United States Patent Application Publication US 2026/0191920 A1 - sequence listing, part 3

SEQ ID NO: 3780 - protein, 209 aa, unidentified
  source 1..209: note = Acidipila rosea
  REGION 1..209: note = tr|A0A4R1LFQ3|A0A4R1LFQ3_9BACT GTP cyclohydrolase 1; OS = Acidipila rosea OX=768535 GN=folE PE=3 SV=1
MKRAAMSEATALREHMITGLEDISTQDLYREIIRRFDEDPSRDGLERTPERVEKAMTFLTKGYHQDPTAILRGAMFDVDYDEMVLVKDIEMFSLCEHHMLPFFGKVHVAYIPNGKVIGLSKIPRLVEVFARRLQVQERMTRQIADAIQDAISPQGVGVVIEARHLCMMMRGVEKQNSSTVTSAMVGVFQKQNTRAEFLSLVRERRQDAF

SEQ ID NO: 3781 - protein, 202 aa, unidentified
  source 1..202: note = Acidipila sp.
  REGION 1..202: note = tr|A0A372IS22|A0A372IS22_9BACT GTP cyclohydrolase 1; OS = Acidipila sp. 4G-K13 OX=2303751 GN=folE PE=3 SV=1
MALVDRLVESTGLEDCSTQDIYRELIRRFDEDPTRDGLLRTPERMEKTIAFLTKGYHEDPTAILRGAMFDVDYDEMVIVKDIEMFSLCEHHMLPFFGKVHVAYIPNGKVIGLSKIPRLVEVFARRLQVQERLTRQIADAIHDAIAPQGVGVVIEARHLCMMMRGVEKQNSSTVTSAMVGVFQKQNTRAEFLSLVRERMQASV

SEQ ID NO: 3782 - protein, 211 aa, unidentified
  source 1..211: note = Acidipropionibacterium acidipropionici
  REGION 1..211: note = tr|K7SN29|K7SN29_ACIA4 GTP cyclohydrolase 1; OS = Acidipropionibacterium acidipropionici (strain ATCC 4875 / DSM 20272 / JCM 6432 / NBRC 12425 / NCIMB 8070); OX = 1171373GN=folE PE=3 SV=1
MTTGDSQIPDQFDRRADGPAVEHPAVDEARAAAAVREFLVAIGEDPDREGLQETPARVARAAGELFAGMRADPAEVLSKTFDMSHDEMVLVRDIEVQSFCEHHLLPFTGVAHVGYIPAPNGRVTGLSKLARLVDAYAKRPQVQERLTTQVADALVEHIGARGVIVVVECEHMCMTMRGVRKPGSRTVTSAVRGILRDSATRAEAMSLILNH

SEQ ID NO: 3783 - protein, 204 aa, unidentified
  source 1..204: note = Acidipropionibacterium acidipropionici
  REGION 1..204: note = tr|A0A142KLU7|A0A142KLU7_9ACTN GTP cyclohydrolase 1; OS = Acidipropionibacterium acidipropionici OX=1748 GN=folE; PE = 3 SV=1
MPDQFDRRADGPAVEHPAVDEARAAAAVREFLVAIGEDPDREGLQETPARVARAAGELFAGMRADPAEVLSKTFDMSHDEMVLVRDIEVQSFCEHHLLPFTGVAHVGYIPAPNGRVTGLSKLARLVDAYAKRPQVQERLTTQVADALVEHIGARGVIVVVECEHMCMTMRGVRKPGSRTVTSAVRGILRDSATRAEAMSLILNH

SEQ ID NO: 3784 - protein, 202 aa, unidentified
  source 1..202: note = Acidipropionibacterium jensenii
  REGION 1..202: note = tr|A0A3Q9UQC5|A0A3Q9UQC5_9ACTN GTP cyclohydrolase 1; OS = Acidipropionibacterium jensenii OX=1749 GN=folE PE=3; SV = 1
MVGQAIPHSGSSSTGFVDKPRAAAAVREFLAAIGEDPDREDLLETPMRVAKAAEELFAGMHTDPAEVLSKTFDISHDELVLVRDIEVQSFCEHHLLPFVGVAHVGYIPSKDGRVTGLSKLGRLVDCYAKRPQVQERLTTQVADALVRYIGARGVIVVVECEHVCMTMRGVRKPGSRTVTSAVRGILRDPATRAEAMGLITNG

SEQ ID NO: 3785 - protein, 202 aa, unidentified
  source 1..202: note = Acidipropionibacterium jensenii
  REGION 1..202: note = tr|A0A3T0S2M7|A0A3T0S2M7_9ACTN GTP cyclohydrolase 1; OS = Acidipropionibacterium jensenii OX=1749 GN=folE PE=3; SV = 1
MVGQALPHSGPSSTGFVDKPRAAAAVREFLAAIGEDPDREDLLETPMRVAKAAEELFAGMRTDPAEVLSKTFDISHDELVLVRDIEVQSFCEHHLLPFVGVAHVGYIPSKDGRVTGLSKLGRLVDCYAKRPQVQERLTTQVADALVRYIGARGVIVVVECEHMCMTMRGVRKPGSRTVTSAVRGILRDPATRAEAMGLITNG

SEQ ID NO: 3786 - protein, 212 aa, unidentified
  source 1..212: note = Acidipropionibacterium virtanenii
  REGION 1..212: note = tr|A0A344URF0|A0A344URF0_9ACTN GTP cyclohydrolase 1; OS = Acidipropionibacterium virtanenii OX=2057246 GN=folE; PE = 3 SV=1
MTTGETQIPDQIDRRVDGPAAEYPAVDEARAAAAVREFLAAIGEDPDREGLRDTPGRVARAAEELFAGMRTDPAEVLAKTFDMDHDEMVLVRDIEVQSFCEHHLLPFTGVAHVGYIPATSGRVTGLSKLARLVDAYAKRPQVQERLTTQVADALVEHIGARGVIVVVECEHMCMTMRGVRKPGSRTVTSAVRGILRDPTTRAEAMGLILNHS

SEQ ID NO: 3787 - protein, 210 aa, unidentified
  source 1..210: note = Acidisarcina polymorpha
  REGION 1..210: note = tr|A0A2Z5G7C6|A0A2Z5G7C6_9BACT GTP cyclohydrolase 1; OS = Acidisarcina polymorpha OX=2211140 GN=folE PE=3 SV=1
MAQPAIVHKANIPKQEPKGGISEFSTQEIYAELLQRFDGDPTRDGLLKTPERVEKAMTFLTKGYQEDPTKILRGALFDVDYDEMVIVKDIEMFSLCEHHMLPFFGRVHVAYIPNAKVIGLSKIPRLIEVFARRLQVQERMTQQIADSIQEAIHPQGVGVVVEARHLCMMMRGVEKQNSSTVTSAMRGVFGKQSTRTEFLSLVRERGQGAF

SEQ ID NO: 3788 - protein, 219 aa, Acidisphaera rubrifaciens
  REGION 1..219: note = tr|A0A0D6P314|A0A0D6P314_9PROT GTP cyclohydrolase 1; OS = Acidisphaera rubrifaciens HS-AP3 OX=1231350 GN=folE; PE = 3 SV=1
MVFEDTHVNIVTPAPHRLAEPTDGRPTREQAEEAVRTLLRWAGDDPSREGLLDTPARVVRSYDEFFAGYSVDPVRLLETTFEEVEGYDEIVLLRDIRLESHCEHHMVPIIGRAHVAYLPQSRVVGISKLARVVEAYAKRLQIQEKLTAQIANTINEVLQPRGTAVIIEGNHQCMSTRGVHKPGALLVTSRMLGAFRDNPDTRRELLSMVNKPMSGPRED

SEQ ID NO: 3789 - protein, 271 aa, unidentified
  source 1..271: note = Acidithiobacillales bacterium
  REGION 1..271: note = tr|A0A0S8L3D1|A0A0S8L3D1_9PROT GTP cyclohydrolase FolE2 OS=Acidithiobacillales bacterium SM1_46 OX=1703384; GN = folE2 PE=3 SV=1
MKKAKAETTQIADVQSSPDTRRLQIDKVGIKDIRHPILVKDRSQGVQHTIANFNMYVELPHNFKGTHMSRFVEILNAHDMEISVDSFRDMLAEMSKRLEADRGYIEMSFPYFINKAAPVSGVKSLLDYHVTFIGEVHNGTDITKIRVVVPVTSLCPCSKEISERGAHNQRSHVTVTVRTNTFVWIEDVIDLVEKQASCELYGLLKRPDEKFVTERAYDNPKFVEDMVRDIAAQLNKDERIEAYVVESENFESIHNHSAYAMIKKDKTEAAS

SEQ ID NO: 3790 - protein, 273 aa, unidentified
  source 1..273: note = Acidithiobacillales bacterium
  REGION 1..273: note = tr|A0A0S8BKG1|A0A0S8BKG1_9PROT GTP cyclohydrolase FolE2 OS=Acidithiobacillales bacterium SG8_45 OX=1703383; GN = folE2 PE=3 SV=1
MSSSSKAQTAACIADVQNAPDTRHIQIDKVGIKDIRHPVRVKDRSQGEQHTIARFNMYVELPHNFKGTHMSRFVDILNNHEYEISVESFTEMLMEMRERLEADRGHIEMHFPYFVNKSAPVSGVQSLMDYEVSLIGDVQGDETIVGIKVVVPVTSLCPCSKEISDYGAHNQRSHVTVEVRTNSFVWIEDVIDLVEKQASCELFGLLKRPDEKYVTERAYDNPKFVEDMVRDVAAVLNADDRIDSYIVESENFESIHNHSAYALIERDKKQKPD

SEQ ID NO: 3791 - protein, 264 aa, Acidithiobacillus caldus
  REGION 1..264: note = tr|A0A059ZSN2|A0A059ZSN2_ACICK GTP cyclohydrolase FolE2 OS=Acidithiobacillus caldus (strain ATCC 51756 / DSM 8584 / KU) OX=637389 GN=folE2 PE=3 SV=1
MRDCAAETLEDVQGRADPRAIAIQRVGVKAVRHPLRISDRDDRVQHSIALCNMYVALPAHLKGTHMSRFLEILNRYPDPLGVRTIAGFLEEVRQRLEAQAARVELRFPYFVNKRAPVSGVESLLDYEVEILADRDASGLQLDLGVMVPVTSLCPCSKSISDYGAHNQRSHVWVRAQLAQTVWIEDLIDVVESVASCQLYGLLKRPDEKFVTEYAYDHPKFVEDMVRDVALRLHKDPRIRRFTVSSENFESIHNHSAYAEIHMDN

SEQ ID NO: 3792 - protein, 264 aa, Acidithiobacillus caldus; identical to SEQ ID NO: 3791
  REGION 1..264: note = tr|A0A1E7Z0W6|A0A1E7Z0W6_9PROT GTP cyclohydrolase FolE2 OS=Acidithiobacillus caldus OX=33059 GN=folE2 PE=3; SV = 1

SEQ ID NO: 3793 - protein, 264 aa, unidentified
  source 1..264: note = Acidithiobacillus ferridurans
  REGION 1..264: note = tr|A0A2Z6IM07|A0A2Z6IM07_9PROT GTP cyclohydrolase FolE2 OS=Acidithiobacillus ferridurans OX=1232575 GN=folE2; PE = 3 SV=1
MRDCAVEILEDVQGRADPRAIAIQQVGIRAVRHPMQIQDRDGITQPTIARCNMYVSLPAHLKGTHMSRFIEILNAQEGSFSVEGFGAVVEEMRQRLEADSARLEMHFPFFIEKTAPVSGVRSMLDYEVKLAGEITPAGYRLTIGVMVPVTSLCPCSKSISEYGAHNQRAHVWVHVRTCETVWIRDIIDLIEAEASCELYGLLKRPDEKYVTEYAYDHPKFVEDMVRDVALRLQEDSRVQWFSVSSENFESIHNHSAYAMIEMEK

SEQ ID NO: 3794 - protein, 264 aa, Acidithiobacillus ferrivorans
  REGION 1..264: note = tr|A0A257TDQ1|A0A257TDQ1_9PROT GTP cyclohydrolase FolE2 OS=Acidithiobacillus ferrivorans OX=160808 GN=folE2; PE = 3 SV=1
MRDCAVEVLEDVQGRTDPRAIAIQQVGIRDVRHPIQFQDRDGTVQPTVAQCNMYVSLPAHLKGTHMSRFIEILNAQESPLGVESFGTAVEQMRQRLEADSARLEMRLPFFVQKAAPVSGVRSMLDYEVELIGEVTPSGYHLTIGVMVPVTSLCPCSKSISEYGAHNQRAHVWVHVRARETIWIKDIIDLIEAEASCQLYGVLKRPDEKYVTEYAYDHPKFVEDMVRDVALRLREDPRVRWFSVSSENFESIHNHSAYAMIEMEK

SEQ ID NO: 3795 - protein, 277 aa, Acidithiobacillus ferrivorans
  REGION 1..277: note = tr|A0A060UPG7|A0A060UPG7_9PROT GTP cyclohydrolase FolE2 OS=Acidithiobacillus ferrivorans OX=160808 GN=folE2; PE = 3 SV=1
MTNSVHYSQEGSAVRDCAVEILEDVQGRADPRAIAIQQVGIRAVRHPMQFQDRDGAVQPTIAQCNMYVSLPAHLKGTHMSRFIEVLNAHESPFSVESFGAAVEQMRQRLEADSARLEMRLPFFVQKAAPVSGVKSMLDYEVELIGEITPAGYLLTIGVMVPVTSLCPCSKSISEYGAHNQRAHVWVHVRAHETIWIKDIIDLIEAEASCQLYGVLKRPDEKYVTEYAYDHPKFVEDMVRDVALRLREDPRVRWFSVSSENFESIHNHSAYAMIEMEK

SEQ ID NO: 3796 - protein, 264 aa, Acidithiobacillus ferrooxidans
  REGION 1..264: note = tr|A0A2W1K056|A0A2W1K056_ACIFR GTP cyclohydrolase FolE2 OS=Acidithiobacillus ferrooxidans OX=920 GN=folE2; PE = 3 SV=1
MRDCAVEILEDVQGRADPRAIAIQQVGIRAVRHPLQIQDRDGIVQPTIARCNMYVSLPAHLKGTHMSRFIEILNAHEGSFSVEGFGAVVEEMRQRLEADSARLEMRFPFFIEKTAPVSGVRSMLDYEVKLAGEITPAGYRLTMGVMVPVTSLCPCSKSISEYGAHNQRAHVWVHVRACETVWIRDIIDLIEAEASCELYGLLKRPDEKYVTEYAYDHPKFVEDLVRDVALRLQEDRRVQWFSVSSENFESIHNHSAYAMIEMEK

SEQ ID NO: 3797 - protein, 264 aa, Acidithiobacillus ferrooxidans; identical to SEQ ID NO: 3796
  REGION 1..264: note = tr|B7JC68|B7JC68_ACIF2 GTP cyclohydrolase FolE2; OS = Acidithiobacillus ferrooxidans (strain ATCC 23270 / DSM 14882 / CIP 104768 / NCIMB 8455) OX=243159 GN=folE2 PE=3 S; V = 1

SEQ ID NO: 3798 - protein, 264 aa, Acidithiobacillus sp.
  REGION 1..264: note = tr|A0A2I1DJ37|A0A2I1DJ37_9PROT GTP cyclohydrolase FolE2 OS=Acidithiobacillus sp. SH OX=187490 GN=folE2 PE=3; SV = 1
MGICATEVLEDVQGRVDPRAIPIQQVGIRAVRHPLQFADRDGSVQPSVALCNMYVSLPAHLKGTHMSRFMEILNMHDAPISVEGFRAIVEEMCKRLEADSARLEMQLPFFVQKKAPVSGVKSMLDYEVELVGEVTPQGYQLTVGVMVPVTSLCPCSKSISEYGAHNQRAHVWVHVRSQESIWVRDLIDLVEGEASCELFGLLKRPDEKYVTEYAYDHPKFVEDMVRDVALRLQEDDRVQWFSVSSENFESIHNHSAYAKIEMEK

SEQ ID NO: 3799 - protein, 264 aa, Acidithiobacillus sp.
  REGION 1..264: note = tr|A0A3M8QPX0|A0A3M8QPX0_9PROT GTP cyclohydrolase FolE2 OS=Acidithiobacillus sp. CJ-2 OX=1867749 GN=folE2; PE = 3 SV=1
MRDCAAEVMEDVQGRPDPRAIPINQVGIKAIRHPVRIRDRSEGEQHTIALCNMYVSLPQHFKGTHMSRFVEILNAHDREISVDSFQEIVRTMRERLDADAARLEMQFPYFINKAAPISGVKSLMDYEVSFVGESSHDQYRQTIGVQVPVTSLCPCSKSIADYGAHNQRSHVQVRVRANDWIWIEEIIDLVEEEASCQLYGLLKRPDEKFVTEYAYDHPKFVEDMVRDVAIRLKGDSRVDWFSVSSENFESIHNHSAYAMIEMDK

SEQ ID NO: 3800 - protein, 264 aa, Acidithiobacillus thiooxidans
  REGION 1..264: note = tr|A0A1C2JH53|A0A1C2JH53_ACITH GTP cyclohydrolase FolE2 OS=Acidithiobacillus thiooxidans OX=930 GN=folE2; PE = 3 SV=1
MRNCATEILEDVQGRVDPRAIPIQQVGIRAVRHPLQIADRDAAVQPSVALCNMYVSLPAHLKGTHMSRFMEILNNQEAPISVEAFRGIVEQMCTRLEADSARLEMRLPFFVQKAAPVSGVKSMLDYEVELIGEITPKGYQLTLGVMVPVTSLCPCSKSISEYGAHNQRAHVWVHVRSQETIWVRDLIDLIEAEASCELYGLLKRPDEKHVTEYAYDHPKFVEDMVRDVALRLQEDPRVRWFSVSSENFESIHNHSAYAMIEMEK

SEQ ID NO: 3801 - protein, 264 aa, Acidithiobacillus thiooxidans
  REGION 1..264: note = tr|A0A543Q8B0|A0A543Q8B0_ACITH GTP cyclohydrolase FolE2 OS=Acidithiobacillus thiooxidans ATCC 19377; OX = 637390 GN=folE2 PE=3 SV=1
MRNCATEILEDVQGRVDPRAIPIQQVGIRAVRYPLQIADREAVVQPSVALCNMYVSLPAHLKGTHMSRFMEILNNQEAPISVEAFRGIVEQMCTRLEADSARLEMRLPFFVQKAAPVSGVKSMLDYEVELVGEITPQGYQLTLGVMAPVTSLCPCSKSISEYGAHNQRAHVWVHVRSQDTIWVRDLIDLIEAEASCELYGLLKRPDEKFVTEYAYDHPKFVEDMVRDVALRLQEDPRVRWFSVSSENFESIHNHSAYAMIEMEK

SEQ ID NO: 3802 - protein, 271 aa, unidentified
  source 1..271: note = Acidithrix ferrooxidans
  REGION 1..271: note = tr|A0A0D8HCS6|A0A0D8HCS6_9ACTN GTP cyclohydrolase FolE2 OS=Acidithrix ferrooxidans OX=1280514 GN=folE2 PE=4; SV = 1
MRDIQAENDLRGIALEEVGINNLTLPVSVSAESGTLISTVAKVSIGVSVAENLRGTHMSRLVESAIIHLSDLSPCSIEECHKEIASKLDAVDTTVRIEFDYFINKESPISKKRSPMRYKVNLNSFKRDCTFITTVGVTVRITSLCPCSKEISDYGAHNQRGTVEIAIQYQGPPGAKLDQDFGIMESINIAEDCGSAPLYTLVKRSDERFITMLAFDNPAFVEDIVRNATLRLRQNNSSAFMVSAVNDESIHDHNAFASFASSDWNWKYGRM

SEQ ID NO: 3803 - protein, 195 aa, unidentified
  source 1..195: note = Acidithrix ferrooxidans
  REGION 1..195: note = tr|A0A0D8HJD9|A0A0D8HJD9_9ACTN GTP cyclohydrolase 1; OS = Acidithrix ferrooxidans OX=1280514 GN=folE PE=3 SV=1
MDVKRVVQAADAFLDALGVPLDDEARTATARRVGELWCDLLSGESDDPSRYLNGGFGGEFHEMIAVNDITFHSVCEHHLLPFYGKVSLCYLPGEAGLIAGASNLTRVVEVVSKRLQIQERLSSQIAQAIEDGIGAAGVLVVVRGTHFCMTMRETKDTGSCLVTVASRGVLTSNSDLRREARSLIMDDFRSDSDDL

SEQ ID NO: 3804 - protein, 204 aa, unidentified
  source 1..204: note = Acidobacteria bacterium
  REGION 1..204: note = tr|A0A1F2RIC2|A0A1F2RIC2_9BACT GTP cyclohydrolase 1; OS = Acidobacteria bacterium RIFCSPLOWO2_02_FULL_60_20; OX = 1797179 GN=folE PE=3 SV=1
MATSKAQRVAPGSEQGTVDRVPQILRELLANLDEEPGREGLRDTPRRAAKALRYLTGGYQMRVDDILNGALYSVTYDEMVIVKDIELFSLCEHHLLPFFGKCHVAYVPDKKVVGLSKIPRLVDMFARRLQIQERLTQQIAETLQERIGPQGVGVVVEARHLCMMMRGVEKQHSQTVTSAMLGVFRDQQQTREEFLSLVLGASRT

SEQ ID NO: 3805 - protein, 199 aa, unidentified
  source 1..199: note = Acidobacteria bacterium
  REGION 1..199: note = tr|A0A1Q7LBP0|A0A1Q7LBP0_9BACT GTP cyclohydrolase 1; OS = Acidobacteria bacterium 13_1_40CM_4_58_4 OX=1803453; GN = folE PE=3 SV=1
MSPSVETTTLTSASFEELVREMLVRLGEDPAREGLVRTPSRVHRAFEFLTKGYKEDPDALLKKALFTVTYDEMVIVKDVEMFSLCEHHLLPFFGKVHVAYIPNGKVIGLSKIPRLIEIFSRRLQIQERLTTQIAETIQKAIEPQGVGVVIEARHLCMMMRGVEKQHSSAVTSSMLGCFRDEQETRTEFLSLIRNRSNGV

SEQ ID NO: 3806 - protein, 198 aa, unidentified
  source 1..198: note = Acidobacteriales bacterium
  REGION 1..198: note = tr|A0A1Q6X7Y2|A0A1Q6X7Y2_9BACT GTP cyclohydrolase 1; OS = Acidobacteriales bacterium 13_2_20CM_55_8 OX=1803470; GN = folE PE=3 SV=1
MTPTVETTTLTSATFENLVREILVRLGEDPAREGLLRTPERVHHAFEFLTKGYQQDPDTMLKNALFTVSYDEMVIVKDVEVFSLCEHHMLPFFGKVHVAYIPNGKVIGLSKIPRLIEIFSRRLQIQERLTTQIAETIQKAIQPQGVGVVIEARHLCMMMRGVEKQHSSAVTSSMLGCFRDEQETRTEFLSLINHRNGS

SEQ ID NO: 3807 - protein, 198 aa, unidentified
  source 1..198: note = Acidobacteriales bacterium
  REGION 1..198: note = tr|A0A1Q7MU73|A0A1Q7MU73_9BACT GTP cyclohydrolase 1; OS = Acidobacteriales bacterium 13_1_40CM_3_55_5 OX=1803468; GN = folE PE=3 SV=1
MTPTVETTTLTSATFENLVREILVRLGEDPAREGLLRTPERVHHAFQFLTKGYQQDPDTMLKNALFTVSYDEMVIVKDVEVFSLCEHHMLPFFGKVHVAYIPNGKVIGLSKIPRLIEIFSRRLQIQERLTTQIAETIQKAIQPQGVGVVIEARHLCMMMRGVEKQHSSAVTSSMLGCFRDEQETRTEFLSLINHRNGG

SEQ ID NO: 3808 - protein, 191 aa, unidentified
  source 1..191: note = Acidobacteriia bacterium
  REGION 1..191: note = tr|A0A321LAI8|A0A321LAI8_9BACT GTP cyclohydrolase 1; OS = Acidobacteriia bacterium AA117 OX=2169412 GN=folE PE=3; SV = 1
MAASTTELLRELLVRLGEDATRDGLLKTPERMEKALKYLTQGHKQNPDEILKGALFEVTYDEMVIVKDIEMFSLCEHHILPFFGKVHVAYIPNGRVIGLSKIPRIVDVFARRLQIQERLTVEIAETIQRAIEPQGVGVVIEARHLCVMMRGVEKQHSSAVTSHMLGSFRTAEKTREEFLSLIRNGKNGYSF

SEQ ID NO: 3809 - protein, 204 aa, unidentified
  source 1..204: note = Acidobacteriia bacterium
  REGION 1..204: note = tr|A0A317J8N8|A0A317J8N8_9BACT GTP cyclohydrolase 1; OS = Acidobacteriia bacterium OX=2081523 GN=folE PE=3 SV=1
MRSNKAIVKVLPAQQKENSIAPLVEEILAKLGEDPRREGLARTPQRVDQALKFLTSGYEMDVRKIVNDALYEVKYDEMVVVKDIEFFSLCEHHLLPFFGKVHVAYLPRNRVIGLSKIPRIVDVFARRLQIQERLTQQVAQTIQEAIDPVGVGVICEARHFCMMMRGVEKQHSGAMTSAMLGAFRDKKKTRDEFLSLVNHRGNGF

SEQ ID NO: 3810 - protein, 215 aa, Acidobacterium capsulatum
  REGION 1..215: note = tr|C1F2Z7|C1F2Z7_ACIC5 GTP cyclohydrolase 1; OS = Acidobacterium capsulatum (strain ATCC 51196 / DSM 11244 / JCM 7670 / NBRC 15755 / NCIMB 13165 / 161); OX = 240015 GN=fol E PE=3 SV=1
MKRGPMATISLQDKLSRNSGSVPPALEKYSTQEIYAELLRRYDEDPTRDGLLRTPERVEKAMKYLTQGYHQEPAGILQGALFDVDYDEMVLVKDIEMFSLCEHHMLPFFGRVHVAYIPNGKVVGLSKIPRLVEVFARRLQVQERMTRQIAEAIQDAINPQGVGVVIEARHLCMMMRGVEKQNSSTVTSAMLGVFQQQNTRGEFLSLVRDRSYQQL

SEQ ID NO: 3811 - protein, 210 aa, Acidobacterium sp.
  REGION 1..210: note = tr|A0A3D4VG68|A0A3D4VG68_9BACT GTP cyclohydrolase 1; OS = Acidobacterium sp. OX=1872119 GN=folE PE=3 SV=1
MATISLQDKLSRNSGSVPPALEKYSTQEIYAELLRRYDEDPTRDGLLRTPERVEKAMKYLTQGYHQEPAGILQGALFDVDYDEMVLVKDIEMFSLCEHHMLPFFGRVHVAYIPNGKVVGLSKIPRLVEVFARRLQVQERMTRQIAEAIQDAINPQGVGVVIEARHLCMMMRGVEKQNSSTVTSAMLGVFQQQNTRGEFLSLVRDRSYQQL

SEQ ID NO: 3812 - protein, 220 aa, Acidobacterium sp.
  REGION 1..220: note = tr|A0A2G4JIR2|A0A2G4JIR2_9BACT GTP cyclohydrolase 1; OS = Acidobacterium sp. OX=1872119 GN=folE PE=3 SV=1
MAAPTATAEMPVTEIYNEPMQDLIQRLLIELGEDPTREGLVKTPRRVDKALRFLTSGYQADIDAMLNGALFSVDYSEMVIVRDIDFYSMCEHHLLPFFGKCHVAYIPNGKVIGLSKIPRVVDIFARRLQLQERMTNQIAEIINEKIKPLGVAVVCEGTHLCMAMRGVEKQNSYTITSAMLGAFRDQSRTRMEFLELLKLRGGNLSVTGLPVPGHTHDHDE

SEQ ID NO: 3813 - protein, 211 aa, Acidocella aminolytica
  REGION 1..211: note = tr|A0A0D6PL28|A0A0D6PL28_9PROT GTP cyclohydrolase 1; OS = Acidocella aminolytica 101 = DSM 11237 OX=1120923; GN = folE PE=3 SV=1
MNIQTKSATPVKHKQTQARPSRAEAEEAVRILLRWAGDDPTREGLLDTPKRVAKSYEEFFKGYEEDPVAILSRTFEETEGYDEMILLRDIRLESHCEHHMVPITGKAHVAYLPSTRVVGISKLARVVDAYAKRFQIQEKLTAQIANTIQDVLKPRGVAVVIEANHQCISTRGVHKPGVSMVTSHMIGEFRDNPSTRREFLAMIQGRTCTAE

SEQ ID NO: 3814 - protein, 212 aa, Acidocella sp.
  REGION 1..212: note = tr|A0A257QRM3|A0A257QRM3_9PROT GTP cyclohydrolase 1; OS = Acidocella sp. 20-58-15 OX=1970302 GN=folE PE=3 SV=1
MNIHTPASKLIKNDAATRPSRAEAEAAVRTMLRWAGEDPEREGLLDTPARVVRSYEEFFKGYGEDPVAVLARTFEEIEGYDEMVVLRDIRVESHCEHHMVPIIGRAHVAYLPNTRVVGISKLARVVDAYAHRFQIQEKLTAQIANTINEVLQPRGVAVMIEANHQCMSTRGVHKPGASMITSRMLGAFRDDPSTRKEFLSIVSQRVCTSVEA

SEQ ID NO: 3815 - protein, 212 aa, Acidocella sp.
  REGION 1..212: note = tr|A0A257Q3S5|A0A257Q3S5_9PROT GTP cyclohydrolase 1; OS = Acidocella sp. 20-57-95 OX=1970301 GN=folE PE=3 SV=1
MNIHTPAAQIVKTDALVKPSRAEAEAAIRVMLRWAGEDPNREGLLDTPARVVRAYEEFFKGYDEDPVAILARTFEEIEGYDEMVVLRDIRLESHCEHHMVPIIGRAHVAYLPNTRVVGISKLARVVDAYAHRFQIQEKLTAQIANTINDVLQPRGVAVVIEANHQCMSTRGVHKPGASMITSRMLGAFRDNLATRKEFLSIINQRSCTSVEA

SEQ ID NO: 3816 - protein, 218 aa, Acidomonas methanolica
  REGION 1..218: note = tr|A0A023D723|A0A023D723_ACIMT GTP cyclohydrolase 1; OS = Acidomonas methanolica NBRC 104435 OX=1231351 GN=folE; PE = 3 SV=1
MSKLTADLVPLETIRGKAIEESCPIGPHSCPEDAAGRIARAVRDILVALGENPDREGLLETPDRVARMYLDVLGGLHEDPRIHLRKQFSADRHEGAVIVRDIRFHSMCEHHLLPFFGRAHVAYLPDGGRLTGLSKLARTVGVLARRPQLQERLTDQIADAIAEVLDPKAVMVLVEAEHMCMAMRGVRSPGSTTVTTVTRGLWQRDSAARAEILALLRG

SEQ ID NO: 3817 - protein, 200 aa, Acidothermus cellulolyticus
  REGION 1..200: note = tr|A0LRB9|A0LRB9_ACIC1 GTP cyclohydrolase 1; OS = Acidothermus cellulolyticus (strain ATCC 43068 / 11B); OX = 351607 GN=folE PE=3 SV=1
MTDIDLRTGERAPGVDLARIEDAVREILLAIGEDPDRDGLRDTPARVARAYAEQFAGLRQRPEDVLSVVFDANHDEMVLVRDIEVYSTCEHHLTPFHGVAHVGYIPNARGQITGLSKIARLVDIFARRPQVQERLTVQIAEAMERILQPRGVIVVVDCEHLCMSMRGVRKPGARTVTSAVRGVFRSDERTRAEALRLITG

SEQ ID NO: 3818 - protein, 212 aa, Acidothermus cellulolyticus
  REGION 1..212: note = tr|A0LVH7|A0LVH7_ACIC1 GTP cyclohydrolase 1; OS = Acidothermus cellulolyticus (strain ATCC 43068 / 11B); OX = 351607 GN=folE PE=3 SV=1
MRSQETISDVVPDTPLPDGRHPVLRVIPQPSIDLAAAERAAAAFLHALGIDLDSEVMAQTPKRMARGFAELLEPREFTLTTFPNTERYDEMVAARHIPFVSLCEHHMFPFVGFATVGYLPGDRILGLSKLARVVEHFARRPQVQERFTAQIARWLDEHLGPRGVGVIVDAEHLCMTIRGVRATGARTTTSALLGAFRDDPRVRAEFLDLAGD

SEQ ID NO: 3819 - protein, 241 aa, Acidovorax avenae
  REGION 1..241: note = tr|F0QCG4|F0QCG4_ACIAP GTP cyclohydrolase I; OS = Acidovorax avenae (strain ATCC 19860 / DSM 7227 / JCM 20985 / NCPPB 1011) OX=643561 GN=Acav_3548 PE=4 SV=1
MFTHLADDPDSAPPPEGAPVSAKIRERLLAARKRFHANDNIADFLEPGELEQLLDEVEAKMQGVLDSMVIDTAGDHNTQDTARRVAKMYLGEVFRGRYVKQPAITEFPNAEHLNELMIVGPITVRSACSHHFCPVIGKLWIGVLPNEHTNVIGLSKYARLVDWVMGRPQIQEEAVVQLADLIMEKTQPDGLAIVMEASHFCMSWRGVREMDSKMLNSVMRGVFLKDAALRREFLSLIPGRT

SEQ ID NO: 3820 - protein, 267 aa, Acidovorax citrulli
  REGION 1..267: note = tr|A1TT93|A1TT93_ACIAC GTP cyclohydrolase I; OS = Acidovorax citrulli (strain AAC00-1) OX=397945; GN = Aave_3631 PE=4 SV=1
MWPVGAARARETLVEPGWRIADTIACMFTHLADDPNSAPPHEGAPVSAKIRERLLAARKRFHANDNIADFLEPGELEQLLDEVEAKMQGVLDSMVIDTAGDHNTQDTARRVAKMYLGEVFRGRYVKQPAITEFPNAEHLNELMIVGPITVRSACSHHFCPVIGKLWIGVLPNEHTNVIGLSKYARLVDWVMGRPQIQEEAVVQLADLIMEKTQPDGLAIVMEASHFCMSWRGVREMDSKMLNSVMRGVFLKDAALRREFLSLIPGRT

SEQ ID NO: 3821 - protein, 241 aa, Acidovorax delafieldii
  REGION 1..241: note = tr|C5TAV8|C5TAV8_ACIDE GTP cyclohydrolase I; OS = Acidovorax delafieldii 2AN OX=573060 GN=AcdelDRAFT_4038; PE = 4 SV=1
MSSQPVADMTPIPPDEGTPVSVKIRERIAAARKRFNANDNIAEFIEPGELEQLLDEVEVKMQGVLDSMVINTAGDHNTHNTARRVAKMYLNEVFKGRYVQAPPITEFPNAEHLNELMIVGPLTVRSACSHHFCPVIGKIWIGIMPNEHTNVIGLSKYARIVDWIMGRPQIQEEAVVQLADLIMEKTQPDGLAIVMEASHFCMSWRGVRDMDSKMINSVMRGVFLKDSALRREFLSLIPGKN

SEQ ID NO: 3822 - protein, 241 aa, unidentified
  source 1..241: note = Acidovorax ebreus
  REGION 1..241: note = tr|B9ME33|B9ME33_ACIET GTP cyclohydrolase I; OS = Acidovorax ebreus (strain TPSY) OX=535289 GN=Dtpsy_0808; PE = 4 SV=1
MSSEPPAPLSGAAPDEGTPVSVKIRERLNAARRRFHANDNIAEFIQPGELERLLDEVEAKMQGVLDSMVIDTAGDHNTQATARRVAKMYLNEVFKGRYVQPPAITEFPNAEHLNELMIVGPVTVRSACSHHFCPVIGKIWIGVLPNEHTNVIGLSKYARLVDWVMGRPQIQEEAVVQLADLIMEKTQPDGLAIVMEASHFCMSWRGVREMDSKMINSVMRGVFLTNPTLRREFLALIPRRS

SEQ ID NO: 3823 - protein, 241 aa, Acidovorax sp.; identical to SEQ ID NO: 3822
  REGION 1..241: note = tr|A1W4E6|A1W4E6_ACISJ GTP cyclohydrolase I; OS = Acidovorax sp. (strain JS42) OX=232721 GN=Ajs_0879 PE=4; SV = 1

SEQ ID NO: 3824 - protein, 237 aa, Acidovorax sp.
  REGION 1..237: note = tr|A0A542J678|A0A542J678_9MICO GTP cyclohydrolase 1; OS = Acidovorax sp. SLBN-42 OX=2572897 GN=folE PE=3 SV=1
MTSIELADPGAGRPRLHAVAADEVADPADLADRADLADSLVLPEAAEPGGRVDRARATAAVADLLTALGRDIRSPHLAETPRRVADSFIELLTPRPFEATTFPNDEGYDELVVVAGIPFDSLCEHHMLPFSGTAHVGYVPGARLLGLSKFARVVERFARDLQVQERLTRRVAGWIEAELAPAGVGVVLEAEHLCMSVRGVQVRGSRTVTSSFTGVVRDDERTRREFLARCGLRGMME

SEQ ID NO: 3825 - protein, 305 aa, unidentified
  source 1..305: note = Acidovorax wautersii
  REGION 1..305: note = tr|A0A1I2BLL5|A0A1I2BLL5_9BURK GTP cyclohydrolase FolE2 OS=Acidovorax wautersii OX=1177982 GN=folE2 PE=3 SV=1
MNDALPDVSLTDTAPRLSPLEWVGMQGIDLPLTLAEPGYRRELHARADVAVDLPAPQVKGIHMSRLYRLLDGLSQGEALSPAGLHGVLQAMIASHHDCDSRSARLGLALDLLVRRPALVTQGLSGWKSYPVRLEASLVAGVFRCRLEVRVGYSSTCPCSAALARQLIEHAFSEAFGQQEAVPSQDVAGWLRRHASLATPHSQRSEACVSVDVAADAPTLGLLALIDGIEQAVGTPVQTAVKRADEQAFAALNGQNLMFVEDAARRIETALGGYGRPRVFVRHMESLHPHDAVAWASPHREGMVAA

SEQ ID NO: 3826 - protein, 184 aa, unidentified
  source 1..184: note = Acinetobacter albensis
  REGION 1..184: note = tr|A0A1C4GT40|A0A1C4GT40_9GAMM GTP cyclohydrolase 1; OS = Acinetobacter albensis OX=1673609 GN=folE PE=3 SV=1
MSMQQSYTNILTAVGEDLNRPGLKDTPMRAAKAFSYLTSGYSKTLEEVTNNAVFPSDNREMVLVKNIEFYSLCEHHLLPFYGRVHIAYLPEGNVLGLSKFARITEMFARRLQIQENLTQQIAEAVAEVTQARGVAVMIDSAHMCMMMRGVGKQESTTRTVSFIGDFKTNKEERREFLSALPENF

SEQ ID NO: 3827 - protein, 184 aa, unidentified
  source 1..184: note = Acinetobacter apis
  REGION 1..184: note = tr|A0A217EEZ0|A0A217EEZ0_9GAMM GTP cyclohydrolase 1; OS = Acinetobacter apis OX=1229165 GN=folE PE=3 SV=1
MSMQQSYEKILEAVGEDLERPGLKDTPIRAARAFSYLTSGYAKSLEEVTNDAVFPSDNREMVLVKNIEFYSLCEHHLLPFYGRVHIGYLPEGKVLGLSKFARITEMFARRLQIQENLTQEIALAVEQVTGARGVAVVIDSAHMCMMMRGVGKQNSTTRTVSFVGEFKAHTEARREFLSAVPESY

SEQ ID NO: 3828 - protein, 182 aa, Acinetobacter baumannii
  REGION 1..182: note = tr|A0A158LW24|A0A158LW24_ACIBA GTP cyclohydrolase 1; OS = Acinetobacter baumannii NIPH 190 OX=1217640 GN=folE; PE = 3 SV=1
MQQSYANILTAVGEDLNRPGLKDTPVRAAKAFSYLTSGYSKTLEEVTNNAVFPSDNHEMVLVKNIEFYSLCEHHLLPFYGRVHVAYLPEGKVLGLSKFARITEMFARRLQIQENLTQQIAEAVAEVTGARGVAVVIDSAHMCMMMRGVGKQESTTRTVSFVGDFKTDKEARREFLSAVPESY

SEQ ID NO: 3829 - protein, 184 aa, Acinetobacter baumannii
  REGION 1..184: note = tr|A0A062FAY5|A0A062FAY5_ACIBA GTP cyclohydrolase 1; OS = Acinetobacter baumannii 754286 OX=1310668 GN=folE PE=3; SV = 1
MSMQQSYANILTAVGEDLNRPGLKDTPVRAAKAFSYLTSGYSKTLEEVTNNAVFPSDNHEMVLVKNIEFYSLCEHHLLPFYGRVHVAYLPEGKVLGLSKFARITEMFARRLQIQENLTQQIAEAVAEVTGARGVAVVIDSAHMCMMMRGVGKQESTTRTVSFIGDFKTDKEARREFLSAVPESY

SEQ ID NO: 3830 - protein, 294 aa, Acinetobacter baylyi
  REGION 1..294: note = sp|Q6FBI2|GCH4_ACIAD GTP cyclohydrolase FolE2; OS = Acinetobacter baylyi (strain ATCC 33305 / BD413 / ADP1); OX = 62977 GN=folE2 PE=3 SV=1
MNAQLPDVSVSQLPCNLSPLNWVGMQHIDLPTVIDTANQTVNTKVDVYVNLPKSSVKGIHMSRLYHLINHLSVLNTMSIKSVLKQMIDSHQDCGTTAAKIVFKFDLLLKRDAIVSTALSGWKSYPVIIEASIINELFNIEYKLDISYSSTCPCSAALSRQIIKNGFKADFSSQNLIPSADIEAWLEQYATLATPHSQRSIATVVVQPFDYAHDINFVDLIDSIENTLKTPTQTAVKRADEQAFAKLNGENLMFVEDAARRLKMLLDQKYKFWSAQVVHQESLHPHDAIAVAISS

SEQ ID NO: 3831 - protein, 197 aa, Acinetobacter baylyi
  REGION 1..197: note = tr|Q6F9M5|Q6F9M5_ACIAD GTP cyclohydrolase 1; OS = Acinetobacter baylyi (strain ATCC 33305 / BD413 / ADP1); OX = 62977 GN=folE PE=3 SV=1
MPTLFNRVKSKRLMSMQQSYANILTAVGEDLNRPGLKDTPIRAAKAFSFLTSGYGKSLEEVTNNAVFPSDNHEMVLVKNIEFYSLCEHHLLPFYGRVHIAYLPEGQVLGLSKFARITEMFARRLQIQENLTQQIAQAVEEVTKARGVAVMIDSAHMCMMMRGVGKQESTTRTVSFIGDFKTDKEARREFLSAVPESY

SEQ ID NO: 3832 - protein, 300 aa, Acinetobacter beijerinckii
  REGION 1..300: note = tr|N9FF93|N9FF93_9GAMM GTP cyclohydrolase FolE2; OS = Acinetobacter beijerinckii CIP 110307 OX=1217648; GN = folE2 PE=3 SV=1
MNLALPDISANSILPKAYSHCLDWVGMEKIALPVRVENTLCQSQVNAYVSLDDPLAKGIHMSRLYTRLLELSSIGNLNLMDLRSLLQDFLVSHHDLSKHAKIEIHSELYIERPALISKLSGWKSYPFVLSCQLLDEQFLAELKVEIPYSSTCPCSAALSRNIIQQRFESALNNQDIRLDQQEILDWLSSTDAIAATPHSQRSFAILNFRLDQNIQHIPLILFINQAEQALMTPVQTAVKRIDEQAFAIANGQNLMFCEDALRRLYGTFLNHKSINGFNFKVIHAESLHAHDAVAQGSWQW

SEQ ID NO: 3833 - protein, 184 aa, Acinetobacter beijerinckii
  REGION 1..184: note = tr|N9E5B7|N9E5B7_9GAMM GTP cyclohydrolase 1; OS = Acinetobacter beijerinckii ANC 3835 OX=1217649 GN=folE; PE = 3 SV=1
MSMQQSYANILTAVGEDLNRPGLKDTPMRAAKAFSFLTSGYSKTLEEVTNSAVFPSDNHEMVLVKNIEFYSLCEHHLLPFYGRVHIAYLPEGQVLGLSKFARITEMFARRLQIQENLTQQIAEAVAEVTQARGVAVVIDSAHMCMMMRGVGKQESTTRTVSFVGDFKTDKEARREFLSAVPESY

SEQ ID NO: 3834 - protein, 184 aa, Acinetobacter bereziniae
  REGION 1..184: note = tr|N8XFM5|N8XFM5_ACIBZ GTP cyclohydrolase 1; OS = Acinetobacter bereziniae NIPH 3 OX=1217651 GN=folE PE=3; SV = 1
MSMQQSYANILTAVGEDLDRPGLKDTPMRAAKAFSYLTSGYSKTLEEVTNNAVFPSDNDEMVLVKNIEFYSLCEHHLLPFHGRVHIAYLPSGNVLGLSKFARITEMFARRLQIQEQLTKQIADAVAEVTQARGVAVVIDSAHMCMMMRGVSKQESTTRTVSFVGDFKTDKEARREFLSAVPEAH

SEQ ID NO: 3835 - protein, 184 aa, Acinetobacter bereziniae; identical to SEQ ID NO: 3834
  REGION 1..184: note = tr|A0A0A8TK31|A0A0A8TK31_ACIBZ GTP cyclohydrolase 1; OS = Acinetobacter bereziniae OX=106648 GN=folE PE=3 SV=1

SEQ ID NO: 3836 - protein, 184 aa, unidentified
  source 1..184: note = Acinetobacter bohemicus
  REGION 1..184: note = tr|A0A1I6NV33|A0A1I6NV33_9GAMM GTP cyclohydrolase 1; OS = Acinetobacter bohemicus OX=1435036 GN=folE PE=3 SV=1
MSMQQSYANILTAVGEDLNRPGLKDTPMRAAKAFSYLTSGYSKTLEEVTNNAVFPSDNHEMVLVKNIEFYSLCEHHLLPFYGRVHIAYLPEGNVLGLSKFARITEMFARRLQIQEQLTQQIAEAVAEVTKARGVAVVIDSAHMCMMMRGVGKQESTTRTVSFVGDFKTNKEERREFLSAVPENY

SEQ ID NO: 3837 - protein, 184 aa, unidentified; identical to SEQ ID NO: 3836
  source 1..184: note = Acinetobacter bohemicus
  REGION 1..184: note = tr|N8QAA7|N8QAA7_9GAMM GTP cyclohydrolase 1; OS = Acinetobacter bohemicus ANC 3994 OX=1217715 GN=folE; PE = 3 SV=1

SEQ ID NO: 3838 - protein, 184 aa, unidentified
  source 1..184: note = Acinetobacter boissieri
  REGION 1..184: note = tr|A0A1G6IIM6|A0A1G6IIM6_9GAMM GTP cyclohydrolase 1; OS = Acinetobacter boissieri OX=1219383 GN=folE PE=3 SV=1
MSMQQSYQHILQTIGEDLERPGLKDTPIRAARAFSYLTSGYEKSLEEVTNNAVFPSDNREMVLVKNIEFYSLCEHHLLPFYGRVHIAYLPEGNVLGLSKFARITEMFARRLQIQENLTQQIAEAVESVTGARGVAVVIDSAHMCMMMRGVGKQSSTTRTVSFVGDFKENTEARREFLSAVPESY

SEQ ID NO: 3839 - protein, 289 aa, unidentified
  source 1..289: note = Acinetobacter boissieri
  REGION 1..289: note = tr|A0A1G6IBD5|A0A1G6IBD5_9GAMM GTP cyclohydrolase FolE2 OS=Acinetobacter boissieri OX=1219383 GN=folE2 PE=3; SV = 1
MPLPDISTQHLPQHFSPLNWVGMEKIALPLLFNNQPILSHADIHINVPKENVKGIHMSRIFLQLQQLKNITASTIKEQLEQIITTHQNDNTNQARLILHFKLPIQQYALKTPEISGWKYYPVMVEAQLTSTQFNLDYTVEIEYSSTCPCSAALSRQIITDQFTHDFETSNQINKSDVVNWITQHGSLATPHSQRSTAAITIRQSTDLNFYQMIESIEHTLQTATQTAVKRADEQAFAQHNGQNLMFVEDAARRIGHTLNQSYSKWQVKVTHYESLHSHNAVAYLDHTIT

SEQ ID NO: 3840 - protein, 301 aa, Acinetobacter bouvetii
  REGION 1..301: note = tr|A0A4Q7AWS0|A0A4Q7AWS0_9GAMM GTP cyclohydrolase FolE2 OS=Acinetobacter bouvetii OX=202951 GN=folE2 PE=3; SV = 1
MNALQLPDVSSEPFLNMHAYPLDWVGMENIALPIQIQNTLCASKVNAYVSLDDPQAKGIHMSRLYTRLLELHALPDLTLSKIYQALQDFLASHTELSQQARLDIQAEFNLEQPALVSALSGWKSYPFNLSCKLSEHTFEAELAIEITYSSTCPCSAALVRDLIQKSFQDAIDTKKINPQNTDEVMAWLGTTDAIVATPHSQRSFAQLRFKLAPCLQSIPIRQFISHAEQALTTPVQTAVKRVDEQAFALANGQNLMFCEDALRRLYHAFVNYSGISGFNFKVIHAESLHAHDAVAQGSWQW

SEQ ID NO: 3841 - protein, 184 aa, Acinetobacter bouvetii
  REGION 1..184: note = tr|N9C9L9|N9C9L9_9GAMM GTP cyclohydrolase 1; OS = Acinetobacter bouvetii DSM 14964 = CIP 107468; OX = 1120925 GN=folE PE=3 SV=1
MSMQQSYANILTAVGEDLNRPGLKDTPMRAAKAFSYLTSGYSQTLEEVTNKAVFPSDNREMVLVKNIEFYSLCEHHLLPFHGRVHIAYLPEGNVLGLSKFARITEMFARRLQIQENLTQQIAEAVAEVTGARGVAVMIDSAHMCMMMRGVGKQESTTRTVSFVGDFKTNKEERREFLSAVPESY

SEQ ID NO: 3842 - protein, 184 aa, Acinetobacter brisouii
  REGION 1..184: note = tr|V2UVB9|V2UVB9_9GAMM GTP cyclohydrolase 1; OS = Acinetobacter brisouii CIP 110357 OX=1341683 GN=folE; PE = 3 SV=1
MSMQQSYEKILTAVGEDLQRPGLKDTPVRAARAFSYLTSGYNQTLEEVTNNAVFPSENREMVLVKNIEFYSLCEHHLLPFYGRVHIAYLPEGQVLGLSKFARITEMFARRLQIQENLTQQIAEAVASVTHARGVAVVIDSAHMCMMMRGVGKQNSTTRTVSFVGQFKTDEEVRREFLRVVPESY

SEQ ID NO: 3843 - protein, 302 aa, Acinetobacter brisouii
  REGION 1..302: note = tr|V2UVQ3|V2UVQ3_9GAMM GTP cyclohydrolase FolE2; OS = Acinetobacter brisouii CIP 110357 OX=1341683 GN=folE2; PE = 3 SV=1
MNQILPDISQTQQPNYSSPLAWVGMQGIDLPLQLEQSTGIYPILCKVNATVNLPRADIKGIHMSRLYQHCNQLQQLNILEIYQLLQKMITSHQDCGSSAAQFDCQFELLLQRHALSSPELCGWKAYPVKLHTKLENGKFRFEFGVEVSYSSTCPCSAALSRQVIHDTFVDDFQNDTELKTHQIAKWLLQNASLATPHSQRSLAQVTIRQHSITQDLKIIELIDLIEETLQTATQTAVKRIDEQTFAKRNGENLMFVEDAARRLSYALAQPYIDWSLKVDHQESLHPHNAVAYQHSEHWLTDI

SEQ ID NO: 3844 - protein, 184 aa, Acinetobacter calcoaceticus
  REGION 1..184: note = tr|A0A380VKA6|A0A380VKA6_ACICA GTP cyclohydrolase 1; OS = Acinetobacter calcoaceticus OX=471 GN=folE2 PE=3 SV=1
MSMQQSYANILTAVGEDLNRPGLKDTPVRAAKAFSYLTSGYSKTLEEVTNNAVFPSDNHEMVLVKNIEFYSLCEHHLLPFYGRVHVAYLPEGKVLGLSKFARITEMFARRLQIQENLTQQIAEAVAEVTGARGVAVVIDSAHMCMMMRGVGKQESTTRTVSFVGDFKTDKEARREFLSAVPESY

SEQ ID NO: 3845 - protein, 182 aa, Acinetobacter calcoaceticus
  REGION 1..182: note = tr|N9EHP1|N9EHP1_ACICA GTP cyclohydrolase 1; OS = Acinetobacter calcoaceticus ANC 3680 OX=1217653 GN=folE; PE = 3 SV=1
MQQSYANILTAVGEDLNRPGLKDTPVRAAKAFSYLTSGYSKTLEEVTNNAVFPSDNHEMVLVKNIEFYSLCEHHLLPFYGRVHIAYLPEGKVLGLSKFARITEMFARRLQIQENLTQQIAEAVAEVTGARGVAVVIDSAHMCMMMRGVGKQESTTRTVSFIGDFKTDKESRREFLSAVPESY

SEQ ID NO: 3846 - protein, 184 aa, Acinetobacter calcoaceticus; identical to SEQ ID NO: 3844
  REGION 1..184: note = tr|A0A2S4T164|A0A2S4T164_9GAMM GTP cyclohydrolase 1; OS = Acinetobacter calcoaceticus/baumannii complex sp. ABNIH27 OX=2080673 GN=folE PE=3 SV=1

SEQ ID NO: 3847 - protein, 184 aa, unidentified
  source 1..184: note = Acinetobacter celticus
  REGION 1..184: note = tr|A0A1C3CWU5|A0A1C3CWU5_9GAMM GTP cyclohydrolase 1; OS = Acinetobacter celticus OX=1891224 GN=folE PE=3 SV=1
MSMQQSYANILTAVGEDLNRPGLKDTPMRAAKAFSYLTSGYSQTLEEVTNNAVFPSDNREMVLVKNIEFYSLCEHHLLPFYGRVHIAYLPEGNVLGLSKFARITEMFARRLQIQENLTQQIAEAVAEITQARGVAVMIDSAHMCMMMRGVGKQESTTRTVSFIGDFKTNKEDRREFLGALPENY

SEQ ID NO: 3848 - protein, 300 aa, unidentified
  source 1..300: note = Acinetobacter colistiniresistens
  REGION 1..300: note = tr|N9R914|N9R914_9GAMM GTP cyclohydrolase FolE2; OS = Acinetobacter colistiniresistens OX=280145 GN=folE2; PE = 3 SV=1
MNLALPDISAETKLSKAYQYALDWVGMEKIALPLKIENTLCQSQVNAYVSLDDPSAKGIHMSRLYTRLLELTSIHNLNLPDLKLALMDFLKSHYGLSTHAKIEIHSELYLQRSALISQLSGWKSYPFVLSCQLLADQFEAELKVEVPYSSTCPCSAALSRNIIQQRFETALEKQEISLDHHDILNWLGGTDAIAATPHSQRSVAILHFKLNQNIKHIPLILFINQAEQSLMTPVQTAVKRINEQAFAIANGQNLMFCEDALRRLYSTFLHHQNITGFNFKVIHAESLHAHDAVAQGAWQW

SEQ ID NO: 3849 - protein, 184 aa, unidentified
  source 1..184: note = Acinetobacter colistiniresistens
  REGION 1..184: note = tr|N9R8J0|N9R8J0_9GAMM GTP cyclohydrolase 1; OS = Acinetobacter colistiniresistens OX=280145 GN=folE PE=3; SV = 1
MSMQQSYANILTAVGEDLNRPGLQDTPMRAAKAFSFLTSGYSKTLEEVTNSALFPSDNHEMVLVKNIEFYSLCEHHLLPFYGRVHIAYLPEGQVLGLSKFARITEMFARRLQVQENLTQQIAEAVAKVTQARGVAVVIDSAHMCMMMRGVGKQESTTRTVSFVGDFKTDKDVRREFLSAVPENY

SEQ ID NO: 3850 - protein, 184 aa, unidentified
  source 1..184: note = Acinetobacter cumulans
  REGION 1..184: note = tr|A0A3A8GCI0|A0A3A8GCI0_9GAMM GTP cyclohydrolase 1; OS = Acinetobacter cumulans OX=2136182 GN=folE PE=3 SV=1
MSMQQSYANILTAVGEDLNRPGLKDTPMRAAKAFSYLTSGYNQTLEEVTNNAVFPSDNREMVLVKNIEFYSLCEHHLLPFYGRVHIAYLPEGNVLGLSKFARITEMFARRLQIQENLTQQIAEAVAEVTGARGVAVVIDSAHMCMMMRGVGKQESTTRTVSFVGDFKTNKEERREFLSAVPESY

SEQ ID NO: 3851 - protein, 184 aa, unidentified
  source 1..184: note = Acinetobacter defluvii
  REGION 1..184: note = tr|A0A2S2FCL7|A0A2S2FCL7_9GAMM GTP cyclohydrolase 1; OS = Acinetobacter defluvii OX=1871111 GN=folE PE=3 SV=1
MSMQQSYANILTAVGEDLNRPGLKDTPMRAAKAFSYLTSGYSKSLAEVTNNAVFPSDNDEMVLVKNIEFYSLCEHHLLPFYGRVHIAYLPSGNVLGLSKFARITEMFARRLQIQEQLTKQIADAVAEVTDARGVAVVIDSAHMCMMMRGVSKQESTTRTVSFVGDFKTDKEARREFLLAVPEAH

SEQ ID NO: 3852 - protein, 184 aa, unidentified
  source 1..184: note = Acinetobacter equi
  REGION 1..184: note = tr|A0A0N9W1U8|A0A0N9W1U8_9GAMM GTP cyclohydrolase 1; OS = Acinetobacter equi OX=1324350 GN=folE PE=3 SV=1
MSMQQSYANILTAVGEDLNRPGLKDTPMRAAKAFSYLTSGYNQSLAEVTNNAVFPSDNREMVLVKNIEFYSLCEHHLLPFYGRVHIAYLPEGNVLGLSKFARITEMFARRLQIQENLTQQIAEAVAEVTGARGVAVVIDSAHMCMMMRGVGKQESTTRTVSFIGDFKTNKEERREFLSAVPESY

SEQ ID NO: 3853 - protein, 184 aa, unidentified
  source 1..184: note = Acinetobacter gandensis
  REGION 1..184: note = tr|A0A1A7R8Y6|A0A1A7R8Y6_9GAMM GTP cyclohydrolase 1; OS = Acinetobacter gandensis OX=1443941 GN=folE PE=3 SV=1
MSMQQSYANILTAVGEDLNRPGLKDTPMRAAKAFSYLTSGYTQTLEEVTNNAVFPSDNREMVLVKNIEFYSLCEHHLLPFYGRVHIAYLPEGNVLGLSKFARITEMFARRLQIQENLTQQIAEAVSEVTGARGVAVVIDSAHMCMMMRGVGKQESTTRTVSFVGDFKTNKEERREFLSAVPESY

SEQ ID NO: 3854 - protein, 184 aa, unidentified; identical to SEQ ID NO: 3844
  source 1..184: note = Acinetobacter genomosp.
  REGION 1..184: note = tr|A0A1V2UUS5|A0A1V2UUS5_9GAMM GTP cyclohydrolase 1; OS = Acinetobacter genomosp. 33YU OX=1675530 GN=folE PE=3; SV = 1

SEQ ID NO: 3855 - protein, 182 aa, Acinetobacter gerneri
  REGION 1..182: note = tr|N8YCL5|N8YCL5_9GAMM GTP cyclohydrolase 1; OS = Acinetobacter gerneri DSM 14967 = CIP 107464 OX=1120926; GN = folE PE=3 SV=1
MQQSYANILTAVGEDLERPGLKDTPMRAAKAFSYLTSGYSKTLEEVTNNAVFPSDNHEMVLVKNIEFYSLCEHHLLPFYGRVHIAYLPEGNVLGLSKFARITEMFARRLQIQEQLTKQIAEAVAEVTQARGVAVVIDSAHMCMMMRGVSKQESTTRTVSFIGDFKTDKDARREFLLAVPEAH

SEQ ID NO: 3856 - protein, 300 aa, Acinetobacter guillouiae
  REGION 1..300: note = tr|A0A077L1G8|A0A077L1G8_ACIGI GTP cyclohydrolase FolE2 OS=Acinetobacter guillouiae OX=106649 GN=folE2 PE=3; SV = 1
MNLVLPDVSAESSLTRNYYYPLDWVGMEKIALPLYLENSLCQSQVNAYVSLDDVFAKGIHMSRLYTRLLKLSTIKNLALLDIKDALLDFLASHKDLSAHAKIEIHSELYIERPALVSQLSGWKSYPFVLSCQLLKDDFYAELNVEIPYSSTCPCSAALARNIIQQRFASALENQEIQLDPQEILSWLNSTDAIAATPHSQRSFAQLNFKLDQNIQYIPLILFINQAEQALMTPVQTAVKRIDEQAFAVANGQNLMFCEDALRRLYATFIHHPSILGFNFKVIHAESLHAHDAVAQGAWQW

SEQ ID NO: 3857 - protein, 184 aa, Acinetobacter guillouiae; identical to SEQ ID NO: 3834
  REGION 1..184: note = tr|N8WSM9|N8WSM9_ACIGI GTP cyclohydrolase 1; OS = Acinetobacter guillouiae NIPH 991 OX=1217656 GN=folE; PE = 3 SV=1

SEQ ID NO: 3858 - protein, 300 aa, Acinetobacter gyllenbergii
  REGION 1..300: note = tr|A0A1B8UFK2|A0A1B8UFK2_9GAMM GTP cyclohydrolase FolE2 OS=Acinetobacter gyllenbergii OX=134534 GN=folE2; PE = 3 SV=1
MNLALPDISAESHLPKAYSYALDWVGMENIALPVRLENTLCQSQVNAYVSLDDPLAKGIHMSRLYTRLLELSSIQNINLADLELTLMDFLESHHDLSKHAKIEIHSELYIERSALISNLSGWKSYPFMLSCQLLNDRFEAELRVEIPYSSTCPCSAALARHIIQQRFESALQKQEIGLDQHEILNWLSRTDAIAATPHSQRSFAILHFKLDRNIKHIPLILFINQAEQALMTPVQTAVKRIDEQAFAIANGQNLMFCEDALRRLYGTFIHHNNIKGFNFKVIHAESLHAHDAVAQGSWQW

SEQ ID NO: 3859 - protein, 182 aa, Acinetobacter gyllenbergii
  REGION 1..182: note = tr|V2UX26|V2UX26_9GAMM GTP cyclohydrolase 1; OS = Acinetobacter gyllenbergii NIPH 230 OX=1217658 GN=folE; PE = 3 SV=1
MQQSYANILTAVGEDLNRPGLKDTPMRAAKAFSFLTSGYSKTLEEVTNSALFPSDNHEMVLVKNIEFYSLCEHHLLPFYGRVHIAYLPEGQVLGLSKFARITEMFARRLQVQENLTQQIAEAVAQVTQARGVAVVIDSAHMCMMMRGVGKQESTTRTVSFIGDFKTDKDTRREFLSAVPESY

SEQ ID NO: 3860 - protein, 184 aa, Acinetobacter haemolyticus
  REGION 1..184: note = tr|D4XP56|D4XP56_ACIHA GTP cyclohydrolase 1; OS = Acinetobacter haemolyticus ATCC 19194 OX=707232 GN=folE; PE = 3 SV=1
MSMQQSYANILTAVGEDLTRPGLQDTPMRAAKAFSFLTSGYSKTLAEVTNSAVFPSDNHEMVLVKNIEFYSLCEHHLLPFYGRVHIAYLPEGQVLGLSKFARITEMFARRLQIQENLTQQIAEAVAEVTQARGVAVVIDSAHMCMMMRGVGKQESTTRTVSFVGDFKTDKDARREFLSAVPESY

SEQ ID NO: 3861 - protein, 184 aa, Acinetobacter haemolyticus; identical to SEQ ID NO: 3860
  REGION 1..184: note = tr|N9F807|N9F807_ACIHA GTP cyclohydrolase 1; OS = Acinetobacter haemolyticus NIPH 261 OX=1217986 GN=folE; PE = 3 SV=1

SEQ ID NO: 3862 - protein, 300 aa, unidentified
  source 1..300: note = Acinetobacter halotolerans
  REGION 1..300: note = tr|A0A4Q6XEJ5|A0A4Q6XEJ5_9GAMM GTP cyclohydrolase FolE2 OS=Acinetobacter halotolerans OX=1752076 GN=folE2; PE = 3 SV=1
MNLVLPDISAESTLPKAYSHSLDWVGMENIALPVHIENTRCPSQINAFVSLDDPFAKGIHMSRLYTRLLELTKISNLSLFDIKHVLKDFLESHKGLSEHAKIEIHSELYIERPALISNLSGWKSYPFVLSCQLLKDQFEARLKVEIPYSSTCPCSAALARNIIQQRFQTALANQEISLDQQQIVDWLNTTDAIAATPHSQRSFAILNFKLDQNIKHIPLILFINQAEQSLMTAVQTAVKRIDEQAFAVANGQNLMFCEDALRRLYSTFLNHQNIKGFNFKVIHAESLHAHDAVARGSWQW

SEQ ID NO: 3863 - protein, 184 aa, unidentified
  source 1..184: note = Acinetobacter halotolerans
  REGION 1..184: note = tr|A0A4Q6X9N9|A0A4Q6X9N9_9GAMM GTP cyclohydrolase 1; OS = Acinetobacter halotolerans OX=1752076 GN=folE PE=3 SV=1
MSMQQSYANILTAVGEDLTRPGLQDTPMRAAKAFSFLTSGYSKTLEEVTNNAVFPSDNHEMVLVKNIEFYSLCEHHLLPFYGRVHIAYLPEGQVLGLSKFARITEMFARRLQIQENLTQQIAEAVAEVTQARGVAVVIDSAHMCMMMRGVGKQESTTRTVSFVGEFKTDKDARREFLSAVPESY

SEQ ID NO: 3864 - protein, 184 aa, unidentified
  source 1..184: note = Acinetobacter idrijaensis
  REGION 1..184: note = tr|A0A098YIW9|A0A098YIW9_9GAMM GTP cyclohydrolase 1; OS = Acinetobacter idrijaensis OX=1507807 GN=folE PE=3 SV=1
MTMQQSYANILTAVGEDLNRPGLKDTPVRAAKAFSYLTSGYSQTLEEVTNQAVFPSDNREMVLVKNIEFYSLCEHHLLPFYGRVHIAYLPEGHVLGLSKFARITEMFARRLQIQENLTQQIAEAVAEVTKARGVAVMIDSAHMCMMMRGVGKQESTTRTVSFIGDFKTDKETRREFLSAVPESY

SEQ ID NO: 3865 - protein, 184 aa, unidentified
  source 1..184: note = Acinetobacter indicus
  REGION 1..184: note = tr|V2ULC5|V2ULC5_9GAMM GTP cyclohydrolase 1; OS = Acinetobacter indicus CIP 110367 OX=1341679 GN=folE; PE = 3 SV=1
MSMQQSYANILTAVGEDLNRPGLKDTPMRAAKAFSYLTSGYSQTLAEVTNNAVFPSDNREMVLVKNIEFYSLCEHHLLPFYGRVHIAYLPEGNVLGLSKFARITEMFARRLQIQENLTQQIAEAVAEVTKARGVAVVIDSAHMCMMMRGVGKQESTTRTVSFIGDFKTDKDARREFLSAVPESY

SEQ ID NO: 3866 - protein, 184 aa, unidentified; identical to SEQ ID NO: 3865
  source 1..184: note = Acinetobacter indicus
  REGION 1..184: note = tr|A0A0F3LTZ0|A0A0F3LTZ0_9GAMM GTP cyclohydrolase 1; OS = Acinetobacter indicus OX=756892 GN=folE PE=3 SV=1

SEQ ID NO: 3867 - protein, 184 aa, Acinetobacter johnsonii
  REGION 1..184: note = tr|A0A0W8GZ42|A0A0W8GZ42_ACIJO GTP cyclohydrolase 1; OS = Acinetobacter johnsonii OX=40214 GN=folE PE=3 SV=1
MSMQQSYANILTAVGEDLTRPGLLDTPMRAAKAFSYLTSGYSKSLEEVTNNAVFPSDNREMVLVKNIEFYSLCEHHLLPFYGRVHIAYLPEGNVLGLSKFARITEMFARRLQIQENLTQQIAEAVAEVTGARGVAVMIDSAHMCMMMRGVGKQESTTRTVSFIGDFKTNKEERREFLSAVPESY

SEQ ID NO: 3868 - protein, 184 aa, Acinetobacter johnsonii; identical to SEQ ID NO: 3867
  REGION 1..184: note = tr|N9CR06|N9CR06_ACIJO GTP cyclohydrolase 1; OS = Acinetobacter johnsonii ANC 3681 OX=1217662 GN=folE; PE = 3 SV=1

SEQ ID NO: 3869 - protein, 184 aa, Acinetobacter junii
  REGION 1..184: note = tr|D0SMH7|D0SMH7_ACIJU GTP cyclohydrolase 1; OS = Acinetobacter junii SH205 OX=575587 GN=folE PE=3 SV=1
MSMQQSYANILTAVGEDLNRPGLKDTPMRAAKAFSFLTSGYSKTLEEVTNSAVFPSDNHEMVLVKNIEFYSLCEHHLLPFYGRVHIAYLPEGQVLGLSKFARITEMFARRLQIQENLTQQIAEAVAEVTQARGVAVVIDSAHMCMMMRGVGKQESTTRTVSFVGDFKTDKDARREFLSAVPESY

SEQ ID NO: 3870 - protein, 300 aa, Acinetobacter junii
  REGION 1..300: note = tr|A0A4Q7AMQ7|A0A4Q7AMQ7_ACIJU GTP cyclohydrolase FolE2 OS=Acinetobacter junii OX=40215 GN=folE2 PE=3 SV=1
MNLVLPDISADSTLPKAYSHCLDWVGMEKIALPVRIENTLCQSQVNAYVSLDDPLAKGIHMSRLYTRLLELSSVGNLNLMVLKSLLQDFLESHRDLSKHAKIEIQSELYIERPALISKLSGWKSYPFVLSCQLLDGQFLAELNVEIPYSSTCPCSAALSRNIIQQRFESALNNQEIRLDQQEILDWLSSTNAIAATPHSQRSFAILNFRLDQNIQHIPLILFINQAEQALMTPVQTAVKRIDEQAFAIANGQNLMFCEDALRRLYGTFLNHKSIRGFNFKVIHAESLHAHDAVAQGSWQW

SEQ ID NO: 3871 - protein, 184 aa, unidentified
  source 1..184: note = Acinetobacter kookii
  REGION 1..184: note = tr|A0A1G6L8F2|A0A1G6L8F2_9GAMM GTP cyclohydrolase 1; OS = Acinetobacter kookii OX=1226327 GN=folE PE=3 SV=1
MSMQQSYANILTAVGEDLNRPGLKDTPMRAAKAFSYLTSGYSKTLEEVTNSAVFPSDNREMVLVKNIEFYSLCEHHLLPFYGRVHIAYLPEGQVLGLSKFARITEMFARRLQIQENLTQQIAEAVAEVTKARGVAVMIDSAHMCMMMRGVGKQESTTRTVSFVGDFKTNKEERREFLAAVPESY

SEQ ID NO: 3872 - protein, 184 aa, unidentified; identical to SEQ ID NO: 3836
  source 1..184: note = Acinetobacter kyonggiensis
  REGION 1..184: note = tr|A0A1H3G7T9|A0A1H3G7T9_9GAMM GTP cyclohydrolase 1; OS = Acinetobacter kyonggiensis OX=595670 GN=folE PE=3 SV=1

SEQ ID NO: 3873 - protein, 184 aa, unidentified
  source 1..184: note = Acinetobacter lactucae
  REGION 1..184: note = tr|A0A151YMH0|A0A151YMH0_9GAMM GTP cyclohydrolase 1; OS = Acinetobacter lactucae OX=1785128 GN=folE PE=3 SV=1
MSMQQSYANILTAVGEDLDRPGLKDTPVRAAKAFSYLTSGYSKTLEEVTNNAVFPSDNHEMVLVKNIEFYSLCEHHLLPFYGRVHVAYLPEGKVLGLSKFARITEMFARRLQIQENLTKQIAEAVAEVTEARGVAVVIDSAHMCMMMRGVGKQESTTRTVSFIGDFKTDKEARREFLSAVPESY

SEQ ID NO: 3874 - protein, 184 aa, unidentified
  source 1..184: note = Acinetobacter larvae
  REGION 1..184: note = tr|A0A1B2M0U6|A0A1B2M0U6_9GAMM GTP cyclohydrolase 1; OS = Acinetobacter larvae OX=1789224 GN=folE PE=3 SV=1
MSMQQSYANILTAVGEDLNRPGLKDTPLRAAKAFSYLTSGYTQSLAEVTNNAVFPSDNHEMVLVKNIEFYSLCEHHLLPFSGRVHIAYLPEGHVLGLSKFARITEMFARRLQIQETLTQQIAEAIAEVTQARGVAVMIDSAHMCMMMRGVSKQASTTRTVAYVGDFKTDKDVRQEFLQALPEVY

SEQ ID NO: 3875 - protein, 184 aa, Acinetobacter lwoffii
  REGION 1..184: note = tr|N9HE35|N9HE35_ACILW GTP cyclohydrolase 1; OS = Acinetobacter lwoffii ATCC 9957 = CIP 70.31 OX=1311804; GN = folE PE=3 SV=1
MTMQQSYANILTAVGEDLNRPGLKDTPVRAAKAFSYLTSGYSQTLEEVTNKAVFPSDNREMVLVKNIEFYSLCEHHLLPFYGRVHIAYLPEGHVLGLSKFARITEMFARRLQIQENLTQQIAEAVAEVTKARGVAVMIDSAHMCMMMRGVGKQESTTRTVSFIGDFKTDKETRREFLSAVPESY

SEQ ID NO: 3876 - protein, 184 aa, Acinetobacter lwoffii; identical to SEQ ID NO: 3875
  REGION 1..184: note = tr|D0SV03|D0SV03_ACILW GTP cyclohydrolase 1; OS = Acinetobacter lwoffii SH145 OX=575588 GN=folE PE=3 SV=1

SEQ ID NO: 3877 - protein, 184 aa, unidentified
  source 1..184: note = Acinetobacter marinus
  REGION 1..184: note = tr|A0A1G6IPQ4|A0A1G6IPQ4_9GAMM GTP cyclohydrolase 1; OS = Acinetobacter marinus OX=281375 GN=folE PE=3 SV=1
MSMQQYYAKILTEIGEDLARPGLQDTPIRAAKAFSFLTSGYQQKLEDVINKAVFPADNREMVLVKNIEFYSLCEHHLLPFYGRVHIAYLPEGQVLGLSKFARITEMFARRLQIQENLTKQIAEAVQEATGARGVAVMIDSAHMCMVMRGVGKQHSTTRTVSYLGEMKDNQQARQEFLSAVPEVF

SEQ ID NO: 3878 - protein, 290 aa, unidentified
  source 1..290: note = Acinetobacter nectaris
  REGION 1..290: note = tr|V2TGG0|V2TGG0_9GAMM GTP cyclohydrolase FolE2; OS = Acinetobacter nectaris CIP 110549 OX=1392540 GN=folE2; PE = 3 SV=1
MPLPDISKDNHAQHTLPLTWVGMEKIALPLTYKSYPVECFADIHINLPKADAKGIHMSRLFLELQELKEIQHTKIQTILEKILKTHEDCHATQVHLKLTFNLPIQRNALITRNISGWKYYKVEMDIQLNKDQISFNSTIDIDYSSTCPCSAALSRQLITDQFHQDFIGHPQVSLDQVAIWLQKNASVATPHSQRSIASITVSHQDIDFLAFINLIENTLQTATQTAVKRADEQAFSKRNGGNLMFVEDAARRIGNVLMQNHYKTWHIKVTHQESLHSHNAVAYLDHATVT

SEQ ID NO: 3879 - protein, 184 aa, unidentified
  source 1..184: note = Acinetobacter nectaris
  REGION 1..184: note = tr|V2TU23|V2TU23_9GAMM GTP cyclohydrolase 1; OS = Acinetobacter nectaris CIP 110549 OX=1392540 GN=folE; PE = 3 SV=1
MSMQQSYENILEAVGEDLERPGLKDTPLRAAKAFSYLTSGYNKTLEEVTNDAVFPSDNREMVLVKNIEFYSLCEHHLLPFYGRVHIAYLPEGHVLGLSKFARITEMFARRLQIQENLTQQIAEAIENITGARGVAVVIDSAHMCMMMRGVGKQSSTTRTVSFVGEFKTNTETRREFLSAVPESY

SEQ ID NO: 3880 - protein, 184 aa, Acinetobacter nosocomialis; identical to SEQ ID NO: 3844
  REGION 1..184: note = tr|A0A1Y5NK56|A0A1Y5NK56_ACINO GTP cyclohydrolase 1; OS = Acinetobacter nosocomialis P020 OX=1285584 GN=folE PE=3; SV = 1

SEQ ID NO: 3881 - protein, 182 aa, Acinetobacter nosocomialis; identical to SEQ ID NO: 3828
  REGION 1..182: note = tr|A0A0E2GC59|A0A0E2GC59_ACINO GTP cyclohydrolase 1; OS = Acinetobacter nosocomialis NIPH 386 OX=1217985 GN=folE; PE = 3 SV=1

SEQ ID NO: 3882 - protein, 184 aa, unidentified; identical to SEQ ID NO: 3844
  source 1..184: note = Acinetobacter oleivorans
  REGION 1..184: note = tr|A0A2T5Q7N8|A0A2T5Q7N8_9GAMM GTP cyclohydrolase 1; OS = Acinetobacter oleivorans OX=1148157 GN=folE PE=3 SV=1

SEQ ID NO: 3883 - protein, 300 aa, unidentified
  source 1..300: note = Acinetobacter oleivorans
  REGION 1..300: note = tr|D8JM39|D8JM39_ACISD GTP cyclohydrolase FolE2; OS = Acinetobacter oleivorans (strain JCM 16667 / KCTC 23045 / DR1) OX=436717 GN=folE2 PE=3 SV=1
MNLVLPDISAEPTLPNAYSHRLDWVGMENIALPVRIENTLCPSHINAYVSLDDPLAKGIHMSRLYTRLLELTSLENINMPDLKLVLEDFLDSHQNLSQHAKIEIHSKLYIERPALVSKLSGWKSYPFVLSGQLSNDQFEAELKVEIPYSSTCPCSAALSRNIIQQRFESALQNQAIRLDQQDIMNWLNTTDAIAATPHSQRSFALLQFKLDQNLQDIPLIEFINQAELALMTPVQTAVKRIDEQAFAVANGQNLMFCEDALRRLYGSFIHHKNIHGFKFKVTHAESLHAHDAVAQGTWQW

SEQ ID NO: 3884 - protein, 184 aa, Acinetobacter parvus
  REGION 1..184: note = tr|N8RKR0|N8RKR0_9GAMM GTP cyclohydrolase 1; OS = Acinetobacter parvus NIPH 1103 OX=1217671 GN=folE PE=3; SV = 1
MSMQQSYANILTAVGEDLNRPGLKDTPMRAAKAFSFLTSGYSKTLEEVTNSAVFPSDNHEMVLVKNIEFYSLCEHHLLPFYGRVHIAYLPEGQVLGLSKFARITEMFARRLQIQENLTQQIAEAVAEVTQARGVAVMIDSAHMCMMMRGVGKQESTTRTVSFTGDFKTDKEARREFLSAVPESY

SEQ ID NO: 3885 - protein, 184 aa, Acinetobacter parvus
  REGION 1..184: note = tr|N8QDU8|N8QDU8_9GAMM GTP cyclohydrolase 1; OS = Acinetobacter parvus DSM 16617 = CIP 108168 OX=981333; GN = folE PE=3 SV=1
MSMQQSYANILTAVGEDLNRPGLKDTPMRAAKAFSFLTSGYSKTLEEVTNSAVFPSDNHEMVLVKNIEFYSLCEHHLLPFYGRVHIAYLPEGQVLGLSKFARITEMFARRLQIQENLTQQIAEAVAEVTQARGVAVVIDSAHMCMMMRGVGKQESTTRTVSFIGDFKTDKETRREFLSAVPESY

SEQ ID NO: 3886 - protein, 184 aa, unidentified
  source 1..184: note = Acinetobacter piscicola
  REGION 1..184: note = tr|A0A4Q4H3C8|A0A4Q4H3C8_9GAMM GTP cyclohydrolase 1; OS = Acinetobacter piscicola OX=2006115 GN=folE PE=3 SV=1
MSMQQSYANILTAVGEDLDRPGLKDTPMRAAKAFSYLTSGYSKTLEEVTNNAVFPSDNDEMVLVKNIEFYSLCEHHLLPFHGRVHIAYLPSGNVLGLSKFARITEMFARRLQIQEQLTKQIADAVAEVTNARGVAVVIDSAHMCMMMRGVSKQESTTRTVSFVGDFKTDKEARREFLLAVPEAH

SEQ ID NO: 3887 - protein, 301 aa, unidentified
  source 1..301: note = Acinetobacter piscicola
  REGION 1..301: note = tr|A0A4Q4GT87|A0A4Q4GT87_9GAMM GTP cyclohydrolase FolE2 OS=Acinetobacter piscicola OX=2006115 GN=folE2 PE=3; SV = 1
MNALQLPDVSSEPFLNMHAYPLDWVGMENIALPIHIQNTLCASKVNAYVSLDDPQAKGIHMSRLYTRLLELHALPDLTLSKIYQVLQDFLASHTELSQQARLDIQAEFNLEQPALVSALSGWKSYPFSLSCKLSEHTFEAELAIEITYSSTCPCSAALARDLIQKSFQDAIDTKKINPQNTDEIMAWLGTTDAIVATPHSQRSFAQLRFNLDPCLQSIPIRQFISHAEKALTTPVQTAVKRVDEQAFALANGQNLMFCEDALRRLYHAFVNYSGISGFNFKVIHAESLHAHDAVAQGSWQW

SEQ ID NO: 3888 - protein, 184 aa, Acinetobacter pittii
  REGION 1..184: note = tr|R8YP88|R8YP88_ACIPI GTP cyclohydrolase 1; OS = Acinetobacter pittii ANC 4050 OX=1217691 GN=folE PE=3; SV = 1
MSMQQSYANILTAVGEDLDRPGLKDTPVRAAKAFSYLTSGYSKTLEEVTNNAVFPSDNHEMVLVKNIEFYSLCEHHLLPFYGRVHVAYLPEGKVLGLSKFARITEMFARRLQIQENLTQQIAEAVAEVTGARGVAVVIDSAHMCMMMRGVGKQESTTRTVSFIGDFKTDKEARREFLSAVPESY

SEQ ID NO: 3889 - protein, 184 aa, Acinetobacter pittii
  REGION 1..184: note = tr|C0LMI8|C0LMI8_ACIPI GTP cyclohydrolase 1; OS = Acinetobacter pittii OX=48296 GN=folE PE=3 SV=1
MSMQQSYANILTAVGEDLDRPGLKDTPVRAAKAFSYLTSGYSKTLEEVTNNAVFPSDNHEMVLVKNIEFYSLCEHHLLPFYGRVHVAYLPEGKVLGLSKFARITEMFARRLQIQENLTQQIAEAVAEVTGARGVAVVIDSAHMCMMMRGVGKQESTTRTVSFVGDFKTDKEARREFLSAVPESY

SEQ ID NO: 3890 - protein, 184 aa, unidentified
  source 1..184: note = Acinetobacter populi
  REGION 1..184: note = tr|A0A1Z9YUN3|A0A1Z9YUN3_9GAMM GTP cyclohydrolase 1; OS = Acinetobacter populi OX=1582270 GN=folE PE=3 SV=1
MSMQQSYSDILTAIGEDLDRPGLKDTPIRAAKAFAFLTSGYQKDLKEVTNDAVFPSENREMVLVKNIEFYSLCEHHLLPFYGRVHIGYLPEGRVLGLSKFARITEMFARRLQIQENLTQQIAEAIVEVTGARGVAVVIDSAHMCMMMRGVGKQQSTTRTVCFLGELKSNEQARREFLNAVPESY

SEQ ID NO: 3891 - protein, 184 aa, unidentified
  source 1..184: note = Acinetobacter pragensis
  REGION 1..184: note = tr|A0A151Y3Q3|A0A151Y3Q3_9GAMM GTP cyclohydrolase 1; OS = Acinetobacter pragensis OX=1806892 GN=folE PE=3 SV=1
MSMQQSYANILTAVGEDLNRPGLKDTPMRAAKAFSYLTSGYSQTLEEVTNKAVFPSDNREMVLVKNIEFYSLCEHHLLPFHGRVHIAYLPEGNVLGLSKFARITEMFARRLQIQENLTQQIAEAVAEVTGARGVAVMIDSAHMCMMMRGVGKQESTTRTVSFVGDFKTNKEERREFLSAAPESY

SEQ ID NO: 3892 - protein, 301 aa, unidentified
  source 1..301: note = Acinetobacter pragensis
  REGION 1..301: note = tr|A0A151Y089|A0A151Y089_9GAMM GTP cyclohydrolase FolE2 OS=Acinetobacter pragensis OX=1806892 GN=folE2 PE=3; SV = 1
MNALQLPDVSSEPFLNMHAYPLDWVGMENIALPIQIQNTLCASKVNAYVSLDDPQAKGIHMSRLYTRLLELHALPDLTLSKIYQALQDFLASHTELSQQARLDIQAEFNLEQPALVSALSGWKSYPFNLSCKLSEHTFEAELAIEITYSSTCPCSAALARDLIQKSFQDAIDTKKINPQNTDEVMAWLGTTDAIVATPHSQRSFAQLRFKLAPCLQSIPIRQFISHAEQALTTPVQTAVKRVDEQAFALANGQNLMFCEDALRRLYHAFVNYSGISGFNFKVIHAESLHAHDAVAQGSWQW

SEQ ID NO: 3893 - protein, 300 aa, unidentified
  source 1..300: note = Acinetobacter proteolyticus
  REGION 1..300: note = tr|A0A2N0W983|A0A2N0W983_9GAMM GTP cyclohydrolase FolE2 OS=Acinetobacter proteolyticus OX=1776741 GN=folE2; PE = 3 SV=1
MNSALPDISAESKLAKAFGHSLDWVGMEKIALPVTIENTRCQSQVNAYVSLDDPLAKGIHMSRLYTRLLELTTIKNINLADLKLTLMDFLTSHHDLSKHARIEIHSELYIERPALISKLSGWKSYPFVLSCQLLNDQFDAELKVEIPYSSTCPCSAALSRNIIQQRFESALQKQEIRLDQHDIMNWLSGTDAIAATPHSQRSFAILHFKLDQNIKHIPLILFINQAEQALMTPVQTAVKRIDEQAFAIANGQNLMFCEDALRRLYSTFIHHNSIKAFNFKVIHAESLHAHDAVAQGSWQW

SEQ ID NO: 3894 - protein, 184 aa, unidentified
  source 1..184: note = Acinetobacter proteolyticus
  REGION 1..184: note = tr|A0A1E7R9Z2|A0A1E7R9Z2_9GAMM GTP cyclohydrolase 1; OS = Acinetobacter proteolyticus OX=1776741 GN=folE PE=3 SV=1
MSMQQSYANILTAVGEDLNRPGLQDTPMRAAKAFSFLTSGYSKTLEEVTNSALFPSDNHEMVLVKNIEFYSLCEHHLLPFYGRVHIAYLPEGQVLGLSKFARITEMFARRLQVQENLTQQIAEAVAQVTQARGVAVVIDSAHMCMMMRGVGKQESTTRTVSFIGDFKTDKDTRREFLSAVPESY

SEQ ID NO: 3895 - protein, 184 aa, unidentified
  source 1..184: note = Acinetobacter puyangensis
  REGION 1..184: note = tr|A0A240EC24|A0A240EC24_9GAMM GTP cyclohydrolase 1; OS = Acinetobacter puyangensis OX=1096779 GN=folE PE=3 SV=1
MSMQQSYSDILTAIGEDLDRPGLKDTPIRAAKAFTFLTSGYQKDLKEVTNDAVFPSENREMVLVKNIEFYSLCEHHLLPFYGRVHIGYLPEGQVLGLSKFARITEMFARRLQIQENLTQQIAEAIVEVTGARGAAVVIDSAHMCMMMRGVGKQQSTTRTVCFLGELKNNEQARREFLSAVPESY

SEQ ID NO: 3896 - protein, 184 aa, unidentified
  source 1..184: note = Acinetobacter qingfengensis
  REGION 1..184: note = tr|A0A1E7RCG4|A0A1E7RCG4_9GAMM GTP cyclohydrolase 1; OS = Acinetobacter qingfengensis OX=1262585 GN=folE PE=3 SV=1
MSMQQSYSDILTAIGEDLERPGLKDTPIRAAKAMAYLTSGYQKSLIEVTNDAVFPSDNREMVLVKNIEFYSLCEHHLLPFYGRVHIAYLPEGNVLGLSKFARITEMFARRLQIQENLTQQIAEAIVEVTGARGAAVVIDSAHMCMMMRGVGKQHSTTRTVCFLGEMKDNEQARREFLNAVPENY

SEQ ID NO: 3897 - protein, 184 aa, Acinetobacter radioresistens
  REGION 1..184: note = tr|A0A3F3H2I1|A0A3F3H2I1_ACIRA GTP cyclohydrolase 1; OS = Acinetobacter radioresistens NIPH 2130 OX=1217674; GN = folE PE=3 SV=1
MSMQQSYANILTAVGEDLNRPGLKDTPMRAAKAFSYLTSGYSKTLEEVTNNAVFPSDNREMVLVKNIEFYSLCEHHLLPFYGRVHIAYLPEGNVLGLSKFARITEMFARRLQIQENLTQQIAEAVAEVTQARGVAVMIDSAHMCMMMRGVGKQESTTRTVSFIGDFKTDKEARREFLSAVPESY

SEQ ID NO: 3898 - protein, 184 aa, Acinetobacter radioresistens; identical to SEQ ID NO: 3897
  REGION 1..184: note = tr|A0A2T1J3K1|A0A2T1J3K1_ACIRA GTP cyclohydrolase 1; OS = Acinetobacter radioresistens OX=40216 GN=folE PE=3 SV=1

SEQ ID NO: 3899 - protein, 295 aa, Acinetobacter rudis
  REGION 1..295: note = tr|S3NWN3|S3NWN3_9GAMM GTP cyclohydrolase 1; OS = Acinetobacter rudis CIP 110305 OX=421052 GN=folE PE=3; SV = 1
MIEQSEFNLVLEKLADNLKATWSNKTISLYPAHFRLAAVINMLSLLGCKVKVATDINDADLILSFEDSDLGHLSLATKLATIHDLPVAVLPIQEECTLPWEVASDSFVELVSPVISNLLEVIADDPEREGLIETPLRVAKAWKTWVSGYEQDPAEILKVFEDGAEGCDEMVIVKDIPIYSKCEHHLADIFGTATIAYIPNGKVVGLSKLSRLAELYARRLQVQERMTNQIADALETHLGAKGVAVLIRARHMCMESRGLCQQGHHTITMAVRGLLLTDLKARGEFMHLANSLATA

SEQ ID NO: 3900 - protein, 301 aa, Acinetobacter rudis
  REGION 1..301: note = tr|S3N633|S3N633_9GAMM GTP cyclohydrolase FolE2; OS = Acinetobacter rudis CIP 110305 OX=421052 GN=folE2 PE=3; SV = 1
MTHTLLPDISTQSSSLTPPYPLNWVGMENITLPIYIQNIRYISQANAYVSLDDPQAKGIHMSRLYTRLLDICKIEDLTLDHIQQVLQDFLTSHQGLSSHAKIELQGNFHLEQPALISDLSGWKSYPFHLSAELKAQQFKASFAIEIGYSSTCPCSAALARDLIQKRFEDAVSLGKLKLNDVNQISTWLGTTDAIVATPHSQRSTAQLKFNLSPSMKSIPIQQFIQHAERALATPVQTAVKRVDEQAFALANGQNLMFCEDALRRLYHAFIDYPEITAFDFKVIHAESLHAHDAVAQGSWPC

SEQ ID NO: 3901 - protein, 184 aa, Acinetobacter schindleri
  REGION 1..184: note = tr|N8XWZ2|N8XWZ2_9GAMM GTP cyclohydrolase 1; OS = Acinetobacter schindleri NIPH 900 OX=1217675 GN=folE; PE = 3 SV=1
MTMQQSYANILTAVGEDLNRPGLKDTPVRAAKAFSYLTSGYSQTLEEVTNNAVFPSDNHEMVLVKNIEFYSLCEHHLLPFYGRVHIAYLPEGRVLGLSKFARITEMFARRLQIQENLTQQIAEAVAEVTSARGVAVVIDSAHMCMMMRGVGKQESTTRTVSFVGDFKTNKEERREFLSAVPEAY

SEQ ID NO: 3902 - protein, 184 aa, Acinetobacter schindleri
  REGION 1..184: note = tr|A0A1P8PIN2|A0A1P8PIN2_9GAMM GTP cyclohydrolase 1; OS = Acinetobacter schindleri OX=108981 GN=folE PE=3 SV=1
MTMQQSYANILTAVGEDLNRPGLKDTPVRAAKAFSYLTSGYSQTLEEVTNNAVFPSDNHEMVLVKNIEFYSLCEHHLLPFYGRVHIAYLPEGRVLGLSKFARITEMFARRLQIQENLTQQIAEAVAEVTGARGVAVVIDSAHMCMMMRGVGKQESTTRTVSFVGDFKTNKEERREFLSAVPEAY

SEQ ID NO: 3903 - protein, 184 aa, unidentified; identical to SEQ ID NO: 3844
  source 1..184: note = Acinetobacter seifertii
  REGION 1..184: note = tr|A0A1C2YLJ1|A0A1C2YLJ1_9GAMM GTP cyclohydrolase 1; OS = Acinetobacter seifertii OX=1530123 GN=folE PE=3 SV=1

SEQ ID NO: 3904 - protein, 300 aa, unidentified
  source 1..300: note = Acinetobacter seifertii
  REGION 1..300: note = tr|A0A2M8MFD4|A0A2M8MFD4_9GAMM GTP cyclohydrolase FolE2 OS=Acinetobacter seifertii OX=1530123 GN=folE2 PE=3; SV = 1
MNLDLPDISAEPNLPNAYSHRLDWVGMENIALPIRIENTLCSSHVNAYVSLDDPLAKGIHMSRLYTRLLELTSLENINMLDLKLVLEDFLESHQDLSQHAKIEIHSSLYIERPALVSKLSGWKSYPFVLSCQLSHDQFEAELKVEIPYSSTCPCSAALSRNIIQQRFESALQNQEIRLNPQDIIEWLNTTDAIAATPHSQRSFALLQFKLNQDFHEIPLIEFINQAELALMTPVQTAVKRVDEQAFAVANGQNLMFCEDALRRLYGSFIHHKYIHGFKFKVTHAESLHAHDAVAQGSWQW

SEQ ID NO: 3905 - protein, 294 aa, Acinetobacter soli
  REGION 1..294: note = tr|A0A1P8EGQ2|A0A1P8EGQ2_9GAMM GTP cyclohydrolase FolE2 OS=Acinetobacter soli OX=487316 GN=folE2 PE=3 SV=1
MNSTLPDVCVSQLPNDLIALKWVGMEGIDLPLSIQQFYYPLSAKVDIYVNLPKSDIKGIHMSRLYRLLNELHDLDASVIHSLLQDIISSHQDCGSDAAKIVLKFDLMLSRSALVSADLNGWKSYPVCIEAELINHKFQINYAVDVSYSSTCPCSAALSRQLIAQTFELQFKDTHTLPKSDVKQWLEEHATYATPHSQRSIAQIKIETDDAKQLINLTELIDKVEQALKTPTQTAVKRADEQAFAQLNGQNLMFVEDAARRLSSELDKTSLKWSIKVIHQESLHAHDAVAISMSS

SEQ ID NO: 3906 - protein, 197 aa, Acinetobacter soli
  REGION 1..197: note = tr|A0A1P8EFC7|A0A1P8EFC7_9GAMM GTP cyclohydrolase 1; OS = Acinetobacter soli OX=487316 GN=folE PE=3 SV=1
MPSLFSKVKSKRLMSMQQSYANILTAVGEDLNRPGLKDTPIRAAKAFSFLTSGYGKSLEEVTNNAVFPSDNHEMVLVKNIEFYSLCEHHLLPFYGRVHIAYLPEGQVLGLSKFARITEMFARRLQIQENLTQQIAQAVEEVTKARGVAVMIDSAHMCMMMRGVGKQESTTRTVSFIGDFKTDKEARREFLSAVPESY

SEQ ID NO: 3907 - protein, 184 aa, Acinetobacter sp.
  REGION 1..184: note = tr|A0A2H9UNY0|A0A2H9UNY0_9GAMM GTP cyclohydrolase 1; OS = Acinetobacter sp. ANC 5347 OX=2053290 GN=folE PE=3 SV=1
MTMQQSYANILTAVGEDLNRPGLKDTPVRAAKAFSYLTSGYSQTLEEVTNKAVFPSDNREMVLVKNIEFYSLCEHHLLPFYGRVHIAYLPEGHVLGLSKFARITEMFARRLQIQENLTQQIAEAVAEITKARGVAVMIDSAHMCMMMRGVGKQESTTRTVSFIGDFKTDKETRREFLSAVPESY

SEQ ID NO: 3908 - protein, 300 aa, Acinetobacter sp.; identical to SEQ ID NO: 3862
  REGION 1..300: note = tr|A0A3L9M543|A0A3L9M543_9GAMM GTP cyclohydrolase FolE2 OS=Acinetobacter sp. 2JN-4 OX=2479844 GN=folE2 PE=3; SV = 1

SEQ ID NO: 3909 - protein, 184 aa, Acinetobacter tandoii
  REGION 1..184: note = tr|A0A515BDE1|A0A515BDE1_9GAMM GTP cyclohydrolase 1; OS = Acinetobacter tandoii OX=202954 GN=folE PE=3 SV=1
MSMQQSYANILTAVGEDLNRPGLVDTPVRAAKAFSYLTSGYSKTLEEVTNKAVFPSDNREMVLVKNIEFYSLCEHHLLPFYGRVHIAYLPEGHVLGLSKFARITEMFARRLQIQENLTQQIAEAVAEVTQARGVAVVIDSAHMCMMMRGVGKQESTTRTVSFVGEFKTDKESRREFLSAVPESY

SEQ ID NO: 3910 - protein, 184 aa, Acinetobacter tandoii
  REGION 1..184: note = tr|R9AXR2|R9AXR2_9GAMM GTP cyclohydrolase 1; OS = Acinetobacter tandoii DSM 14970 = CIP 107469 OX=1120927; GN = folE PE=3 SV=1
MSMQQSYANILTAVGEDLNRPGLVDTPVRAAKAFSYLTSGYSKTLEEVTNKAVFPSDNREMVLVKNIEFYSLCEHHLLPFYGRVHIAYLPEGHVLGLSKFARITEMFARRLQIQENLTQQIAEAVAEVTQARGVAVVIDSAHMCMMMRGVGKQESTTRTVSFIGEFKTDKESRREFLSAVPESY

SEQ ID NO: 3911 - protein, 184 aa, Acinetobacter tjernbergiae; identical to SEQ ID NO: 3869
  REGION 1..184: note = tr|V2W2G2|V2W2G2_9GAMM GTP cyclohydrolase 1; OS = Acinetobacter tjernbergiae DSM 14971 = CIP 107465; OX = 1120928 GN=folE PE=3 SV=1

SEQ ID NO: 3912 - protein, 184 aa, Acinetobacter towneri
  REGION 1..184: note = tr|N9BAL1|N9BAL1_9GAMM GTP cyclohydrolase 1; OS = Acinetobacter towneri DSM 14962 = CIP 107472 OX=1120929; GN = folE PE=3 SV=1
MSMQQSYANILTAVGEDLNRPGLKDTPMRAAKAFSYLTSGYSQTLAEVTNNAVFPSDNREMVLVKNIEFYSLCEHHLLPFYGRVHIAYLPEGNVLGLSKFARITEMFARRLQIQENLTQQIAEAVAEVTKARGVAVVIDSAHMCMMMRGVGKQESTTRTVSFVGDFKTDKEARREFLSAVPESF

SEQ ID NO: 3913 - protein, 184 aa, Acinetobacter towneri; identical to SEQ ID NO: 3912
  REGION 1..184: note = tr|A0A1E8E1W5|A0A1E8E1W5_9GAMM GTP cyclohydrolase 1; OS = Acinetobacter towneri OX=202956 GN=folE PE=3 SV=1

SEQ ID NO: 3914 - protein, 184 aa, Acinetobacter ursingii
  REGION 1..184: note = tr|N9DAE7|N9DAE7_9GAMM GTP cyclohydrolase 1; OS = Acinetobacter ursingii ANC 3649 OX=1257043 GN=folE PE=3; SV = 1
MSMQQSYANILTAVGEDLNRPGLKDTPIRAAKAFSFLTSGYGKTLEEVTNSAVFPSDNHEMVLVKNIEFYSLCEHHLLPFYGRVHIAYLPEGKVLGLSKFARITEMFARRLQIQENLTQQIAEAVLEVTQARGVAVMIDSAHMCMMMRGVGKQESTTRTVSFLGDFKTDKEVRREFLSAVPESY

SEQ ID NO: 3915 - protein, 184 aa, Acinetobacter ursingii; identical to SEQ ID NO: 3914
  REGION 1..184: note = tr|N9S9Y8|N9S9Y8_9GAMM GTP cyclohydrolase 1; OS = Acinetobacter ursingii NIPH 706 OX=1217716 GN=folE PE=3; SV = 1

SEQ ID NO: 3916 - protein, 184 aa, unidentified
  source 1..184: note = Acinetobacter variabilis
  REGION 1..184: note = tr|N9MLR6|N9MLR6_9GAMM GTP cyclohydrolase 1; OS = Acinetobacter variabilis OX=70346 GN=folE PE=3 SV=1
MTMQQSYANILTAVGEDLNRPGLKDTPVRAAKAFSYLTSGYSQTLEEVTNSAVFPSDNREMVLVKNIEFYSLCEHHLLPFYGRVHIAYLPEGKVLGLSKFARITEMFARRLQIQENLTQQIAEAVAEVTNARGVAVMIDSAHMCMMMRGVGKQESTTRTVSFIGDFKTDKEVRREFLGAVPESY

SEQ ID NO: 3917 - protein, 184 aa, Acinetobacter venetianus
  REGION 1..184: note = tr|N8YIX1|N8YIX1_ACIVR GTP cyclohydrolase 1; OS = Acinetobacter venetianus (strain ATCC 31012 / CIP 110063 / RAG-1) OX=1191460 GN=folE PE=3 SV=1
MSMQQSYANILTAVGEDLNRPGLKDTPMRAAKAFSFLTSGYSKTLEEVTNSAVFPSDNHEMVLVKNIEFYSLCEHHLLPFYGRVHIAYLPEGQVLGLSKFARITEMFARRLQIQENLTQQIAEAVADVTKARGVAVVIDSAHMCMMMRGVGKQESTTRTVSFVGDFKTDKDARREFLSAVPESY

SEQ ID NO: 3918 - protein, 252 aa, Acinetobacter venetianus
  REGION 1..252: note = tr|A0A150HZE4|A0A150HZE4_9GAMM Putative GTP cyclohydrolase 1 type 2 OS=Acinetobacter venetianus; OX = 52133 GN=AVENLUH13518_00326 PE=4 SV=1
MANLHDIVQWCNQTLKANEFKDYAPNGLQIEGKAEVNKIVCAVTASEDAIDAAIAEKADALLVHHGYFWKGEAYPITGMRGNRIKKLIQNNISLIAYHLPLDAHPSLGNNVAIADLIGLQNLEALDPSEKHPIGNIAYLDQPLSPEQFKAKLQNIFDFGIIHLPCNKTLIQKVGFCTGGAQDFIAKAASENCDAYISGEVSERTFYEAKELGVHYFACGHHATERYGVQRLADALANQFMIEAVYLELNNPI

SEQ ID NO: 3919 - protein, 184 aa, unidentified
  source 1..184: note = Acinetobacter wuhouensis
  REGION 1..184: note = tr|A0A3G2T5G5|A0A3G2T5G5_9GAMM GTP cyclohydrolase 1; OS = Acinetobacter wuhouensis OX=1879050 GN=folE PE=3 SV=1
MSMQQSYANILTAVGEDLDRPGLKDTPMRAAKAFSYLTSGYSKTLEEVTNNAVFPSDNDEMVLVKNIEFYSLCEHHLLPFHGRVHIAYLPSGNVLGLSKFARITEMFARRLQIQEQLTKQIADAVAEVTDARGVAVVIDSAHMCMMMRGVSKQESTTRTVSFVGDFKTDKEARREFLSAVPEAH

SEQ ID NO: 3920 - protein, 184 aa, unidentified
  source 1..184: note = Acinetobacter wuhouensis
  REGION 1..184: note = tr|A0A385C361|A0A385C361_9GAMM GTP cyclohydrolase 1; OS = Acinetobacter wuhouensis OX=1879050 GN=folE PE=3 SV=1
MSMQQSYANILTAVGEDLDRPGLKDTPMRAAKAFSYLTSGYSKTLEEVTNNAVFPSDNDEMVLVKNIEFYSLCEHHLLPFHGRVHIAYLPSGNVLGLSKFARITEMFARRLQIQEQLTKQIADAVAEVTNARGVAVVIDSAHMCMMMRGVSKQESTTRTVSFVGDFKTDKEARREFLSAVPEAH

SEQ ID NO: 3921 - protein, 195 aa, unidentified
  source 1..195: note = Actibacterium atlanticum
  REGION 1..195: note = tr|A0A058ZI19|A0A058ZI19_9RHOB GTP cyclohydrolase 1; OS = Actibacterium atlanticum OX=1461693 GN=folE PE=3 SV=1
MNALESKVLSSQDEIEAAIETLLKALGEDPAREGLRDTPARVARMYREVFRGLHEDPLKHLETQFSADGHEELVIVKDITFFSMCEHHLLPFFGKAHIAYLPDGGRLAGLSKLARVTQTIAARPQLQERMSAQIADALEQALGARGVMVKLEAEHMCMAMRGARADGSKTVTLVTRGELSDNPERRAETLKLLQD

SEQ ID NO: 3922 - protein, 366 aa, unidentified
  source 1..366: note = Actibacterium mucosum
  REGION 1..366: note = tr|A0A037ZDI8|A0A037ZDI8_9RHOB GTP cyclohydrolase FolE2 OS=Actibacterium mucosum KCTC 23349 OX=1454373; GN = folE2 PE=3 SV=1
MTVQKPAKGKEDLDDMRAALARLRDWAAHASPEELAAVDPAVSRLVPGNALDNRPPMRRDYPQDFQADAAYRATLPDLQNGPESLIRGARKALQHVGISNFRLPIRYHTRDNGDLTLETSVTGTVSLDADRKGINMSRIMRSFYAHSERAFSFEVISTALDDYQRDLDSFDARIMMRFSFPVRRPSLRSGLSGFQYYDIALELSEHAGQRRKIMHLDYVYSSTCPCSLELSEHARAERGQLATPHSQRSVARISVAMKDDACRMWFEDLIDICRAAVPTETQVMVKREDEQAFAELNAANPIFVEDAVRLFAEGLAADDRIGDFRVVASHQESLHSHDAVSVVVEGDTFAQQSLDPQLFASLIHHG

SEQ ID NO: 3923 - protein, 200 aa, unidentified
  source 1..200: note = Actinoallomurus bryophytorum
  REGION 1..200: note = tr|A0A543BTF9|A0A543BTF9_9ACTN GTP cyclohydrolase 1; OS = Actinoallomurus bryophytorum OX=1490222 GN=folE PE=3; SV = 1
MPVRSTPALRVVGTDGGIDLVEAERAAGEFLRALGVSTESESVRGTPGRMARAYAELFSPRAFDLTTFPNDEGYDELVLARDIPLRSVCEHHLLPFVGTIHIGYLPAERILGLSKLARVAEHFSYRPQVQERLTKQIADWLAEQLAPRGVGVVVEAEHTCMTLRGVQATGSRTVTSTLLGTLREDPRSRAEFFALTGVGP

SEQ ID NO: 3924 - protein, 198 aa, unidentified
  source 1..198: note = Actinoallomurus bryophytorum
  REGION 1..198: note = tr|A0A543CIK4|A0A543CIK4_9ACTN GTP cyclohydrolase 1; OS = Actinoallomurus bryophytorum OX=1490222 GN=folE PE=3; SV = 1
MNPAPESHGPPIDQARVEKAVREILIAVGEDPDRDGLVDTPARVARAYAEQLAGMRQRPEDVLNTVFDAGHDEMVIVKDIEVYSLCEHHLVPFHGVAHVGYTPNAKGQITGLSKLARLVDVYARRPQVQERMTSQIADALVDVLQPRGVIVVVEAEHLCMTMRGVRKPGAKTLTSAVRGDFRDEPSTRAEAMSLILGR

SEQ ID NO: 3925 - protein, 285 aa, unidentified
  source 1..285: note = Actinoalloteichus hoggarensis
  REGION 1..285: note = tr|A0A221W9B4|A0A221W9B4_9PSEU Putative GTP cyclohydrolase 1 type 2 OS=Actinoalloteichus hoggarensis; OX = 1470176 GN=AHOG_23210 PE=4 SV=1
MSATVADVVTALERAYPPEYAEDWDAIGLVCGDPASPVDRVLVCVDPTEDTVSEALELGAGLIVAHHPLLLRGVHGVPADQPKGRLIHRMLLGGVALYCAHTNADSAVPGVSDALAEAIGLRVTGALRPHRGATAETPLLGLGRVGELARPEPFSRFVRRVADALPTTSWGVRASGDPERPIRRVAVSGGAGDGFLSTAAALGVDAYVTSDLRHHPASEHAALSTVPGGRAPALVDVAHWAGEWPWCGQAAEVVRTATQSTVEVHVSQRRTDPWNLHEPGDRSRT

SEQ ID NO: 3926 - protein, 209 aa, unidentified
  source 1..209: note = Actinoalloteichus hoggarensis
  REGION 1..209: note = tr|A0A221VWU3|A0A221VWU3_9PSEU GTP cyclohydrolase 1; OS = Actinoalloteichus hoggarensis OX=1470176 GN=folE PE=3; SV = 1
MTDLISRPERGESESGSPARPVFDRARAEAAVRELLLACGEDPDREGLQETPARVARAYQEMFAGLFTDPDAVLDKTFDEGHDELVLVSDIPVYSYCEHHLLPFHGSAHVGYIPNKEGRVTGLSKLARVVDLYARRPQVQERLTSQVADALVRKLNPRGVIVVMEAEHLCMSMRGVRKPGARTTTSAVRGLLRSSPSSRAEALDLIRRQ

SEQ ID NO: 3927 - protein, 209 aa, Actinoalloteichus hymeniacidonis
  REGION 1..209: note = tr|A0A1D8BQW0|A0A1D8BQW0_9PSEU GTP cyclohydrolase 1; OS = Actinoalloteichus hymeniacidonis OX=340345 GN=folE PE=3; SV = 1
MTDLINENGQAEAGARPSSRPAFDQPRAEAAVRELLLACGEDPDREGLRDTPARVGRAYQEMFAGLFTDPDEVLDKTFDEGHDEMVLVTDIPIYSYCEHHLLPFHGSAHVGYIPNQQGRVTGLSKLARVVDLYARRPQVQERLTSQVADALVRKLDPRGVIVVIEAEHLCMSMRGVRKPGARTTTSAVRGLFRSSPSSRAEALDLIRGH

SEQ ID NO: 3928 - protein, 209 aa, Actinoalloteichus sp.
  REGION 1..209: note = tr|A0A1L7F0H8|A0A1L7F0H8_9PSEU GTP cyclohydrolase 1; OS = Actinoalloteichus sp. GBA129-24 OX=1612551 GN=folE PE=3; SV = 1
MTDLISEYDTVGQASDSSARPAFDRTRAEAAVRELLLACGEDPDREGLQETPARVARAYQEMFAGLFTDPDAVLDKTFDEGHDELVLVTDIPVYSYCEHHLLPFHGSAHVGYIPNTEGRVTGLSKLARVVDLYARRPQVQERLTSQVADALVRKLNPRGVIVVMEAEHLCMSMRGVRKPGARTTTSAVRGLLRSSPSSRAEALDLIRRH

SEQ ID NO: 3929 - protein, 219 aa, Actinobacillus delphinicola
  REGION 1..219: note = tr|A0A448TRM1|A0A448TRM1_9PAST GTP cyclohydrolase 1; OS = Actinobacillus delphinicola OX=51161 GN=folE PE=3 SV=1
MQDISVEAAQVKRALAEQGLETPMLPQDKTKNERRNEIQQKMQEVLTLIGLDLSDDSLQETPKRLAKMYIDEIFSGLDYQNFPKITKIKNAMKVSERVQVNDITLTTTCEHHFVTIDGTVAIAYYPAKWVIGLSKLNRIVDFFAKRPQVQERFTEQLLVALQTILETQDVAIYVNAAHYCVKGRGIQDSNSYTITSAYGGVFLNDREERKEFLACVRHK

SEQ ID NO: 3930 - protein, 87 aa, Actinobacillus equuli
  REGION 1..87: note = tr|A0A448QPA8|A0A448QPA8_ACTEU GTP cyclohydrolase I; OS = Actinobacillus equuli OX=718 GN=folE_1 PE=4 SV=1
MSIISAEAQKVREALIAKGIETPTIQLTKDKDSRRAEIQQHMRSVMELLGLDLQDDSLEETPHRLAKMYVDEILAAWIMRLSQNYQY

SEQ ID NO: 3931 - protein, 218 aa, Actinobacillus equuli
  REGION 1..218: note = tr|A0A0A7MDS9|A0A0A7MDS9_ACTEU GTP cyclohydrolase 1; OS = Actinobacillus equuli subsp. equuli OX=202947 GN=folE; PE = 3 SV=1
MSIISAEAQKVREALIAKGIETPTIQLTKDKDSRRAEIQQHMRSVMELLGLDLQDDSLEETPHRLAKMYVDEIFSGLDYATFPKITNIENRMKVSEMVLVDDITLTSTCEHHFVTIDGKVAVAYYPKKWVIGLSKINRVVQFFAQRPQVQERFTEQILTAFQTILETEDVAVYVKATHFCVKCRGVKDTNSYTVTSAFGGAFLEDRETRKEFLGLINK

SEQ ID NO: 3932 - protein, 218 aa, Actinobacillus indolicus
  REGION 1..218: note = tr|A0A4V1AXT9|A0A4V1AXT9_9PAST GTP cyclohydrolase 1; OS = Actinobacillus indolicus OX=51049 GN=folE PE=3 SV=1
MSNISPEAQSVRDALLAKGIETPTVAHQKDKDSRRSEIQQHMRSVLELLGLDLRDDSLEETPHRLAKMYVDEIFSGLDYETFPKITKIKNQMKVSEMVLVDDITLTSTCEHHFVTIDGKVAVAYYPKDWVIGLSKINRVVQFFAQRPQVQERFTEQILTAFQTILETEDVAVYVKATHFCVKCRGVKDTHSQTMTSAFGGVFLQDRETRKEFLSLISK

SEQ ID NO: 3933 - protein, 218 aa, Actinobacillus indolicus
  REGION 1..218: note = tr|A0A4V0IF43|A0A4V0IF43_9PAST GTP cyclohydrolase 1; OS = Actinobacillus indolicus OX=51049 GN=folE PE=3 SV=1
MSKISPEAQSVRDALLAKGIETPTVAHQKDKDSRRSEIQQHMRAVLELLGLDLRDDSLEETPHRLAKMYVDEIFSGLDYETFPKITKIKNQMKVSEMVLVDDITLTSTCEHHFVTIDGKVAVAYYPKDWVIGLSKINRVVQFFAQRPQVQERFTEQILTAFQTILETEDVAVYVKATHFCVKCRGVKDTHSQTMTSAFGGVFLQDRETRKEFLSLINK

SEQ ID NO: 3934 - protein, 218 aa, Actinobacillus lignieresii
  REGION 1..218: note = tr|A0A380TS51|A0A380TS51_ACTLI GTP cyclohydrolase 1; OS = Actinobacillus lignieresii OX=720 GN=folE PE=3 SV=1
MSIISAEAQKVREALIAKGIETPTVQLTKDKDSRRAEIQQHMRSVLELLGLDLQDDSLEETPHRLAKMYVDEIFSGLDYATFPKITNIENRMKVSEMVLVDDITLTSTCEHHFVTIDGKVAVAYYPKKWVIGLSKINRVVQFFAQRPQVQERFTEQILTAFQTILETDDVAVFVKATHFCVKCRGVKDTNSYTVTSAFGGVFLEDRETRKEFLGLINK

SEQ ID NO: 3935 - protein, 221 aa, Actinobacillus minor
  REGION 1..221: note = tr|C5S0U7|C5S0U7_9PAST GTP cyclohydrolase 1; OS = Actinobacillus minor NM305 OX=637911 GN=folE PE=3 SV=1
MTTISPISEEAQKVRKALIAKGIETPTIALTKDKSTRRAEIQAHFRSVMELLGLDLSDDSLEETPQRLAKMYVDEIFSGLDYATFPKITNIENRMKVSEMVLVDDITLTSTCEHHFVTIDGKVAVAYYPKKWVIGLSKINRVVQFFAQRPQVQERFTEQILTAFQTILETEDVAVYVKATHFCVKCRGVKDTNSYTVTSAFGGVFLEDRETRKEFLSLINK

SEQ ID NO: 3936 - protein, 218 aa, Actinobacillus pleuropneumoniae; identical to SEQ ID NO: 3934
  REGION 1..218: note = sp|B3GXP9|GCH1_ACTP7 GTP cyclohydrolase 1; OS = Actinobacillus pleuropneumoniae serotype 7 (strain AP76) OX=537457 GN=folE PE=3 SV=1

SEQ ID NO: 3937 - protein, 218 aa, Actinobacillus pleuropneumoniae; identical to SEQ ID NO: 3934
  REGION 1..218: note = tr|A0A223MH42|A0A223MH42_ACTPL GTP cyclohydrolase 1; OS = Actinobacillus pleuropneumoniae OX=715 GN=folE PE=3 SV=1

SEQ ID NO: 3938 - protein, 217 aa, Actinobacillus porcinus
  REGION 1..217: note = tr|A0A4V0IE75|A0A4V0IE75_9PAST GTP cyclohydrolase 1; OS = Actinobacillus porcinus OX=51048 GN=folE PE=3 SV=1
MAISAEAEKVRAALIEKGIETPMKTLRMAKDERRTEIQQKMREVMELIGLDLTDDSLEETPTRLAKMYVDEIFSGLDYANFPKITNIENRMKVSEMVLVNDVTLTSTCEHHFVTIDGLVSVAYYPKKWVIGLSKINRVVQFFAQRPQVQERLTEQILLAFQTILETEDVAVYMKATHFCVKCRGIKDTNSYTVTSAFGGVFLDDRETRKEFLSLINK

SEQ ID NO: 3939 - protein, 221 aa, unidentified; identical to SEQ ID NO: 3935
  source 1..221: note = Actinobacillus porcitonsillarum
  REGION 1..221: note = tr|A0A2U8FKX6|A0A2U8FKX6_9PAST GTP cyclohydrolase 1; OS = Actinobacillus porcitonsillarum OX=189834 GN=folE PE=3; SV = 1

SEQ ID NO: 3940 - protein, 217 aa, unidentified
  source 1..217: note = [Actinobacillus] rossii
  REGION 1..217: note = tr|A0A380TVW8|A0A380TVW8_9PAST GTP cyclohydrolase 1; OS = [Actinobacillus] rossii OX=123820 GN=folE PE=3 SV=1
MTISAEANKVRAALVEKGIETPMMKLRAPKDERRTAIQQKMREVMELIGLDLTDDSLEETPVRLAKMYVDEIFSGLDYENFPKITNIENRMKVSEMVLINDVTLTSTCEHHFVTIDGLVSVAYYPKKWVIGLSKINRVVQFFAQRPQVQERLTEQILLAFQTILETDDVAVYMKATHFCVKCRGIKDSNSYTVTSAFGGVFLEDRETRKEFLSLINK

SEQ ID NO: 3941 - protein, 217 aa, Actinobacillus seminis
  REGION 1..217: note = tr|A0A263HB77|A0A263HB77_9PAST GTP cyclohydrolase 1; OS = Actinobacillus seminis OX=722 GN=folE PE=3 SV=1
MDSILPEAKKVREALIAKGIETPMIAPQQSKDERRVGIEQHMREVMKLIGLDLRDDSLEETPARLAKMFIDEIFSGLDYANFPKITNIENRMKVSEMVLVNDVTLTSTCEHHFVTIDGMVSVAYYPKKWVIGLSKINRVISFFAQRPQVQERLTEQILLAFQTILETEDVAVYVKATHFCVKCRGIKDTNSYTVTSAFGGVFLDDRETRKEFLTLIR

SEQ ID NO: 3942 - protein, 217 aa, Actinobacillus succinogenes
  REGION 1..217: note = tr|A6VNV8|A6VNV8_ACTSZ GTP cyclohydrolase 1; OS = Actinobacillus succinogenes (strain ATCC 55618 / DSM 22257 / 130Z) OX=339671 GN=folE PE=3 SV=1
MTISAEAKKVRNALIEKGIETPMVEFQQNKNERRTAIQQKMREVMELIGLDLRDDSLEETPVRLAKMYVDEIFSGLDYANFPKITNIENRMKVSEMVLVNDVTLTSTCEHHFVTIDGLVSVAYYPKKWVIGLSKINRVVQFFAQRPQVQERLTEQVLLAFQTILETDDVAVYMKATHFCVKCRGIKDSNSYTVTSAFGGVFLEDRETRKEFLSLVNK

SEQ ID NO: 3943 - protein, 218 aa, Actinobacillus suis; identical to SEQ ID NO: 3931
  REGION 1..218: note = tr|K0G2X7|K0G2X7_ACTSU GTP cyclohydrolase 1; OS = Actinobacillus suis H91-0380 OX=696748 GN=folE PE=3 SV=1

SEQ ID NO: 3944 - protein, 218 aa, Actinobacillus ureae
  REGION 1..218: note = tr|E8KHW2|E8KHW2_9PAST GTP cyclohydrolase 1; OS = Actinobacillus ureae ATCC 25976 OX=887324 GN=folE PE=3; SV = 1
MSIISEEAQKVREALIAKGIETPTIQLTKDKDSRRAEIQQHMRSVMELLGLDLQDDSLEETPHRLAKMYVDEIFSGLDYATFPKITNIENRMKVSEMVLVDDITLTSTCEHHFVTIDGKVAVAYYPKKWVIGLSKINRVVQFFAQRPQVQERFTEQILTAFQTILETEDVAVYVKATHFCVKCRGVKDTNSYTVTSAFGGAFLEDRETRREFLGLINK

SEQ ID NO: 3945 - protein, 201 aa, unidentified
  source 1..201: note = Actinobacteria bacterium
  REGION 1..201: note = tr|A0A0N1NPU4|A0A0N1NPU4_9ACTN GTP cyclohydrolase 1; OS = Actinobacteria bacterium OV320 OX=1592329 GN=folE PE=3; SV = 1
MTDPVTLDGEGAIGEFDEKRAENAVRELLIAVGEDPDREGLRETPARVARAYKEIFAGLWQQPEDVLTTTFDLGHDEMVLVKDIEVFSTCEHHLVPFRGVAHVGYIPSTTGKITGLSKLARLVDVYARRPQVQERLTTQIADSLMEILEPRGVIVVIECEHMCMSMRGIRKPGAKTITSAVRGQLRDAATRNEAMSLIMAR

SEQ ID NO: 3946 - protein, 207 aa, unidentified
  source 1..207: note = Actinobacteria bacterium
  REGION 1..207: note = tr|A0A2N3G2J8|A0A2N3G2J8_9ACTN GTP cyclohydrolase 1; OS = Actinobacteria bacterium HGW-Actinobacteria-4; OX = 2013649 GN=folE PE=3 SV=1
MTDSTLPNAVAGAQDTPPATAVDRPRIEAAVREILAAVGENPDRDGLRDTPARVARAYEEFFAGLSQDPADVLSAVFELGHEEMILVKDIELYSTCEHHLVPFHGVAHVGYIPGEDGRITGLSKLARLVDVFAKRPQVQERLTTQVADALVKHLGARGVIVVIEAEHLCMSMRGVRKPGSRTVTSAVRGVMRDGATRAEAMSLILGK

SEQ ID NO: 3947 - protein, 213 aa, unidentified
  source 1..213: note = Unknown
  REGION 1..213: note = tr|A0A094Q967|A0A094Q967_9ACTN GTP cyclohydrolase 1; OS = actinobacterium acAMD-2 OX=1504318 GN=folE PE=3 SV=1
MTDRLVEQAASIDPVTDLVSDFRDVPAFDQERAEKAVRELLLAVGEDPDRDGLLDTPARVARAYQELFAGMHQKPEDVLATTFDLGHHELVIVKDIELYSTCEHHLVPFFGRAHVGYLPNAEGRITGLSKLARLVDVFAKRPQVQERLTSQVADSLMRVLAPEGVIVVVECEHLCMSMRGIRKPGATTITSAVRGVFADPALRSEAMTLIRGH

SEQ ID NO: 3948 - protein, 208 aa, unidentified
  source 1..208: note = Unknown
  REGION 1..208: note = tr|A0A094PD44|A0A094PD44_9ACTN GTP cyclohydrolase 1; OS = actinobacterium acAMD-5 OX=1504319 GN=folE PE=3 SV=1
MAEDISPIDKVSLNSDDLDIKNFDAARIEAAVRELLLGIGEDPDRDGLKNTPSRVARSYAEIFGGLHREPAEVLTTTFDLGHEELVLVRDIEVYSVCEHHLLPFFGVAHVGYLPGFAGKITGLSKIARVVDLFAKRPQVQERLTTQIADALESMLDPAGVIVILECEHLCMSMRGIKKTNAKTITSTARGALKEEPARAEALRLIRNF

SEQ ID NO: 3949 - protein, 102 aa, unidentified
  source 1..102: note = Unknown
  REGION 1..102: note = tr|A0A094Q5H7|A0A094Q5H7_9ACTN GTP cyclohydrolase 1 (Fragment) OS=actinobacterium acIB-AMD-7 OX=1504322; GN = GM48_1870 PE=3 SV=1
AHIGYIPGESGRITGISKLARVVDLYARRPQVQERLTSQIADALVEILQPGGVIVIIDCEHLCMSMRGVRKSQARTTTSAVRGQLLNPATRAEAISLINQSR

SEQ ID NO: 3950 - protein, 206 aa, unidentified
  source 1..206: note = Unknown
  REGION 1..206: note = tr|A0A094Q2C3|A0A094Q2C3_9ACTN GTP cyclohydrolase 1; OS = actinobacterium acIB-AMD-7 OX=1504322 GN=folE PE=3 SV=1
MSEINSVSMGPHDGGAKKEFDQARAEKAVTELLHAIGEDPDREGLKDTPKRVAKALAENFAGLWQKPEDVLTTTFDIGHQELVIVREIEVFSHCEHHLTPFHGVAHIGYIPGESGRITGISKLARVVDLYARRPQVQERLTSQIADALVEILQPGGVIVIIDCEHLCMSMRGVRKSQARTTTSAVRGQLLNPTTRAEAISLINQSR

SEQ ID NO: 3951 - protein, 198 aa, unidentified
  source 1..198: note = Unknown
  REGION 1..198: note = tr|A0A094PRV6|A0A094PRV6_9ACTN GTP cyclohydrolase 1; OS = actinobacterium acMicro-4 OX=1504317 GN=GM43_4295 PE=3; SV = 1
MTPPTVIVDSEALTRAVHDILVAVGEDPRREGLVNTPERVAELFTELYSGVGVDPVGVLVDARPVATEDNERGELVAMRDISFHSLCEHHLLPFDGVVSVVYAPGDRIVGLGTLVTLVEVISRRPQLQERVGEMIVHSLVSSGVAVGALALISAVHGCVAYRGPQQKLTTITVAAEGTLAKGTARHEALMLAGGEDWA

SEQ ID NO: 3952 - protein, 206 aa, unidentified
  source 1..206: note = Unknown
  REGION 1..206: note = tr|J9DTQ6|J9DTQ6_9ACTN GTP cyclohydrolase 1; OS = actinobacterium SCGC AAA027-L06 OX=913338 GN=folE PE=3; SV = 1
MSEVNSVSMGPHDGGAAKEFDQARAEKAVTELLHALGEDPNRDGLKDTPKRVAKALAENFAGLWQKPEDVLTTTFDIGHKELVIVREIEVFSHCEHHLTPFHGVAHIGYIPGESGRITGISKLARVVDLYARRPQVQERLTSQIADALVEILQPGGVIVIIDCEHLCMSMRGVRKSQARTTTSAVRGQLLNPATRAEAISLINQSR

SEQ ID NO: 3953 - protein, 208 aa, Actinobaculum massiliense
  REGION 1..208: note = tr|K9EII2|K9EII2_9ACTO GTP cyclohydrolase 1; OS = Actinobaculum massiliense ACS-171-V-Col2 OX=883066; GN = folE PE=3 SV=1
MNKADVASDAAGVAAPGAVPTAAREAKIAAAVREILVAIGEDPERDGLRETPARIARAMSEVFAGIGHDPDAVLDAQFDVGFHEMVIVRDIGFYSVCEHHLLPFFGTASVAYIPGKEGKVTGLSKLARLVKGYAARPQVQERLTTQIAEALMSRLSAAGALVVIKAEHMCMTMRGVKSPGAQTVTSAVRGQLRNSSTRAEAMSLIEGS

SEQ ID NO: 3954 - protein, 277 aa, Actinobaculum sp.
  REGION 1..277: note = tr|U1RGG0|U1RGG0_9ACTO GTP cyclohydrolase 1; OS = Actinobaculum sp. oral taxon 183 str. F0552 OX=1227261; GN = folE PE=3 SV=1
MCPTDRTPRTAPPELPDGPGKARRGPIVGEAPGRPSDSPGLDSCEHGFPESGESDSPRQARSACDAGEPELREPRGGGRVPAESAGGSGVRSYDEAGVVEAVRALLLAVGEDPAREGLAGTPERLARAYREMFAGLHEDPAEALDAQFDIGHQEMVLVRDIPMYSTCEHHLLPFHGVAHVAYIPGAEGRVTGLSKLARLVEGYARRPQIQERLTSQVADALAKRLEARGVMVVVEAEHLCMSMRGVRKPGSRTVTSAVRGVLRNQATRAEALSLMRA

SEQ ID NO: 3955 - protein, 197 aa, Actinobaculum sp.
  REGION 1..197: note = tr|A0A430JLX4|A0A430JLX4_9ACTO GTP cyclohydrolase 1; OS = Actinobaculum sp. 352 OX=2490946 GN=folE PE=3 SV=1
MTDTPAGAVRAYDEERVRRAVRDLLFAIGENPERDGLRDTPERIARAWREMLSGLHSDPDEVLEAQFDIGHQEMVLVKDIPLYSLCEHHLLPFHGVAHVAYIPGVDGKVTGLSKLARLVEGYARRPQVQERLTSQVADALVRKLGARGVIVVVEAEHLCMSMRGVRKPGARTITSAVRGIMRNSATRAEAMSLINSQ

SEQ ID NO: 3956 - protein, 228 aa, Actinobaculum suis
  REGION 1..228: note = tr|A0A1G7CA90|A0A1G7CA90_9ACTO GTP cyclohydrolase 1; OS = Actinobaculum suis OX=1657 GN=folE PE=3 SV=1
MPKKNQQEPGPKTHGAARQGEPAPAAAAKPGAPQNAYTGTRPVDGPRIEAAVREILRGIGEDPDREGLRDTPGRIARAMAEVFAGIGHDPDVVLDAQFDVGFHEMVIVRDIEFQSVCEHHMLPFYGTAAVVYIPGPAGKVTGLSKLARLVQGYARRLQVQERLTTQIADALMHRLGAAGALVIIKAEHMCMTMRGVRSQGATTVTSAVRGQLRKASTRAEAMSLIEGT

SEQ ID NO: 3957 - protein, 181 aa, Actinobaculum suis
  REGION 1..181: note = tr|A0A0K9ERW0|A0A0K9ERW0_9ACTO GTP cyclohydrolase 1; OS = Actinobaculum suis OX=1657 GN=folE PE=3 SV=1
MEAAVREILRGIGEDPDREGLRDTPGRIARAMAEVFAGIGHDPDVVLDAQFDVGFHEMVIVRDIEFQSVCEHHMLPFYGTAAVAYIPGPAGKVTGLSKLARLVQGYARRLQVQERLTTQIADALMHRLGAAGALVIIKAEHMCMTMRGVRSQGATTVTSAVRGQLRKASTRAEAMSLIEGT

SEQ ID NO: 3958 - protein, 194 aa, Actinocorallia herbida
  REGION 1..194: note = tr|A0A3N1DA45|A0A3N1DA45_9ACTN GTP cyclohydrolase 1; OS = Actinocorallia herbida OX=58109 GN=folE PE=3 SV=1
MTAAPGFDHARIEKAVREILYAIGEDPDRDGLRATPARVARAYAEHFAGLAMGPEDALTTSFEADHDEMVLVKDIELYSTCEHHLVPFHGVAHVGYTPGEKGQITGLSKLARLVDVYARRPQVQERLTSQVADALMEHLQPRGVIVVVEAEHLCMTMRGVRKPGAKTITSAVRGDFRNSAETRAEAMSLILGRS

SEQ ID NO: 3959 - protein, 201 aa, unidentified
  source 1..201: note = Actinocrispum wychmicini
  REGION 1..201: note = tr|A0A4R2JMV6|A0A4R2JMV6_9PSEU GTP cyclohydrolase 1; OS = Actinocrispum wychmicini OX=1213861 GN=folE PE=3 SV=1
MAATTGSHSVRRVFDQERAEKAVRELLLACGENPDREGLADTPSRVARAYREMFAGLYMDPDSVLAKTFDESHEELVLVTDIPIYSFCEHHLLPFHGVAHVGYIPNEHGKVTGLSKVARLVDAYAKRPQVQERLTSQIADSLVRTLQPRGVIVVIEAEHLCMAMRGVRKPGSRTTTSAVRGQFKTSASSRAEALDLIKARR

SEQ ID NO: 3960 - protein, 201 aa, unidentified
  source 1..201: note = Actinocrispum wychmicini
  REGION 1..201: note = tr|A0A4R2IWP5|A0A4R2IWP5_9PSEU GTP cyclohydrolase 1; OS = Actinocrispum wychmicini OX=1213861 GN=folE PE=3 SV=1
MIASNTDTTAPQGFADACVAVRTLLRFAGYDPDQPVIRDTPDRVARALADMTAGYREDPRVYLERVFPEQGADGMVVVSGIRFASLCEHHMLPFSGTATVGYVPRDGRLLGLSKLPRLVGVFARRLQVQERLTAQIARTIHEDLPAEGAACVVSATHTCVSVRGVTQPHAVTMTRAWAGSFRDDPEARLEFLGRAESTPDW

SEQ ID NO: 3961 - protein, 204 aa, Actinokineospora auranticolor
  REGION 1..204: note = tr|A0A2S6GDY4|A0A2S6GDY4_9PSEU GTP cyclohydrolase 1; OS = Actinokineospora auranticolor OX=155976 GN=folE PE=3; SV = 1
MTDVLDSTVLNGSQAPPGRVDSDRVADLVGQLLVVIGEDPAREGLADTPARVAAWWGEFFSADAAVPTCFTEQYLSDQLVVVGGVSVWSLCEHHLLPMNLNVTAGYVPDGQVIGLSKFGRVAQRYAGRLQVQERFTRQVADEIALAIGGSNVAVAVHGTHLCMSARGVRMEAARTTTVDTRGRFGADPVLSQQFLAIATDRRNL

SEQ ID NO: 3962 - protein, 206 aa, Actinokineospora auranticolor
  REGION 1..206: note = tr|A0A2S6GE98|A0A2S6GE98_9PSEU GTP cyclohydrolase 1; OS = Actinokineospora auranticolor OX=155976 GN=folE PE=3; SV = 1
MMTSRNGAGTDTVPASAFDRDRAERAVRELLLACGEDPDREGLLETPARVARAYAELFAGLYTEPDAVLDKTFDESHGELVLVTDIPMYSTCEHHLVPFHGVAHVGYIPNEQGRVTGLSKLARLVDLYAKRPQVQERLTSQIADALVRKLEPRGVVVVIEAEHLCMSMRGIRKPGARTTTSALRGLHKTSPSTRAEALQLINGRRR

SEQ ID NO: 3963 - protein, 207 aa, unidentified
  source 1..207: note = Actinokineospora bangkokensis
  REGION 1..207: note = tr|A0A1Q9LCJ5|A0A1Q9LCJ5_9PSEU GTP cyclohydrolase 1; OS = Actinokineospora bangkokensis OX=1193682 GN=folE PE=3; SV = 1
MTTTTDGLGADATAPSPAFDQDRAERAVRELLLACGEDPDREGLLETPARVARAYAELFAGLYTDPEQVLDKTFDVSHEELVLVTDIPMYSTCEHHLVPFHGVAHVGYIPALTGRVTGLSKLARLVDLYAKRPQVQERLTSQVADAVVRKLDARGAIVVIEAEHLCMAMRGIRKPGARTTTSALRGIFQTSASSRAEAMQLINGRTR

SEQ ID NO: 3964 - protein, 374 aa, Actinokineospora cianjurensis
  REGION 1..374: note = tr|A0A421B618|A0A421B618_9PSEU GTP cyclohydrolase 1; OS = Actinokineospora cianjurensis OX=585224 GN=folE PE=3; SV = 1
MTTSRDRVGTFSTREDVPTPAFDQDRAEKAIRELLLACGEDPDREGLLETPARVARAYAELFAGLYTEPDSVLDKTFDESHDELILVTDIPMYSTCVPHGQPVDAVGGPRAAQDIRVGDPLWTLVDGRRVETSVIGVTAKRSRDLVEVSTGAGVFTVTGDHPLATPHGWAEAKDVAGSHVEWTGIAAPARELVTAGAPGQDAEWLLRHGFARDGHTTTLGQSQWVRVESVRAVAAEATVYSLTCDPHPTFLIGGHLTHNCEHHLVPFHGHAHVGYIPNEKGNVTGLSKLARLVDLYAKRPQVQERLTSQVADALVRKLQPRGVIVVIEAEHLCMAMRGIRKPGARTTTSALRGLLKSSPSTRAEAIQLINGRSR

SEQ ID NO: 3965 - protein, 206 aa, unidentified
  source 1..206: note = Actinokineospora mzabensis
  REGION 1..206: note = tr|A0A317S9Z6|A0A317S9Z6_9PSEU GTP cyclohydrolase 1; OS = Actinokineospora mzabensis OX=1470177 GN=folE PE=3 SV=1
MTTTNNGAGTAAVPAPAFDPARAENAVRELLLACGEDPDREGLRETPARVARAYAELFAGLYTEPDAVLDKTFDVSHEELVLVTDIPMYSTCEHHLVPFHGVAHVGYIPALTGRVTGLSKLARLVDLYAKRPQVQERLTSQVADAVMRKLDARGAIVVIEAEHLCMAMRGVRKPGARTVTSALRGQFKTSASSRAEAMQLINGRSR

SEQ ID NO: 3966 - protein, 206 aa, unidentified; identical to SEQ ID NO: 3965
  source 1..206: note = Actinokineospora spheciospongiae
  REGION 1..206: note = tr|W7IS27|W7IS27_9PSEU GTP cyclohydrolase 1; OS = Actinokineospora spheciospongiae OX=909613 GN=folE PE=3; SV = 1

SEQ ID NO: 3967 - protein, 259 aa, unidentified
  source 1..259: note = Actinokineospora spheciospongiae
  REGION 1..259: note = tr|W7IJZ9|W7IJZ9_9PSEU GTP cyclohydrolase I type 2; OS = Actinokineospora spheciospongiae OX=909613 GN=UO65_3541; PE = 4 SV=1
MQNEFDRRGISVDQVGITGLRYPVAFDDGEVQQSAIADFTVTVRLQPERRGTHMSRMVALVHEHLQVLDPRRLPQVLKIGMDELEAPSIEITAGFSLTRTVTAPASHRESITVHDVAIIASLDDASCAVTSAVRSEVTSLCPCSKTISDYGAHNQRSQITLAVQGTADDPYPLPARTALDLLDGTGSAPVIPLVKRSDERVLTMQAYDHPAFVEDMAREVAGACRSRGLAHEVRVRNFESIHSHDAVATINGGASRGWL

SEQ ID NO: 3968 - protein, 374 aa, Actinokineospora terrae
  REGION 1..374: note = tr|A0A1H9U9Q8|A0A1H9U9Q8_9PSEU GTP cyclohydrolase 1; OS = Actinokineospora terrae OX=155974 GN=folE PE=3 SV=1
MTTSRDRVGTFSTREDVPTPAFDQDRAEKAIRELLLACGEDPDREGLLETPARVARAYAELFAGLYTEPDSVLDKTFDESHDELILVTDIPMYSTCVPHGQPVDAVGGPRAAQDIRVGDPLWTLVDGRRVRTSVIGVTAKRSRELVEVSTSAGVFTVTGDHPLATPHGWAEAKDVAGSHVEWTGIAAPARELVTAGAPGHDADWLLRHGFARDEHTTTLGQSQWVRVESVRAVAGEATVYSLTCDPHPTFLIGGHLTHNCEHHLVPFHGHAHVGYIPNEKGNVTGLSKLARLVDLYAKRPQVQERLTSQVADALVRKLQPRGVIVVIEAEHLCMAMRGIRKPGARTTTSALRGLLKSSPSTRAEAIQLINGRSR

SEQ ID NO: 3969 - protein, 205 aa, Actinomadura bangladeshensis
  REGION 1..205: note = tr|A0A4R4NDA2|A0A4R4NDA2_9ACTN GTP cyclohydrolase 1; OS = Actinomadura bangladeshensis OX=453573 GN=folE PE=3 SV=1
MDVAALAVSPITPVRVTGRPGEMDLAAAELAAGEFLRALGVGTDSESLRGTPGRMARAYAELFTSRSFDLTTFPNDDGYDELVLARDIPLRSVCEHHLLPFVGTAHIGYLPGRRILGLSKLARVLEHFARRPQVQERLTKQVADWLQAHLDPAGVGVVIEAEHTCMTLRGVQATGARTVTSTLLGTLRDAPASRQEFLALTGVGR

SEQ ID NO: 3970 - protein, 202 aa, Actinomadura bangladeshensis
  REGION 1..202: note = tr|A0A4R4NQI6|A0A4R4NQI6_9ACTN GTP cyclohydrolase 1; OS = Actinomadura bangladeshensis OX=453573 GN=folE PE=3 SV=1
MENDPPGETLHGGHFDHARIEKAVREILIGIGEDPDRDGLRDTPARVARAYAEQFAGLRQTPEDALTTVFDADHEEMVLVKDIEVYSVCEHHLVPFHGVAHVGYTPNKKGQITGLSKLARLVDVYARRPQVQERLTSQVADALMSVLEPRGAIVVIEAEHLCMTMRGVRKPGAKTVTSAVRGDFRDHAETRSEAMSLILGRY

SEQ ID NO: 3971 - protein, 195 aa, Actinomadura chibensis
  REGION 1..195: note = tr|A0A5D0P0K3|A0A5D0P0K3_9ACTN GTP cyclohydrolase 1; OS = Actinomadura chibensis OX=392828 GN=folE PE=3 SV=1
MLEEPPGFDHARIEKAVREILIGIGEDPDRDGLRDTPARVARAYAEQFAGLRQRPEDALTTVFDADHEEMVLVKDIEVYSVCEHHLVPFHGVAHVGYTPNKKGQITGLSKLARLVDVYARRPQVQERLTSQVADAMMSVLEPRGAIVVIEAEHLCMTMRGVRKPGAKTVTSAVRGDFRDHAETRSEAMSLILGRY

SEQ ID NO: 3972 - protein, 202 aa, unidentified
  source 1..202: note = Actinomadura darangshiensis
  REGION 1..202: note = tr|A0A4R5B2Q2|A0A4R5B2Q2_9ACTN GTP cyclohydrolase 1; OS = Actinomadura darangshiensis OX=705336 GN=folE PE=3 SV=1
MEEDPPGATVHGGHFDHARIARAVREILIGIGEDPDRDGLRDTPARVARAYAEQFAGLRQTPEDALTTVFDADHEEMVLVKDIEVYSVCEHHLVPFHGVAHVGYTPNKKGQITGLSKLARLVDVYARRPQVQERLTSQVADALMSVLEPRGAIVVIEAEHLCMTMRGVRKPGAKTVTSAVRGDFRDHAETRSEAMSLILGRY

SEQ ID NO: 3973 - protein, 206 aa, Actinomadura echinospora
  REGION 1..206: note = tr|A0A1H5YUH1|A0A1H5YUH1_9ACTN GTP cyclohydrolase 1; OS = Actinomadura echinospora OX=1992 GN=folE PE=3 SV=1
MALPYDEDGAPLRAELPDFDHARLERAVREILIAIGEDPDRDGLRETPARVARAYAEQFAGLRQHPEDVLNKVFEADHDEMVLVKDIEVYSSCEHHLVPFHGVAHVGYTPNKKGQITGLSKLARLVDVYARRPQVQERLTSQVADALMEILEPRGVIVVIEAEHLCMTMRGVRKPGAKTVTSAVRGDFRDHPETRAEAMSLILGGS

SEQ ID NO: 3974 - protein, 201 aa, Actinomadura hallensis
  REGION 1..201: note = tr|A0A543IMP2|A0A543IMP2_9ACTN GTP cyclohydrolase 1; OS = Actinomadura hallensis OX=337895 GN=folE PE=3 SV=1
MEGEAKLLEEPPGFDHARIEKAVREILIGIGEDPDRDGLRETPARVARAYAEQFAGLRQTPEDALTTVFDADHEEMVLVKDIEVYSVCEHHLVPFHGVAHVGYTPNKKGQITGLSKLARLVDVYARRPQVQERLTSQVADALMSVLEPRGAIVVIEAEHLCMTMRGVRKPGAKTVTSAVRGDFRDHAETRAEAMSLILGRY

SEQ ID NO: 3975 - protein, 211 aa, Actinomadura madurae
  REGION 1..211: note = tr|A0A1I5EQI0|A0A1I5EQI0_9ACTN GTP cyclohydrolase 1; OS = Actinomadura madurae OX=1993 GN=folE PE=3 SV=1
MAIPYDEAPIEIDPPGETVRGGHFDHARIEKAVREILIGIGEDPDRDGLRETPARVARAYAEQFAGLRQTPEDALTTVFDADHEEMVLVKDIEVYSVCEHHLVPFHGVAHVGYTPNKKGQITGLSKLARLVDVYARRPQVQERLTSQVADALMTVLEPRGAIVVIEAEHLCMTMRGVRKPGAKTVTSAVRGDFRDHAETRSEAMSLILGRY

SEQ ID NO: 3976 - protein, 210 aa, Actinomadura mexicana
  REGION 1..210: note = tr|A0A239H7I3|A0A239H7I3_9ACTN GTP cyclohydrolase 1; OS = Actinomadura mexicana OX=134959 GN=folE PE=3 SV=1
MAIPYDEAPIENDPPGETLHGGRFDHARIEKAVREILIGIGEDPERDGLRDTPARVARAYAEQFAGLRQQPEDALTTVFDADHEEMVLVKDIEVYSVCEHHLVPFHGVAHVGYTPNKKGQITGLSKLARLVDVYARRPQVQERLTSQVADAMMRVLEPRGAIVVIEAEHLCMTMRGVRKPGAKTVTSAVRGDFRDHAETRSEAMSLILGR

SEQ ID NO: 3977 - protein, 202 aa, Actinomadura meyerae
  REGION 1..202: note = tr|A0A239MV45|A0A239MV45_9ACTN GTP cyclohydrolase 1; OS = Actinomadura meyerae OX=240840 GN=folE PE=3 SV=1
MENDPPGETVRGGHFDHARIEKAVREILIGIGEDPDRDGLRDTPARVARAYAEQFAGLRQTPEDVLTTVFDADHEEMVLVKDIEVYSVCEHHLVPFHGVAHVGYTPNKKGQITGLSKLARLVDVYARRPQVQERLTSQVADALMRVLEPRGAIVVIEAEHLCMTMRGVRKPGAKTVTSAVRGDFRDHAETRSEAMSLILGRH

SEQ ID NO: 3978 - protein, 192 aa, unidentified
  source 1..192: note = Actinomadura parvosata
  REGION 1..192: note = tr|A0A2P9IG59|A0A2P9IG59_9ACTN GTP cyclohydrolase 1; OS = Actinomadura parvosata subsp. kistnae OX=1955414; GN = folE PE=3 SV=1
MTQHDVDLGRIEKAVREILYAIGEDPDRDGLVETPSRVARAMAEQYSGLGQTPEDVLNKVFDVDHDEMVLVRDIEVYSTCEHHLVPFHGLAHVGYIPNERGQVTGLSKLARLVDVFARRPQVQERMTSQIADALMRVLEPRGVIVVVECEHLCMTMRGVRKPGAKTVTSAVRGDFRTSDKTRSEAMALILGR

SEQ ID NO: 3979 - protein, 179 aa, unidentified
  source 1..179: note = Actinomadura parvosata
  REGION 1..179: note = tr|A0A2P9I1M5|A0A2P9I1M5_9ACTN GTP cyclohydrolase I type 1 OS=Actinomadura parvosata subsp. kistnae OX=1955414; GN = KIS93_01226 PE=4 SV=1
MTLEDAAAMAVAVPEEAGAADEYEACEHARRMMAALGFPLHEPGMVGTPARLVNALRELTGGLREDPGRHLEVTFPPESNDPGLIAVTNVPFISLCEHHLLPFTGAMTVAYVPAPGAPIVGLSKLARMAQGFAAMPQVQEHLGEQIAETLHTKLESLKGVFRTEPAMRENFFRLHSSGV

SEQ ID NO: 3980 - protein, 224 aa, Actinomadura pelletieri
  REGION 1..224: note = tr|A0A495QG84|A0A495QG84_9ACTN GTP cyclohydrolase 1; OS = Actinomadura pelletieri DSM 43383 OX=1120940 GN=folE; PE = 3 SV=1
MADSQHEADRWSAEEAALDAGRAFVEGEEPILQEPPGFDHARIEKAVREILFAIGEDPDRDGLRDTPARVARAYAEQFAGLRQAPEDALTTVFDADHEEMVLVKDIEVYSVCEHHLVPFHGVAHVGYTPNKKGQITGLSKLARLVDVYARRPQVQERMTSQVADALMKVLEPRGVIVVIEAEHLCMTMRGVRKPGAKTVTSAVRGDFRDHAETRAEAMSLILGR

SEQ ID NO: 3981 - protein, 201 aa, Actinomadura sp.
  REGION 1..201: note = tr|A0A4R4MI65|A0A4R4MI65_9ACTN GTP cyclohydrolase 1; OS = Actinomadura sp. 7K534 OX=2530366 GN=folE PE=3 SV=1
MEGEASILEEPPGFDHARIEKAVREILIGIGEDPDRDGLRETPARVARAYAEQFAGLRQTPEDALTTVFDADHEEMVLVKDIEVYSVCEHHLVPFHGVAHVGYTPNKKGQITGLSKLARLVDVYARRPQVQERLTSQVADALMRVLEPRGAIVVIEAEHLCMTMRGVRKPGAKTVTSAVRGDFRDHAETRSEAMSLILGRY

SEQ ID NO: 3982 - protein, 195 aa, Actinomadura sp.
  REGION 1..195: note = tr|A0A4R4XR09|A0A4R4XR09_9ACTN GTP cyclohydrolase 1; OS = Actinomadura sp. KC06 OX=2530369 GN=folE PE=3 SV=1
MLEEPPGFDHARIEKAVREILIGIGEDPERDGLRETPARVARAYAEQFAGLRQQPEDALTTVFDADHEEMVLVKDIEVYSVCEHHLVPFHGVAHVGYTPNKKGQITGLSKLARLVDVYARRPQVQERLTSQVADALMSVLEPRGAIVVIEAEHLCMTMRGVRKPGAKTVTSAVRGDFRDHAETRSEAMSLILGRY

SEQ ID NO: 3983 - protein, 195 aa, unidentified
  source 1..195: note = Actinomadura syzygii
  REGION 1..195: note = tr|A0A5D0UCB1|A0A5D0UCB1_9ACTN GTP cyclohydrolase 1; OS = Actinomadura syzygii OX=1427538 GN=folE PE=3 SV=1
MLEEPPGFDHARIEKAVREILIGIGEDPDRNGLRDTPARVARAYAEQFAGLRQTPEDALTTVFDADHEEMVLVKDIEVYSVCEHHLVPFHGVAHVGYTPNKKGQITGLSKLARLVDVYARRPQVQERLTSQVADAMMSVLEPRGAIVVIEAEHLCMTMRGVRKPGAKTVTSAVRGDFRDHAETRSEAMSLILGRY

SEQ ID NO: 3984 - protein, 195 aa, Actinomadura umbrina
  REGION 1..195: note = tr|A0A3D9SY64|A0A3D9SY64_9ACTN GTP cyclohydrolase 1; OS = Actinomadura umbrina OX=111806 GN=folE PE=3 SV=1
MEENPPGFDHERLERAVREILYAIGEDPDRDGLRETPARVARAYAEQFAGLRQAPEDVLNKVFEADHDEMVLVKDIEVYSSCEHHLTPFHGVAHVGYTPNKKGQITGLSKLARLVDVYARRPQVQERLTSQVADALMRILEPRGVIVVIEAEHLCMTMRGVRKPGAKTLTSAVRGDFRDCAETRAEAMSLILGRP

SEQ ID NO: 3985 - protein, 213 aa, Actinomadura umbrina
  REGION 1..213: note = tr|A0A3D9SUB1|A0A3D9SUB1_9ACTN GTP cyclohydrolase 1; OS = Actinomadura umbrina OX=111806 GN=folE PE=3 SV=1
MSVTEPDALTESPTPSLRYRRLAVAGRGPDVDAQAAQRAVADLLVALGRDPHGEHLADTPRRVAAAYTELLTPREFDLTTFPNEEGYDELVLAKRIPMQSLCEHHLLPFQGVAHVGYLPGERILGLSKLARVVELFARDLQVQERLTKQVADWLQEHLEPKGVGVVIEAEHLCMSLRGVRATGSATVTSALHGVLRHDARSRQEFLALTGIID

SEQ ID NO: 3986 - protein, 237 aa, Actinomadura viridilutea
  REGION 1..237: note = tr|A0A2P6UAX8|A0A2P6UAX8_9ACTN GTP cyclohydrolase 1; OS = Actinomadura viridilutea OX=58112 GN=folE PE=3 SV=1
MAEPYDESRDPAVELAAGSAGVAGEPDARPEAPASASSGGLAVPNGRKRVFDYARIERAVREILIGIGEDPDRDGLRETPARVARAYAEQFAGLRQDPEDALTKVFEADHDEMVLVKDIEVYSTCEHHLVPFHGLAHVGYTPNEKGQITGLSKLARLVDVYARRPQVQERLTSQIADALMRILEPRGVIVVIEAEHLCMTMRGVRKPGARTVTSAVRGAFRDRPETRAEAMGLILGR

SEQ ID NO: 3987 - protein, 215 aa, Actinomyces bovis
  REGION 1..215: note = tr|A0A2X0TV53|A0A2X0TV53_9ACTO GTP cyclohydrolase 1; OS = Actinomyces bovis OX=1658 GN=folE PE=3 SV=1
MSDGVAGQEPEGSRPVTAAVPTCPPRPYDAEGVRRAVRDLLVAVGEDPDRDGLRETPDRMARAYAEMFSGLAEDPGEHLERVFDVGHEEMILVRDIPLYSVCEHHLLPFHGVAHVAYIPNEEGRVTGLSKIARMVDGYARRPQVQERLTAQVADAVVEHLGARGVLAVVEAEHLCMSMRGVRKPGSNTVTSAVRGQMRKAATRSEAMSLILGRRS

SEQ ID NO: 3988 - protein, 190 aa, Actinomyces bowdenii
  REGION 1..190: note = tr|A0A3P1V9G0|A0A3P1V9G0_9ACTO GTP cyclohydrolase 1; OS = Actinomyces bowdenii OX=131109 GN=folE PE=3 SV=1
MGYDAEGVRRAVRDLLIAIGEDPERDGLRETPERMARAYAEMFAGLGEDPAAHLDRVFDVGHEEMVLVRDIPLYSVCEHHLLPFHGVAHVGYIPGEDGRVTGLSKLARLVEGYARRPQVQERLTAQIADAMVDRLGCRGVLAVVEAEHLCMSMRGVRKPGSNTITSAVRGIMRAAATRSEAMSLILGGRH

SEQ ID NO: 3989 - protein, 189 aa, Actinomyces coleocanis
  REGION 1..189: note = tr|C0VYV9|C0VYV9_9ACTO GTP cyclohydrolase 1; OS = Actinomyces coleocanis DSM 15436 OX=525245 GN=folE PE=3; SV = 1
MSFNQRAAEAAVRDLLIAVGEDPEREGLLETPARVARAWKELLSGLDEDPAKHLEKHFTVETDEMVLVRDIEFHSVCEHHLLPFHGRAHVAYIPRDNKVTGLSKLARVVEGYARRPQVQERLTTQIAQALVEKLNPQGVCVIMEAEHLCMTMRGIRKTGATTVTSKLCGVMNNSATRQEMMTLVMGGNR

SEQ ID NO: 3990 - protein, 190 aa, Actinomyces denticolens
  REGION 1..190: note = tr|A0A1M6BR67|A0A1M6BR67_9ACTO GTP cyclohydrolase 1; OS = Actinomyces denticolens OX=52767 GN=folE PE=3 SV=1
MTYDAEGVRRAVRDLLTAVGEDPDREGLRDTPERMARAYAELFAGLDEDPGKHVERVFEVGHHEMVLVRDIPMYSVCEHHLLPFHGVAHVAYLPGERGRVTGLSKLARLVEGYARRPQVQERLTAQIADALVERLECSGVLVVVEAEHLCMSMRGVRKPGSNTVTSAVRGQLRNAATRAEAMSLIQGGRH

SEQ ID NO: 3991 - protein, 189 aa, Actinomyces europaeus
  REGION 1..189: note = tr|S2WER3|S2WER3_9ACTO GTP cyclohydrolase 1; OS = Actinomyces europaeus ACS-120-V-Col10b OX=883069; GN = folE PE=3 SV=1
MAYDAAGVERAVRDLLVAIGEDPSREGLVDTPARMSRAWAEIVGGLEEDPSVHLQTHFRVEHEEMVLVRDIDFYSVCEHHLLPFYGKAHVAYIPANSTVTGLSKLARLVEGYARRPQVQERLTSQIADALVTKLKPQGACVIIEAEHMCMTMRGVRKPGSWTVTSALRGVMNSPATRQEIMTLVMEGRK

SEQ ID NO: 3992 - protein, 189 aa, Actinomyces europaeus
  REGION 1..189: note = tr|A0A2N6UVI6|A0A2N6UVI6_9ACTO GTP cyclohydrolase 1; OS = Actinomyces europaeus OX=66228 GN=folE PE=3 SV=1
MTYDAAGVERAVRDLLVAIGEDPSREGLIDTPARMSRAWAEIVGGLEEDPSVHLETHFQVEHEEMVLVRDIDFYSVCEHHLLPFYGKAHVAYIPANNTVTGLSKLARLVEGYARRPQVQERLTSQIADALVNKLKPQGACVIIEAEHMCMTMRGVRKPGSWTVTSALRGVMNSPATRQEIMTLVMEGRK

SEQ ID NO: 3993 - protein, 190 aa, unidentified
  source 1..190: note = Actinomyces gaoshouyii
  REGION 1..190: note = tr|A0A1V0KHK4|A0A1V0KHK4_9ACTO GTP cyclohydrolase 1; OS = Actinomyces gaoshouyii OX=1960083 GN=folE PE=3 SV=1
MTYDAEGVRRAVRDLLTAVGEDPDREGLRETPERMARAYAELFAGLDEDPGKHVERVFEVGHHEMVLVRDIPMYSVCEHHLLPFHGVAHVAYLPGGRGRVTGLSKLARLVEGYARRPQVQERLTAQIADALVERLECSGVLVVVEAEHLCMSMRGVRKPGANTVTSAVRGQLRNAATRAEAMSLIQGGRH

SEQ ID NO: 3994 - protein, 190 aa, unidentified
  source 1..190: note = Actinomyces glycerinitolerans
  REGION 1..190: note = tr|A0A1M4RZM1|A0A1M4RZM1_9ACTO GTP cyclohydrolase 1; OS = Actinomyces glycerinitolerans OX=1892869 GN=folE PE=3; SV = 1
MSYDADGVRHAIRELLVAVGEDPDREGLRGTPDRIARALAEMFSGLEDDPARHLETVFDADHQEMVLVRDIPLYSVCEHHLLPFHGVAHVGYIPGEDGRVTGLSKLARLVEGYARRPQVQERLTSQIADAMVERLGVRGVIVVIEAEHLCMSMRGVHKPGANTVTSAVRGVMHNAATRSEAMSLVLGRRA

SEQ ID NO: 3995 - protein, 225 aa, Actinomyces graevenitzii
  REGION 1..225: note = tr|U1PNI8|U1PNI8_9ACTO GTP cyclohydrolase 1; OS = Actinomyces graevenitzii F0530 OX=1321817 GN=folE PE=3; SV = 1
MTSEVTGAETGQTQAAPEGQAVPEAQATPSALAQTRPYDAEGVRKAVYDLLVAIGEDPERDGLRETPQRMARAYAELFAGLSEDPAHHLDKVFDVGHEEMVLVRDIPMYSVCEHHLLPFHGVAHVGYIPGTDGHVTGLSKLARLVEGYARRPQVQERLTAQVADAMVERLHCRGVLVVVEAEHLCMSMRGVRKPGSNTVTSAVRGIMRNPATRAEAMSLILGRRG

SEQ ID NO: 3996 - protein, 194 aa, Actinomyces graevenitzii
  REGION 1..194: note = tr|A0A2N6V1L3|A0A2N6V1L3_9ACTO GTP cyclohydrolase 1; OS = Actinomyces graevenitzii OX=55565 GN=folE PE=3 SV=1
MAQTRPYDAEGVRKAVYDLLVAIGEDPERDGLRETPQRMARAYAELFAGLSEDPAHHLDKVFDVGHDEMVLVRDIPMYSVCEHHLLPFHGVAHVGYIPGTDGHVTGLSKLARLVEGYARRPQVQERLTAQVADAMVERLHCRGVLVVVEAEHLCMSMRGVRKPGSNTVTSAVRGIMRNPATRAEAMSLILGRRG

SEQ ID NO: 3997 - protein, 188 aa, Actinomyces hominis
  REGION 1..188: note = tr|A0A2N6UQW7|A0A2N6UQW7_9ACTO GTP cyclohydrolase 1; OS = Actinomyces hominis OX=595468 GN=folE PE=3 SV=1
MYDEAGVRTAVTDLLRALGEDPTREGLRETPARMARAWKEMVSGLGQDPSKHLDKLFDVQTEEMVLVRDIKFYSVCEHHLLPFFGRAHVAYIPANNRVTGLSKLARVVEGFARRPQVQERLTTQIADALVEKLEPQGATVIIEAEHLCMTMRGVRKPGASTVTSALRGVMNNAATRQEMMTLVMGGRR

SEQ ID NO: 3998 - protein, 189 aa, Actinomyces hongkongensis
  REGION 1..189: note = tr|A0A1D8B3W3|A0A1D8B3W3_9ACTO GTP cyclohydrolase 1; OS = Actinomyces hongkongensis OX=178339 GN=folE PE=3 SV=1
MTFDADAVERACRDLLVAVGEDPGREGLAGTPGRMARAWRELLAGVDLDPRDYLRTQFHAGTDELVLVRDIVFHSVCEHHLLPFSGRAHVGYIPRGGVVTGLSKLARLVEGYARRPQVQERLTAQIADALNEVLRPQGVIVVIEAEHMCMSMRGVRKPGSSTVTSALRGIMNDGTTRAEMMALVLGGRR

SEQ ID NO: 3999 - protein, 189 aa, Actinomyces hordeovulneris
  REGION 1..189: note = tr|A0A1Q5PYE8|A0A1Q5PYE8_9ACTO GTP cyclohydrolase 1; OS = Actinomyces hordeovulneris OX=52770 GN=folE PE=3 SV=1
MSPYDAVAVERAVRDLLRAVGEDPDRDGLRETPARMARAYQELFSGLGQDPAAHLEAVFDIGHEEMILVRDIPFYSVCEHHLLPFHGVAHVGYIPGADGRVTGLSKLARLVEGFARRPQVQERITSQVADALVERLAPRGAITVLSAEHLCMSMRGVAKPGSRTITSAVRGIMRNPATRAEAMGLILGQ

SEQ ID NO: 4000 - protein, 215 aa, Actinomyces israelii; identical to SEQ ID NO: 3987
  REGION 1..215: note = tr|A0A3S4VNI7|A0A3S4VNI7_9ACTO GTP cyclohydrolase 1; OS = Actinomyces israelii OX=1659 GN=folE PE=3 SV=1

SEQ ID NO: 4001 - protein, 190 aa, Actinomyces johnsonii
  REGION 1..190: note = tr|A0A507ZZM9|A0A507ZZM9_9ACTO GTP cyclohydrolase 1; OS = Actinomyces johnsonii OX=544581 GN=folE PE=3 SV=1
MSYDAEGVRRAVRELLVAIGEDPDRDGLRDTPERMARAYAEMFSGLGQDPAEHVERVFDVGHEEMVLVRDIPMYSVCEHHLLPFHGAAHVGYIPSADGRVTGLSKVARLVDGYARRPQVQERLTRQIADALVERLECRGVLVVVEAEHLCMSMRGVRKPGSNTVTSAVRGIMRNAATRSEAMSLVLGRRS

SEQ ID NO: 4002 - protein, 190 aa, Actinomyces johnsonii; identical to SEQ ID NO: 4001
  REGION 1..190: note = tr|U1S2B1|U1S2B1_9ACTO GTP cyclohydrolase 1; OS = Actinomyces johnsonii F0542 OX=1321818 GN=folE PE=3 SV=1

SEQ ID NO: 4003 - protein, 194 aa, unidentified
  source 1..194: note = Actinomyces liubingyangii
  REGION 1..194: note = tr|A0A1Q5PLN5|A0A1Q5PLN5_9ACTO GTP cyclohydrolase 1; OS = Actinomyces liubingyangii OX=1921764 GN=folE PE=3 SV=1
MTKQPVDLEAAAQAVRQLLVAIGEDPDREGLADTPMRVAKSFEEMTSGLHIDPAKHLETRFNIGHDEVVLVRDITFHSLCEHHLLPFFGKAHVAYLPADGQVTGLSKLARVVDGYARRPQVQERLTMQIADAIEEKLSPRGCAVVIEAEHLCMTVRGVAKPGASTVTSALRGAMRNNPATRAEVLALIAPAGGR

SEQ ID NO: 4004 - protein, 197 aa, Actinomyces marimammalium
  REGION 1..197: note = tr|A0A1Q5PME4|A0A1Q5PME4_9ACTO GTP cyclohydrolase 1; OS = Actinomyces marimammalium OX=156892 GN=folE PE=3 SV=1
MSEAIDLKSVEQAVTDLLKALGEDPTRPGLVDTPKRVAKAWQEMLNGQAAEPVQQLETVFESHHSDLVIVRDIGFESVCEHHLLPFKGVAHIGYIPRDGKVVGLSKLARLVDGYAHRLQLQEKLTNQIADALQEALDPIGVGVVMEAEHTCMSVRGVRQRLADTVTIAGRGECAPGGSHRADFLALLGNPHVDGDHE

SEQ ID NO: 4005 - protein, 190 aa, Actinomyces massiliensis
  REGION 1..190: note = tr|J1HMJ5|J1HMJ5_9ACTO GTP cyclohydrolase 1; OS = Actinomyces massiliensis F0489 OX=1125718 GN=folE PE=3; SV = 1
MTYDADAVRRAVRDLLAAVGEDPDREGLRDTPERMARAYAEMFSGLDEDPGAHVERAFDVGHSEMVLVRDIPLYSVCEHHLLPFHGAAHVAYIPGEDGRVTGLSKVARLVDGYARRPQVQERLTAQAADAMVERLGCRGVLVVVEAEHLCMSMRGVRKPGANTVTSAVRGIMRNAATRSEAMSLILGRRS

SEQ ID NO: 4006 - protein, 190 aa, Actinomyces naeslundii
  REGION 1..190: note = tr|A0A2I1KG28|A0A2I1KG28_ACTNA GTP cyclohydrolase 1; OS = Actinomyces naeslundii OX=1655 GN=folE PE=3 SV=1
MSYDAEGVRRAVHDLLVAIGEDPDRDGLRDTPERMARAYAEMFAGLGQDPAEHVERVFDVGHEEMVLVRDIPMYSVCEHHLLPFHGSAHVGYIPSADGRVTGLSKVARLVDGYARRPQVQERLTRQIADALVERLECRGVLVVVEAEHLCMSMRGVRKPGSNTVTSAVRGIMRNAATRSEAMSLVLGRRS

SEQ ID NO: 4007 - protein, 190 aa, Actinomyces naeslundii
  REGION 1..190: note = tr|J3JKK9|J3JKK9_ACTNH GTP cyclohydrolase 1; OS = Actinomyces naeslundii (strain ATCC 12104 / DSM 43013 / JCM 8349 / NCTC 10301 / Howell 279) OX=1115803 GN=folE; PE = 3 SV =1
MSYDAEGVRRAVHDLLVAIGEDPDRDGLRDTPERMARAYAEMFAGLGQDPAEHVERVFDVGHEEMVLVRDIPMYSVCEHHLLPFHGSAHVGYIPSEDGRVTGLSKVARLVDGYARRPQVQERLTRQIADALVERLECRGVLVVVEAEHLCMSMRGVRKPGSNTVTSAVRGIMRNAATRSEAMSLVLGRRS

SEQ ID NO: 4008 - protein, 210 aa, Actinomyces nasicola
  REGION 1..210: note = tr|A0A1H3X8E7|A0A1H3X8E7_9ACTO GTP cyclohydrolase 1; OS = Actinomyces nasicola OX=208480 GN=folE PE=3 SV=1
MSRPDPERSDHFTNGVGAGPNRAYDAAGVEKAVRDLLIAVGEDPDRDGLIDTPRRMARAYAEMFAGLHENPADPLDAAFDIGHEEMILVKDIPMYSMCEHHLLPFHGLAHVGYIPNESGHVTGLSKLARLVEGHARRPQVQERLTSLVADSLVDRLHPRGVIVVVEAEHLCMSMRGVRKPGSRTITSAVRGQMRNAATRAEAMSLIMSGR

SEQ ID NO: 4009 - protein, 197 aa, Actinomyces nasicola
  REGION 1..197: note = tr|A0A1Q5Q2W7|A0A1Q5Q2W7_9ACTO GTP cyclohydrolase 1; OS = Actinomyces nasicola OX=208480 GN=folE PE=3 SV=1
MSEQLGAKRAYDAAGVERAIRDLLIAVGEDPERDGLRDTPKRMACAYAEMFAGLHENPSDHLDAAFDIGHEEMILVKDIPMYSMCEHHLLPFHGVAHVGYIPNASGHVTGLSKLARLVEGHARRPQVQERLTSLVADSLVERLQPRGVIVVVEAEHLCMSMRGVRKPGSRTITSAVRGQMRSAATRAEAMSLIMSGR

SEQ ID NO: 4010 - protein, 189 aa, unidentified
  source 1..189: note = Actinomyces neuii
  REGION 1..189: note = tr|A0A2I1ILP0|A0A2I1ILP0_9ACTO GTP cyclohydrolase 1; OS = Actinomyces neuii OX=33007 GN=folE PE=3 SV=1
MSREFDYERARRAAYELLCAIGEDPSRPGLEETPDRVARAWKELSVGLHEDPSEHLQKQFEVGTDEIVLIRDIPFYSVCEHHLLPFFGMANVAYLPAHGKVTGLSKIARCVEGFARKPQVQERLTAQIADALSQKLHAAGVAVVLEGEHLCMTMRGIKKPGAKTVTSALRGQMRRNQATRAEVLRLITG

SEQ ID NO: 4011 - protein, 189 aa, unidentified
  source 1..189: note = Actinomyces neuii
  REGION 1..189: note = tr|K0YPX8|K0YPX8_9ACTO GTP cyclohydrolase 1; OS = Actinomyces neuii BVS029A5 OX=888439 GN=folE PE=3 SV=1
MSNNFDYERARQAAYDLLCAIGEDPSRPGLEETPDRVARAWRELSVGLHEDPGAHLEKQFEVGTDEIVLIRDIPFYSVCEHHLLPFFGMANVAYLPSHGKVTGLSKIARCVEGFARKPQVQERLTAQIADAIADKLHAAGVAVVLEGEHLCMTMRGIKKPGAKTVTSALRGQMRRNQATRAEVLRLITH

SEQ ID NO: 4012 - protein, 190 aa, Actinomyces oris
  REGION 1..190: note = tr|A0A1Q8W6S8|A0A1Q8W6S8_9ACTO GTP cyclohydrolase 1; OS = Actinomyces oris OX=544580 GN=folE PE=3 SV=1
MSYDAEGVRRAVRDLLVAIGEDPERDGLRDTPERMARAYAEMFAGLGQDPAEHVERVFDVGHEEMVLVRDIPMYSVCEHHLLPFHGAAHVGYIPSADGRVTGLSKVARLVDGYARRPQVQERLTRQIADALVERLQCRGVLVVVEAEHLCMSMRGVRKPGSNTVTSAVRGIMRNAATRSEAMSLVLGRRS

SEQ ID NO: 4013 - protein, 190 aa, Actinomyces oris
  REGION 1..190: note = tr|A0A1Q8XE42|A0A1Q8XE42_9ACTO GTP cyclohydrolase 1; OS = Actinomyces oris OX=544580 GN=folE PE=3 SV=1
MSYDAEGVRRAVHDLLVAIGEDPERDGLRDTPERMARAYAEMFAGLDQDPAEHVERVFDVGHEEMVLVRDIPMYSVCEHHLLPFHGSAHVGYIPGEDGRVTGLSKVARLVDGYARRPQVQERLTRQIADALVERLQCRGVLVVVEAEHLCMSMRGVRKPGSNTVTSAVRGIMRNAATRSEAMSLVLGRRS

SEQ ID NO: 4014 - protein, 183 aa, Actinomyces radicidentis
  REGION 1..183: note = tr|A0A0X8JGZ6|A0A0X8JGZ6_ACTRD GTP cyclohydrolase 1; OS = Actinomyces radicidentis OX=111015 GN=folE PE=3 SV=1
MRRAVRDLLVAIGEDPDRDGLVETPDRMARAYAEIFAGLAEDPGAHVEKVFDVGHEEMVLVRDIPMYSVCEHHLLPFHGVAHVAYIPSEGGRVTGLSKVARLVEGYARRPQVQERLTSQVADAMVDRLGVRGVLVVVEAEHLCMSMRGIRKPGSNTVTSAVRGQMRNAATRSEAMSLILGRRS

SEQ ID NO: 4015 - protein, 191 aa, Actinomyces ruminicola
  REGION 1..191: note = tr|A0A1G9RNB5|A0A1G9RNB5_9ACTO GTP cyclohydrolase 1; OS = Actinomyces ruminicola OX=332524 GN=folE PE=3 SV=1
MVSYDVDGVRRAIRDLLTAVGEDPDRDGLRDTPDRIARALAEMFSGLGEDPARHLETVFDADHQEMVLVRDIPLYSVCEHHLLPFHGVAHVGYIPGEDGRVTGLSKLARLVEGYARRPQVQERLTSQIADAMVERLGVRGVIVVIEAEHLCMSMRGVRKPGANTITSAVRGAMRNAATRSEAMSLVLGRRS

SEQ ID NO: 4016 - protein, 190 aa, Actinomyces slackii
  REGION 1..190: note = tr|A0A3S4U1T3|A0A3S4U1T3_9ACTO GTP cyclohydrolase 1; OS = Actinomyces slackii OX=52774 GN=folE PE=3 SV=1
MSYDAQGVRQAVRDLLVAIGEDPDRDGLRETPDRMARAYAEMFAGLEEDPAEHLERVFDVGHEEMILVRDIPLYSVCEHHLLPFHGQAHVAYIPGEGGRVTGLSKLARLVEGYARRPQVQERLTAQIADAMVERLGCRGVLTVVEAEHLCMSMRGVRKPGSNTVTSAVRGQLRNAATRAEAMSLIQGGRS

SEQ ID NO: 4017 - protein, 190 aa, Actinomyces sp.; identical to SEQ ID NO: 4001
  REGION 1..190: note = tr|G9PPH5|G9PPH5_9ACTO GTP cyclohydrolase 1; OS = Actinomyces sp. oral taxon 849 str. F0330 OX=653386; GN = folE PE=3 SV=1

SEQ ID NO: 4018 - protein, 190 aa, Actinomyces sp.
  REGION 1..190: note = tr|F9PHV5|F9PHV5_9ACTO GTP cyclohydrolase 1; OS = Actinomyces sp. oral taxon 175 str. F0384 OX=944560; GN = folE PE=3 SV=1
MSYDAEGVRRAVHDLLVAIGEDPERDGLRDTPERMARAYAEMFAGLDQDPAEHVERVFDVGHEEMVLVRDIPMYSVCEHHLLPFHGSAHVGYIPSEDGRVTGLSKVARLVDGYARRPQVQERLTRQIADALVERLQCRGVLVVVEAEHLCMSMRGVRKPGSNTVTSAVRGIMRNAATRSEAMSLVLGQRS

SEQ ID NO: 4019 - protein, 190 aa, unidentified
  source 1..190: note = Actinomyces succiniciruminis
  REGION 1..190: note = tr|A0A1L7RL75|A0A1L7RL75_9ACTO GTP cyclohydrolase 1; OS = Actinomyces succiniciruminis OX=1522002 GN=folE PE=3; SV = 1
MSYDADGVRHAIRELLVAVGEDPDREGLRGTPDRIARALAEMFSGLEEDPARHLETVFDADHQEMVLVRDIPMYSVCEHHLLPFHGVAHVGYIPGEDGRVTGLSKLARLVEGYARRPQVQERLTSQIADAMVERLGVRGVIVVIEAEHLCMSMRGVHKPGANTVTSAVRGVMHNAATRSEAMSLVLGRRA

SEQ ID NO: 4020 - protein, 198 aa, unidentified
  source 1..198: note = Actinomyces tangfeifanii
  REGION 1..198: note = tr|A0A1D9MLL1|A0A1D9MLL1_9ACTO GTP cyclohydrolase 1; OS = Actinomyces tangfeifanii OX=1912795 GN=folE PE=3 SV=1
MTEATPQRQYDEAAAAAAVEAFLRAIGEDPTRDGLQETPARVARAWREITGGLHTDPAKHLERTFEIDHNEMVLVRDIPFYSVCEHHLLPFFGQAHVAYIPAGGRVTGLSKLARVVEGYARRPQVQERLTSQIADALVESLGAKGVGVVLSGEHMCMTMRGVSKPGSQTITSALRGAMRTNDATRAEFMSLVLAPNNR

SEQ ID NO: 4021 - protein, 207 aa, Actinomyces urogenitalis
  REGION 1..207: note = tr|C0W610|C0W610_9ACTO GTP cyclohydrolase 1; OS = Actinomyces urogenitalis DSM 15434 OX=525246 GN=folE; PE = 3 SV=1
MSEDQDPGTRTRGAGPSPRPYDAEGVRRAVRDLLIAIGEDPDRDGLRETPDRMARAYEEMFAGLREDPGAHVEKVFDVGHDEMVLVRDIPMYSVCEHHLLPFHGVAHIAYIPSEDGHVTGLSKLARLVEGYARRPQVQERLTAQVADAMVERLGVRGVLVVVEAEHLCMSMRGVRKPGASTVTSAVRGQLRAAATRAEAMSLILGRH

SEQ ID NO: 4022 - protein, 219 aa, Actinomyces urogenitalis
  REGION 1..219: note = tr|W1VIM3|W1VIM3_9ACTO GTP cyclohydrolase 1 (Fragment) OS=Actinomyces urogenitalis DORA_12 OX=1403939; GN = Q605_AUC00436G0001 PE=3 SV=1
GRACCAGGRGRGMSEDQDPGTRTRGAGPSPRPYDAEGVRRAVRDLLIAIGEDPDRDGLRETPDRMARAYEEMFAGLREDPGAHVEKVFDVGHDEMVLVRDIPMYSVCEHHLLPFHGVAHIAYIPSEDGHVTGLSKLARLVEGYARRPQVQERLTAQVADAMVERLGVRGVLVVVEAEHLCMSMRGVRKPGASTVTSAVRGQLRAAATRAEAMSLILGRH

SEQ ID NO: 4023 - protein, 190 aa, Actinomyces viscosus
  REGION 1..190: note = tr|F2V0R1|F2V0R1_ACTVI GTP cyclohydrolase 1; OS = Actinomyces viscosus C505 OX=562973 GN=folE PE=3 SV=2
MSYDAEGVRRAVHDLLVAIGEDPERDGLRDTPERMARAYAEMFAGLDQDPAEHVERVFDVGHEEMVLVRDIPMYSVCEHHLLPFHGLAHVGYIPSEDGRVTGLSKVARLVDGYARRPQVQERLTRQIADALVERLQCRGVLVVVEAEHLCMSMRGVRKPGSNTVTSAVRGIMRNAATRSEAMSLVLGRRS

SEQ ID NO: 4024 - protein, 190 aa, Actinomyces viscosus
  REGION 1..190: note = tr|A0A3S4ZAH3|A0A3S4ZAH3_ACTVI GTP cyclohydrolase 1; OS = Actinomyces viscosus OX=1656 GN=folE PE=3 SV=1
MSYDAEGVRRAVRDLLVAIGEDPDRDGLRDTPERMARAYQEMFSGLGQDPAEHVERVFDVGHEEMVLVRDIPMYSVCEHHLLPFHGAAHVGYIPSPDGRVTGLSKVARLVDGYARRPQVQERLTRQIADALVERLECRGVLVVVEAEHLCMSMRGVRKPGSNTITSAVRGIMRNAATRSEAMSLVLGRRS

SEQ ID NO: 4025 - protein, 176 aa, unidentified
  source 1..176: note = Actinomycetaceae bacterium
  REGION 1..176: note = tr|A0A179B5S1|A0A179B5S1_9ACTO GTP cyclohydrolase 1; OS = Actinomycetaceae bacterium BA112 OX=1823756 GN=folE; PE = 3 SV=1
MRALLRAVGENPERDGLVDTPARMARSFKEIFSGLRQDPADALEAKFDIGHQEMIIVKDIPFYSTCEHHLLPFHGHAHVAYIPNADGKVTGLSKIARLVDGYARRPQVQERIATQVAEALESRLGARGVLVVIEAEHMCMSMRGVNKPGSRTVTSAVRGVLRNQATRSEALSLIQG

SEQ ID NO: 4026 - protein, 235 aa, unidentified
  source 1..235: note = Actinomycetales bacterium
  REGION 1..235: note = tr|A0A2N1JJQ5|A0A2N1JJQ5_9ACTO GTP cyclohydrolase 1; OS = Actinomycetales bacterium SN12 OX=2058180 GN=folE PE=3; SV = 1
MSVDRARVERLTRELLEAIGENPDRPGLTHTPSRMAELYAEFFAGVGEDPAVHLARTISVSRGPAPDTVPSGAVLLRDIRFRSVCEHHLLPFAGVAHLAYLPGEQVVGLGALVKVVETLASRPQVQERLGEQIADAIAENLDTRGVLVVLDASHGCVTMRGGRQPLATTVTIAARGAFTDPAARAELIALIGGPSAGSGSQGSATQAQGAATQGQGSATQAQGAAAQGQGLGSHG

SEQ ID NO: 4027 - protein, 197 aa, unidentified
  source 1..197: note = Actinomycetales bacterium
  REGION 1..197: note = tr|A0A1R4F1W1|A0A1R4F1W1_9ACTO GTP cyclohydrolase 1; OS = Actinomycetales bacterium JB111 OX=1434822 GN=folE PE=3; SV = 1
MTERAPMRQPVDAARAEAAVRELLLAVGEDPDREGLRETPARVARSYSELLAGLAEDPADHLDAVFDIDHQELVIAADIPLYSMCEHHLLPFHGRAHVGYIPSLDGRVTGLSKLARVVEGYARRPQVQERLTAQVADALMERLGARGAIVVVEAEHMCMSMRGVHATGTRTVTSAVRGALRNPATRAEAMSLLRSRS

SEQ ID NO: 4028 - protein, 269 aa, Actinomycetospora cinnamomea
  REGION 1..269: note = tr|A0A2U1FLE7|A0A2U1FLE7_9PSEU GTP cyclohydrolase 1; OS = Actinomycetospora cinnamomea OX=663609 GN=folE PE=3 SV=1
MTTSRDLERDAQRPEEHADSGQHADSGQHADSGQHADRGSTPTAAAAPGAGRGLTPNGDGVSPTDDGAGGPVGTAVAPEWTGFDAPRAEAAVRELLLAIGEDPDREGLRETPARVARAYQELFAGLRSDPAAVLERTFDEDHDELVLVRDIPVFSMCEHHLLPFHGQAHVAYIPAHDGRVTGLSKLARLVDLYARRPQVQERLTRQVADALDERLGARGVLVVIDAEHQCMSARGVRKPGARTTTSAVRGIMKTSASTRAEALGLIRGG

SEQ ID NO: 4029 - protein, 224 aa, Actinomycetospora succinea
  REGION 1..224: note = tr|A0A4R6VJA0|A0A4R6VJA0_9PSEU GTP cyclohydrolase 1; OS = Actinomycetospora succinea OX=663603 GN=folE PE=3 SV=1
MTTSQELDGDLGDTRVRPTDDGAGGPVGDVLAPEWEGFDAPRAEAAVRELLLAIGEDPDREGLRDTPARVARSYRELFAGLRTDPSLVLERTFSEDHEELVLVRDIPMFSMCEHHLLPFHGVAHVAYIPGPQGHVTGLSKLARLVDLYARRPQVQERLTSQVADALDTKLDTRGALVVIDAEHQCMSARGVRKPGARTTTSAVRGIFKTSASTRAEALNLIRSG

SEQ ID NO: 4030 - protein, 206 aa, Actinophytocola oryzae
  REGION 1..206: note = tr|A0A4R7UYT8|A0A4R7UYT8_9PSEU GTP cyclohydrolase 1; OS = Actinophytocola oryzae OX=502181 GN=folE PE=3 SV=1
MTVNGSRRGPLYTGGSVFDQERAERAVRELLLACGENPDRDGLQDTPQRVARAYLEMFAGLYTDPDEVLDRTFDECHDELVLVTDIPMYSTCEHHLVPFHGTAHVGYIPNEQGKVTGLSKIARLVDLYAKRPQVQERLTSQIADALVRKLSPRGVIVVVEAEHLCMAMRGVRKPGARTTTSAVRGIFRSSATSRSEALALINGRTK

SEQ ID NO: 4031 - protein, 116 aa, unidentified
  source 1..116: note = Actinoplanes atraurantiacus
  REGION 1..116: note = tr|A0A285EZ44|A0A285EZ44_9ACTN GTP cyclohydrolase 1; OS = Actinoplanes atraurantiacus OX=1036182; GN = SAMN05421748_101196 PE=3 SV=1
MSMCEHHLLPFKGVAHIGYVPGTHGRITGLSKLARLVEVYARRPQVQERLTSQIADLLMSKLDARGAIVVLECEHLCMEMRGIRKVGARTVTSAVRGAFQTDAKIRAEAMALINAR

SEQ ID NO: 4032 - protein, 214 aa, unidentified
  source 1..214: note = Actinoplanes awajinensis
  REGION 1..214: note = tr|A0A117MPB6|A0A117MPB6_9ACTN GTP cyclohydrolase 1; OS = Actinoplanes awajinensis subsp. mycoplanecinus; OX = 135947 GN=folE PE=3 SV=1
MSTKDELDYLAARLVDGKLTGTPVEDAVDLGRIEKAVREILIAIGEDPDRDGLVRTPSRVARAYAELFAGLRVDPATVLTTTFEADHEELVLVRDIEVQSMCEHHLLPFTGVAHIGYIPGTNGRITGLSKLVRLVEVFARRPQVQERLTSQIADLLMAKLDARGAIVVLECEHLCMEMRGIRKVGARTVTSAVRGAFQTDGKVRAEAMALINAR

SEQ ID NO: 4033 - protein, 196 aa, Actinoplanes brasiliensis
  REGION 1..196: note = tr|A0A4R6JLE1|A0A4R6JLE1_9ACTN GTP cyclohydrolase 1; OS = Actinoplanes brasiliensis OX=52695 GN=folE PE=3 SV=1
MTIEADLRWDLVTQRDMPAAEQAATAFLEALGVDLTAPGLAETPGRMARAYAEMLTPREFAMTTFDNDEGYDELVLAKSIPVRSLCEHHLLPFVGVAHVGYLPADRILGLSKLARVVEMFAHRTQVQERLTKQIADWLSMRLRPRGVGVVIEADHMCMSLRGVRAPAARTVTSTLLGSLRDDPRSRAEFFAVAGPG

SEQ ID NO: 4034 - protein, 208 aa, Actinoplanes derwentensis
  REGION 1..208: note = tr|A0A1H2CYA1|A0A1H2CYA1_9ACTN GTP cyclohydrolase 1; OS = Actinoplanes derwentensis OX=113562 GN=folE PE=3 SV=1
MDYLAARLVDGKLTGTPVEQAVDLGRIEKAVREILIAVGEDPDRDGLQRTPARVARAYAELFAGLRVDPASVLTTTFEADHEELVLVRDIELHSMCEHHLLPFKGVAHIGYIPGTDGRITGLSKLARLVEVFARRPQVQERLTSQIADLLMQQLGARGAIVVLECEHLCMEMRGIRKAGARTVTSAVRGGFKTDGKVRAEVMALINAR

SEQ ID NO: 4035 - protein, 148 aa, Actinoplanes friuliensis
  REGION 1..148: note = tr|U5WF77|U5WF77_9ACTN GTP cyclohydrolase 1; OS = Actinoplanes friuliensis DSM 7358 OX=1246995; GN = AFR_41535 PE=3 SV=1
MFAGLRVDPAKVLTTTFEANHEELVLVRDIELMSLCEHHLLPFKGVAHVGYIPGVDGRITGLSKLARLVEVFARRPQVQERLTSQIADLLMEKLSPRGVIVVLECEHLCMEMRGIRKVGARTVTSAVRGAFQRDGKVRAEAMALINAR

SEQ ID NO: 4036 - protein, 236 aa, Actinoplanes italicus
  REGION 1..236: note = tr|A0A2T0KAQ7|A0A2T0KAQ7_9ACTN GTP cyclohydrolase 1; OS = Actinoplanes italicus OX=113567 GN=folE PE=3 SV=1
MNVFQPGIEPETAGRRHVEKSSISTSGELDYLAARLVDGKLTGTPVEDAVDLGRIEKAVREILIAVGEDPDRDGLQRTPARVARAYAELFAGLRVDPATVLTTSFEADHEELVLVRDIEVQSMCEHHLLPFKGVASIGYIPGTDGRITGLSKLARLVEVFARRPQVQERLTSQIADLLMAQLGARGAIVVLECEHLCMEMRGIRKAGARTVTSAVRGAFQTDGKVRAEAMALINAR

SEQ ID NO: 4037 - protein, 137 aa, unidentified
  source 1..137: note = Actinoplanes lutulentus
  REGION 1..137: note = tr|A0A327ZC84|A0A327ZC84_9ACTN GTP cyclohydrolase 1; OS = Actinoplanes lutulentus OX=1287878 GN=B0I29_1068 PE=3; SV = 1
MLTTTFEADHEELVLVRDIEVQSMCEHHLLPFKGVAHIGYIPGTDGRITGLSKLARLVEVFARRPQVQERLTSQIADLLMQKLGARGAIVVLECEHLCMEMRGIRKVGARTVTSAVRGAFQTDGKVRAEAMALINAR

SEQ ID NO: 4038 - protein, 208 aa, Actinoplanes missouriensis
  REGION 1..208: note = tr|I0HJ36|I0HJ36_ACTM4 GTP cyclohydrolase 1; OS = Actinoplanes missouriensis (strain ATCC 14538 / DSM 43046 / CBS 188.64 / JCM 3121 / NCIMB 12654 / NBRC 102363 / 431) O X=512565 GN=folE PE=3 SV=1
MDYLAARLVDGKVTGTPVEDAVDLGRIEKAIREILIAIGEDPDRDGLERTPARVARAYAELFAGLRVDPATVLTTTFEADHEELVLVRDIEVQSMCEHHLLPFKGVAHIGYIPGADGRITGLSKLARLVEVYARRPQVQERLTSQIADLLMEKLAARGAIVVLECEHLCMEMRGIRKVGARTVTSAVRGAFQSDGKVRAEAMALINAR

SEQ ID NO: 4039 - protein, 212 aa, Actinoplanes philippinensis
  REGION 1..212: note = tr|A0A1I2JDG8|A0A1I2JDG8_9ACTN GTP cyclohydrolase 1; OS = Actinoplanes philippinensis OX=35752 GN=folE PE=3 SV=1
MSDELDYLAARLVDGKLSGTPVEQAVDLGRIEKAVREILIAVGEDPDRDGLQRTPARVARAYAELFAGLRVDPASVLTTTFEADHEELVLVRDIELHSMCEHHLLPFKGVAHIGYIPGTDGRITGLSKLARLVDVFARRPQVQERLTSQIADLLMERLGARGAIVVLECEHLCMEMRGIRKAGARTVTSAVRGGFQTDGKVRAEVMALINAR

SEQ ID NO: 4040 - protein, 137 aa, Actinoplanes regularis
  REGION 1..137: note = tr|A0A239AP29|A0A239AP29_9ACTN GTP cyclohydrolase 1; OS = Actinoplanes regularis OX=52697 GN=SAMN06264365_10833; PE = 3 SV=1
MLTTTFEADHEELVLVRDIEVQSMCEHHLLPFKGVASIGYIPGTDGRITGLSKLARLVEVYARRPQVQERLTSQIADLLMEKLEARGAIVVLECEHLCMEMRGIRKVGARTVTSAVRGAFQTDGKVRAEAMALINAR

SEQ ID NO: 4041 - protein, 222 aa, Actinoplanes sp.
  REGION 1..222: note = tr|A0A428X1G5|A0A428X1G5_9ACTN GTP cyclohydrolase 1; OS = Actinoplanes sp. ATCC 53533 OX=1288362 GN=folE PE=3 SV=1
MTDGSSTEPNGADEPDYLAARLVDGKLTGTPVEQAVDLARIEKAVREILIAIGEDPDRDGLVRTPARVARAYAELFAGLRVDPAKVLTTTFEANHEELVLVRDIELMSLCEHHLLPFKGVAHIGYIPGVDGRITGLSKLARLVEVFARRPQVQERLTSQIADLLMEKLTPRGVIVVLECEHMCMEMRGIRKVGARTVTSAVRGAFQSDGKVRAEAMALINAR

SEQ ID NO: 4042 - protein, 194 aa, Actinoplanes sp.
  REGION 1..194: note = tr|R4L0I7|R4L0I7_9ACTN GTP cyclohydrolase 1; OS = Actinoplanes sp. N902-109 OX=649831 GN=K924_0009 PE=3; SV = 1
MSVTKLDLTEDALVTTEDPLVGLARQLLTEIGEDPDRDGLRDTPVRFARWWREFINYEPGSVGTLFESVGTSQLVVVSDIQVWSLCEHHLLPFNCAVTIAYRPTGRLLGLSKFARVAHQHAHKLQVQERLVNQIALDVATLTGTPDVAVIAKGEHLCMTMRGIKAAAQMTSTAYRGGFSTDPALRSELFDLLRA

SEQ ID NO: 4043 - protein, 199 aa, Actinoplanes teichomyceticus
  REGION 1..199: note = tr|A0A561WQZ7|A0A561WQZ7_ACTTI GTP cyclohydrolase 1; OS = Actinoplanes teichomyceticus OX=1867 GN=FHX34_1011271; PE = 3 SV=1
MSTDLDVDKGPLAMMDGLGADPLEDLARLLLKEIGEDPSRDGLRDTPARYARWWREFIEYDPGTVDTVFEATSAGQLVLVSGIEVWSLCEHHLLPFNCSLTIGYRAADRLLGLSKFARIAHHRAHRLQVQERLVADIAADVARIAGTEDVGVIGTGEHLCMTMRGIKTSARMTSSSLLGAFAEEGLLRSELLTHLQTAR

SEQ ID NO: 4044 - protein, 198 aa, Actinoplanes teichomyceticus
  REGION 1..198: note = tr|Q6ZZH1|Q6ZZH1_ACTTI GTP cyclohydrolase 1; OS = Actinoplanes teichomyceticus OX=1867 GN=tcp35 PE=3 SV=1
MTVTAKHVGNTRPAPDLATATAAAATFLDALGVDLSPESLQETPARMARAYADLLTAREFKLTTFDNDEGYDELVMARNIPIRSVCEHHLLPFIGVAHVGYLPAARILGLSKLARVVEMFAHGTQVQERLTKQIADWLIKELEPNGVGVVIEAEHLCMTLRGVQAVGANTITSSMLGVLRDDARSRGEFLAAAGLGGR

SEQ ID NO: 4045 - protein, 214 aa, Actinoplanes utahensis
  REGION 1..214: note = tr|A0A0A6UET9|A0A0A6UET9_ACTUT GTP cyclohydrolase 1; OS = Actinoplanes utahensis OX=1869 GN=folE PE=3 SV=1
MSKSDELDYLAARLVDGKLTGTPVEQAVDLGRIEKAVREILIAVGEDPDRDGLVRTPARVARAYAELFAGLRVDPATVLTTSFEADHEELVLVRDIELQSMCEHHLLPFKGVAHIGYIPGTDGRITGLSKLARLVEVFARRPQVQERLTSQIADLLMAQLGARGAIVVLECEHLCMEMRGIRKAGARTVTSAVRGGFQTDGKVRAEAMALINAR

SEQ ID NO: 4046 - protein, 212 aa, Actinoplanes xinjiangensis
  REGION 1..212: note = tr|A0A316FCK6|A0A316FCK6_9ACTN GTP cyclohydrolase 1; OS = Actinoplanes xinjiangensis OX=512350 GN=folE PE=3 SV=1
MSDELDYLAARLVDGKLTGTPVEQAVDLGRIEKAVREILIAVGEDPDRDGLQRTPARVARAYAELFAGLRVDPATVLTTTFEADHEELVLVRDIELHSMCEHHLLPFKGVAHIGYIPGTDGRITGLSKLARLVEVFARRPQVQERLTSQIADLLMAQLGARGAIVVLECEHLCMEMRGIRKAGARTVTSAVRGGFQTDGKVRAEVMALINAR

SEQ ID NO: 4047 - protein, 208 aa, Actinopolymorpha cephalotaxi
  REGION 1..208: note = tr|A0A1I2NG39|A0A1I2NG39_9ACTN GTP cyclohydrolase 1; OS = Actinopolymorpha cephalotaxi OX=504797 GN=folE PE=3 SV=1
MTADATGVTDVTDLHAPAEIPPFDHGRAERAIRELLLAVGEDPDREGLRDTPARVARSYAEMFAGLRMTPESVLSTTFDLGHDEMVLVKDIEVWSVCEHHLVPFTGNAHIGYIPNAEGQITGLSKLARLVDVYAKRPQVQERLTTQVAEALLRILSPRGVIVVIECEHLCMTMRGVRKPGAKTVTSAVRGQLRDPATRAEAMSLIIGA

SEQ ID NO: 4048 - protein, 208 aa, Actinopolymorpha singaporensis
  REGION 1..208: note = tr|A0A1H1QIW4|A0A1H1QIW4_9ACTN GTP cyclohydrolase 1; OS = Actinopolymorpha singaporensis OX=117157 GN=folE PE=3; SV = 1
MTAKATGVTDVRDLHEAAEIPPFDHGRAERAIRELLLAVGEDPDREGLHDTPARVARAYAEMFAGLRMTPESVLTTTFDLGHDEMVLVKDIEVWSVCEHHLVPFTGSAHIGYIPNAEGQITGLSKLARLVDVYAKRPQVQERLTTQVADALLRILSPRGVIVVIECEHLCMTMRGVRKPGAKTVTSAVRGQLRDPTTRAEAMSLIIGA

SEQ ID NO: 4049 - protein, 212 aa, Actinopolyspora alba
  REGION 1..212: note = tr|A0A1I1W4A3|A0A1I1W4A3_9ACTN GTP cyclohydrolase 1; OS = Actinopolyspora alba OX=673379 GN=folE PE=3 SV=1
MTGQGVPIGPDAEFGSDPAELVDEYFDRPRAEAAIRELLLAAGEDPERDGLRETPARVARAYEELFTGLYTDPDEVLDRTFDEAHEELVLVRDIPMYSQCEHHLLPFHGMAHIGYIPNEQGRVTGLSKLARLVDLYAKRPQVQERLTSQIADALTRKLEPRGVIVVVDAEHLCMGMRGIRKAGSTTTTSAVRGIFRSSSSSRAEALSLIRGK

SEQ ID NO: 4050 - protein, 201 aa, Actinopolyspora erythraea
  REGION 1..201: note = tr|A0A223RSS6|A0A223RSS6_9ACTN GTP cyclohydrolase 1; OS = Actinopolyspora erythraea OX=414996 GN=CDG81_12220 PE=3; SV = 1
MTSFSPPRSGSDSFDDDFERGEEVGVGSDPLEEIARSLLVEIGEDPDRDGLRETPARYARWWREFIDYDPGKIETSFHSVSSDQLIEVSGIRVWSLCEHHLLPFWCDVSIAYVAHNKILGLSKFARIAHKHAHRLQVQERLTAGIADSVQEFTGSPDVAVRARGEHLCMTMRGVRTSADMSTSVLRGDFERNAELRTRLSS

SEQ ID NO: 4051 - protein, 212 aa, Actinopolyspora erythraea
  REGION 1..212: note = tr|A0A099DAJ5|A0A099DAJ5_9ACTN GTP cyclohydrolase 1; OS = Actinopolyspora erythraea OX=414996 GN=folE PE=3 SV=1
MTREGVPIGPDAEFGSDPAEMVDEHFDRARAEAAIRELLLAAGEDPERDGLRETPARVARAYEELFTGLYTDPDQVLDRTFDEAHEELVLVRDIPVYSQCEHHLLPFHGMAHIGYIPNEQGRVTGLSKLARLVDLYAKRPQVQERLTSQIADALTRKLEPRGVIVVVDAEHLCMGMRGIRKAGSTTTTSAVRGIFRSSSSSRAEALSLIRGK

SEQ ID NO: 4052 - protein, 207 aa, Actinopolyspora mortivallis
  REGION 1..207: note = tr|A0A2T0GTH2|A0A2T0GTH2_9ACTN GTP cyclohydrolase 1; OS = Actinopolyspora mortivallis OX=33906 GN=folE PE=3 SV=1
MPAGPDAEFGSDPAEFVHQRFDKPRAQAAIRELLLAAGEDPDREGLRETPERVARAYEELFTGLYTDPDEVLDRTFDESHEELVLVRDIPMYSQCEHHLLPFHGMAHIGYIPNDQGRVTGLSKLARLVDLYAKRPQVQERLTSQIADALTRKLEPRGVIVVVEAEHLCMGMRGVRKAGSVTTTSAVRGVFRSSASSRSEALSLIRGK

SEQ ID NO: 4053 - protein, 212 aa, unidentified
  source 1..212: note = Actinopolyspora mzabensis
  REGION 1..212: note = tr|A0A1G9B0V3|A0A1G9B0V3_9ACTN GTP cyclohydrolase 1; OS = Actinopolyspora mzabensis OX=995066 GN=folE PE=3 SV=1
MTGQGVPIGPDAEFGSDPAEFVEEHFDRPRAEAAIRELLLAAGEDPERDGLRETPARVARAYEELFTGLYTDPDEVLDRTFDEAHEELVLVRDIPMYSQCEHHLLPFHGMAHIGYIPNEQGRVTGLSKLARLVDLYAKRPQVQERLTSQIADALIRKLEPRGVIVVVDAEHLCMGMRGIRKAGSTTTTSAVRGIFRSSSSSRAEALSLIREK

SEQ ID NO: 4054 - protein, 212 aa, unidentified; identical to SEQ ID NO: 4049
  source 1..212: note = Actinopolyspora righensis
  REGION 1..212: note = tr|A0A1I7BNC7|A0A1I7BNC7_9ACTN GTP cyclohydrolase 1; OS = Actinopolyspora righensis OX=995060 GN=folE PE=3 SV=1

SEQ ID NO: 4055 - protein, 212 aa, unidentified
  source 1..212: note = Actinopolyspora saharensis
  REGION 1..212: note = tr|A0A1H1F587|A0A1H1F587_9ACTN GTP cyclohydrolase 1; OS = Actinopolyspora saharensis OX=995062 GN=folE PE=3 SV=1
MTGESVPVGPDAEFGADPAEFVDQKFDRPRAAAAIRELLLAAGEDPDREGLRETPERVARAYEELFTGLYTDPDEVLDRTFDESHEELVLVRDIPMYSQCEHHLLPFHGMAHIGYIPNDQGRVTGLSKLGRLVDLYAKRPQVQERLTSQIADALTRKLEPRGVIVVVEAEHLCMGMRGVRKAGSVTTTSAVRGVFRSSASSRSEALSLIRGK

SEQ ID NO: 4056 - protein, 212 aa, Actinopolyspora sp.
  REGION 1..212: note = tr|A0A543JSN1|A0A543JSN1_9ACTN GTP cyclohydrolase 1; OS = Actinopolyspora sp. DSM 45965 OX=2586995 GN=folE PE=3; SV = 1
MTGESVPVGPDAEFGADPAEFVDQKFDRPRAAAAIRELLLAAGEDPDREGLLETPERVARAYEELFTGLYTDPDEVLDRTFDESHEELVLVRDIPMYSQCEHHLLPFHGMAHIGYIPNDQGRVTGLSKLGRLVDLYAKRPQVQERLTSQIADALTRKLEPRGVIVVVEAEHLCMGMRGVRKAGSVTTTSAVRGVFRSSASSRSEALSLIRGK

SEQ ID NO: 4057 - protein, 212 aa, Actinopolyspora sp.; identical to SEQ ID NO: 4049
  REGION 1..212: note = tr|A0A4Q8B2D2|A0A4Q8B2D2_9ACTN GTP cyclohydrolase 1; OS = Actinopolyspora sp. DSM 45956 OX=2512148 GN=folE PE=3; SV = 1

SEQ ID NO: 4058 - protein, 201 aa, Actinopolyspora xinjiangensis
  REGION 1..201: note = tr|A0A1H0S1C6|A0A1H0S1C6_9ACTN GTP cyclohydrolase 1; OS = Actinopolyspora xinjiangensis OX=405564; GN = SAMN04487905_103328 PE=3 SV=1
MTSFSPPRSGSDSFDDDFESGEEVGVDSDPLEQIARSLLVEIGEDPDRDGLRETPARYARWWREFIDYDPGKIETSFHSVSSDQLIEVSGIRVWSLCEHHLLPFWCDVSIAYVARNKILGLSKFARIAHKHAHRLQVQERLTAGIADSVQEFTGSPDVAVRARGEHLCMTMRGVRTSADMSTSVLRGDFERNAELRTRLSS

SEQ ID NO: 4059 - protein, 212 aa, Actinopolyspora xinjiangensis
  REGION 1..212: note = tr|A0A1H0WXD1|A0A1H0WXD1_9ACTN GTP cyclohydrolase 1; OS = Actinopolyspora xinjiangensis OX=405564 GN=folE PE=3; SV = 1
MTREGVPIGPDAEFGSDPAELVDEHFDRARAEAAIRELLLAAGEDPERDGLRETPARVARAYEELFTGLYTDPDQVLDRTFDEAHEELVLVRDIPVYSQCEHHLLPFHGMAHIGYIPNEQGRVTGLSKLARLVDLYAKRPQVQERLTSQIADALTRKLEPRGVIVVVDAEHLCMGMRGIRKAGSTTTTSAVRGIFRSSSSSRAEALSLIRGK

SEQ ID NO: 4060 - protein, 207 aa, unidentified
  source 1..207: note = Actinorugispora endophytica
  REGION 1..207: note = tr|A0A4R6V4H9|A0A4R6V4H9_9ACTN GTP cyclohydrolase 1; OS = Actinorugispora endophytica OX=1605990 GN=folE PE=3 SV=1
MSGYHEEAGDYAEPLPPAGVDQHRIEKAVREILLAIGEDPDRDGLLDTPARVARAYAEQFAGLDQRPEDVLTTVFEAGHEEMVLVRDIEMYSTCEHHLVPFYGVAHIGYIPSAEGQITGLSKLARLVDVYARRPQVQERLTTQIADALMTNLKPRGVIVVIEAEHLCMTMRGVRKPGAKTLTSAVRGGFRDSDRTRAEAMSLILGRR

SEQ ID NO: 4061 - protein, 218 aa, unidentified
  source 1..218: note = Actinorugispora endophytica
  REGION 1..218: note = tr|A0A4R6UXH4|A0A4R6UXH4_9ACTN GTP cyclohydrolase 1; OS = Actinorugispora endophytica OX=1605990 GN=folE PE=3 SV=1
MSDQNAQRVLTEAEAPEARPVLSRLRVMRPPAETDLEAAEAAAADLLAALGLPLGGEGMAETPRRMAHAYAEMLAVPSFDMTTFPNTEGYDELVLVKGIPVRSLCEHHMLPFTGVAHVGYLPADRILGLSKFARVVDFFAHRAQTQERLTKQVTEKLQERLAPRGVGVVVEAEHTCMSLRGVRAAGARTVTSAFFGHLREDSAARAEFLALTGVRGEA

SEQ ID NO: 4062 - protein, 209 aa, Actinosynnema mirum
  REGION 1..209: note = tr|C6WGG7|C6WGG7_ACTMD GTP cyclohydrolase 1; OS = Actinosynnema mirum (strain ATCC 29888 / DSM 43827 / NBRC 14064 / IMRU 3971) OX=446462 GN=folE PE=3 SV=1
MIEFDNAGLPSNGEAGVAAKRPFDQERAEAAVRELLLACGEDPEREGLRETPARVARAYREMFAGLFTEPDGVLAKTFDESHEELVLVTEIPVYSFCEHHLLPFHGVAHVGYIPNEQGRVTGLSKLARLVDLYAKRPQVQERLTSQVADALVRRLEPRGVIVVVEAEHLCMGMRGVRKPGSRTTTSAVRGLLRTSASSRAEAISLIKGR

SEQ ID NO: 4063 - protein, 209 aa, Actinosynnema pretiosum
  REGION 1..209: note = tr|A0A290YZH1|A0A290YZH1_9PSEU GTP cyclohydrolase 1; OS = Actinosynnema pretiosum OX=42197 GN=folE PE=3 SV=1
MIEFDNAGLPSNGEAGVAAKRPFDQKRAEAAVRELLLACGEDPEREGLRETPARVARAYREMFAGLFTEPDSVLAKTFDESHEELVLVTDIPVYSFCEHHLLPFHGVAHVGYIPNEQGRVTGLSKLARLVDLYAKRPQVQERLTSQVADALVRRLEPRGVIVVVEAEHLCMGMRGVRKPGSRTTTSAVRGLLRTSASSRAEAISLIKGR

SEQ ID NO: 4064 - protein, 209 aa, Actinosynnema pretiosum
  REGION 1..209: note = tr|A0A347PSD1|A0A347PSD1_9PSEU GTP cyclohydrolase 1; OS = Actinosynnema pretiosum subsp. pretiosum OX=103721; GN = folE PE=3 SV=1
MIEFDNAGLPSNGEAGVAAKRPFDQERAEAAVRELLLACGEDPEREGLRETPARVARAYREMFAGLFTEPDGVLAKTFDESHEELVLVTDIPVYSFCEHHLLPFHGVAHVGYIPNEQGRVTGLSKLARLVDLYAKRPQVQERLTSQVADALVRRLEPRGVIVVVEAEHLCMGMRGVRKPGSRTTTSAVRGLLRTSASSRAEAISLIKGR

SEQ ID NO: 4065 - protein, 199 aa, Actinosynnema sp.
  REGION 1..199: note = tr|A0A1V2PTI3|A0A1V2PTI3_9PSEU GTP cyclohydrolase 1; OS = Actinosynnema sp. ALI-1.44 OX=1933779 GN=folE PE=3 SV=1
MRAVTALRVVHEPDTGVDLAAAEEAAKAFLHALGVPTDTESLRGTPGRMARAYAELFSPRPFDLTTFPNDEGYDELVLARSIPVRSVCEHHLLPFVGTAHVGYLPGERILGLSKLARIVEYFACRPQVQERLTKQVADWLDDHLRPRGIGVVIEAEHTCMTLRGVLASGSTTVTSTLLGSLRDDARSRQEFFALTGVHA

SEQ ID NO: 4066 - protein, 198 aa, Actinosynnema sp.
  REGION 1..198: note = tr|A0A1V2PSE0|A0A1V2PSE0_9PSEU GTP cyclohydrolase 1; OS = Actinosynnema sp. ALI-1.44 OX=1933779 GN=folE PE=3 SV=1
MDGARSVRPVFDQARAERAVRELLLACGEDPDRQGLAETPARVARAYREMFAGLYMDPDAVLAKTFDEAHEELVLVTDIPMYSYCEHHLLPFHGVAHVGYIPNEHGKVTGLSKLARLVDAYAKRPQVQERLTSQIADSLMRTLEPRGVIVVVEAEHLCMSMRGIRKPGARTTTSGVRGQFKTSASSRAEALDLIKARR

SEQ ID NO: 4067 - protein, 215 aa, Actinotalea fermentans
  REGION 1..215: note = tr|A0A511Z116|A0A511Z116_9CELL GTP cyclohydrolase 1; OS = Actinotalea fermentans OX=43671 GN=folE_2 PE=3 SV=1
MTSLSVTPPQTPPSAPLRVVPDAAEPDLEAATVAAGAFLAALGVPLDSPSMAASPRRMAAAWSEMLTPRAFDLTTFPNDGGYREMVLARDLPVHSICEHHLLPFVGVAHVAYLPGERLLGLSKLARLVELHARRPQVQERLTQQIADWLDRELAPRGVGVVVEAHHQCMSLRGVRTPESSTVTAAFHGALGQRDARAELLSLAGARRALDEEATA

SEQ ID NO: 4068 - protein, 209 aa, Actinotalea fermentans
  REGION 1..209: note = tr|A0A511YXV4|A0A511YXV4_9CELL GTP cyclohydrolase 1; OS = Actinotalea fermentans OX=43671 GN=folE_1 PE=3 SV=1
MTDLPDDVPLPGEPDLAVPPEPHYDAPRAEAAVRELLLAIGEDPDRDGLRETPARVARAYAETFAGLYQDPREILATTFELGHEEMILVKDIAVYSTCEHHLVPFHGVAHVAYIPGPDGRVTGLSKIARLVDLYARRPQVQERLTSQIADTLVEVLAPGGVLVVVDCEHLCMTMRGVRKPGSHTVTSAVRGQLRNPATRAEAMSLIIGR

SEQ ID NO: 4069 - protein, 212 aa, unidentified
  source 1..212: note = Actinotalea ferrariae
  REGION 1..212: note = tr|A0A021VMH1|A0A021VMH1_9CELL GTP cyclohydrolase 1; OS = Actinotalea ferrariae CF5-4 OX=948458 GN=folE PE=3 SV=1
MSHTADDIPIPGGTTDEEISMTPVLYDAERAERAVRELLLAVGEDPDRDGLRETPARVARAYAELFAGLYQDPADVLKVTFDIGGHDEMILVKDIEVYSTCEHHLVPFHGVAHVGYIPGEDGRVTGLSKLARLVDVFARRPQVQERLTTQIADTLVEVLRPQGVIVVLQCEHLCMSMRGVRKPGSNTLTSAVRGQMRDAATRAEAMSLILGR

SEQ ID NO: 4070 - protein, 197 aa, unidentified
  source 1..197: note = Actinotignum sanguinis
  REGION 1..197: note = tr|A0A430JT81|A0A430JT81_9ACTO GTP cyclohydrolase 1; OS = Actinotignum sanguinis OX=1445614 GN=folE PE=3 SV=1
MDTQRIDAERVDTGRVERAVRELLSAIGEDPDRPGLVDTPARVARACTEIFAGVGKDPDAVLDAQFAEDFHEMVVVRDITFYSMCEHHLLPFFGVAHIVYIPGEEGKVTGLSKLARLVEGYARRPQVQERLTTQIANALRDRLGAAGVLVVVEAEHMCMTMRGVRNSGSRTVTSAVRGMLRKPSTRAEAMSLIERGA

SEQ ID NO: 4071 - protein, 219 aa, unidentified
  source 1..219: note = Actinotignum schaalii
  REGION 1..219: note = tr|S2VP96|S2VP96_9ACTO GTP cyclohydrolase 1; OS = Actinotignum schaalii FB123-CNA-2 OX=883067 GN=folE; PE = 3 SV=1
MSAAESAGNGPVDSQSAETQRHAARQADTARVVDTERVERAVRELLSAIGEDPDRPGLVDTPARVARACTEIFAGVGKDPDAVLDAQFAEDFHEMVVVRDITFYSMCEHHLLPFFGVAHIVYIPGEEGKVTGLSKLARLVEGYARRPQVQERLTTQIANALRDRLGAAGVLVVVEAEHMCMTMRGVCNSGSRTVTSAVRGMLRKPSTRAEAMSLIERGA

SEQ ID NO: 4072 - protein, 203 aa, unidentified
  source 1..203: note = Actinotignum schaalii
  REGION 1..203: note = tr|A0A068NKA7|A0A068NKA7_9ACTO GTP cyclohydrolase 1; OS = Actinotignum schaalii OX=59505 GN=folE PE=3 SV=1
MDTQRHGTRPVDTARVVDTERVERAVRELLSAIGEDPDRPGLVDTPARVARACTEIFSGVGKDPDAVLDAQFAEDFHEMVVVRDITFYSMCEHHLLPFFGAAHIVYIPGAEGKVTGLSKLARLVEGYARRPQVQERLTTQIANALRDRLGAAGVLVVVEAEHMCMTMRGVRNSGSRTVTSAVRGMLRKPSTRAEAMSLIERGA

SEQ ID NO: 4073 - protein, 202 aa, unidentified
  source 1..202: note = Actinotignum timonense
  REGION 1..202: note = tr|A0A2I2J4W7|A0A2I2J4W7_9ACTO GTP cyclohydrolase 1; OS = Actinotignum timonense OX=1870995 GN=folE PE=3 SV=1
MDCQGVDTQRPGARQVDTARVERAVRELLSAIGEDPDRPGLVDTPARVARACTEIFSGVGKDPDAVLDAQFAEDFHEMVVVRDITFYSMCEHHLLPFFGAAHIVYIPGAEGNVTGLSKLARLVEGYARRPQVQERLTTQIANALRDRLGAAGVLVVVEAEHMCMTMRGVRNSGSRTVTSAVRGMLRKPSTRAEAMSLIERGA

SEQ ID NO: 4074 - protein, 198 aa, unidentified
  source 1..198: note = Actinotignum urinale
  REGION 1..198: note = tr|A0A2N6UYC4|A0A2N6UYC4_9ACTO GTP cyclohydrolase 1; OS = Actinotignum urinale OX=190146 GN=folE PE=3 SV=1
MSTSFVEQPQFDEERVRNAIRELLIGIGENPDREGLQETPARIARSYQEIFSGLGTDPSEVLSTTFAENFHEMIIVRDIPFTSMCEHHLLPFWGHAHVAYIPGKDGKVTGLSKLARLVEGYSRRPQIQERLTTQIAEALIGALEASGALVVIEAEHMCMNMRGVRKPGSYTVTSAVRGALRNATTRAEAMSLIQGCRS

SEQ ID NO: 4075 - protein, 188 aa, unidentified
  source 1..188: note = Acutalibacter muris
  REGION 1..188: note = tr|A0A1Z2XVH7|A0A1Z2XVH7_9FIRM GTP cyclohydrolase 1; OS = Acutalibacter muris OX=1796620 GN=folE PE=3 SV=1
MDMDKLRRAVRDILEAVGEDPEREGLQETPDRVARMYGEIFSGLASDPKEHLKIFNESGKHDELVFVKDIPLYSVCEHHLLPFIGRAHIAYIPKDGGIIGLSKFARIVDCFARRPQVQERLTGQIADFLYDNLKPQGVAVFIQAEHLCMTMRGARAAGTVTETSALRGCMRSDARTRAEVTALLKGKQ

SEQ ID NO: 4076 - protein, 204 aa, unidentified
  source 1..204: note = Acutalibacter sp.
  REGION 1..204: note = tr|A0A3A9F2A2|A0A3A9F2A2_9FIRM GTP cyclohydrolase 1; OS = Acutalibacter sp. 1XD8-33 OX=2320081 GN=folE PE=3 SV=1
MRRGRGQEAETERSVNPMDMEKIRRAVRDILEAVGEDPDREGLRETPDRVARMYGEIFSGLDADTKEHLKIFQESGKHDELVFVKDIPLYSVCEHHLLPFIGKAHIAYIPKDGRIIGLSKFSRVVDCFARRPQVQERLTGQIADFLYDNLAPRGVAVFIEAEHLCMTMRGARAAGSRTQTSALRGCMRSDARTRAEVTALLGGG

SEQ ID NO: 4077 - protein, 217 aa, Adhaeribacter aerolatus
  REGION 1..217: note = tr|A0A512B381|A0A512B381_9BACT GTP cyclohydrolase 1; OS = Adhaeribacter aerolatus OX=670289 GN=folE2_2 PE=3 SV=1
MDKYNLDAEDLEHENSSLHTPLREDAFKMTNDLKIELIEKHFREIMHILGLDLTDDSLQGTPHRVAKMYVNEIFRGLDPENKPHAKLFQNRFAYNQMLVERDITLYSYCEHHFVPIIGKAHVAYIPDKHVVGLSKLNRIVQYYAKRPQVQERLTMQIADELKSTLFTDNVAVYIEADHLCVMSRGVNDVSSSTITTEYSGLFQQDQYRNEFLTYIRK

SEQ ID NO: 4078 - protein, 221 aa, Adhaeribacter aerolatus
  REGION 1..221: note = tr|A0A512AYK7|A0A512AYK7_9BACT GTP cyclohydrolase 1; OS = Adhaeribacter aerolatus OX=670289 GN=folE2_1 PE=3 SV=1
MITLNGNIIPVKEANGKDAAHNPEKLLKLNGAEATDESKIKAISHYFRQIMLMLGLDMEDDSLKGTPDRVAKMYVQEIFRGMNPANKPAVTLFENKYHYNKMLVVKDITVYSCCEHHFLPIMGKAHVAYFSSGKVIGLSKVNRLVQYYCQRPQVQERLTEQIAQALQKALHTEDVAVIIEATHLCVAARGIRDIASTTRTSHYSGKFQNNAIKKELLSWLK

SEQ ID NO: 4079 - protein, 226 aa, Adhaeribacter sp.
  REGION 1..226: note = tr|A0A2T2Y9F8|A0A2T2Y9F8_9BACT GTP cyclohydrolase 1; OS = Adhaeribacter sp. HMF7605 OX=2072846 GN=folE PE=3 SV=1
MDKPLTPNIPLDLESEETDPISVHSAIETPLRPDAFALSDAEKIERITFYFREIMHTLGLDLTDDSLQGTPHRVAKMYVNEVFRGLNPENKPHAKLFENRYAYNQMLVERDITIYSYCEHHFVPIIGKAHVAYMPEKNVVGLSKLNRIVQYFAKRPQVQERLTMQIADELKQVLHTQNVAVYIEADHLCVMSRGVNDVGSSTITTEFSGLFQEDKYRQEFLQYIRK

SEQ ID NO: 4080 - protein, 225 aa, Adhaeribacter sp.
  REGION 1..225: note = tr|A0A369QI14|A0A369QI14_9BACT GTP cyclohydrolase 1; OS = Adhaeribacter sp. HMF7616 OX=2072847 GN=gch1 PE=3 SV=1
MDKLTPNIPLDLEPEETDPISSNTSIETPLRPDAFALSDAEKIERITFYFREIMHTLGLDLTDDSLQGTPHRVAKMYVNEVFRGLNPENKPQAKLFENRYAYNQMLVERDITIYSYCEHHFVPIIGKAHVAYIPENNVVGLSKLNRIVQYFAKRPQVQERLTMQIADELKNVLHTQNVAVYIEADHLCVMSRGVNDVGSSTITTEFTGLFQEDKYRQEFLQYIRK

SEQ ID NO: 4081 - protein, 187 aa, Adlercreutzia equolifaciens
  REGION 1..187: note = tr|A0A3E2EH08|A0A3E2EH08_9ACTN GTP cyclohydrolase 1; OS = Adlercreutzia equolifaciens OX=446660 GN=folE PE=3 SV=1
MDTAKIEAGVRLILEGIGEDPEREGLRETPARVARMYEEVLGGLEEDPSRHFDVTFDEGHEEIVLVGDIPFFSMCEHHLAPFFGKAHVAYIPGEDGRICGISKLARLVDGFAKRPQVQERLTGQIADTLVEALHPAGVIVVLEAEHMCMSMRGVKKPGAKTTTRAVRGCFETDADARSEALSLIFRH

SEQ ID NO: 4082 - protein, 265 aa, Advenella incenata
  REGION 1..265: note = tr|A0A4Q7VDV1|A0A4Q7VDV1_9BURK GTP cyclohydrolase FolE2 OS=Advenella incenata OX=267800 GN=folE2 PE=3 SV=1
MNSQIEPSVLMPDVQSTLDERHITIQRVGIRQVKQPMLLQLADGSVQATIAEWTFTVMLPAHEKGTHMSRFMALLNTWRNRPMTAETFRAMALEMLPLLHAEKGDITATFPYFINKKAPVSGVESLMDYQVTWVARAQGQQAVVEQTVLVPVMSLCPCSKAISEYGAHNQRSHVTVSLIAEQHYELDDLIRRIEAQGSCELWGLLKRTDEKYVTERSYDNPKFVEDLVRDVAAVFQKLPGVVSYRVEAENFESIHNHSAYAVVEG

SEQ ID NO: 4083 - protein, 265 aa, Advenella kashmirensis
  REGION 1..265: note = tr|V8QMZ6|V8QMZ6_9BURK GTP cyclohydrolase FolE2; OS = Advenella kashmirensis W13003 OX=1424334 GN=folE2 PE=3; SV = 1
MNSQIEPSVLMPDVQSTLDERHITIQRVGIRQVKQPMLLQLADGSVQATIAEWTFTVMLPAHEKGTHMSRFMALLNAWRNRPMTAETFRAMALEMLPLLHAEKGDITATFPYFINKKAPVSGVESLMDYQVTWVAMAEGDQAVVEQTMVVPVMSLCPCSKAISEYGAHNQRSHVTVSLTAQQHYELDDLIRRIEAQGSCELWGLLKRTDEKYVTERSYDNPKFVEDLVRDVAAVFQKLPGVVKYRVQAENFESIHNHSAYAVVEG

SEQ ID NO: 4084 - protein, 265 aa, Advenella kashmirensis
  REGION 1..265: note = tr|A0A356LCA9|A0A356LCA9_9BURK GTP cyclohydrolase FolE2 OS=Advenella kashmirensis OX=310575 GN=folE2 PE=3; SV = 1
MNSQIEPSVLMPDVQSTLDERHITIQRVGIRQVKQPMLLQLADGSVQATIAEWTFTVMLPAHEKGTHMSRFMALLNTWRNRPMTAETFRAMALEMLPLLHAEKGDITATFPYFINKTAPVSGVESLMDYQVTWVAKAQGEQAVVEQTVLVPVMSLCPCSKAISEYGAHNQRSHVTVSLIAEQHYELDDLIRRIEAQGSCELWGLLKRTDEKYVTERSYDNPKFVEDLVRDVAAVFQKLPGVVSYRVEAENFESIHNHSAYAVVEG

SEQ ID NO: 4085 - protein, 246 aa, Advenella mimigardefordensis
  REGION 1..246: note = tr|W0PEW3|W0PEW3_9BURK GTP cyclohydrolase 1; OS = Advenella mimigardefordensis DPN7 OX=1247726 GN=folE; PE = 4 SV=1
MSDSNIKKGNEQLAEQATHPDDSGYISIRIRERIRQAGARFHANDNIARFIEPGELDQLQQEVQDKMQAVLSSLVIDTDSDHNTNETAKRVAKMYLREVFAGRYTEAPQVTEFPNIEKLNELMIVGPIQVRSACSHHLCPIMGKVWIGIMPNEHSNLIGLSKYARLVAWLMERPQIQEEAVKHVADLLMKKVNPDGLAVVMDADHFCMQWRGVRDMESRMINSVMRGSFLNDSDLRKEFLSLIRAR

SEQ ID NO: 4086 - protein, 265 aa, Advenella mimigardefordensis
  REGION 1..265: note = tr|W0PDN6|W0PDN6_9BURK GTP cyclohydrolase FolE2; OS = Advenella mimigardefordensis DPN7 OX=1247726 GN=folE2; PE = 3 SV=1
MNSQIEPSVLMPDVQSTLDERHITIQRVGIRQVKQPMLLQLADGSVQATIAEWTFTVMLPAHEKGTHMSRFMALLNTWRNRPMTAESFRAMALEMLPLLHAEKGDITATFPYFINKKAPVSGVESLMDYQVTWVARAEGQQAVVEQTMLVPVMSLCPCSKAISEYGAHNQRSHVTVSVVAEQHYELDDLIRRIEAQGSCELWGLLKRTDEKYVTERSYDNPKFVEDLVRDVAAVFQKLPGVVRYRVEAENFESIHNHSAYAVVEG

SEQ ID NO: 4087 - protein, 265 aa, Advenella sp.
  REGION 1..265: note = tr|A0A2M9TP33|A0A2M9TP33_9BURK GTP cyclohydrolase FolE2 OS=Advenella sp. S44 OX=1982755 GN=folE2 PE=3 SV=1
MNSQIEPSVLMPDVQSTLDERHITIQRVGIRQVKQPMLLQLADGSVQATIAEWTFTVMLPAHEKGTHMSRFMALLNTWRNRPMTAETFRAMALEMLPLLHAEKGDITATFPYFINKKAPVSGVESLMDYQVTWVAKAQKDQAVVEQTVLVPVMSLCPCSKAISEYGAHNQRSHVTVSLIAQQHYELDDLIRRIEAQGSCELWGLLKRTDEKYVTERSYDNPKFVEDLVRDVAAVFQKLPGVVSYRVEAENFESIHNHSAYAVVEG

SEQ ID NO: 4088 - protein, 199 aa, Aequorivita antarctica
  REGION 1..199: note = tr|A0A5C6Z288|A0A5C6Z288_9FLAO GTP cyclohydrolase 1; OS = Aequorivita antarctica OX=153266 GN=folE PE=3 SV=1
MSSYRYFEEYDQPVTDSLIDNYSNILSTIGEDVSREGILKTPERAAKAMQFLTSGNCQDPAEILKSAMFAEAYHDMVIIKDIELYSLCEHHILPFFGKAHIAYIPDGYIVGLSKIPRIVDVFARRLQVQERLTHDILECINDTLKPKGVAVVIEASHMCMMMRGVQKQNSVTTTSGFRGQFEAIETRSEFLKLISNDLS

SEQ ID NO: 4089 - protein, 226 aa, Aequorivita antarctica
  REGION 1..226: note = tr|A0A5C6YXS2|A0A5C6YXS2_9FLAO GTP cyclohydrolase 1; OS = Aequorivita antarctica OX=153266 GN=folE PE=3 SV=1
MDLEKQLKEIEAMGNDHIGSSTETPMRPDAFELSDIEKIASIKKDVQNILHTLGLDLKDDSLKGTPTRVAKMFVQEIFGGLHPDRRPKASTFENKYKYKEMLVEKNITLYSTCEHHLLPIVGKAHIAYISNGSVVGLSKMNRIVDYYAKRPQVQERLTMQIVKELQQVLNTEDVACVIDAKHLCVNSRGIRDIDSSTVTSEFGGAFKNSETRREFLDYIKLDTQFQ

SEQ ID NO: 4090 - protein, 225 aa, Aequorivita lipolytica
  REGION 1..225: note = tr|A0A5C6YQM4|A0A5C6YQM4_9FLAO GTP cyclohydrolase 1; OS = Aequorivita lipolytica OX=153267 GN=folE PE=3 SV=1
MDLEKQLKDIEEMGNDHIGNSTETPMRHDAFELSDIEKIASIKKDVQNIMHTLGLDLTDDSLKGTPTRVAKMFVQEIFGGLHPDRRPKASTFENKYKYQEMLVEKNITLYSTCEHHLLPIVGKAHIAYISNGTVVGLSKMNRIVDYYAKRPQVQERLTMQIVKELQDVLNTEDVACVIDAKHLCVNSRGIRDIDSSTVTSEFGGAFKKPETRREFLDYIKLDTEF

SEQ ID NO: 4091 - protein, 199 aa, Aequorivita lipolytica
  REGION 1..199: note = tr|A0A5C6YLS8|A0A5C6YLS8_9FLAO GTP cyclohydrolase 1; OS = Aequorivita lipolytica OX=153267 GN=folE PE=3 SV=1
MASYRYFEEYDQPVTDSLIENYSKILSTIGEDVSREGILKTPERAAKAMQFLTSGNCQDPAEILKSAMFAEAYHDMVIIKDIELYSLCEHHILPFFGKAHIAYIPDGHIVGLSKIPRVVDIFSRRLQVQERLTHDILECLNNTLKPKGVAVVIEASHMCMMMRGVQKQNSVTTTSGFRGQFEAIETRNEFLKLISNDLS

SEQ ID NO: 4092 - protein, 225 aa, unidentified
  source 1..225: note = Aequorivita soesokkakensis
  REGION 1..225: note = tr|A0A1A9LGL4|A0A1A9LGL4_9FLAO GTP cyclohydrolase 1; OS = Aequorivita soesokkakensis OX=1385699 GN=folE PE=3 SV=1
MDLEKQLKDIEAMGNDHIGSSTETPMRTDAFELSDIEKIASIKKDIQNIMHTLGLDLTDDSLKGTPTRVAKMFVQEIFGGLHPDRRPKASTFENKYKYQEMLVEKNITLYSTCEHHLLPIVGKAHIAYISNGSVVGLSKMNRIVDYYAKRPQVQERLTMQIVKELQQVLNTEDVACVIDAKHLCVNSRGIRDIDSSTVTSEFGGAFKNSETRREFLDYIKLDTEF

SEQ ID NO: 4093 - protein, 199 aa, unidentified
  source 1..199: note = Aequorivita soesokkakensis
  REGION 1..199: note = tr|A0A1A9LIJ6|A0A1A9LIJ6_9FLAO GTP cyclohydrolase 1; OS = Aequorivita soesokkakensis OX=1385699 GN=folE PE=3 SV=1
MSSYRYFEEYDQPVTDNLIENYSKILSGIGEEVSREGLLKTPERAAKAMQFLTSGNCQDPAEILKSAMFAEAYHDMVIIKDIELYSLCEHHILPFFGKAHVAYIPDGYIVGLSKIPRIVDVFARRLQVQERLTHDILECINNTLKPKGVAVVIEASHMCMMMRGVQKQNSVTTTSGFRGQFEAIETRNEFLKLISSDLS

SEQ ID NO: 4094 - protein, 226 aa, Aequorivita sp.
  REGION 1..226: note = tr|A0A330ML95|A0A330ML95_9FLAO GTP cyclohydrolase 1; OS = Aequorivita sp. CIP111184 OX=2211356 GN=folE_1 PE=3 SV=1
MDLEKQLKEIEAMGNDHIGSSSETPMRTDAFEMSDIEKIASIKKDVQNIMHTLGLDLNDDSLKGTPTRVAKMFVQEIFGGLHPDRKPKASTFENKYKYQEMLVEKNITLYSTCEHHLLPIVGKAHIAYISNGSVVGLSKMNRIVDYYAKRPQVQERLTMQIVKELQEVLNTEDVACVIDAKHLCVNSRGIRDIDSSTVTSEFGGAFKNSETRREFLDYIKLDTQFQ

SEQ ID NO: 4095 - protein, 225 aa, Aequorivita sp.
  REGION 1..225: note = tr|A0A2E5AZL3|A0A2E5AZL3_9FLAO GTP cyclohydrolase 1; OS = Aequorivita sp. OX=1872390 GN=folE PE=3 SV=1
MDLEKQLKEIEAMGNDHIGSSTETPMRTDAFELSDIEKIASIKKDVQNIMHTLGLDLSDDSLKGTPTRVAKMFVQEIFGGLHPDRRPKASTFENKYKYQEMLVEKNITLYSTCEHHLLPIVGKAHIAYISNGTVVGLSKMNRIVDYYAKRPQVQERLTMQIVKELQQVLGTEDVACVIDAKHLCVNSRGIRDIDSSTVTSEFGGAFKNVETRREFLDYIKLDTEF

SEQ ID NO: 4096 - protein, 225 aa, Aequorivita sublithincola
  REGION 1..225: note = tr|I3YSW7|I3YSW7_AEQSU GTP cyclohydrolase 1; OS = Aequorivita sublithincola (strain DSM 14238 / LMG 21431 / ACAM 643 / 9-3) OX=746697 GN=folE PE=3 SV=1
MDLEKHLKEIEAMGDDHISGSTETPMRPDAFELSDIEKIASIKKDVQNIMQTLGLDLTDDSLKGTPNRVAKMFVQEIFGGLHPDRKPKASTFENKYKYQEMLVEKNITLYSTCEHHLLPIVGRAHIAYISNGTVVGLSKMNRIVDYYAKRPQVQERLTMQIVKELQQVLNTDDVACVIDAKHLCVNSRGIRDIDSSTVTSEFGGAFKNSETRREFLDYIKMDTEF

SEQ ID NO: 4097 - protein, 199 aa, Aequorivita sublithincola
  REGION 1..199: note = tr|I3YZ21|I3YZ21_AEQSU GTP cyclohydrolase 1; OS = Aequorivita sublithincola (strain DSM 14238 / LMG 21431 / ACAM 643 / 9-3) OX=746697 GN=folE PE=3 SV=1
MASYKYFEEYSQPVTDSLIDNYSKILSTIGEDVNREGILKTPERAAKAMQFLTSGNCQDPAQILRSAMFAEAYHDMVIIKDIELYSLCEHHILPFFGKAHIAYIPNGHIVGLSKIPRVVDVFARRLQVQERLTHDILECINNTLKPKGVAVVIEAAHMCMMMRGVQKQNSVTTTSGFRGQFEAIETRNEFLKLISNDLS

SEQ ID NO: 4098 - protein, 199 aa, unidentified
  source 1..199: note = Aequorivita viscosa
  REGION 1..199: note = tr|A0A1M6GD27|A0A1M6GD27_9FLAO GTP cyclohydrolase 1; OS = Aequorivita viscosa OX=797419 GN=folE PE=3 SV=1
MGSYRYFEEYNQPVTDSLTDNYSSILKTIGEDTEREGIVKTPERAAKAIQFLTSGNCQDPAEILRSAMFKESYHDMVIVKDIELYSLCEHHILPFFGKAHIAYIPNGHIVGLSKIPRVVDVFARRLQVQERLTHDILECINDTLKPRGVAVVIEASHMCMMMRGVQKQNSVTTTSGFRGEFEALQTRNEFLKLISNDLS

SEQ ID NO: 4099 - protein, 225 aa, unidentified
  source 1..225: note = Aequorivita viscosa
  REGION 1..225: note = tr|A0A1M6D6Y3|A0A1M6D6Y3_9FLAO GTP cyclohydrolase 1; OS = Aequorivita viscosa OX=797419 GN=folE PE=3 SV=1
MDLEKTLKTIEEMGDDHISSSSETPMRPDAFELSDIEKIALIKEDVRNIMETLGLDLSDDSLKGTPNRVAKMFVQEIFGGLHPNRKPKASTFDNKYKYNEMLVEKNITLYSTCEHHLLPIVGQAHIAYISNGTVVGLSKMNRIVDYYAKRPQVQERLTMQIVKELQQVLNTEDVACVIDAKHLCVNSRGIRDIDSSTVTSEFGGAFKNSDTRKEFLDYIKLDTKF

SEQ ID NO: 4100 - protein, 188 aa, unidentified
  source 1..188: note = Aeribacillus composti
  REGION 1..188: note = tr|A0A559TX03|A0A559TX03_9BACI GTP cyclohydrolase 1; OS = Aeribacillus composti OX=1868734 GN=folE PE=3 SV=1
MPKINKEQIEQAVRLIIEAIGEDPNREGLADTPKRVANMYEEIFSGINQDPKEYFQTVFEEDHEELVLVKDIQFFSMCEHHLVPFFGKVHIAYIPKGGKVTGLSKLARAVEAVVKKPQLQERITSTIADSIVESLDPHGVMVVVEAEHMCMTMRGVKKPGSITVTSAVRGCFLNDAAARSEVLSLIKK

SEQ ID NO: 4101 - protein, 188 aa, Aeribacillus pallidus
  REGION 1..188: note = tr|A0A223E931|A0A223E931_9BACI GTP cyclohydrolase 1; OS = Aeribacillus pallidus OX=33936 GN=folE PE=3 SV=1
MPKINKEQIEQSVRLIIEAIGEDPNREGLADTPKRVANMYEEIFSGIDQDPKEYFQTVFEEDHEELVLVKDIQFFSMCEHHLVPFFGKVHIAYIPKGGKVTGLSKLARAVEAVVKKPQLQERITSTIADSIVESLDPHGVMVVVEAEHMCMTMRGVKKPGSITVTSAVRGCFLNDAAARSEVLSLIKK

SEQ ID NO: 4102 - protein, 188 aa, Aeribacillus pallidus
  REGION 1..188: note = tr|A0A165XC44|A0A165XC44_9BACI GTP cyclohydrolase 1; OS = Aeribacillus pallidus OX=33936 GN=folE PE=3 SV=1
MPKINKEQIEQAVRLIIEAIGEDPNREGLADTPKRVANMYEEIFSGIDQDPKEYFQTVFEEDHEELVLVKDIQFFSMCEHHLVPFFGKVHIAYIPKGGKVTGLSKLARAVEAVVKKPQLQERITSTIADSIVESLDPHGVMVVVEAEHMCMTMRGVKKPGSITVTSAVRGCFLNDAAARSEVLSLIKK

SEQ ID NO: 4103 - protein, 250 aa, Aeriscardovia aeriphila
  REGION 1..250: note = tr|A0A261FB31|A0A261FB31_9BIFI GTP cyclohydrolase 1; OS = Aeriscardovia aeriphila OX=218139 GN=folE PE=3 SV=1
MSSSCVEENSSALRLKAGEPQAAEAAQVGDAQAGDTQAGDTQVGDAQAAEDSLERQYPPVDKAKVRQAVRLYLEAIGDDPDRPGLRETPDRIARASTELFEGLTTDPREILEKRFPVNSEEMVLVRDIEFYSVCEHHLLPFFGVAHVGYFPGKEGVLGLSKLARLVDVYARRPQVQEQMTAQIADALMKYADARGVIVVTEAEHMCMAMRGVRKANARTITSAIRGRMVNPTTRAEAMSLILNSARLSNN

SEQ ID NO: 4104 - protein, 189 aa, unidentified
  source 1..189: note = Aerococcaceae bacterium
  REGION 1..189: note = tr|A0A347WM65|A0A347WM65_9LACT GTP cyclohydrolase 1; OS = Aerococcaceae bacterium ZY16052 OX=2036206 GN=folE PE=3; SV = 1
MEAKHFDTEKIETAVRMLLEAIGEDPNREGLLETPERVARAMKEIFGGLGETAEAHLQKSFEHVDGGIVVVKDMSFYSMCEHHLLPFWGKAHIAYLPNDKVAGLSKLARTVETYARKPQLQERLTKEIAEAMMTYLGAKGVLVVVEGEHMCMNMRGVQKPGSKTVTSIARGALAEDTRLLDEAYRMLDR

SEQ ID NO: 4105 - protein, 185 aa, Aerococcus sanguinicola
  REGION 1..185: note = tr|A0A0X8FBV1|A0A0X8FBV1_9LACT GTP cyclohydrolase 1; OS = Aerococcus sanguinicola OX=119206 GN=folE PE=3 SV=1
MDKVKIEQAIRDLLIGIGEDPDREGLQETPKRVAKMYAELLDGYQRTPAQHMEKQFTAEDSELVLVKDIPFHSMCEHHLLPFYGVGHIAYVPGADKVVGLSKLARILEDISLRLQLQEQITTEVAHTIADNLEVEGVFVVLEAEHMCMSIRGVHKEGASTVTKSALGCFKENSELRKEVLSMIRA

SEQ ID NO: 4106 - protein, 185 aa, Aerococcus sp.
  REGION 1..185: note = tr|A0A1F1DKU3|A0A1F1DKU3_9LACT GTP cyclohydrolase 1; OS = Aerococcus sp. HMSC061A03 OX=1739396 GN=folE PE=3 SV=1
MDKEKVEQAIRDLLIGIGEDPDREGLQETPKRVAKMYAELLDGYQRTPAQHMEKQFTAEDSELVLVKDIPFHSMCEHHLLPFYGVGHIAYVPGADKVVGLSKLARILEDISLRLQLQEQITSEVAHTIADNLDVEGVFVVLEAEHMCMSIRGVHKEGASTVTKAALGCFKENSELRKEVLSMIRG

SEQ ID NO: 4107 - protein, 184 aa, Aerococcus sp.
  REGION 1..184: note = tr|A0A1F2EV03|A0A1F2EV03_9LACT GTP cyclohydrolase 1; OS = Aerococcus sp. HMSC10H05 OX=1581084 GN=folE PE=3 SV=1
MDTKRIEKAVREILLAIGENPDREGLVETPERVARMYAEVFDGLTRDPKIHTEKTFSESASEFVLVKDIPFHSTCEHHLLPVIGQAHVAYIPKDGQVIGLSKLARIVEDFALRPQLQERLTNQVADVLANELGAEGVYVVLEAEHMCMTLRGIKKPGSKTVTYATRGVYNDRDRRQEALDMMQL

SEQ ID NO: 4108 - protein, 193 aa, Aerococcus suis
  REGION 1..193: note = tr|A0A1W1YV94|A0A1W1YV94_9LACT GTP cyclohydrolase 1; OS = Aerococcus suis OX=371602 GN=folE PE=3 SV=1
MNEENLKHIEQLVREILIEIGEDPDREGLIETPKRVAKSLQEITASTTKEEFTEGKMFPTETTGNDQLVSVNNIPFYSMCEHHMLPFFGTVNVGYLPQNGQIIGLSKIPRLVDYVSKKLNVQENITREVADILMEITDAKGVAVVVDARHMCVEMRGVAKNNSVTRTTYFLGAFNEDTQLRTEFLQTLPKVGF

SEQ ID NO: 4109 - protein, 184 aa, Aerococcus urinaeequi
  REGION 1..184: note = tr|A0A0U4WED9|A0A0U4WED9_9LACT GTP cyclohydrolase 1; OS = Aerococcus urinaeequi OX=51665 GN=folE PE=3 SV=1
MDMERIEKAVREILLAVGENPDREGLVETPERVAKMYAEVFDGLNRDPRIHTEKTFSESASEFVLVKDIPFHSTCEHHLLPVIGQAHVAYIPKDGQVIGLSKLARIVEDFALRPQLQERLTNQVADVLAEELGAEGVFVVLEAEHMCMTLRGIKKPGAKTVTYATRGAYTDRGRRQEVLDMMNL

SEQ ID NO: 4110 - protein, 184 aa, Aerococcus urinaeequi
  REGION 1..184: note = tr|A0A3D4XMG4|A0A3D4XMG4_9LACT GTP cyclohydrolase 1; OS = Aerococcus urinaeequi OX=51665 GN=folE PE=3 SV=1
MDMERIEKAVREILLAVGENPDREGLVETPERVAKMYAEVFDGLNREPRIHTEKTFSESASEFVLVKDIPFHSTCEHHLLPVIGQAHVAYIPKDGQVIGLSKLARIVEDFALRPQLQERLTNQVADVLAEELGAEGVFVVLEAEHMCMTLRGIKKPGAKTVTYATRGAYTDRGRRQEVLDMMNL

SEQ ID NO: 4111 - protein, 184 aa, Aerococcus viridans
  REGION 1..184: note = tr|D4YFH7|D4YFH7_9LACT GTP cyclohydrolase 1; OS = Aerococcus viridans ATCC 11563 = CCUG 4311 OX=655812; GN = folE PE=3 SV=1
MDMERIEKAVREILLAVGENPDREGLIETPERVAKMYAEVFDGLNRNPRIHTEKTFSESASEFVLVKDISFHSTCEHHLLPVIGQAHVAYIPKNGQVIGLSKLARIVEDFALRPQLQERLTNQVADVLAKELGAEGVFVVLEAEHMCMTLRGIKKPGAKTVTYATRGAYTDRGRRQEVLDMMSL

SEQ ID NO: 4112 - protein, 184 aa, Aerococcus viridans; identical to SEQ ID NO: 4107
  REGION 1..184: note = tr|A0A2N6UD43|A0A2N6UD43_9LACT GTP cyclohydrolase 1; OS = Aerococcus viridans OX=1377 GN=folE PE=3 SV=1

SEQ ID NO: 4113 - protein, 187 aa, unidentified
  source 1..187: note = Aeromicrobium camelliae
  REGION 1..187: note = tr|A0A3N6X7Q6|A0A3N6X7Q6_9ACTN GTP cyclohydrolase 1; OS = Aeromicrobium camelliae OX=1538144 GN=folE PE=3 SV=1
MSVDLPRAEAAVRELLAAIGEDPDREGLRDTPARVARSYVELVAGLDQNPADVLTASFDVGHDELVLVKDIEVWSLCEHHLVPFFGVAHVGYIPSEGGKVTGLSKLARLVDVYARRPQVQERLTTQIAEALVTVLQPRGAIVVIEAEHLCMTMRGVRKGGAKTITSAVRGQLRDPATRAEAMGLITA

SEQ ID NO: 4114 - protein, 187 aa, unidentified
  source 1..187: note = Aeromicrobium choanae
  REGION 1..187: note = tr|A0A1T4Z1T5|A0A1T4Z1T5_9ACTN GTP cyclohydrolase 1; OS = Aeromicrobium choanae OX=1736691 GN=folE PE=3 SV=1
MPVDQPRAEAAVRELLAALGEDPERDGLEDTPARVARSYTELLGGYDQDAKEVLSAVFEVGHRELVLVRDIELWSMCEHHMVPFFGVAHVGYIPGEHGHVTGLSKLARLVDVYARRLQVQERLTTQIAESIVEVLEPRGVIVVIEAEHLCMTMRGVAKAGARTITSAVRGQLLDPATRAEAMNLISR

SEQ ID NO: 4115 - protein, 191 aa, Aeromicrobium erythreum
  REGION 1..191: note = tr|A0A0U4BXU9|A0A0U4BXU9_9ACTN GTP cyclohydrolase 1; OS = Aeromicrobium erythreum OX=2041 GN=folE PE=3 SV=1
MTVDLARAEAAVRELLLAVGEDPDRDGLKETPARVARSYNELLAGLDQDPREVLTATFDVGHDELVLVKDIELWSMCEHHLVPFTGVAHVGYIPRADGFVTGLSKLARLVDVFARRPQVQERLTTQIADALTDVLEPRGVIVVIEAEHLCMAMRGVRKGGARTVTSAVRGQLRDPATRAEAMGLITAGTRR

SEQ ID NO: 4116 - protein, 187 aa, Aeromicrobium flavum
  REGION 1..187: note = tr|A0A512HT60|A0A512HT60_9ACTN GTP cyclohydrolase 1; OS = Aeromicrobium flavum OX=416568 GN=folE PE=3 SV=1
MAVDQPRAEAAVRELLAAIGEDPDRDGLLDTPARVARSYAELLGGYDQDAREVLSAVFEVGHRELVLVRDIEVWSMCEHHMVPFFGVAHIGYIPGETGHVTGLSKLARLVDVYARRLQVQERLTTQVAEAMVEVLEPRGVIVVIEAEHLCMTMRGVAKAGARTITSAVRGQLLDPATRAEAMQLISK

SEQ ID NO: 4117 - protein, 188 aa, Aeromicrobium marinum
  REGION 1..188: note = tr|E2SC54|E2SC54_9ACTN GTP cyclohydrolase 1; OS = Aeromicrobium marinum DSM 15272 OX=585531 GN=folE PE=3; SV = 1
MTVDQVRAAAAIRELLFAIGEDPDRDGLVDTPARVARSYVELVAGLDQDPAEVLTATFDVGHDELVLVKDIELWSMCEHHLVPFFGVAHIGYIPEDGGYVTGLSKLARLVDVFARRPQVQERLTTQIADALSDVLKPRGVIVVIEAEHLCMAMRGVRKGGAKTVTSAVRGQLRDPATRAEAMGLITGP

SEQ ID NO: 4118 - protein, 187 aa, Aeromicrobium sp.
  REGION 1..187: note = tr|A0A554SBH6|A0A554SBH6_9ACTN GTP cyclohydrolase 1; OS = Aeromicrobium sp. Co35 OX=2590901 GN=folE PE=3 SV=1
MSVDLPRAEAAVRELLLAVGEDPDRDGLRDTPARVARSYAELLSGMDQDPTDVLTAVFEVGHDEFVLVKDIELWSMCEHHLVPFFGVAHVGYIPGEGGNVTGLSKLARLVDVYARRPQVQERLTTQIADSLVEVLHPAGVIVVLEAEHLCMTMRGVRKGGARTVTSAVRGQLRDSATRAEAMQLITA

SEQ ID NO: 4119 - protein, 187 aa, Aeromicrobium sp.
  REGION 1..187: note = tr|A0A200HJ30|A0A200HJ30_9ACTN GTP cyclohydrolase 1; OS = Aeromicrobium sp. PE09-221 OX=1898043 GN=folE PE=3 SV=1
MSVDLPRAEAAVRELLLAVGEDPDRDGLRDTPARVARSYAELLSGLDQDPTDVLTAVFDVGHDEFVLVKDIELWSMCEHHLVPFFGVAHVGYIPGEGGNVTGLSKLARLVDVYARRPQVQERLTTQIADSLVEVLRPAGVIVVLEAEHLCMTMRGVRKGGARTVTSAVRGQLRDSATRAEAMQLITA

SEQ ID NO: 4120 - protein, 218 aa, Aeromonas allosaccharophila
  REGION 1..218: note = tr|A0A1Q5VUA3|A0A1Q5VUA3_9GAMM GTP cyclohydrolase 1; OS = Aeromonas allosaccharophila OX=656 GN=folE PE=3 SV=1
MTTLSPEALLVRAALEAQGLETPLVANDLNSQQKREKIEGHMRSIMETLGLDLTDDSLAETPHRIAKMYVNEIFSGLDYSTFPKVTVIENKMQVDEMIMVRDISLTSTCEHHFVTIDGLAHVAYIPRGKVIGLSKINRIVQFFARRPQVQERLTQQILLALQTLLGTQDVAINIRATHYCVKARGVMDSTSYTTTTSLGGVFKTQPDTRAEFLGGLRG

SEQ ID NO: 4121 - protein, 218 aa, Aeromonas allosaccharophila
  REGION 1..218: note = tr|A0A0T6UYZ9|A0A0T6UYZ9_9GAMM GTP cyclohydrolase 1; OS = Aeromonas allosaccharophila OX=656 GN=folE PE=3 SV=1
MTTLSPEALLVRAALEAQGLETPLVANELNSQQKREKIEGHMRSIMETLGLDLTDDSLAETPHRIAKMYVNEIFSGLDYSTFPKVTVIENKMQVDEMIMVRDISLTSTCEHHFVTIDGLAHVAYIPRGKVIGLSKINRIVQFFARRPQVQERLTQQILLALQTLLGTQDVAINIRATHYCVKARGVMDSTSYTTTTSLGGVFKTQPDTRAEFLGGLRG

SEQ ID NO: 4122 - protein, 218 aa, unidentified
  source 1..218: note = Aeromonas cavernicola
  REGION 1..218: note = tr|A0A2H9U6U7|A0A2H9U6U7_9GAMM GTP cyclohydrolase 1; OS = Aeromonas cavernicola OX=1006623 GN=folE PE=3 SV=1
MTTLSPEALLVRAALEAQGLETPLVTNELNSQQKREKIEGHMRSIMETLGLDLTDDSLAETPHRIAKMYVNEIFSGLDYSTFPKVTVIENKMQVDEMIMVRDISLTSTCEHHFVTIDGLAHVAYIPRGKVIGLSKINRIVQFFARRPQVQERLTQQILLALQTLLGTKDVAISIKATHYCVKARGVMDSTSYTTTTSLGGVFKTQPDTRAEFLAGLKR

SEQ ID NO: 4123 - protein, 218 aa, Aeromonas caviae
  REGION 1..218: note = tr|A0A125XZV3|A0A125XZV3_AERCA GTP cyclohydrolase 1; OS = Aeromonas caviae OX=648 GN=folE PE=3 SV=1
MTSLSQEALLVRAALEAEGLETPLVANELSGQQKKEKIEGHMRAIMETLGLDLADDSLAETPHRIAKMYVNEIFSGLDYATFPKVTVIENKMKVDEMIMVRDISLTSTCEHHFVTIDGFAHVAYIPRGKVIGLSKINRIVQFFARRPQVQERLTQQILLALQTLLGTRDVAISIKATHFCVKARGVMDSTSYTTTTSLGGVFKTQPDTRAEFLGGLKG

SEQ ID NO: 4124 - protein, 218 aa, unidentified
  source 1..218: note = Aeromonas dhakensis
  REGION 1..218: note = tr|A0A433GAQ5|A0A433GAQ5_9GAMM GTP cyclohydrolase 1; OS = Aeromonas dhakensis OX=196024 GN=folE PE=3 SV=1
MTSLSREALLVRAALEAEGLETPLVANTLDGQQKREKIEGHMRAIMETLGLDLADDSLAETPHRIAKMYVNEIFSGLDYATFPKVTVIENKMKVDEMIMVRNISLTSTCEHHFVTIDGLAHVAYIPRGKVIGLSKINRIVQFFARRPQVQERLTQQSLLALQTLLGTKDVAISIKATHFCVKARGVMDSTSYTTTTSLGGVFKTQPDTRAEFLAGLKG

SEQ ID NO: 4125 - protein, 218 aa, unidentified
  source 1..218: note = Aeromonas dhakensis
  REGION 1..218: note = tr|K1JCW9|K1JCW9_9GAMM GTP cyclohydrolase 1; OS = Aeromonas dhakensis OX=196024 GN=folE PE=3 SV=1
MTSLSREALLVRAALEAEGLETPLVANTLDGQQKREKIEGHMRAIMETLGLDLADDSLAETPHRIAKMYVNEIFSGLDYATFPKVTVIENKMKVDEMIMVRDISLTSTCEHHFVTIDGLAHVAYIPRGKVIGLSKINRIVQFFARRPQVQERLTQQILLALQTLLGTKDVAISIKATHFCVKARGVMDSTSYTTTTSLGGVFKTQPDTRAEFLAGLKG

SEQ ID NO: 4126 - protein, 220 aa, Aeromonas diversa
  REGION 1..220: note = tr|N9VH73|N9VH73_9GAMM GTP cyclohydrolase 1; OS = Aeromonas diversa CDC 2478-85 OX=1268237 GN=folE PE=3; SV = 1
MSELSTHAKLVRDALVAQGLETPMVPSTLDRAEKQARIEEHMRAIMGLLSLDLEDDSLAETPHRIAKMYVNEIFAGLDYSTFPKVTVIENKMQVDEMIVVRDISLTSTCEHHFVTIDGLAHVAYIPRGKVIGLSKINRIVQFFARRPQVQERLTQQVLLALQTLLGTRDVAISITATHYCVKARGVMDATSATTTTSLGGVFKTQPDTRAEFLGMLRATR

SEQ ID NO: 4127 - protein, 219 aa, Aeromonas encheleia
  REGION 1..219: note = tr|A0A3S4UBI4|A0A3S4UBI4_9GAMM GTP cyclohydrolase 1; OS = Aeromonas encheleia OX=73010 GN=folE PE=3 SV=1
MMTNLSQEALLVRAALEAQGLETPLVANELNGQQKKEKIEGHMRAIMETLGLDLRDDSLAETPHRIAKMYVNEIFSGLDYTTFPKVTVIENKMKVDEMIMVRDISLTSTCEHHFVTIDGLAHVAYIPRGKVIGLSKINRIVQFFARRPQVQERLTQQILLALQTLLGTRDVAISIKATHFCVKARGVMDSTSHTTTTSLGGVFKTQPDTRAEFLGGLKG

SEQ ID NO: 4128 - protein, 218 aa, Aeromonas enteropelogenes
  REGION 1..218: note = tr|A0A175VJC9|A0A175VJC9_AEREN GTP cyclohydrolase 1; OS = Aeromonas enteropelogenes OX=29489 GN=folE PE=3 SV=1
MTTLSQEALLVRAALEAQGLETPLVANQLDSQQKREKIEGHMRAIMETLGLDLADDSLAETPHRIAKMYVNEIFSGLDYTTFPKVTVIENKMQVDEMIMVRDISLTSTCEHHFVTIDGLAHVAYIPRGKVIGLSKINRIVQFFARRPQVQERLTQQILLALQTLLGTQDVAISIKATHFCVKARGVMDSTSYTTTTSLGGVFKTQPDTRAEFLGGLRS

SEQ ID NO: 4129 - protein, 218 aa, Aeromonas hydrophila
  REGION 1..218: note = sp|A0KIN6|GCH1_AERHH GTP cyclohydrolase 1; OS = Aeromonas hydrophila subsp. hydrophila (strain ATCC 7966 / DSM 30187 / JCM 1027 / KCTC 2358 / NCIMB 9240); OX = 380703 GN=f olE PE=3 SV=1
MTSLSREALLVRAALEAEGLETPLVANALDGQQKREKIEGHMRAIMETLGLDLADDSLAETPHRIAKMYVNEIFSGLDYATFPKVTVIENKMKVDEMIMVRDISLTSTCEHHFVTIDGLAHVAYIPRGKVIGLSKINRIVQFFARRPQVQERLTQQILLALQTLLGTKDVAISIKATHFCVKARGVMDSTSYTTTTSLGGVFKTQPDTRAEFLAGLKR

SEQ ID NO: 4130 - protein, 218 aa, Aeromonas hydrophila; identical to SEQ ID NO: 4129
  REGION 1..218: note = tr|A0A081UT11|A0A081UT11_AERHY GTP cyclohydrolase 1; OS = Aeromonas hydrophila OX=644 GN=folE PE=3 SV=1

SEQ ID NO: 4131 - protein, 218 aa, Aeromonas jandaei
  REGION 1..218: note = tr|A0A2S5FES1|A0A2S5FES1_AERJA GTP cyclohydrolase 1; OS = Aeromonas jandaei OX=650 GN=folE PE=3 SV=1
MTTLSQEALLVRAALEAQGLETPLVANELDSQQKREKIEGHMRAIMETLGLDLADDSLAETPHRIAKMYVNEIFSGLDYATFPKVTVIENKMQVDEMIMVRDISLTSTCEHHFVTIDGLAHVAYIPRGKVIGLSKINRIVQFFARRPQVQERLTQQILLALQTLLGTRDVAISIKATHYCVKARGVMDSTSYTTTTSLGGVFKTQPDTRAEFLSGLKS

SEQ ID NO: 4132 - protein, 218 aa, Aeromonas jandaei
  REGION 1..218: note = tr|A0A3N6V5L1|A0A3N6V5L1_AERJA GTP cyclohydrolase 1; OS = Aeromonas jandaei OX=650 GN=folE PE=3 SV=1
MTTLSQEALLVRAALEAQGLETPLVANELDSQQKREKIEGHMRAIMETLGLDLADDSLAETPHRIAKMYVNEIFSGLDYSTFPKVTVIENKMQVDEMIMVRDISLTSTCEHHFVTIDGLAHVAYIPRGKVIGLSKINRIVQFFARRPQVQERLTQQILLALQTLLGTKDVAISIKATHYCVKARGVMDSTSYTTTTSLGGVFKTQPDTRAEFLSGLKG

SEQ ID NO: 4133 - protein, 218 aa, unidentified
  source 1..218: note = Aeromonas lusitana
  REGION 1..218: note = tr|A0A2M8HAP2|A0A2M8HAP2_9GAMM GTP cyclohydrolase 1; OS = Aeromonas lusitana OX=931529 GN=folE PE=3 SV=1
MTNLSQEALLVRAALEAQGLETPLVANELNGQQKKEKIEGHMRAIMETLGLDLADDSLAETPHRIAKMYVNEIFSGLDYSTFPKVTVIENKMKVDEMIMVRDISLTSTCEHHFVTIDGLAHVAYIPRGKVIGLSKINRIVQFFARRPQVQERLTQQILLALQTLLGTRDVAISIKATHYCVKARGVMDSTSYTTTTSLGGVFKTQPDTRAEFLGGLKG

SEQ ID NO: 4134 - protein, 218 aa, Aeromonas media
  REGION 1..218: note = tr|A0A023RMQ1|A0A023RMQ1_AERME GTP cyclohydrolase 1; OS = Aeromonas media WS OX=1208104 GN=folE PE=3 SV=1
MTSLSQEALLVRAALEAQGLETPLVANELNGQQKKEKIEGHMRAIMETLGLDLADDSLAETPHRIAKMYVNEIFSGLDYATFPKVTVIENKMKVDEMIMVRDISLTSTCEHHFVTIDGLAHVAYIPRGKVIGLSKINRIVQFFARRPQVQERLTQQILLALQTLLGTKDVAISIKATHFCVKARGVMDSTSYTTTTSLGGVFKTQPDTRAEFLGGLKG

SEQ ID NO: 4135 - protein, 217 aa, Aeromonas molluscorum
  REGION 1..217: note = tr|R1F5W4|R1F5W4_9GAMM GTP cyclohydrolase 1; OS = Aeromonas molluscorum 848 OX=1268236 GN=folE PE=3 SV=1
MSLSQEAMLVRAALEAEGLETPLVANSLSNQQKKESIEGHMRAIMETLGLDLADDSLAETPHRIAKMYVNEIFSGLDYTSFPKVTVIENKMKVDEMIMVKDISLTSTCEHHFVTIDGLAHVAYIPRGKVIGLSKINRIVQFFARRPQVQERLTQQILLALQTLLGTKDVAISIAATHYCVKARGVMDSTSYTTTTSLGGVFKTQPDTRAEFLAGLKR

SEQ ID NO: 4136 - protein, 218 aa, unidentified
  source 1..218: note = Aeromonas rivipollensis
  REGION 1..218: note = tr|A0A2P1PJ32|A0A2P1PJ32_9GAMM GTP cyclohydrolase 1; OS = Aeromonas rivipollensis OX=948519 GN=folE PE=3 SV=1
MTSFSQEALLVRAALEAEGLETPLVANGLNGQQKKENIEGHMRAIMETLGLDLADDSLAETPHRIAKMYVNEIFSGLDYATFPKVTVIENKMKVDEMIMVRDISLTSTCEHHFVTIDGLAHVAYIPRGKVIGLSKINRIVQFFARRPQVQERLTQQILLALQTLLGTRDVAISIKATHFCVKARGVMDSTSYTTTTSLGGVFKTQPDTRAEFLGGLKG

SEQ ID NO: 4137 - protein, 218 aa, Aeromonas salmonicida
  REGION 1..218: note = sp|A4SPE8|GCH1_AERS4 GTP cyclohydrolase 1; OS = Aeromonas salmonicida (strain A449) OX=382245 GN=folE; PE = 3 SV=1
MTSLSQEALLVRAALEAEGLETPLVANALNGQQKKEKIEGHMRAIMETLGLDLTDDSLAETPHRIAKMYVNEIFSGLDYSTFPKVTVIENKMKVDEMIMVRDISLTSTCEHHFVTIDGLAHVAYIPRGKVIGLSKINRIVQFFARRPQVQERLTQQILLALQTLLGTKDVAISIKATHFCVKARGVMDSTSYTTTTSLGGVFKTQPDTRAEFLGGLKG

SEQ ID NO: 4138 - protein, 218 aa, Aeromonas salmonicida
  REGION 1..218: note = tr|A0A4Y4XW21|A0A4Y4XW21_AERSA GTP cyclohydrolase 1; OS = Aeromonas salmonicida OX=645 GN=folE PE=3 SV=1
MTSLSQEALLVRAALEAEGLETPLVANALNGQQKKEKIEGHMRAIMETLGLDLTDDSLVETPHRIAKMYVNEIFSGLDYSTFPKVTVIENKMKVDEMIMVRDISLTSTCEHHFVTIDGLAHVAYIPRGKVIGLSKINRIVQFFARRPQVQERLTQQILLALQTLLGTKDVAISIKATHFCVKARGVMDSTSYTTTTSLGGVFKTQPDTRAEFLGGLKG

SEQ ID NO: 4139 - protein, 220 aa, Aeromonas schubertii
  REGION 1..220: note = tr|A0A0W7U423|A0A0W7U423_9GAMM GTP cyclohydrolase 1; OS = Aeromonas schubertii OX=652 GN=folE PE=3 SV=1
MSELSTHAKLVRDALIAQGLETPMVPSTLDRAEKQARIEEHMRAIMGLLSLDLEDDSLAETPHRIAKMYVNEIFAGLDYSTFPKVTVIENKMQVDEMIVVKDISLTSTCEHHFVTIDGMAHVAYIPRGKVIGLSKINRIVQFFARRPQVQERLTQQVLLALQTLLGTRDVAISITATHYCVKARGVMDATSATTTTSLGGVFKTQPDTRAEFLGMLRVGR

SEQ ID NO: 4140 - protein, 220 aa, Aeromonas schubertii
  REGION 1..220: note = tr|A0A0S2SL32|A0A0S2SL32_9GAMM GTP cyclohydrolase 1; OS = Aeromonas schubertii OX=652 GN=folE PE=3 SV=1
MSELSTHAKLVRDALIAQGLETPMVPSTLDRAEKQARIEEHMRAIMGLLSLDLEDDSLAETPHRIAKMYVNEIFAGLDYSTFPKVTVIENKMQVDEMIVVKDISLTSTCEHHFVTIDGMAHVAYIPRGKVIGLSKINRIVQFFARRPQVQERLTQQVLLALQTLLGTRDVAISITATHYCVKARGVMDATSATTTTSLGGVFKTQPDTRAEFLGMLRASR

SEQ ID NO: 4141 - protein, 220 aa, Aeromonas simiae
  REGION 1..220: note = tr|A0A5J6WYM0|A0A5J6WYM0_9GAMM GTP cyclohydrolase I FolE OS=Aeromonas simiae OX=218936 GN=folE PE=4 SV=1
MSDLSPQARLVRDALVAQGLETPLAPNGLSRDEKRERIEAHMRAIMETLELDLRDDSLAETPHRIAKMYVGEIFAGLDYASFPKVTVIENKMQVDEMIMVRDITLTSTCEHHFVTIDGFAHVAYIPRGKVIGLSKINRIVQFFARRPQVQERLTQQVLLALQTLLGTQDVAISITATHYCVKARGVQDATSATTTTSLGGVFKTQPDTRAEFLGGLRAAR

SEQ ID NO: 4142 - protein, 218 aa, Aeromonas sobria
  REGION 1..218: note = tr|A0A1S2CRS9|A0A1S2CRS9_AERSO GTP cyclohydrolase 1; OS = Aeromonas sobria OX=646 GN=folE PE=3 SV=1
MTILSQEALLVRAALEAQGLETPLVANELNSQQKREKIEGHMRSIMETLGLDLADDSLAETPHRIAKMYVNEIFSGLDYSTFPKVTVIENKMQVDEMIMVRDISLTSTCEHHFVTIDGLAHVAYIPRGKVIGLSKINRIVQFFARRPQVQERLTQQILLALQTLLGTKDVAISIRATHYCVKARGVMDSTSHTTTTSLGGVFKTQPDTRAEFLGGLRG

SEQ ID NO: 4143 - protein, 218 aa, Aeromonas sobria
  REGION 1..218: note = tr|A0A2N3J2H8|A0A2N3J2H8_AERSO GTP cyclohydrolase 1; OS = Aeromonas sobria OX=646 GN=folE PE=3 SV=1
MTTLSQEALLVRAALEAQGLETPLVANELNSQQKREKIEGHMRSIMETLGLDLVDDSLAETPHRIAKMYVNEIFSGLDYATFPKVTVIENKMQVDEMIMVRDISLTSTCEHHFVTIDGLAHVAYIPRGKVIGLSKINRIVQFFARRPQVQERLTQQILLALQTLLGTKDVAISIRATHYCVKARGVMDSTSHTTTTSLGGVFKTQPDTRAEFLGGLRG

SEQ ID NO: 4144 - protein, 218 aa, Aeromonas sp.
  REGION 1..218: note = tr|A0A291TFI4|A0A291TFI4_9GAMM GTP cyclohydrolase 1; OS = Aeromonas sp. CU5 OX=2033033 GN=folE PE=3 SV=1
MTTLSQEALLVRAALEAQGLETPLVANELNSQQKREKIEGHMRSIMETLGLDLADDSLAETPHRIAKMYVNEIFSGLDYSTFPKVTVIENKMQVDEMIMVRDISLTSTCEHHFVTIDGLAHVAYIPRGKVIGLSKINRIVQFFARRPQVQERLTQQILLALQTLLSTKDVAISIRATHYCVKARGVMDSTSHTTTTSLGGVFKTQPDTRAEFLGGLRG

SEQ ID NO: 4145 - protein, 218 aa, Aeromonas sp.
  REGION 1..218: note = tr|A0A2R7MXR7|A0A2R7MXR7_9GAMM GTP cyclohydrolase 1; OS = Aeromonas sp. HMWF017 OX=2056853 GN=folE PE=3 SV=1
MTTLSPEALLVRAALEAQGLETPLVTNELNSQQKREKIEGHMRSIMETLGLDLTDDSLAETPHRIAKMYVNEIFSGLDYSTFPKVTVIENKMQVDEMIMVRDISLTSTCEHHFVTIDGMAHVAYIPRGKVIGLSKINRIVQFFARRPQVQERLTQQILLALQTLLGTKDVAISIKATHYCVKARGVMDSTSYTTTTSLGGVFKTQPDTRAEFLGGLRG

SEQ ID NO: 4146 - protein, 218 aa, Aeromonas taiwanensis
  REGION 1..218: note = tr|A0A5F0K9Z7|A0A5F0K9Z7_9GAMM GTP cyclohydrolase 1; OS = Aeromonas taiwanensis OX=633417 GN=folE PE=3 SV=1
MTSLSQEALLVRAALEAQGLETPLVANALNGQQKKEKIEGHMRAIMETLGLDLADDSLAETPHRIAKMYVNEIFSGLDYATFPKVTVIENKMKVDEMIMVRDISLTSTCEHHFVTIDGFAHVAYIPRGKVIGLSKINRIVQFFARRPQVQERLTQQILLALQTLLGTQDVAISIKATHFCVKARGVMDSTSYTTTTSLGGVFKTQPDTRAEFLGGLKG

SEQ ID NO: 4147 - protein, 218 aa, Aeromonas veronii
  REGION 1..218: note = tr|A0A494U7F0|A0A494U7F0_9GAMM GTP cyclohydrolase 1; OS = Aeromonas veronii OX=654 GN=folE PE=3 SV=1
MTTLSPEALLVRAALEAQGLETPLVTNELNSQQKREKIEGHMRSIMETLGLDLTDDSLAETPHRIAKMYVNEIFSGLDYSTFPKVTVIENKMQVDEMIMVRDISLTSTCEHHFVTIDGMAHVAYIPRGKVIGLSKINRIVQFFARRPQVQERLTQQILLALQTLLGTQDVAISIKATHYCVKARGVMDSTSYTTTTSLGGVFKTQPDTRAEFLGGLRG

SEQ ID NO: 4148 - protein, 218 aa, Aeromonas veronii; identical to SEQ ID NO: 4145
  REGION 1..218: note = tr|A0A165TQW1|A0A165TQW1_9GAMM GTP cyclohydrolase 1; OS = Aeromonas veronii OX=654 GN=folE PE=3 SV=1

SEQ ID NO: 4149 - protein, 227 aa, Aestuariibacter sp.
  REGION 1..227: note = tr|A0A506R902|A0A506R902_9ALTE GTP cyclohydrolase 1; OS = Aestuariibacter sp. GS-14 OX=2590670 GN=folE PE=3 SV=1
MLAKEAVIVRDAVKLGMSKEALMVHEALVAKGLETPMVETGLSDEAKRQRIEGAMRDIMQTLGLDLSDDSLADTPLRIAKMYVDEIFSGLDYRKFPKITQIENKMQLGQPVQVSGISLTSTCEHHFVTIDGTASVAYIPKNTVIGLSKINRLVGFFAQRPQVQERLTQQVLVALQTLTGTDDVAVSINATHYCVKARGIRDSLSYTKTSALGGKFLADAELRREFFS

SEQ ID NO: 4150 - protein, 227 aa, Aestuariibacter sp.
  REGION 1..227: note = tr|A0A2D6XZ52|A0A2D6XZ52_9ALTE GTP cyclohydrolase 1; OS = Aestuariibacter sp. OX=1872400 GN=folE PE=3 SV=1
  VARIANT 17: note = Xaa can be any naturally occurring amino acid
MLAKEAVIVRDAVKLGXSKEALMVHEALVARGLETPMLETGLSDEAKRQRIEGAMREIMETLGLDLSDDSLSETPLRIAKMYVDEIFSGLDYRKFPKITQIENKMQLGQPVHVSDVSLTSTCEHHFVTIDGTASVAYIPKDTVIGLSKINRLVGFFAQRPQVQERLTQQVLVALQTLTGTEDVAVAINATHYCVKARGIRDSLSYTKTSALGGKFLADAELRREFFS

SEQ ID NO: 4151 - protein, 209 aa, unidentified
  source 1..209: note = Aestuariispira insulae
  REGION 1..209: note = tr|A0A3D9H9K4|A0A3D9H9K4_9PROT GTP cyclohydrolase 1; OS = Aestuariispira insulae OX=1461337 GN=folE PE=3 SV=1
MTTDSKTSPSGAMTVTRADAEEAVRKLLCWAGDDPDREGLLDTPGRVVRAFEEYFAGYAEDPDTLLSRTFEETDGYDEMVVLKEIPFESHCEHHLAPILGKVHVAYLPNERVVGISKLARVVEIYAKRLQIQEKMTAQIANAITSALKPKGAAVVVQASHQCMTCRGVHKPGVDMMTSYMTGRFREDARTRSEFLTLIGRNNIRKVHSI

SEQ ID NO: 4152 - protein, 199 aa, unidentified
  source 1..199: note = Aestuariispira insulae
  REGION 1..199: note = tr|A0A3D9HIG9|A0A3D9HIG9_9PROT GTP cyclohydrolase 1; OS = Aestuariispira insulae OX=1461337 GN=folE PE=3 SV=1
MADAVKKPELVANRPTREEAEAAVKVLLAYTGDDPEREGLRDTPKRVVKAYDEYFVGYQQDPIEILQRTFGETDGYDEMVMLRDIPFESHCEHHIAPIIGRVHVAYLPSERVVGISKLARVVEAYAKRLQTQEIMTVQIADAINEALKPQGVAVVIDAVHQCMTTRGIHKPGVSTVTSRMLGVFRSNPETRAEFLAMIE

SEQ ID NO: 4153 - protein, 208 aa, unidentified
  source 1..208: note = Aestuariivirga litoralis
  REGION 1..208: note = tr|A0A2W2BGL8|A0A2W2BGL8_9RHIZ GTP cyclohydrolase 1; OS = Aestuariivirga litoralis OX=2650924 GN=folE PE=3 SV=1
MEAVVKKIPSKPVKRPTQEEAEAAVRTLLAWAGDNPEREGLLDTPKRVAKAFREYFSGYEDDPAEALSRTFNDVGGYDDIVMLRDIEFNSHCEHHIAPFIGRVHVAYLPKASVVGISKLARVVEIFARRLQTQETMTAQIANAISESLNPRGVAVLVEAVHTCMSMRGIGKRNVATITTQFTGEFKTNPVLQARFMELVRAPSNGFSL

SEQ ID NO: 4154 - protein, 206 aa, Afifella marina
  REGION 1..206: note = tr|A0A1G5P9P4|A0A1G5P9P4_AFIMA GTP cyclohydrolase 1; OS = Afifella marina DSM 2698 OX=1120955 GN=folE PE=3 SV=1
MDSTLKLFSSAAVAGRKPSREEAEAAVRTLIAWLGDDPDREGLRDTPRRVVSAYEELYAGYPQDPGTLLARTFKDVGGYHDMVLVRDIAFYSHCEHHMLPFFGHVHIAYYPNDGVVGLSKMARVVEAYARRLQTQETMTAQITDALENALSPRGVAVMVEAEHMCMSMRGVQKQGSSTMTSRFTGLFHDEAAEREKFLNLVRPTGR

SEQ ID NO: 4155 - protein, 210 aa, Afifella marina
  REGION 1..210: note = tr|A0A1G5NVE6|A0A1G5NVE6_AFIMA GTP cyclohydrolase 1; OS = Afifella marina DSM 2698 OX=1120955 GN=folE PE=3 SV=1
MTRFPATLPQEKTLGRPRPDRAAVEAAVRLIIEWAGDDPDREGLIDTPARVVRAYEEFFEGYNTDPAELLARTFEETDDYDDMIVLRNMRLESHCEHHIVPIIGKAHIAYLPNRRVVGISKLARLVEVYAKRLQIQETLTSQIANTIAEVLRPRGVAVVVEAAHMCMTTRGIRKPGVTMVTRRFIGEFKDDADLRRDFLAQIAAPSERFG

SEQ ID NO: 4156 - protein, 232 aa, Afipia broomeae
  REGION 1..232: note = tr|K8P908|K8P908_9BRAD GTP cyclohydrolase 1; OS = Afipia broomeae ATCC 49717 OX=883078 GN=folE PE=3 SV=1
MDQGRSNGDEMDAIIKPIRTGKPAEKSEIPASDYMASAIDPGLVRPSRSEAEAAAKTLLAYIGENTSREGLLDTPRRMIEAYDELFQGYAQCPAEILDRTFGETAGYDDFVLMRDINFHSHCEHHVMPFYGKAHIAYAPVDRVVGLSKLARLVDAFAHRLQTQEHLTAQVAGAINAILKPRGVAVVMEAEHTCMSVRGIAKAGAKTLTSRFTGVFQDNPEEQARFLNMVRGV

SEQ ID NO: 4157 - protein, 246 aa, Afipia broomeae
  REGION 1..246: note = tr|A0A2M8ZK29|A0A2M8ZK29_9BRAD GTP cyclohydrolase 1; OS = Afipia broomeae OX=56946 GN=folE PE=3 SV=1
MDALIKSLRPNKPSDAKSSDAKSTETKAPESKILDTRPAELDPSEFLAAAVRADQPRPSRAEAEQAVLTLLSYIGENPDREGLIDTPRRVVEAYDELYQGYHQCPAEVLDRTFGETAGYDDFVLIRDIEFTSQCEHHMMPFYGKAHIAYTPVERVVGLSKLARLTDIFARRLQTQEHLTAQIAAAIDEILKPRGVAVMIEAEHTCMSVRGVAKHGATTFTSRFTGMFRDNPTEQARFLSMLRGPQR

SEQ ID NO: 4158 - protein, 222 aa, Afipia clevelandensis
  REGION 1..222: note = tr|K8PHJ8|K8PHJ8_9BRAD GTP cyclohydrolase 1; OS = Afipia clevelandensis ATCC 49720 OX=883079 GN=folE PE=3; SV = 1
MDAIIKPIRSGKPADKSEIPASDYMASAIDPGIVRPSRAEAEAAAKTLLAYIGENTNREGLLDTPRRMVEAYDELFQGYAQCPAEILDRTFGETAGYDDFVLMRDISFHSHCEHHVMPFYGKAHIAYAPVDRVVGLSKLARLVDAFAHRLQTQEHLTAQVAGAINAILKPRGVAVVMEAEHTCMSVRGIAKKGALTLTSRFTGIFQDNPEEQARFLNMVRGV

SEQ ID NO: 4159 - protein, 208 aa, Afipia felis
  REGION 1..208: note = tr|A0A090MS99|A0A090MS99_AFIFE GTP cyclohydrolase 1; OS = Afipia felis OX=1035 GN=folE_3 PE=3 SV=1
MISNVKVLERERSMTDVSERPDRAEVEDAFRTIIRWTGDDPKRDGLIETPSRVARAFEEFFIGYSQNPVTVLQKTFEEIEGYDEMITLRGVRFESHCEHHMAPIVGKAWVAYIPNGRVVGISKLARVVEIYAKRLQIQEKMTAQIANTINDVLKPQGVAVLIKAQHHCMTTRGIHKPGTDLVTSRMLGCFRDNPATRQEFLSMTAERD

SEQ ID NO: 4160 - protein, 122 aa, Afipia felis
  REGION 1..122: note = tr|A0A380WCG2|A0A380WCG2_AFIFE GTP cyclohydrolase 1; OS = Afipia felis OX=1035 GN=folE_3 PE=3 SV=1
MVVLRGIAFESHCEHHLAPIVGKAWVAYVPNGRVVGLSKLARVVEAYAKRLQIQERLTSEIASTIQEVLKPQGVGVVIKATHHCMSSRGVHKVGSEMITSCMLGCFRDNASTRHEFLAMATK

SEQ ID NO: 4161 - protein, 207 aa, Afipia massiliensis
  REGION 1..207: note = tr|A0A4U6BTC2|A0A4U6BTC2_9BRAD GTP cyclohydrolase 1; OS = Afipia massiliensis OX=211460 GN=folE PE=3 SV=1
MLKGQNVHALERVKVSQDDTNRPDRAEVEAAVQTIIRWAGDDPQRDGLIETPSRVTRAFEEFFSGYAQDPVEILQKTFDETEGYDEMIVLRGIPFESHCEHHMAPIIGRAWVAYIPNGRVVGISKLARVVDVFAKRLQIQEKMTAQIANTINEVLKPQGVGVIIKAAHHCMATRGVHKADTDLVTSRMLGCFRDNALTRQEFLGVAV

SEQ ID NO: 4162 - protein, 222 aa, Afipia massiliensis
  REGION 1..222: note = tr|A0A4U6BQ98|A0A4U6BQ98_9BRAD GTP cyclohydrolase 1; OS = Afipia massiliensis OX=211460 GN=folE PE=3 SV=1
MDAIIKPIRSGKPADKSEIPASDYMASAIDPGLVRPSRSEAEAAVKTLLAYIGENTGREGLLDTPRRMVEAYDELFQGYTQCPAEILDRTFGETAGYDDFVLMRDINFHSHCEHHVMPFYGKAHIAYAPVDRVVGLSKLARLVDAFAHRLQTQEHLTAQVAGAINAILKPRGVAVVMEAEHTCMSVRGIAKEGAKTLTTRFTGVFQDNPDEQARFLNMVRGV

SEQ ID NO: 4163 - protein, 234 aa, Afipia sp.
  REGION 1..234: note = tr|A0A1G9Z872|A0A1G9Z872_9BRAD GTP cyclohydrolase 1; OS = Afipia sp. GAS231 OX=1882747 GN=folE PE=3 SV=1
MDALIKSLRPGKGSEIKAPDVAPEPRPAELDPSEFLAAAVRADQPRPSRAEAEAAVHTLLNYIGENPAREGLLDTPRRVVEAFDELYQGYHQCPAEVLDRTFGETAGYDDFVLIRDIEFTSQCEHHMMPFYGRAHIAYTPVERVVGLSKLARLTDIFARRLQTQEHLTAQIAAAVDEILKPRGVAVVIEAEHTCMSVRGVAKHGAMTFTSRYTGMFRDNPAEQARFLSMVRGLR

SEQ ID NO: 4164 - protein, 222 aa, Afipia sp.
  REGION 1..222: note = tr|A0A2D6Z1B2|A0A2D6Z1B2_9BRAD GTP cyclohydrolase 1; OS = Afipia sp. OX=1871052 GN=folE PE=3 SV=1
MDAIIKPIRTGKPAEKSEIPASDYMASAIDPGLVRPSRSEAEAAAKTLLAYIGENTSREGLLDTPRRMIEAYDELFQGYAQCPAEILDRTFGETAGYDDFVLMRDINFHSHCEHHVMPFYGKAHIAYAPVDRVVGLSKLARLVDAFAHRLQTQEHLTAQVAGAINAILKPRGVAVVMEAEHTCMSVRGIAKAGAKTLTSRFTGVFQDNPEEQARFLNMVRGV

SEQ ID NO: 4165 - protein, 226 aa, Agarivorans albus
  REGION 1..226: note = tr|R9PFQ9|R9PFQ9_AGAAL GTP cyclohydrolase 1; OS = Agarivorans albus MKT 106 OX=1331007 GN=folE PE=3 SV=1
MKVALAEKQFRKDACLSPEAIQVRQALIEKGIETPLVDNQLSNEQKYNKIKASLTDVVATLGLDLSDDSLAETPHRIAKMFVDEVFSGLDYSRFPKISIIENKMAVEEMVKVSDIAFTSTCEHHFVTIDGLAKVAYIPKDHIIGLSKINRIVRFFAQRPQVQERLTQQVLVALQSLLGTEDVAISIEATHFCVKARGVMDASSSTQTSAYGGKFKTSKSARREFLA

SEQ ID NO: 4166 - protein, 307 aa, Agarivorans albus
  REGION 1..307: note = tr|R9PQV3|R9PQV3_AGAAL GTP cyclohydrolase FolE2; OS = Agarivorans albus MKT 106 OX=1331007 GN=folE2 PE=3 SV=1
MSTAMPDVANSSRAQTEGKLDWVGMSQIEMPIMLAFEAQAASRVSAKIEAFVSLDDPQAKGIHMSRLYLILDQLSNEGVLDYAGLHRVLDQFIESHQDLSEQAQVRFSFDYHLRRKSLLSGKTGWKAYPVAITATRHQQQTTIELEVEVPYSSTCPCSAALSRQLIQQAFKQQFADEQVSSEAVHQWLGSSEGIVATPHSQRSIAQLKVKIATEHQDIPIISLIDEVESSLKTPVQAAVKREDEQEFARLNGQNLMFCEDAARRLQHSLNNRADLVDFWVRVNHLESLHAHDAVCVVTKGIEQGYSA

SEQ ID NO: 4167 - protein, 317 aa, Agarivorans sp.
  REGION 1..317: note = tr|A0A4D4IWK8|A0A4D4IWK8_9ALTE GTP cyclohydrolase FolE2 OS=Agarivorans sp. Toyoura001 OX=2283141 GN=folE2_1; PE = 3 SV=1
MLRSQLPDVASSSLTTHQPSISWVGMDDISVPVYLDEPAGLTHSHASASIAVDLPGGEQAARGIHMSRLYFLLNELAQQALTRQSLEHCLAQVLSSHSDVRSTAARIELQFEFLLKRPALVSNSPAGWQRYPITLSAELIQGQALSVALQVELQYSSTCPCSAALVRESLAHQFLQHFGEDKTLSPSQAAAWLKQNGTLATPHSQRSVALVSLPLPTHSTALGLVNLIEQLEAIIATPVQTSVKRADEQAFAELNGENLMFVEDISRRLTQQLTPLYPSIAIQVRHLESLHAHNAFAQVSPRTSTVKLQPQFAQGSR

SEQ ID NO: 4168 - protein, 226 aa, Agarivorans sp.
  REGION 1..226: note = tr|A0A4D4ITX3|A0A4D4ITX3_9ALTE GTP cyclohydrolase 1; OS = Agarivorans sp. Toyoura001 OX=2283141 GN=folE PE=3 SV=1
MKVALAEKQFRKDACLSPEAIQVRQALIDKGIETPLLENQLTNEQKYLKIKASLTDVVATLGLDLKDDSLAETPHRIAKMFVDEVFSGLDYSRFPKISIIENKMAVEEMVKISDIAFTSTCEHHFVTIDGLAKVAYIPKDNIIGLSKINRIVRFFAQRPQVQERLTQQILVALQSLLGTDDVAITMDATHFCVKARGVMDASSSTQTSAYGGLFKTSKSVRREFLG

SEQ ID NO: 4169 - protein, 218 aa, unidentified
  source 1..218: note = Agathobacter ruminis
  REGION 1..218: note = tr|A0A2G3E2M4|A0A2G3E2M4_9FIRM GTP cyclohydrolase 1; OS = Agathobacter ruminis OX=1712665 GN=folE PE=3 SV=1
MTFDCNCSCTSLFGIRINEEYNAGKEQEMAINKDLIKESIRNIIIALGDDPNREGVKDTPDRVARMYEEVFEGMNYTNEEIAEMFNKTFDEDYYDANNQDLVYVKDIEVFSYCEHHLALMYDMKVSVAYIPNQKVIGLSKIARIADMAAKRLQLQERIGNDIAEIIERVTGSQDVAVFIEASHSCMTARGIKNASAKTYTQTLRGRFRTEPDLLARLK

SEQ ID NO: 4170 - protein, 218 aa, Aggregatibacter actinomycetemcomitans
  REGION 1..218: note = tr|H0KGD6|H0KGD6_AGGAC GTP cyclohydrolase 1; OS = Aggregatibacter actinomycetemcomitans RhAA1 OX=1089447; GN = folE PE=3 SV=1
MNDISPEAEKVRTALVQKGIETPMIVSDESKDERRTKIEQHMREVLRLIGLDLRDDSIEETPSRLAKMFVDEIFSGLDYTNFPKITNIANRMKVSEMVLVNDVTLTSTCEHHFVTIDGKVSVAYYPKKWVIGLSKINRIVAFFAQRPQVQERLTEQILLAFQTILETEDVAVYVKATHFCVKCRGIKDTNSYTVTSAFGGVFLEDRETRKEFLSLINK

SEQ ID NO: 4171 - protein, 218 aa, Aggregatibacter actinomycetemcomitans
  REGION 1..218: note = tr|A0A5D0KYA2|A0A5D0KYA2_AGGAC GTP cyclohydrolase I FolE OS=Aggregatibacter actinomycetemcomitans OX=714; GN = folE PE=4 SV=1
MNDISPEAEKVRTALVQKGIETPMIVSDESKDERRTRIEQHMREVLRLIGLDLRDDSIEETPSRLAKMFVDEIFSGLDYVNFPKITNIANRMKVSEMVLVNDVTLTSTCEHHFVTIDGKVSVAYYPKKWVIGLSKINRIVTFFAQRPQVQERLTEQILLAFQTILETEDVAVYVKATHFCVKCRGIKDANSYTVTSAFGGVFLEDRETRKEFLSLINK

SEQ ID NO: 4172 - protein, 218 aa, Aggregatibacter aphrophilus
  REGION 1..218: note = tr|A0A3S5ECV5|A0A3S5ECV5_AGGAP GTP cyclohydrolase 1; OS = Aggregatibacter aphrophilus ATCC 33389 OX=985008; GN = folE PE=3 SV=1
MNHISPEAEKVRNALRQKGIETPMIVLDESKDERRTHIEQHMREVLRLIGLDLRDDSIEETPSRLAKMFVDEIFSGLDYANFPKITNIANRMKVSEMVLVNDVTLTSTCEHHFVTIDGMVSVAYYPKNWVIGLSKINRVVAFFAQRPQVQERLTEQILLAFQTILETEDVAVYVKATHFCVKCRGIKDTNSYTVTSAFGGVFLEDRETRKEFLSLINK

SEQ ID NO: 4173 - protein, 218 aa, Aggregatibacter aphrophilus; identical to SEQ ID NO: 4172
  REGION 1..218: note = tr|A0A0K1N403|A0A0K1N403_AGGAP GTP cyclohydrolase 1; OS = Aggregatibacter aphrophilus OX=732 GN=folE PE=3 SV=1

SEQ ID NO: 4174 - protein, 218 aa, Aggregatibacter segnis
  REGION 1..218: note = tr|E6KXB3|E6KXB3_9PAST GTP cyclohydrolase 1; OS = Aggregatibacter segnis ATCC 33393 OX=888057 GN=folE; PE = 3 SV=1
MNDISPEAEKVRTALVQKGIETPMAVLNETKDERRTKIEQYMREVLRLIGLDLNDDSIEETPSRLAKMFVDEIFSGLDYANFPKITNIANRMKVSEMVLVNDVTLTSTCEHHFVTIDGKVSVAYYPKKWVIGLSKINRVVSFFAQRPQVQERLTEQILLAFQTILETEDVAVYVKATHFCVKCRGIKDANSYTVTSAFGGVFLEDRETRKEFLSLINK

SEQ ID NO: 4175 - protein, 218 aa, Aggregatibacter segnis
  REGION 1..218: note = tr|A0A369Y824|A0A369Y824_9PAST GTP cyclohydrolase 1; OS = Aggregatibacter segnis OX=739 GN=folE PE=3 SV=1
MNDISPEAEKVRTALVQKGIETPMAVLNETKDERRTKIEQHMQEVLRLIGLDLNDDSIEETPSRLAKMFVDEIFSGLDYANFPKITNIANRMKVSEMVLVNDVTLTSTCEHHFVTIDGKVSVAYYPKKWVIGLSKINRVVSFFAQRPQVQERLTEQILLAFQTILETEDVAVYVKATHFCVKCRGIKDANSYTVTSAFGGVFLEDRETRKEFLSLINK

SEQ ID NO: 4176 - protein, 218 aa, Aggregatibacter sp.
  REGION 1..218: note = tr|U1S7C8|U1S7C8_9PAST GTP cyclohydrolase 1; OS = Aggregatibacter sp. oral taxon 458 str. W10330; OX = 1321772 GN=folE PE=3 SV=1
MNHISPEAAKVREALRQKGIETPMIVLDESKDERRTHIEQHMREVLRLIGLDLRDDSIEETPARLAKMFVDEIFSGLDYANFPKITNIANRMKVSEMVLVNDVTLTSTCEHHFVTIDGMVSVAYYPKKWVIGLSKINRVVAFFAQRPQVQERLTEQILLAFQTILETEDVAVYVKATHFCVKCRGIKDANSYTVTSAFGGVFLEDRETRKEFLSLINK

SEQ ID NO: 4177 - protein, 180 aa, Agitococcus lubricus
  REGION 1..180: note = tr|A0A2T5IVR2|A0A2T5IVR2_9LACT GTP cyclohydrolase 1; OS = Agitococcus lubricus OX=1077255 GN=folE PE=3 SV=1
MEQAYANIITAVGEDLNRAGLLDTPKRAAKAFQYLCKGYTEDLNTIVNNAIFPSDNDQMVIVKDIELYSLCEHHLLPFIGKCHVAYLPDGNVLGLSKVARIVDMFARRLQIQENLTKQIADAIQQVTGAKGVGVIIEAKHMCMMMRGVEKQNSVMSSSVMLGRFRDNAQTRNEFLSLIKA

SEQ ID NO: 4178 - protein, 191 aa, Agreia pratensis
  REGION 1..191: note = tr|A0A1X7JML6|A0A1X7JML6_9MICO GTP cyclohydrolase 1; OS = Agreia pratensis OX=150121 GN=folE PE=3 SV=1
MTAFDRARVEAAVHDILIAIGEDPSRGGLDRTPARVADAYEEFFSGLGVDAVSMLGDTFAVPEGAEAEPVLVRDIEFRSVCEHHLLPFTGVAHVAYVPSNRLIGLGRIASVVDALASRPQLQERLGDEIASVIEDGVDARGVLVVLDAQHDCVRTRGPRQTRSSTVTVSSRGTLSQPAERAELMSLIGATT

SEQ ID NO: 4179 - protein, 191 aa, Agreia sp.
  REGION 1..191: note = tr|A0A0S9PIU0|A0A0S9PIU0_9MICO GTP cyclohydrolase 1; OS = Agreia sp. Leaf283 OX=1736321 GN=folE PE=3 SV=1
MTTFDRARIEAAVREILIGIGEDPVREGLERTPARVADAYAEFFSGLGVDAQAMLGDTFPVADESHSEPVLVRDIEFRSVCEHHLLPFTGVAHVAYVPSTRLIGLGRIASVVETLASRPQLQERLGDEIAAVIDSGVDARGVLVVLDARHDCVRTRGPRQTRSSTVTVSSRGTLSQPADRAELMSLIGAAT

SEQ ID NO: 4180 - protein, 191 aa, Agreia sp.
  REGION 1..191: note = tr|A0A0S9DVM4|A0A0S9DVM4_9MICO GTP cyclohydrolase 1; OS = Agreia sp. Leaf244 OX=1736305 GN=folE PE=3 SV=1
MTTFDRARIEAAVREILIAIGEDPVREGLERTPARVADAYAEFFSGLGVDAQAMLGDTFPVADESRFEPVLVRDIEFRSVCEHHLLPFTGVAHVAYVPSTRLIGLGRIASVVETLASRPQLQERLGDEIAAVIESGVDARGVLVVLDARHDCVRTRGPRQTHSSTVTVSSRGTLSQPADRAELMSLIGAAT

SEQ ID NO: 4181 - protein, 201 aa, unidentified
  source 1..201: note = Agrobacterium albertimagni
  REGION 1..201: note = tr|K2Q078|K2Q078_9RHIZ GTP cyclohydrolase 1; OS = Agrobacterium albertimagni AOL15 OX=1156935 GN=folE; PE = 3 SV=1
MDAIVKKLTVEAPRPTREEAEQAVRTLLLWAGDDPQREGLLDTPARVAKAYEELFSGYSADIEDVLGRTFEEVGGYDDMVLVRDISFFSHCEHHMLPVMGKAHVAYLPKGRVLGLSKIARVVDVFAKRLQTQENMTAQIAQAIDETLVPRGVAVFLEAEHMCMAMRGIQKTGSTTLTTTFTGAFKDNAAEQARFMSMVRSR

SEQ ID NO: 4182 - protein, 208 aa, unidentified
  source 1..208: note = Agrobacterium arsenijevicii
  REGION 1..208: note = tr|A0A0D8KZ24|A0A0D8KZ24_9RHIZ GTP cyclohydrolase 1; OS = Agrobacterium arsenijevicii OX=1585697 GN=folE PE=3 SV=1
MDAIVKNFPGAGAKPEVAEARPSQAEAEEAVRVLLRWAGENPAREGLLDTPKRVAKAYRELFAGYELNVQDVLGTTFEEVGGYDDVVLVRDIPFFSHCEHHMVPIVGKAHVAYLPAGRVLGLSKIARVVEIFGRRLQTQENMTAQIARSIEETLKPRGVAVMIDAEHMCMSMRGVNKQGSTTLTTSFTGTFKNDPAEQVRFMTMVRNR

SEQ ID NO: 4183 - protein, 208 aa, unidentified
  source 1..208: note = Agrobacterium bohemicum
  REGION 1..208: note = tr|A0A135P8G7|A0A135P8G7_9RHIZ GTP cyclohydrolase 1; OS = Agrobacterium bohemicum OX=2052828 GN=folE PE=3 SV=1
MDAIVKNFPGAGTQNGTAGVRPTQAEAEDAVRVLLRWAGDNPNREGLLDTPKRVAKSYRELFSGYDLDATDVLGTTFEEVGGYDDIILVRDIPFHSHCEHHMVPIVGKAHVAYLPAGRVLGLSKIARVVEIYGRRLQTQETMTAQIATAIETTLKPRGVAVLIDAEHMCMSMRGVRKQGSTTLTTSFTGTFKTEPAQQARFMTMVYSR

SEQ ID NO: 4184 - protein, 208 aa, unidentified
  source 1..208: note = Agrobacterium deltaense
  REGION 1..208: note = tr|A0A1S7TKX4|A0A1S7TKX4_9RHIZ GTP cyclohydrolase 1; OS = Agrobacterium deltaense NCPPB 1641 OX=1183425 GN=folE; PE = 3 SV=1
MDAIVKNFPGAGAKPDVAEARPSQAEAEEAVRVLLRWAGENPAREGLLDTPKRVAKAYRELFAGYELNVQDVLGTTFEEVGGYDDVVLVRDIPFFSHCEHHMVPIVGKAHVAYLPAGRVLGLSKIARVVEIFGRRLQTQENMTAQIARSIEETLKPRGVAVMIDAEHMCMSMRGVNKQGSTTLTTSFTGTFKNDPAEQVRFMTMVRNR

SEQ ID NO: 4185 - protein, 208 aa, unidentified; identical to SEQ ID NO: 4184
  source 1..208: note = Agrobacterium deltaense
  REGION 1..208: note = tr|A0A1S7P6Z1|A0A1S7P6Z1_9RHIZ GTP cyclohydrolase 1; OS = Agrobacterium deltaense Zutra 3/1 OX=1183427 GN=folE; PE = 3 SV=1

SEQ ID NO: 4186 - protein, 208 aa, unidentified; identical to SEQ ID NO: 4184
  source 1..208: note = Agrobacterium fabrum
  REGION 1..208: note = sp|Q8UEK8|GCH1_AGRFC GTP cyclohydrolase 1; OS = Agrobacterium fabrum (strain C58 / ATCC 33970); OX = 176299 GN=folE PE=3 SV=1

SEQ ID NO: 4187 - protein, 208 aa, unidentified; identical to SEQ ID NO: 4184
  source 1..208: note = Agrobacterium fabrum
  REGION 1..208: note = tr|A0A3G2D4D3|A0A3G2D4D3_9RHIZ GTP cyclohydrolase 1; OS = Agrobacterium fabrum OX=1176649 GN=folE PE=3 SV=1

SEQ ID NO: 4188 - protein, 208 aa, unidentified
  source 1..208: note = Agrobacterium genomosp.
  REGION 1..208: note = tr|A0A1S7MIB7|A0A1S7MIB7_9RHIZ GTP cyclohydrolase 1; OS = Agrobacterium genomosp. 1 str. TT111 OX=1183430 GN=folE; PE = 3 SV=1
MDAIVKNFPGAGAKPDVAEARPSQTEAEEAVRVLLRWAGENPAREGLLDTPKRVAKAYRELFAGYELNVQDVLGTTFEEVGGYDDVVLVRDIPFFSHCEHHMVPIVGKAHVAYLPAGRVLGLSKIARVVEIFGRRLQTQENMTAQIARSIEETLKPRGVAVMIDAEHMCMSMRGVNKQGSTTLTTSFTGTFKNDPAEQVRFMTMVRNR

SEQ ID NO: 4189 - protein, 208 aa, unidentified; identical to SEQ ID NO: 4184
  source 1..208: note = Agrobacterium genomosp.
  REGION 1..208: note = tr|A0A1S7PFL8|A0A1S7PFL8_9RHIZ GTP cyclohydrolase 1; OS = Agrobacterium genomosp. 5 str. CFBP 6626 OX=1183435; GN = folE PE=3 SV=1

SEQ ID NO: 4190 - protein, 208 aa, unidentified
  source 1..208: note = Agrobacterium larrymoorei
  REGION 1..208: note = tr|A0A4D7DUC7|A0A4D7DUC7_9RHIZ GTP cyclohydrolase 1; OS = Agrobacterium larrymoorei OX=160699 GN=folE PE=3 SV=1
MDAIVKNFPGAGAIDDAVDSRPTQAEAEEAVRVLLRWAGDDPTREGLLDTPKRVAKSYRELFSGYDLEATSVLGTFFEEVGGYDDIILVRDIPFYSHCEHHMVPIIGKAHVAYLPSGRVLGLSKIARVVEIFGRRLQTQETMTAQIASAINDTLKPRGVAVMIDAEHMCMSMRGVQKQGSTTLTTSFTGTFKSEPAEQARFMSMVRNR

SEQ ID NO: 4191 - protein, 139 aa, unidentified
  source 1..139: note = Agrobacterium radiobacter
  REGION 1..139: note = tr|W1L450|W1L450_RHIRD GTP cyclohydrolase 1 (Fragment) OS=Agrobacterium radiobacter DSM 30147; OX = 1336745 GN=L902_32045 PE=3 SV=1
QDVLGTTFEEVGGYDDVVLVRDIPFFSHCEHHMVPIVGKAHVAYLPAGRVLGLSKIARVVEIFGRRLQTQENMTAQIARSIEETLKPRGVAVMIDAEHMCMSMRGVNKQGSTTLTTSFTGVFKNDPAEQVRFMTMVRNR

SEQ ID NO: 4192 - protein, 207 aa, unidentified
  source 1..207: note = Agrobacterium radiobacter
  REGION 1..207: note = tr|B9JFG8|B9JFG8_AGRRK GTP cyclohydrolase 1; OS = Agrobacterium radiobacter (strain K84 / ATCC BAA-868); OX = 311403 GN=folE PE=3 SV=1
MDAIVKNFPQAVESDRILDRPSQKEAEDAVRVLLRWAGDDPQREGLLDTPERVAKAYRELFAGYDMSPEDVLGRTFEEVSGYDDMVLVRDIPFFSHCEHHMVPIIGKAHVAYLPNGRVLGLSKIARTVEIFGRRLQTQEAMTAQIANAIDDSLRPRGVAVMIEAEHMCMAMRGVQKQGSSTLTTTFTGAFKADPAEQVRFMTMVRSR

SEQ ID NO: 4193 - protein, 207 aa, unidentified; identical to SEQ ID NO: 4192
  source 1..207: note = Agrobacterium rhizogenes
  REGION 1..207: note = tr|A0A546ZKM4|A0A546ZKM4_AGRRH GTP cyclohydrolase 1; OS = Agrobacterium rhizogenes OX=359 GN=folE PE=3 SV=1

SEQ ID NO: 4194 - protein, 208 aa, unidentified
  source 1..208: note = Agrobacterium rhizogenes
  REGION 1..208: note = tr|A0A546XJY2|A0A546XJY2_AGRRH GTP cyclohydrolase 1; OS = Agrobacterium rhizogenes OX=359 GN=folE PE=3 SV=1
MDAIVKNFPGAGTKPDVAEARPSQAEAEEAVRVLLRWAGENPAREGLLDTPKRVAKAYRELFAGYELNVQDVLGTTFEEVGGYDDVVLVRDIPFFSHCEHHMVPIVGKAHVAYLPAGRVLGLSKIARVVEIFGRRLQTQENMTAQIARSIEETLKPRGVAVMIDAEHMCMSMRGVNKQGSTTLTTSFTGSFKNDPAEQVRFMTMVRNR

SEQ ID NO: 4195 - protein, 208 aa, unidentified
  source 1..208: note = Agrobacterium rosae
  REGION 1..208: note = tr|A0A2S4EEU1|A0A2S4EEU1_9RHIZ GTP cyclohydrolase 1; OS = Agrobacterium rosae OX=1972867 GN=folE PE=3 SV=1
MDAIVKNFPGAGTPNGAADLRPTQAEAEDAVRVLLRWAGDDPNREGLLDTPKRVAKSYRELFSGYDLDASDVLGTTFEEVGGYDDIILVRDIPFHSHCEHHMVPIVGKAHVAYLPAGRVLGLSKIARVVEIYGRRLQTQETMTAQIANAIETTLKPRGVAVLIDAEHMCMSMRGVRKQGSTTLTTSFTGTFKAEAAQQARFMTMVYSR

SEQ ID NO: 4196 - protein, 208 aa, unidentified
  source 1..208: note = Agrobacterium rubi
  REGION 1..208: note = tr|A0A081CS13|A0A081CS13_9RHIZ GTP cyclohydrolase 1; OS = Agrobacterium rubi TR3 = NBRC 13261 OX=1368415 GN=folE; PE = 3 SV=1
MDAIVKNFPGAGTQDGVTAVRPTQAEAEEAVRVLLRWAGDNPNREGLLDTPKRVAKSYRELFSGYALDANDVLGTTFEEVGGYDDIILVRDIPFYSHCEHHMVPIIGKAHVAYLPEGRVLGLSKIARVVEIFGRRLQTQETMTAQIANAIESKLKPRGVAVMIDAEHMCMSMRGVQKQGSTTLTTSFTGTFKAEAAQQARFMSMVYNR

SEQ ID NO: 4197 - protein, 208 aa, unidentified; identical to SEQ ID NO: 4196
  source 1..208: note = Agrobacterium rubi
  REGION 1..208: note = tr|A0A1B9U2W8|A0A1B9U2W8_9RHIZ GTP cyclohydrolase 1; OS = Agrobacterium rubi OX=28099 GN=folE PE=3 SV=1

SEQ ID NO: 4198 - protein, 208 aa, unidentified; identical to SEQ ID NO: 4184
  source 1..208: note = Agrobacterium salinitolerans
  REGION 1..208: note = tr|A0A1S7U5C2|A0A1S7U5C2_9RHIZ GTP cyclohydrolase 1; OS = Agrobacterium salinitolerans str. Hayward 0363; OX = 1183434 GN=folE PE=3 SV=1

SEQ ID NO: 4199 - protein, 208 aa, unidentified; identical to SEQ ID NO: 4184
  source 1..208: note = Agrobacterium salinitolerans
  REGION 1..208: note = tr|A0A1S9EYL3|A0A1S9EYL3_9RHIZ GTP cyclohydrolase 1; OS = Agrobacterium salinitolerans OX=1183413 GN=folE PE=3; SV = 1

SEQ ID NO: 4200 - protein, 208 aa, unidentified
  source 1..208: note = Agrobacterium sp.
  REGION 1..208: note = tr|A0A4U6APZ8|A0A4U6APZ8_9RHIZ GTP cyclohydrolase 1; OS = Agrobacterium sp. LC34 OX=1643810 GN=folE PE=3 SV=1
MDAIVKNFPGAGTKPDVAEARPSQAEAEEAVRVLLRWAGENPAREGLLDTPKRVAKAYRELFAGYELNVQDVLGTTFEEVGGYDDVVLVRDIPFFSHCEHHMVPIVGKAHVAYLPAGRVLGLSKIARVVEIFGRRLQTQENMTAQIARSIEETLKPRGVAVMIDAEHMCMSMRGVNKQGSTTLTTSFTGTFKNDPAEQVRFMTMVRNR

SEQ ID NO: 4201 - protein, 208 aa, unidentified; identical to SEQ ID NO: 4184
  source 1..208: note = Agrobacterium sp.
  REGION 1..208: note = tr|A0A357X8Q3|A0A357X8Q3_AGRSP GTP cyclohydrolase 1; OS = Agrobacterium sp. OX=361 GN=folE PE=3 SV=1

SEQ ID NO: 4202 - protein, 208 aa, unidentified; identical to SEQ ID NO: 4184
  source 1..208: note = Agrobacterium tumefaciens
  REGION 1..208: note = tr|A0A1S7QVS4|A0A1S7QVS4_RHIRD GTP cyclohydrolase 1; OS = Agrobacterium tumefaciens str. Kerr 14 OX=1183424; GN = folE PE=3 SV=1

SEQ ID NO: 4203 - protein, 208 aa, unidentified; identical to SEQ ID NO: 4188
  source 1..208: note = Agrobacterium tumefaciens
  REGION 1..208: note = tr|H0HB12|H0HB12_RHIRD GTP cyclohydrolase 1; OS = Agrobacterium tumefaciens 5A OX=1107544 GN=folE PE=3; SV = 1

SEQ ID NO: 4204 - protein, 201 aa, unidentified
  source 1..201: note = Agrobacterium vitis
  REGION 1..201: note = sp|B9JWF1|GCH1_AGRVS GTP cyclohydrolase 1; OS = Agrobacterium vitis (strain S4 / ATCC BAA-846); OX = 311402 GN=folE PE=3 SV=1
MDATVKKMSPETSRPSREEAENAVRTLLRWAGDDPSREGLLDTPKRVAKAYGELFGGYNVNVEDVLGTTFEEVGGYNDIVLVRDIPFFSHCEHHMLPVIGKAHVAYLPNGRVLGLSKIARVVDLFARRLQTQETMTAQIADSLVQYLQPRGVAVMVDAEHMCMAMRGIQKSGSTTLTTTFTGEFKTDVPQQVRFMTMVQNR

SEQ ID NO: 4205 - protein, 201 aa, unidentified; identical to SEQ ID NO: 4204
  source 1..201: note = Agrobacterium vitis
  REGION 1..201: note = tr|A0A202F5L3|A0A202F5L3_AGRVI GTP cyclohydrolase 1; OS = Agrobacterium vitis OX=373 GN=folE PE=3 SV=1

SEQ ID NO: 4206 - protein, 188 aa, Agrococcus baldri
  REGION 1..188: note = tr|A0A1I6LKA0|A0A1I6LKA0_9MICO GTP cyclohydrolase 1; OS = Agrococcus baldri OX=153730 GN=folE PE=3 SV=1
MAVDRERVEAAVRELLAAIGDDPGRAGLLDTPRRVATAYTEYFAGVGADPTEQLDTLGLEGETGEMVLLRDIEFRSMCEHHLLPFTGVAHIAYLPGDRITGLGRIPAVVDVIASRPQIQERLTDEIADALDAGLEPRGVLVVIEAAHGCVQARGARQASSTTVTVASRGQLAEPIERAEIMALIGERR

SEQ ID NO: 4207 - protein, 188 aa, Agrococcus baldri
  REGION 1..188: note = tr|A0A510ZYU9|A0A510ZYU9_9MICO GTP cyclohydrolase 1; OS = Agrococcus baldri OX=153730 GN=folE PE=3 SV=1
MAVDRERVEAAVRELLAAIGDDPGRAGLVDTPRRVASAYAEYFAGVGADPAEQLDTIGLEGETGELVLLRDIEFRSMCEHHLLPFTGVAHVAYLPGEHIVGLGRIPAVVDVVASRPQIQERLTDEIADALEAGLEPRGVLVVVEAAHGCVAARGARQARSTTVTVASRGQLAEPIERAEIMALIGERR

SEQ ID NO: 4208 - protein, 188 aa, Agrococcus carbonis
  REGION 1..188: note = tr|A0A1H1QDA5|A0A1H1QDA5_9MICO GTP cyclohydrolase 1; OS = Agrococcus carbonis OX=684552 GN=folE PE=3 SV=1
MAVDRERVEAAVRELLAAIGDDPEREGLRDTPRRVATAYAEYFAGVGADPTAQLDTLGLEGETGEMVLLRDIEFRSMCEHHLLPFTGVAHIAYLPGDRIVGLGRIPAVVDVVASRPQIQERLTDEIADALVAGLAPRGVLVVIEAAHGCVQARGARQASSTAVTVASRGQLAEPLERAEIMALIGERR

SEQ ID NO: 4209 - protein, 191 aa, Agrococcus casei
  REGION 1..191: note = tr|A0A1R4F854|A0A1R4F854_9MICO GTP cyclohydrolase 1; OS = Agrococcus casei LMG 22410 OX=1255656 GN=folE PE=3 SV=1
MSIDRERVQRAVSELLAAIGDDPARDGLHETPRRVADAYAEFFRGVGSDPVEHLRDSLDVGEQTGEVVLLRDIEFTSMCEHHLLPFSGVAHVAYLPGAKIVGLGRIPAVVRTIAARPQIQERLTDEVADALVQGLDPAGVLVVVDASHGCLATRGANQSNASTVTLASRGSLTEPVARAELLALIGERVTR

SEQ ID NO: 4210 - protein, 189 aa, Agrococcus jejuensis
  REGION 1..189: note = tr|A0A1G8C1R8|A0A1G8C1R8_9MICO GTP cyclohydrolase 1; OS = Agrococcus jejuensis OX=399736 GN=folE PE=3 SV=1
MAVDRARVAAAVGELLAAIGDDPTRQGLAETPRRVAEAYADYFSGVGVDAAEQLADTTSLEGETGELVLVRGIELRSICEHHLLPFTGTAHVAYLPGERIVGLGRIPAVVDTVASRPQIQERLTDEIADALVRGLEPRGVLVVVEATHGCVTARGARQVRSSTVTMASRGVLAEPIERAEIMALIGESR

SEQ ID NO: 4211 - protein, 188 aa, Agrococcus jenensis
  REGION 1..188: note = tr|A0A3N2ASI4|A0A3N2ASI4_9MICO GTP cyclohydrolase 1; OS = Agrococcus jenensis OX=46353 GN=folE PE=3 SV=1
MAVDGERIAAAVRELLAAIGDDPARAGLAETPRRVAEAYADYFAGVGVDASSHLDSADLAGESGELVLLRDIEFRSMCEHHLLPFTGVAHVAYLPSDRIVGLGRIPRVVETIASRPQIQERLTDEIADALVAGLEPRGVLVVVEAAHGCVAARGARQAKSSTVTIASRGTLAEPIERAEIMALIGERR

SEQ ID NO: 4212 - protein, 188 aa, Agrococcus lahaulensis
  REGION 1..188: note = tr|A0A443JY04|A0A443JY04_9MICO GTP cyclohydrolase 1; OS = Agrococcus lahaulensis OX=341722 GN=folE PE=3 SV=1
MAVDRERIAAAVRELLAAIGDDPARPGLAETPRRVAEAYAEYFSGVGEDPTAHLDSADLAGESGELVLLRDIEFRSMCEHHLLPFTGVAHVAYLPSDRIVGLGRIPRVVETIASRPQIQERLTDEIADALVAGLDPRGVLVVVEAGHGCVAARGARQAKSSTVTVASRGALAEPIERAEIMALIGERR

SEQ ID NO: 4213 - protein, 188 aa, unidentified
  source 1..188: note = Agrococcus pavilionensis
  REGION 1..188: note = tr|U1LPB2|U1LPB2_9MICO GTP cyclohydrolase 1; OS = Agrococcus pavilionensis RW1 OX=1330458 GN=folE PE=3; SV = 1
MAVDRARVAAAVRELLAAIGDDPARPGLAETPRRVAEAYAEYFAGVGEDASAHLDTSDLTGERGEMVLLRDIEFRSMCEHHLLPFTGIAHVAYLPGDRIVGLGRIPRVVETIASRPQIQERLTDEIADALVAGLEPEGVLVVVDAVHGCVGARGSRQVNSSTVTVASRGRLAEPIERAEIMALIGERR

SEQ ID NO: 4214 - protein, 189 aa, Agrococcus sp.
  REGION 1..189: note = tr|A0A4P8RG92|A0A4P8RG92_9MICO GTP cyclohydrolase 1; OS = Agrococcus sp. SGAir0287 OX=2070347 GN=folE PE=3 SV=1
MAVDRARVAAAVAELLAAIGDDPTRQGLAETPRRVAEAYADYFSGVGVDAAEPLADSTSLDGETGELVLLRGIELRSICEHHLLPFTGIAHVAYLPGDRIVGLGRIPAVVDVVASRPQIQERLTDEIADALVRGLAPRGVLVVVEATHGCVTARGARQTRSSTVTMASRGALAAPLERAEIMALIGESR

SEQ ID NO: 4215 - protein, 198 aa, Agromyces albus
  REGION 1..198: note = tr|A0A4Q2KU93|A0A4Q2KU93_9MICO GTP cyclohydrolase 1; OS = Agromyces albus OX=205332 GN=folE PE=3 SV=1
MAGVDARRIERAVLEILLAIGEDPDRPGLTRTPQRVAEAYAEFFAGLDVDPLSHLADTVPLGATEAGAPATSDAVILRDLAFRSVCEHHLLPFVGTAHVAYLPNERVVGLGRIPAVVDTLASRPQLQERLAEEIADTLQAGLDPKGVLVVLDAQHRCVTTRGSRQERSSTVTIASRGALASPAARAEIIALIGNSSDA

SEQ ID NO: 4216 - protein, 197 aa, Agromyces atrinae
  REGION 1..197: note = tr|A0A4Q2M048|A0A4Q2M048_9MICO GTP cyclohydrolase 1; OS = Agromyces atrinae OX=592376 GN=folE PE=3 SV=1
MPPVDRARVEAAVHELLLAIGEDPTRPGIERTPQRVAESYVEFFHGVSEDPLVHLADCVPLGAADDGGETTSDAVIVRDLAFRSMCEHHLLPFTGVAHVAYLPHERVIGLGRIPLVIDTLAARPQLQERLAEEIADALDAGLEPRGVLVVLDAAQQCVSTRGPRQVASSTVTIASRGELTEPAARSEIMALIGARRD

SEQ ID NO: 4217 - protein, 197 aa, unidentified
  source 1..197: note = Agromyces aureus
  REGION 1..197: note = tr|A0A191WIG1|A0A191WIG1_9MICO GTP cyclohydrolase 1; OS = Agromyces aureus OX=453304 GN=folE PE=3 SV=1
MAGVDTERIERAVLEILVAIGEDPERAGLRRTPARVAEAYADFFGGLEVDPLSHLADAVPVGTSESGAPATSDAVVLRDLAFRSVCEHHLLPFVGTAHVAYLPGDRVVGLGRIPAVVDTLAARPQLQERLAEEIADALETGLEPRGVLVVLDAQHRCVTTRGSRQERSSTITVVARGALTEAAARAEIIALIGGVAA

SEQ ID NO: 4218 - protein, 198 aa, unidentified
  source 1..198: note = Agromyces binzhouensis
  REGION 1..198: note = tr|A0A4Q2JHA0|A0A4Q2JHA0_9MICO GTP cyclohydrolase 1; OS = Agromyces binzhouensis OX=1817495 GN=folE PE=3 SV=1
MTGVDADRIERAVRELLLAIGEDPERPGLERTPRRVAEAYADYFSGVGADPLVHLAETVASGDTAAGVPATSDAVVLRDLAFRSVCEHHLLPFIGTAHVAYLPGERLVGLGRIPAVIDTIASRPQLQERIAEEVADALVAGLDPRGVLVVIDAVHGCVTARGARQDRSSTVTIASRGELAEPAARAEIIALIGSGRGA

SEQ ID NO: 4219 - protein, 198 aa, Agromyces cerinus
  REGION 1..198: note = tr|A0A1N6F880|A0A1N6F880_9MICO GTP cyclohydrolase 1; OS = Agromyces cerinus subsp. cerinus OX=232089 GN=folE PE=3; SV = 1
MAGVDAERIQRAVHEILLAIGEDPSRPGLERTPQRVAEAYADFFGGLDVDPQSHLADTVPIGATDAGVPATSDAVVLRDLAFRSVCEHHLLPFVGTAHVAYLPGDRVVGLGRIPAVVDTLARRPQLQERLTEEIADALVAGLDPRGVLVVLDAQHRCVTTRGSRQERSSTVTIASRGALSEPAARSEIITLIGAQTNA

SEQ ID NO: 4220 - protein, 217 aa, Agromyces flavus
  REGION 1..217: note = tr|A0A1H1MC09|A0A1H1MC09_9MICO GTP cyclohydrolase 1; OS = Agromyces flavus OX=589382 GN=folE PE=3 SV=1
MTSIELVEPGAERPRLHAVEVAGGSETDRPRPVDRDRAAAAVADLLEALGRDIRSPHLADTPRRVADAFAEMLTPRPFAPTSFANDEGYDDLVVVAGIPFDSLCEHHLLPFSGVAHVGYVPGDRLVGLSKLARVVEHFARDLQVQERLTRQVVGWLDDELDPRGVGVVIEAEHLCMSLRGVQARGTRTVTSAYSGVVHDDARTRAEFLARCRAGGAA

SEQ ID NO: 4221 - protein, 198 aa, Agromyces flavus
  REGION 1..198: note = tr|A0A1H1LF89|A0A1H1LF89_9MICO GTP cyclohydrolase 1; OS = Agromyces flavus OX=589382 GN=folE PE=3 SV=1
MTGVDTGRIERAVRELLLAIGEDPDRAELERTPARVAEAYQEFFSGIGADPQAHLADSVELGAADDGEPATGDAIVLRDLHFRSVCEHHLLPFIGTAHVAYLPGAKVVGLGRIPAVVDTLASRPQLQERLAEEIADALEAGLAPRGVLVVLDAVHSCVTTRGVRQEHSSTVTVASRGALAESAARAEVIALIGSGRGV

SEQ ID NO: 4222 - protein, 198 aa, Agromyces fucosus
  REGION 1..198: note = tr|A0A4Q2JNH5|A0A4Q2JNH5_9MICO GTP cyclohydrolase 1; OS = Agromyces fucosus OX=41985 GN=folE PE=3 SV=1
MAGVDAERIQRAVHEILLAIGEDPSRPGLERTPQRVAEAYADFFGGLDVDPLSHLADSVPIGATDAGVPATSDAVVLRDLAFRSVCEHHLLPFVGTAHVAYLPGDRVVGLGRIPAVVDTLARRPQLQERLAEEIADALVAGLDPKGVLVVLDAQHRCVTTRGSRQERSSTVTIASRGALSEPAARSEIITLIGAQTNA

SEQ ID NO: 4223 - protein, 203 aa, Agromyces ramosus
  REGION 1..203: note = tr|A0A4Q7MHB7|A0A4Q7MHB7_9MICO GTP cyclohydrolase 1; OS = Agromyces ramosus OX=33879 GN=folE PE=3 SV=1
MSLVHDHDEFDLDHAVGVVATASLPDRRAEAAVSDLLLALGFDVADPDLVETPRRVVASFRELLHREPLTMTTFPNEEGYDELVLVREIPFTSLCAHHLLPFRGVAHVGYLPAERLLGLSKLARVVEHFAGDLQLQERLTVQIADFLASELAPNGVGVVLEAEHLCMSIRGANAPTARTQTARFTGALAEHGWERFRDASRHG

SEQ ID NO: 4224 - protein, 198 aa, Agromyces ramosus
  REGION 1..198: note = tr|A0A4Q7MDD9|A0A4Q7MDD9_9MICO GTP cyclohydrolase 1; OS = Agromyces ramosus OX=33879 GN=folE PE=3 SV=1
MAGVDTARIERAVHEILLAIGEDPTRPGLERTPQRVAEAYAEFFGGLDVDPLSHLADTVPLGATEAGVPATSDAVVLRDLAFRSVCEHHLLPFVGTAHVAYLPAERVVGLGRIPAVIDTLAARPQLQERLAEEIADALEAGLEPKGVLVVLDAQHRCVTTRGSRQERSSTVTIASRGALAEPAARAEIIALIGAAERG

SEQ ID NO: 4225 - protein, 182 aa, Agromyces sp.
  REGION 1..182: note = tr|A0A542JT19|A0A542JT19_9PSED GTP cyclohydrolase 1; OS = Agromyces sp. SLBN-50 OX=744977 GN=folE PE=3 SV=1
MSLEQQYTAILGQLGEDVSREGLLDTPKRAAKAMQYLCKGYQQTLEEVTNGALFSSDNSEMVLVKNIELYSLCEHHLLPFIGKAHVAYIPSGKVLGLSKVARIVDMYARRLQIQENLSRQIAEAVQQVTGALGVAVVIEAQHMCMMMRGVEKQNSSMVTSVMLGEFRENAATRSEFLSLIRD

SEQ ID NO: 4226 - protein, 179 aa, Agromyces sp.
  REGION 1..179: note = tr|A0A0Q9J300|A0A0Q9J300_9MICO GTP cyclohydrolase 1; OS = Agromyces sp. Soil535 OX=1736390 GN=ASG80_06230 PE=3; SV = 1
MDSTTQLVSDTVAEQSIAEVLDLVGASRTGNVDKSPRRIIEAWRFACRGVDLDPAEALGQPAASSSTAEVSISGIPVLSTCEHQFLPFFGTATITYAPAGLIVGFGRIAKMVDILAGRPQLQERLTSSIADVLESVLHPIALRVELTCTQTCMMMSPAMTLDSTVRTVESRGWSLGSQP

SEQ ID NO: 4227 - protein, 321 aa, unidentified
  source 1..321: note = Ahniella affigens
  REGION 1..321: note = tr|A0A2P1PTB0|A0A2P1PTB0_9GAMM GTP cyclohydrolase FolE2 OS=Ahniella affigens OX=2021234 GN=folE2 PE=3 SV=1
MNEINQANWSLDANPADATSADATKLLPDIAAAKAAQRGVLQWVGMRNVRAPLLIAASSGAAAERVAASVDVYVNLTDADARGIHMSRLYLLLESLAEVPVSSQSLRDLLGRLIESQAGLADAARIVLRFDLMLRRRALKSQLSGWKAYPVRMDARLGADGLRVQQELRIAYSSTCPMSAALSRQIQREHFEHHFGQSSQVPVSAVAEWLEQESGLAATPHAQRSQAVLNLSWQPDVANWPVLALIDQVEQALATPVQTAVKRIDEQTFARLNAENLMFCEDAARRVATVLRGVPSLADFEVDVAHFESLHAHDAVAVAVR

SEQ ID NO: 4228 - protein, 203 aa, unidentified
  source 1..203: note = Ahniella affigens
  REGION 1..203: note = tr|A0A2P1PWT3|A0A2P1PWT3_9GAMM GTP cyclohydrolase 1; OS = Ahniella affigens OX=2021234 GN=folE PE=3 SV=1
MSSRKAGKSKAPKISRAEAEAAVRTLLAYAGEDPSREGLLETPRRVVEAYSDWFSGYKEDPEVYLARTFEEVEGYDEMIVLRDIEFESHCEHHMAPIIGKAHIGYVPNGKVVGISKLARVVEAYARRFQVQEKMTAQIARCIQDVLKPIGVGVVVEGAHECMTTRGIHKRGVSMVTSKMLGSFHDDARTRAEFLAFIDVGSGR

SEQ ID NO: 4229 - protein, 207 aa, unidentified
  source 1..207: note = Ahrensia marina
  REGION 1..207: note = tr|A0A0N0VM47|A0A0N0VM47_9RHOB GTP cyclohydrolase 1; OS = Ahrensia marina OX=1514904 GN=folE PE=3 SV=1
MDAIVNKLPGKEENMLDDSNNKPTQAEAEEAVRTLLRWMGEDITREGLLDTPKRVVKSYSELFGGYEADPSDVLGRTFEEVAGYNDIVLVKDIHFHSHCEHHMVPIIGKAHVAYLPDERVLGLSKIARVVDIFARRLQTQETLTSQVATSIDETLAPRGVAVMIEAEHMCMAMRGVRKQGSTTVTTRFTGEFEKPENQYRFLEMLRH

SEQ ID NO: 4230 - protein, 208 aa, Ahrensia sp.
  REGION 1..208: note = tr|A0A2E0IRL2|A0A2E0IRL2_9RHOB GTP cyclohydrolase 1; OS = Ahrensia sp. OX=1872419 GN=folE PE=3 SV=1
MDAIVSTFSKDEEDQIATPARPTREEAEAAVRTLIRWTGDNPDREGLLETPQRVVNAYREMFSGYDMDPHEVLGRTFEEVAGYDDVVLVKDIGFHSHCEHHMVPIIGKAHVAYLPDGRVLGLSKIARVIDIFAQRLQTQESITAQIASTIDEALSPRGVAVMIEAEHMCMAMRGIRKQGSTTLTTTFTGAFRNDPQEQARFISMVRGR

SEQ ID NO: 4231 - protein, 211 aa, Ahrensia sp.
  REGION 1..211: note = tr|E0MKZ3|E0MKZ3_9RHOB GTP cyclohydrolase 1; OS = Ahrensia sp. R2A130 OX=744979 GN=folE PE=3 SV=1
MDQIVDTDAILREGDETSTLPAKPTRAEAEAAVKTLLRWSGDDITREGLQDTPARVAKSYSELFSGYGEDPTEALGRTFEEVSGYDDMVVIRDIHFHSHCEHHMVPIIGKAHVGYLPDGKVVGLSKIARVVDIFARRLQTQEALTSQIAHTIQDVLEPRGVAVMIEAQHMCMVMRGIKKDGSTTLTTTFTGAYRDDPQEQIRYMTLLRQAA

SEQ ID NO: 4232 - protein, 185 aa, Aidingimonas halophila
  REGION 1..185: note = tr|A0A1H3AUY5|A0A1H3AUY5_9GAMM GTP cyclohydrolase 1; OS = Aidingimonas halophila OX=574349 GN=folE PE=3 SV=1
MSEQLTDHYYQILQGVGEDPEREGLRDTPRRAADAMRFLTRGYGQSLATLVNGAVFESETDEMVLIKDIELYSMCEHHMLPFIGKCHIAYLPNGRVLGLSKFARIVDMYARRLQIQEDLTRQIAEAIQEVTEARGVAVVIEAKHMCMMMRGVEKQNSSMTSSVMLGAFRENQPTRQEFLTLVSGR

SEQ ID NO: 4233 - protein, 267 aa, unidentified
  source 1..267: note = Akkermansia glycaniphila
  REGION 1..267: note = tr|A0A1C7PD02|A0A1C7PD02_9BACT GTP cyclohydrolase FolE2 OS=Akkermansia glycaniphila OX=1679444 GN=folE2 PE=3; SV = 1
MKELKDTQNERDTRQVSIDRVGVKGLKYPIVVRDKEHRRQSTVATISLAVDLPEEFKGTHMSRFVEVLQDHKRHLDVHSAVQLPGKLLERLQAKRAHVEIEFPFFRSKAAPVTGMEGMMDYGVSFVIDERLGEPVDFLLTVTVPVTTLCPCSKAMSERGAHNQRGIVTYSVRFTSGPVWIEDLIDLIEACASCPVYSLLKRPDEKWVTDKAYDNPVFVEDLVRNIAIRTESYNAFSWYRVEAENFESIHNHQAYAVIERTLGDQKKD

SEQ ID NO: 4234 - protein, 264 aa, Akkermansia muciniphila
  REGION 1..264: note = sp|B2ULP4|GCH4_AKKM8 GTP cyclohydrolase FolE2; OS = Akkermansia muciniphila (strain ATCC BAA-835 / Muc); OX = 349741 GN=folE2 PE=3 SV=1
MQELKDTQSEADTRNISIDRVGVKGLRFPIQIQDKLNRIQSTVATVSLAVDLPEEFKGTHMSRFVEALHQHGPLLDVHTALAIPRELLRRLSARRSHVEMEFPFFRSKNAPVTGIEGLMDYVVRFEMEAEANNKLADFKLTVIVPVTTLCPCSKAMSAYGAHNQRGLVTYSVRFASRPVWIEDLIDLVESCASCSLFSVLKRPDEKWVTEKAYENPVFVEDLVRNVALKTQSHSAFSWYRVEAENFESIHNHQAYAVIERDLRS

SEQ ID NO: 4235 - protein, 264 aa, Akkermansia muciniphila; identical to SEQ ID NO: 4234
  REGION 1..264: note = tr|A0A2N8IXS3|A0A2N8IXS3_9BACT GTP cyclohydrolase FolE2 OS=Akkermansia muciniphila OX=239935 GN=folE2 PE=3; SV = 1

SEQ ID NO: 4236 - protein, 264 aa, Akkermansia sp.
  REGION 1..264: note = tr|A0A4Q5HZZ2|A0A4Q5HZZ2_9BACT GTP cyclohydrolase FolE2 OS=Akkermansia sp. aa_0143 OX=2478952 GN=folE2 PE=3; SV = 1
MQELKDTQSEADTRNISIDRVGVKGLRFPIQIQDKLNRIQSTVATVSLAVDLPEEFKGTHMSRFVEALHQHGSLLDVHTALSIPRELLGRLSASRSHVEMEFPFFRAKAAPVTGREGLMDYVVRFEMEAEAGDRLADFKLTVVVPVTTLCPCSKAMSSYGAHNQRGIVTYSVRFASRPVWIEDLIDLVESCASCSLFSVLKRPDEKWVTEKAYENPVFVEDLVRNVALKTQSHSAFSWYRVEAENFESIHNHQAYAVIERDLRS

SEQ ID NO: 4237 - protein, 264 aa, Akkermansia sp.
  REGION 1..264: note = tr|A0A139TQ72|A0A139TQ72_9BACT GTP cyclohydrolase FolE2 OS=Akkermansia sp. KLE1798 OX=1574265 GN=folE2 PE=3; SV = 1
MQELKDTQSEADTRNISIDRVGVKGLRFPIQIQDKLNRIQSTVATVSLAVDLPEEFKGTHMSRFVEALHQHGPLLDVHTALSIPRELLGRLSASRSHVEMEFPFFRAKAAPVTGREGLMDYVVRFEMEAEAGDRLADFKLTVVVPVTTLCPCSKAMSSYGAHNQRGIVTYSVRFASRPVWIEDLIDLVESCASCSLFSVLKRPDEKWVTEKAYENPVFVEDLVRNVALKTQSLSAFSWYRVEAENFESIHNHQAYAVIERDLRS

SEQ ID NO: 4238 - protein, 365 aa, Albidovulum inexpectatum
  REGION 1..365: note = tr|A0A2S5JI49|A0A2S5JI49_9RHOB GTP cyclohydrolase FolE2 OS=Albidovulum inexpectatum OX=196587 GN=folE2 PE=3; SV = 1
MNSFSKIGVAPSAEDAANALKTLREWAASADPVEVARLDPAIARLLPGAEVSNYPDLSRSYPSDFRPDEAYHASMPDLQNGPTSLIVGARAVLQHVGISNFRLPIRFHLRDGGDLTLEASVTGTVSLDADRKGINMSRIMRSFYAHSERTFSFEVLEAVIEDYKRDHDAVDARLMMRFSFPVRQKSLRSGLEGWQYYDIALELVEQAGQRKRIIHLDYVYSSTCPCSLELSEHARKVRGQLATPHSQRSVARISVVASGSKCLWFEDLIELARAAVPTETQVMVKREDEQAFAELNAANPIFVEDAARAFAQQLLADQRVGDFRIIASHQESLHSHDAVSVLIEGPTFVSESLDPRLFASLHKPG

SEQ ID NO: 4239 - protein, 376 aa, unidentified
  source 1..376: note = Albidovulum xiamenense
  REGION 1..376: note = tr|A0A1G9D0M4|A0A1G9D0M4_9RHOB GTP cyclohydrolase FolE2 OS=Albidovulum xiamenense OX=990712 GN=folE2 PE=3; SV = 1
MNVHLPRAPLAGDDEKAQRDEIARALQAIEGRLAESVGEERRALIAGLERLLMRNGTEPAADGPRAGLSRDYDSDFVPDEAYRASLPDLQNGPASLIRGERGLIQHVGISNFRLPIRYHTRDNGDLTLETSVTGTVSLEAEKKGINMSRIMRSFYAHAERTFSFDVIEAALDDYKRDLESFDARIQMRFSFPMKVQSLRSGLWGYQYYDIALELVERDGVRRKFMHLDYVYSSTCPCSLELSEHAREVRGRLATPHSQRSVARISVELKGPKCLWFEDLIELCRAAVPTETQVMVKREDEQAFAELNAANPIFVEDAARLFCEKLAQDPRIGDFRIVASHQESLHSHDAVSVLTRGPSLAAESLDPRLFDTLHHAG

SEQ ID NO: 4240 - protein, 210 aa, unidentified
  source 1..210: note = Albimonas pacifica
  REGION 1..210: note = tr|A0A1I3MZC4|A0A1I3MZC4_9RHOB GTP cyclohydrolase 1; OS = Albimonas pacifica OX=1114924 GN=folE PE=3 SV=1
MNVRQTGFQPPEGPAPLDRPSREEAEAAVRTLLRWAGDDPAREGLLDTPSRVARAYGEWFAGYEDDPEAMLQRTFEEVEGYDEMVLLTDIRFESHCEHHLAPIIGKAHVAYLPTDRVVGISKLARLVDAYAKRLQVQEKLTAQIAGALDRALKPRGVAVLIEGEHHCMSTRGVHRPGVSMVTTRLTGAFQENPALRAEFMALAQPDRRSR

SEQ ID NO: 4241 - protein, 269 aa, unidentified
  source 1..269: note = Alcaligenaceae bacterium
  REGION 1..269: note = tr|A0A516W957|A0A516W957_9BURK GTP cyclohydrolase FolE2 OS=Alcaligenaceae bacterium SJ-26 OX=2593958; GN = folE2 PE=3 SV=1
MNTSAAAPAAMPDVQSSQDTRQVPIQRVGIRSVRHPLQVASASGAQATVGDWTLTVALPATEKGTHMSRFIALLEQYRSTPLDRSRFGNMASEMLELLHAEKGDIEVSFPYFVEKAAPISGVRSLLDYQVNFLARASREHGVDFVLTVLVPVTSLCPCSKTISEYGAHNQRSHVTVKVLLDSDIDLDQLIGVIEREGSCELWGLLKRPDEKYVTERAYDNPKFVEDLVRDVAVRVAAQPGVRGYQVQAENFESIHNHSAYAVVEGGAAI

SEQ ID NO: 4242 - protein, 271 aa, unidentified
  source 1..271: note = Alcaligenaceae bacterium
  REGION 1..271: note = tr|A0A4S1EH70|A0A4S1EH70_9BURK GTP cyclohydrolase FolE2 OS=Alcaligenaceae bacterium 429 OX=2562948 GN=folE2; PE = 3 SV=1
MTSLTKAAGTMPDVQSSVDTRHVAIQKVGVRGVRYPLFVQMAGDAAPTVGEWELTVALPPEEKGTHMSRFMELLEKYRQTPISATLYCQIAAEMLDLLKAEAGEMTVSFPYFINKAAPVSGVQSLLDYELGWSASVMRTEDGSVDTEFELSVLVPVTSLCPCSKAISKYGAHNQRSHVTVNLVLEDPAAVDVNALIQQVEEQASCQLWGLLKRTDEKYVTEQAYENPKFVEDLVRDVAVLVRDMPSVLNYRIEAENFESIHNHSAYAVVEG

SEQ ID NO: 4243 - protein, 313 aa, Alcaligenes aquatilis
  REGION 1..313: note = tr|A0A427LPN4|A0A427LPN4_9BURK GTP cyclohydrolase FolE2 OS=Alcaligenes aquatilis OX=323284 GN=folE2 PE=3 SV=1
MTVVLPDPALNDSTYGLTPLSWVGMEGIDLPITVVEPGYTRQLHARVDAQVDLPLAHVKGIHMSRLYRLLNDVPPEQALSLLGLRRLLQSMVDSQEDCGTRSARLGFSFDLLLRRPALVTQDLAGWKSYPVVLEARLVDGSFVCKMQVQIGYSSTCPCSAALARQLIEQGFMQAFGRQPDLRAEEVAAWLHKHASLATAHSQRSQALVQVQVSEDSEDFGFLALIDRVEKALATPLQTAVKRADEQAFAALNGQNLMFVEDAARRIEAALVDYQNAGIQVRHLESLHPHDAVAFKTPLMSETPFARLNGGVAP

SEQ ID NO: 4244 - protein, 267 aa, Alcaligenes aquatilis
  REGION 1..267: note = tr|A0A3G2HZW9|A0A3G2HZW9_9BURK GTP cyclohydrolase FolE2 OS=Alcaligenes aquatilis OX=323284 GN=folE2 PE=3 SV=1
MNTVSESPLAMPDVQSSMDTRRVAIQRVGVRGVRHPMMLDLQGQAVPTVAQWELTVALPPEEKGTHMSRFVALLEEYRRQAMTPAGFVQMAQTMLPLLGAGRGDMTATFPVFLEKVAPVSGVASLMDYTVSWTARVGVDAQPEFELSVLVPVTSLCPCSKAISEYGAHNQRSHVTVQAVFADPAALDLPTLIKSVEEQASCQLWGLLKRTDEKYVTEYAYDNPKFVEDLVRDVAVSVRSLPGVLRYSIEAENFESIHNHSAYASVQG

SEQ ID NO: 4245 - protein, 267 aa, Alcaligenes faecalis
  REGION 1..267: note = tr|A0A2U2BJX3|A0A2U2BJX3_ALCFA GTP cyclohydrolase FolE2 OS=Alcaligenes faecalis OX=511 GN=folE2 PE=3 SV=1
MNTVSESPLAMPDVQSSMDTRRVAIQRVGVRGVRHPMMLDLQGQAVPTVAQWELTVALPPEEKGTHMSRFVALLEEYRRQAMTPAGFVQMAQAMLPLLNAGRGDMTATFPVFLEKVAPVSGVASLMDYTVSWTARVGVDALPEFELSVLVPVTSLCPCSKAISEYGAHNQRSHVTVQAVFADPAALDLPTLIKSVEEQASCQLWGLLKRTDEKYVTEYAYDNPKFVEDLVRDVAVSVRSLPGVLRYSIEAENFESIHNHSAYASVQG

SEQ ID NO: 4246 - protein, 313 aa, Alcaligenes faecalis
  REGION 1..313: note = tr|A0A3G6HGI6|A0A3G6HGI6_ALCFA GTP cyclohydrolase FolE2 OS=Alcaligenes faecalis OX=511 GN=folE2 PE=3 SV=1
MTVVLPDPALNDSSYGLTPLSWVGMEGIDLPITVVEPGYMRQPHARVDAQVDLPLAHVKGIHMSRLYRLLNDVPPEQALSPLRLRRLLQSMVESQEDCGTCCARLGFSFDLLVRRPALVTQNLAGWKSYPVVLEARLLDGMFVCKVQVQIGYSSTCPCSAALARQLIEQGFMQAFGKQPVLHADEVAAWLHKHASLATAHSQRSQALVQVDVAEDSENFGFLALIDRVEKALATPLQTAVKRADEQAFAALNGQNLMFVEDAARRIEAALVGYQNPGIQVRHLESLHPHDAVAFKTPLSAEMSLSGLKEGVVL

SEQ ID NO: 4247 - protein, 313 aa, Alcaligenes sp.
  REGION 1..313: note = tr|U1YGS8|U1YGS8_9BURK GTP cyclohydrolase FolE2; OS = Alcaligenes sp. EGD-AK7 OX=1386079 GN=folE2 PE=3 SV=1
MTVVLPDPALNDSSHGLTPLSWVGMEGVDLPITVLERGYKQQLHARVDAQVDLPLAHVKGIHMSRLYRLLNDLPPEQSLSPLGLRRLLQGMVDSQQDCGTRSARLCFRFDLLVRRPALVTQGLAGWKSYPVALEARLLDGIFICKVQVQIAYSSTCPCSAALARQLIEQGFMQAFGKQPVLHADEVAAWLHKHASLATPHSQRSQALVHIQVSEDSEDFGFLTLIDRIEESLATPLQTAVKRADEQAFAALNGQNLMFVEDAARRIEAALGGYQNPGVQVRHLESLHPHDAVAFKTPVSEGMPFLRLSGGVAP

SEQ ID NO: 4248 - protein, 267 aa, Alcaligenes sp.
  REGION 1..267: note = tr|U7U900|U7U900_9BURK GTP cyclohydrolase FolE2; OS = Alcaligenes sp. EGD-AK7 OX=1386079 GN=folE2 PE=3 SV=1
MNTVSESPLAMPDVQSSTDTRRVAIQRVGVRGVRHPMMLDLQGQAVPTVAQWELTVALPPEEKGTHMSRFVALLEEYRRQAMTPAGFVQMAQAMLPLLNAGRGDMTATFPVFLEKVAPVSGVASLMDYTVSWTARVGVDAQPEFELSVLVPVTSLCPCSKAISEYGAHNQRSHVTVQAVFADPATLDLPTLIKSVEEQASCQLWGLLKRTDEKYVTEYAYDNPKFVEDLVRDVAVSVRSLPGVLRYSIEAENFESIHNHSAYASVQG

SEQ ID NO: 4249 - protein, 181 aa, unidentified
  source 1..181: note = Alcaligenes xylosoxydans
  REGION 1..181: note = tr|A0A0D6HSN4|A0A0D6HSN4_ALCXX GTP cyclohydrolase 1; OS = Alcaligenes xylosoxydans xylosoxydans OX=85698 GN=folE; PE = 3 SV=1
MSLESHYTAILEALGEDPSREGLADTPARAAKAMRHLCRGYNQNLEEIVNGALFTSDTREIVLVKNIELYSLCEHHMLPFIGKAHVAYLPNGKVLGLSKVARIVEMYARRLQIQENLSRQVAEAVQSVTGAAGVAVVIEAQHMCMMMRGVEKQNSSMVTSVMLGEFHDNPSTRAEFLSLIR

SEQ ID NO: 4250 - protein, 265 aa, unidentified; identical to SEQ ID NO: 3738
  source 1..265: note = Alcaligenes xylosoxydans
  REGION 1..265: note = tr|A0A0D6GV23|A0A0D6GV23_ALCXX GTP cyclohydrolase FolE2 OS=Alcaligenes xylosoxydans xylosoxydans OX=85698; GN = folE2 PE=3 SV=1

SEQ ID NO: 4251 - protein, 305 aa, unidentified
  source 1..305: note = Alcanivoracaceae bacterium
  REGION 1..305: note = tr|A0A3L8AVT4|A0A3L8AVT4_9GAMM GTP cyclohydrolase FolE2 OS=Alcanivoracaceae bacterium GenoA1_TS13_700; OX = 2072747 GN=folE2 PE=3 SV=1
MPDIATATQPKAPGLLDWVGMSEIDVPLSIPTRNGGVAHAVAKAQAYVNLINPEAKGIHMSRLYLLLDEACSQTLTAAGLRDVLARFLESHEGLSDQAFVDFRFDFLARRPALKSEFSGWKAYPARVIATEDPDGFHFELKVEIPYSSTCPCSAALARQLIQKQFREDFGNGKQISADEVYGWLGTEQGIVATPHSQRSIAEIKVRLSDDTNSFPLEELIDVVEDGLKTPVQTAVKREDEQEFALLNGQNLMFCEDAARRIQSALNEQSSYQDFWVRVNHLESLHAHNAVAVVTKGIDGGYLPQP

SEQ ID NO: 4252 - protein, 181 aa, unidentified
  source 1..181: note = Alcanivoracaceae bacterium
  REGION 1..181: note = tr|A0A3L8B6Y2|A0A3L8B6Y2_9GAMM GTP cyclohydrolase 1; OS = Alcanivoracaceae bacterium GenoA1_TS13_700 OX=2072747; GN = folE PE=3 SV=1
MKENFAAIINAIGEDLSRPGLEKTPERAAKAFEYLTRGYHQNLDDVINDALFPSDASEMVVVKDIELYSMCEHHLLPFIGRAHVAYIPSGKVLGLSKIARIVDMYARRLQIQEQLTTQIAETIQNVVNAAGVGVVIEAQHMCMMMRGVEKQNSVMKTSAMLGTFRDNQATRTEFLSLINAR

SEQ ID NO: 4253 - protein, 307 aa, Alcanivorax borkumensis
  REGION 1..307: note = sp|Q0VMK6|GCH4_ALCBS GTP cyclohydrolase FolE2; OS = Alcanivorax borkumensis (strain ATCC 700651 / DSM 11573 / NCIMB 13689 / SK2) OX=393595 GN=folE2 PE=3 SV=2
MPDVASNSMVDHIHTTLDWVGMSEIHLPARVSDTLAGERPVSTSIQAYVNLANADAKGIHMSRLFLMLEETFGDHSVSAGSIEQLLRNFLQTHEGLSTRGFVQLDFEYSMRRAALKSSYSGWKSYPVSIKGTLCEDGMRIELSVEVPYSSTCPCSAALSRQLIQEQFRKDFEESKVDTDAVLEWLGTEEGILATPHSQRSIAQVRVLLDHNVGDAFPITALIDSIEGALKTPVQTAVKRVDEQEFALLNGQNLMFCEDAARRLKTALNPQSCYKDFWLRVNHLESLHAHNAVAIVTKEVEGGYLPIP

SEQ ID NO: 4254 - protein, 318 aa, Alcanivorax dieselolei
  REGION 1..318: note = tr|K0C6R2|K0C6R2_ALCDB GTP cyclohydrolase FolE2; OS = Alcanivorax dieselolei (strain DSM 16502 / CGMCC 1.3690 / B-5) OX=930169 GN=folE2 PE=3 SV=1
MKRESGADNTKAMPDVASNSMVDHIGGTLDWVGMSEIHLPARVSDTRVGERPVSTSIQAYVNLANPDAKGIHMSRLYLMLEETFGDHSVSPASIEQLLGNFLETHEGLSTRGFVQFDFEYSMRRPALKSSYAGWKSYTVSIKASLGEEGLCTEMYVEVPYSSTCPCSAALARQLIQEQFREDFQSGKVDVDEVFEWLGTEEGIRATPHSQRSIAQVRVLLDKAAESFPITALIDAIEEALKTPVQTAVKRIDEQEFALLNGQNLMFCEDAARRLKHALDPQPCYRDFWLRVNHLESLHAHNAVAIVTKEVDGGYLPIP

SEQ ID NO: 4255 - protein, 319 aa, Alcanivorax hongdengensis
  REGION 1..319: note = tr|L0WJ53|L0WJ53_9GAMM GTP cyclohydrolase FolE2; OS = Alcanivorax hongdengensis A-11-3 OX=1177179 GN=folE2; PE = 3 SV=1
MTRENGAGGTKQMPDVASNSMVDHIHTTLDWVGMSEIHLPARVSDTLAGERPVSTSIQAYVNLANADAKGIHMSRLFLMLEETFGDHSVSAASIEQLLRNFLETHEGLSTRGFVQLDFEYSMRRPALKSSYSGWKSYPVSIKGTLCEQGMRIEMYVEVPYSSTCPCSAALSRQLIQEQFRKDFQDGKIDAQAVFDWLGTEEGIVATPHSQRSVAQVRVLLDHTEGDAFPITALIDSIEGALKTPVQTAVKRIDEQEFALLNGQNLMFCEDAARRLKVSLDPQPCYKDFWLRVNHLESLHAHNAVAIVTKEVDGGYLPIP

SEQ ID NO: 4256 - protein, 319 aa, Alcanivorax jadensis
  REGION 1..319: note = tr|A0A095SCL2|A0A095SCL2_9GAMM GTP cyclohydrolase FolE2 OS=Alcanivorax jadensis T9 OX=1177181 GN=folE2 PE=3; SV = 1
MTRETGAGGTKQMPDVASNSMVDHIHSTLDWVGMSEIHLPARVSDTLAGERPVSTSIQAYVNLANPDAKGIHMSRLFLMLEETFGDHSVSAASIEQLLRNFLQTHEGLSTRGFVQLDFEYSMRRPALKSSYSGWKSYPVSIKGTLCEEGMRIEMYVEVPYSSTCPCSAALSRQLIQEQFRRDFAEGKVDADAVFEWLGTEEGILATPHSQRSVAQVRVLLDHTEGDAFPITALIDSIEGSLKTPVQTAVKRVDEQEFALLNGQNLMFCEDAARRLKQALNPQGCYKDFWLRVNHLESLHAHNAVAIVTKEVDGGYLPIP

SEQ ID NO: 4257 - protein, 319 aa, unidentified
  source 1..319: note = Alcanivorax nanhaiticus
  REGION 1..319: note = tr|A0A095SIJ5|A0A095SIJ5_9GAMM GTP cyclohydrolase FolE2 OS=Alcanivorax nanhaiticus OX=1177154 GN=folE2 PE=3; SV = 1
MTREKGAAGTKQMPDVASNSMVDHIHSTLDWVGMSEIHLPARVSDTLAGERPVSTSIQAYVNLANPDAKGIHMSRLFLMLEETFGDHSVSAGSIEQLLRNFLETHEGLSTRGFVQLDFEYSMRRPALKSSYSGWKSYPVSIKGTLCEEGMRIEMYVEVPYSSTCPCSAALSRQLIQEQFRKDFKEGKVDAEAVFEWLGTEEGIVATPHSQRSVAQVRVLLDHTEGDAFPITALIDSIEGALKTPVQTAVKRVDEQEFALLNGQNLMFCEDAARRLKQAIDPQPCYKDFWLRVNHLESLHAHNAVAIVTKEVDGGYLPIP

SEQ ID NO: 4258 - protein, 183 aa, Alcanivorax pacificus
  REGION 1..183: note = tr|A0A0B4XNE0|A0A0B4XNE0_9GAMM GTP cyclohydrolase 1; OS = Alcanivorax pacificus W11-5 OX=391936 GN=folE PE=3 SV=1
MTDSLSALYREVLTQLGEDPAREGLLDTPARVAKAMRFLTGGYQQSLEALVNGAVFSSDNDEMVVVRDIEFYSLCEHHMLPFFGKCHIAYIPDGKVLGLSKCARIVDMYARRLQIQENLTLQVAHAIGDVTGARGVGVIMDARHLCMMMRGVEKQHASTTTSVMLGTLRESAAARSEFLSLVT

SEQ ID NO: 4259 - protein, 317 aa, Alcanivorax pacificus
  REGION 1..317: note = tr|A0A0B4XT67|A0A0B4XT67_9GAMM GTP cyclohydrolase FolE2 OS=Alcanivorax pacificus W11-5 OX=391936 GN=folE2; PE = 3 SV=1
MKREDAAPHSMPDVASMASRHKGPKLDWVGMSEIHLPARVSDSVHGERPISSRIQAYVNLADTNARGIHMSRLYLMLEETFGDHSVSTASIRTLLENFLHTHDGLSSRAFVELDFEYSVRRPSLKSQYAGWKSYPVRIAGTLCEQGLRIELSVEVPYSSTCPCSAALARQLIQDAFREKFGDVGTIDAEDAAEWLGTEQGIVATPHSQRSIAQVRVLLDHAQDDAFPITALIDLIEGALKTPVQTAVKREDEQEFARLNGQNLMFCEDAARRLQVVMDQDPQYKDFWLRVNHLESLHAHNAVAIVTKNVDGGYLPIP

SEQ ID NO: 4260 - protein, 323 aa, unidentified
  source 1..323: note = Alcanivorax profundi
  REGION 1..323: note = tr|A0A418XUE8|A0A418XUE8_9GAMM GTP cyclohydrolase FolE2 OS=Alcanivorax profundi OX=2338368 GN=folE2 PE=3 SV=1
MEKPMTRENGADSTKQMPDVASNSMVDHIHSTLDWVGMSEIHLPARVSDTLAGERPVSTSIQAYVNLANPDAKGIHMSRLFLMLEETFGDHSVSSASIEQLLRNFLETHEGLSTRGFVQLDFEYSMRRPALKSSYSGWKSYPVSIKGTLCEEGMRIEMYVEVPYSSTCPCSAALSRQLIQEQFRKDFQDGKVDAEAVLEWLGTEEGIVATPHSQRSVAQVRVLLDHNEGDAFPITALIDSIEGALKTPVQTAVKRVDEQEFALLNGQNLMFCEDAARRLKQAIDPQSCYKDFWLRVNHLESLHAHNAVAIVTKEVDGGYLPIP

SEQ ID NO: 4261 - protein, 318 aa, Alcanivorax sp.
  REGION 1..318: note = tr|A0A3D9IDA6|A0A3D9IDA6_9GAMM GTP cyclohydrolase FolE2 OS=Alcanivorax sp. EA2 OX=2183984 GN=folE2 PE=3 SV=1
MKRESGADNTKAMPDVASNSMVDHIGGTLDWVGMSEIHLPARVSDTRVGERPVSTSIQAYVNLANPDAKGIHMSRLYLMLEETFGDHSVSPASIEQLLGNFLETHEGLSTRGFVQFDFEYSMRRPALKSSYAGWKSYTVSIKASLGEEGLCTEMYVEVPYSSTCPCSAALARQLIQEKFREDFQSGKVDVDEVFEWLGTEEGIRATPHSQRSIAQVRVLLDKAAESFPITALIDSIEEALKTPVQTAVKRIDEQEFALLNGQNLMFCEDAARRLKHALDPQPCYRDFWLRVNHLESLHAHNAVAIVTKEVEGGYLPIP

SEQ ID NO: 4262 - protein, 320 aa, Alcanivorax sp.
  REGION 1..320: note = tr|A0A350FEF6|A0A350FEF6_9GAMM GTP cyclohydrolase FolE2 OS=Alcanivorax sp. OX=1872427 GN=folE2 PE=3 SV=1
MKRDSSSETTKSMPDVATNSMVEHIHSTLDWVGMSEIHLPARISDTLAGERPVSTSIQAYVNLSNPDAKGIHMSRLYLMLEETFGDHSVSAYSIRKLLQNFLDSHEGLSDRGFVQFDFEYSMRRPALKSSYSGWKSYPVTIKATLAPDGMRMELAVEVPYSSTCPCSAALARQLIQEQFRKDFEGEGSVDMEKVFEWLGTEEGIMATPHSQRSVAQVRVLLDTDCDEAFPITALIDSIEGALKTPVQTAVKRVDEQEFAKLNGQNLMFCEDSARRLKRALDGQPCYQDFWLRVNHLESLHAHNAVAIATKEVEGGYLPIP

SEQ ID NO: 4263 - protein, 223 aa, unidentified
  source 1..223: note = Algibacter alginicilyticus
  REGION 1..223: note = tr|A0A0P0DE80|A0A0P0DE80_9FLAO GTP cyclohydrolase 1; OS = Algibacter alginicilyticus OX=1736674 GN=folE PE=3 SV=1
MDNNLEKIESLGDDHIGTSENTPMRQDAFKLTTEEKMDIIKDDVRHIMETLGLDLSDDSLSGTPNRVAKMFVKEIFSGLDPNKKPKSSTFDNKYKYGEMLVEKNITVYSTCEHHLLPIVGRAHIAYISNGTVVGLSKMNRIVDYFAKRPQVQERLTIQIVRELQEVLNTKDVACIIDAKHLCVNSRGIRDIESSTVTSEFGGKFKDMATRREFLDYIKLETKF

SEQ ID NO: 4264 - protein, 195 aa, unidentified
  source 1..195: note = Algibacter alginicilyticus
  REGION 1..195: note = tr|A0A0P0D326|A0A0P0D326_9FLAO GTP cyclohydrolase 1; OS = Algibacter alginicilyticus OX=1736674 GN=folE PE=3 SV=1
MPYKQFEEFNMQVTDDVKDRYKSIIQDLGEDPKREGLLKTPERASKAMQFLTQGYHQDPVEILKGAMFKESYNEMVIVKDIELYSLCEHHILPFFGKAHIAYIPNGQIVGLSKLPRIVDVFSRRLQVQERLTEQILDCINNTLKPQGVAVVIEASHMCMMMRGVQKQNSLTTTSGFRGQFEKIETRNEFLKLIGK

SEQ ID NO: 4265 - protein, 225 aa, unidentified
  source 1..225: note = Algibacter amylolyticus
  REGION 1..225: note = tr|A0A556QF99|A0A556QF99_9FLAO GTP cyclohydrolase 1; OS = Algibacter amylolyticus OX=1608400 GN=folE PE=3 SV=1
MAFDSNIEDFDALGNDHIGTSENTPMRSDAFKLNNEEKIDIIKDDVRHILETLGLDLTDDSLKGTPNRVAKMFVNEIFGGLNPDKKPSASTFDNKYKYGEMLVEKNITVYSTCEHHLLPIVGRAHIAYISNGTVVGLSKMNRIVDYFAKRPQVQERLTIQVVRELQNVLGTKDVACVIDAKHLCVNSRGIRDIESSTVTSEFGGKFQDMETRREFLDYIKLDTKF

SEQ ID NO: 4266 - protein, 195 aa, unidentified
  source 1..195: note = Algibacter amylolyticus
  REGION 1..195: note = tr|A0A556QA79|A0A556QA79_9FLAO GTP cyclohydrolase 1; OS = Algibacter amylolyticus OX=1608400 GN=folE PE=3 SV=1
MPYKSFEEYSDDVTDNVKNKYQEIITDLGEDTSRDGLLKTPERAAKAMQFLTQGYDQDPVEILKGAMFKESYNEMVIVKDIELYSLCEHHILPFFGKVHIAYIPNGQIVGLSKLPRIVDVFARRLQVQERLTQQILDCINDTLNPQGVAVVIEASHMCMMMRGVQKQNSTTTTSGFRGQFEKIETRNEFLKLIGK

SEQ ID NO: 4267 - protein, 195 aa, unidentified
  source 1..195: note = Algibacter aquaticus
  REGION 1..195: note = tr|A0A1E5SJV0|A0A1E5SJV0_9FLAO GTP cyclohydrolase 1; OS = Algibacter aquaticus OX=1849968 GN=folE PE=3 SV=1
MPYKKFEEYNMKVTDDVKDRYKNIIQDLGEDTERDGLLKTPERAAKAMQFLTQGYDQDPVEILKSAMFKESYNEMVIVKDIELYSLCEHHILPFFGKAHIAYIPNGYIVGLSKLPRILDVFARRLQVQERLTEQVLDCINDTLKPQGVAVVIEASHMCMMMRGVQKQNSITTTSGFRGQFEKSETRNEFLKLIGK

SEQ ID NO: 4268 - protein, 225 aa, unidentified
  source 1..225: note = Algibacter aquaticus
  REGION 1..225: note = tr|A0A1E5TBN9|A0A1E5TBN9_9FLAO GTP cyclohydrolase 1; OS = Algibacter aquaticus OX=1849968 GN=folE PE=3 SV=1
MKIENNLEEFESLGDDHIGTSSNTPLRSDAFKLSNEEKIDIIKDDVRHILETLGLDLTDDSLSGTPNRVAKMFVKEIFGGLNPKKKPSASTFDNKYKYGEMLVEKNITVYSTCEHHLLPIVGRAHIAYISNGTVVGLSKMNRIVDYFAKRPQVQERLTIQIVKELQEVLNTEDVACVIDAKHLCVNSRGIRDIESSTVTSEFGGKFKKEATRREFLDYIKLDTTF

SEQ ID NO: 4269 - protein, 225 aa, Algibacter lectus
  REGION 1..225: note = tr|A0A090V941|A0A090V941_9FLAO GTP cyclohydrolase 1; OS = Algibacter lectus OX=221126 GN=folE PE=3 SV=1
MKMDNNIEEHDTLGEDHIGTSADTPLRNDAFTLSDSEKIDIIKDDVRHILETLGLDLTDDSLSGTPNRVAKMFVNEIFGGLDPKKKPKASTFDNKYKYGEMLVEKNITVYSTCEHHLLPIVGRAHIAYISNGTVVGLSKMNRVVDYYAKRPQVQERLTIQVVKALQEVLNTDDVACVIDAKHLCVNSRGIRDIESSTVTSEFGGKFKEESTRREFLDYIKLETKF

SEQ ID NO: 4270 - protein, 195 aa, Algibacter lectus
  REGION 1..195: note = tr|A0A090WLT5|A0A090WLT5_9FLAO GTP cyclohydrolase 1; OS = Algibacter lectus OX=221126 GN=folE PE=3 SV=1
MPYRKLEEYNMQVTDDVKNRYRNIIEDLGEDTEREGLVKTPERAAKAMQFLTQGYDQDPVEILKGAMFKESYNEMVIVKDIELYSLCEHHILPFFGKAHIAYIPNGHIVGLSKLPRIVDVFARRLQVQERLTEQILDCINDTLKPQGVAVVIEASHMCMMMRGVQKQNSITTTSGFRGQFEKIETRNEFLKLIGK

SEQ ID NO: 4271 - protein, 225 aa, unidentified
  source 1..225: note = Algibacter pectinivorans
  REGION 1..225: note = tr|A0A1I1REV8|A0A1I1REV8_9FLAO GTP cyclohydrolase 1; OS = Algibacter pectinivorans OX=870482 GN=folE PE=3 SV=1
MAFDSNIEDFDALGNDHIGTSENTPMRSDAFKLNNEEKIDIIKDDVRHIMETLGLDLTDDSLKGTPNRVAKMFVNEIFGGLNPDKKPSASTFDNKYKYGEMLVEKNITVYSTCEHHLLPIVGRAHIAYISNGTVVGLSKMNRIVDYFAKRPQVQERLTIQVVRELQNVLGTKDVACVIDAKHLCVNSRGIRDIESSTVTSEFGGKFQDMETRREFLDYIKLDTKF

SEQ ID NO: 4272 - protein, 231 aa, unidentified
  source 1..231: note = Algibacter pectinivorans
  REGION 1..231: note = tr|A0A1I1QFC5|A0A1I1QFC5_9FLAO GTP cyclohydrolase 1; OS = Algibacter pectinivorans OX=870482 GN=folE PE=3 SV=1
METDKLTPTKNGNTLNGFSLNDIGDDHLYTGLETPMKPDAFKLSDADKKERISILFEEIMDVMGLDLTDDSLKGTPQRVAKMYIDEIFSGLNPANKPKIALFDNKYQYNQMLVEKDITFYSNCEHHFVPIIGKAHVAYISSGKVIGLSKLNRIVQYYAKRPQVQERLTNQIANELKTILDTNDVAVIISAKHLCVSSRGIKDDTSSTVTAYYGGTFNTPEKITEFQNHINS

SEQ ID NO: 4273 - protein, 229 aa, Algibacter sp.
  REGION 1..229: note = tr|A0A2U2X4Q8|A0A2U2X4Q8_9FLAO GTP cyclohydrolase 1; OS = Algibacter sp. ZY111 OX=2100723 GN=folE PE=3 SV=1
MQLEKLRTNGHKLNGFSLDDIGDDHLYTGLETPMKADAFKLSDEEKKERIAILFEEIMDVMGLDLTDDSLQGTPKRVAKMYIDEIFSGLNPANKPKVALFDNKYQYNQMLVEKNITFYSNCEHHFVPIIGKAHVAYISSGKVIGLSKLNRIVQYYAKRPQVQERLTNQIANELKSILDTEDVAVIIDAKHLCVSSRGIKDDTSSTVTAFYGGQFNTSEKITELQNYLNS

SEQ ID NO: 4274 - protein, 195 aa, Algibacter sp.
  REGION 1..195: note = tr|A0A2U2X2S1|A0A2U2X2S1_9FLAO GTP cyclohydrolase 1; OS = Algibacter sp. ZY111 OX=2100723 GN=folE PE=3 SV=1
MPYKSFEEYNMKVTDDVKDRYKNIIKDLGEDTKRDGLIKTPERAAKAMQFLTQGYDQDPVEILKGAMFKESYNEMVIVKDIELYSLCEHHILPFFGKAHIAYIPNGQIVGLSKLPRIVDVFARRLQVQERLTEQVLDCINDTLKPQGVAVVIEASHMCMMMRGVQKQNSITTTSGFRGQFEKIETRNEFLKLIGK

SEQ ID NO: 4275 - protein, 195 aa, unidentified; identical to SEQ ID NO: 4270
  source 1..195: note = Algibacter wandonensis
  REGION 1..195: note = tr|A0A4R8MFZ3|A0A4R8MFZ3_9FLAO GTP cyclohydrolase 1; OS = Algibacter wandonensis OX=1343161 GN=folE PE=3 SV=1

SEQ ID NO: 4276 - protein, 225 aa, unidentified; identical to SEQ ID NO: 4269
  source 1..225: note = Algibacter wandonensis
  REGION 1..225: note = tr|A0A4R8MKT4|A0A4R8MKT4_9FLAO GTP cyclohydrolase 1; OS = Algibacter wandonensis OX=1343161 GN=folE PE=3 SV=1

SEQ ID NO: 4277 - protein, 225 aa, unidentified
  source 1..225: note = Algoriella xinjiangensis
  REGION 1..225: note = tr|A0A1I4UDZ7|A0A1I4UDZ7_9FLAO GTP cyclohydrolase 1; OS = Algoriella xinjiangensis OX=684065 GN=folE PE=3 SV=1
MCDKHLHDEMEDDHFSANLETPLKADAFELSAEEKVKMIEGDFRKIMETLGLDLTDDSLKGTPKRVAKMFVNEIFGGLLPERKPGMSTFENKYKYNQMLVEKDIVVYSTCEHHFLPIVGRAHVAYISKGKVIGLSKMNRIVEYYSKRPQVQERLTMQIVKAMQDALGTDDVACIIDAKHLCVNSRGIKDIESSTVTAEYGGAFKESEQLRKELIAYIGMKTAFNV

SEQ ID NO: 4278 - protein, 228 aa, Algoriphagus alkaliphilus
  REGION 1..228: note = tr|A0A1G5WXP6|A0A1G5WXP6_9BACT GTP cyclohydrolase 1; OS = Algoriphagus alkaliphilus OX=279824 GN=folE PE=3 SV=1
MLSTMGIDIARSSFEYLGEDHVGTSLETPLREDAFEMDDDLKVELIEKHFREIMHIMGLDLTDDSLKGTPHRVAKMYVKEVFSGLNPKNKPAAKLFENKYKYNQMLVEKDITFHSHCEHHFVPIYGRAHVAYISSGDVIGLSKINRIVQYYSKRPQVQERLTMQIGNELKEALGTEDVAVIMDAYHMCVSSRGVNDTNSSTVTSFFSGKFESEEQTRNEFLKYISLKK

SEQ ID NO: 4279 - protein, 234 aa, Algoriphagus antarcticus
  REGION 1..234: note = tr|A0A3E0E038|A0A3E0E038_9BACT GTP cyclohydrolase 1; OS = Algoriphagus antarcticus OX=238540 GN=folE PE=3 SV=1
MKQKETLLNTMGINIARASAEDIGDEHVGTSLETPLREDAFEMDDELKIELIEKHFREIMHIMGLDLTDDSLKGTPHRVAKMYVKEVFSGLDPKNKPVAKLFENKYKYSEMLVEKNITFFSHCEHHFVPIHGKAHVAYISNGSVIGLSKINRIVQYYSQRPQVQERLTMQIGNELIEALGTDDVAVIMDADHMCVSSRGVKDTTSSTLTSFYSGKFEKDEQTRNEFIKYISLER

SEQ ID NO: 4280 - protein, 234 aa, Algoriphagus aquaeductus
  REGION 1..234: note = tr|A0A326RT88|A0A326RT88_9BACT GTP cyclohydrolase 1; OS = Algoriphagus aquaeductus OX=475299 GN=folE PE=3 SV=1
MKQKETLLNTMGINIARASFEEIGEEHVGTSLETPLREDAFEMDDDLKVELIEKHFREIMHIMGLDLTDDSLKGTPHRVAKMYVKEVFSGLNPKNKPAAKLFENKYKYNEMLVEKDITFHSHCEHHFVPIYGKAHVAYISNGNVIGLSKINRIVQYYSKRPQVQERLTMQIGNELKEALGTEDVAVIMDAYHMCVSSRGVNDTNSSTVTAFYSGKFERDEQSRNEFMKYISLNK

SEQ ID NO: 4281 - protein, 234 aa, Algoriphagus aquimarinus
  REGION 1..234: note = tr|A0A5C7AUK7|A0A5C7AUK7_9BACT GTP cyclohydrolase 1; OS = Algoriphagus aquimarinus OX=237018 GN=folE PE=3 SV=1
MKQKETLLNTMGIKIARASFEEIGEDHVGTSLETPLREDAFEMDDELKVELIEKHFREIMNIMGLDLTDDSLKGTPHRVAKMYVKEVFSGLNPKNKPVAKLFENKYKYNEMLVEKDITVHSHCEHHFVPIYGKAHVAYISNGSVIGLSKINRIVQYFSQRPQVQERLTMQIGNELKEALGTDDVAVIIDAYHMCVSSRGVKDTQSSTVTSFYSGKFEKDEQSRNEFIQYISLEK

SEQ ID NO: 4282 - protein, 234 aa, Algoriphagus aquimarinus
  REGION 1..234: note = tr|A0A1I1B093|A0A1I1B093_9BACT GTP cyclohydrolase 1; OS = Algoriphagus aquimarinus OX=237018 GN=folE PE=3 SV=1
MKQKETLLNTMGIKIARASFEEIGEEHVGTSLETPLREDAFEMDDELKVELIEKHFREIMNIMGLDLTDDSLKGTPHRVAKMYVKEVFSGLNPKNKPVAKLFENKYKYNEMLVEKDITVHSHCEHHFVPIYGKAHVAYISNGSVIGLSKINRIVQYFSQRPQVQERLTMQIGNELKEALGTDDVAVIIDAYHMCVSSRGVKDTQSSTVTSFYSGKFEKDEQSRNEFMQYINLEK

SEQ ID NO: 4283 - protein, 234 aa, Algoriphagus boritolerans
  REGION 1..234: note = tr|A0A1H5WMD3|A0A1H5WMD3_9BACT GTP cyclohydrolase 1; OS = Algoriphagus boritolerans DSM 17298 = JCM 18970; OX = 1120964 GN=folE PE=3 SV=1
MKQKETLLSTMGINISRTSFEDLGEEHVGTSLETPLREDAFEMDDDLKVELIEKHFREIMHIMGLDLSDDSLKGTPHRVAKMYVKEVFSGLNPKNKPATKLFENKYKYNQMLVEKDITFYSHCEHHFVPIYGRAHVAYISTGEVIGLSKINRIVQYYSKRPQVQERLTMQIGNELKEAVGTEDVAVIMDAYHMCVSSRGVNDTNSSTVTSFFSGKFESDEQSRNEFLKYISLKK

SEQ ID NO: 4284 - protein, 234 aa, unidentified
  source 1..234: note = Algoriphagus boseongensis
  REGION 1..234: note = tr|A0A4V3D2C0|A0A4V3D2C0_9BACT GTP cyclohydrolase 1; OS = Algoriphagus boseongensis OX=1442587 GN=folE PE=3 SV=1
MKQKETLLNTMGINLVRASIEEIGEEHVGTSLETPLREDAFVMDDNLKVELIEKHFREIMHILGLDLTDDSLKGTPHRVAKMYVKEVFAGLNPKNKPAAKLFENKYKYAEMLVEKDITFHSHCEHHFVPIYGKAHVAYISNGNVIGLSKINRIVQYYAKRPQVQERLTMQVGNELKEVLGTEDVAVIMDAYHMCVSSRGVNDTNSSTVTSFYSGKFESDEQSRNEFLKYISLKK

SEQ ID NO: 4285 - protein, 234 aa, Algoriphagus chordae
  REGION 1..234: note = tr|A0A2W7R476|A0A2W7R476_9BACT GTP cyclohydrolase 1; OS = Algoriphagus chordae OX=237019 GN=folE PE=3 SV=1
MKQKETLLNTMGIKIARASFEEIGEEHVGTSLETPLREDAFEMDDDLKVELIEKHFREIMNIMGLDLTDDSLKGTPHRVAKMYVKEVFSGLNPKNKPVAKLFENKYKYNEMLVEKDITVHSHCEHHFVPIYGKAHVAYISNGNVIGLSKINRIVQYFSQRPQVQERLTMQIGNELKEALGTDDVAVIIDAYHMCVSSRGVKDTQSSTVTSFYSGKFEKDEQSRNEFMQYISLEK

SEQ ID NO: 4286 - protein, 234 aa, Algoriphagus faecimaris
  REGION 1..234: note = tr|A0A1G6RXT5|A0A1G6RXT5_9BACT GTP cyclohydrolase 1; OS = Algoriphagus faecimaris OX=686796 GN=folE PE=3 SV=1
MKQKETMLNTMGIDLARAAFEEIGEEHVGTSLETPLREDAFEMDDNLKVELIEKHFREIMNILGLDLTDDSLKGTPHRVAKMYVKEVFAGLNPKNKPAAKLFENKYKYSEMLVEKDITFHSHCEHHFVPIYGKAHVAYISNGNVIGLSKINRIVQYYSKRPQVQERLTVQIGNELKEVLGTEDVAVIMDAYHMCVSSRGVNDTNSSTVTSFYSGKFERDEQSRNEFLKYISMEK

SEQ ID NO: 4287 - protein, 234 aa, Algoriphagus halophilus
  REGION 1..234: note = tr|A0A1N6DAD4|A0A1N6DAD4_9BACT GTP cyclohydrolase 1; OS = Algoriphagus halophilus OX=226505 GN=folE PE=3 SV=1
MKQKETLLNTMGINISSASFEEIGEEHVGTSLETPLREDAFEMDDELKIELIEKHFREIMHIMGLDLTDDSLKGTPHRVAKMYVKEVFSGLNPKNKPVAKLFENKYKYNEMLVEKDITFHSHCEHHFVPIYGKAHVAYISGGEVIGLSKINRIVQYFAKRPQVQERLTMQIGNELKEVLKTDDVAIIMDANHMCVSSRGVQDVNSSTVTSFFSGKFEKDEQARNEFLKYISLEK

SEQ ID NO: 4288 - protein, 234 aa, Algoriphagus hitonicola
  REGION 1..234: note = tr|A0A1I2P7S0|A0A1I2P7S0_9BACT GTP cyclohydrolase 1; OS = Algoriphagus hitonicola OX=435880 GN=folE PE=3 SV=1
MKQKETMLNTMGIDLARASFEEIGEEHVGTSLETPLREDAFEMDDELKVELIEKHFREIMHILGLDLTDDSLKGTPHRVAKMYVKEVFAGLNPKNKPAAKLFENKYKYSEMLVEKDITFHSHCEHHFVPIYGKAHVAYISNGNVIGLSKINRIVQYYAQRPQVQERLTMQIGNELKEVLGTDDVAVVMDAYHMCVSSRGVNDTNSSTVTSFYSGKFERDEQSRNEFMKYISLKK

SEQ ID NO: 4289 - protein, 234 aa, Algoriphagus locisalis
  REGION 1..234: note = tr|A0A1I7BKW8|A0A1I7BKW8_9BACT GTP cyclohydrolase 1; OS = Algoriphagus locisalis OX=305507 GN=folE PE=3 SV=1
MKQKETLLNTMGINIARASAEDIGDEHVGTSLETPLREDAFEMDDELKVELIEKHFREIMHIMGLDLTDDSLKGTPHRVAKMYVKEVFSGLNPKNKPVAKLFENKYKYNEMLVEKNITFFSHCEHHFVPIHGKAHVAYISNGSVIGLSKINRIVQYFSQRPQVQERLTMQIGNELVEALGTDDVAVIMDADHMCVSSRGVKDTTSSTLTSFYSGKFEKDEQTRNEFLKYISLER

SEQ ID NO: 4290 - protein, 224 aa, unidentified
  source 1..224: note = Algoriphagus machipongonensis
  REGION 1..224: note = tr|A3I138|A3I138_9BACT GTP cyclohydrolase 1; OS = Algoriphagus machipongonensis OX=388413 GN=folE PE=3; SV = 1
MGIDISQASLEEIGEEHVGTSLETPLREDAFEMDDDLKVELIEKHFREIMHIMGLDLTDDSLKGTPHRVAKMYVKEVFSGLNPKNKPIAKLFENKYKYKEMLVEKDITFHSHCEHHFVPIYGNAHVAYISKGEVIGLSKINRIVQYFAKRPQVQERLTMQIGNELKEVLKTDDVAVILDANHMCVSSRGVQDTNSSTVTSFYSGKFEKDEQSRNEFLKYISLEK

SEQ ID NO: 4291 - protein, 228 aa, Algoriphagus marincola
  REGION 1..228: note = tr|A0A0P8AKS8|A0A0P8AKS8_9BACT GTP cyclohydrolase 1; OS = Algoriphagus marincola HL-49 OX=1305737 GN=folE PE=3; SV = 1
MLTSMGIDIARASYEELGEEHLASSVETPLREDAFEMDDDLKVELIEKHFKEIMNILGLDLTDDSLKGTPHRVAKMYVKEVFAGLNPKNKPVAKLFENKFQYNQMLVEKDITFFSHCEHHFVPIYGRAHVAYISNGNVIGLSKINRIVQYYSKRPQVQERLTMQIGNDLKEALGTDDVAVIMDAYHMCVSSRGINDTNSSTVTSFYSGKFDTDEQTRNEFLKYISLEK

SEQ ID NO: 4292 - protein, 234 aa, Algoriphagus ornithinivorans
  REGION 1..234: note = tr|A0A1I5H3Q5|A0A1I5H3Q5_9BACT GTP cyclohydrolase 1; OS = Algoriphagus ornithinivorans OX=226506 GN=folE PE=3 SV=1
MKQKETLLNTMGINLSRASFEEIGEEHVGTSLETPLREDAFEMDDDLKVELIEKHFREIMNILGLDLTDDSLKGTPHRVAKMYVKEVFAGLNPKNKPAAKLFENKYKYNEMLVEKDITFHSHCEHHFVPIYGKAHVAYISNGNVIGLSKINRIVQYFAKRPQVQERLTMQIGNELKEVLGTEDVAIIMDAYHMCVSSRGVNDTNSSTVTSFYSGKFERDEQARNEFLKYISLEK

SEQ ID NO: 4293 - protein, 234 aa, Algoriphagus ratkowskyi
  REGION 1..234: note = tr|A0A2W7SE38|A0A2W7SE38_9BACT GTP cyclohydrolase 1; OS = Algoriphagus ratkowskyi OX=57028 GN=folE PE=3 SV=1
MKQKETLLNTMGINIARASSEDIGDEHVGTSLETPLREDAFEMDDELKIELIEKHFREIMHVMGLDLTDDSLKGTPHRVAKMYVKEVFSGLNPKNKPVAKLFENKYKYSEMLVEKNITFFSHCEHHFVPIYGKAHVAYISNGSVIGLSKINRIVQYFSQRPQVQERLTMQIGNELIEALGTDDVAVIMDADHMCVSSRGVKDTTSSTLTSFYGGKFEKDEQTRNEFLKYISLER

SEQ ID NO: 4294 - protein, 234 aa, Algoriphagus sp.
  REGION 1..234: note = tr|A0A418PUV8|A0A418PUV8_9BACT GTP cyclohydrolase 1; OS = Algoriphagus sp. N3 OX=2056311 GN=folE PE=3 SV=1
MKQKETMLNTMGIDIARASFEEIGEEHVGTSLQTPLREDAFVMDDDLKVELIEKHFREIMHIMGLDLTDDSLKGTPHRVAKMYVKEVFAGLNPKNKPAAKLFENKYKYSEMLVEKDITFHSHCEHHFVPIYGKAHVAYISNGNVIGLSKINRIVQYFSKRPQVQERLTMQIGNELKEVLGTEDVAVIMDAYHMCVSSRGVNDTNSSTVTSFYSGKFETDEQSRNEFLKYISLKK

SEQ ID NO: 4295 - protein, 234 aa, Algoriphagus sp.
  REGION 1..234: note = tr|A0A258ES08|A0A258ES08_9BACT GTP cyclohydrolase 1; OS = Algoriphagus sp. 32-45-6 OX=1970314 GN=folE PE=3 SV=1
MKQKETLLNTMGINLSRETFEEFGDDHVGTSLQTPLREDAFEMDDDLKVELIEKHFREIMHIMGLDLTDDSLKGTPHRVAKMYVKEVFSGLNPKNKPAAKLFENKYKYNEMLVEKDITFHSHCEHHFVPIYGKAHVAYISNGNVIGLSKINRIVQYYSKRPQVQERLTMQIGNELKEALGTEDVAVIMDAYHMCVSSRGVNDTNSSTVTAFYSGKFERDEQSRNEFMKYIQLEK

SEQ ID NO: 4296 - protein, 234 aa, Algoriphagus yeomjeoni
  REGION 1..234: note = tr|A0A327PAB9|A0A327PAB9_9BACT GTP cyclohydrolase 1; OS = Algoriphagus yeomjeoni OX=291403 GN=folE PE=3 SV=1
MKQKETLLNTMGINIARASAEDIGDEHVGTSLETPLREDAFEMDDELKVELIEKHFREIMHIMGLDLTDDSLKGTPHRVAKMYVKEVFSGLNPKNKPLAKLFENKYKYNEMLVEKNITFFSHCEHHFVPIHGKAHVAYISNGSVIGLSKINRIVQYFSQRPQVQERLTMQIGNELVEALGTDDVAVIMDADHMCVSSRGVKDTTSSTLTSFYSGKFEKDEQSRNEFLKYISLEK

SEQ ID NO: 4297 - protein, 234 aa, unidentified
  source 1..234: note = Algoriphagus zhangzhouensis
  REGION 1..234: note = tr|A0A1M7Z7A9|A0A1M7Z7A9_9BACT GTP cyclohydrolase 1; OS = Algoriphagus zhangzhouensis OX=1073327 GN=folE PE=3 SV=1
MKQKETLLNTMGINISRASFEEIGEEHVGTSLETPLREDAFEMDDDLKVELIEKHFREIMNILGLDLTDDSLKGTPHRVAKMYVKEVFAGLNPKNKPTAKLFENKYKYNEMLVEKDITFHSHCEHHFVPIYGRAHVAYISNGNVIGLSKINRIVQYFAKRPQVQERLTMQIGNELKEALGTEDVAVIMDAYHMCVSSRGVQDTNSSTVTSFYSGKFEKDEQARNEFLKYISLEK

SEQ ID NO: 4298 - protein, 241 aa, Alicycliphilus denitrificans
  REGION 1..241: note = tr|F4G8R1|F4G8R1_ALIDK GTP cyclohydrolase I; OS = Alicycliphilus denitrificans (strain DSM 14773 / CIP 107495 / K601) OX=596154 GN=Alide2_0927 PE=4 SV=1
MSSEPAAEPNAPPSDEGTPVSVKIRERLAAARRRFHANDNIAEFIEPGELELLLDEVEARMQGVLDSMVIDTAGDHNTQSTARRVAKMYLNEVFKGRYVHPPTITEFPNAEHLNELMIVGPITVRSACSHHFCPVIGKIWIGVLPNEHTNVIGLSKYARLVDWVMGRPQIQEEAVVQLADLIMEKTQPDGLAIVMEASHFCMSWRGVREMDSKMINSVMRGVFLTNSTLRREFLALIPGRN

SEQ ID NO: 4299 - protein, 241 aa, Alicycliphilus denitrificans; identical to SEQ ID NO: 4298
  REGION 1..241: note = tr|E8U0X8|E8U0X8_ALIDB GTP cyclohydrolase I; OS = Alicycliphilus denitrificans (strain DSM 18852 / JCM 14587 / BC) OX=596153 GN=Alide_0964 PE=4 SV=1

SEQ ID NO: 4300 - protein, 191 aa, Alicyclobacillus acidocaldarius
  REGION 1..191: note = tr|F8IFX0|F8IFX0_ALIAT GTP cyclohydrolase 1; OS = Alicyclobacillus acidocaldarius (strain Tc-4-1); OX = 1048834 GN=folE PE=3 SV=1
MDKPMDTARIEQAVRMILEAIGEDPDREGLVDTPARVARMYQEIFSGLHRDPQEELSARFHVEHGEVVLVRDIPFYSMCEHHLLPFFGTAHVAYLPHNNVVTGLSKLARLVDVVAKKPQVQERMTNEIADALSDALQAEGVLVVIDAEHLCMSMRGIRKPGSRTTTIAARGKYDEDTRLREEVLHLIRLGV

SEQ ID NO: 4301 - protein, 206 aa, Alicyclobacillus acidocaldarius
  REGION 1..206: note = tr|F8ID39|F8ID39_ALIAT GTP cyclohydrolase 1; OS = Alicyclobacillus acidocaldarius (strain Tc-4-1); OX = 1048834 GN=folE PE=3 SV=1
MATFHVNARQVQLQHQAKSVDTARIEQAVRMILEAIGEAPDREGLVDTPARVARMYQEIFSGLHQDPRDELSARFHVEHGEVVLVRDIPFYSMCEHHLLPFFGIAHIAYLPHNHVVTGLSKLARLVDVVAKKPQVQERMTNEIADALVEALEAEGVLVVVDAEHLCMSMRGIRKPGSRTTTVATRGRYLHHPHEREEVLRLIRLGG

SEQ ID NO: 4302 - protein, 210 aa, Alicyclobacillus acidoterrestris
  REGION 1..210: note = tr|A0A512CMZ3|A0A512CMZ3_9BACL GTP cyclohydrolase 1; OS = Alicyclobacillus acidoterrestris OX=1450 GN=folE PE=3; SV = 1
MTTHIHPHHVDAEFEDTSIQPARTMDLAKIEEAVRMILTAVGEDPDREGLLDTPARVARMYEEIFAGLHRDPKQELSARFHVEHGEMVFVRDIPFYSMCEHHLLPFFGTAHVAYLPSDNVVTGLSKLARLVDTVAKRPQVQERMTNDIADVLFTELNAEGVMVVVDAEHLCMNMRGIKKPGSKTMTLAVRGRYESDLRMREEVLQLVRYR

SEQ ID NO: 4303 - protein, 190 aa, Alicyclobacillus acidoterrestris
  REGION 1..190: note = tr|A0A512CKG5|A0A512CKG5_9BACL GTP cyclohydrolase 1; OS = Alicyclobacillus acidoterrestris OX=1450 GN=folE PE=3; SV = 1
MSITMDKHQLITDHIRSLLQLIGENPNREGLLDTPSRVANMYEEVFAGVGIAPETALTTTFAEDYEGMVIVKDIDYYTFCEHHLIPFYGKAHIAYLPSGRVVGLSKFARLVELVSKRPQVQERMTQQIADAVMNVLAPRGVIVTLAGTHLCMCARGVKKPGTSTITTVKLGAFAEQASLVQEFEQALSRQ

SEQ ID NO: 4304 - protein, 205 aa, Alicyclobacillus ferrooxydans
  REGION 1..205: note = tr|A0A0P9CUH5|A0A0P9CUH5_9BACL GTP cyclohydrolase 1; OS = Alicyclobacillus ferrooxydans OX=471514 GN=folE PE=3; SV = 1
MINEQSLTSSNTDPGQASQPNQERVNVAYHVRKILELLGENPDREGLLDTPDRVAKMFEEMLSGLNVDPVSVLNTTFEETSDGPVIVSDITFYSLCEHHMVPFFGKAHVGYLPGKRIVGLSKLARLVETVSQRLQVQERMTSQIVNAVTTALEPEGVIALVEAEHTCMCARGVKKPGSRTTTIAASGRYKDDVALRQEFLRMIGK

SEQ ID NO: 4305 - protein, 176 aa, Alicyclobacillus ferrooxydans
  REGION 1..176: note = tr|A0A0P9CS92|A0A0P9CS92_9BACL GTP cyclohydrolase 1; OS = Alicyclobacillus ferrooxydans OX=471514 GN=folE PE=3; SV = 1
MILEAIGEDPTRDGLLDTPDRVARMYAEVFSGLRQDPKEVLSARFEVGDSEIVLVRDIPFYSMCEHHLVPFYGKAHVAYVPRDGVVTGLSKLARLVEAYARRPQVQERLTNEIAQTLYEELNAEGVFVMIQAEHMCMSMRGVQKPGSSTITKARRGNLTSAQEQEVFTLLQASRQL

SEQ ID NO: 4306 - protein, 185 aa, Alicyclobacillus hesperidum
  REGION 1..185: note = tr|J9HME2|J9HME2_9BACL GTP cyclohydrolase 1; OS = Alicyclobacillus hesperidum URH17-3-68 OX=1200346; GN = folE PE=3 SV=1
MARIEQAVRTILEAVGENPDREGLIDTPARVARMYAEIFAGLHQDPREELSARFHVEHGEMVLVRDIPFYSMCEHHLLPFFGTAHVAYLPHANVVTGLSKLARLVDVVAKRPQVQERMTNEIADVLVSELQAEGVLVVVDAEHLCMNMRGIRKPGSRTMTLAARGRYEEDVRMREEVLQMIRYHG

SEQ ID NO: 4307 - protein, 209 aa, Alicyclobacillus hesperidum
  REGION 1..209: note = tr|A0A1H2RQ77|A0A1H2RQ77_9BACL GTP cyclohydrolase 1; OS = Alicyclobacillus hesperidum OX=89784 GN=folE PE=3 SV=1
MTTSHVDTNDKQEAVFPLDKPRIDMARIEQAVRTILEAVGEDPDREGLIDTPARVARMYAEIFAGLHQDPREELSARFHVEHGEMVLVRDIPFYSMCEHHLLPFFGTAHVAYLPHANVVTGLSKLARLVDVVAKRPQVQERMTNEIADVLVSELQAEGVLVVVDAEHLCMNMRGIRKPGSRTMTLAARGRYEEDVRMREEVLQMIRYHG

SEQ ID NO: 4308 - protein, 199 aa, Alicyclobacillus macrosporangiidus
  REGION 1..199: note = tr|A0A1I7FHV4|A0A1I7FHV4_9BACL GTP cyclohydrolase 1; OS = Alicyclobacillus macrosporangiidus OX=392015 GN=folE; PE = 3 SV=1
MRTETNQQVIPAPVHERDQIAEHVREILRLLGEDTTRDGLVDTPLRVAKMYEEMLGGMRMDPESVLSATFDETAQGPVIVSDITFYSLCEHHMVPFFGKAHVAYLPSQTIVGISKIARLVDVFARRLQVQERMTEQIVDTIDRVLKPHGVMALIDAEHTCMCARGIRKPGSRTITVATRGEYQHNADLRREFLQMIGRG

SEQ ID NO: 4309 - protein, 218 aa, unidentified
  source 1..218: note = Alicyclobacillus montanus
  REGION 1..218: note = tr|A0A1M6L2V6|A0A1M6L2V6_9BACL GTP cyclohydrolase 1; OS = Alicyclobacillus montanus OX=1830138 GN=folE PE=3 SV=1
MAQIKRSKALQSVATFAEDTAAIEMKRHRPTVDREKVEEAIRMLLEAVGENPNREGLLDTPARVARMYEEIFAGLHHNPSEELSARFHVDHDELVFVKDIPFYSMCEHHLLPFFGVAHVAYLPSGGVVTGLSKLARLVDMVAKRPQVQERMTNMIVDVLMQEMEPAGAMVVIEAEHLCMNMRGIKKPGSKTLTIAARGEFQEHPERREEILQMIRYAH

SEQ ID NO: 4310 - protein, 209 aa, Alicyclobacillus sacchari
  REGION 1..209: note = tr|A0A4R8LPY4|A0A4R8LPY4_9BACL GTP cyclohydrolase 1; OS = Alicyclobacillus sacchari OX=392010 GN=folE PE=3 SV=1
MTTSHVDTNDKQEAIFALDKPRIDMARIEQAVRTILEAVGEDPDREGLLDTPARVARMYAEIFAGLHQDPREELSARFHVEHGEMVLVRDIPFYSMCEHHLLPFFGTAHVAYLPHANVVTGLSKLARLVDVVAKRPQVQERMTNKIADVLATELQAEGVLVVVDAEHLCMNMRGIRKPGSRTMTLAARGRYEEDARMREEVLQMIRYRA

SEQ ID NO: 4311 - protein, 199 aa, Alicyclobacillus sp.
  REGION 1..199: note = tr|A0A1F2Y727|A0A1F2Y727_9BACL GTP cyclohydrolase 1; OS = Alicyclobacillus sp. RIFOXYA1_FULL_53_8 OX=1797236; GN = folE PE=3 SV=1
MFQEPSTTTTASPAAEKHRAIAYHVRELLRLVGEDVDREGLLETPLRVAKMFDELLAGMNVDLASVLNTTFEERTEGPVIVQDITFYSLCEHHMVPFFGKAHIAYLPSSRIVGLSKLARLVDAASSRLQVQERMTEQLVATIDAVLEPRGVIALVEAEHTCMCARGVKKPGSKTTTLAARGVYRDDYSLRSEFLHMIGR

SEQ ID NO: 4312 - protein, 210 aa, Alicyclobacillus sp.
  REGION 1..210: note = tr|A0A1F2Y116|A0A1F2Y116_9BACL GTP cyclohydrolase 1; OS = Alicyclobacillus sp. RIFOXYA1_FULL_53_8 OX=1797236; GN = folE PE=3 SV=1
MSYAWRIGVTTDMSDELIDEMTVRFDVEKIQQAVRMILEAIGEDLTRDGLRETPERVARMFQEIFTGLHTDAAAVLSAQFHTSHDELVFVKDIPFFSMCEHHLLPFFGKAHIAYIPRNGIVAGLSKLARLVDATAKRPQVQERMTDEIAQVLESALNVQGVMVVVQAEHLCMNMRGVKKPGSTTLTLATKGTFSAEPSLRQEVLQLIQLS

SEQ ID NO: 4313 - protein, 209 aa, unidentified
  source 1..209: note = Alicyclobacillus tengchongensis
  REGION 1..209: note = tr|A0A0V0PRI7|A0A0V0PRI7_9BACL GTP cyclohydrolase 1; OS = Alicyclobacillus tengchongensis OX=368812 GN=folE PE=3; SV = 1
MATSHVDTNDKQEAVFALDKPRIDMARIEQAVRTILEAVGEDPDREGLIDTPARVARMYAEIFAGLHQDPREELSARFHVEHGEMVLVRDIPFYSMCEHHLLPFFGKAHVAYLPHANVVTGLSKLARLVDVVAKRPQVQERMTNEIADVLVSELQAEGVLVVVDAEHLCMNMRGIRKPGSRTMTLAARGRYEEDVRMREEVLQMIRYHG

SEQ ID NO: 4314 - protein, 206 aa, Alicyclobacillus vulcanalis
  REGION 1..206: note = tr|A0A1N7LI35|A0A1N7LI35_9BACL GTP cyclohydrolase 1; OS = Alicyclobacillus vulcanalis OX=252246 GN=folE PE=3 SV=1
MATFHVNTRQVRSMHERKTVDTARIEQAVRMILEAIGEAPEREGLADTPARVARMYQEIFAGLHRDPKEELSARFHVEHRDVVIVRDIPFYSMCEHHLLPFFGFAHVAYRPHDHVVTGLSKLARLVDVVAKKPQVQERMTNEIADALDEALAAEGVLVVVEAEHLCMSMRGIRKPGSRTTTIAQRGCYEESAAQREEVLHLIRFGA

SEQ ID NO: 4315 - protein, 206 aa, Alicyclobacillus vulcanalis
  REGION 1..206: note = tr|A0A1N7LZE1|A0A1N7LZE1_9BACL GTP cyclohydrolase 1; OS = Alicyclobacillus vulcanalis OX=252246 GN=folE PE=3 SV=1
MATSRVDSERVRASREMDKPMDTARIEQAIRMILEAIGEDPDREGLVDTPARVARMYEEIFAGLHRDPQEELSARFHVEHGEVVLVRDIPFYSMCEHHLLPFFGTAHVAYLPHGNVVTGLSKLARLVDVVAKKPQVQERMTNEIADALADALEAEGVLVVVDAEHLCMSMRGIRKPGSRTTTIAARGKYEDARLRQEILQLIRFGT

SEQ ID NO: 4316 - protein, 307 aa, unidentified
  source 1..307: note = Aliidiomarina haloalkalitolerans
  REGION 1..307: note = tr|A0A432VT20|A0A432VT20_9GAMM GTP cyclohydrolase FolE2 OS=Aliidiomarina haloalkalitolerans OX=859059; GN = folE2 PE=3 SV=1
MPTSMPDIANQVQAQTEGTLDWVGMSQIEMPMMVASETGLPQQVGARIEAFVSLDDPKAKGIHMSRLYLAVDELANDNVLSASSIKELLGKFIATHEGLSQSARVSFAFEYLLRRKSLISGKQGWKGYPVTVSAERVGDQVTLELEVGVTYSSTCPCSAALARQLIQQAFRERFSEEDVSREEIVAWLGTTEGIVATPHSQRSLAEVKVKLTDNVDILPIVAMIDRIENTLKTPVQAAVKREDEQEFARLNGQNLMFCEDAARRLQHELNRVSTVRDFRVRVNHYESLHAHDAVSITTKGISGGYRP

SEQ ID NO: 4317 - protein, 213 aa, unidentified
  source 1..213: note = Aliidiomarina iranensis
  REGION 1..213: note = tr|A0A432W0P8|A0A432W0P8_9GAMM GTP cyclohydrolase 1; OS = Aliidiomarina iranensis OX=1434071 GN=folE PE=3 SV=1
MLTKEAEQVRQALIDAGLETPMKENGLTADQKYDRIRSLMTEVVDVLGLDLADDSLSETPHRIAKMYVREIFCGLDYANFPKMALIENKMKVDEMVKVKDVSFNSTCEHHFVTIDGTARVAYIPNETVIGLSKINRIVRFFAQRPQIQERLTQQILVALQTLLGTKNVAVSIDAVHYCVKSRGVMDATSTTETSALGGIFKTDERTRYEFLAN

SEQ ID NO: 4318 - protein, 308 aa, unidentified
  source 1..308: note = Aliidiomarina maris
  REGION 1..308: note = tr|A0A327X3B9|A0A327X3B9_9GAMM GTP cyclohydrolase FolE2 OS=Aliidiomarina maris OX=531312 GN=folE2 PE=3 SV=1
MPTSMPDIANQDSAQTVGTLDWVGMSNIEMPLLVTVPGQPDRQVSAKVDAFVSLDDAQAKGIHMSRLYLAVDELSASGSLQPAQLHTLLKTFIHTHADLSSSAMVRFHFDYHLRRKSLISKKQGWKAYPVTLQAVLSEQGLEIELGVQIPYSSTCPCSAALARQIIQDAFAARFEDDSIDKDDVLAWLGTTDGVPATPHSQRSIADIKVKLREDGTDLPIEDLIDAVEDTLKTPVQAAVKREDEQEFARLNGQNLMFCEDAARRIKHCLNQRQDVRDFWVRINHYESLHAHDAVSIATKGVAGGFLAR

SEQ ID NO: 4319 - protein, 308 aa, unidentified
  source 1..308: note = Aliidiomarina minuta
  REGION 1..308: note = tr|A0A432W8S8|A0A432W8S8_9GAMM GTP cyclohydrolase FolE2 OS=Aliidiomarina minuta OX=880057 GN=folE2 PE=3 SV=1
MPTSMPDIANQTSAQTMGNLDWVGMSNIEMPLLVSVPGQPDRQVSAKVDAFVNLGDPQAKGIHMSRLYLAVDELAASGSLQPSQIDTLLKSFISSHLELSHQALVRFTFDYHLRRKSLVSKKQGWKAYPVTLQAILDDQGLEIELQVEVPYSSTCPCSAALARQLIQEAFDKKFNAASVSKEDVSAWLGTTDGIPATPHSQRSVADVKVKLNTGATDLPIEDLIDTIEDALQTPVQAAVKREDEQEFARLNGQNLMFCEDAARRLQHRLNQESQFHDFWIRVNHYESLHAHDAVSITTKGIKGGFQAR

SEQ ID NO: 4320 - protein, 307 aa, unidentified
  source 1..307: note = Aliidiomarina sanyensis
  REGION 1..307: note = tr|A0A432WIC2|A0A432WIC2_9GAMM GTP cyclohydrolase FolE2 OS=Aliidiomarina sanyensis OX=1249555 GN=folE2 PE=3; SV = 1
MPTSMPDIANQAQAQTEGSLDWVGMSNIEMPVMVASESGLPQQVGARIEAFVSLDDPKAKGIHMSRLYLAVDELANDDVLSASSVRRLLDRFVETHDDLSTKAHVSFAFEYLLRRKSLISGKQGWKGYPVSVSATFNGKEYDIELKIGVTYSSTCPCSAALARQLIQEAFQKRFKDAEVNAEDVKAWLGTTEGIVATPHSQRSLAEVQVKLRDDVDILPIVAMIDRIESSLKTPVQAAVKREDEQEFARLNGQNLMFCEDAARRLQHELNKVSTVLDFKIRVNHYESLHAHDAVSVTTKGITGGYRP

SEQ ID NO: 4321 - protein, 307 aa, unidentified
  source 1..307: note = Aliidiomarina shirensis
  REGION 1..307: note = tr|A0A432WUM5|A0A432WUM5_9GAMM GTP cyclohydrolase FolE2 OS=Aliidiomarina shirensis OX=1048642 GN=folE2 PE=3; SV = 1
MPTSMPDIANQAQAHIEGTLDWVGMSNIEMPFMVASESGLPQQVAARVEAFVSLDDAKAKGIHMSRLYLAVDELANDDVLSGSSIRKLLDYFIESHNDISQQARVSFAFEYLLRRKSLVSGKQGWKGYPVTISAVRNNGKTELEMQVGITYSSTCPCSAALARQLIQEAFQKQFHDEDLNIDDVVAWLGTTDGIVATPHSQRSLADIKVKLSDDTDILPIVAMIDRVEAALKTPVQAAVKREDEQEFARLNGQNLMFCEDAARLLQYELSKNSTILDFWIRVNHYESLHAHDAVSITTKGITGGYRA

SEQ ID NO: 4322 - protein, 308 aa, unidentified
  source 1..308: note = Aliidiomarina soli
  REGION 1..308: note = tr|A0A432WC52|A0A432WC52_9GAMM GTP cyclohydrolase FolE2 OS=Aliidiomarina soli OX=1928574 GN=folE2 PE=3 SV=1
MPTSMPDIANQDSAQTMGTLDWVGMSNIEMPLLVTVPGQPDRQVSAKVDAFVSLDDSQAKGIHMSRLYLAVDELSASGSLQPAQLHTLLKTFISSHADLSSQAMVRFHFDYHLRRKSLISKKQGWKAYPVTLQAILSDQGLDIELGVAVPYSSTCPCSAALARQLIQDAFNQRFDEDSMDKESVLAWLGTTEGVPATPHSQRSIADIKVKLQAEHNDLPIEELIDAIENTLKTPVQAAVKREDEQEFARLNGQNLMFCEDAARRVKHTLNQNSHIRDFWIRINHYESLHAHDAVSITTKGIPNGYSPR

SEQ ID NO: 4323 - protein, 307 aa, Aliidiomarina sp.
  REGION 1..307: note = tr|A0A552X5S1|A0A552X5S1_9GAMM GTP cyclohydrolase FolE2 OS=Aliidiomarina sp. IM1326 OX=2593535 GN=folE2 PE=3; SV = 1
MPTSMPDIANQAQAQTEGSLDWVGMSNIEMPVMIASEAGLPQQVGARIEAFVSLDDPKAKGIHMSRLYLAVDELANDDVLSASSIRRLLDRFIETHDDLSSKARVMFSFEYLLRRKSLVSGKQGWKGYPVTVAATFNGSGYDVELSVNATYSSTCPCSAALARQLIQEAFKKRFQEQEVSAEEVAAWLGTTEGIVATPHSQRSVAEVKVKLSNDVDILPIVALIDRIEGTLKTPVQAAVKREDEQEFARLNGQNLMFCEDAARRLQHELNKLPTVLDFRVRVNHYESLHAHDAVSVTTKGISGGYRP

SEQ ID NO: 4324 - protein, 308 aa, Aliidiomarina taiwanensis
  REGION 1..308: note = tr|A0A432X808|A0A432X808_9GAMM GTP cyclohydrolase FolE2 OS=Aliidiomarina taiwanensis OX=946228 GN=folE2 PE=3; SV = 1
MSTTMPDIAAELSTQHLGTLDWVGMSEIDMPLMLLDEQNNEHRISARIDAYVSLDVADAKGIHMSRLYLALEQLSAEGHVSISSLRSLLESFLATHQGLSQSARVVLRFDYHLRRPSLLSGNVGWKAYPVELNAEMIEGQFHCDLSLDVTYSSTCPCSAALARQLIQDAFQQKFADTAQLSKEDVTEWLGTTEGIVATPHSQRSVAEMKVRLTEDAQQLPLVTLIDSAEEALKTPVQAAVKREDEQEFARLNGQNNMFCEDAARILKHRLNNTDFVADFRVRVNHYESLHAHDAVSIVTKGLTNGFKP

SEQ ID NO: 4325 - protein, 299 aa, unidentified
  source 1..299: note = Aliifodinibius roseus
  REGION 1..299: note = tr|A0A1M5BEB8|A0A1M5BEB8_9BACT GTP cyclohydrolase FolE2 OS=Aliifodinibius roseus OX=1194090 GN=folE2 PE=3; SV = 1
MISTTLKRYYDPTFTVSEDYKDSLPDLQNGPASLIEGANVPIQQVGISDFKLPLKYPRPDGELITLETSVEGYVGLEAGKKGINMSRIIRRFYDFRDEVFHPDMLRDILETYIEQLDSNAAYLKLSFNYPILQESLRSDLEGYQYYETAIEGVLSADGEFHKFMHLDFEYSSACPCSYELSEHARDKRGVASIPHSQRSVASLTVELDESIFVEDLVDHCRQALMTETQVMVKREDEQAFAEMNGAFQKFVEDAARLLYEELNRDKNILDFVIRCAHMESLHSHDAVSRICKGVPNGLR

SEQ ID NO: 4326 - protein, 202 aa, unidentified
  source 1..202: note = Aliifodinibius roseus
  REGION 1..202: note = tr|A0A1M5K7D5|A0A1M5K7D5_9BACT GTP cyclohydrolase 1; OS = Aliifodinibius roseus OX=1194090 GN=folE PE=3 SV=1
MEKILNGIDKDIKDLSEQEKIEYIQFYFSKIMQVLELDLTDDTFEDTPRRVAEMYVNEIFSGLNDDNFPEMTAFENSYEYSGMLIEKDITLFSYCAHHFVPIIGKAHVAYYPSEKVVGLSKINRLVHHFARRPQVQEKLTMEIADALKDSLETDDIAILIEADHLCVASRGVKDTNSTTQTSYYSGKFEKAEIRKEFLTSIE

SEQ ID NO: 4327 - protein, 299 aa, unidentified
  source 1..299: note = Aliifodinibius sediminis
  REGION 1..299: note = tr|A0A521BA26|A0A521BA26_9BACT GTP cyclohydrolase FolE2 OS=Aliifodinibius sediminis OX=1214077 GN=folE2 PE=3; SV = 1
MISTTLKRYYDPTFTVSEDYKESLPDLQNGPASLIEGANVPIQQVGISDFKLPLKYPRPDGEIITLETSVGGYVGLEAGKKGINMSRIIRRFYDFKDEVFHPEMLREVLEAYIESLDSNSAYLKLSFNYPILQESLRSGLEGYQYYETAIEGVLSSDGEFHTYMHLDFEYSSACPCSFELAEHARDNRGVATVPHSQRSVASLTVELDESIFVEDLVNHCRKALMTETQVMVKREDEQAFAEMNGAFQKFVEDAARLLYEELNEQDKIRDFVIRCAHLESLHSHDAVSRICKGVPNGLR

SEQ ID NO: 4328 - protein, 202 aa, unidentified
  source 1..202: note = Aliifodinibius sediminis
  REGION 1..202: note = tr|A0A521ES00|A0A521ES00_9BACT GTP cyclohydrolase 1; OS = Aliifodinibius sediminis OX=1214077 GN=folE PE=3 SV=1
MEKILNGIDKDLNNLSEQEKVEYIQFYFSKIMQVLELDLTDDTFEDTSRRVAEMYVNEIFSGLNDDNFPEMTAFDNSYKYSGMLIEKDITLFSYCAHHFVPIIGKAHVAYYPSEKVVGLSKINRLVQHFARRPQVQEKLTMEIADALKDSLETDDIAILIEADHLCVASRGVKDTNSTTQTSYYSGKFEKAEIRKEFLTSIE

SEQ ID NO: 4329 - protein, 299 aa, unidentified
  source 1..299: note = Aliifodinibius sp.
  REGION 1..299: note = tr|A0A2A2G8G6|A0A2A2G8G6_9BACT GTP cyclohydrolase FolE2 OS=Aliifodinibius sp. WN023 OX=2032627 GN=folE2 PE=3; SV = 1
MISTKLKRHYDPTFTVSDDYKASLPDLQNGPASLIEGADVPIQQVGISNFKLPLKYPRPDGELLTLETSVDGYVGLEAGKKGINMSRIMRSFYNFEDDVFHPDKLEEILKTYREELNTQTAYLRLSFNYPIKQESLRSGLEGYQYYTVSIEGTMDADGQFRKFMHLDFEYSSACPCSYELSEHARETREVASIPHSQRSIANLTVELNEEIFVEDLVNHCREALMTETQVMVKREDEQAFAEMNGAYQKFVEDAARLLYEQLNDEGRIHDFVIRCTHMESLHSHDAVSRICKGVKNGLR

SEQ ID NO: 4330 - protein, 184 aa, unidentified
  source 1..184: note = Aliiglaciecola lipolytica
  REGION 1..184: note = tr|K6YUT5|K6YUT5_9ALTE GTP cyclohydrolase 1; OS = Aliiglaciecola lipolytica E3 OX=1127673 GN=folE PE=3; SV = 1
MSQELQDHYANILEILGEDTTREGLVDTPKRAAKAMQFLTDGYQKDIQGVVNGAIFEADTDEMVIIQDIEYYSLCEHHVLPFIGRCHIAYLPDGKVLGLSKFARIVDMFARRLQIQEGLTKQIADAVLEVTGAKGVGVIMEGKHMCMMMRGVQKQNSSMITSVMLGSFRTSPATRNEFLRLIGK

SEQ ID NO: 4331 - protein, 225 aa, unidentified
  source 1..225: note = Aliiglaciecola sp.
  REGION 1..225: note = tr|A0A553LAE2|A0A553LAE2_9ALTE GTP cyclohydrolase 1; OS = Aliiglaciecola sp. M165 OX=2593649 GN=folE PE=3 SV=1
MLNTQVVSVREALSDQAIAVRNALTEQGLETPMRETGLSDAEKRAKIQAAMGDIMRTLGLDLNDDSLCDTPSRIAKMYVDEIFSGLDYRRFPKITAIENKMNTQEMVKVSDISLTSTCEHHFVTIDGTANVAYIPKDKVLGLSKINRLVDFFSQRPQVQERLTQQVLLAIQTIVGTEDVAITINATHYCVKARGVRDNTSYTKTSALGGVFQNDPNMRAEFFAKD

SEQ ID NO: 4332 - protein, 200 aa, unidentified
  source 1..200: note = Aliiglaciecola sp.
  REGION 1..200: note = tr|A0A553L5C3|A0A553L5C3_9ALTE GTP cyclohydrolase 1; OS = Aliiglaciecola sp. M165 OX=2593649 GN=folE PE=3 SV=1
MIAHDKRLSSSRENSLMSDKLTHHYSQILSILGEDVNREGLLDTPKRAAKAMKFLTDGYQKELKDVINDAIFEADTDEMVIVQDIEYYSLCEHHVLPFIGRCHIAYIPNGKVLGLSKFARIVDMYARRLQIQEGLTKQIADAVQEVTGAKGVGVVMEGKHMCMMMRGVQKQNSSMITSVMLGSFRNSQATRTEFLRLIGK

SEQ ID NO: 4333 - protein, 212 aa, unidentified
  source 1..212: note = Aliikangiella marina
  REGION 1..212: note = tr|A0A545T7F8|A0A545T7F8_9GAMM GTP cyclohydrolase 1; OS = Aliikangiella marina OX=1712262 GN=folE PE=3 SV=1
MISPEAKLVQQTLIEKGLETPLIETNLTSEEKYARIRGFFSEIVATLGLDLTDDSLAETPHRIAKMYVDEIFSGLDYSNFPKIAVIDNKMKVDEMVKVSNIDLTSTCEHHFVTIDGSATVAYIPTNKIIGLSKINRIVGFFAQRPQVQERLTQQVLIALQTLLETDNVAVSIKATHYCVKSRGIKDVNSETSTTALGGIFKSNVHTRAEFFN

SEQ ID NO: 4334 - protein, 183 aa, unidentified
  source 1..183: note = Aliikangiella marina
  REGION 1..183: note = tr|A0A545TDF7|A0A545TDF7_9GAMM GTP cyclohydrolase 1; OS = Aliikangiella marina OX=1712262 GN=folE PE=3 SV=1
MNEKLTTLYSEILTELGEDPSREGLLDTPKRAAKAMQFLTQGYHQSLDEVVNGAIFESDNDEMVIVKDIELYSMCEHHLLPFIGKCHVAYLPTGKVIGLSKIARIVDMFGRRLQIQENMTKQIAQAIMQVTNAAGVGVIVEAKHMCMMMRGVEKQNSTMTTSVMLGAFREKSKTRAEFLNLIR

SEQ ID NO: 4335 - protein, 183 aa, unidentified
  source 1..183: note = Aliikangiella sp.
  REGION 1..183: note = tr|A0A545U613|A0A545U613_9GAMM GTP cyclohydrolase 1; OS = Aliikangiella sp. M105 OX=2592383 GN=folE PE=3 SV=1
MSDKLAGYYENILSELGEDLERDGLKDTPQRAAKAMQFLTRGYHQNLEEVVNGAIFESDNDEMVIVKDIELYSLCEHHLLPFIGKCHVAYLPTGKVIGLSKIARIVDMFGRRLQIQENMTKQIAEAIMEVTEASGVGVIIEAKHMCMMMRGVEKQNSVMSTSVMLGAFRSKPATRAEFLTLVK

SEQ ID NO: 4336 - protein, 368 aa, unidentified
  source 1..368: note = Aliiroseovarius crassostreae
  REGION 1..368: note = tr|A0A0N8IBM3|A0A0N8IBM3_9RHOB GTP cyclohydrolase FolE2 OS=Aliiroseovarius crassostreae OX=154981 GN=folE2; PE = 3 SV=1
MNQMKRGSKNNVDRASAEEALATLRAWAEAADPVEVAALDPSIARLLPGGEVSNYPALRRTYPDEFTPDADYKASMPDLQNGPASLIQGAKRHIQHVGISNFRLPIRYHTRDGSDLTLETSVTGTVSLEAGKKGINMSRIMRSFYAHAEKTFSFDVIEHALDDYKADLESLDARIEMRFSYPAKVESLRSGLMGYQYYDIALELFEHHGKRRKFLHLDYVYSSTCPCSLELSEHARQSRGQLATPHSQRSVARISVEKIHQPGNTLWFEDLIDMCRIAVPTETQVMVKREDEQAFAELNAANPIFVEDATRLFCEQLQLDPRIGDFRVVASHQESLHSHDAVSILTEGETFEAQSLDPKLFSTLFHVG

SEQ ID NO: 4337 - protein, 368 aa, unidentified
  source 1..368: note = Aliiroseovarius halocynthiae
  REGION 1..368: note = tr|A0A545SRA9|A0A545SRA9_9RHOB GTP cyclohydrolase FolE2 OS=Aliiroseovarius halocynthiae OX=985055 GN=folE2; PE = 3 SV=1
MNQMKRKGGDAVDTAQAQDALEVLRNWAAKADPVEVAALDPAIARLLPSADLPNYPELSRIYPDDFAPDADYKASMPDLQNGPASLIQGAKRHIQHVGISNFRLPIRYHTRDGSDVTLETAVTGTVSLEAGKKGINMSRIMRSFYGHAEKTFSFDVIEAALDDYKTDLESLDARIEMRFSYPARVESLRSGLSGYQYYDIALELVEHRGKRRKFIHLDYVYSSTCPCSLELSEHARQMRGQLATPHSQRSVARISVEKIHQPTGTLWFEDLIDLCRIAVPTETQVMVKREDEQAFAELNAANPIFVEDAARLFCEQLQQDDRIGDFRIVASHQESLHSHDAVSILIEGDTFEAESFDPKLFSTLFHVG

SEQ ID NO: 4338 - protein, 368 aa, unidentified
  source 1..368: note = Aliiroseovarius pelagivivens
  REGION 1..368: note = tr|A0A2R8AHW0|A0A2R8AHW0_9RHOB GTP cyclohydrolase FolE2 OS=Aliiroseovarius pelagivivens OX=1639690 GN=folE2; PE = 3 SV=1
MNQMKRKGGDAVDTAQAQDALEVLRNWAAKADPVEVAALDPAIARLLPSADLPNYPELSRTYPSDFEPDADYKASMPDLQNGPASLIQGAKRHIQHVGISNFRLPIRYHTRDGSDVTLETSVTGSVSLEAGKKGINMSRIMRSFYGHAEKTFSFDVIEAALDDYKNDLESLDARIEMRFSYPARVESLRSGLSGYQYYDIALELVEHRGKRRKFLHLDYVYSSTCPCSLELSEHARQMRGQLATPHSQRSVARISVEKIHQPSGTLWFEDLIDLCRVAVPTETQVMVKREDEQAFAELNAANPIFVEDAARLFCEQLQQDDRIGDFRIVASHQESLHSHDAVSILIEGDTFEAESLDPKLFSTLFHVG

SEQ ID NO: 4339 - protein, 368 aa, unidentified
  source 1..368: note = Aliiroseovarius sediminilitoris
  REGION 1..368: note = tr|A0A1I0QP27|A0A1I0QP27_9RHOB GTP cyclohydrolase FolE2 OS=Aliiroseovarius sediminilitoris OX=1173584; GN = folE2 PE=3 SV=1
MNQMKRKGGIAPDAAAARDALDVLRDWAAKADPVEVAKLDPAIARLLPGAELPNYPDLNRDYPADFTPDAAYRATMPDLQNGPASLIQGAKRHIQHVGISNFRLPIRYHTRDGADVTLETSVTGTVSLEAGKKGINMSRIMRSFYAHAEKTFSFDVIEAALDDYKTDLESLDARIEMRFSYPARVESLRSGLSGYQYYDIALELVEHRDQRRKFMHLDYVYSSTCPCSLELSEHARQMRGQLATPHSQRSVARISIEKIHQPHHTLWFEDLIDICRNAVPTETQVMVKREDEQAFAEMNAANPIFVEDAARLFCEHLQKDARIGDFRVVASHQESLHSHDAVSILTEGETFEAESLDPKLFSTLFHVG

SEQ ID NO: 4340 - protein, 367 aa, unidentified
  source 1..367: note = Aliishimia ponticola
  REGION 1..367: note = tr|A0A4S4NF23|A0A4S4NF23_9RHOB GTP cyclohydrolase FolE2 OS=Aliishimia ponticola OX=2499833 GN=folE2 PE=3 SV=1
MNIHAPELTTIPERSEAETALETLREWAKRASAAEIAELDPSLSALLPGRSTAPYPALSRSYPDDFTVDEAYKAGLPDLQNGPSSLIRGAKRQIQHVGISNFRLPIRYATRDNGPLMLETSVTGTVSLEAEKKGINMSRIMRSFYKHAEREFSFDVIDAALDDYKADLGSFDARIQMRFSFPMKVESLRSGLSGYQYYDIALELVEQAGLRKKIVHLDYVYSSTCPCSLELSEHARATRGQLATPHSQRSVARISVVLEEDAPCLWFEDLIDACRRAVPTETQAMVKREDEQAFAELNAANPIFVEDAARLFCAQLLADHRVGDFRVIASHQESLHSHDAVSVLTEGPTFAQDSLDPRLFQSLFHIG

SEQ ID NO: 4341 - protein, 217 aa, Aliivibrio finisterrensis
  REGION 1..217: note = tr|A0A4Q5KQ60|A0A4Q5KQ60_9GAMM GTP cyclohydrolase 1; OS = Aliivibrio finisterrensis OX=511998 GN=folE PE=3 SV=1
MSSLSESAVLVRDALVARGLETPMKENGVSREEKKERIEEHMREILTLLSLDLSDDSLEETPHRIAKMYVDEIFSGLDYANFPKITVIENKMNCDEMVRVNDITLTSTCEHHLVTIDGKATVAYIPRGKIIGLSKINRIVRFFAQRPQVQERMTQQILVALQTLLGCDDVAITMEATHYCVKSRGVMDATSSTTTTALGGIFKRNPATRHEFLSGIR

SEQ ID NO: 4342 - protein, 217 aa, Aliivibrio finisterrensis
  REGION 1..217: note = tr|A0A4Q5KW22|A0A4Q5KW22_9GAMM GTP cyclohydrolase 1; OS = Aliivibrio finisterrensis OX=511998 GN=folE PE=3 SV=1
MSSLSESAVLVRDALVARGLETPMKENGVSREEKKERIEEHMREILTLLSLDLSDDSLEETPHRIAKMYVDEIFSGLDYANFPKITVIENKMNCDEMVRVNDITLTSTCEHHLVTIDGKATVAYIPRGKIIGLSKINRIVRFFAQRPQVQERMTQQILVALQTLLGSDDVAITMEATHYCVKSRGVMDATSSTTTTALGGIFKRNPATRHEFLSGIR

SEQ ID NO: 4343 - protein, 217 aa, Aliivibrio fischeri
  REGION 1..217: note = sp|Q5E4E4|GCH1_ALIF1 GTP cyclohydrolase 1; OS = Aliivibrio fischeri (strain ATCC 700601 / ES114); OX = 312309 GN=folE PE=3 SV=1
MSSLSESAILVRDALVARGLETPMKENGVSREEKKERIEEHMREILTLLSLDLSDDSLEETPHRIAKMYVDEIFSGLDYANFPKITVIENKMNCDEMVRVNDITLTSTCEHHLVTIDGKATVAYIPRGKIIGLSKINRIVRFFAQRPQVQERMTQQILVALQTLLGSDDVAITMEATHYCVKSRGVMDATSSTTTTALGGIFKRNPATRHEFLSGIR

SEQ ID NO: 4344 - protein, 217 aa, Aliivibrio fischeri; identical to SEQ ID NO: 4343
  REGION 1..217: note = tr|A0A1B9PJB7|A0A1B9PJB7_ALIFS GTP cyclohydrolase 1; OS = Aliivibrio fischeri OX=668 GN=folE PE=3 SV=1

SEQ ID NO: 4345 - protein, 217 aa, Aliivibrio logei
  REGION 1..217: note = tr|A0A1B9NUC5|A0A1B9NUC5_ALILO GTP cyclohydrolase 1; OS = Aliivibrio logei OX=688 GN=folE PE=3 SV=1
MSSFSESAILVRDALVARGLETPMKENGISREEKKERIEEHMREILSLLTLDLSDDSLEETPHRIAKMYVDEIFSGLDYANFPKITVIENKMNCDEMVRVNDITLTSTCEHHLVTIDGKATVAYIPREKIIGLSKINRIVRFFAQRPQVQERMTQQILVALQTLLGSDDVAITMEATHYCVKSRGVMDATSSTTTTALGGIFKRNPATRHEFLSGIR

SEQ ID NO: 4346 - protein, 217 aa, Aliivibrio salmonicida; identical to SEQ ID NO: 4345
  REGION 1..217: note = sp|B6EGN8|GCH1_ALISL GTP cyclohydrolase 1; OS = Aliivibrio salmonicida (strain LFI1238) OX=316275; GN = folE PE=3 SV=1

SEQ ID NO: 4347 - protein, 217 aa, Aliivibrio sifiae
  REGION 1..217: note = tr|A0A2S7XDR5|A0A2S7XDR5_9GAMM GTP cyclohydrolase 1; OS = Aliivibrio sifiae OX=566293 GN=folE PE=3 SV=1
MSSFSESAILVRDALIARGLETPMKENGISREEKKERIEDHMREILTLLSLDLSDDSLEETPHRIAKMYVDEIFSGLDYANFPKITVIENKMNCDEMVRVNDITLTSTCEHHLVTIDGKATVAYIPRQKIIGLSKINRIVRFFAQRPQVQERMTQQILVALQTLLGSDDVAITMEATHYCVKSRGIMDATSSTTTTALGGIFKRNPATRHEFLSGIR

SEQ ID NO: 4348 - protein, 217 aa, Aliivibrio sifiae
  REGION 1..217: note = tr|A0A2S7XHA6|A0A2S7XHA6_9GAMM GTP cyclohydrolase 1; OS = Aliivibrio sifiae OX=566293 GN=folE PE=3 SV=1
MSSFSESAILVRDALIARGLETPMKENGISREEKKERIEEHMREILTLLSLDLSDDSLEETPHRIAKMYVDEIFSGLDYANFPKITVIENKMNCDEMVRVNDITLTSTCEHHLVTIDGKATVAYIPRQKIIGLSKINRIVRFFAQRPQVQERMTQQILVALQTLLGSDDVAITMEATHYCVKSRGVMDATSSTTTTALGGIFKRNPATRHEFLNGIR

SEQ ID NO: 4349 - protein, 217 aa, Aliivibrio sp.
  REGION 1..217: note = tr|A0A1B9PN67|A0A1B9PN67_9GAMM GTP cyclohydrolase 1; OS = Aliivibrio sp. 1S175 OX=1840087 GN=folE PE=3 SV=1
MSSFSESAILVRDALIARGLETPMKENGISREEKKERIEEHMREILTLLSLDLSDDSLEETPHRIAKMYVDEIFSGLDYANFPKITVIENKMNCDEMVRVNDITLTSTCEHHLVTIDGKATVAYIPRQKIIGLSKINRIVRFFAQRPQVQERMTQQILVALQTLLGSDDVAITMEATHYCVKSRGVMDATSSTTTTALGGIFKSIPATRHEFLSGIR

SEQ ID NO: 4350 - protein, 217 aa, Aliivibrio wodanis
  REGION 1..217: note = tr|A0A090KJR0|A0A090KJR0_9GAMM GTP cyclohydrolase 1; OS = Aliivibrio wodanis OX=80852 GN=folE PE=3 SV=1
MSSLSESAILVRDALVARGLETPMKENGISREEKKERIEEHMREILTLLSLDLTDDSLEETPHRIAKMYVDEIFSGLDYSNFPKITVIDNKMNCDEMVRVNDITLTSTCEHHLVTIDGKATIAYIPREKIIGLSKINRIVRFFAQRPQVQERMTQQILVALQTLLGSDDVAITMEATHYCVKSRGVMDATSSTTTTALGGIFKRNPATRHEFLSGIR

SEQ ID NO: 4351 - protein, 213 aa, Alishewanella aestuarii
  REGION 1..213: note = tr|J1QFR8|J1QFR8_9ALTE GTP cyclohydrolase 1; OS = Alishewanella aestuarii B11 OX=1197174 GN=folE PE=3 SV=1
MLTEEAMLVRSALEARGLETPMRDNGLSRDQKYQKINQLMTEIVQTLGLDLNDDSLRETPHRIAKMYVDEVFGGLDYRNFPKIALIENKMQVSEMVKVKDISFTSTCEHHFVTIDGSATVAYIPAKKIIGLSKINRIVRFFAQRPQVQERLTQQILIALQALLETDNVAVTMDAVHYCVKSRGVMDVNSKTQTTALGGIFKDDARTRAEFLAC

SEQ ID NO: 4352 - protein, 213 aa, Alishewanella agri
  REGION 1..213: note = tr|I9NY51|I9NY51_9ALTE GTP cyclohydrolase 1; OS = Alishewanella agri BL06 OX=1195246 GN=folE PE=3 SV=1
MLTEEAMLVRSALEARGLETPMRDNGLSRDQKYQKINQLMTEIVQTLGLDLNDDSLSETPHRIAKMYVDEVFGGLDYRNFPKIALIENKMQVSEMVKVKDISFTSTCEHHFVTIDGSATVAYIPAKKIIGLSKINRIVRFFAQRPQVQERLTQQILIALQALLETDNVAVTMDAVHYCVKSRGVMDVNSKTQTTALGGIFKDDARTRAEFLAR

SEQ ID NO: 4353 - protein, 213 aa, Alishewanella jeotgali
  REGION 1..213: note = tr|H3ZBR5|H3ZBR5_9ALTE GTP cyclohydrolase 1; OS = Alishewanella jeotgali KCTC 22429 OX=1129374 GN=folE; PE = 3 SV=1
MLTEEAMLVRSALEARGLETPMRDNGLSRDQKYQKISQLMTEIVETLGLDLTDDSLSETPHRIAKMYVDEVFSGLVYSNFPKIALIENKMQVSEMVKVKDISFTSTCEHHFVTIDGSATVAYIPGKKIIGLSKINRIVRFFAQRPQVQERLTQQVLIALQALLETDNVAVTMDAVHYCVKSRGVMDVNSKTQTTALGGIFKEDARTRAEFLAR

SEQ ID NO: 4354 - protein, 213 aa, Alishewanella sp.; identical to SEQ ID NO: 4353
  REGION 1..213: note = tr|A0A1C2BZN0|A0A1C2BZN0_9ALTE GTP cyclohydrolase 1; OS = Alishewanella sp. HH-ZS OX=1856684 GN=folE PE=3 SV=1

SEQ ID NO: 4355 - protein, 213 aa, Alishewanella sp.
  REGION 1..213: note = tr|A0A0T5PJS4|A0A0T5PJS4_9ALTE GTP cyclohydrolase 1; OS = Alishewanella sp. WH16-1 OX=1651088 GN=folE PE=3 SV=1
MLTEEAMLVRSALEARGLETPMHDNGLSRDQKYQKINQLMTEIVQTLGLDLNDDSLRETPHRIAKMYVDEVFGGLDYRNFPKIALIENKMQVSEMVKVKDISFTSTCEHHFVTIDGSATVAYIPAKKIIGLSKINRIVRFFAQRPQVQERLTQQILIALQALLETDNVAVTMDAVHYCVKSRGVMDVNSKTQTTALGGIFKDDARTRAEFLAR

SEQ ID NO: 4356 - protein, 202 aa, Alistipes finegoldii
  REGION 1..202: note = tr|A0A173WGT2|A0A173WGT2_9BACT GTP cyclohydrolase 1; OS = Alistipes finegoldii OX=214856 GN=folE PE=3 SV=1
MEERNYNKVERFDAKAIEELKHHYTEILRLLGEDPAREGLQKTPERVAKAMSFLTKGYDENPLEIIRSATFREEYKQMVLVKDIELYSLCEHHMLPFYGKAHVAYIPNGHITGLSKIARVVECFARRLQVQERLTVQIRDCIQEALNPMGVAVVIEASHMCMQMRGIEKQQSATTTSAFTGIFLSDHRTREEFMTLISHRYR

SEQ ID NO: 4357 - protein, 202 aa, Alistipes finegoldii
  REGION 1..202: note = tr|I3YLH9|I3YLH9_ALIFI GTP cyclohydrolase 1; OS = Alistipes finegoldii (strain DSM 17242 / JCM 16770 / AHN 2437 / CCUG 46020 / CIP 107999) OX=679935 GN=folE PE=3; SV = 1
MEERTYNKEERFDARTIEALKLHYAEILRLLGEDPSREGLLKTPERVAKAMAFLTKGYEENPLEIIRSATFREEYKQMVLVKDIELYSLCEHHMLPFYGKAHVAYIPNGHITGLSKIARVVECYARRLQVQERLTVQIRDCIQEALNPMGVAVVIEASHMCMQMRGIEKQQSATTTSAFTGIFLSDHRTREEFMTLISHKYR

SEQ ID NO: 4358 - protein, 198 aa, Alistipes indistinctus
  REGION 1..198: note = tr|A0A412SDP4|A0A412SDP4_9BACT GTP cyclohydrolase 1; OS = Alistipes indistinctus OX=626932 GN=folE PE=3 SV=1
MESNYEKEELFSPEKVAALAGHYKAILELLGEDASREGLLKTPERVAKAMSFLTQGYGQDPKEILLSAKFKEEYKQMVIVKDIELYSMCEHHMIPFYGKAHVAYIPNGYITGLSKIARVVEAFARRLQVQERLTVQIRDCIQQALNPLGVAVVIEASHMCMQMRGVQKQNCSTTTSAFTGAFLTQMQTREEFIQLIGK

SEQ ID NO: 4359 - protein, 289 aa, Alistipes indistinctus
  REGION 1..289: note = tr|G5H7G6|G5H7G6_9BACT GTP cyclohydrolase 1; OS = Alistipes indistinctus YIT 12060 OX=742725 GN=folE PE=3; SV = 1
MEIGRNTYFGVSINAYAPVDQTADVSSDVTVDGSERIRYRGGIGRIAIQRIYPYLCRTGAFRTRLPALFGRCMVCVSGVDEVVSAGVKFIPMESNYEKEELFSPEKVAALAGHYKAILELLGEDASREGLLKTPERVAKAMSFLTQGYGQDPKEILLSAKFKEEYKQMVIVKDIELYSMCEHHMIPFYGKAHVAYIPNGYITGLSKIARVVEAFARRLQVQERLTVQIRDCIQQALNPLGVAVVIEASHMCMQMRGVQKQNCSTTTSAFTGAFLTQMQTREEFIQLIGK

SEQ ID NO: 4360 - protein, 201 aa, unidentified
  source 1..201: note = Alistipes inops
  REGION 1..201: note = tr|A0A0B0BXV0|A0A0B0BXV0_9BACT GTP cyclohydrolase 1; OS = Alistipes inops OX=1501391 GN=folE PE=3 SV=1
MDKLYEREDIYDVRTVEELAGHYKRILELLGEDTSREGLLKTPERVAKAMAFLTKGYGEDPKEILLSAKFREDYRHMVVVKDIELYSMCEHHMLPFYGKAHVAYIPNGYITGLSKVARVVECFARRFQVQERLTVQIRDCIQEALDPMGVAVVIEAAHTCMQMRGIQKQNSVTTTSAFTGAFLKNQNTRQEFLQIISSNLR

SEQ ID NO: 4361 - protein, 165 aa, unidentified
  source 1..165: note = Alistipes obesi
  REGION 1..165: note = tr|A0A3D3YLD8|A0A3D3YLD8_9BACT GTP cyclohydrolase 1 (Fragment) OS=Alistipes obesi OX=1118061 GN=folE PE=3 SV=1
MEKKLYEKQEIYDPATIAELSEHYAAILRLLGEDPTREGLLKTPERVAKAMAFMTKGYAEDPRDILLSAMFREEYRQMVLVRDIEVYSLCEHHMLPFYGKAHVAYIPDGYITGLSKVARVVECFARRLQVQERLTVQIRDCIHEALHPLGVAVVIEASHMCMQMR

SEQ ID NO: 4362 - protein, 196 aa, Alistipes onderdonkii
  REGION 1..196: note = tr|A0A4V1Z0F3|A0A4V1Z0F3_9BACT GTP cyclohydrolase 1; OS = Alistipes onderdonkii OX=328813 GN=folE PE=3 SV=1
MEAITPNAEDIIGALKTLIRAIGEDPDREGLIGTPDRIMRMWKEIFRGYDPAQKPKITTFANEEGMSDIVFDCGDYYSMCEHHILPFFGRYYFAYIPSPKGRILGISKVARVVGYCAARLQLQERLARDIVQMLSEALNNEALGFAIVMKGQHLCKTMRGVRNDGKMSVAHFTGVFNLNSDLRKEFYKLIDLNSNG

SEQ ID NO: 4363 - protein, 202 aa, Alistipes onderdonkii
  REGION 1..202: note = tr|A0A1Y3QTC8|A0A1Y3QTC8_9BACT GTP cyclohydrolase 1; OS = Alistipes onderdonkii OX=328813 GN=folE PE=3 SV=1
MEERNYNKEERFDAKTIEVLKHHYTEILRLLGEDPAREGLQKTPERVAKAMSFLTKGYDENPLEIIRSATFREEYKQMVLVKDIELYSLCEHHMLPFYGKAHVAYIPNGHITGLSKIARVVECFARRLQVQERLTVQIRDCIQEALNPMGVAVVIEASHMCMQMRGIEKQQSATTTSAFTGIFLSDHRTREEFMTLISHRYR

SEQ ID NO: 4364 - protein, 202 aa, Alistipes putredinis
  REGION 1..202: note = tr|R7JG80|R7JG80_9BACT GTP cyclohydrolase 1; OS = Alistipes putredinis CAG:67 OX=1263036 GN=folE PE=3 SV=1
MEMKRYQKEENFSPEKIAKLREHYKAILELLGEDPAREGLLKTPERVAKAMSFLTQGYEDDPLAIIRSATFKEEYRQMVLVKDIELYSLCEHHMLPFYGKAHVAYIPNGYITGLSKIARVVESFARRLQVQERLTVQIRDCIQEALNPMGVAVVIEASHMCMQMRGVEKQGSATTTSAFTGVFLSHPPTRQEFMTLISNKYR

SEQ ID NO: 4365 - protein, 202 aa, Alistipes putredinis; identical to SEQ ID NO: 4364
  REGION 1..202: note = tr|B0MY26|B0MY26_9BACT GTP cyclohydrolase 1; OS = Alistipes putredinis DSM 17216 OX=445970 GN=folE PE=3; SV = 1

SEQ ID NO: 4366 - protein, 202 aa, Alistipes shahii
  REGION 1..202: note = tr|D4IM53|D4IM53_9BACT GTP cyclohydrolase 1; OS = Alistipes shahii WAL 8301 OX=717959 GN=folE PE=3 SV=1
MELKNYDKEERFDPATVEALKGHYTEILRLLGEDPAREGLLKTPERVAKAMSFLTKGYDENPLEIIRSATFREEYKQMVLVKNIELYSMCEHHMLPFYGKAHVAYIPNGRITGLSKIARVVECFARRLQVQERLTVQIRDCIQEALNPMGVAVVIEASHMCMQMRGIEKQQSATTTSAFTGIFLSDHRTREEFMTLISHRYR

SEQ ID NO: 4367 - protein, 202 aa, Alistipes shahii
  REGION 1..202: note = tr|A0A5B3GL55|A0A5B3GL55_9BACT GTP cyclohydrolase 1; OS = Alistipes shahii OX=328814 GN=folE PE=3 SV=1
METKNYDKEERFDPATVEALKLHYAEILRLLGEDPAREGLLKTPERVAKAMAFLTKGYDENPLDIIRSAMFREEYRQMVLVKDIELYSLCEHHMLPFYGKAHVAYIPNGYITGLSKVARVVECFARRLQVQERLTVQIRDCIQEALNPMGVAVVIEASHMCMQMRGIEKQQSATTTSAFTGVFLSSQRTREEFMTLISHRYR

SEQ ID NO: 4368 - protein, 202 aa, Alistipes sp.; identical to SEQ ID NO: 4367
  REGION 1..202: note = tr|A0A1Q6EAT6|A0A1Q6EAT6_9BACT GTP cyclohydrolase 1; OS = Alistipes sp. 56_sp_Nov_56_25 OX=1896969 GN=folE PE=3; SV = 1

SEQ ID NO: 4369 - protein, 202 aa, Alistipes sp.
  REGION 1..202: note = tr|A0A4Y1X0M9|A0A4Y1X0M9_9BACT GTP cyclohydrolase 1; OS = Alistipes sp. 5CPEGH6 OX=2585119 GN=folE PE=3 SV=1
MEGRNYTKEERFDAGRVEALKHHYAEILRLLGEDPAREGLLKTPERVAKAMAFLTKGYDEDPLEIIRSATFREEYRQMVLVKDIELYSLCEHHMLPFYGKAHVAYIPNGRITGLSKIARVVECFARRLQVQERLTVQIRDCIQEALDPMGVAVVIEASHMCMQMRGIEKQQSATTTSAFTGVFLSSQRTREEFMTLISHRYR

SEQ ID NO: 4370 - protein, 202 aa, unidentified
  source 1..202: note = Alistipes timonensis
  REGION 1..202: note = tr|A0A1H4BBI9|A0A1H4BBI9_9BACT GTP cyclohydrolase 1; OS = Alistipes timonensis JC136 OX=1033731 GN=folE PE=3 SV=1
MEMKNYDKEERFDPATIEALKLHYAEILRLLGEDPAREGLLKTPERVAKAMSFLTKGYDENPLEIIRSATFREEYRQMVLVKDIELYSLCEHHMLPFYGKAHVAYIPNGYITGLSKVARVVECFARRLQVQERLTVQIRDCIQEALNPMGVAVVIEASHMCMQMRGIEKQQSATTTSAFTGVFLSSQRTREEFMTLISHRYR

SEQ ID NO: 4371 - protein, 234 aa, unidentified
  source 1..234: note = Aliterella atlantica
  REGION 1..234: note = tr|A0A0D8ZTE1|A0A0D8ZTE1_9CYAN GTP cyclohydrolase 1; OS = Aliterella atlantica CENA595 OX=1618023 GN=folE PE=3; SV = 1
MTNSASDRGRESMDGLNSLNRGVSTRPDRNTQNGKQPNIQPPTEELNEPMMEAVRTLLLGVGEDPEREGLLKTPKRVAEAMRFLTSGYNQSLEELVNGAIFDEGHNEMVLVRDINTFSLCEHHMLPFMGRAHVAYIPNQKVVGLSKLARIVEMYSRRLQVQERLTRQIAEAVQTILEPKGVAVVIEASHMCMVMRGVQKPGSWTVTSAMIGVFQDEQKTREEFFNLIRHQAAFF

SEQ ID NO: 4372 - protein, 308 aa, Alkalibacillus haloalkaliphilus
  REGION 1..308: note = tr|A0A511W1R6|A0A511W1R6_9BACI GTP cyclohydrolase FolE2 OS=Alkalibacillus haloalkaliphilus OX=94136 GN=folE2; PE = 3 SV=1
MNETVKKQLPDKQERHKLFGTVEPGPKTKPIEKEQMKDLQNTRKDFLFELDAVGISNVKHPVIVNSSLTPETQTTIGTFYFASSISQDSKGTNMSRFTEQLQTYYENGLVLSLKTLKSFVYELRQRLEQKDAEVTVSFPWFFERKAPYSEKAGLNHADAWIKVHYDQDEGYDIRVGVKGKITTLCPCSKEISEYSAHNQRGNIEMEVLINEDFDEDKLDWKFILLEAAESNASARIHPVLKRPDEKMVTEQAYENPRFVEDMVRLVASDLYEIDEVERFFVKCINEESIHLHDAVASISYDKRDEQSV

SEQ ID NO: 4373 - protein, 188 aa, Alkalibacter saccharofermentans
  REGION 1..188: note = tr|A0A1M4TQE8|A0A1M4TQE8_9FIRM GTP cyclohydrolase 1; OS = Alkalibacter saccharofermentans DSM 14828 OX=1120975; GN = folE PE=3 SV=1
MDKERIEKAVREILFAVGENPDREGLVDTPKRIAKMYEEIFSGLNENPADHLEIYFQQEKYEELVLIKDIPFYSVCEHHLVPFFGKAHVGYLPKNGKLTGLSKLARVVETVAKRPQLQERLTATVADTIQRKLEPYGVIVVVEAEHMCMTMRGVKKPGSKTITSAVRGVFESDAKARSEVMSFINFGK

SEQ ID NO: 4374 - protein, 188 aa, Alkalibaculum bacchi
  REGION 1..188: note = tr|A0A366IDL7|A0A366IDL7_9FIRM GTP cyclohydrolase 1; OS = Alkalibaculum bacchi OX=645887 GN=folE PE=3 SV=1
MDKKKIEDAVRQILEAIGEDPDREGLIETPKRIAKMYEEIFSGLEQDPGEHLEKIFPGENHEELVLIKDIPFYSMCEHHLVPFFGKAHVGYLPKDGKLTGLSKLARVVETLSKKPQLQERLTSSVADIIMEKLKPYGVIVVIEAEHMCMTMRGVKKPGSKTITSAVRGGFATDAKARAEVMSFINWRN

SEQ ID NO: 4375 - protein, 187 aa, unidentified
  source 1..187: note = Alkalicoccus halolimnae
  REGION 1..187: note = tr|A0A5C7FH26|A0A5C7FH26_9BACI GTP cyclohydrolase 1; OS = Alkalicoccus halolimnae OX=1667239 GN=folE PE=3 SV=1
MAQVDHEKIEQAVTMILEAVGEDPKREGLEDTPKRVARMYEEIFQGLKQDPKEHFKTVFGEDHEELVLVKDIPFYSTCEHHLVPFFGKVHIGYLPKGGKVTGLSKMARAVEAVTKRPQLQERITSTIADSMVETLNPLGVIVIVEAEHMCMTMRGVKKPGSQTVTSAVRGAFKDNDAARAEVMALIK

SEQ ID NO: 4376 - protein, 187 aa, unidentified
  source 1..187: note = Alkalicoccus saliphilus
  REGION 1..187: note = tr|A0A2T4UB35|A0A2T4UB35_9BACI GTP cyclohydrolase 1; OS = Alkalicoccus saliphilus OX=200989 GN=folE PE=3 SV=1
MTHINHQKIEEAVTMILEAVGEDPGREGLQDTPKRVARMYEEIFQGLHQDPKEHFKTIFGEDHEELVLVKDIPFYSMCEHHLVPFFGKAHIGYLPQGGKVTGLSKLARAVEAVTKRPQLQERITSTIADSLVETLEPQGVMVIVEAEHMCMTMRGVKKPGSSTITSAVRGVFREDEAARSEVLSLIK

SEQ ID NO: 4377 - protein, 273 aa, Alkalilimnicola ehrlichii
  REGION 1..273: note = sp|Q0AA39|GCH4_ALKEH GTP cyclohydrolase FolE2; OS = Alkalilimnicola ehrlichii (strain ATCC BAA-1101 / DSM 17681 / MLHE-1) OX=187272 GN=folE2 PE=3 SV=1
MPEAEKLATVSIEDVQARQDSRRIPINKVGIKDIRHPVRVGGRDGQEQHTVANFSMYVNLPQHFKGTHMSRFVQILEGHDTEITVQSFREMLHEVAERLEAESGHIEMAFPLFVRKTAPVTGVQSLMDYQVAFIGEIHEGEPELAIRVVVPVTSLCPCSKEISRYGAHNQRSHVTVTAKTRDLLWVEDLIDLVEEEASCELYGLLKRPDEKYVTERAYENPKFVEDLVRDVAIRLNDEDRVLAYNVTAENFESIHNHSAFAEIEHDKTGEPRR

SEQ ID NO: 4378 - protein, 267 aa, Alkalilimnicola ehrlichii
  REGION 1..267: note = tr|A0A3E0X2P4|A0A3E0X2P4_9GAMM GTP cyclohydrolase FolE2 OS=Alkalilimnicola ehrlichii OX=351052 GN=folE2 PE=3; SV = 1
MSQAPTVERVAIEDVQSRADTRRIPINKVGIKDIRHPVRVKDRTGHEQHTVAMFNMYVNLPHDFKGTHMSRFVEILNSHDTEITVQSFNEILVEMTERLEAQSGHVEMSFPYFVRKEAPISKVSSLLDYEVSFIGEIHDGKPELWIKVLVPVTSLCPCSKQISERGAHNQRSHVTVSARTRDFVWIEELIDLVEEEASCELYGLLKRPDEKYVTERAYDNPKFVEDMVRDVAARLNADARILAYQVESENFESIHNHSAYALIEHTK

SEQ ID NO: 4379 - protein, 215 aa, Alkalimonas amylolytica
  REGION 1..215: note = tr|A0A1H3X022|A0A1H3X022_ALKAM GTP cyclohydrolase 1; OS = Alkalimonas amylolytica OX=152573 GN=folE PE=3 SV=1
MLSEEAIRVRSALEKKGLETPMQETGLSRDQKYQKISALMTEVVQTLGLDLADDSLAETPHRIAKMYVDEIFSGLDYRNFPKVTQIDNKMNVKEMIKVRDIGVSSTCEHHFITIDGTATVAYIPSTKVIGLSKINRIVRFFAQRPQVQERLTEQVLVALQTLLETDNVAVSIEAVHYCVKARGVMDVNSKTQTTALGGSFREDARTRAEFFSRLS

SEQ ID NO: 4380 - protein, 301 aa, Alkalimonas amylolytica
  REGION 1..301: note = tr|A0A1H4E903|A0A1H4E903_ALKAM GTP cyclohydrolase FolE2 OS=Alkalimonas amylolytica OX=152573 GN=folE2 PE=3; SV = 1
MQTELPDITQEMVQKTSVVLDEVGMQQLDLLLQLSDGGDAIVQPVKANIGINLPRTDARGIHMSRLYRLLNDFAGQQLCTPANLKQLLQQLLDSHLDCHSDQVVLELSFDRLCKHPALITPGLSGWRRYPVQLRASLSPKGFLLKLQLAVQYSSTCPCSAALSRQLLQQKFLADFSDVALSKANVADWLLQHGSYATPHSQRSVASIELSLAATATGFPISAVIEQAEAALATPVQTAVKRADEQEFARLNGANLMFVEDAARRLAASLRPQYPDVCIEVQHLESLHPHDAYARIHASREF

SEQ ID NO: 4381 - protein, 213 aa, unidentified
  source 1..213: note = Alkalinema sp.
  REGION 1..213: note = tr|A0A251WE39|A0A251WE39_9CYAN GTP cyclohydrolase 1; OS = Alkalinema sp. CACIAM 70d OX=1934309 GN=folE PE=3 SV=1
MSPLTSSLEAELARNALREEGDADYFASMESAVREMLIGVGEDPDREGLLKTPKRVAKAMQFLTSGYSQSLDELLNGAIFDEGHNEMVLVRDINFFSLCEHHMLPFMGRAHVAYIPNQKVVGLSKLARIVEMYSRRLQVQERLTRQIAEALQDVLQPRGVAVVMEATHMCMVMRGVQKPGSWTVTSAMVGCFQEDHKTREEFLNLIRHQPAFF

SEQ ID NO: 4382 - protein, 224 aa, unidentified
  source 1..224: note = Alkalinema sp.
  REGION 1..224: note = tr|A0A251WGS7|A0A251WGS7_9CYAN GTP cyclohydrolase 1; OS = Alkalinema sp. CACIAM 70d OX=1934309 GN=folE PE=3 SV=1
MNYPSMTESSIERSLVEPTADSAIAALKTQAHPPVSDAEMMQAVRTLLIGLGEDPDREGLRDTPKRVVKALQFLTQGYHQSLDELLNGAVFHESTNEMVLVRDIDLFSSCEHHILPIIGRVHVAYIPNGKVIGLSKIARICEMYARRLQVQERLTAQIADALQGLLKPQGVAVVVEATHMCMAMRGVQKPGSWTATSAMKGVFAEDPKTRQEFMSLIQHRPAFH

SEQ ID NO: 4383 - protein, 188 aa, unidentified
  source 1..188: note = Alkaliphilus metalliredigens
  REGION 1..188: note = tr|A6TQ51|A6TQ51_ALKMQ GTP cyclohydrolase 1; OS = Alkaliphilus metalliredigens (strain QYMF) OX=293826; GN = folE PE=3 SV=1
MDKEKIQRAVRDILEAIGEDPDREGLIDTPKRIAKMYDEIFEGLVADPKDHLDIYFEDEKHEEMVLVKDIPFYSVCEHHLVPFFGKAHVGYIPKGGKLTGLSKLARVVDTVAKRPQLQERLTSMIAETIMDKLDPHGVIVVVEAEHMCMTMRGVKKSGSKTVTSVVRGIFKTDAKARAEAMSLIQFGS

SEQ ID NO: 4384 - protein, 184 aa, Alkaliphilus peptidifermentans
  REGION 1..184: note = tr|A0A1G5KKL1|A0A1G5KKL1_9CLOT GTP cyclohydrolase 1; OS = Alkaliphilus peptidifermentans DSM 18978 OX=1120976; GN = folE PE=3 SV=1
MNEGRVMEAIKIILEEIGEDPNREGLKETPKRVMNLFKEIYGHTGINPNEELNTVFSEEHDEMVVVKDIPFHSTCEHHLIPFFGKVHIGYIPNGKIVGLSKLHRLVENTSRRLQVQERMTTMISKAIVDKLSPKGVIVVVNAEHLCISMRGIKKLGSITTTFSSEGVFKNDINLKNDFYHAIKL

SEQ ID NO: 4385 - protein, 273 aa, Alkalispirillum mobile
  REGION 1..273: note = tr|A0A498BY08|A0A498BY08_9GAMM GTP cyclohydrolase FolE2 OS=Alkalispirillum mobile OX=85925 GN=folE2 PE=3 SV=1
MPEAEKLATCSIEDVQARQDSRRIPINKVGIKDVRHPVRVGVRDGEEQHTVATFNMYVNLPQHFKGTHMSRFVQILEGHDTEITVQSFREMLHEVAERLEAESGHIEMDFPLFVRKSAPVTGVQSLMDYQVTFIGEIHEGEPELGIRVVVPVTSLCPCSKDISRYGAHNQRSHITVTARTRDLLWVEDLIDLVEEEASCELYALLKRPDEKYVTERAYENPKFVEDLVRDVAIRLNDEDRVLAYNVTAENFESIHNHSAFAEIEHDKTGEPRR

SEQ ID NO: 4386 - protein, 188 aa, Alkalispirillum mobile
  REGION 1..188: note = tr|A0A498C807|A0A498C807_9GAMM GTP cyclohydrolase 1; OS = Alkalispirillum mobile OX=85925 GN=folE PE=3 SV=1
MTESIQAAYRQILLDLGEDPDREGLKDTPGRAARAMQYLTRGYHQTLDEVLNGAVFSSDNDEMVIVRNIELYSLCEHHLLPFIGRAHVAYLPDGKVIGLSKVARIVDMYARRLQIQENLTRQIALAIQEVTGGRGVAVYINARHMCMMMRGVEKQNSEMSTSVMLGDFRSNHKTRDEFLQLIRTPSAY

SEQ ID NO: 4387 - protein, 265 aa, unidentified
  source 1..265: note = Alkalispirochaeta americana
  REGION 1..265: note = tr|A0A1N6P479|A0A1N6P479_9SPIO GTP cyclohydrolase FolE2 OS=Alkalispirochaeta americana OX=159291 GN=folE2; PE = 3 SV=1
MVDVQNQNDTRRIPLQKVGVRNISHPVTVLDRDHRTQHTVADLALYASLPHDYKGTHMSRFVEVFQRYAGEIRMPRFLDMLQEVRQYLDAERAFGELHFPYFMEKQAPVSRQPSLMNYRCGFSGSVSAQGRQFFVSVAVPVTTLCPCSREISSRGAHNQRGTCTVTAEVQDFFWMEDLIELIESCASAGLYTLLKRVDEKFVTEQAYDHPVFVEDLVREVTTAVEERFRFPWFCVEALNQESIHNHDAYAYVERGRPPLEKPHES

SEQ ID NO: 4388 - protein, 181 aa, unidentified
  source 1..181: note = Alkalispirochaeta odontotermitis
  REGION 1..181: note = tr|A0A0A0E1H6|A0A0A0E1H6_9SPIO GTP cyclohydrolase 1; OS = Alkalispirochaeta odontotermitis OX=1329640 GN=folE; PE = 3 SV=1
MEKLIRSLLIEIGENPDREGLCGTPQRVTESWNFLSSGYRSNLEEIVRGAVFKSDSNNMILCKDIEVYSICEHHMLPFFGTCTIGYISKVKIVGVSKLARMVNHFSRRLQLQERLTTDIAKAVMRLVDADGAGVVINAKHMCMTMRGVEKQHSSMTTSSVLGSFHSDPSTRTEFLTLATKC

SEQ ID NO: 4389 - protein, 265 aa, unidentified
  source 1..265: note = Alkalispirochaeta sphaeroplastigenens
  REGION 1..265: note = tr|A0A2S4K0F8|A0A2S4K0F8_9SPIO GTP cyclohydrolase FolE2 OS=Alkalispirochaeta sphaeroplastigenens OX=1187066; GN = folE2 PE=3 SV=1
MVDVQNQNDTRRIPLQKVGVRNISHPVTVLDRDHRQQHTVADLALYASLPHDYKGTHMSRFIEVFQRYAGEIRMPRFLDMLQEVRHHLDAERAFGELHFPYFMEKEAPVSKQSSLMNYRCGFSGSVSARERHFFVSMAVPVTTLCPCSREISSRGAHNQRGTCTVTAEVQEFFWMEDVIELIESCASAGLYTLLKRVDEKFVTEQAYDHPVFVEDLVREVTTALEERFRFPWFSVEALNRESIHNHDAYAYVERGRPPLEKPHES

SEQ ID NO: 4390 - protein, 207 aa, unidentified
  source 1..207: note = Alkalitalea saponilacus
  REGION 1..207: note = tr|A0A1T5BXG5|A0A1T5BXG5_9BACT GTP cyclohydrolase 1; OS = Alkalitalea saponilacus OX=889453 GN=folE PE=3 SV=1
MEFTLNGDNGYIKKESYDDETTQRLSEVYKESLELLGEDTSREGLEKTPLRVAKAMQFLTQGYNMSPEDIIRSAMFREDYQQMVVVKDIELYSLCEHHLLPFFGKAHVAYIPRHHITGLSKVARVVEAFARRLQVQERLTTQIKECIDSTLNPLGVAVVIEAQHMCMQMRGVQKQHSVTTTSDFTGAFLKNMATRGEFFNIIGSKLH

SEQ ID NO: 4391 - protein, 185 aa, Alkanindiges illinoisensis
  REGION 1..185: note = tr|A0A4Y7XC89|A0A4Y7XC89_9GAMM GTP cyclohydrolase 1; OS = Alkanindiges illinoisensis OX=197183 GN=folE PE=3 SV=1
MTMQQSYANIISAIGEDLERPGLLDTPARAAKAFSFLTHGYHQSLDEVTNNAVFPSTNREMVLVKGIEFYSLCEHHLLPFMGQAHIAYLPNGHVLGLSKFARIVDMYSRRLQIQENLTQQIAQAVMDATGARGAAVVMDAAHMCMMMRGVQKQHSSTRSVSMLGEFTTNTQARQEFLMAVPNENI

SEQ ID NO: 4392 - protein, 185 aa, Alkanindiges sp.
  REGION 1..185: note = tr|A0A1S8CUD8|A0A1S8CUD8_9GAMM GTP cyclohydrolase 1; OS = Alkanindiges sp. H1 OX=1907941 GN=folE PE=3 SV=1
MTMQQSYANIISAIGEDLERPGLLDTPARAAKAFSFLTHGYNQSLDEVTNNAVFPSTNREMVLVKGIEFYSLCEHHLLPFMGQAHIAYLPNGHVLGLSKFARIVDMYSRRLQIQENLTQQIAQAVMDATGARGAAVVMDAAHMCMMMRGVQKQHSSTRSVSMLGEFSTNTQARQEFLMAVPGENI

SEQ ID NO: 4393 - protein, 186 aa, Allisonella histaminiformans
  REGION 1..186: note = tr|A0A1G5WDP1|A0A1G5WDP1_9FIRM GTP cyclohydrolase 1; OS = Allisonella histaminiformans OX=209880 GN=folE PE=3 SV=1
MADKNKLEQAARLILEAIGEDPNREGLLETPRRFAEMMEEQMAYTTVSNEEIAREFGKTFSSSEEGPVVVKDIFIFSHCEHHLALMYHMHVSVGYIPSGRVIGLSKVARIADAVSRRLQIQERIGADIRTIIEKVTGSQDVIVRIDGEHSCMTARGIKKPGAVTTTISSSGKFNTPEYRQLFKEML

SEQ ID NO: 4394 - protein, 207 aa, Alloactinosynnema album
  REGION 1..207: note = tr|A0A1H0SW50|A0A1H0SW50_9PSEU GTP cyclohydrolase 1; OS = Alloactinosynnema album OX=504798 GN=folE PE=3 SV=1
MNDSRRNGAGTYDVPAPVFDQDRAEKAVRELLLACGEDPDRDGLLDTPARVARAYAELFAGLYTDPESVLNKTFDESHDELVLVTDIPMFSTCEHHLVPFHGVAHVGYIPNEQGRITGLSKLARLVDLYAKRPQVQERLTSQVADAMMKKLEPRGVIVVIEAEHLCMAMRGIRKPGARTTTSALRGILKSSPSSRAEAIELINGRTR

SEQ ID NO: 4395 - protein, 207 aa, Alloactinosynnema album
  REGION 1..207: note = tr|A0A1H0QX84|A0A1H0QX84_9PSEU GTP cyclohydrolase 1; OS = Alloactinosynnema album OX=504798 GN=folE PE=3 SV=1
MSLSPAPDHLDEHRRLRVVHEREAVDLPAAQRAVADLLIALGRDPASEHLADTPRRVARAYAEMLTPREFNLTTFPNDEGYDELVLAKSIPVQSLCEHHLLPFQGVAHVGYLPGERILGLSKLARVVELFARDLQVQERLTKQVADWLQHHLDPKGVGVVIEAEHLCMSLRGVRAAGARTVTSALQGALREDPRSRQEFFALAGVNG

SEQ ID NO: 4396 - protein, 204 aa, unidentified
  source 1..204: note = Alloactinosynnema iranicum
  REGION 1..204: note = tr|A0A1G6VXL8|A0A1G6VXL8_9PSEU GTP cyclohydrolase 1; OS = Alloactinosynnema iranicum OX=1271860 GN=folE PE=3 SV=1
MTNIIHNTAQILAPPGQVDTERVAGLVGELLAAIGEDSTREGLADTPTRVAAWWREFFSPEPSAAPTCFTEHHLSGQLVVVGGMSVWSLCEHHLLPMNLDVSVGYLPEGQVVGLSKFGRVAQRHAARLQVQERFTRQVADEIAEAIGGDNVAVSVRGTHLCMSARGVRMDAARTTTVETRGRFESDFVLSQQFLTLTTDRRRGA

SEQ ID NO: 4397 - protein, 214 aa, unidentified
  source 1..214: note = Alloactinosynnema iranicum
  REGION 1..214: note = tr|A0A1G6XQG2|A0A1G6XQG2_9PSEU GTP cyclohydrolase 1; OS = Alloactinosynnema iranicum OX=1271860 GN=folE PE=3 SV=1
MTAEAPSIHPTEWSADFPALIPPSAPPAYGDIDLDAARRAVADLLVALGRDPGAAHLADTPRRVAHAYAEMLTPREFTMTTFPNDEGYDELVLARDIPVQSLCEHHLLPFQGVAHVGYLPGERILGLSKLARVVELFARDLQVQERLTKQVADWLQTRLAPRGVGVVIEAEHMCMSLRGVRATGSRTVTSTLQGALREDARSRQEFFALAGVNS

SEQ ID NO: 4398 - protein, 220 aa, Alloactinosynnema sp.
  REGION 1..220: note = tr|A0A0H5CT04|A0A0H5CT04_9PSEU GTP cyclohydrolase 1; OS = Alloactinosynnema sp. L-07 OX=1653480 GN=folE PE=3 SV=1
MVAGIPPISEVPMNDNLSHGVGTPRDVPIPGFDQDRAEKAVRELLLACGEDPDRDGLVDTPARVARAYHELFAGLYTNPESVLDKTFDESHDELVLVTDIPMFSTCEHHLVPFHGVAHVGYIPNEQGRVTGLSKLARLVDLYSKRPQVQERLTSQIADAMMKKLEPRGVIVVIEAEHLCMAMRGIRKPGARTTTSALRGILKSSASSRAEAIELINGRTR

SEQ ID NO: 4399 - protein, 306 aa, Allobacillus sp.
  REGION 1..306: note = tr|A0A556PS94|A0A556PS94_9BACI GTP cyclohydrolase FolE2 OS=Allobacillus sp. SKP4-8 OX=1955272 GN=folE2 PE=3; SV = 1
MDNSYNLKQLPTKEERHKLFGSVPPGPRTKPHEKEKMKDLQNTKQNFLFELDAVGISNVKHPIKIASSMTPETQTTIGTFYFASSISQDSKGTNMSRFTEQLHHYHSEGFTLSIESLKQFTRDLKDRLEQKDAEVKVEFPWFFERKAPYTDMAGMNHADAWIHVRYDEQDHHQVTVGLSGKVTTLCPCSKEISEYSAHNQRGNMKMEVELAEDFDESQTDWKVLLLEAAESNASARIHPVLKRPDEKMVTEQAYENPRFVEDMVRLVAADLYELDMIEKFYVQCVNEESIHLHDAVASITYDKRKK

SEQ ID NO: 4400 - protein, 306 aa, Allobacillus sp.
  REGION 1..306: note = tr|A0A556PXM3|A0A556PXM3_9BACI GTP cyclohydrolase FolE2 OS=Allobacillus sp. SKP2-8 OX=1955271 GN=folE2 PE=3; SV = 1
MDNSYNPKQLPSKEERHKLFGSVPPGPRTKPHEKEKMKDLQNTKQNFLFELDAVGISNVKHPIEITSSMVPETQTTIGKFYFASSISQDSKGTNMSRFTEQLHHYHSEGFTLSIESLKQFTRDLKERLEQKDAEVKVEFPWFFERKAPYTDMAGMNHADAWIHVRYDEHDHHQITVGLSGKVTTLCPCSKEISEYSAHNQRGNMTMEVELVEDFDERQTDWKAMLLEAAESNASARIHPVLKRPDEKMVTEQAYENPRFVEDMVRLVAADLYELDIIEKFYVACENEESIHLHDAIASVTYDKRTE

SEQ ID NO: 4401 - protein, 283 aa, Allochromatium vinosum
  REGION 1..283: note = tr|D3RQA8|D3RQA8_ALLVD GTP cyclohydrolase FolE2; OS = Allochromatium vinosum (strain ATCC 17899 / DSM 180 / NBRC 103801 / NCIMB 10441 / D) OX=572477 GN=folE2 PE=3 SV=1
MEPSTPSPCSTNATCEIADVQGSADTRRIAIDKVGIKDIRHPVRVLDRSGTEQHTVANFNMYVYLPHDFKGTHMSRFVEILNRHEREISVSSFKTMLSEMSERLESEAGHIEMRFPFFINKKAPVSGVESLLDYEVTFIGEIRNGQPRLELKVMVPVTSLCPCSKEISAFGAHNQRSHVTVQVRMERFMWLEELIELVEREASSELYGLLKRPDEKFVTERAYTNPKFVEDLVRDVAKRLNDDPRILAYTVEAENFESIHNHSAYALIERDKAAESRLAESAL

SEQ ID NO: 4402 - protein, 278 aa, Allochromatium warmingii
  REGION 1..278: note = tr|A0A1H3CKM6|A0A1H3CKM6_ALLWA GTP cyclohydrolase FolE2 OS=Allochromatium warmingii OX=61595 GN=folE2 PE=3; SV = 1
MEPSTTSSGSPAIVCDIADVQGSADTRRIAIDRVGIKDIRHPVRVLDRSGTEQHTVATFNMYVYLPHDFKGTHMSRFVEILNRHEREISVSSFKTMLADMSERLESEAGHIEMRFPFFISKQAPVSGVTSLLDYDVTFIGEIRDGQPHLELKVMVPVTSLCPCSKEISAFGAHNQRSHVTVQVRMERFMWLEELIELVEHEASSELYGLLKRPDEKFVTERAYSNPKFVEDLVRDVAKRLNEDDRILAYTVEAENFESIHNHSAYALIARDKTTEAAL

SEQ ID NO: 4403 - protein, 180 aa, unidentified
  source 1..180: note = Allofrancisella guangzhouensis
  REGION 1..180: note = tr|A0A0A8E456|A0A0A8E456_9GAMM GTP cyclohydrolase 1; OS = Allofrancisella guangzhouensis OX=594679 GN=folE PE=3; SV = 1
MQQNFKNLITAIGENPNRNGLIGTPQRAAKAFSFLTRGYQQSLKEVINGALFESSIDEMVVIDNIEFFSLCEHHLLPFTGICHIAYLPTGKVLGLSKFARIVDMFAQRLQIQEQLTEEIATAIQDITGARGVGVVIEAKHFCMMMRGVRKQNSIMKTSVMLGEFKASHSTRSEFLALSMK

SEQ ID NO: 4404 - protein, 204 aa, unidentified
  source 1..204: note = Allofrancisella guangzhouensis
  REGION 1..204: note = tr|A0A0A8E4D1|A0A0A8E4D1_9GAMM GTP cyclohydrolase 1; OS = Allofrancisella guangzhouensis OX=594679 GN=SD28_05115; PE = 3 SV=1
MKTTYDKELGLQIQKHLITKGLESYRDLNVDKSKQVETISNAYQEILTALRLTSIEFEKTPHRIARMFTQEIFYGLDYGNFPACGLYENEFRYDGILTQKHINIMSFCEHHFVPFEGTAEVSFIPKDNNIIGLCRINSICDFFSRRPQIQERMTAQIFETLKFILKTEDVSVKITAKHTCVSFRGKNNKDSETFTQMTGGHFKK

SEQ ID NO: 4405 - protein, 205 aa, unidentified
  source 1..205: note = Allofrancisella inopinata
  REGION 1..205: note = tr|A0A4R7L7L0|A0A4R7L7L0_9GAMM GTP cyclohydrolase 1; OS = Allofrancisella inopinata OX=1085647 GN=EDC55_11610; PE = 3 SV=1
MKTIYDKELGLQIQEYLVSKGLEAYRSLEIEKSKQIKTISNAYQEILTVLGLTTTEFEKTPHRVARMFTQEIFYGLDYDNFPACALYENKFRYDGVLTQKNINIMSFCEHHFIPFEGTAEVSFIPKDNNIIGLCRINSICDFFARRPQIQERMTAQIFETLKFILKTEDVSVKITAQHTCVSFRGKNNKDSETFTQITGGYFKNK

SEQ ID NO: 4406 - protein, 185 aa, Alloiococcus otitis
  REGION 1..185: note = tr|K9EPW4|K9EPW4_9LACT GTP cyclohydrolase 1; OS = Alloiococcus otitis ATCC 51267 OX=883081 GN=folE PE=3; SV = 1
MVDYQRIEKAVEEILRAVGEDPGREGLLETPKRVAKMYAERFAGLEKDPAVHTQKYFHEDNELVLVKDIEFDSTCEHHLLPIIGKAHVAYKPKDGRVIGLSKLARILEDVTKRPQLQERITNQVADVIMDNLEPEGVFVVVEGEHMCMSIRGIKKRGSITVTKAERGVFRQDKELKKEVLDMIKE

SEQ ID NO: 4407 - protein, 171 aa, Allokutzneria albata
  REGION 1..171: note = tr|A0A1H0AMJ3|A0A1H0AMJ3_9PSEU GTP cyclohydrolase 1; OS = Allokutzneria albata OX=211114 GN=folE PE=3 SV=1
MGEDPIREGLRDTPARVARAYQELFAGLYIDPDSVLDKTFDESHEELVLVTDIPMYSTCEHHLLPFHGVAHVGYIPNAEGQVTGLSKLARLVDLYARRPQVQERLTSQVADALVRKLNPRGVIVVMQAEHLCMGMRGIKKAGALTTTSAVRGLMRDSASTRAEAIELIKAR

SEQ ID NO: 4408 - protein, 196 aa, Allokutzneria albata
  REGION 1..196: note = tr|A0A1G9RZ93|A0A1G9RZ93_9PSEU GTP cyclohydrolase 1; OS = Allokutzneria albata OX=211114 GN=folE PE=3 SV=1
MTAQLRVLHGRTGVDVAAAQRAVADLLVALGRDPDSEHLADTPRRVAHAYAELLTPREFDLTTFPNEEGYDELVLAKSIPVQSLCEHHLLPFHGVAHVGYLPGERILGLSKLARVVELFARDLQVQERLTKRVADWLQDHLAPKGVGVVIEAEHMCMSLRGVRASGSRTVTSALQGVLREDLRSRQEFFALAGVGA

SEQ ID NO: 4409 - protein, 197 aa, unidentified
  source 1..197: note = Allonocardiopsis opalescens
  REGION 1..197: note = tr|A0A2T0Q242|A0A2T0Q242_9ACTN GTP cyclohydrolase 1; OS = Allonocardiopsis opalescens OX=1144618 GN=folE PE=3 SV=1
MTEFSRPLDVDHPRIERAIREILLAIGEDPDRDGLRDTPARVARAYAEQFAGLGQDPAEVLSTVFDIDHQEMVLVKDIEMVSSCEHHLVPFYGSAHVGYIPNEKGQVTGLSKLARLVDVFARRPQVQERLTSQIADALMAHIQPAGVIVVIEAEHLCMTMRGVRKPGAKTVTSAVRGSFRDHEPTRHEAMSLILGPR

SEQ ID NO: 4410 - protein, 213 aa, unidentified
  source 1..213: note = Allonocardiopsis opalescens
  REGION 1..213: note = tr|A0A2T0Q224|A0A2T0Q224_9ACTN GTP cyclohydrolase 1; OS = Allonocardiopsis opalescens OX=1144618 GN=folE PE=3 SV=1
MTLAHEAAPAAVRALAPGGGAEPPAEAVAHAEAMLSLLGIACDTESTRDTPRRFVRALAELTRGTRLDPGRHLRVRFPPESACQGVIAAVDVPFVAVCEHHLLPFPGRAAVAYLPAPGARIVGLSKLARLLQEYAARPQVQERLGEQVVAALTAELDTRGAACLIRAEHACMTLRGAQAHGAAMVTTHLAGEFGTDAALRAQVLALAPRPPAR

SEQ ID NO: 4411 - protein, 190 aa, unidentified
  source 1..190: note = Alloprevotella rava
  REGION 1..190: note = tr|G5G984|G5G984_9BACT GTP cyclohydrolase 1; OS = Alloprevotella rava F0323 OX=679199 GN=folE PE=3 SV=1
MIQEEKIERLKVLNAKILALLGETPQREGLLKTPERVAKAQLTLTRGYEMDASAVLNSAKFQESYQHMVIVKDINFYSLCEHHMLPFYGKAHIAYIPNGYITGLSKLARVVDIYSHRLQVQERMTQQVMECIQDALNPLGVMVVIEAKHMCMQMRGVEKENSMTVTSAFSGAFNQAKTREEFLDLIHNSK

SEQ ID NO: 4412 - protein, 188 aa, unidentified
  source 1..188: note = Alloprevotella sp.
  REGION 1..188: note = tr|A0A3P1Z0D5|A0A3P1Z0D5_9BACT GTP cyclohydrolase 1; OS = Alloprevotella sp. OH1205_COT-284 OX=2491043 GN=folE; PE = 3 SV=1
MTEQERLEQLQLHYTEIIKLLGEDPRREGLRKTPERVAKAMLTLLRGYAMNPVEVLNSAKFVENYKQMVIVKDIELFSLCEHHLLPFYGKAHVAYIPNGHICGLSKIPRVVDIFSHRLQVQERLTLQVMEAIQEALDPLGVMVVVEAEHMCMQMRGVEKQHSLTTTSSFCGAFEQAKTREEFLQLIHR

SEQ ID NO: 4413 - protein, 189 aa, unidentified
  source 1..189: note = Alloprevotella sp.
  REGION 1..189: note = tr|A0A496KCV6|A0A496KCV6_9BACT GTP cyclohydrolase 1; OS = Alloprevotella sp. OX=1872471 GN=folE PE=3 SV=1
MTEQERIDQLKFHYKETLQLFGEDPEREGLLKTPERVAKAMLTLTRGYAMDPVAVLNSAKFKEEYNQMVIVKDIEFFSLCEHHMLPFFGKAHVAYIPNGCICGLSKIPRVVDIFSHRLQVQERLTLQVMEAIKEALDPKGVMVVIEAEHMCMQMRGVEKQHSCTTTSSFCGAFEQAKTREEFLQLIKRA

SEQ ID NO: 4414 - protein, 190 aa, unidentified
  source 1..190: note = Alloprevotella tannerae
  REGION 1..190: note = tr|C9LDL6|C9LDL6_9BACT GTP cyclohydrolase 1; OS = Alloprevotella tannerae ATCC 51259 OX=626522 GN=folE; PE = 3 SV=1
MTTEDRIEGLKTLYKEALTVLGEDTEREGLLKTPERVAKAMLDLTRGYTMDAAKVLTSAKFKEDYRHMVIVKDINFYSLCEHHLLPFYGKAHIAYIPNGYITGLSKLARVVDIFSHRLQVQERMTLQIKECIEQALNPLGVMVVLEAKHMCMQMRGIEKENSITTTSDFSGAFTQAKTREEFLALIARKE

SEQ ID NO: 4415 - protein, 192 aa, unidentified
  source 1..192: note = Alloscardovia macacae
  REGION 1..192: note = tr|A0A1Y2STS9|A0A1Y2STS9_9BIFI GTP cyclohydrolase 1; OS = Alloscardovia macacae OX=1160091 GN=folE PE=3 SV=1
MSKGEYNEEGVRQAVRLFLESIGEDPDREGLLDTPDRIARAGRELFAGLSQDPKEVLAKRFSVDTEEMVLVRDIELYSVCEHHLLPFHGVAHIGYIPSGHQVTGLSKLARLVDVYARRPQVQERLTQQIADALVNELHAKGVIVVTDCEHLCMSMRGVKKSQARTLTSAVRGVMRESTTRAEAMQLILQPRG

SEQ ID NO: 4416 - protein, 192 aa, unidentified
  source 1..192: note = Alloscardovia macacae
  REGION 1..192: note = tr|A0A261F7F4|A0A261F7F4_9BIFI GTP cyclohydrolase 1; OS = Alloscardovia macacae OX=1160091 GN=folE PE=3 SV=1
MTRGEYNEEGVRKAVRLFLESIGEDPDREGLLDTPDRIARAGRELFSGLSQDPKEVLAKRFTVDTEEMVLVRDIELYSVCEHHLLPFHGVAHIGYIPSGHEVTGLSKLARLVDVYARRPQVQERLTQQIADALVNELHAKGVIVVTDCEHLCMSMRGVKKSQARTLTSAVRGVMRESTTRAEAMQLILQPRG

SEQ ID NO: 4417 - protein, 191 aa, Alloscardovia omnicolens
  REGION 1..191: note = tr|U1SK17|U1SK17_9BIFI GTP cyclohydrolase 1; OS = Alloscardovia omnicolens F0580 OX=1321816 GN=folE PE=3; SV = 1
MSKGEYNEEGVRQAVRLFLESIGEDPEREGLLDTPDRIARAGRELFAGLHSNPDEVLAKRFAVDTEEMVLVRDIEIYSVCEHHLLPFHGVAHIGYIPGNGEVVGLSKLARLVDMYARRPQVQERLTQQVADALVNELHAQGVIVVTDCEHLCMSMRGIKKSQAHTLTSAVRGIMRDSSTRAEAMRLILNAR

SEQ ID NO: 4418 - protein, 197 aa, Alloscardovia omnicolens
  REGION 1..197: note = tr|A0A2I1M5B0|A0A2I1M5B0_9BIFI GTP cyclohydrolase 1; OS = Alloscardovia omnicolens OX=419015 GN=folE PE=3 SV=1
MRRKASMSKGEYNEEGVRQAVRLFLESIGEDPEREGLLDTPDRIARAGRELFAGLHSNPDEVLAKRFAVDTEEMVLVRDIEIYSVCEHHLLPFHGVAHIGYIPGNGEVVGLSKLARLVDMYARRPQVQERLTQQVADALVNELHAQGVIVVTDCEHLCMSMRGIKKSQAHTLTSAVRGIMRDSSTRAEAMRLILNAR

SEQ ID NO: 4419 - protein, 192 aa, Alloscardovia sp.
  REGION 1..192: note = tr|A0A4R0QPA9|A0A4R0QPA9_9BIFI GTP cyclohydrolase 1; OS = Alloscardovia sp. GLDI4/2 OX=2496842 GN=folE PE=3 SV=1
MNNDSSYNEEGVRQAVRLFLESIGEDPNREGLLDTPDRIARAGRELFAGLHQNPHDVLEKHFSVDTEEMVLVRDIELYSVCEHHLLPFHGVAHIGYIPAKNEVVGLSKLARLVEVFARRPQVQERLTQQIADALVHEIHAKGVIVVTDCEHLCMSMRGVKKSQARTLTSAVRGAMRDSATRAEAMQLILQQR

SEQ ID NO: 4420 - protein, 197 aa, Alloscardovia sp.; identical to SEQ ID NO: 4418
  REGION 1..197: note = tr|A0A1F1AW24|A0A1F1AW24_9BIFI GTP cyclohydrolase 1; OS = Alloscardovia sp. HMSC034E08 OX=1739413 GN=folE PE=3; SV = 1

SEQ ID NO: 4421 - protein, 203 aa, unidentified
  source 1..203: note = Unknown
  REGION 1..203: note = tr|A0A1V1PPR2|A0A1V1PPR2_9PROT GTP cyclohydrolase 1; OS = alpha proteobacterium U9-1i OX=1605283 GN=folE PE=3 SV=1
MSEILKWRSPDEAEQKRPSREAAMEAVRTLIAWAGDDPEREGLLDTPQRVVDAYREWFRGYDLCPNEELSRTFEEVSGYDDMVMLKKIDVESHCEHHIAPFLGKAYVAYLPTDRVVGISKIARVVEIFAKRLQTQETMTAQVAHAIADALKPLGVAVLIDAEHQCMSTRGVHHKDVTTVTTSFTGAFKENVELRDRFLKLAGY

SEQ ID NO: 4422 - protein, 196 aa, unidentified
  source 1..196: note = Unknown
  REGION 1..196: note = tr|A0A061QD38|A0A061QD38_9PROT GTP cyclohydrolase 1; OS = alpha proteobacterium Q-1 OX=1492281 GN=folE PE=3 SV=1
MTKSAGVQISKEEAAARDAVRTLIRWSGEDPDREGLRDTPERVVRAFLEYFRGYEEDPVIYLSRTFEEVSGYDEVVLLRNIPFVSHCEHHLAPIIGKAHVAYLPHDKVVGISKLARVVHAYARRMQVQERLTAQIGDCITKVLEPEGVAVVIEATHGCMTCRGVETPEVIMTTSRMTGVFREDDKARREVLSLMGF

SEQ ID NO: 4423 - protein, 209 aa, unidentified
  source 1..209: note = Alphaproteobacteria bacterium
  REGION 1..209: note = tr|A0A2N3EG61|A0A2N3EG61_9PROT GTP cyclohydrolase 1; OS = Alphaproteobacteria bacterium HGW-Alphaproteobacteria-11 OX=2013657 GN=folE PE=3 SV=1
MNAVVDGLRARTEDDRLSAVEKPSREEAEAAVRTLIAWAGDNPDREGLIDTPGRVVRAYEEFFEGYNEDPYKELSRTFEEVEGYNDMVMLRDINIESHCEHHMVAILGRAHIAYVPTKKVVGISKLARVIEIFARRLQTQETMTAQIADTINAALQPQGVAILIEAKHQCMTTRGIKKPDVATITTQFTGVFRDDPRMEARFMQMIRGY

SEQ ID NO: 4424 - protein, 205 aa, unidentified
  source 1..205: note = Alphaproteobacteria bacterium
  REGION 1..205: note = tr|A0A3R7XIF4|A0A3R7XIF4_9PROT GTP cyclohydrolase 1; OS = Alphaproteobacteria bacterium TMED54 OX=1986640 GN=folE; PE = 3 SV=1
MTSYSSIKTEFQNDDAKKEVSIEDAEKAVKTLITWIGDNPDREGLIDTPKRVVRAFNEHFSGYKENPSEILSKTFKEVQGYDDIVVLKKIDFESHCEHHMLPIIGEASVGYLPNKSIVGISKLARIVNTFAKRLQTQEIMTSQIINAIQENLNPLGVGVVIEAEHHCMKTRGVYKKKSLMRTSQFKGLFLEDEKLRNRFLDFAKD

SEQ ID NO: 4425 - protein, 210 aa, unidentified
  source 1..210: note = Alsobacter sp.
  REGION 1..210: note = tr|A0A2T1HRY1|A0A2T1HRY1_9RHIZ GTP cyclohydrolase 1; OS = Alsobacter sp. SH9 OX=2109933 GN=folE PE=3 SV=1
MDAVVKSFSPRTALKPSESAPRPTREEAEAAVRTLIRWAGDDPAREGLLDTPKRVVKAYEELFRGYREDAQDIMSKVFEEVGGYDDMVVVRDIPFHSHCEHHMVPFVGAAHIGYYPSEGVVGLSKLARVVDVFARRLQTQETMTAEIVGAIDEALKPRGVAVIIEAEHMCMSMRGVQKQGARTVTTQFTGVFRDDPAEQARFLTMVRGLR

SEQ ID NO: 4426 - protein, 198 aa, unidentified
  source 1..198: note = Altererythrobacter aquimixticola
  REGION 1..198: note = tr|A0A4T3F407|A0A4T3F407_9SPHN GTP cyclohydrolase 1; OS = Altererythrobacter aquimixticola OX=2489173 GN=folE; PE = 3 SV=1
MSCDIDGQDGKIPVPEDVQDAIRTLIRWSGDNPDREGLVDTPARVARAWKEYCQGYDEDPSHHLSRVFEEVGGYDEIVLLKDIPFQSHCEHHMAPIIGKAAIAYLPNDHVVGISKLARVLHGYARRLQIQERLTAEVAECIWKHLEPRGVAVVIEASHACMTARGVRTPGVNMVTSRVMGLFRSDSKSREEVLKLMGY

SEQ ID NO: 4427 - protein, 202 aa, unidentified
  source 1..202: note = Altererythrobacter atlanticus
  REGION 1..202: note = tr|A0A0F7KMH9|A0A0F7KMH9_9SPHN GTP cyclohydrolase 1; OS = Altererythrobacter atlanticus OX=1267766 GN=folE PE=3; SV = 1
MSSLVGPDEDEPRGKPPVPEDVQDAIRTLIRWAGDDPSREGLVDTPARVARAWKEYCSGYEEDPAEHLGRVFEEVGGYDEIVLLKDIPFQSHCEHHMAPIIGKAAIAYLPTRRVVGISKLARVLHGYARRLQIQERLTAEVAQCIWDNLEPRGVAVVIEASHACMTARGVRTPGVNMVTSQVMGTFRRDHKSRQEVLQLMGY

SEQ ID NO: 4428 - protein, 202 aa, Altererythrobacter dongtanensis
  REGION 1..202: note = tr|A0A1B2AE41|A0A1B2AE41_9SPHN GTP cyclohydrolase 1; OS = Altererythrobacter dongtanensis OX=692370 GN=folE PE=3; SV = 1
MSSLVGPDEDDPRGKPPVPEHVQDAIRTLIEWAGDDPTREGLLDTPARVARAWKEYCLGYGEDPSVHLSRIFEEVGGYDELVLLRDIPFQSHCEHHMAPIIGKAAIAYMPTDRVVGISKLARVLHGFARRLQVQERLTAEVAKCIWDHLKPQGVAVVIEAAHSCMTARGVRTPGVSMVTSKLYGCFLDDERSREEVLKLMGY

SEQ ID NO: 4429 - protein, 204 aa, Altererythrobacter epoxidivorans
  REGION 1..204: note = tr|A0A0M4MSS3|A0A0M4MSS3_9SPHN GTP cyclohydrolase 1; OS = Altererythrobacter epoxidivorans OX=361183 GN=folE PE=3; SV = 1
MSCGDGYSDDPGLPSKPDVPAHVQDAIRTLIEWAGDDPSREGLLDTPKRVGRAWLEYCQGYQEDPAIHLSRVFEEVGGYDEVVLLKDIPFQSHCEHHMAPITGKAAIAYLPKNKVVGISKLARVLHGFARRLQIQERLTAEVAQCIWDNLEPHGVAVVIEAQHGCMTGRGVRTPGVGMITSRLHGCFLEDQRSRKEVLGLMGYG

SEQ ID NO: 4430 - protein, 207 aa, Altererythrobacter ishigakiensis
  REGION 1..207: note = tr|A0A562UW53|A0A562UW53_9SPHN GTP cyclohydrolase 1; OS = Altererythrobacter ishigakiensis OX=476157 GN=folE PE=3; SV = 1
MNYMNVHDHAEFDPENPLNKPDVPEDVQEAIRTLIRWTGDDPEREGLVDTPKRVGRAWLEYCQGYQSDPAVHLSRIFEEVGGYDEIVLLKDIPFQSHCEHHMAPITGKAHIAYLPDKKVVGISKLARVLHGFANRLQVQERLTAEVADCIWQNLEPRGVAVVIEAEHGCMTGRGVKVHEVEMLTSRMMGCFLEDHRSRKEVMSLMGY

SEQ ID NO: 4431 - protein, 206 aa, Altererythrobacter marensis
  REGION 1..206: note = tr|A0A2W5ALV2|A0A2W5ALV2_9SPHN GTP cyclohydrolase 1; OS = Altererythrobacter marensis OX=543877 GN=folE PE=3 SV=1
MSLNDDTPDNGDLVSPPAKLPVPNEVQAAIRTLIRWAGDDPEREGLIDTPARVGRAWREYCSGYREDPAQHLSRVFEEVGGYNEIVLLKDIPFQSHCEHHMAPITGKAAIAYLPRDRVVGISKLARVLHGFARRLQVQERLTAEVADCIWDHLQPQGVAVVIEAVHGCMTARGVRTPGVGMITSRMMGTFLEDHRSREEVLRLMGY

SEQ ID NO: 4432 - protein, 202 aa, Altererythrobacter marensis
  REGION 1..202: note = tr|A0A0G3X975|A0A0G3X975_9SPHN GTP cyclohydrolase 1; OS = Altererythrobacter marensis OX=543877 GN=folE PE=3 SV=1
MSSLVGPDEDVSRGKLPVPDDVQEAIRTLIRWAGDDPAREGLLDTPSRVARAWKEYCLGYGEDPAIHLSRVFEEVGGYNEIVLLKDIPFQSHCEHHMAPIIGKAAIAYLPTDRVVGISKLARVLHGFARRLQVQERLTAEVADCIWEHLQPQGVAVVIEASHSCMTARGVRTPGVTMTTSRMMGTFLDDPRSREEVLKLMGY

SEQ ID NO: 4433 - protein, 202 aa, Altererythrobacter namhicola
  REGION 1..202: note = tr|A0A1C7D9R4|A0A1C7D9R4_9SPHN GTP cyclohydrolase 1; OS = Altererythrobacter namhicola OX=645517 GN=folE PE=3 SV=1
MGSLVGPDEDNPIGKPPVPENVQDAIRTLIEWAGDDPTREGLLDTPARVARAWKEYCLGYTEDPSVHLSRVFEEVGGYNEIVLLKDIPFQSHCEHHMAPIIGKAAIAYLPTDRVVGISKLARVLHGFARRLQVQERLTAEVADCIWENLKPQGVAVVIDAQHACMTARGVRTPGVGMVTSRMMGTFLEDQRSRKEVLSLMGY

SEQ ID NO: 4434 - protein, 202 aa, Altererythrobacter sp.
  REGION 1..202: note = tr|A0A420EFG8|A0A420EFG8_9SPHN GTP cyclohydrolase 1; OS = Altererythrobacter sp. HN-Y73 OX=2320269 GN=folE PE=3; SV = 1
MSSLVGPDEDDPRGKPPVPEDVQEAIRTLIRWTGDDPEREGLQDTPKRVARAWKEYCVGYEEDPAVHLSRVFEEVGGYDEIVLLKDIPFQSHCEHHMAPIIGKAAIAYLPTDHVVGISKLARVLHGYARRLQIQERLTAEVAQCIWDNLQPKGVAVVIEASHACMTARGVRTPGVGMVTSRVMGTFRKDDRSRKEVLGLMGY

SEQ ID NO: 4435 - protein, 202 aa, Altererythrobacter sp.
  REGION 1..202: note = tr|A0A369Q8R4|A0A369Q8R4_9SPHN GTP cyclohydrolase 1; OS = Altererythrobacter sp. HME9302 OX=2161824 GN=gch1 PE=3; SV = 1
MSSLVGPDEDDPRGKPPVPENVQDAIRTLIEWSGDDPEREGLLDTPKRVARAWLEYCQGYGEDPSIHLSRVFEEVGGYNEIVLLKDIPFQSHCEHHMAPIIGKAAIAYLPSDRVVGISKLARVLHGYARRLQIQERLTAEVADCIWDNLQPQGVAVVIEASHACMTARGVRTPGVGMTTSRMMGTFLKDERSRKEVLSLMGY

SEQ ID NO: 4436 - protein, 204 aa, unidentified
  source 1..204: note = Altererythrobacter xiamenensis
  REGION 1..204: note = tr|A0A1Y6FHB9|A0A1Y6FHB9_9SPHN GTP cyclohydrolase 1; OS = Altererythrobacter xiamenensis OX=1316679 GN=folE PE=3; SV = 1
MSCDDGYVDDPGAPQKPEVPEHVQDAIRTLIEWSGDDPTREGLIDTPKRVGRAWLEYCQGYQEDPAIHLSRVFEEVGGYDEIVLLKDIPFQSHCEHHMAPITGKAAIAYLPKNKVVGISKLARVLHGFARRLQIQERLTAEVASCIWDNLEPHGVAVVIEAQHGCMTGRGVRTPGVNMVTSRLCGCFLDDQRSRKEVLSLMGYG

SEQ ID NO: 4437 - protein, 189 aa, unidentified
  source 1..189: note = Alteribacillus bidgolensis
  REGION 1..189: note = tr|A0A1G8C450|A0A1G8C450_9BACI GTP cyclohydrolase 1; OS = Alteribacillus bidgolensis OX=930129 GN=folE PE=3 SV=1
MPTVDHDKIKQAVRLILEAVGEDPNREGLMDTPKRVAKMYEEVFQGIHQDPSEHLQTVFGEDHEELVLVRDIPFYSMCEHHLVPFYGKAHVGYIPKGGKVTGLSKLARTVETVAKKPQLQERITSTIANTIVETLEPHGVIVVVEAEHMCMTMRGVKKPGAETVTSAVRGTFEKDDASRAEVLALINRS

SEQ ID NO: 4438 - protein, 302 aa, unidentified
  source 1..302: note = Alteribacillus bidgolensis
  REGION 1..302: note = tr|A0A1G8CX91|A0A1G8CX91_9BACI GTP cyclohydrolase FolE2 OS=Alteribacillus bidgolensis OX=930129 GN=folE2; PE = 3 SV=1
MALHLKKILPNKEERHKLFGSVPPIKGKKPTDKENMPDLQNKPNDYLFPIEKVGISNVRHPVNITSELDPGHQTTVAQFTLTTSLIQQSKGINMSRLTELLHEYHKKNWTLDLSSLSQFSKELVQWMEQDHAEVEVSFPWFFERKGPATGKGGLMHADMWMKSSYQEEEKKHSPSIGITAAVTTLCPCSKEISEYSAHNQRGMVTIKANLYEHVSFDWKKELLEAAETNASALLHPVLKRPDEKMVTEQAYENPRFVEDLCRLIAADLYEMDFIRSFQVECRNEESIHLHDAVAALSFSKEE

SEQ ID NO: 4439 - protein, 189 aa, unidentified
  source 1..189: note = Alteribacillus iranensis
  REGION 1..189: note = tr|A0A1I1ZQC0|A0A1I1ZQC0_9BACI GTP cyclohydrolase 1; OS = Alteribacillus iranensis OX=930128 GN=folE PE=3 SV=1
MPTFDHDKIESAVRLILEAIGEDPDREGLLDTPKRVARMYEEVFSGIHEDPAIHLQTVFGEDHEELVLVRDIPFYSMCEHHLVPFYGKAHVGYIPKGGKVTGLSKLARTVETVARKPQLQERITSTIANTILDTLEPHGVIVVVEAEHMCMTMRGIKKPGSETVTSAVRGVFEEDAAARAEVLSLINRS

SEQ ID NO: 4440 - protein, 175 aa, unidentified
  source 1..175: note = Alteribacillus persepolensis
  REGION 1..175: note = tr|A0A1G7ZH19|A0A1G7ZH19_9BACI GTP cyclohydrolase 1; OS = Alteribacillus persepolensis OX=568899 GN=folE PE=3 SV=1
MILEGVGEDPDREGLLDTPKRVAKMYEEVFQGIYEDPKEHLQTVFGEDHEELVLVRDIPFHSMCEHHLVPFFGKAHVGYIPKGGKVTGLSKLARTVETVAQKPQLQERITSTIADSIVETLEPHGVIVVVEAEHMCMTMRGIKKPGAQTVTSAVRGTFEEDAAARAEVLSLINKS

SEQ ID NO: 4441 - protein, 308 aa, unidentified
  source 1..308: note = Alteromonadaceae bacterium
  REGION 1..308: note = tr|A0A420E8M3|A0A420E8M3_9ALTE GTP cyclohydrolase FolE2 OS=Alteromonadaceae bacterium ALS 81 OX=2164068; GN = folE2 PE=3 SV=1
MPHAMPDIANSTQAQTTGTLDRVGMSKIELPIMLSFENQAPTRIEADVEAFVNLTVAEAKGIHMSRLYLLLDELSTESVLNYASLRTLLEGFISSHEDLSDVAQLSFKFDYHLRRESLISKKTGWKAYPMQINARYQNQRMQVELKVDVPYSSTCPCSAALARQLIQDAFSQQFQNKEAINFDNIHRWLGSTQGIVATPHSQRSIAEVKVILADNVKDFPFIQLINSIEDALQTPVQAAVKRADEQEFARLNGQNLMFCEDAARRLQQRLIGQTEFADFWLRVNHLESLHAHDAVSETTKGVPGGYTA

SEQ ID NO: 4442 - protein, 227 aa, unidentified
  source 1..227: note = Alteromonadaceae bacterium
  REGION 1..227: note = tr|A0A2D9KCW3|A0A2D9KCW3_9ALTE GTP cyclohydrolase 1; OS = Alteromonadaceae bacterium OX=1916082 GN=folE PE=3 SV=1
MLAKEAVIVRDAVKLGISKEALMVHEALVARGLETPMLETGLSDEAKRQRIEGAMREIMETLGLDLSDDSLSETPLRIAKMYVDEIFSGLDYRKFPKITQIENKMQLGQPVHVSDVSLTSTCEHHFVTIDGTASVAYIPKDTVIGLSKINRLVGFFAQRPQVQERLTQQVLVALQTLTGTEDVAVAINATHYCVKARGIRDSLSYTKTSALGGKFLADAELRREFFS

SEQ ID NO: 4443 - protein, 184 aa, unidentified
  source 1..184: note = Alteromonadales bacterium
  REGION 1..184: note = tr|A0Y0H2|A0Y0H2_9GAMM GTP cyclohydrolase 1; OS = Alteromonadales bacterium TW-7 OX=156578 GN=folE PE=3; SV = 1
MHNELKDSYQKIITAVGEDAEREGLLDTPKRAAKAMEYLTQGYRQTLDEITNNAVFTSDADDMVLVQNIELYSMCEHHLLPFIGRCHIAYIPNGKVLGLSKFARIVDMFSRRFQIQEQLTHQIAKAVEEVTGAKGVGVIVEAKHMCMMMRGVEKQNSSMRTSVMLGNFRSDPKTRNEFLQLIKG

SEQ ID NO: 4444 - protein, 306 aa, unidentified
  source 1..306: note = Alteromonadales bacterium
  REGION 1..306: note = tr|A0A2N0WPC3|A0A2N0WPC3_9GAMM GTP cyclohydrolase FolE2 OS=Alteromonadales bacterium alter-6D02 OX=2058087; GN = folE2 PE=3 SV=1
MPHQMPDIASTANAQTEGNIDWVGMSHIEMPLMLETQDEAPQRVSAKVETFVNIIVPQAKGIHMSRLFLRLDELSTESSLSPSTLEQMLSDFIQSHDDISDQAQVSFTFDYHLRRASLLSKKKGWKAYPATIKATIDNNRVETELVVEVPYSSTCPCSAALSRQLIQKAFSERFENSALDKQQVIEWLGTTEGIVATPHSQRSVAQVKVKLPQDLAEFPLRQLIDLIEHVMQTPVQAAVKREDEQEFARLNAANLMFCEDAVRRAKHGLNQNDFTDFWVRINHYESLHAHDAVAVAVKGVKQGYTA

SEQ ID NO: 4445 - protein, 228 aa, unidentified
  source 1..228: note = Alteromonas aestuariivivens
  REGION 1..228: note = tr|A0A3D8M7D4|A0A3D8M7D4_9ALTE GTP cyclohydrolase 1; OS = Alteromonas aestuariivivens OX=1938339 GN=folE PE=3 SV=1
MLSNEAVIVRDALEPAYSREALLVRNALEAKGLETPMVDNPLSDDEKRGRIEAAMHDIMGALGLDLSDDSLADTPKRIAKMYVDEIFSGLDYRKFPKITQIENKMALNQPVQVSDISLTSTCEHHFVTIDGTASVAYIPKDTVIGLSKINRLVGFFAQRPQVQERLTQQVLVALQALTGTDDVAVSINATHYCVKARGIRDTNSYTRTSAVGGQFEVNSDLRREFFAL

SEQ ID NO: 4446 - protein, 227 aa, unidentified
  source 1..227: note = Alteromonas australica
  REGION 1..227: note = tr|A0A075P5Y4|A0A075P5Y4_9ALTE GTP cyclohydrolase 1; OS = Alteromonas australica OX=589873 GN=folE PE=3 SV=1
MLAKEAVIVRDALDPSISESAQRVRAALEEKGLETPMAGNGLSDEQKRLKIESAMREVMDTLGLDLSDDSLCDTPKRIAKMYVDEIFGGLDYRKFPKITQIENKMRLDQPVQVSDISLTSTCEHHFVTIDGTATVSYIPKDTVLGLSKINRLVGFFAQRPQVQERLTQQVLVAIQTLTGSEDVAVSINATHYCVKARGIRDTNSYTKTSALGGKFLEDAELRRQFFA

SEQ ID NO: 4447 - protein, 228 aa, unidentified
  source 1..228: note = Alteromonas confluentis
  REGION 1..228: note = tr|A0A1E7ZGS5|A0A1E7ZGS5_9ALTE GTP cyclohydrolase 1; OS = Alteromonas confluentis OX=1656094 GN=folE PE=3 SV=1
MLSNEAVVVRDALEPGLSASAIMVRKALEDKGLETPMVRNGLSDDEKRARIEAAMTDIMDTLGLDRADDSLADTPARIAKMYVNEIFSGLDYRNFPKITVIENKMQLNQPVQVSDISLTSTCEHHFVTIDGTATVSYIPKDTVIGLSKLNRLVGFFAQRPQVQERLTQQVLVAIQTLAGTEDVAVTINATHYCVKARGIRDTNSYTRTSALGGQFLTDPLLRQDFFRN

SEQ ID NO: 4448 - protein, 228 aa, unidentified
  source 1..228: note = Alteromonas lipolytica
  REGION 1..228: note = tr|A0A1E8F8X6|A0A1E8F8X6_9ALTE GTP cyclohydrolase 1; OS = Alteromonas lipolytica OX=1856405 GN=folE PE=3 SV=1
MLAKEAVVVRDAVKLGISKEALLVHEALVDKGLETPMLENGLSDDAKRQRIERAMRDVMETLGLDLTDDSLAETPERIAKMYVDEIFSGLDYRKFPKITQIENKMQVGQPVQVSDISLTSTCEHHFVTIDGTATVAYIPKDTVIGLSKINRLVGFFAQRPQVQERLTQQVLVALQALTGTEDVAVVINATHYCVKARGIRDSLSYTKTSALGGQFLADAQLRREFFGN

SEQ ID NO: 4449 - protein, 227 aa, Alteromonas macleodii
  REGION 1..227: note = tr|K0EK45|K0EK45_ALTMB GTP cyclohydrolase 1; OS = Alteromonas macleodii (strain Balearic Sea AD45); OX = 1004787 GN=folE PE=3 SV=1
MLAKEAVIVRDALDPSISEPAQRVREALEAKGLETPMVANGLTDEQKRKRIESAMRDVMDTLGLDLTDDSLCDTPTRIAKMYVNEIFGGLDYRKFPKITAIENKMQIDQPVQVSDISLTSTCEHHFVTIDGTATVSYIPKDTVIGLSKINRLVGFFAQRPQVQERLTQQVLVALQTLTNTEDVAVSINATHYCVKARGIRDTNSYTKTSALGGRFLTDSELKREFFR

SEQ ID NO: 4450 - protein, 308 aa, Alteromonas macleodii
  REGION 1..308: note = tr|A0A126Q3Y4|A0A126Q3Y4_ALTMA GTP cyclohydrolase FolE2 OS=Alteromonas macleodii OX=28108 GN=folE2 PE=3 SV=1
MASFNSPNTVLPDVTTEHSTAQLPVIDKVGMQGIAIPLHILGRRGERLASKATVDVTVSLDHPNAKGIHMSRLYSLLQRYLSNQDLHKSALVSLMNALIESQDGLSNSAQLNLHFDLTVSRPALISRMSGYQSYPASLCVRRSPERYETQLKLRVPYSSTCPCSASLSRKALSEVFVQQFEGKGLSVEEMGAWLASKQASIATAHAQRSFADITLDLSDNEIPDFIGIIDLIENALGTPLQTAVKREDEQAFAKRNAENLMFVEDSVRRLHEALSTYYQATYFRVKVEHQESLHAHDAIAELSGPVHR

SEQ ID NO: 4451 - protein, 227 aa, Alteromonas marina
  REGION 1..227: note = tr|A0A0B3YEE5|A0A0B3YEE5_9ALTE GTP cyclohydrolase 1; OS = Alteromonas marina OX=203795 GN=folE PE=3 SV=1
MLAKEAVIVRDALDPSISEPAQRVREALEAKGLETPMVANGLTDEQKRKRIESAMRDVMDTLGLDLTDDSLCDTPTRIAKMYVNEIFGGLDYRKFPKITAIENKMQIDQPVQVSDISLTSTCEHHFVTIDGTATVSYIPKDTVIGLSKINRLVGFFAQRPQVQERLTQQVLIALQTLTNTEDVAVSINATHYCVKARGIRDTNSYTKTSALGGRFHTDSELKREFFR

SEQ ID NO: 4452 - protein, 308 aa, Alteromonas marina
  REGION 1..308: note = tr|A0A0B3Y3X6|A0A0B3Y3X6_9ALTE GTP cyclohydrolase FolE2 OS=Alteromonas marina OX=203795 GN=folE2 PE=3 SV=1
MASFNSHNTVLPDVTTEQSTAQVPVIDKVGMQGIAIPLHILGKRGERLASKATVDVTVSLDHPNAKGIHMSRLYNLLQRYLSNQDLHKSALVSLMNSLIESQGGLSNSAQLNLHFDLTVSRPALISKMSGYQSYPASLCVRRSPTGYKAQLKLTVPYSSTCPCSASLSRQALSDAFIQQFEGKDLSLVEMGAWLASKQASIATAHAQRSFADITLDLSDNEIPDFIGIIDLVENALGTPLQTAVKREDEQAFAKRNAENLMFVEDSVRRLHEALSTYYQATYFRVKVEHQESLHAHDAIAELSGPVHR

SEQ ID NO: 4453 - protein, 227 aa, unidentified
  source 1..227: note = Alteromonas mediterranea
  REGION 1..227: note = tr|S5AK40|S5AK40_9ALTE GTP cyclohydrolase 1; OS = Alteromonas mediterranea 615 OX=1300253 GN=folE PE=3; SV = 1
MLAKEAVIVRDALDPSISEPAQRVREALEAKGLETPMVANGLSDEQKRKRIESAMRDVMDTLGLDLTDDSLCDTPTRIAKMYVNEIFGGLDYRRFPKITAIENKMQIDQPVQVSDISLTSTCEHHFVTIDGTATVSYIPKNTVIGLSKINRLVGFFAQRPQVQERLTQQVLVALQTLTNTDDVAVSINATHYCVKARGIRDTNSYTKTSALGGRFLTESELKREFFR

SEQ ID NO: 4454 - protein, 227 aa, unidentified; identical to SEQ ID NO: 4453
  source 1..227: note = Alteromonas mediterranea
  REGION 1..227: note = tr|T2DMH1|T2DMH1_ALTMD GTP cyclohydrolase 1; OS = Alteromonas mediterranea (strain DSM 17117 / CIP 110805 / LMG 28347 / Deep ecotype) OX=1774373 GN=folE PE=3 SV=1

SEQ ID NO: 4455 - protein, 227 aa, unidentified
  source 1..227: note = Alteromonas naphthalenivorans
  REGION 1..227: note = tr|F5Z6C5|F5Z6C5_ALTNA GTP cyclohydrolase 1; OS = Alteromonas naphthalenivorans OX=715451 GN=folE PE=3; SV = 1
MLAKEAVIVRDALEPSISESAQRVRAALEEKGLETPMVANGLSDEQKRQKIEIAMRDVMNTLGLDLNDDSLHDTPTRIAKMYVNEVFGGLDYRNFPKITQIENKMLLDQPVQVSDISLTSTCEHHFVTIDGLATVSYIPNDTIIGLSKLNRLVSFFAQRPQVQERLTQQVLVAIQTLASTEDVAVSINATHYCVKARGIRDTNSYTKTSALGGKFLSDVELRRAFFS

SEQ ID NO: 4456 - protein, 228 aa, unidentified
  source 1..228: note = Alteromonas pelagimontana
  REGION 1..228: note = tr|A0A2A6B0C8|A0A2A6B0C8_9ALTE GTP cyclohydrolase 1; OS = Alteromonas pelagimontana OX=1858656 GN=folE PE=3 SV=1
MLAKEAVVVRGALDPAISKEALLVRHALEAKGLETPMINTGLSDEDKRSRIEAAMSDIMDTLGLDRRDDSLSDTPKRIAKMYVDEIFSGLDYRKFPKITQIENKMQLDQPVQVSDISLVSTCEHHFVTIDGTASVSYIPKHTVLGLSKINRLVGFFAQRPQVQERLTQQVMVAIQTLTGSDDVAVSINATHYCVKARGIRDTHSYTRTSALGGKFTTDADLRREFFMR

SEQ ID NO: 4457 - protein, 227 aa, Alteromonas sp.
  REGION 1..227: note = tr|A0A3S5CX77|A0A3S5CX77_9ALTE GTP cyclohydrolase 1; OS = Alteromonas sp. 76-1 OX=2358187 GN=folE PE=3 SV=1
MLAKEAVIVRDALEPSISESAQRVRAALEEKGLETPMVANGLSDEQKRQKIEIAMRDVMNTLGLDLNDDSLHDTPTRIAKMYVNEVFGGLDYRNFPKITQIENKMRLDQPVQVSDISLTSTCEHHFVTIDGLATVSYIPKDTIIGLSKLNRLVSFFAQRPQVQERLTQQVLVAIQTLASTEDVAVSINATHYCVKARGIRDTNSYTKTSALGGKFLSDVELRRAFFS

SEQ ID NO: 4458 - protein, 228 aa, Alteromonas sp.
  REGION 1..228: note = tr|A0A3N5Z4Y9|A0A3N5Z4Y9_9ALTE GTP cyclohydrolase 1; OS = Alteromonas sp. U0105 OX=2259342 GN=folE PE=3 SV=1
MLSKEAVVMRSRSEPSLTKEAVIVRDALISQGLETPMVENHLSDEAKRAKIENAMRDVMETLGLDLTDDSLMDTPNRIAKMYVNEIFSGLDYSKFPKITQIENKMRLNQPVQVSDISLTSTCEHHFVTIDGTASVSYIPKRTVLGLSKINRLVGFFAQRPQVQERLTQQVMVAIQALTGTEDVAVSINATHYCVKARGIRDSNSYTKTSALGGVFNTDPQMRREFFES

SEQ ID NO: 4459 - protein, 227 aa, Alteromonas stellipolaris
  REGION 1..227: note = tr|A0A0S1YR20|A0A0S1YR20_9ALTE GTP cyclohydrolase 1; OS = Alteromonas stellipolaris LMG 21856 OX=1160720 GN=folE; PE = 3 SV=1
MLAKEAVIVRDALEPSISESAQRVRAALEEKGLETPMVANGLSDEQKRQKIEIAMRDVMNTLGLDLTDDSLHDTPTRIAKMYVNEVFGGLDYRNFPKITQIENKMRLDQPVQVSDISLTSTCEHHFVTIDGLATVSYIPKDTIIGLSKLNRLVSFFAQRPQVQERLTQQVLVAIQTLASTDDVAVSINATHYCVKARGIRDTNSYTKTSALGGKFLSDVELRRAFFS

SEQ ID NO: 4460 - protein, 225 aa, unidentified
  source 1..225: note = Altibacter sp.
  REGION 1..225: note = tr|A0A2D9N7V0|A0A2D9N7V0_9FLAO GTP cyclohydrolase 1; OS = Altibacter sp. OX=2024823 GN=folE PE=3 SV=1
MDLEKQLRAIEAQGDDHIGSSTDTPLRPDAFELSDIEKIALIKKDVQNIMNTLGLDLTDDSLKGTPTRVAKMFVQEIFGGLHPDRKPKASTFENKYKYGEMLVEKNITLYSTCEHHLLPIVGKAHIAYISSGTVVGLSKMNRVVDYFAKRPQVQERLTMQIVEELQKVLGTEDVACVIDAKHLCVNSRGIRDIDSSTVTSEFGGKFKDPQTRREFLDYIHLDTEF

SEQ ID NO: 4461 - protein, 199 aa, unidentified
  source 1..199: note = Altibacter sp.
  REGION 1..199: note = tr|A0A2D9N5Z5|A0A2D9N5Z5_9FLAO GTP cyclohydrolase 1; OS = Altibacter sp. OX=2024823 GN=folE PE=3 SV=1
MGSYKFFEEYNHEVTDDLRNNFSEILKGVGEDITREGIVKTPERAAKAMQFLTSGHCQDPEEVLRSAMFAEGYNDMVIIKDIELYSLCEHHMLPFFGKAHIAYIPDGHIVGLSKIPRVVDIFARRLQVQERLTHDILECINTTLKPKGVAVVIEASHMCMMMRGVQKQNSVTTTSGFRGQFEKIETRSEFLKLISSDLA

SEQ ID NO: 4462 - protein, 257 aa, Alysiella crassa
  REGION 1..257: note = tr|A0A376BVA4|A0A376BVA4_9NEIS GTP cyclohydrolase FolE2 OS=Alysiella crassa OX=153491 GN=folE2 PE=3 SV=1
MMIPDVQSTQDLRNTPINQVGIKDLRFPIRVHSQDGTQSTVARLTMTVFLPAEQKGTHMSRFVALMEEQTAAIDFDELRRLTGEMLQRLDSHSGKISVSFPFFRQKTAPISGIKSLLDYDVTLCGEIKNGEYAYRLKVLIPVTSLCPCSKEISQYGAHNQRSHVTLSLQCSADVAIEEVIDLVENQASCQLYGLLKRPDEKYVTEKAYENPKFVEDMVRDIAVALRSDSRVQAFEVESENFESIHNHSAYAVITYPS

SEQ ID NO: 4463 - protein, 258 aa, Alysiella filiformis
  REGION 1..258: note = tr|A0A286EC91|A0A286EC91_9NEIS GTP cyclohydrolase FolE2 OS=Alysiella filiformis DSM 16848 OX=1120981; GN = folE2 PE=3 SV=1
MTPMPDVQSTTDVRNMPINQVGIKALRFPIRFKTAQSEQHTIAHFAMTVYLPAEQKGTHMSRFVALLEENQQAFDFQKLRQLTEQMLDKLHTHSGKISMAFPFFRKKAAPVSGIQSFLDYDVTLTSEIKNGAFSGCLKILVPITSLCPCSKEISQYGAHNQRSHVTLTLHSHNDQISIEEIIDLIEQQGSSQLYGLLKRPDEKFVTETAYENPKFVEDIVRDIAVALRQDSRIHAFEVESENFESIHNHSAYAYIAYP

SEQ ID NO: 4464 - protein, 250 aa, unidentified
  source 1..250: note = Amantichitinum ursilacus
  REGION 1..250: note = tr|A0A0N0GPU4|A0A0N0GPU4_9NEIS Putative GTP cyclohydrolase 1 type 2 OS=Amantichitinum ursilacus; OX = 857265 GN=ybgI PE=4 SV=1
MSVSRQELENYIGQYLRVSLFRDYCPNGIQVEGRASIQRIATAVTASLAAIEAAHAIGADALLVHHGYFWKGEAAPITGTKKARIARLISTDINLFAYHLPLDAHPDVGNNATLGQILGARTVGQFGEQNLAWIGEFDAPVTLRQLGARLHSMLEREPLLIGDLDKPLRRIGWCTGGAQSFFHEAATLDIDCFVTGEASEFVTHTARESGVAFVAAGHHATERGGVRALGAHLAEHFGLDVTHLDIPNPV

SEQ ID NO: 4465 - protein, 268 aa, unidentified
  source 1..268: note = Amantichitinum ursilacus
  REGION 1..268: note = tr|A0A0N0XIZ8|A0A0N0XIZ8_9NEIS GTP cyclohydrolase FolE2 OS=Amantichitinum ursilacus OX=857265 GN=folE2 PE=3; SV = 1
MNAPHNNVQPLTDVQSSEDTRNIAINKVGIKSIRHPVRVADRADGIQHTIATFDMYVFLPQHFKGTHMSRFVQILNSHEKEISVESFETILREMCTALEAEAGYIEMRFPYFINKTAPVSGVQSLLDYDVTLIGEIRNGEYEMKLKVLVPVTSLCPCSKQISQYGAHNQRSHVTVTATLGDHLWIEELVELVEAQASCELWGLLKRPDEKYVTERAYDNPKFVEDMVRDVAAQLNTEQRVVAYVVESENFESIHNHSAYALIEADKRG

SEQ ID NO: 4466 - protein, 360 aa, Amaricoccus sp.
  REGION 1..360: note = tr|A0A501WTU3|A0A501WTU3_9RHOB GTP cyclohydrolase FolE2 OS=Amaricoccus sp. HB172011 OX=2589815 GN=folE2 PE=3; SV = 1
MDGPTAINEHQPTEAEARAAARLLMRWAGRAGEAGPGEVAELVARAAPYPDLSREFEAGFRPDAAYLADMPDLQNGPAALIRGARVPIQHVGISNFRLPIRYRVREGGEVQLETSVTGSVSLEADRKGINMSRIMRSFYQHAEKHFSAEVIQGVLDSYVVDLDSFDARIQMRFRYPMLRRSLRSGLEGYQYYDVALEVVRHGRDTRRIMHLDYVYSSTCPCSLELSEHARETRGRIAVPHAQRSVARVSVELVGTERLWFEDLVDLCARAIPTETQVMVKREDEQAFAELSGANPIFVEDAVRVLCAQIEAEARIGDFRVVASHQESLHSHDAVSILTRGETFRQSSYDPRLFDTLYHVG

SEQ ID NO: 4467 - protein, 267 aa, unidentified
  source 1..267: note = Aminivibrio pyruvatiphilus
  REGION 1..267: note = tr|A0A4R8MGP8|A0A4R8MGP8_9BACT GTP cyclohydrolase FolE2 OS=Aminivibrio pyruvatiphilus OX=1005740 GN=folE2; PE = 3 SV=1
MRDVQSERDSRRIPIDRVGVGGVSYPIVVLDQKENIQHTVASVSMSVSLPHEYRGTHMSRFIEVLHEFQGKVTLPHMEQIAEDLRTVLSAECAEIVFSFPYFISRNAPVSGLSSFTRYDVSFTAVKGEDFFDLVTSVTVPVQTLCPCSREISEAGAHNQRAFVTIAARMNGLVWIEELVDIAERNASAPVYTLLKREDEKFVTEQAYNTPRFVEDVLRDVAVDLEAEDRITWYSIRVASSESIHNHDAFASLERDKEGKGKKREERK

SEQ ID NO: 4468 - protein, 213 aa, Aminobacter aminovorans
  REGION 1..213: note = tr|A0A142M7J9|A0A142M7J9_AMIAI GTP cyclohydrolase 1; OS = Aminobacter aminovorans OX=83263 GN=folE PE=3 SV=1
MDAVAKKLMPQSAYMDKPATDRPTEAEVEAAVKVLLRWTGDDPQREGLIDTPKRVTKAFREMFNGYDMCPADELGRTFEEVAGYDDLVIVRDIKFHSHCEHHMVPIIGKAHVGYLPDGKVVGLSKIARVVDIFAHRLQTQEAMTAQIAGVIQDVLNPRGVAVMIEAEHMCMAMRGIRKQGSTTLTSTFTGVFRDTPEEQVRFVTMVRAGGGGI

SEQ ID NO: 4469 - protein, 213 aa, Aminobacter aminovorans
  REGION 1..213: note = tr|A0A380WPR8|A0A380WPR8_AMIAI GTP cyclohydrolase 1; OS = Aminobacter aminovorans OX=83263 GN=folE PE=3 SV=1
MDAVAKKLMPQSAYMDKPATDRPTEAEVEAAVKVLLRWTGDDPQREGLIDTPKRVTKAFREMFNGYDMCPADELGRTFEEVAGYDDMVIVRDIKFHSHCEHHMVPIIGKAHVGYLPDGKVVGLSKIARVVDIFAHRLQTQEAMTAQIAGVIQDVLNPRGVAVMIEAEHMCMAMRGIRKQGSTTLTSTFTGVFRDTPEEQVRFVTMVRAGGGGI

SEQ ID NO: 4470 - protein, 212 aa, Aminobacter sp.
  REGION 1..212: note = tr|A0A316GPD5|A0A316GPD5_9RHIZ GTP cyclohydrolase 1; OS = Aminobacter sp. AP02 OX=2135737 GN=folE PE=3 SV=1
MDAVAKKLMPQSAYMDMPTTDRPSAAEVEAAVKVLLRWTGDNPEREGLIDTPKRVTKAFREMFNGYDMCPAEELGRTFEEVAGYDDLVIVRDIKFHSHCEHHMVPIIGKAHVGYLPDGKVVGLSKIARVVDIFAHRLQTQEAMTAQIAGVIQDVLNPRGVAVMIEAEHMCMAMRGIRKQGSTTLTSTFTGVFRDTPEEQVRFVTMVRAGGGI

SEQ ID NO: 4471 - protein, 211 aa, Aminobacter sp.
  REGION 1..211: note = tr|A0A562FCP5|A0A562FCP5_9RHIZ GTP cyclohydrolase 1; OS = Aminobacter sp. J15 OX=935260 GN=folE PE=3 SV=1
MDAIVKNFPPRAENPKHSEPAPTQAEVEAAVRTLLRWTGDNPDREGLIDTPKRVAKAYREMFSGYTQDPAEELGRTFEEVEGYNDLVLVRDIQFHSHCEHHMVPIIGRAHVGYLPDGKVVGLSKIARVVDIFAHRLQTQEAMTAQIAGVIQDVLNPRGVAIMIEAEHMCMAMRGIRKQGSTTLTTTFTGAFQDDPQEQARFMMMLRAGTGR

SEQ ID NO: 4472 - protein, 261 aa, Aminobacterium colombiense
  REGION 1..261: note = tr|D5EG48|D5EG48_AMICL GTP cyclohydrolase FolE2; OS = Aminobacterium colombiense (strain DSM 12261 / ALA-1); OX = 572547 GN=folE2 PE=3 SV=1
MRDVQNERDSRKIPIDLVGVRNLSYPIIVLDRQQNEQRTVAEISMAVSLPHHYRGTHMSRFIEVLEEFQGKVTLSQMEHITEHLRKVLHADRAEITFQFPYFMRRYAPVTNLPSYSRYDVTFWSQKSDTFDLVTTVSVPVQTLCPCSKEISEAGAHNQRGRIDISARMKNFVWIEELVEIAERCGSAPLHTLLKREDEKYVTEEAYNNAKFVEDVLRDTALALEAEPRISWYKVRVVSSESIHNHDAFAELERHVAHGGSI

SEQ ID NO: 4473 - protein, 259 aa, Aminobacterium sp.
  REGION 1..259: note = tr|A0A3D0MR35|A0A3D0MR35_9BACT GTP cyclohydrolase FolE2 OS=Aminobacterium sp. OX=1872491 GN=folE2 PE=3 SV=1
MSMRDVQSERDSRRIPIDLVGIRDLSYPIVVLDREQKEQHTVANVSMAVSLPEHYRGTHMSRFIEVLEEFQGKVTLSQMEHITEHLRQTLRADRAEITFQFPYFIRRHAPVTKIPSYSRYDVIFWAQKDSSFDLITTVIVPVQTLCPCSKEISEFGAHNQRARIEVAARMKNFVWIEELVEIAERCGSAPLHSLLKREDEKYVTEQAYQNAKFVEDVLRDTALELEAESRISWYRVRVVSSESIHNHDAFAELERHVSG

SEQ ID NO: 4474 - protein, 263 aa, Aminomonas paucivorans
  REGION 1..263: note = tr|E3CW99|E3CW99_9BACT GTP cyclohydrolase FolE2; OS = Aminomonas paucivorans DSM 12260 OX=584708 GN=folE2; PE = 3 SV=1
MRDVQNEPDLRNIPLDRVGVSDLSYPIEVRDRDHKVQRTVARIAMAVSLPRDYRGTHMSRFVEVLESMGGQVTVHRMDSLVALLQERLAAQSAEVEFRFPYFIQRHAPQSGAASLTRYDVVFRASRQEDRFDLVTTVRAPVLTLCPCSREISEAGAHNQRAHVTLSVRMASIVWIEELADLAERCASCPVYSLLKREDEKHVTEQAYHNPRFVEDVAREAALALDGDPRIPWYRVTVKSHESIHNHDAFASLERDRRSPEVAP

SEQ ID NO: 4475 - protein, 190 aa, Ammonifex degensii
  REGION 1..190: note = tr|C9RBW5|C9RBW5_AMMDK GTP cyclohydrolase 1; OS = Ammonifex degensii (strain DSM 10501 / KC4) OX=429009; GN = folE PE=3 SV=1
MFDQEKIKQAVRLLLEAIGEDPEREGLRDTPERVARMYAEIFAGLQEDPAVHLEKYFTENHEEMVLVRDIPVYSVCEHHLLPFFGVAHVAYIPRGVVTGLSKLARVVDGFARRPQLQERLTTQIADTIMEKLNPRGVLVVIEAEHMCMTMRGVKKPGAKTVTSAVRGIFQQNAATRAEALALIRGRDFRP

SEQ ID NO: 4476 - protein, 191 aa, Ammonifex sp.
  REGION 1..191: note = tr|A0A3A6MTT8|A0A3A6MTT8_9THEO GTP cyclohydrolase 1; OS = Ammonifex sp. OX=1872493 GN=folE PE=3 SV=1
MFDREKIERAVRMILEAVGEDPGREGLRETPQRVARMYEEIFCGLTEDPADHLLKYFTENHEEMVLVRDIPVYSVCEHHLLPFLGTAHVAYIPRAGSITGLSKLARVVEGYARRPQLQERLTSQVADAIMERLEPRGVLVVIEAEHMCMSMRGVMKPGAKTVTSAVRGIFQQNPATRAEAFALIRGREPRG

SEQ ID NO: 4477 - protein, 191 aa, Ammonifex thiophilus
  REGION 1..191: note = tr|A0A3D8P433|A0A3D8P433_9THEO GTP cyclohydrolase 1; OS = Ammonifex thiophilus OX=444093 GN=folE PE=3 SV=1
MFDQEKIKQAVRLLLEAIGEDPEREGLRDTPERVARMYAEIFAGLREDPAVHLEKYFTENHEEMVLVRDIPVYSVCEHHLLPFFGVAHVAYIPRAGVVTGLSKLARVVDGFARRPQLQERLTTQIADTIMEKLNPRGVLVVIEAEHMCMTMRGVKKPGAKTVTSAVRGIFQQNAATRAEALALIRGRDFRP

SEQ ID NO: 4478 - protein, 187 aa, Ammoniphilus oxalaticus
  REGION 1..187: note = tr|A0A419SN18|A0A419SN18_9BACL GTP cyclohydrolase 1; OS = Ammoniphilus oxalaticus OX=66863 GN=folE PE=3 SV=1
MAVDHEKIQQAVRMILEAVGEDPDREGLIETPARVARMYEEIFQGMFIDPTEYFKVIFSEQHEELVLVKDIPFYSTCEHHLVPFFGTAHVAYIPKGGRVVGLSKLARALEAVCRRPQLQERITSVVANSIMDELQPYGVAVVVEAEHMCMTMRGVKKPGSKTVTSAVRGCFEKDAAARAEVFSLMKD

SEQ ID NO: 4479 - protein, 187 aa, Ammoniphilus sp.
  REGION 1..187: note = tr|A0A4Q1T9L5|A0A4Q1T9L5_9BACL GTP cyclohydrolase 1; OS = Ammoniphilus sp. CFH 90114 OX=2493665 GN=folE PE=3 SV=1
MNVDQEKIQQAVRMILEAVGEDADREGLLDTPARVARMYEEIFQGLHIDPKEYFSVIFSEEHEELVLVKDIPFYSTCEHHLVPFFGVAHVAYIPQGGRVVGLSKLARAVEAVAKRPQLQERITSVVANSIMETLRPHGVVVVVEAEHMCMTMRGVKKPGSKTVTSAVRGCFEDDVAARAEVFSLIKN

SEQ ID NO: 4480 - protein, 187 aa, Amnibacterium kyonggiense
  REGION 1..187: note = tr|A0A4R7FQ49|A0A4R7FQ49_9MICO GTP cyclohydrolase 1; OS = Amnibacterium kyonggiense OX=595671 GN=CLV52_0441 PE=3; SV = 1
MTPDLERAQRAVEEYLRALGLDPADPSLDRTPERVARLGAELFAGVGVDPVPDLAASAVADTDARGPVAFLDIPFRSTCEHHLLKFAGAVSLVYRPGAVAGLGAIVRVIETIAARPQVQERLTDEIAFALEHGLGATGVLVTAVAEHDCVAIRGPRIRGATVRTLAARGAYAVEPTAAEARSLVGLA

SEQ ID NO: 4481 - protein, 195 aa, Amnibacterium sp.
  REGION 1..195: note = tr|A0A3A1TZS3|A0A3A1TZS3_9MICO GTP cyclohydrolase 1; OS = Amnibacterium sp. DD4a OX=2306585 GN=D1781_01375 PE=3; SV = 1
MTPDLERARRAVEEYLRAYGLDPEDPTLERTPDRVARLGGELFGGVGVDPLPALAASAVAEVAARGPVAFLDVPFRSICEHHLLKFAGTVSVVYLPGRAVAGLGAIVGLIETVSSRPQVQERLTDEIALALEQALGATGVLVSATAEHDCVAMRGPRIRGAAVRTLAARGAYAVEPAAAEARALLRLGPTGVPGE

SEQ ID NO: 4482 - protein, 193 aa, Amnibacterium sp.
  REGION 1..193: note = tr|A0A2V1HSA3|A0A2V1HSA3_9MICO GTP cyclohydrolase 1; OS = Amnibacterium sp. M8JJ-5 OX=2173173 GN=folE PE=3 SV=1
MDADRIRRAVGELLAAIGEDSTRDGLRETPDHVAAAYAELFSGVGVDAAAYLDEASDVLDLTVGAEPVILRDIPFRSTCEHHLLPFEGTVSLAYLPRARVTGLGRLARVVDAVASRPQIQERLTEEIADAIHRGLDADGALVIVTASHACLWARGSRTRGASVVTIAGRGEYSSGEGRRDVLPLLTGSSEAAG

SEQ ID NO: 4483 - protein, 305 aa, unidentified
  source 1..305: note = Amphibacillus marinus
  REGION 1..305: note = tr|A0A1H8GYV5|A0A1H8GYV5_9BACI GTP cyclohydrolase FolE2 OS=Amphibacillus marinus OX=872970 GN=folE2 PE=3 SV=1
MKQLRQLPSKTERHRIFGSVKPGKKIKPTEKEDMPDLQNKQADFLFELDQVGIANVKHPIIINSLATPTEQTSVASFSLSSSVAQDSKGTNMSRFTEQLQLYFSENKLNTDLTTLKSFTKALAERLESPDALIEIEVPWFFERRGPSSDLAGLNHADLAIRIQYREDRPFEVTVALTGTITTLCPCSKEISEYSAHNQRGTVTMEVELSADFDEDKVDWKLLLLEAAESNASARIHPVLKRPDEKMVTEQAYENPRFVEDIVRLVAADLYEASEVKAFYIACRNQESIHLHDAVASITFDKTTNE

SEQ ID NO: 4484 - protein, 309 aa, Amphibacillus xylanus
  REGION 1..309: note = tr|K0J4A5|K0J4A5_AMPXN GTP cyclohydrolase FolE2; OS = Amphibacillus xylanus (strain ATCC 51415 / DSM 6626 / JCM 7361 / LMG 17667 / NBRC 15112 / Ep01) OX=698758; GN = folE2PE=3 SV=1
MDHKERKFRQLPNKEDRLRLFGSVKPGHKTKPSNKEDMADLQNTQADFLFKLDEVGITNVKHPILINSELLPNQQSSVGSFTFSSTVDQYNKGTNMSRFTEQLHDFYERNLLSFDLNNLKIFTKELAQRLKTKDAKLEIKAPWFFERKGPSSGLAGLNYADIKVSISYLAPDQFNIIVGLKGSVTTLCPCSKEISEYSAHNQRGEVKMEIELRDDFDESKLDWKAFLLEAAESNASARLHPVLKRPDEKMVTEQAFENPRFVEDMVRLVAADLYESDDVVAFQVRCQNHESIHLHDAIASISFDKRAIQ

SEQ ID NO: 4485 - protein, 203 aa, unidentified
  source 1..203: note = Amphiplicatus metriothermophilus
  REGION 1..203: note = tr|A0A239PQJ9|A0A239PQJ9_9PROT GTP cyclohydrolase 1; OS = Amphiplicatus metriothermophilus OX=1519374 GN=folE; PE = 3 SV=1
MSVEKVTALKAPDERPRPGRQEAEEAVRTLLAYFGEDPLREGLVDTPRRFVDAYEEFLSGYAEDPVAILSRTFEEVDGYNDIVLMKNIRLESHCEHHIQPIIGVAHVAYLPSDRVVGISKLARVVDAYARRLQSQETLTSQIATAIETALAPRGVAVRIEAEHQCISTRGVRKTDVACVTQTLTGVFHADPQMEARFYRLIGV

SEQ ID NO: 4486 - protein, 196 aa, unidentified
  source 1..196: note = Amphiplicatus metriothermophilus
  REGION 1..196: note = tr|A0A239PZ38|A0A239PZ38_9PROT GTP cyclohydrolase 1; OS = Amphiplicatus metriothermophilus OX=1519374 GN=folE; PE = 3 SV=1
MGNPIDRTEEDRRRAMEAVRELIRWIGDDPEREGLKDTPRRVIEAFLEYFRGYEECPETYLTRTFEQVGGYDEIVLLRDIPFHSHCEHHLAPIMGKAHVAYLPKDKVVGISKLARVVHAFAKRLQVQERLTAEIADCIQKVLEPAGVAVVIEATHACMTCRGVETPDVIMTTSRMMGVFREDDKARHEVLKLIGFN

SEQ ID NO: 4487 - protein, 179 aa, Amphritea atlantica
  REGION 1..179: note = tr|A0A1H9FJN9|A0A1H9FJN9_9GAMM GTP cyclohydrolase 1; OS = Amphritea atlantica OX=355243 GN=folE PE=3 SV=1
MEKEFASIIQQLGEDLTREGLVDTPKRAAKAMQFLTRGYEQNLDEVINGALFPTDNSEMVIVKDIELYSMCEHHMLPFIGKCHVGYIPKGQVIGLSKIARIVDMFARRLQIQENMTKQIADAIMQATGADGVGVVIEAQHMCMMMRGVEKQNSSMKTSMMLGSFRKSQSTRGEFLSLIN

SEQ ID NO: 4488 - protein, 179 aa, Amphritea balenae
  REGION 1..179: note = tr|A0A3P1SKY7|A0A3P1SKY7_9GAMM GTP cyclohydrolase 1; OS = Amphritea balenae OX=452629 GN=folE PE=3 SV=1
MEKEFASIIEQLGEDLTREGLVDTPKRAAKAMQFLTRGYQQDLDEVINGALFPTENSEMVIVKDIELYSMCEHHMLPFIGKCHVGYIPNGQVIGLSKIARIVDMFARRLQIQENMTKQVADAIMHATGAAGVGVVIEAQHMCMMMRGVEKQNSSMKTSMMLGSFRKSQATRTEFLALIH

SEQ ID NO: 4489 - protein, 179 aa, Amphritea sp.
  REGION 1..179: note = tr|A0A430KVR4|A0A430KVR4_9GAMM GTP cyclohydrolase 1; OS = Amphritea sp. MCCC 1K03512 OX=2490544 GN=folE PE=3 SV=1
MEKEFASIIEQLGEDITREGLVDTPKRAAKAMQFLTRGYEQNLDEVINGALFPTENSEMVIVKDIELYSMCEHHMLPFIGKCHVGYVPKGQVIGLSKIARIVDMFARRLQIQENMTKQIADAIMEATGADGVGVVIEARHMCMMMRGVEKQNSSMKTSMMLGSFRKSQPTRSEFLTLIN

SEQ ID NO: 4490 - protein, 204 aa, Amycolatopsis alba
  REGION 1..204: note = tr|A0A229R8P5|A0A229R8P5_9PSEU GTP cyclohydrolase 1; OS = Amycolatopsis alba DSM 44262 OX=1125972 GN=folE PE=3; SV = 1
MTTDRTTPSVNGESPVFDQDRAEKAVRELLLACGEDPDRDGLLETPARVARAYREMFAGLYTEPDHVLDRTFDEAHEELVLVTDIPMFSTCEHHLVPFHGVAHVGYIPNGHGKVTGLSKLARLVDLYAKRPQVQERLTSQVADALMRKLAPRGAIVVVEAEHLCMAMRGIRKPGARTTTSAVRGLLQSSASSRAEALDLIKGRR

SEQ ID NO: 4491 - protein, 198 aa, Amycolatopsis alba
  REGION 1..198: note = tr|A0A229RWU8|A0A229RWU8_9PSEU GTP cyclohydrolase 1; OS = Amycolatopsis alba DSM 44262 OX=1125972 GN=folE PE=3; SV = 1
MSTPALRVVHETGPGPDLEAAEAAAADLLTALGISLDSESLRGTPGRMARAYAELFTPRSFDLTTFPNDEGYDELVLARGIPVRSVCEHHLLPFVGVAHVGYLPGERILGLSKLARIVEHFACRPQVQERLTKQVADWLDEQLEPRGVGVVIEAEHSCMTLRGVQAAGSSTVTSTLLGTLREDARSRQEFFALTGING

SEQ ID NO: 4492 - protein, 195 aa, unidentified
  source 1..195: note = Amycolatopsis albispora
  REGION 1..195: note = tr|A0A344L151|A0A344L151_9PSEU GTP cyclohydrolase 1; OS = Amycolatopsis albispora OX=1804986 GN=folE PE=3 SV=1
MAAPLRVVNGRTGVDVEAAQRAVADLLVALGHDPASEHLADTPRRVADAYGELLTPREFNLTTFPNDEGYDELVLARGIPVQSLCQHHLLPFHGVAHVGYLPGERILGLSKLARVVELYARDLQVQERLTKQVADWLQQHLAPKGVGVVIEAEHMCMSLRGVRATGSSTVTSALHGVLRDDARSRQEFFGLAGIR

SEQ ID NO: 4493 - protein, 206 aa, unidentified
  source 1..206: note = Amycolatopsis albispora
  REGION 1..206: note = tr|A0A344LL97|A0A344LL97_9PSEU GTP cyclohydrolase 1; OS = Amycolatopsis albispora OX=1804986 GN=folE PE=3 SV=1
MRTASSAAEHRVSDDGPVFDQDRAEKAVRELLLACGEDPDREGLVETPARVARAYHEMFAGLYSNPDQVLDRTFDESHEELVLVTDIPLYSTCEHHLVPFHGVAHVGYIPNSHGKVTGLSKLARLVDLYAKRPQVQERLTSQVADALDRKLQPSGVIVVVEAEHLCMAMRGIRKPGARTTTSAVRGILRTSATSRAEALNLIKGRG

SEQ ID NO: 4494 - protein, 201 aa, unidentified
  source 1..201: note = Amycolatopsis antarctica
  REGION 1..201: note = tr|A0A263CXS0|A0A263CXS0_9PSEU GTP cyclohydrolase 1; OS = Amycolatopsis antarctica OX=1854586 GN=folE PE=3 SV=1
MAPSDSQDLTSPGPVDTERVADLVGQLLAAIGEDPGREGLSDTPARVAAWWRRFFSPDPSAAPTCFTEPHLSGQLVVIGGMSVWSLCEHHLLPMNLDVVVGYVPDGEVMGLSKFGRIAQQCAGRLQVQERFTRQVADEIAVVIGSTDVAVAVRGTHLCMSARGVRMEAARTTTLQTGGRFESDSVLSQQFLTLATDRWRVA

SEQ ID NO: 4495 - protein, 201 aa, unidentified
  source 1..201: note = Amycolatopsis antarctica
  REGION 1..201: note = tr|A0A263CXM3|A0A263CXM3_9PSEU GTP cyclohydrolase 1; OS = Amycolatopsis antarctica OX=1854586 GN=folE PE=3 SV=1
MSEQRAAGPGGPVFDQARAERAIRELLLACGEDPDRNGLQETPARVARAYQEMFAGLYDDPDTVLDKTFDESHEELVLVTDIPMYSTCEHHLVPFHGVAHVGYIPNELGRVTGLSKLARLVDLYARRPQVQERLTSQLADAMERKLQPRGVIVVVQAEHLCMAMRGIRKPGARTTTSAVRGQLKSSASSRAEALDLIKGRR

SEQ ID NO: 4496 - protein, 204 aa, Amycolatopsis australiensis
  REGION 1..204: note = tr|A0A1K1QI01|A0A1K1QI01_9PSEU GTP cyclohydrolase 1; OS = Amycolatopsis australiensis OX=546364 GN=folE PE=3 SV=1
MTWTDQRSPSDADRPVFDQDRAEKAIRELLLACGEDPERDGLKDTPARVARAYREMFAGLYTEPDAVLDRTFDESHEELVLVTDIPMFSQCEHHLVPFHGVAHVGYIPNAAGKVTGLSKLARLVDLYAKRPQVQERLTSQVADAIVRKLEPRGVIVVIEAEHLCMAMRGIRKPGARTTTSAVRGQLKNSASSRAEALDLIKARR

SEQ ID NO: 4497 - protein, 206 aa, Amycolatopsis australiensis
  REGION 1..206: note = tr|A0A1K1SIC7|A0A1K1SIC7_9PSEU GTP cyclohydrolase 1; OS = Amycolatopsis australiensis OX=546364 GN=folE PE=3 SV=1
MTVDPVSEPVPLRHLGVVHDRDTMDLPAAERAVADLLRALGKDPSSEHLGDTPRRVANAYAEMLRPRDFQLTTFPNDEGYDELVLAKSIPVQSLCEHHLLPFRGVAHVGYLPGERILGLSKLARVVELFARDLQVQERLTKQVADWLQEHLAPKGVGVVIEAEHLCMSLRGVRANGALTVTSSLHGLLREEPKTRQEFFALTGVSA

SEQ ID NO: 4498 - protein, 204 aa, Amycolatopsis azurea
  REGION 1..204: note = tr|M2Q5A3|M2Q5A3_9PSEU GTP cyclohydrolase 1; OS = Amycolatopsis azurea DSM 43854 OX=1238180 GN=folE PE=3; SV = 1
MTTDRTTPSGNGAGPVFDQDRAEKAVRELLLACGEDPDRDGLLETPARVARAYREMFAGLYTEPDHVLDRTFDEAHEELVLVTDIPMFSVCEHHLVPFHGVAHVGYIPNGHGKVTGLSKLARLVDLYAKRPQVQERLTSQVADALMRKLAPRGAIVVVEAEHLCMAMRGIRKPGARTTTSAVRGLLQSSASSRAEALDLIKGRR

SEQ ID NO: 4499 - protein, 198 aa, Amycolatopsis azurea
  REGION 1..198: note = tr|M2QGG3|M2QGG3_9PSEU GTP cyclohydrolase 1; OS = Amycolatopsis azurea DSM 43854 OX=1238180 GN=folE PE=3; SV = 1
MSTPALRVVHETGPGPDLEAAEAAAADLLTALGISLDSESLRGTPGRMARAYAELFTPRSFDLTTFPNDEGYDELVLARGIPVRSVCEHHLLPFVGVAHVGYLPGERILGLSKLARIVEHFACRPQVQERLTKQVADWLDEQLEPRGVGVVIEAEHSCMTLRGVQAVGSSTVTSTLLGTLREDARSRQEFFALTGING

SEQ ID NO: 4500 - protein, 204 aa, Amycolatopsis balhimycina
  REGION 1..204: note = tr|A0A428WEZ9|A0A428WEZ9_AMYBA GTP cyclohydrolase 1; OS = Amycolatopsis balhimycina DSM 5908 OX=1081091 GN=folE; PE = 3 SV=1
MTWMDQTSPSSADRPVFDLDRAEKAIRELLLACGEDPERDGLKDTPARVARAYKEMFAGLYTEPDSVLDRTFDEAHEELVLVTDIPMYSVCEHHLVPFHGVAHVGYIPNAAGKVTGLSKLARLVDLYAKRPQVQERLTSQVADAIVRKLEPRGVIVVIEAEHLCMAMRGIRKPGARTTTSAVRGQLKNSPSSRAEALDLIKARR

SEQ ID NO: 4501 - protein, 209 aa, Amycolatopsis balhimycina
  REGION 1..209: note = tr|A0A428W551|A0A428W551_AMYBA GTP cyclohydrolase 1; OS = Amycolatopsis balhimycina DSM 5908 OX=1081091 GN=folE; PE = 3 SV=1
MTVDPVREPVPLRHLGVVHDREAVDLQAAERAVADLLQALGKDPASEHLGDTPRRVAQAYAEMLQPRDFRLTTFPNDEGYDELVLAKSIPVQSLCEHHLLPFRGVAHVGYLPGERILGLSKLARVVEMFARDLQVQERLTKQVADWLQEHLEPQGVGVVIEAEHLCMSLRGVRATGALTVTSSLHGLLREEPKTRQEFFALTGVSAGRS

SEQ ID NO: 4502 - protein, 207 aa, unidentified
  source 1..207: note = Amycolatopsis bartoniae
  REGION 1..207: note = tr|A0A557YVB4|A0A557YVB4_9PSEU GTP cyclohydrolase 1; OS = Amycolatopsis bartoniae OX=941986 GN=folE PE=3 SV=1
MTVNDLYPADVPARHLSVVHDRETVDLPAAQRAIRDLLVALGKDPESEHLADTPRRVAKSYAELLNPREFQLTTFPNDEGYDELVLAKRIPFSSLCEHHMLPFYGVAHVGYLPGERILGLSKLARVVELFARDLQVQERLTKQVADWLQEHLAPKGVGVVLEAEHLCMSLRGVQAAGSRTVTSALHGLLREDRGTRQEFFALTGTQR

SEQ ID NO: 4503 - protein, 230 aa, unidentified
  source 1..230: note = Amycolatopsis cihanbeyliensis
  REGION 1..230: note = tr|A0A542DN47|A0A542DN47_9PSEU GTP cyclohydrolase 1; OS = Amycolatopsis cihanbeyliensis OX=1128664 GN=folE PE=3; SV = 1
MGRVSTDAVTPTTRTVIIASESPNNVRPVFDEVGPERANGRVFDQVRAENAIRELLIACGEDPEREGLRETPARVARAYQEMFAGLYDDPDRVLDRTFAESHEEMVLVSDIPMYSTCEHHLVPFHGVAHVGYIPNGHGNVTGLSKLARLVDLYAKRPQVQERLTSQIADALDRRLKPRGVIVVVEAEHLCMSMRGIRKPGARTTTSAVRGLLQTSASSRAEALDLIKGRR

SEQ ID NO: 4504 - protein, 204 aa, Amycolatopsis coloradensis
  REGION 1..204: note = tr|A0A1R0L1P6|A0A1R0L1P6_9PSEU GTP cyclohydrolase 1; OS = Amycolatopsis coloradensis OX=76021 GN=folE PE=3 SV=1
MTTDRTTASDNGPGPVFDQERAEKAIRELLLACGEDPDRDGLLETPARVARAYREMFAGLYTEPDHVLDRTFDEAHEELVLVTDIPMFSTCEHHLLSFHGVAHVGYIPNEHGKVTGLSKLARLVDLYAKRPQVQERITSQVADALMRKLKPRGVIVVIEAEHLCMAMRGIRKPGARTTTSAVRGLLQSSASSRAEALDLIMGRR

SEQ ID NO: 4505 - protein, 198 aa, Amycolatopsis coloradensis
  REGION 1..198: note = tr|A0A1R0KTH5|A0A1R0KTH5_9PSEU GTP cyclohydrolase 1; OS = Amycolatopsis coloradensis OX=76021 GN=folE PE=3 SV=1
MSTPALRVVHEPGPGPDLEAAEAAAADLLTALGISLDSESLRGTPGRMARAYAELFTPRSFDLTTFPNDEGYDELVLARGIPVRSVCEHHLLPFVGVAHVGYLPGERILGLSKLARIVEHFACRPQVQERLTKQVADWLDEQLEPRGVGVVIEAEHSCMTLRGVQAAGSSTVTSTLLGTLREDARSRQEFFALTGING

SEQ ID NO: 4506 - protein, 209 aa, Amycolatopsis decaplanina
  REGION 1..209: note = tr|M2Z320|M2Z320_9PSEU GTP cyclohydrolase 1; OS = Amycolatopsis decaplanina DSM 44594 OX=1284240 GN=folE; PE = 3 SV=1
MPPFDGVVPDSPEVDIDLAAKHAEAMLTALGLPYDSEHNDRTPRRFVRALAEMTAGRLVDPGRHLEVTFPSVSDNPTMILVVNVRFVSLCEHHLLPWVGRASVAYLPATGARIVGLSKLARLVKEFAARPQVQERLGEQVVTTIERMLDTTGVACLIRGAHSCMNLRGVEAEDASMVSSHLLGRFRDDPAVRAEFIAAVGSANSLGGGG

SEQ ID NO: 4507 - protein, 204 aa, Amycolatopsis decaplanina
  REGION 1..204: note = tr|M2ZAB5|M2ZAB5_9PSEU GTP cyclohydrolase 1; OS = Amycolatopsis decaplanina DSM 44594 OX=1284240 GN=folE; PE = 3 SV=1
MTTNRTTPSGNGDSPVFDQDRAEKAVRELLLACGEDPDRDGLLETPARVARAYREMFAGLYTEPDHVLDRTFDEAHEELVLVTDIPVYSTCEHHLLSFHGVAHIGYIPNEHGKVTGLSKLARLVDLYAKRPQVQERLTSQVADALMRKLEPRGAIVVVEAEHLCMAMRGIRKPGARTTTSAVRGLLQSSASSRAEALDLIKGRR

SEQ ID NO: 4508 - protein, 199 aa, Amycolatopsis eurytherma
  REGION 1..199: note = tr|A0A3N2GQX7|A0A3N2GQX7_9PSEU GTP cyclohydrolase 1; OS = Amycolatopsis eurytherma OX=196083 GN=folE PE=3 SV=1
MQSETALRVVHEPAEGVDLAAAELHAAQFLEALGVSLESESLRGTPGRMARAYAELFSPRPFDLTTFPNDEGYDELVLARGIPVRSVCEHHLLPFVGVAHVGYLPGERILGLSKLARIVEHFARRPQVQERLTKQVADWLAEHVHPKGVGVVIEAEHTCMTLRGVQAVGSSTVTSTLLGTLREDARSRQEFFALTGVNP

SEQ ID NO: 4509 - protein, 198 aa, Amycolatopsis japonica
  REGION 1..198: note = tr|A0A075V184|A0A075V184_9PSEU GTP cyclohydrolase 1; OS = Amycolatopsis japonica OX=208439 GN=folE PE=3 SV=1
MSTPALRVVHETGPGPDLAAAEAAAADLLTALGISLDSESLRGTPGRMARAYAELFTPRPFDLTTFPNDEGYDELVLARGIPVRSVCEHHLLPFVGVAHVGYLPGDRILGLSKLARIVEHFACRPQVQERLTKQVADWLEEQLEPRGVGVVIEAEHSCMTLRGVQAVGSSTVTSTLLGTLREDARSRQEFFALTGING

SEQ ID NO: 4510 - protein, 528 aa, Amycolatopsis japonica
  REGION 1..528: note = tr|A0A075VCM2|A0A075VCM2_9PSEU GTP cyclohydrolase 1; OS = Amycolatopsis japonica OX=208439 GN=folE PE=3 SV=1
MTTDRTTPSDNGDRPVFDQDRAEKAVRELLLACGEDPDRDGLLETPARVARAYREMFAGLYTEPDHVLDRTFDEAHEELVLVTDIPMFSTCVPSKQTVNAVGGRKQAAEVEVGDKLWTLSGGKVEETTVTEISSHQTRELVEVTTAGGSFKVTPDHPLATPKGWVEAKDVEGSFIEWTHARKLCRDRWKPKFGYDFGYVIGATCSDGTVAERYVSLVVNDRDFAKKYAESLYRAFGIEAKLEPVTRPSGYLERDVPGFRVRVVSSFLADLMRQYVGGDAHHQRQRFPMVVLNDRSTFNGFLDGYIDGDGCDDKRHPGRLITSANIPFLEDLATIIGARFTPRKAPASVLYVADRWFERHGFPQDDYTTDLIESDYVEVESVRPVKATGTKPYTVYSFKCEPHPTFLIAGHLTHNCEHHLLSFHGVAHIGYIPNEHGKVTGLSKLARLVDLYAKRPQVQERLTSQVADALMRKLEPRGAIVVVEAEHLCMAMRGIRKPGARTTTSAVRGLLQSSASSRAEALDLIKGRR

SEQ ID NO: 4511 - protein, 204 aa, Amycolatopsis keratiniphila
  REGION 1..204: note = tr|A0A1W2M4G2|A0A1W2M4G2_9PSEU GTP cyclohydrolase 1; OS = Amycolatopsis keratiniphila subsp. keratiniphila; OX = 227715 GN=folE PE=3 SV=1
MTTDRTTPSDNGDRPVFDQDRAEKAVRELLLACGEDPDRDGLLETPARVARAYREMFAGLYTEPDHVLDRTFDEAHEELVLVTDIPMFSTCEHHLLSFHGVAHIGYIPNEHGKVTGLSKLARLVDLYAKRPQVQERLTSQVADALMRKLEPRGAIVVVEAEHLCMAMRGIRKPGARTTTSAVRGLLQSSASSRAEALDLIKGRR

SEQ ID NO: 4512 - protein, 198 aa, Amycolatopsis keratiniphila
  REGION 1..198: note = tr|R4SU92|R4SU92_9PSEU GTP cyclohydrolase 1; OS = Amycolatopsis keratiniphila OX=129921 GN=folE PE=3 SV=1
MSTPALRVVHETGPGPDLVAAEAAAADLLTALGIPLDSESLRGTPGRMARAYAELFTPRPFDLTTFPNDEGYDELVLARGIPVRSVCEHHLLPFVGVAHVGYLPGDRILGLSKLARIVEHFACRPQVQERLTKQVADWLEEQLEPRGVGVVIEAEHSCMTLRGVQAVGSSTVTSTLLGTLREDARSRQEFFALTGING

SEQ ID NO: 4513 - protein, 198 aa, Amycolatopsis lurida
  REGION 1..198: note = tr|A0A2P2FY92|A0A2P2FY92_9PSEU GTP cyclohydrolase 1; OS = Amycolatopsis lurida NRRL 2430 OX=1460371 GN=folE PE=3; SV = 1
MSTPALRVVHESGPGPDLVAAEAAAADLLTALGISLDSESLRGTPGRMARAYAELFTPRPFDLTTFPNDEGYDELVLARGIPVRSVCEHHLLPFVGVAHVGYLPGERILGLSKLARIVEHFACRPQVQERLTKQVADWLEEQLEPRGVGVVIEAEHSCMTLRGVQAVGSSTVTSTLLGTLREDARSRQEFFALTRING

SEQ ID NO: 4514 - protein, 313 aa, Amycolatopsis lurida
  REGION 1..313: note = tr|A0A2P2FVW2|A0A2P2FVW2_9PSEU GTP cyclohydrolase 1; OS = Amycolatopsis lurida NRRL 2430 OX=1460371 GN=BB31_12820; PE = 3 SV=1
MVNDRDFAKKYAEALYRAFGIEAKLEPVTRPSGYLARDVPGFRVRVVSSFLADLMRQYVGGDAHHQRQRFPMVVLNDLSTFNGFLDGYVDGDGFRHKKIAGRTIVSANVPFLEDLATVIGARFTPRTGGIASQLYVADSWFRRHGFPQDDYTTDLIESEYVEVESVRPVKATGTKPYTVYSFKCEPHPTFLIAGHLTHNCEHHLVPFHGVAHVGYIPNGHGKVTGLSKLARLVDLYAKRPQVQERLTSQVADALMRKLEPRGAIVVVEAEHLCMAMRGIRKPGARTTTSAVRGLLQTSASSRAEALDLIKGRR

SEQ ID NO: 4515 - protein, 195 aa, Amycolatopsis marina
  REGION 1..195: note = tr|A0A1I0Y6M2|A0A1I0Y6M2_9PSEU GTP cyclohydrolase 1; OS = Amycolatopsis marina OX=490629 GN=folE PE=3 SV=1
MHATGRIFDQARAERAVRELLLACGEDPDRDGLKDTPARVARAYHEMFAGLYNDPDAVLDKTFDESHEELVLVTDIPMYSTCEHHLVPFHGVAHVGYIPNNQGKVTGLSKLARLVDLYAKRPQVQERLTSQVADALQRRLKPRGVIVVVEAEHLCMSMRGVRKPGARTTTSAVRGLLQTSASSRAEALDLIMGRR

SEQ ID NO: 4516 - protein, 270 aa, Amycolatopsis marina
  REGION 1..270: note = tr|A0A1I1BX53|A0A1I1BX53_9PSEU GTP cyclohydrolase FolE2 OS=Amycolatopsis marina OX=490629 GN=folE2 PE=3 SV=1
MLKDVQAEPDFRGVALNEVGIDELRYPLLVADGQGGKREVVASVTMSVSLDADVKGAHLSRFVDVLHTWRDQLGPDTALAMVDDLRRRMGSAIARASLTFPYFLERRAPVTGSVAFMDYACTLSISAEADGQDLIEQVRVPVTSVCPCSKAISDRGAHNQRGWVTIHARPRDLCGDLWFDDLIDVAEAAGSSPVYALLKRPDERHVTMAGYDNPVFVEDIARDAAGALHSDARIASYKVRVVNDESIHNHNAYAQIPWTNAAQPKNGSAS

SEQ ID NO: 4517 - protein, 204 aa, Amycolatopsis mediterranei
  REGION 1..204: note = tr|A0A0H3DHS5|A0A0H3DHS5_AMYMU GTP cyclohydrolase 1; OS = Amycolatopsis mediterranei (strain U-32) OX=749927; GN = folE PE=3 SV=1
MTWMDQTSHSDADRPVFDHDRAEKAIRELLLACGEDPERDGLKDTPARVARAYQEMFAGLYTEPDSVLDRTFDESHEELVLVTDIPMFSQCEHHLVPFHGVAHVGYIPNAAGKVTGLSKLARLVDLYAKRPQVQERLTSQVADAIVRKLEPRGVIVVIEAEHLCMAMRGIRKPGARTTTSAVRGQLKNSPSSRAEALDLIRARR

SEQ ID NO: 4518 - protein, 206 aa, Amycolatopsis mediterranei
  REGION 1..206: note = tr|A0A0H3D580|A0A0H3D580_AMYMU GTP cyclohydrolase 1; OS = Amycolatopsis mediterranei (strain U-32) OX=749927; GN = folE PE=3 SV=1
MSVDPVSAPVPLRHLGVVHNRDTVDLDAAERAVADLLRALGKDPSSEHLGDTPRRVAHAYAEMLQPRDFQLTTFPNDEGYDELVLAKSIPVQSLCEHHLLPFRGVAHVGYLPGERILGLSKLARVVEMFARDLQVQERLTKQVADWLQEHLAPKGVGVVIEAEHLCMSLRGVRASGALTVTSSLHGLLREEPKTRQEFFALSGVSA

SEQ ID NO: 4519 - protein, 199 aa, Amycolatopsis methanolica
  REGION 1..199: note = tr|A0A076MNF1|A0A076MNF1_AMYME GTP cyclohydrolase 1; OS = Amycolatopsis methanolica 239 OX=1068978 GN=folE PE=3; SV = 1
MQSETALRVVHEPAEGVDLATAELHAAQFLEALGVSLESESLRGTPGRMARAYAELFSPRPFDLTTFPNDEGYDELVLARGIPVRSVCEHHLLPFVGVAHVGYLPGERILGLSKLARIVEHFARRPQVQERLTKQVADWLAEHVHPKGVGVVIEAEHTCMTLRGVQAVGSSTVTSTLLGTLREDARSRQEFFALTGVNP

SEQ ID NO: 4520 - protein, 220 aa, Amycolatopsis methanolica
  REGION 1..220: note = tr|A0A076MZG0|A0A076MZG0_AMYME GTP cyclohydrolase 1; OS = Amycolatopsis methanolica 239 OX=1068978 GN=folE PE=3; SV = 1
MAPRRARVSTGGTPTSRTVKIDSELTPEEGPVFDQARAEKAVRELLEAVGENPDREGLRDTPARVARAYREMFAGLYTDPATVLERTFDESHEELVLVTDIPMYSTCEHHLVPFHGVAHVGYIPNSHGKVTGLSKLARLVDLYAKRPQVQERLTSQIADALVRKLEPRGVIVVVEAEHLCMSMRGIRKPGARTTTSAVRGMLQTSATSRAEALELIKGRR

SEQ ID NO: 4521 - protein, 204 aa, Amycolatopsis niigatensis
  REGION 1..204: note = tr|A0A2N3WI51|A0A2N3WI51_9PSEU GTP cyclohydrolase 1; OS = Amycolatopsis niigatensis OX=369932 GN=folE PE=3 SV=1
MTSTDQTSSKDGIRPVFDQDRAERAVRELLLACGEDPDRDGLQDTPARVARAYREMFAGLYTDPDEVLARTFDESHEELVLVTDIPMYSTCEHHLLAFHGVAHVGYIPNADGKVTGLSKLARLVDLYAKRPQVQERLTSQIADALVRKLEPRGVIVVIEAEHLCMSVRGIRKPGSRTTTSAVRGMLRSSATSRAEAIELIRGRR

SEQ ID NO: 4522 - protein, 200 aa, Amycolatopsis niigatensis
  REGION 1..200: note = tr|A0A2N3W9M6|A0A2N3W9M6_9PSEU GTP cyclohydrolase 1; OS = Amycolatopsis niigatensis OX=369932 GN=folE PE=3 SV=1
MQSSGTALRVVHEPVPGFDLAAAETAAGDFLRALGISLDSESLRGTPGRMARAYAELFTPRSFDLTTFPNDEGYDELVLARDIPVRSVCEHHLLPFTGVAHVGYLPGERILGLSKLARVVEHFACRPQVQERLTKQIAGWLGDQLSPKGVGVVIEAEHTCMTLRGVQATGSSTVTSTLMGTLREDARSRQEFFSLTGVNA

SEQ ID NO: 4523 - protein, 204 aa, Amycolatopsis orientalis
  REGION 1..204: note = tr|A0A193BR90|A0A193BR90_AMYOR GTP cyclohydrolase 1; OS = Amycolatopsis orientalis OX=31958 GN=folE PE=3 SV=1
MTTDRTKPSDNGASPVFDQDRAEKAVRELLLACGEDPDRDGLLETPARVARAYREMFAGLYTEPDHVLDRTFDEAHEELVLVTDIPMFSTCEHHLLSFHGVAHIGYIPNEHGKVTGLSKLARLVDLYAKRPQVQERLTSQVADALMRKLNPRGAIVVVEAEHLCMAMRGIRKPGARTTTSAVRGLLQTSASSRSEALDLIKGRR

SEQ ID NO: 4524 - protein, 198 aa, Amycolatopsis orientalis
  REGION 1..198: note = tr|A0A193C0T9|A0A193C0T9_AMYOR GTP cyclohydrolase 1; OS = Amycolatopsis orientalis OX=31958 GN=folE PE=3 SV=1
MSTPALRVVHEPGPGPDLEAAEAAAADLLTALGISLDSESLRGTPGRMARAYAELFTPRSFDLTTFPNDEGYDELVLARGIPVRSVCEHHLLPFVGVAHVGYLPGERILGLSKLARIVEHFACRPQVQERLTKQVADWLDEQLEPRGVGVVIEAEHSCMTLRGVQATGSSTVTSTLLGTLREDARSRQEFFALTGING

SEQ ID NO: 4525 - protein, 197 aa, unidentified
  source 1..197: note = Amycolatopsis panacis
  REGION 1..197: note = tr|A0A419I1L0|A0A419I1L0_9PSEU GTP cyclohydrolase 1; OS = Amycolatopsis panacis OX=2340917 GN=folE PE=3 SV=1
MSSALRVVHEPDPGLDLAAAEKAAGDFLRALGIQLDSESLQGTPRRMAHAYAELFTPRSFDLTTFPNDEGYDELVLARSIPVRSVCEHHLLPFTGVAHVGYLPGERILGLSKLARVVEHFACRPQVQERLTKQVAGWLSDQLSPKGVGVVIEAEHTCMTLRGVQATGSSTVTSALLGTLRQDARSRQEFFALAGVNS

SEQ ID NO: 4526 - protein, 206 aa, Amycolatopsis pretoriensis
  REGION 1..206: note = tr|A0A1H5Q539|A0A1H5Q539_9PSEU GTP cyclohydrolase 1; OS = Amycolatopsis pretoriensis OX=218821 GN=folE PE=3 SV=1
MTVEPVSEPVPLRHLGVVHDRDAMDLPAAERAVADLLRALGKDPSSEHLGDTPRRVANAYAEMLKPRDFQLTTFPNDEGYDELVLAKSIPVQSLCEHHLLPFRGVAHVGYLPGERILGLSKLARVVEMFARDLQVQERLTKQVADWLQEHLAPKGVGVVIEAEHLCMSLRGVRAAGALTVTSSLHGLLREEPKTRQEFFALTGVSA

SEQ ID NO: 4527 - protein, 204 aa, Amycolatopsis pretoriensis
  REGION 1..204: note = tr|A0A1H5QVH4|A0A1H5QVH4_9PSEU GTP cyclohydrolase 1; OS = Amycolatopsis pretoriensis OX=218821 GN=folE PE=3 SV=1
MTWMDQTSRSDADRPVFDQDRAEKAIRELLLACGEDPERDGLKETPARVARAYHEMFAGLYTEPDSVLDRTFDESHEELVLVTDIPMFSQCEHHLVPFHGVAHVGYIPNAAGKVTGLSKLARLVDLYAKRPQVQERLTSQVADAIVRKLEPRGVIVVIEAEHLCMAMRGIRKPGARTTTSAVRGQLKNSPSSRAEALDLIKARR

SEQ ID NO: 4528 - protein, 205 aa, Amycolatopsis regifaucium
  REGION 1..205: note = tr|A0A154MGQ9|A0A154MGQ9_9PSEU GTP cyclohydrolase 1; OS = Amycolatopsis regifaucium OX=546365 GN=folE PE=3 SV=1
MNPTDRTTPSGNGASPVFDQDRAEKAVRELLLACGEDPDRDGLLETPARVARAYREMFAGLYTEPDHVLDRTFDEAHEELVLVTDIPMFSVCEHHLLSFHGVAHVGYIPNEHGKVTGLSKLARLVDLYAKRPQVQERLTSQVADALMRKLDPRGAIVVVEAEHLCMAMRGIRKPGARTTTSAVRGLLQSSASSRAEALDLIKGRR

SEQ ID NO: 4529 - protein, 198 aa, Amycolatopsis regifaucium
  REGION 1..198: note = tr|A0A154MPF4|A0A154MPF4_9PSEU GTP cyclohydrolase 1; OS = Amycolatopsis regifaucium OX=546365 GN=folE PE=3 SV=1
MSTPALRVVHEPGPGPDLAAAEAAAADLLTALGISLDSESLRGTPGRMARAYAELFTPRSFDLTTFPNDEGYDELVLARGIPVRSVCEHHLLPFVGVAHVGYLPGERILGLSKLARIVEHFACRPQVQERLTKQVADWLDQQLDPRGVGVVIEAEHSCMTLRGVQATGSSTVTSTLLGTLREDARSRQEFFALTRING

SEQ ID NO: 4530 - protein, 215 aa, unidentified
  source 1..215: note = Amycolatopsis rhizosphaerae
  REGION 1..215: note = tr|A0A558AQ84|A0A558AQ84_9PSEU GTP cyclohydrolase 1; OS = Amycolatopsis rhizosphaerae OX=2053003 GN=folE PE=3 SV=1
MRAADVPSPTSRTVNIDSELTREPGPVFDQARAEKAVRELLLAVGEDPDRDGLRDTPARVARAYQEMFAGLYEDPDKVLDRTFDESHEELVLVTDIPLYSMCEHHLAPFHGVAHVGYIPNAHGKVTGLSKLARLVDLYAKRPQVQERLTSQVADALNRKLEPRGVIVVIEAEHLCMSMRGIRKAGARTTTSAVRGVLQTQASTRAEALELIKGRR

SEQ ID NO: 4531 - protein, 198 aa, unidentified
  source 1..198: note = Amycolatopsis rhizosphaerae
  REGION 1..198: note = tr|A0A558A4A0|A0A558A4A0_9PSEU GTP cyclohydrolase 1; OS = Amycolatopsis rhizosphaerae OX=2053003 GN=folE PE=3 SV=1
MSLNTALPVVPAPAEIDLTAAEEAAGHFLRALGVDTEGESLRDTPRRMAKAYADLFTPRPFDLTTFPNDEGYDELVLARSIPLRSVCEHHLLPFTGIAHVGYLPGERILGLSKLARVTEHFARRPQVQERLTKQIADWLDQRLSPKGVGVVIEAEHTCMTLRGVQAAGSTTVTSTLLGTLRSDARSRQEFFALTGVQR

SEQ ID NO: 4532 - protein, 201 aa, Amycolatopsis rifamycinica
  REGION 1..201: note = tr|A0A066TYK5|A0A066TYK5_9PSEU GTP cyclohydrolase 1; OS = Amycolatopsis rifamycinica OX=287986 GN=folE PE=3 SV=1
MDLKSPSDADRPVFDHDRAEKAIRELLLACGEDPERDGLKETPARVARAYREMFAGLYTEPDSVLDKTFDESHEELVLVTDIPMFSQCEHHLVPFHGVAHVGYIPNAHGKVTGLSKLARLVDLYAKRPQVQERLTSQVADALVRKLEPRGVIVVIEAEHLCMAMRGIRKPGARTTTSAVRGQLKTSPSSRAEALDLIKARR

SEQ ID NO: 4533 - protein, 206 aa, Amycolatopsis rifamycinica
  REGION 1..206: note = tr|A0A066U5G1|A0A066U5G1_9PSEU GTP cyclohydrolase 1; OS = Amycolatopsis rifamycinica OX=287986 GN=folE PE=3 SV=1
MTAEPLSAPVPLRHLGVVHNRDTVDLRAAERAVADLLRALGKDPSSEHLGDTPRRVAHAYAEMLQPRDFQLTTFPNDEGYDELVLAKSIPVQSLCEHHLLPFRGVAHVGYLPGERILGLSKLARVVEMFARDLQVQERLTKQVADWLQEHLAPKGVGVVIEAEHLCMSLRGVRANGAQTVTSSLHGMLREEPKTRQEFFALTGVLA

SEQ ID NO: 4534 - protein, 204 aa, Amycolatopsis rubida
  REGION 1..204: note = tr|A0A1I5GCH0|A0A1I5GCH0_9PSEU GTP cyclohydrolase 1; OS = Amycolatopsis rubida OX=112413 GN=folE PE=3 SV=1
MTSTDQTSSKDGIRPVFDQDRAERAVRELLLACGEDPDRDGLQDTPARVARAYREMFAGLYTDPDEVLARTFDESHEELVLVTDIPMYSTCEHHLLAFHGVAHVGYIPNGEGKVTGLSKIARLVDLYARRPQVQERLTSQIADALVRRLEPRGVIVVVEAEHLCMSVRGIRKPGSRTTTSAVRGMLRSSATSRAEAIELIRGRR

SEQ ID NO: 4535 - protein, 200 aa, Amycolatopsis rubida
  REGION 1..200: note = tr|A0A1I5R209|A0A1I5R209_9PSEU GTP cyclohydrolase 1; OS = Amycolatopsis rubida OX=112413 GN=folE PE=3 SV=1
MQSSGTALRVVHEPVPGFDLAAAEHAAGDFLRALGISLDSESLRGTPGRMARAYAELFTPRAFDLTTFPNDEGYDELVLARGIPVRSVCEHHLLPFIGVAHVGYLPGERILGLSKLARVVEHFACRPQVQERLTKQIAGWLGDQLSPKGVGVVIEAEHTCMTLRGVRATGSSTVTSTLMGTLREDARSRQEFFSLTGVNA

SEQ ID NO: 4536 - protein, 199 aa, Amycolatopsis saalfeldensis
  REGION 1..199: note = tr|A0A1H8X525|A0A1H8X525_9PSEU GTP cyclohydrolase 1; OS = Amycolatopsis saalfeldensis OX=394193 GN=folE PE=3 SV=1
MRSGSALHVVHEPDHGIDLAAAERAAGDFLRALGVSIESESLRGTPERMARAYAEMFTPRPFDLTTFPNDEGYDELVLARDIPVRSVCEHHLLPFTGVAHVGYLPGERILGLSKLARVVEHFACRPQVQERLTKQVAGWLSDQLGPKGVGVVIEAEHSCMTLRGVQAIGSTTVTSALLGTLREDARSRSEFFALTGVNK

SEQ ID NO: 4537 - protein, 205 aa, Amycolatopsis saalfeldensis
  REGION 1..205: note = tr|A0A1H8WAJ5|A0A1H8WAJ5_9PSEU GTP cyclohydrolase 1; OS = Amycolatopsis saalfeldensis OX=394193 GN=folE PE=3 SV=1
MTWTDQTSSNNGVARPVFDQDRAENAVRELLLACGEDPDRDGLKDTPARVARAYREMFSGLYLDPAEVLDKTFDESHEELVLVTDIPMFSTCEHHLLSFHGVAHVGYIPNANGKVTGLSKLARLVDLYAKRPQVQERLTSQVADALVRKLEPRGVIVVMEAEHLCMSMRGIRKPGARTTTSAVRGLLRTSASSRAEAIELIKGRR

SEQ ID NO: 4538 - protein, 189 aa, Amycolatopsis sacchari
  REGION 1..189: note = tr|A0A1I4C9D7|A0A1I4C9D7_9PSEU GTP cyclohydrolase 1; OS = Amycolatopsis sacchari OX=115433 GN=folE PE=3 SV=1
MFDQARAEKAVRELLLAVGEDPDRDGLRDTPARVARAYQEMFAGLYTDPDSVLDRTFDESHEEMVLVTDIPIYSTCEHHLVPFHGVAHVGYIPNGQGKVTGLSKLARLVDLYAKRPQVQERLTSQVADALERKLKPRGVIVVIEAEHLCMSMRGIRKAGARTTTSAVRGLLQSSASTRAEALELIKGRR

SEQ ID NO: 4539 - protein, 207 aa, Amycolatopsis sacchari
  REGION 1..207: note = tr|A0A1I4CZF0|A0A1I4CZF0_9PSEU GTP cyclohydrolase 1; OS = Amycolatopsis sacchari OX=115433 GN=folE PE=3 SV=1
MTVEELPTAAVTTRHLSVVHDRETVDLPAARRAIADLLVALGKDPASEHLADTPRRVANAYAELLNPREFQLTTFPNDEGYDELVLAKRIPFSSLCEHHMLPFHGFAHVGYLPGERILGLSKLARVVELFARDLQVQERLTKQVADWLQEHLAPRGVGVVIEAEHLCMSLRGVQATGSRTVTSALHGLLREDRGTRQEFFALTGIQA

SEQ ID NO: 4540 - protein, 204 aa, Amycolatopsis sp.; identical to SEQ ID NO: 4534
  REGION 1..204: note = tr|A0A178XC40|A0A178XC40_9PSEU GTP cyclohydrolase 1; OS = Amycolatopsis sp. M39 OX=1825094 GN=folE_1 PE=3 SV=1

SEQ ID NO: 4541 - protein, 200 aa, Amycolatopsis sp.
  REGION 1..200: note = tr|A0A4Q7J771|A0A4Q7J771_9PSEU GTP cyclohydrolase 1; OS = Amycolatopsis sp. 8-3EHSu OX=2510978 GN=folE PE=3 SV=1
MASSTARYGEPVFDQDRAEKAVRELLLACGEDPDRDGLQETPARVARAYREMFAGLYDDPDHVLDRTFDESHEELVLVTDIPMYSTCEHHLVPFHGVAHVGYIPNAHGKVTGLSKLARLVDLYAKRPQVQERLTSQIADALDRKLSPRGVIVVVEAEHLCMAMRGIRKPGARTTTSAVRGLLKTSASSRAEALDLIKGRR

SEQ ID NO: 4542 - protein, 197 aa, Amycolatopsis sulphurea
  REGION 1..197: note = tr|A0A2A9F5P7|A0A2A9F5P7_9PSEU GTP cyclohydrolase 1; OS = Amycolatopsis sulphurea OX=76022 GN=folE PE=3 SV=1
MSSALRVVHEPDPGLDLVAAEKAAGDFLRALGIQLDSESLQGTPGRMARAYAELFTPRSFDLTTFPNDEGYDELVLARSIPVRSVCEHHLLPFTGVAHVGYLPGERILGLSKLARVVEHFACRPQVQERLTKQVAGWLSDQLSPQGVGVVIEAEHTCMTLRGVQATGSSTVTSALLGTLRRDARSRQEFFALAGVNS

SEQ ID NO: 4543 - protein, 198 aa, Amycolatopsis thailandensis
  REGION 1..198: note = tr|A0A229S373|A0A229S373_9PSEU GTP cyclohydrolase 1; OS = Amycolatopsis thailandensis OX=589330 GN=folE PE=3 SV=1
MSTPALRVVHETGPGPDLEAAEAAAANLLTALGISLDSESLRGTPGRMARAYAELFTPRSFDLTTFPNDEGYDELVLARGIPVRSVCEHHLLPFVGVAHVGYLPGERILGLSKLARIVEHFACRPQVQERLTKQVADWLDEQLQPRGVGVVIEAEHSCMTLRGVQAVGSSTVTSTLLGTLREDARSRQEFFALTGING

SEQ ID NO: 4544 - protein, 206 aa, Amycolatopsis tolypomycina
  REGION 1..206: note = tr|A0A1H4WEP8|A0A1H4WEP8_9PSEU GTP cyclohydrolase 1; OS = Amycolatopsis tolypomycina OX=208445 GN=folE PE=3 SV=1
MTVEPVSAPIPLRHLGVVPDRDAVDLHAAERAVADLLRALGKDPSSEHLDDTPRRVAHAYAEMLRPRDFQLTTFPNDEGYDELVLAKSIPVQSLCEHHLLPFRGVAHVGYLPGERILGLSKLARVVEMFARDLQVQERLTKQVADWLQEHLAPKGVGVVIEAEHLCMSLRGVRASGALTVTSSLHGLLREEPKTRQEFFALSGVSG

SEQ ID NO: 4545 - protein, 204 aa, Amycolatopsis tolypomycina
  REGION 1..204: note = tr|A0A1H5DEL2|A0A1H5DEL2_9PSEU GTP cyclohydrolase 1; OS = Amycolatopsis tolypomycina OX=208445 GN=folE PE=3 SV=1
MTWMDQRSPSDADRPVFDHDRAEKAIRELLLACGEDPERDGLRETPARVARAYREMFAGLYTEPDSVLDKTFDESHEELVLVTDIPMFSSCEHHLVPFHGVAHVGYIPNAAGKVTGLSKLARVVDLYAKRPQVQERLTSQVADAIVRKLEPRGVIVVIEAEHLCMAMRGIRKPGARTTTSAVRGVLKTSPSSRAEALDLIKARR

SEQ ID NO: 4546 - protein, 201 aa, Amycolatopsis vancoresmycina
  REGION 1..201: note = tr|R1H1U6|R1H1U6_9PSEU GTP cyclohydrolase 1; OS = Amycolatopsis vancoresmycina DSM 44592 OX=1292037; GN = folE PE=3 SV=1
MDQTSPSDADRPVFDHDRAEKAIRELLLACGEDPERDGLKDTPARVARAYREMFSGLYTEPDSVLDKTFDESHEELVLVTDIPMYSSCEHHLVPFHGVAHVGYIPNAAGKVTGLSKLARVVDLYAKRPQVQERLTSQVADAIVRKLEPRGVIVVIEAEHLCMAMRGIRKPGARTTTSAVRGQFKNSATSRAEALDLIKARR

SEQ ID NO: 4547 - protein, 199 aa, Amycolatopsis xylanica
  REGION 1..199: note = tr|A0A1H3EY95|A0A1H3EY95_9PSEU GTP cyclohydrolase 1; OS = Amycolatopsis xylanica OX=589385 GN=folE PE=3 SV=1
MHASSALRVVHEPDTGVDLAAAEVAAAAFLQALGISTESESLQGTPRRMAKAYAELFTPRPFDLTTFPNEEGYDELVLARAIPVRSVCEHHLLPFVGVAHVGYLPGERILGLSKLARVVEHFACRPQVQERLTKQVADWLNDQLSPKGVGVVIEAEHNCMTLRGVQAVGSSTVTSTLLGSLRSDSRSRQEFFALTGVNA

SEQ ID NO: 4548 - protein, 208 aa, Amycolatopsis xylanica
  REGION 1..208: note = tr|A0A1H3PC00|A0A1H3PC00_9PSEU GTP cyclohydrolase 1; OS = Amycolatopsis xylanica OX=589385 GN=folE PE=3 SV=1
MTLTMPNTALEDPWHENALAEAAGHARAMFEALGIDCETTSTARTPHRFVKALAELTSGLRQDPARHLRVQFPAESASQGIIAAVDVPFVAVCEHHVLPFLGRATVAYRPSPGGRIVGLSKLARVLQGYAARPQVQERLGEQVVEALTTELSSDAAACLIRSEHACLTLRGAEAHGAVMVTTHLTGEFTTDPCLRAQVLALAPAHARR

SEQ ID NO: 4549 - protein, 376 aa, unidentified
  source 1..376: note = Amylibacter cionae
  REGION 1..376: note = tr|A0A2N5IJU6|A0A2N5IJU6_9RHOB GTP cyclohydrolase FolE2 OS=Amylibacter cionae OX=2035344 GN=folE2 PE=3 SV=1
MNVHDPAIETETLSEDKRKAPTEQDAREALAVLRRWASGNEVTAFANLAPAEAAGALARGVGDAYPALSTVYPENLVADKAYIAGLPDLQNGPASLIKGAKTAIQHVGISNFRLPLRYLTRDKGEMVLETSVTGTVSLEENKKGINMSRIMRSFYAHAESVFSFDVIDAALGDYVSDLDSLDARIQMRLSFPMKKQSLRSGLEGYQYYDIALESTYRNGTKTRILHLDYVYSSTCPCSLELSEHARRTRGQLATPHSQRSVARISAEVLPGDVLWFEDVVALCNSAVPTETQVMVKREDEQAFAEMNAANPIFVEDAVRLFYRALAEDARIGDFRVVASHQESLHSHDAISVLCRGEMFESSTLDPRMFETLIHRG

SEQ ID NO: 4550 - protein, 206 aa, unidentified
  source 1..206: note = Amylibacter kogurei
  REGION 1..206: note = tr|A0A2G5K668|A0A2G5K668_9RHOB GTP cyclohydrolase 1; OS = Amylibacter kogurei OX=1889778 GN=folE PE=3 SV=1
MNLPDPLKNQTGELVVEKPTKEQAEDAVRTLLRWAGDNPEREGLLDTPSRVVKAYGEWFRGYEEDPIDMLKRTFSEVEGYDEMVLLKDIRFESYCEHHMAPIIGVAHVAYIPTARVVGISKLARVVDAFAKRLQVQEKMTSQIANAIETALRPHGVAVVLEGEHHCMCTRGVNKNGVTMMTSAMRGAFKTDRNQRREFMAAIGKSA

SEQ ID NO: 4551 - protein, 216 aa, Anabaena cylindrica
  REGION 1..216: note = tr|K9ZP17|K9ZP17_ANACC GTP cyclohydrolase 1; OS = Anabaena cylindrica (strain ATCC 27899 / PCC 7122); OX = 272123 GN=folE PE=3 SV=1
MTLSIRPDLNSAAQVVSSLSTQQQPIVTEAEMMQAVRTLLIGLGENPDREGLKDTPKRVVKALQFLTKGYNESLDELLNGAVFTEDADEMVLVRDIDIFSSCEHHILPVIGRAHVAYIPDGKVIGLSKIARICEMYARRLQVQERLTLQIADALQGLLKPKGVAVVIEATHMCMVMRGVQKPGSWTVTSAMRGVFSEDARTREEFMNLIRHNPNFH

SEQ ID NO: 4552 - protein, 235 aa, Anabaena cylindrica
  REGION 1..235: note = tr|K9ZHY6|K9ZHY6_ANACC GTP cyclohydrolase 1; OS = Anabaena cylindrica (strain ATCC 27899 / PCC 7122); OX = 272123 GN=folE PE=3 SV=1
MTIVSSNGSNSSTSPLIPDLEEAINPRPDRNTHDGRQPDLHPPTEEHMDQMMDAVRAILVGVGEDPEREGLLKTPKRVAEAMQFLTSGYNQSLEKLVNDAIFDEGHDEMVLVRDINFFSLCEHHMLPFMGRAHVAYIPNQKVVGLSKLARIVEMYSRRLQVQERLTRQIAEAIQTILEPKGVAVVMEASHMCMVMRGVQKPGAWTVTSSMVGIFQEEQKTREEFFNLIRHQASFF

SEQ ID NO: 4553 - protein, 216 aa, Anabaena sp.
  REGION 1..216: note = tr|A0A1B7VUQ2|A0A1B7VUQ2_9NOST GTP cyclohydrolase 1; OS = Anabaena sp. WA113 OX=1710889 GN=folE PE=3 SV=1
MTLSIRPELTSAADIISSLSNQQQPTVTEADMMQAVRTLLIGLGENPDREGLKDTPKRVVKALKFLTSGYDQSIDELLNGAVFTEDANEMVLVRDIDLFSSCEHHILPIIGRAHIAYIPNGKVIGLSKIARICEMYARRLQVQERLTLQIANALQGLLKPQGVAVVIEATHMCMVMRGVQKPGSWTVTSAMRGVFSEDARTREEFMNLIRHSANFK

SEQ ID NO: 4554 - protein, 216 aa, Anabaena sp.
  REGION 1..216: note = tr|A0A1W5CHL1|A0A1W5CHL1_9NOST GTP cyclohydrolase 1; OS = Anabaena sp. 39858 OX=1710890 GN=folE PE=3 SV=1
MTLSIRPDTVSAAQMVSSLSTQQTPTVTEAEMVQAVRTLLIGLGENPDREGLLDTPKRVVKALQFLTKGYNESLDELLNGAVFTEDANEMVLIRDIDIFSSCEHHILPIIGRAHVAYIPNGKVIGLSKIARVCEMYARRLQVQERLTLQIADALQGLLKPQGVAVVVEATHMCMVMRGVQKPGSWTVTSAMRGVFAEDARTREEFMNLVRHNANFH

SEQ ID NO: 4555 - protein, 235 aa, Anabaenopsis circularis
  REGION 1..235: note = tr|A0A1Z4GM47|A0A1Z4GM47_9CYAN GTP cyclohydrolase 1; OS = Anabaenopsis circularis NIES-21 OX=1085406 GN=folE PE=3; SV = 1
MTIASSNGSNRFQSPLISDLAEAINTRPDRNTHDGRLPDLQPPSEENMEQMMDAVRNIIVGVGEDPEREGLLKTPKRVAEAMRYLTSGYNQSLEELVNGAIFDEGHNEMVLVRDINFFSLCEHHMLPFMGRAHVAYIPNQKVVGLSKLARIVEMYSRRLQVQERLTRQIAEAIQTILEPQGVAVVMEATHMCMVMRGVQKPGSWTVTSAMLGVFHDEQKTREEFFNLIRHQPSFF

SEQ ID NO: 4556 - protein, 302 aa, Anaerobacillus alkalilacustris
  REGION 1..302: note = tr|A0A1S2LMR5|A0A1S2LMR5_9BACI GTP cyclohydrolase FolE2 OS=Anaerobacillus alkalilacustris OX=393763 GN=folE2; PE = 3 SV=1
MHKTFDLPSKKERHKRFGSVPPIKGTKPKNKDEMKDLQNTPNDFLFSINSVGISNVKHPVILHSDLLPSVQTTIGTFSLTTSLTQMSKGINMSRLTELLQKYHEEEGFVLSFEQLRRFTKELAVIMNQTAASIEVTFPWFFERKSPALAKVGLMHADAKISVTYDQETKQFTYVTGLTAAVTTLCPCSKEISEYSAHNQRGYVRIETELYSDSIGEKDWKKILLEAAESNASASLHPVLKRPDEKMVTEKAYENPRFVEDMVRLVAADLYENNDIRAFTVECRNEESIHVHDAVATIKFEKE

SEQ ID NO: 4557 - protein, 189 aa, Anaerobacillus alkalilacustris
  REGION 1..189: note = tr|A0A1S2LRI8|A0A1S2LRI8_9BACI GTP cyclohydrolase 1; OS = Anaerobacillus alkalilacustris OX=393763 GN=folE PE=3; SV = 1
MKKFDHQKIEQAVTMILEAIGEDPTREGLLDTPKRVAKMYEEVFQGLNQDPKEHFATVFSEDHEELVLVKDIPFYSMCEHHLVPFFGKAHVGYIPKGGKVTGLSKLARAVEAVAKRPQLQERITSTIADSMVETLQPLGVIVVVEAEHMCMTMRGVKKPGSSTVTSAVRGAFATNAAARAEVLSLINAK

SEQ ID NO: 4558 - protein, 189 aa, Anaerobacillus arseniciselenatis
  REGION 1..189: note = tr|A0A1S2LTI7|A0A1S2LTI7_9BACI GTP cyclohydrolase 1; OS = Anaerobacillus arseniciselenatis OX=85682 GN=folE PE=3; SV = 1
MSNFDHKKIEQAVTMILEAIGEDPNREGLLDTPKRVAKMYEEVFQGLNQDPKEHFATVFSEEHEELVLVKDIPFYSMCEHHLVPFFGKAHVGYIPKGGKVTGLSKLARAVEAVAKRPQLQERITSTIADSMVETLQPLGVIVVVEAEHMCMTMRGVKKPGSSTVTSAVRGAFENNSTARAEVLSLINCK

SEQ ID NO: 4559 - protein, 301 aa, unidentified
  source 1..301: note = Anaerobacillus isosaccharinicus
  REGION 1..301: note = tr|A0A1S2MCS2|A0A1S2MCS2_9BACI GTP cyclohydrolase FolE2 OS=Anaerobacillus isosaccharinicus OX=1532552; GN = folE2 PE=3 SV=1
MIKTIGLPSKAERHKRFGSVPPIIGTKPTDKEKMPDLQNTPNDFLFAINSVGISNVKHPVIVHSELEPKVQTTIATFALTTSLNQMSKGINMSRLTELLQQYHEEGFVLSFEQLRSFTKELAEKMEQTSATIEVTFPWFFERKSPALKKIGLMHADAKISVTYNQDTDQCTYETGLTAAITTLCPCSKEISEYSAHNQRGYVSIDTTLYSDSINEIDWKAFLLEAAESNASAQLHPVLKRPDEKMVTEKAYENPRFVEDMVRLVAADLYENPLIKAFSVECRNEESIHVHDAIASITFTKE

SEQ ID NO: 4560 - protein, 190 aa, unidentified
  source 1..190: note = Anaerobacillus isosaccharinicus
  REGION 1..190: note = tr|A0A1S2KVQ4|A0A1S2KVQ4_9BACI GTP cyclohydrolase 1; OS = Anaerobacillus isosaccharinicus OX=1532552 GN=folE PE=3; SV = 1
MNNFDHKKIEQAIVMILEAIGEDPTREGLLDTPKRVAKMYEEVFQGLNQDPKEHFATVFSEDHEELVLVKDIPFYSMCEHHLVPFFGKAHVGYIPKGGKVTGLSKLARAVEAVAKRPQLQERITSTIADAMVETLQPLGVIVVVEAEHMCMTMRGVKKPGSSTITSAVRGAFANNPAARAEVLSLINTRR

SEQ ID NO: 4561 - protein, 188 aa, unidentified
  source 1..188: note = Anaerobacillus macyae
  REGION 1..188: note = tr|A0A0J6CYD6|A0A0J6CYD6_9BACI GTP cyclohydrolase 1; OS = Anaerobacillus macyae OX=157733 GN=folE PE=3 SV=1
MYEVNHDKIEEAVKMILEAIGEDPEREGLLDTPKRVARMYQEIFQGLHQDPKEHFQTIFGEDHEELVLVKDIPFYSTCEHHLVPFFGKAHVAYIPKGGKVTGLSKLARAVESVTKRPQLQERITSTIANSMVETLDPHGVMVVVEAEHMCMTMRGVKKPGSSTVTSAVRGVFEHDTAARSEVLGLIKG

SEQ ID NO: 4562 - protein, 226 aa, unidentified
  source 1..226: note = Anaerobacterium chartisolvens
  REGION 1..226: note = tr|A0A369B071|A0A369B071_9FIRM GTP cyclohydrolase 1; OS = Anaerobacterium chartisolvens OX=1297424 GN=folE PE=3; SV = 1
MTNGFCARKIVYMIFIDLIEKRVHLIFKKACSGDRRVSFVVDKDRIKAAVREILEAIGEDPDREGLVETPDRVARMYEEIFAGLHMDPRDVVKVFKEENHEEMVMVKDIPLYSICEHHLLPFVGSASVVYLPRKGKVMGLSKLARIVDIVAKKPQLQERLSSQVADIIMEAIDPLGVAVVIEAEHLCMTMRGIKKPGAKTVTSALRGVIKTDSKTRAEVMSLIKGI

SEQ ID NO: 4563 - protein, 216 aa, Anaerobiospirillum thomasii
  REGION 1..216: note = tr|A0A2X0VB06|A0A2X0VB06_9GAMM GTP cyclohydrolase 1; OS = Anaerobiospirillum thomasii OX=179995 GN=folE PE=3 SV=1
MTDKLTAEALLVKNALEACGLETPWHDNGLSPQQKREIIASHMQKIMETLGLDLSDDSLIKTPERVGKMFVNEIFSGLDYRNFPEITLIENKMHFDEMIKVKDITLTSTCEHHFVVIDGVAKVAYMPKDKIIGLSKINRIVQFFGHRPQVQERMTQQILVALQTLLDTQNVAVSISATHYCVKARGVRDPSSLTTTTALGGHFKHNSKSRHEFLTD

SEQ ID NO: 4564 - protein, 191 aa, unidentified
  source 1..191: note = Anaerobium acetethylicum
  REGION 1..191: note = tr|A0A1D3TNA0|A0A1D3TNA0_9FIRM GTP cyclohydrolase 1; OS = Anaerobium acetethylicum OX=1619234 GN=folE PE=3 SV=1
MAIDSAAIKEHIRGLLIALGDDPDREGLKDTPERVAAMYQEVFEGMNYSNHEIAEMFDKTFEDELDFDDDSKDIVVVKDIEIFSYCEHHMALMFDMKVNVAYIPNGRVIGLSKIARVADMVSKRLQLQERIGTDIAEIMQEITGSEDVAVTIEGSHSCMSARGIKKAGAKTYSTTLRGRFKTDPNLQFYLR

SEQ ID NO: 4565 - protein, 196 aa, unidentified
  source 1..196: note = Anaerobutyricum hallii
  REGION 1..196: note = tr|C0ERV3|C0ERV3_9FIRM GTP cyclohydrolase 1; OS = Anaerobutyricum hallii DSM 3353 OX=411469 GN=folE PE=3; SV = 1
MAIDKDAIREHVRGILAALGDDPDREGLKETPDRVARMYEEVFEGMNYTNHEIAMMFNKSFKDDLCVGSDKKDIVLVRDIPIFSYCEHHIALMYDMSVSVAYIPKEKVLGLSKIARICDMASKRLQLQERIGSDIAEIMCEAAETDDVAVIIHGTHSCMSARGIKKEAASTVTTTFRGRFETDATIQSQLAMMLHA

SEQ ID NO: 4566 - protein, 196 aa, unidentified
  source 1..196: note = Anaerobutyricum hallii
  REGION 1..196: note = tr|A0A174IXG8|A0A174IXG8_9FIRM GTP cyclohydrolase 1; OS = Anaerobutyricum hallii OX=39488 GN=folE PE=3 SV=1
MAIDKDAIREHVRGILAALGDDPDREGLKETPDRVARMYEEVFEGMNYTNHEIAMMFNKSFKDDLCVGSDKKDIVLVRDIPIFSYCEHHIALMYDMSVSVAYIPKEKVLGLSKIARICDMASKRLQLQERIGSDIAEIMCEAAETDDVAVIIHGTHSCMSARGIKKEAASTVTTTFRGRFETDAAIQSQLTMMLHA

SEQ ID NO: 4567 - protein, 184 aa, unidentified
  source 1..184: note = Anaerococcus nagyae
  REGION 1..184: note = tr|A0A3E2TGT7|A0A3E2TGT7_9FIRM GTP cyclohydrolase 1; OS = Anaerococcus nagyae OX=1755241 GN=folE PE=3 SV=1
MNEKKIEEAVKMILEAIGEDPSREGLVETPERVARMYKEIFSGIGSSAEDILSKTFSHNGEDTVVVKDIPFYSMCEHHLVPFFGKAHVAYIPNGKVAGLSKIARTVDHYAKKPQLQERLTLEVCEDIMKYLDAKGALVVIEAEHLCMNMRGIKKPGSSTVTSAARGDLEDEKLKNEAYLLMGLK

SEQ ID NO: 4568 - protein, 183 aa, unidentified
  source 1..183: note = Anaerocolumna aminovalerica
  REGION 1..183: note = tr|A0A1I5GGT6|A0A1I5GGT6_9FIRM GTP cyclohydrolase 1; OS = Anaerocolumna aminovalerica OX=1527 GN=folE PE=3 SV=1
MDQKKIEEGVKLLLEGIGEDVKREGLLETPRRVAKMCEEIFGGLKTDAEEYLVKTFTATNNEIIVEKEIPFYSMCEHHLLPFYGKAHIGYIPDGKVVGLSKLARTVEVYGKRPQIQEQMTAQIADDIMKYLNPKGVIVVLEAEHMCMTMRGVRKPGTLTTTLVTRGAFEQNQELKNTFFQLIK

SEQ ID NO: 4569 - protein, 200 aa, unidentified
  source 1..200: note = Anaerocolumna jejuensis
  REGION 1..200: note = tr|A0A1M7D7E7|A0A1M7D7E7_9FIRM GTP cyclohydrolase 1; OS = Anaerocolumna jejuensis DSM 15929 OX=1121322 GN=folE; PE = 3 SV=1
MAIDKAKIEEHIRGLLLALGENPAREGLLETPARVARMCEERFEGINYTNDEIAGMFNKSFEDGLYQPENSQDIVMVRDIDIFSCCEHHLALMYDMKVTVAYIPNGKIVGLSKIARIADMVSKRLQLQERIGSDIAEILQKAAQTEDVAVIIEGRHACMTARGIKSTNAVTMTTTSRGRFNTDRSIADKLTTLYHKNLSL

SEQ ID NO: 4570 - protein, 201 aa, Anaeroglobus geminatus
  REGION 1..201: note = tr|G9YHA7|G9YHA7_9FIRM GTP cyclohydrolase 1; OS = Anaeroglobus geminatus F0357 OX=861450; GN = HMPREF0080_01034 PE=3 SV=1
MAERRKTDRAAAAAGIKQFLEAFGIDLTTERMEGTPDKVAAAFSIFFSGLEEDGLSFWGDSIETKTGGLVAVRRLTYYSICEHHLLPFFGTVSIAYLPKDGRIAGFGRFAEAVRIFSRRPQLQERMTEQICESVQRGLGALGVVVVVTGRHLCLTMRNTLSDRTDIVTVAATGALAEGTILYERALKILEADKRDRKTDNL

SEQ ID NO: 4571 - protein, 210 aa, Anaerolinea sp.
  REGION 1..210: note = tr|A0A1W9PSW7|A0A1W9PSW7_9CHLR GTP cyclohydrolase 1; OS = Anaerolinea sp. 4484_236 OX=1968532 GN=folE PE=3 SV=1
MEKNKKIINDVANLFKQDMDLGKITQAIEEILTAIGEDPNREGLQKTPERVARAYAELLAGYRTDPIELLNEAIFHASYDEMVIVRDIEYYSLCEHHMLPFIGRAHVAYIPDGKIIGLSKIPRIVDMFARRLQIQERMTRQVADLIDELLHPQGVAVVVEGLHMCSMMRGVKKHDARMTTSAMLGAFRNSMPTRQEFLDNISRGSAPLHF

SEQ ID NO: 4572 - protein, 221 aa, Anaerolinea thermolimosa
  REGION 1..221: note = tr|A0A3D1JHF2|A0A3D1JHF2_9CHLR GTP cyclohydrolase 1; OS = Anaerolinea thermolimosa OX=229919 GN=folE PE=3 SV=1
MNGNKNNPRKRILPEVAQAIPEFILAPEPLAVNKPAIEDATRELLLAIGEDPERDGLLKTPERVARMWEELTAGYHTDPEKLINGALFDVDYDEMVLVKDIEYYSLCEHHLLPFFGRAHVAYIPNGRVIGLSKIPRVVEMYARRLQVQERMTAEIAHFLMDTLDARGVAVVVEGSHMCAMMRGVKKPETNMTTSTFLGAFKEDRALRQEFLDQVNRAYHRD

SEQ ID NO: 4573 - protein, 214 aa, Anaerolinea thermophila
  REGION 1..214: note = tr|A0A101FZ66|A0A101FZ66_9CHLR GTP cyclohydrolase 1; OS = Anaerolinea thermophila OX=167964 GN=folE PE=3 SV=1
MTRVECNESELFQFAQLFCDSEVDLKKIEKSVKDILEAIGEDPDREGLQKTPDRVARAYREMLEGYRTDPIKLVNKALFTVEYDDMVIVRDIEFFSMCEHHMLPFLGRAHVAYLPKDKVIGLSKIPRIVDMFSRRLQVQERMTRQIADFLNILLNPRGVAVVVEAVHMCAMVRGVRKHDARMTTSSMLGAFRTRDATRMEFLDNISRGARPLEF

SEQ ID NO: 4574 - protein, 209 aa, unidentified
  source 1..209: note = Anaerolineaceae bacterium
  REGION 1..209: note = tr|A0A1W9V7J3|A0A1W9V7J3_9CHLR GTP cyclohydrolase 1; OS = Anaerolineaceae bacterium 4572_5.1 OX=1971724 GN=folE; PE = 3 SV=1
MQKNNEIIDRVAGLIEEDMDIEKITKAAADMLEAIGEDPEREGLKRTPKRVALAYQELLAGYRTDPIELLNDAIFHVSYDEMVIVRDIEYYSLCEHHMLPFIGRAHVAYLPNGKVIGLSKIPRIVDMFARRLQVQERMTRQIADLINELLHPQGVAVVVEGMHLCSVMRGVKKHDARMTTSAMLGAFRSMPTRQEFLNNISRGAMPLHF

SEQ ID NO: 4575 - protein, 212 aa, unidentified
  source 1..212: note = Anaerolineaceae bacterium
  REGION 1..212: note = tr|A0A101ILG7|A0A101ILG7_9CHLR GTP cyclohydrolase 1; OS = Anaerolineaceae bacterium 46_22 OX=1635294 GN=folE PE=3; SV = 1
MVDDCYDPLAQAADLFCEEAMDVDTIESSIAKILEAIGEDKDREGLLRTPHRVAKSYAELLAGYRMDPKALINNAVFDVAYDAMVIVRDIEFSSMCEHHMLPFIGRAHVAYIPSDKVIGLSKIPRIVDLFSKRLQVQERMTTQIAEFINVVLQPQGVAVVVEGLHMCMMLRGVKKQDARMTTSAMLGAFRDDYSTRMEFLDNISRGANSLHI

SEQ ID NO: 4576 - protein, 225 aa, unidentified
  source 1..225: note = Anaerolineae bacterium
  REGION 1..225: note = tr|A0A3D4J9D0|A0A3D4J9D0_9CHLR GTP cyclohydrolase 1; OS = Anaerolineae bacterium OX=2052143 GN=folE PE=3 SV=1
MSFLFPDDKINHLEKNMPNPEINDDVELTTNSDIDMPKIEDAVRRMLVAFGEDPNREGLLNTPKRVARMYPELLSGYKTDTEKLLNKAIFNVTYDDMVIVRDIEYFSMCEHHMLPFMGRAHVAYIPNGQVIGLSKIPRIVDMFARRLQVQEQMTRQIADFIMELLKPQGVAVVVEGLHLCAMMRGVKKHDARMTTSTMLGTFRTRVATRQEFLNHLDRGADPLRI

SEQ ID NO: 4577 - protein, 211 aa, unidentified
  source 1..211: note = Anaerolineae bacterium
  REGION 1..211: note = tr|A0A2M7KWM1|A0A2M7KWM1_9CHLR GTP cyclohydrolase 1; OS = Anaerolineae bacterium CG_4_8_14_3_um_filter_59_70; OX = 1973902 GN=folE PE=3 SV=1
MEHIDFDDNITEETLRSSKIDSQAVQDAVLQLLTAFGENPQRAGLKRTPQRVARMYAELLAGYAVDPLILVNGALFEVKYDEMVIVRDIEFYSMCEHHLLPFMGRVHVAYIPDGKVLGLSKIPRIVDMFARRLQVQERMTRQIADLIRDLLKPQGVAVVVEALHLCTMMRGVQKHNARMTTSAMHGAFRSNLATRQEFLDNISRGASPLQI

SEQ ID NO: 4578 - protein, 201 aa, unidentified
  source 1..201: note = Anaerolineales bacterium
  REGION 1..201: note = tr|A0A524AC18|A0A524AC18_9CHLR GTP cyclohydrolase 1; OS = Anaerolineales bacterium OX=2073117 GN=folE PE=3 SV=1
MKPELDTEFRIDRERIRKAVLEILLAIGEDPEREGLVGTPGRVADMYAELFCGLFQDPREELRVGFDENHREMVILKDIPFYSMCEHHLLPFHGKAHVGYIPMGRVVGISKIARVVEALARRPQLQERLTSQVADCIMEIVKPTGVGVVIEAEHLCMTMRGIRKPGSLVVTSANRGNFRARKATRDEFLSLIGHAMSGTRR

SEQ ID NO: 4579 - protein, 208 aa, unidentified
  source 1..208: note = Anaerolineales bacterium
  REGION 1..208: note = tr|A0A363UCK6|A0A363UCK6_9CHLR GTP cyclohydrolase 1; OS = Anaerolineales bacterium OX=2073117 GN=folE PE=3 SV=1
MEFDDDIDSIESRSTNIDIADAKRTVVELLKALGQDPEREGLKNTPDRVARMYTELLCGYTADPEKIVNGALFDVKYDEMVIVREIEFYSLCEHHMLPFIGRAHVAYIPDGKVLGLSKIPRIVDMYARRLQVQERMTRQIADFLRDLLEPQGVAVVVEAMHLCAMMRGVKKHDARMTTSAMHGAFRANLATRQEFLENIARGSRPLQF

SEQ ID NO: 4580 - protein, 186 aa, unidentified
  source 1..186: note = Anaeromicrobium sediminis
  REGION 1..186: note = tr|A0A267MGP1|A0A267MGP1_9CLOT GTP cyclohydrolase 1; OS = Anaeromicrobium sediminis OX=1478221 GN=folE PE=3 SV=1
MDKEKIKRAVRDILEAIGEDPDREGLQDTPDRIARMYEEIFSGLKEDPKDHLQIFFQEEKHEELVLVKDIPFYSMCEHHLVPFFGKAHVGYLPKGGKLTGLSKLARVVETVGKKPQLQERLTAQVAETIVEMLDPYGVIVVVEAEHMCMTMRGVKKSGSKTITSAVRGLFERDVKARNEAMTLIKF

SEQ ID NO: 4581 - protein, 192 aa, unidentified
  source 1..192: note = Anaeromicrobium sediminis
  REGION 1..192: note = tr|A0A267MB37|A0A267MB37_9CLOT GTP cyclohydrolase 1; OS = Anaeromicrobium sediminis OX=1478221 GN=folE PE=3 SV=1
MNIKKIEEHVRGILEALGADTESEGLRETPLRVAKMYEEVFEGMKYSNDDLAEMYGKTFEENIKSNNSENDMVLMKDIEIFSHCEHHLALMYNMKVSVAYIPKVKIIGLSKIARIADMVGRRLQLQERIGEDIADIIMKITESEDVAVIIEGEHGCMTVRGIKKTGTKTMTTTLKGRFNTDVMLNNRLFRMI

SEQ ID NO: 4582 - protein, 226 aa, Anaeromyxobacter dehalogenans
  REGION 1..226: note = tr|B8J840|B8J840_ANAD2 GTP cyclohydrolase I; OS = Anaeromyxobacter dehalogenans (strain 2CP-1 / ATCC BAA-258) OX=455488 GN=A2cp1_1998 PE=4 SV=1
MAARLRALRPARPRASAPAAAEATARFLDALGLPPEVRASPELAGTPRRVAEAWLEDLVDGYRIEPAEVLADAMPSAGRALVTLTGIDFHSVCPHHLLPSRGVAHVAYLPGGRVVGFGQLVRLVDCLAHRLVLAEDLAQSVADALVEHLGARGAGCVLDAEHLCLTVRGERRARARAHAEGFAGALARSGVARRSFAQAIARADGPRPARRGARRGRVRGAGPRAR

SEQ ID NO: 4583 - protein, 228 aa, Anaeromyxobacter dehalogenans
  REGION 1..228: note = tr|Q2IJA2|Q2IJA2_ANADE GTP cyclohydrolase I; OS = Anaeromyxobacter dehalogenans (strain 2CP-C) OX=290397; GN = Adeh_1965 PE=4 SV=1
MAARLRALRPPRPRASAPATAEATARFLDALGLPPEVRASPELAGTPRRVAEAWLEDLVDGYRAEPAEVLADAMPSAGRALVTLTGIDFHSVCPHHLLPSRGVAHVAYLPGGRVVGFGQLVRLVDCLAHRLVLAEDLAQSVADALVEHLGARGAGCVLDAEHLCLTVRGERRARARAHAEGFAGALARSGVARRSFAQAIARAAGPRPAGAGRAARRGRARGAGTRAR

SEQ ID NO: 4584 - protein, 219 aa, Anaeromyxobacter sp.
  REGION 1..219: note = tr|A7HBJ5|A7HBJ5_ANADF GTP cyclohydrolase I; OS = Anaeromyxobacter sp. (strain Fw109-5) OX=404589; GN = Anae109_1888 PE=4 SV=1
MAVRPLRSARARGSSAAPDAAAAAEAVERFLDALGLPPQVRASPDLQGTHRRVAQAWLEDLVDGYRRDPAEILADAIPSPSRDLVAVTGIAFHSVCPHHLLPSRGVAHVAYLPGGRVVGFGQLVRLVDALAHRLVLQEDLAHGIADALVTHLGARGAACLLDAEQLCMTVRGEKRGAARAHADAWLGALARGASRQRFLDLAGRAGATRRRPGAGRRRR

SEQ ID NO: 4585 - protein, 226 aa, Anaeromyxobacter sp.
  REGION 1..226: note = tr|B4UAP5|B4UAP5_ANASK GTP cyclohydrolase I; OS = Anaeromyxobacter sp. (strain K) OX=447217 GN=AnaeK_1913; PE = 4 SV=1
MAARLRALRPARPRASAPAAAEATARFLDALGLPPEVRASPELAGTPRRVAEAWLEDLVDGYRIEPAEVLADAMPSAGRALVTLTGIDFHSVCPHHLLPSRGVAHVAYLPGGRVVGFGQLVRLVDCLAHRLVLAEDLAQSVADALVTHLGARGAGCVLDAEHLCLTVRGERRARARAHAEGFAGALARSGVARRSFAQAIARADGPRPARRGARGGRARGAGPRAR

SEQ ID NO: 4586 - protein, 186 aa, unidentified
  source 1..186: note = Anaerospora hongkongensis
  REGION 1..186: note = tr|A0A4R1Q7V7|A0A4R1Q7V7_9FIRM GTP cyclohydrolase 1; OS = Anaerospora hongkongensis OX=244830 GN=folE PE=3 SV=1
MVDEQKARQAIALLLEALGDKAAREGLEDTPRRVAQMYAELFSGLEQDAEQELECFSSDEYDGMVLVKDISFYSMCEHHLIPFFGKAHIAYIPQAGRITGLGRLAKVVDIFAHRPQLQERLTAQVADAMENKLKPAGVMVVVEAEHLCMSMRGVLKPGALTTTLAVRGVFADDQAARAEVLALIKR

SEQ ID NO: 4587 - protein, 262 aa, unidentified
  source 1..262: note = Anaerosporomusa subterranea
  REGION 1..262: note = tr|A0A154BSU0|A0A154BSU0_ANASB GTP cyclohydrolase FolE2 OS=Anaerosporomusa subterranea OX=1794912 GN=folE2; PE = 3 SV=1
MKDVQNLNDVRGIAIQKVGVTDVHLPFQIKTKAGALQSVLARIRLTVDLPQEYKGTHMSRFIEALFAWSQKPVSYREMEQLLGDVLQRLHAQRAGIDIHFKYFIEKTAPVTGLKSILDFDCSFAGNLVQGERLEFTLGVAVPFTSLCPCSKEISDCGAHNQRGVMRVKLRQRPGTFTWIEDLVTLLEEQASCPVYPLLKREDEKYVTERAYENPKFVEDVLRDMVLVLRGIRGVSWFEAECETFESIHNHNAYAYHSEDSQP

SEQ ID NO: 4588 - protein, 195 aa, Anaerostipes caccae
  REGION 1..195: note = tr|B0ME51|B0ME51_ANACD GTP cyclohydrolase 1; OS = Anaerostipes caccae (strain DSM 14662 / NCIMB 13811 / L1-92) OX=411490 GN=folE PE=3 SV=1
MAIDKEAVKKHIRGILEALGDDPDREGLKETPDRVARMYEEVFEGMNYSNDQIAEMYSKTFEDDLSVKNHKDMVVVKDIDIFSYCEHHLALMYNMKVTVAYQPKEKILGLSKIARICDMVGKRLQLQERIGSDIAEIISKVAGTEDVAVLIEGNHSCMSARGIKKNQTKTITSTLRGRFESDPAMENRFYMLADR

SEQ ID NO: 4589 - protein, 195 aa, unidentified
  source 1..195: note = Anaerostipes hadrus
  REGION 1..195: note = tr|A0A173RR45|A0A173RR45_ANAHA GTP cyclohydrolase 1; OS = Anaerostipes hadrus OX=649756 GN=folE PE=3 SV=1
MAIDKEAIKEHVRGILVALGDDPNREGLKETPDRVAKMYEEVFEGMNYSNHEIAQMFSKTFEDDLSVKDHKDMVIVKDIDIFSYCEHHMALMYDMKVSVAYLPKDKVLGLSKIARICDMVGKRLQLQERIGSDIAEIIMEVSGSEDVAVYIEGCHSCMSARGIKKHNAKTVTTTLRGAFDTDSTLKWHFMMQAGK

SEQ ID NO: 4590 - protein, 195 aa, unidentified
  source 1..195: note = Anaerostipes hadrus
  REGION 1..195: note = tr|D4MWU2|D4MWU2_ANAHA GTP cyclohydrolase 1; OS = Anaerostipes hadrus OX=649756 GN=folE PE=3 SV=1
MAIDKEAIKEHIRGILVALGDDPNREGLKETPDRVAKMYEEVFEGMNYSNHEIAQMFSKTFEDDLSVKDHKDMVIVKDIDIFSYCEHHMALMYDMKVSVAYLPKDKVLGLSKIARICDMVGKRLQLQERIGSDIAEIIMEVSGSEDVAVYIEGCHSCMSARGIKKQNAKTVTTTLRGAFDTDSTLKWHFMMQAGK

SEQ ID NO: 4591 - protein, 195 aa, unidentified
  source 1..195: note = Anaerostipes rhamnosivorans
  REGION 1..195: note = tr|A0A4P8IBN5|A0A4P8IBN5_9FIRM GTP cyclohydrolase 1; OS = Anaerostipes rhamnosivorans OX=1229621 GN=folE PE=3 SV=1
MAIDKEAIKTHIRGILEALGDDPEREGLVETPDRVARMYEEVFEGMNYTNTQIAEMFSKTFEDDLSVKNHKDMVIVKDIDIFSYCEHHLALMYNMKVTVAYQPKEKILGLSKIARICDMVGKRLQLQERIGSDIAEIISEVAQTEDVAVLIEGNHSCMSARGIKKNQAKTITSTLRGRFESDPFMESRFYTLADR

SEQ ID NO: 4592 - protein, 195 aa, Anaerostipes sp.
  REGION 1..195: note = tr|R6QFP5|R6QFP5_9FIRM GTP cyclohydrolase 1; OS = Anaerostipes sp. CAG:276 OX=1262699 GN=folE PE=3 SV=1
MAIDKEAVKKHIRGILEALGDDPDREGLMETPDRVARMYEEVFEGMNYSNDQIAEMYSKTFEDDLSVKNHKDMVVVKDIDIFSYCEHHLALMYNMKVTVAYQPKEKILGLSKIARICDMVGKRLQLQERIGSDIAEIISKVAGTEDVAVLIEGNHSCMSARGIKKNQAKTITSTLRGRFESDSAMENRFYMLADR

SEQ ID NO: 4593 - protein, 195 aa, Anaerostipes sp.
  REGION 1..195: note = tr|A0A1Q9JQ13|A0A1Q9JQ13_9FIRM GTP cyclohydrolase 1; OS = Anaerostipes sp. 494a OX=1261636 GN=folE PE=3 SV=1
MAIDREAIKEHIKGILIALGDDPEREGLVETPERVAKMYEEVFEGMNYSNHQVAQMFSKTFEDDLTVKDYRDMVIVKDIDIFSYCEHHMALMYDMKVAVAYLPNQKVLGLSKIARICDMVGKRLQLQERIGSDIAEIIMEVAECEDVAVYIEGCHSCMSARGIKKNNAKTVTTTLRGAFEKDDTLKWHFMMQAGK

SEQ ID NO: 4594 - protein, 191 aa, Anaerotruncus sp.
  REGION 1..191: note = tr|A0A3A9J272|A0A3A9J272_9FIRM GTP cyclohydrolase 1; OS = Anaerotruncus sp. 1XD22-93 OX=2320082 GN=folE PE=3 SV=1
MCQKEEAMIDQEKIKKGVRLILEGIGEDADREGLVETPDRIARMYMELMGGMYEDAGEHLSKRFHVDKSDIVLEKDITFYSMCEHHMLPFYGRAHVAYIPNGTVVGLSKIARTVEVYAKRLQLQEQLTAQVADAFMEHLNPKGVMVMVEAEHMCMTMRGIKKPGSKTVTSATRGVFEGNPELQNTFYQMVR

SEQ ID NO: 4595 - protein, 185 aa, Anaerotruncus sp.
  REGION 1..185: note = tr|R5XC16|R5XC16_9FIRM GTP cyclohydrolase 1; OS = Anaerotruncus sp. CAG:528 OX=1262700 GN=folE PE=3 SV=1
MDKKKIEKAVYDILEAVGEDPNRPGLLETPRRVANMYEEMFSGLTEDPHQHLKFFDEKSNDEMVIVRDIPFASMCEHHLLPFMGKAHIAYIPGENKIIGLSKLARIVDNFAKKPQVQERLTHDIADFLYTEMSAKGVAVIMEAEHMCMSIRGAKASGSKTQTSALRGIMKSDARTREEALALLDK

SEQ ID NO: 4596 - protein, 188 aa, Anaerovibrio lipolyticus
  REGION 1..188: note = tr|A0A1M6GJH9|A0A1M6GJH9_9FIRM GTP cyclohydrolase 1; OS = Anaerovibrio lipolyticus DSM 3074 OX=1120997 GN=folE; PE = 3 SV=1
MNKKAVQAMQGFLEAVGVDLKASGMEKTPERVAGMYEYLFNGIGVSTDDVWGELFKVENEGIVAVRDIPFYSMCEHHLVPFFGKVSIAYKPHEGSIAGFSKFTRMVEIISHRPQLQERMTEDIARAVEQGLKADGVLVIVEAQQLCMIMRGDMAHGSKTITSSTRGCFKSDRESYHQAWNMLGWDNNE

SEQ ID NO: 4597 - protein, 262 aa, Anaerovibrio lipolyticus
  REGION 1..262: note = tr|A0A0B2JMA5|A0A0B2JMA5_9FIRM GTP cyclohydrolase FolE2 OS=Anaerovibrio lipolyticus OX=82374 GN=folE2 PE=3; SV = 1
MKDVQNSADTRGIAIQKVGIRDAHLPLLIKTKEGDYQQVLANISFTVSLPMEYKGTHMSRFQEILNKWTRLPIAEVEMADILQEAMDKLQAETAAIHIEFKYFVDRFAPVSKRKSVLDVDCFFDGVMEREQPLQFTLGVKVPYTSLCPCSKEISEYGAHNQRGVMDVRVSFDDEHECILIEDLVALMEQQGSCQVYPLLKREDEKFVTEKAYDNPKFVEDILRDGVIALRQLEGIKWFALDCDNFESIHNHSAYASHEEFVE

SEQ ID NO: 4598 - protein, 262 aa, Anaerovibrio sp.
  REGION 1..262: note = tr|A0A1X1Q598|A0A1X1Q598_9FIRM GTP cyclohydrolase FolE2 OS=Anaerovibrio sp. JC8 OX=1240085 GN=folE2 PE=3 SV=1
MKDVQNSSDNRGIAIQKVGIRDAHLPLLIKTKDGDYQQVLANISFTVSLPMEYKGTHMSRFQEILNKWTSKPIAEPEMADILKEAMDKLQAETAAIRIEFKYFVDRFAPVSGRKSVLDVDCFFDGFMEREKPLQFTLGVKVPYTSLCPCSKEISEYGAHNQRGVMDVRVAFDDEHECILIEDLVALMEQQASCQVYPLLKREDEKYVTEKAYDNPKFVEDILRDGVIALRQLNGIKWFALDCDNFESIHNHSAYASHEEYVD

SEQ ID NO: 4599 - protein, 188 aa, Anaerovibrio sp.
  REGION 1..188: note = tr|A0A1X1Q7J7|A0A1X1Q7J7_9FIRM GTP cyclohydrolase 1; OS = Anaerovibrio sp. JC8 OX=1240085 GN=folE PE=3 SV=1
MNKKAVQAMQEFLEALGVDLKAAGMEKTPERVAGMYEYLFNGINAGTNEVWGELFKVENEGIVAVRDIPFYSMCEHHLVPFFGRVSIAYKPHEGFIAGFSKFTRMVEIISHRPQLQERMTEEVATAVEQGLKADGVLVIVEAQQLCMTMRGDMAHGTKTITSSCRGLFKDDSQSYHQAWSMLGRDNNE

SEQ ID NO: 4600 - protein, 188 aa, Anaerovirgula multivorans
  REGION 1..188: note = tr|A0A239JCU8|A0A239JCU8_9FIRM GTP cyclohydrolase 1; OS = Anaerovirgula multivorans OX=312168 GN=folE PE=3 SV=1
MDKAKIEKAVREILEAIGENPDREGLKDTPKRIARMYEEIFAGLEADPKQHLDIYFQDEKHEELVLVKDIPFYSVCEHHLVPFYGKAHVGYIPKNGKLTGLSKLARVVETISKRPQLQERLTSTIADTIVEKLQPHGVIVVVEAEHMCMTMRGVKKSGAQTVTSVVRGIFKKDAKARAEAMSLIQFKS

SEQ ID NO: 4601 - protein, 197 aa, Anaplasma centrale
  REGION 1..197: note = tr|D1AUN8|D1AUN8_ANACI GTP cyclohydrolase 1; OS = Anaplasma centrale (strain Israel) OX=574556 GN=folE; PE = 3 SV=1
MHKDLHKPSDEDAKEAVEVLIRWIGDSPGREGLSLTAGRVLNTYRESFRGYALESLHDFRNSVFVNEGYSDMILLRGVNFSSTCEHHMAPMTGVANISYIPKAAVLGVGAIIRVIDIFTKRLQLQERMTVQIAHFLSELLKPAGVAVLIEARHWCAKCSGGEAVDDLKLQTSCMLGAFQDDHNVRSEFFCRVGCKFS

SEQ ID NO: 4602 - protein, 198 aa, Anaplasma marginale
  REGION 1..198: note = tr|B9KIK8|B9KIK8_ANAMF GTP cyclohydrolase 1; OS = Anaplasma marginale (strain Florida) OX=320483 GN=folE; PE = 3 SV=1
MHKDLARKPSDKDAKEAIEVLIRWIDDSPDREGLSLAAGRVLNAYKESFQGYALESSHDFRNSVFANEGYSDMILLRGVNFSSTCEHHMSPMAGVVNISYIPKATVIGVGTVVRVVDIFAKRLQVQERMTVQIAQFLSELLKPAGVAVLIEAKHWCAKYLGGEAVSDLKLQTSCMLGEFQNNQNVRSEFFCRIGYKFS

SEQ ID NO: 4603 - protein, 198 aa, Anaplasma marginale
  REGION 1..198: note = tr|A0A5D8Y8E6|A0A5D8Y8E6_ANAMA GTP cyclohydrolase 1; OS = Anaplasma marginale OX=770 GN=folE PE=3 SV=1
MHKDLARKPSDKDAKEAIEVLIRWIDDSPDREGLSLTAGRVLNAYKESFQGYALESSHDFRNSVFANEGYSDMILLRGVNFSSTCEHHMSPMAGVVNISYIPKATVIGVGTVVRVVDIFAKRLQVQERMTVQIAQFLSELLKPAGVAVLIEAKHWCAKYLGGEAVSDLKLQTSCMLGEFQNNQNVRSEFFCRIGYKFS

SEQ ID NO: 4604 - protein, 198 aa, Anaplasma ovis
  REGION 1..198: note = tr|A0A2N4SVD3|A0A2N4SVD3_9RICK GTP cyclohydrolase 1; OS = Anaplasma ovis OX=142058 GN=folE PE=3 SV=1
MHKDLARKPSDKDAKEAIEVLIRWIYDSPDREGLSLTAGRVLNAYKESFQGYALESSHDFRNSVFANEGYSDMILLRGVNFSSTCEHHMSPMAGVVNISYIPKATVIGVGTVVRVVDIFAKRLQVQERMTVQIAQFLSELLKPAGVAVLIEAKHWCAKYLGGEAVSDLKLQTSCMLGEFQNNQNVRSEFFCRIGYKFS

SEQ ID NO: 4605 - protein, 198 aa, Anaplasma ovis
  REGION 1..198: note = tr|A0A2Z2LBL4|A0A2Z2LBL4_9RICK GTP cyclohydrolase 1; OS = Anaplasma ovis str. Haibei OX=1248439 GN=AOV_02215 PE=3; SV = 1
MYKDLGRKPSDKDAEEAIEVLIRWADDSPGREGLSLTAGRVLSAYKESFQGYALESSHDFRNSVFANEGYSDMILLRGVNFSSTCEHHMSPMTGVVNVSYIPKATVIGVGAIVRVVDIFAKRLQVQERMTVQIAQFLGALLKPAGVAVLIEAEHWCAKYSGGEAANGLKLQTSCMLGEFQNNQDMRSEFFCRIGCKFS

SEQ ID NO: 4606 - protein, 202 aa, Anaplasma phagocytophilum
  REGION 1..202: note = tr|A0A1G4LUW8|A0A1G4LUW8_ANAPH GTP cyclohydrolase 1; OS = Anaplasma phagocytophilum OX=948 GN=folE_1 PE=3 SV=1
MAEVTQCGRVCPTIEEAEEAVRVIIRWMGDDPNREGLLKTPRRVLDYYKKSCSGYAPELLSHYSILPYDGSSSEMVLVKNIGFSSNCEHHLSPICGVAHIAYMPKEKILGIGSIAHIVGCFAKRLQLQERLTNQVAEYLEKILEPHGIAVLLEAEHWCVECSNRDTASRDERLHVQTSQMLGVFEERCDLRNEFFLRIKMYK

SEQ ID NO: 4607 - protein, 98 aa, Anaplasma phagocytophilum
  REGION 1..98: note = tr|A0A181ZXZ0|A0A181ZXZ0_ANAPH GTP cyclohydrolase 1; OS = Anaplasma phagocytophilum OX=948 GN=folE_2 PE=3 SV=1
MPKEKILGIGSIAHIVGCFAKRLQLQERLTNQVAEYLEKILDPHGVAVLLEAEHWCVECSNRDTASRDERLNVQTSQMLGVFEERCDLRNEFFLRIKM

SEQ ID NO: 4608 - protein, 191 aa, unidentified
  source 1..191: note = Ancrocorticia populi
  REGION 1..191: note = tr|A0A2V1K974|A0A2V1K974_9ACTO GTP cyclohydrolase 1; OS = Ancrocorticia populi OX=2175228 GN=folE PE=3 SV=1
MRSERTYDEAAVEKAIRDLLFAVGEDPDRDGLRDTPGRMARAYKEMFSGLYTNPAEVLSAKFDIGHEEMVLVKDIPMYSTCEHHLLPFHGVAHVAYIPGKDGKVTGLSKIARLVDGYARRPQVQERLTSEVADALVESLEVSGVIVVIEAEHLCMSMRGVRKPGSRTITSAVRGIMRNQATRSEAMSLINS

SEQ ID NO: 4609 - protein, 212 aa, Ancylobacter aquaticus
  REGION 1..212: note = tr|A0A3S0GM55|A0A3S0GM55_ANCAQ GTP cyclohydrolase 1; OS = Ancylobacter aquaticus OX=100 GN=folE PE=3 SV=1
MDAVLKSLMRSAQSEMEASAARRPSREEAEAAVRTLIAWAGDDPEREGLLDTPKRVVRAYEELYSGYRAAPESILDRTFGEIGNFDDMVMVRDIEFHSHCEHHMVPFVGKAHIAYFPVERVVGLSKIARIVDIFARRLQTQEHLTSQIITAMDEILKPRGVAILIEAEHMCMAMRGVRKQGASTVTTQFTGVFRDDPQEQVRFMSLLRGMRP

SEQ ID NO: 4610 - protein, 212 aa, Ancylobacter aquaticus
  REGION 1..212: note = tr|A0A4R1I764|A0A4R1I764_ANCAQ GTP cyclohydrolase 1; OS = Ancylobacter aquaticus OX=100 GN=folE PE=3 SV=1
MDAVLKSLMRSAQSEMEASAARRPSREDAEAAVRTLIAWAGDDPEREGLLDTPKRVVRAYEELYSGYRAAPESILDRTFGEIGNFDDMVMVRDIEFHSHCEHHMVPFVGKAHIAYFPVERVVGLSKIARIVDIFARRLQTQEHLTSQIITAMDEILKPRGVAILIEAEHMCMAMRGVRKQGASTVTTQFTGVFRDDPQEQVRFMSLLRGMRP

SEQ ID NO: 4611 - protein, 212 aa, Ancylobacter rudongensis; identical to SEQ ID NO: 4609
  REGION 1..212: note = tr|A0A1G4Q5T4|A0A1G4Q5T4_9RHIZ GTP cyclohydrolase 1; OS = Ancylobacter rudongensis OX=177413 GN=folE PE=3 SV=1

SEQ ID NO: 4612 - protein, 208 aa, unidentified
  source 1..208: note = Ancylomarina sp.
  REGION 1..208: note = tr|A0A4Q1JR39|A0A4Q1JR39_9BACT GTP cyclohydrolase 1; OS = Ancylomarina sp. SHSM-M15 OX=2501299 GN=folE PE=3 SV=1
MEFSINGTENKGFTKIEKFNQETTEELMFHYKKVLELLGEDVEREGLEKTPLRVAKAMQFLTQGYHVKPEEILQSAMFKEDYRQMVIVKDIEVYSMCEHHMLPFVGRAHVAYIPDGTITGLSKIARVVDAFARRLQVQERLTTQIKDCIQDTLKPLGVAVVIEAQHMCMSMRGVQKQNAITTTSDFTGAFEKVATREEFIRLISAKTI

SEQ ID NO: 4613 - protein, 209 aa, unidentified
  source 1..209: note = Ancylomarina sp.
  REGION 1..209: note = tr|A0A425YCC8|A0A425YCC8_9BACT GTP cyclohydrolase 1; OS = Ancylomarina sp. A4 OX=2283628 GN=folE PE=3 SV=1
MEFSTNGDTNKGFTKIEKYNQDTTEQLMFHYKKVLELLGEDAEREGLLKTPLRVAKAMQFLTQGYHNNPEDILRSAMFQEDYRQMVIVKDIEVYSMCEHHMLPFVGRAHVAYIPNGTITGLSKIARVVDAFARRLQVQERLTTQIKDCIQNTLNPLGVAVVIEAQHMCMSMRGVQKQNAITTTSDFTGAFEKVATREEFIRLIANKSNY

SEQ ID NO: 4614 - protein, 208 aa, unidentified; identical to SEQ ID NO: 4612
  source 1..208: note = Ancylomarina subtilis
  REGION 1..208: note = tr|A0A4Q7VL16|A0A4Q7VL16_9BACT GTP cyclohydrolase 1; OS = Ancylomarina subtilis OX=1639035 GN=folE PE=3 SV=1

SEQ ID NO: 4615 - protein, 237 aa, unidentified
  source 1..237: note = Anditalea andensis
  REGION 1..237: note = tr|A0A074KY16|A0A074KY16_9BACT GTP cyclohydrolase 1; OS = Anditalea andensis OX=1048983 GN=folE PE=3 SV=1
MKRKETLLNTTGMDLDRDFDEIGDEHVGTSPETPLRNDAFEMDDEIKMELIEKHFKEIMHILGLDLEDDSLKGTPRRVAKMYIKEVFSGLDPKNMPVPKLFENKYKYNQMLVEKDITFYSHCEHHFVPIVGKAHVAYISNGHVIGLSKINRMVQYFAKRPQVQERLTMQIGNAFKEILGTDDVAVIVDAHHMCVSSRGIQDVNSSTVTSYYGGKFEKDEQTRNELMRYIAMDHKVGL

SEQ ID NO: 4616 - protein, 186 aa, unidentified
  source 1..186: note = Andreesenia angusta
  REGION 1..186: note = tr|A0A1S1V610|A0A1S1V610_9FIRM GTP cyclohydrolase 1; OS = Andreesenia angusta OX=39480 GN=folE PE=3 SV=1
MDRERIEKAIREILFAIGEDPDREGLVDTPKRIAKMYGEIFGGMKVDPKDHLQVFFQEEKHEELVLVKDIPFYSTCEHHLVPFFGKAHVGYLPKNGKLTGLSKLARVVDDVAKRPQLQERITCSVADAIMEVLDPHGVIVVVEAEHMCMTMRGIKKPGSKTITSAVRGIFNTDAKARSEAMTLIKF

SEQ ID NO: 4617 - protein, 187 aa, Aneurinibacillus aneurinilyticus
  REGION 1..187: note = tr|U1X073|U1X073_ANEAE GTP cyclohydrolase 1; OS = Aneurinibacillus aneurinilyticus ATCC 12856 OX=649747; GN = folE PE=3 SV=1
MKVNHKKIEEGVRMILEAVGENPNREGLLDTPARVARMYEEVFSGLAQDPKEYFSVVFSEDHEELVLVKDIPFYSMCEHHLVPFYGVAHVGYIPRGGRVTGLSKLARAVEAVAKRPQLQERITSTVADSIMDTLEPHGVVVVVEAEHLCMTMRGVKKPGAKTVTSAVRGIFAKDSASRAEVFSLIKG

SEQ ID NO: 4618 - protein, 200 aa, Aneurinibacillus aneurinilyticus
  REGION 1..200: note = tr|U1Y9N4|U1Y9N4_ANEAE GTP cyclohydrolase 1; OS = Aneurinibacillus aneurinilyticus ATCC 12856 OX=649747; GN = folE PE=3 SV=1
MNAMRAEAVKSSTSFTDPIEKHFYDIIHLIGEDPEREGLKETPKRIAKMYREIFSGLDEDPAEVLGKTFPAEGTNDIVIVQDIPFHSVCEHHFVPFFGKVHIGYIPNGRIVGLSKFARLVEILARRPQVQERITNQIVDTIEQVIEPVGVIAVIEAEHMCMSMRGIRKPGSKTRTIARRGIFDKDNDVQEQRFFRLLEKE

SEQ ID NO: 4619 - protein, 197 aa, Aneurinibacillus danicus
  REGION 1..197: note = tr|A0A511V5C5|A0A511V5C5_9BACL GTP cyclohydrolase 1; OS = Aneurinibacillus danicus OX=267746 GN=folE_1 PE=3 SV=1
MRAEAVKSSETFIDPIEKHFYDIIHLIGEDPEREGLKETPKRIAKMYREIFSGLDEDPAEVLGKTFPAEGANDIVIVQDIPFYSVCEHHFVPFFGKAHIGYIPNGRIVGLSKFARLVEILARRPQVQERITNQIVDALEQVIQPVGAIAVIEAEHMCMSMRGVKKPGSKTRTIARRGIFAKDNGVQEERFFRLLEKE

SEQ ID NO: 4620 - protein, 187 aa, Aneurinibacillus danicus
  REGION 1..187: note = tr|A0A511V7N6|A0A511V7N6_9BACL GTP cyclohydrolase 1; OS = Aneurinibacillus danicus OX=267746 GN=folE_2 PE=3 SV=1
MKVNHKKIEEAVRMILEAIGENPSREGLLDTPARVARMYEEVFTGLSQDPKEYFSVVFSEEHEELVLVKDIPFYSMCEHHLVPFYGVAHVGYIPRGGRVTGLSKLARAVEAVAKRPQLQERITSTVADSIMETLEPHGVVVVVEAEHLCMTMRGVKKPGSKTVTSAVRGIFAQDPASRAEVFSLIKG

SEQ ID NO: 4621 - protein, 197 aa, Aneurinibacillus migulanus
  REGION 1..197: note = tr|A0A1G8HRY8|A0A1G8HRY8_ANEMI GTP cyclohydrolase 1; OS = Aneurinibacillus migulanus OX=47500 GN=folE PE=3 SV=1
MRAEAVKSSTTFTDPIEKHFYDIIHLIGEDPEREGLKETPKRIAKMYREIFSGLNEDPAEVLGKTFPAEGTNDIVIVQDIPFHSVCEHHFVPFFGKVHIGYIPNGRIVGLSKFARLVEILARRPQVQERITNQIVDTIEQVIEPIGVIAVIEAEHMCMSMRGVRKPGSKTRTIARRGIFDKDNGVQEQRFFRLLEKE

SEQ ID NO: 4622 - protein, 187 aa, Aneurinibacillus migulanus
  REGION 1..187: note = tr|A0A0D1XXR8|A0A0D1XXR8_ANEMI GTP cyclohydrolase 1; OS = Aneurinibacillus migulanus OX=47500 GN=folE PE=3 SV=1
MKINHKKIEEGVRMILEAVGEDPNREGLLDTPARVARMYEEVFSGLTQDPKEYFSVVFSEDHEELVLVKDIPFYSMCEHHLVPFYGVAHVGYIPRGGRVTGLSKLARAVEAVAKRPQLQERITSTVADSIMDTLEPHGVVVVVEAEHLCMTMRGVKKPGAKTVTSAVRGIFAKDSASRAEVFSLIKG

SEQ ID NO: 4623 - protein, 196 aa, unidentified
  source 1..196: note = Aneurinibacillus soli
  REGION 1..196: note = tr|A0A0U5AZQ8|A0A0U5AZQ8_9BACL GTP cyclohydrolase 1; OS = Aneurinibacillus soli OX=1500254 GN=folE PE=3 SV=1
MRAEAVKSSKQAADPIEQHFYEVIQLIGENPEREGLQETPKRIAKMYREVFGGLQEDPEEVLGKTFPAEGASDIVIVQDIPFYSMCEHHFVPFFGKVHIGYIPDGRIVGLSKFARLVDILARRPQVQERMTNQIVEALNNVVCPIGAIAVVEAEHLCMSMRGIKKPGSRTRTIARGGVFKTDLVQEERFFRLLEKE

SEQ ID NO: 4624 - protein, 200 aa, Aneurinibacillus sp.
  REGION 1..200: note = tr|A0A0X8D5T3|A0A0X8D5T3_9BACL GTP cyclohydrolase 1; OS = Aneurinibacillus sp. XH2 OX=1450761 GN=folE PE=3 SV=1
MNAMRAEAVKSSRTFTDPIEKHFYDIISLIGEDPEREGLQETPKRIAKMYREIFSGLHEDPAEVLGKTFPAEGTNDIVIVQDIPFYSVCEHHFVPFFGKVHIGYIPNGRIVGLSKFARLVEILARRPQVQERITNQIVDTLEKVIEPVGAIAVVEAEHLCMSMRGVKKPGSKTRTIARRGIFEKDNGVQEERFFRLLEKE

SEQ ID NO: 4625 - protein, 189 aa, Aneurinibacillus sp.
  REGION 1..189: note = tr|A0A0X8D3S0|A0A0X8D3S0_9BACL GTP cyclohydrolase 1; OS = Aneurinibacillus sp. XH2 OX=1450761 GN=folE PE=3 SV=1
MNHTVLNVDLEENIKLILQYIGEIPEREGLIETPKRVIKMYDEIFKGYKEDPSSYLRKTFKEDHRELVLVKDISFYSHCEHHMVPFFGVAHIAYIPNGFVVGLSKIARMLEAYDRRLQLQERLTFQVAKTMFEVLNPLGVMVVIEAEHFCMTIRGVQKPGAKNVTTETLGIFTEDNELVHKVLDLIKTK

SEQ ID NO: 4626 - protein, 189 aa, Aneurinibacillus thermoaerophilus; identical to SEQ ID NO: 4625
  REGION 1..189: note = tr|A0A1G8BKJ4|A0A1G8BKJ4_ANETH GTP cyclohydrolase 1; OS = Aneurinibacillus thermoaerophilus OX=143495 GN=folE; PE = 3 SV=1

SEQ ID NO: 4627 - protein, 197 aa, Aneurinibacillus thermoaerophilus
  REGION 1..197: note = tr|A0A1G7YPX3|A0A1G7YPX3_ANETH GTP cyclohydrolase 1; OS = Aneurinibacillus thermoaerophilus OX=143495 GN=folE; PE = 3 SV=1
MRAEAVKSSRTFTDPIEKHFYDIISLIGEDPEREGLQETPKRIAKMYREIFSGLHEDPAEVLGKTFPAEGTNDIVIVQDIPFYSVCEHHFVPFFGKVHIGYIPNGRIVGLSKFARLVEILARRPQVQERITNQIVDTLEKVIEPVGAIAVVEAEHLCMSMRGVKKPGSKTRTIARRGIFEKDNGVQEERFFRLLEKE

SEQ ID NO: 4628 - protein, 188 aa, Angustibacter sp.
  REGION 1..188: note = tr|A0A0Q7JLD7|A0A0Q7JLD7_9ACTN GTP cyclohydrolase 1; OS = Angustibacter sp. Root456 OX=1736539 GN=folE PE=3 SV=1
MVDQERAAAAVRELLLAIGEDPERDGLRGTPERVARSFTEIYAGIGQSPADVLTTTFEIGHDELVMVRDIDMYSMCEHHLLPFHGVAHVGYIPNPDGRVTGLSKLARLVDVYARRPQIQERMTSDIADALVEHLSPRGVLVVIEAEHLCMAMRGVRRPGTTTITSAVRGQLRDAATRAEAMSLLRGRS

SEQ ID NO: 4629 - protein, 197 aa, Angustibacter sp.
  REGION 1..197: note = tr|A0A0Q7K0W6|A0A0Q7K0W6_9ACTN GTP cyclohydrolase 1; OS = Angustibacter sp. Root456 OX=1736539 GN=folE PE=3 SV=1
MTARVDVRAAEQAAHDLMDALGLDVDAEALVDTPRRMVEAYRELLTPRSFDLTTFANDEGYDELVLARAIPVQSVCEHHLLPFVGVAHVGYLPGERILGLSKLARVVELFARRPQVQERLTKQVADWLDDRLAPRGVGVVIEAEHTCMTLRGVRANGSTTVTSTLLGTLREDARSRAEFLALTGLTGGLTTGGGVRG

SEQ ID NO: 4630 - protein, 186 aa, Anoxybacillus amylolyticus
  REGION 1..186: note = tr|A0A160F3K3|A0A160F3K3_9BACI GTP cyclohydrolase 1; OS = Anoxybacillus amylolyticus OX=294699 GN=folE PE=3 SV=1
MVNYEQIEQAVRLILEAIGEDPNREGLLDTPKRVAKMYAEVFSGMNEDPKEHFQTVFSEEHEELVLVKDIPFFSMCEHHLVPFFGVAHVAYIPRGGKVTGLSKLARAVEAVARRPQLQERITATVADAIMETLEPHGALVVVEAEHMCMTMRGVKKPGAKTVTIAARGTFETDHVARGEVLSLIKG

SEQ ID NO: 4631 - protein, 188 aa, Anoxybacillus amylolyticus
  REGION 1..188: note = tr|A0A4R1GBB3|A0A4R1GBB3_9BACI GTP cyclohydrolase 1; OS = Anoxybacillus amylolyticus OX=294699 GN=folE PE=3 SV=1
MPEINFAQIEYAVRLILEAIGEDPNREGLVDTPKRVAKMYAEVFAGLQEDPKQHFQTVFSEEHEELVLVKDIPFYSMCEHHLVPFFGAAHVAYIPREGKVTGLSKLARAVEAVARRPQLQERITATIADSIVEALEPHGVMVVVEAEHMCMTMRGVKKPGAKTVTTAVRGVFETDANARAEVLSLIKA

SEQ ID NO: 4632 - protein, 184 aa, Anoxybacillus ayderensis
  REGION 1..184: note = tr|A0A0D0GYJ2|A0A0D0GYJ2_9BACI GTP cyclohydrolase 1; OS = Anoxybacillus ayderensis OX=265546 GN=folE PE=3 SV=1
MNVEQIEQAVRLILEAIGEDPNREGLLDTPKRVAKMYAEVFSGLNEDPKIHLQTVFSEDHEELVLVKDIPFYSMCEHHLVPFFGVAHVAYIPRGGKVTGLSKLARAVETVARRPQLQERITATVADAIMETLEPHGVMVVVEAEHMCMTMRGVKKPGAKTVTTAVRGTLATDEKARAEILALIK

SEQ ID NO: 4633 - protein, 187 aa, Anoxybacillus ayderensis
  REGION 1..187: note = tr|A0A1X6MG95|A0A1X6MG95_9BACI GTP cyclohydrolase 1; OS = Anoxybacillus ayderensis OX=265546 GN=folE PE=3 SV=1
MQQMNVEQIEQAVRLILEAIGEDPNREGLLDTPKRVAKMYAEVFSGLNEDPKIHLQTVFSEDHEELVLVKDIPFYSMCEHHLVPFFGVAHVAYIPRGGKVTGLSKLARAVETVARRPQLQERITATVADAIMETLEPHGVMVVVEAEHMCMTMRGVKKPGSKTVTTAVRGTLATDEKARAEILALIK

SEQ ID NO: 4634 - protein, 200 aa, Anoxybacillus flavithermus
  REGION 1..200: note = tr|B7GHP5|B7GHP5_ANOFW GTP cyclohydrolase 1; OS = Anoxybacillus flavithermus (strain DSM 21510 / WK1); OX = 491915 GN=mtrA PE=3 SV=1
MLESDYVKLNARRMNQMNVQQIEQAVRLILEAIGEDPNREGLLDTPKRVAKMYAEVFSGLTEDPKVHLQTVFSEDHEELVLVKDIPFYSMCEHHLVPFFGVAHVAYIPRGGKVTGLSKLARTVETVARRPQLQERITATVADAIMETLEPHGVMVVVEAEHMCMTMRGVKKPGAKTVTTAVRGTLATDEKARAEILALIK

SEQ ID NO: 4635 - protein, 187 aa, Anoxybacillus flavithermus
  REGION 1..187: note = tr|R4FC45|R4FC45_9BACI GTP cyclohydrolase 1; OS = Anoxybacillus flavithermus NBRC 109594 OX=1315967; GN = folE PE=3 SV=1
MQQMNVQQIEQAVRLILEAIGEDPNREGLLDTPKRVAKMYAEVFSGLTEDPKVHLQTVFSEDHEELVLVKDIPFYSMCEHHLVPFFGVAHVAYIPRGGKVTGLSKLARTVETVARRPQLQERITATVADAIMETLEPHGVMVVVEAEHMCMTMRGVKKPGAKTVTTAVRGTLATDDKARAEILALIK

SEQ ID NO: 4636 - protein, 184 aa, Anoxybacillus gonensis
  REGION 1..184: note = tr|M5QQX8|M5QQX8_9BACI GTP cyclohydrolase 1; OS = Anoxybacillus gonensis OX=198467 GN=folE PE=3 SV=1
MNVEQIEQAVRLILEAIGEDPNREGLLDTPKRVAKMYAEVFSGLNEDPKIHLQTVFSEDHEELVLVKDIPFYSMCEHHLVPFFGVAHVAYIPRGGKVTGLSKLARTVETVARRPQLQERITATVADAIMETLEPHGVMVVVEAEHMCMTMRGVKKPGAKTVTTAVRGTLATDEKARAEILALIK

SEQ ID NO: 4637 - protein, 187 aa, Anoxybacillus gonensis
  REGION 1..187: note = tr|A0A0A2SHJ7|A0A0A2SHJ7_9BACI GTP cyclohydrolase 1; OS = Anoxybacillus gonensis OX=198467 GN=folE PE=3 SV=1
MQQMNVEQIEQAVRLILEAIGEDPNREGLLDTPKRVAKMYAEVFSGLNEDPKIHLQTVFSEDHEELVLVKDIPFYSMCEHHLVPFFGVAHVAYIPRGGKVTGLSKLARTVETVARRPQLQERITATVADAIMETLEPHGVMVVVEAEHMCMTMRGVKKPGAKTVTTAVRGTLATDEKARAEILALIK

SEQ ID NO: 4638 - protein, 299 aa, Anoxybacillus kamchatkensis
  REGION 1..299: note = tr|A0A4S3L6U2|A0A4S3L6U2_9BACI GTP cyclohydrolase FolE2 OS=Anoxybacillus kamchatkensis OX=196180 GN=folE2; PE = 3 SV=1
MEHLHLPKKEDRLIYFGSTNPLINKTKPTEKEQMVDLQREKKDFFFHIDHVGIFNVSHPITIESSMKPHVQTTIGTFTLTTSLNRDEKGINMSRLTELLHEYYEKNWTVTLRSLQSFSKDMAERMKQRKSSVSVRYPWYYEKEAPETLHKGMVHANVLTTMTYEHEKGWKASVGIDCTVTTLCPCSKEISEYSAHNQRSIVSIIADLQHDAEWPESFKEQLLHIAESNASSQMYSVLKRPDEKYVTERAYENPRFVEDLIRLIAADLYEQAWVRSFHITCRNEESIHLHDAYAQMSFQK

SEQ ID NO: 4639 - protein, 187 aa, Anoxybacillus kamchatkensis; identical to SEQ ID NO: 4637
  REGION 1..187: note = tr|A0A346DIY0|A0A346DIY0_9BACI GTP cyclohydrolase 1; OS = Anoxybacillus kamchatkensis G10 OX=1212546 GN=folE PE=3; SV = 1

SEQ ID NO: 4640 - protein, 184 aa, Anoxybacillus pushchinoensis
  REGION 1..184: note = tr|A0A1I0SNI7|A0A1I0SNI7_9BACI GTP cyclohydrolase 1; OS = Anoxybacillus pushchinoensis OX=150248 GN=folE PE=3 SV=1
MNTQQIEQAVRLILEAIGEDPNREGLLDTPKRVAKMYAEVFAGLNEDPKVHLQTVFSEDHEELVLVKDIPFYSMCEHHLVPFFGVAHVAYIPRGGKVTGLSKLARTVETVARRPQLQERITATVADAIMDTLEPHGVMVVVEAEHMCMTMRGVKKPGAKTVTTAVRGTLAEDEKARAEILALIK

SEQ ID NO: 4641 - protein, 299 aa, Anoxybacillus sp.
  REGION 1..299: note = tr|A0A094JZM2|A0A094JZM2_9BACI GTP cyclohydrolase FolE2 OS=Anoxybacillus sp. KU2-6(11) OX=1535751 GN=folE2; PE = 3 SV=1
MEHLHLPKKEDRLIYFGSTNPLINKTKPTEKGQMVDLQREKKDFFFHIDHVGIFNVSHPITIESSMKPHVQTTIGTFTLTTSLNRDEKGINMSRLTELLHEYYEKNWTVTLRSLQSFSKDMAERMKQRKSSVSVRYPWYYEKEAPETLHKGMVHANVLTTMTYEHEKGWQASVGIDCTVTTLCPCSKEISEYSAHNQRSIVSIIADLQHDAEWPESFKEQLLHIAESNASSQMYSVLKRPDEKYVTERAYENPRFVEDLIRLIAADLYEQAWVRSFHITCRNEESIHLHDAYAQMSFQK

SEQ ID NO: 4642 - protein, 187 aa, Anoxybacillus sp.
  REGION 1..187: note = tr|A0A094M3H7|A0A094M3H7_9BACI GTP cyclohydrolase 1; OS = Anoxybacillus sp. KU2-6(11) OX=1535751 GN=folE PE=3 SV=1
MQQMNVEQIEQAVRLILEAIGEDPNREGLLDTPKRVAKMYAEVFSGLNEDPKIHLQTVFSEDHEELVLVKDIPFYSMCEHHLVPFFGVAHVAYIPRGGKVTGLSKLARTVETVARRPQLQERITATVADAIMETLEPHGVMVVVEAEHMCMTMRGVKKPGAKTVTTAVRGTLATDDKARAEILALIK

SEQ ID NO: 4643 - protein, 184 aa, unidentified
  source 1..184: note = Anoxybacillus suryakundensis
  REGION 1..184: note = tr|A0A0K6GLB9|A0A0K6GLB9_9BACI GTP cyclohydrolase 1; OS = Anoxybacillus suryakundensis OX=1325335 GN=folE PE=3; SV = 1
MNVEQIEQAVRLILEAIGEDPNREGLLDTPKRVAKMYAEVFSGLNEDPKIHLQTVFSEDHEELVLVKDIPFYSMCEHHLVPFFGVAHVAYIPRGGKVTGLSKLARTVETVARRPQLQERITATVADAIMETLEPHGVMVVVEAEHMCMTMRGVKKPGAKTVTTAVRGTLETDDKARAEILALIK

SEQ ID NO: 4644 - protein, 184 aa, Anoxybacillus thermarum; identical to SEQ ID NO: 4636
  REGION 1..184: note = tr|A0A0D0QVW2|A0A0D0QVW2_9BACI GTP cyclohydrolase 1; OS = Anoxybacillus thermarum OX=404937 GN=folE PE=3 SV=1

SEQ ID NO: 4645 - protein, 190 aa, unidentified
  source 1..190: note = Anoxybacillus vitaminiphilus
  REGION 1..190: note = tr|A0A327YSI3|A0A327YSI3_9BACI GTP cyclohydrolase 1; OS = Anoxybacillus vitaminiphilus OX=581036 GN=folE PE=3 SV=1
MAQDIRLDAMEETIRTLLEQIGEDPEREGLKDTPKRVAKMYREVFAGIGVDPKTALTTTFEEAYEGIVTVKDISYYTFCEHHLIPFYGKAHIGYIPSGRVVGLSKFARLVELVSKKPQVQERMTQEIADAIMDVLNPKGVIVNIEGTHLCMCARGVKKPGAKTITSVKKGVFAEKDLLVQEFERAIYRAL

SEQ ID NO: 4646 - protein, 199 aa, unidentified
  source 1..199: note = Anoxybacillus vitaminiphilus
  REGION 1..199: note = tr|A0A327YST5|A0A327YST5_9BACI GTP cyclohydrolase 1; OS = Anoxybacillus vitaminiphilus OX=581036 GN=folE PE=3 SV=1
MNTKLKHQSVADDPIERHFYEIIQLIGEDPEREGLIETPKRIAKMYREIFSGLHENPEEILQKTFPAEGTKDIVIVQDIPFYSVCEHHFVPFFGKVHIGYIPNERIVGLSKFARLVDVFARRPQVQERITNEIVNTIQKVVNPLGVICVVEAEHMCMTMRGIKKPGSLTRTIAKSGVFDSDELPNYYEERFFKMLNKEI

SEQ ID NO: 4647 - protein, 188 aa, unidentified
  source 1..188: note = Anoxybacter fermentans
  REGION 1..188: note = tr|A0A3Q9HQG4|A0A3Q9HQG4_9FIRM GTP cyclohydrolase 1; OS = Anoxybacter fermentans OX=1323375 GN=folE PE=3 SV=1
MVDKEKIKRAVRDILEAIGEDPEREGLKDTPRRIADMYEEIFSGLYEDPKKHLEIYFQDEKHEELVLVKDIPFYSICEHHLLPFFGKAHVAYIPRGGKLTGLSKLARVVETVAKRPQLQERITKTVADILMEQLEPYGVIVVIEAEHMCMTMRGVKKPGSKTVTSAIRGLFERNHASRAEVMSLINHK

SEQ ID NO: 4648 - protein, 214 aa, unidentified
  source 1..214: note = Anseongella ginsenosidimutans
  REGION 1..214: note = tr|A0A4V2UU28|A0A4V2UU28_9SPHI GTP cyclohydrolase 1; OS = Anseongella ginsenosidimutans OX=496056 GN=folE PE=3; SV = 1
MDDKNIEGQLLDELEMDGYQKIDRYNTHKIKQLADKYREILKDIGEDPTRPGLLNTPERVAKALLYFTHGYDMDPAGIIRSALFEEEYSQMVIVKDIELYSLCEHHMVPFFGKAHIAYIPKGKIVGLSKIPRVVDVFARRLQVQERLTNDIKDCLHNTLQPAGVAVVIECTHLCMCMRGVQKQNSVTTTSAFTGEFAKETTRAEFMRLISANLV

SEQ ID NO: 4649 - protein, 225 aa, unidentified
  source 1..225: note = Antarcticibacterium flavum
  REGION 1..225: note = tr|A0A5B7X7A8|A0A5B7X7A8_9FLAO GTP cyclohydrolase 1; OS = Antarcticibacterium flavum OX=2058175 GN=folE PE=3 SV=1
MKIDQIENEIDELGDAHASSSAVNPMKEDAFNLSDTEKIAMITEDVKHILDTLGMDLNDDSLRGTPLRVAKMFVKEMFAGLDPQRKPKASTFENKYKYGEMLVEKNITVYSTCEHHLLPIVGKAHVAYISKGSVIGLSKMNRIVDYFAKRPQVQERMTMQIVQELQKALGTEDVACVIDAKHLCVNSRGIRDIESSTVTSEFGGAFKDPGVKREFLDYIKLDTTF

SEQ ID NO: 4650 - protein, 197 aa, unidentified
  source 1..197: note = Antarcticibacterium sp.
  REGION 1..197: note = tr|A0A5B8YGU3|A0A5B8YGU3_9FLAO GTP cyclohydrolase 1; OS = Antarcticibacterium sp. PAMC 28998 OX=2585771 GN=folE; PE = 3 SV=1
MYTFFEEYSEEVTGELTGNFENIITTLGEDTGREGIIKTPERAAKAMQFLMQGYHVDPEEVLRQAMFKENYNEMVVVKDIELYSLCEHHMLPFFGKAHIGYIPDGYIVGLSKLPRVVDVFARRMQVQERLTHDILECINRTIKPKGVAIVIEAQHMCMMMRGVQKQNSVTTTSGFRGQFEKIETRNEFMKLISSNLK

SEQ ID NO: 4651 - protein, 225 aa, unidentified
  source 1..225: note = Antarcticibacterium sp.
  REGION 1..225: note = tr|A0A5B8YMF6|A0A5B8YMF6_9FLAO GTP cyclohydrolase 1; OS = Antarcticibacterium sp. PAMC 28998 OX=2585771 GN=folE; PE = 3 SV=1
MKIDHLENEIEEMGDAHAFSSAENPMREDAFNLSDTDKIALITEDVKHILETLGMDLNDDSLKGTPLRVAKMFVKEIFSGLDPQRKPKASTFENKYKYGEMLVEKNITVYSTCEHHLLPIVGKAHVAYISKGRVIGLSKMNRLVDHYAKRPQVQERMTMQIVQELQQALGTPDVACVIDAKHLCVNSRGIRDIDSSTVTSEFGGAFKDPGIKREFLDYIKLDTAF

SEQ ID NO: 4652 - protein, 366 aa, Antarctobacter heliothermus
  REGION 1..366: note = tr|A0A239G391|A0A239G391_9RHOB GTP cyclohydrolase FolE2 OS=Antarctobacter heliothermus OX=74033 GN=folE2; PE = 3 SV=1
MNIHTPAIDRKPSKEEAAEALALLRRWASKAHDAEIAALDPIVGRLSPDATPETYPALARVYPEGFTVDDAYKATLPDLQNGPSSLIRGANRAIQHVGISNFRLPIQYHTRDNGDLRLETSVTGTVSLEADKKGINMSRIMRSFYAHADKTFSFEVIEAALDDYKSDLESFDARINMRFSFPMKVDSLRSGLSGYQYYDIALELVERDGVRRKVMHLDYVYSSTCPCSLELSEHARQTRGQLATPHSQRSVARISVELREGDCLWFEDVVDMCRRAVPTETQVMVKREDEQAFAELNAANPIFVEDAARLFAEQLQADERVGDYRVVASHQESLHSHDAVSVLTEGDLFAADSLDPKLFTTLFHVG

SEQ ID NO: 4653 - protein, 366 aa, Antarctobacter heliothermus
  REGION 1..366: note = tr|A0A222E9T6|A0A222E9T6_9RHOB GTP cyclohydrolase FolE2 OS=Antarctobacter heliothermus OX=74033 GN=folE2; PE = 3 SV=1
MNIHTPAIDRKPSKEEAAEALALLRRWASKAHDAEIAALDPIVGRLTPDATPETYPAFARVYPEGFSVDAAYKDTLPDLQNGPSSLIRGANRAIQHVGISNFRLPIQYRTRDNGDLRLETSVTGTVSLEADKKGINMSRIMRSFYAHAEKTFSFEVIEAALDDYKSDLESFDARINMRFSFPMKVDSLRSGLSGYQYYDIALELVERDGVRRKVMHLDYVYSSTCPCSLELSEHARQTRGQLATPHSQRSVARISVELREGDCLWFEDVVDMCRRAVPTETQVMVKREDEQAFAELNAANPIFVEDAARLFAEQLQADERVGDYRVVASHQESLHSHDAVSVLTEGDLFAADSLDPKLFSTLFHVG

SEQ ID NO: 4654 - protein, 193 aa, unidentified
  source 1..193: note = Antricoccus suffuscus
  REGION 1..193: note = tr|A0A2T1A3Q0|A0A2T1A3Q0_9ACTN GTP cyclohydrolase 1; OS = Antricoccus suffuscus OX=1629062 GN=folE PE=3 SV=1
MDAARPFDRDRAIAAVRELLIAIGEDPDREGLQRTPQRVANAYAEIFAGLHSDPSEVLQTVFDEGHQEMILVRDIELYSTCEHHLVPFHGVAHVGYIPGADGRITGLSKLARLVDLLAKRPQVQERLTGQIADVLVGELKPRGAIVVIECEHLCMAMRGIRKPGARTVTSAVRGIFQHNLSTRAEAMSLIVGR

SEQ ID NO: 4655 - protein, 209 aa, unidentified
  source 1..209: note = Antricoccus suffuscus
  REGION 1..209: note = tr|A0A2T1A269|A0A2T1A269_9ACTN GTP cyclohydrolase 1; OS = Antricoccus suffuscus OX=1629062 GN=folE PE=3 SV=1
MSALQTSSVEPDERRIHAVDPGRAAPTIEHDAARAAVRQLLTALGQDVDSEELRDTPRRVADAYAEMLTPALFNVTTFPNDGEYDELVLVRDIPVQSLCAHHLLPFTGTAHVAYLPGERIVGLSKLARAVEMFARGLQVQERLTTQISGWLEEVLAPKGVGVVIEAEHMCMTMRGVQARGTRTLTSSLRGLIHDDARTRSEFLALTRHT

SEQ ID NO: 4656 - protein, 216 aa, Aphanizomenon flosaquae; identical to SEQ ID NO: 4553
  REGION 1..216: note = tr|A0A1B7VWY2|A0A1B7VWY2_APHFL GTP cyclohydrolase 1; OS = Aphanizomenon flos-aquae LD13 OX=1710894 GN=folE PE=3; SV = 1

SEQ ID NO: 4657 - protein, 235 aa, Aphanizomenon flosaquae
  REGION 1..235: note = tr|A0A1B7WZI9|A0A1B7WZI9_APHFL GTP cyclohydrolase 1; OS = Aphanizomenon flos-aquae WA102 OX=1710896 GN=folE PE=3; SV = 1
MTIAGSNVSNNPQSPLITNLAEAINVRPDRNTHDGREPIINPPSEETMNEMMAAVRTMIIGVGEDPEREGLLKTPKRVAKAMKFLTSGYNESLEDLINGAIFDEGHDEMVLVRDINFFSLCEHHMLPFMGRAHVAYIPNQKVVGLSKLARIVEMYSRRLQVQERLTRQIAEALQTVLEPRGVAVVMEASHMCMVMRGVQKPGSWTVTSSMVGIFQEEHKTREEFFNLIRHQASFY

SEQ ID NO: 4658 - protein, 241 aa, unidentified
  source 1..241: note = Aphanothece hegewaldii
  REGION 1..241: note = tr|A0A2T1LY05|A0A2T1LY05_9CHRO GTP cyclohydrolase 1; OS = Aphanothece hegewaldii CCALA 016 OX=2107694 GN=folE; PE = 3 SV=1
MTIASNGLNRPNSSPDGTNSDSGNKLSERVTTRPDRNTHNGQVPQIQENPEVSKEHLMDAVHTMLKAVGEDPEREGLLKTPKRVAEAMQFLTQGYHQSLETLVNGAIFDEGHNEMVLVRDIDFFSLCEHHMLPFMGRAHVAYIPNQKVVGLSKLARIVEMFSRRLQVQERLTRQIAEAVQDILDPQGVAVVMEATHMCMVMRGVQKPGSWTVTSAMLGVFQEEQKTREEFLNLIHHRPNFF

SEQ ID NO: 4659 - protein, 242 aa, unidentified
  source 1..242: note = Aphanothece sacrum
  REGION 1..242: note = tr|A0A401IDQ5|A0A401IDQ5_APHSA GTP cyclohydrolase 1; OS = Aphanothece sacrum FPU1 OX=1920663 GN=folE PE=3 SV=1
MTIASSNGINRTNSNPSNGSDLLSPNLAEKVYTRPDRNTHNGNPPQIHPTPDISKEKMMEAVRTMLLGVGEDPDREGLLKTPKRVAEAMQFLTQGYNQSLEELVNDAIFDEGHSEMVLVRDINFFSLCEHHMLPFMGRAHVAYIPNQKVVGLSKLARIVEMYSRRLQVQERLTRQIAEAIQEILEPQGVAVVMEATHMCMVMRGVQKPGSWTVTSAMVGLFQEEQKTREEFLNLIRHQPNFF

SEQ ID NO: 4660 - protein, 221 aa, unidentified
  source 1..221: note = Apibacter adventoris
  REGION 1..221: note = tr|A0A2S8AET0|A0A2S8AET0_9FLAO GTP cyclohydrolase 1; OS = Apibacter adventoris OX=1679466 GN=folE PE=3 SV=1
MFTEDEDIDHLSNAEYTPIRKDAFEMPIEKKQELIQDHFTEIMKILGLDMNDDSLKDTPKRVAKMYVKEIFGGLLPENKPSISTFENTYKYRQMLIEKDITVYSTCEHHFLPIIGRAHVAYISNGTVIGLSKINRIVNYYARRPQVQERLTRQIVKAMSEALNTKDVACVIDAKHLCINSRGIQDTNSSTVTAELSGMFRNNPTTRKEFLHYIGIDSHFKI

SEQ ID NO: 4661 - protein, 226 aa, unidentified
  source 1..226: note = Apibacter mensalis
  REGION 1..226: note = tr|A0A0X3AQ97|A0A0X3AQ97_9FLAO GTP cyclohydrolase 1; OS = Apibacter mensalis OX=1586267 GN=folE PE=3 SV=1
MFFIMFNKEDEESDHFSYTEYTPIRSDAFVLSPEEKQKAIQEHFAKIMHILGLEMNDDSLKDTPKRVAKMYVNEIFGGLLPENKPQVSTFKNSYKYRQMLIEKDITVYSTCEHHFLPIIGKAHVAYFSNGKVIGLSKINRIVNYYSRRPQVQERLTRQIVEAIKEVLNTKDVACVIDAKHLCVNSRGIQDTESSTVTAELSGIFLSNPTTRKEFLHYIGIDSHFKI

SEQ ID NO: 4662 - protein, 222 aa, unidentified
  source 1..222: note = Apibacter sp.
  REGION 1..222: note = tr|A0A2S8ABI8|A0A2S8ABI8_9FLAO GTP cyclohydrolase 1; OS = Apibacter sp. wkB309 OX=1679467 GN=folE PE=3 SV=1
MFNKEDEELDHFTHTEYTPIRSDAFVLSPEEKQKAIQEHFTKIMHILGLDLNDDSLKDTPKRVAKMYVNEIFGGLLPENKPEVSTFKNNYKYRQMLIEKDITVYSTCEHHFLPIIGRAHVAYFSNGKVIGLSKINRIVNYYSRRPQVQERLTRQIVEAIKEVLNTNDVACVIDAKHLCVNSRGIQDTESSTVTAELSGLFLNNPTTRKEFLHYIGIDSHFKI

SEQ ID NO: 4663 - protein, 222 aa, unidentified
  source 1..222: note = Apibacter sp.
  REGION 1..222: note = tr|A0A563DB09|A0A563DB09_9FLAO GTP cyclohydrolase 1; OS = Apibacter sp. AL1 OX=2509005 GN=folE PE=3 SV=1
MFNTDDEEQDHFSPTEYTPLREDAFTISPEKKQELIQLHFTEIMKILGLDMKDDSLQDTPKRVAKMYVNEIFGGLLPENKPAISTFDNNYKYKQMLIEKDITVYSTCEHHFLPIIGKAHVAYISNQKVIGLSKINRIVNYYARRPQVQERLTRQIVEALKEALNTKNVACVIDAKHLCVNSRGIKDTNSSTVTAELSGSFQTNPTTRKEFLHYIGIDSHFKI

SEQ ID NO: 4664 - protein, 218 aa, Aquabacter spiritensis
  REGION 1..218: note = tr|A0A4V2UYN3|A0A4V2UYN3_9RHIZ GTP cyclohydrolase 1; OS = Aquabacter spiritensis OX=933073 GN=folE PE=3 SV=1
MDAVVKLLKAQAELEAGADKRALVPDRAGRPSREEAEAAVRTLLAYIGENPQREGLVDTPRRVIKAYDELYSGYGHDAEEILGRTFGEIGTFDDFVLLRDIPFHSHCEHHMVPFVGKAHVAYFPVERVVGLSKIARVVDGYARRLQTQEHLTSQIVTALDEALRPRGVAVLIEAEHMCMAMRGISKAGVTTVTSQFTGAFRDDPAEQVRFITLVRGRP

SEQ ID NO: 4665 - protein, 274 aa, Aquabacterium commune
  REGION 1..274: note = tr|A0A4R6R752|A0A4R6R752_9BURK GTP cyclohydrolase FolE2 OS=Aquabacterium commune OX=70586 GN=folE2 PE=3 SV=1
MNAPELLPLIDIQSQIDTRQLPIQAVGVKGVRYPVRLRAGHANHIGQGRSTDTVGHWTMSVGLAATVKGTHMSRFIELLEAPRDALDLPGFAAMAREMLQRLGADSGRISVQFPYFLRKAAPVSGVESLLDIDATWACHIPTQGAEPELSMTLTVAATSLCPCSKEISAYGAHNQRSHITLNVQLRQAMSIEELARVAEDSASCAVYGLLKRVDEKHVTERAYDNPKFVEDLVRDVALALAAEPRVKAYEVEVENFESIHNHSAFATIGGHRDD

SEQ ID NO: 4666 - protein, 267 aa, Aquabacterium sp.
  REGION 1..267: note = tr|A0A521YFJ1|A0A521YFJ1_9BURK GTP cyclohydrolase FolE2 OS=Aquabacterium sp. OX=1872578 GN=folE2 PE=3 SV=1
MNDQTLPPLLHTIADTQSERDERHLAIQHVGIRELRYPIRLKLGAEGADYGTVATWSLDVALPAEHKGTHMSRFVSWLDGHQQPLDATAVREGMDDMLERLHATEGRIEARFTFFIRKHAPVSGVSSLLDYQGAWIAERRAGRTTVWAEVLVPVKSLCPCSKEISDYGAHNQRSHVTIRAELLADIGWHELVRIAEESASSEIWGLLKRPDEKWITERAYENPKFVEDLVRDVALRLNGETRIGRYRTTVENFESIHNHSAFAVIER

SEQ ID NO: 4667 - protein, 267 aa, Aquabacterium sp.
  REGION 1..267: note = tr|A0A522C753|A0A522C753_9BURK GTP cyclohydrolase FolE2 OS=Aquabacterium sp. OX=1872578 GN=folE2 PE=3 SV=1
MNDQTLPPLLHTIADTQSERDERHLAIQHVGIRELRYPIRLKLGAEGADYGTVATWSLDVALPAEHKGTHMSRFVSWLDGHQQPLDATAVREGMDDMLERLHATEGRIEARFTFFIRKHAPVSGVSSLLDYQGAWIAERRAGRTTVWAEVLVPVKSLCPCSKEISDYGAHNQRSHVTIRAELLADIGWHELVRIAEDSASSEIWGLLKRPDEKWITERAYENPKFVEDLVRDVALRLNGETRIGRYRTTVENFESIHNHSAFAVIER

SEQ ID NO: 4668 - protein, 215 aa, Aquamicrobium aerolatum
  REGION 1..215: note = tr|A0A1I3L588|A0A1I3L588_9RHIZ GTP cyclohydrolase 1; OS = Aquamicrobium aerolatum DSM 21857 OX=1121003 GN=folE; PE = 3 SV=1
MDACVKNIPLQTSPAQDLSSLQTNQRPSAAEVEAAVGVLLRWTGDNPEREGLIDTPKRVAKAYREMFSGYEQDPAEELGRTFEEVEGYDDMVLIRDISFHSHCEHHMVPIIGKAHVAYLPDGKVVGLSKIARTVDIFAHRLQTQEAMTAQIAHVIQDVLQPRGVAVLIEAEHMCMAMRGIRKQGSTTLTTTFTGAFRDHPEEQARFMMMLRGLSR

SEQ ID NO: 4669 - protein, 212 aa, Aquamicrobium defluvii
  REGION 1..212: note = tr|A0A011U742|A0A011U742_9RHIZ GTP cyclohydrolase 1; OS = Aquamicrobium defluvii OX=69279 GN=folE PE=3 SV=1
MDAVIKQKMPASSYLDKPVTDRPGQHEVEAAVRTLLRWTGDNPDREGLIDTPKRVAKAFREMFNGYDMCPAEELGRTFEEVAGYDDLVVVRDIQFHSHCEHHMVPIIGKAHVGYLPDGKVVGLSKIARVVDIFAHRLQTQESMTAQIANVIQDVLNPRGVAVMIEAEHMCMAMRGIRKQGSTTLTSTFTGTFSDNAEEQIRFMTMVRGGLVR

SEQ ID NO: 4670 - protein, 211 aa, Aquamicrobium sp.
  REGION 1..211: note = tr|A0A4U6C0P6|A0A4U6C0P6_9RHIZ GTP cyclohydrolase 1; OS = Aquamicrobium sp. LC103 OX=1120658 GN=folE PE=3 SV=1
MDAILKNFPPRADDQGKDAQRPTKEEVEAAVRTLIRWTGDNPDREGLLETPKRVAKAYREMFAGYDLDPAQELGRTFEEVAGYDDLVLVKDINFHSHCEHHMVPIVGKAHVAYLPDGKVVGLSKIARVVDIFAHRLQTQEAMTAQIAGVIQEVLNPRGVAVMIEAEHMCMAMRGIRKQGSTTLTTTFTGAFKDQPEEQARFMMMLRTGLKD

SEQ ID NO: 4671 - protein, 266 aa, Aquaspirillum sp.
  REGION 1..266: note = tr|A0A1U9JLN6|A0A1U9JLN6_9NEIS GTP cyclohydrolase FolE2 OS=Aquaspirillum sp. LM1 OX=1938604 GN=folE2 PE=3; SV = 1
MTDSILIPDVQSSADLRNIAINKVGIKSIRHPVQVADRSGGVQHSIGLFDMYVYLPHQFKGTHMSRFVEILNSHEREISARSFEQIARQMVERLDAESGYLEMRFPYFVNKTAPVSGVKSLLDYDVTFIGELKNGQYYFTLKVLVPVTSLCPCSKKISERGAHNQRSHITLTVRTQAHMWIEELIDIAERQASCELYGLLKRPDEKYVTERAYDNPKFVEDLVRDVAAALTADPRIDGYVVESENFESIHNHSAYALIEFDRASQH

SEQ ID NO: 4672 - protein, 310 aa, unidentified
  source 1..310: note = Aquibacillus sp.
  REGION 1..310: note = tr|A0A516KFX8|A0A516KFX8_9BACI GTP cyclohydrolase FolE2 OS=Aquibacillus sp. TKL69 OX=2594883 GN=folE2 PE=3; SV = 1
MNAPNNRKKVLPNKFERHKLFGSVDPGPKTKPIEKDKMADLQNSRKDFLFEIDAVGISNVKHPIQITSQLQPQSQTTIGTFTFTSKINQDSKGTNMSRFTEQLTEYHSTKNFIVSIASMKQFTQDLAVRLKQEDAYMEVTFPWFFERKGPSSELAGLNHADATIKVSYDKKFGFDVEVGLSGTITTLCPCSKEISEYSAHNQRGIVSMTVSLTDDFDETAHDWKEVLLEAAESNASARIHPVLKRPDEKMVTEQAYENPRFVEDMVRLVAADLYEQPFIEKFSVACRNEESIHLHDAIASITYDKSKEMK

SEQ ID NO: 4673 - protein, 180 aa, Aquicella lusitana
  REGION 1..180: note = tr|A0A370GF21|A0A370GF21_9COXI GTP cyclohydrolase 1; OS = Aquicella lusitana OX=254246 GN=folE PE=3 SV=1
MQTYFKKIIEALGENPEREGLKNTPKRAAKAMEFLTQGYHQSIDQILNGALFETDNDEMILVKNIELYSLCEHHLLPFIGKCHVAYVPNGKIIGLSKIARIVDMHARRLQVQENLTREIAQTIFDVVGAKGVGVIIEAQHLCMMMRGVEKQNSVMSTSVMLGLLREDSRSRAEFLSLVKH

SEQ ID NO: 4674 - protein, 180 aa, Aquicella siphonis
  REGION 1..180: note = tr|A0A5E4PKN1|A0A5E4PKN1_9COXI GTP cyclohydrolase 1; OS = Aquicella siphonis OX=254247 GN=folE PE=3 SV=1
MKDHFKKIIEAIGENPDREGLRDTPKRAAKAMEFLTQGYHQSIDQIINGALFQSDNEEMVLVKNIELYSLCEHHMLPFIGKCHVAYLPNGKILGLSKVARIIDMHSRRLQVQENLTREIAQTMCDVTQAKGVGVIIEAQHLCMMMRGVEKQNSIMSTSVMLGAFRDDMRTRAEFLSLVKN

SEQ ID NO: 4675 - protein, 364 aa, unidentified
  source 1..364: note = Aquicoccus porphyridii
  REGION 1..364: note = tr|A0A5A9Z4J3|A0A5A9Z4J3_9RHOB GTP cyclohydrolase FolE2 OS=Aquicoccus porphyridii OX=1852029 GN=folE2 PE=3; SV = 1
MNKITPDIDKAPSREEAETALARLRQWAEQASPEERADLDPALARLIPGADYPEFSRDYPEGFTVTPAYKATLPDLQNGPASLIRGAKRVIQHVGISNFRLPIQYHTRDNGDLTLETSVTGSVSLEAEKKGINMSRIMRSFYAHADKTFSFEVIEAALDDYKSDLESFDARIQMRLSFPMKVQSLRSGLAGYQYYDIALELVEQGGARRKIIHLDYVYSSTCPCSLELSEHARSARGQLATPHSQRSVARLSVEVRDTAKCLWFEDLIDLARAAVPTETQVMVKREDEQAFAELNAANPIFVEDAARLFAQQLEDDPRIGDFRIVASHQESLHSHDAVSILTEGELFETASLDPRLFTTLFHVG

SEQ ID NO: 4676 - protein, 366 aa, unidentified
  source 1..366: note = Aquicoccus sp.
  REGION 1..366: note = tr|A0A4V6ENM6|A0A4V6ENM6_9RHOB GTP cyclohydrolase FolE2 OS=Aquicoccus sp. SCR17 OX=2541728 GN=folE2 PE=3 SV=1
MNIHTRDTDSIPSREEAETALATLRRWAQTASAEEMSTLGPVAEALDLPTGPNAYPVLSREYPEDFTVTPEYKETLPDLQNGPAALIRGAQRPIQHVGISNFRLPIRFHTRDNGDLALETSVTGTVSLEAEKKGINMSRIMRSFYEYAEKTFSFEVIEAALDAYKADLESIDARIQMRFSFPVKVESLRSGLAGYQYYDIALELVEAEGVRRKIMHLDYVYASTCPCSLELSEHARQFRGQLATPHSQRSVARLSVEVKEGDCLWFEDLIDHCRRAVPTETQVMVKREDEQAFAELNAANPIFVEDAARLFSEALMGDPRIGDFRVVASHQESLHSHDAVSVLTEGSTFAAQSLDPRLFDTLYHTG

SEQ ID NO: 4677 - protein, 184 aa, unidentified
  source 1..184: note = Aquifex aeolicus
  REGION 1..184: note = sp|O66603|GCH1_AQUAE GTP cyclohydrolase 1 OS=Aquifex aeolicus (strain VF5) OX=224324 GN=folE PE=3 SV=1
MAIDKEKIKQAVRLFLEGIGEDPDREGLKETPERVARMWEEFERMRNFDMKLFEEFGGYNEMVLVKDIKFYSLCEHHLLPFFGKVHIAYIPDKKISGLSKLVRTVRAFALRPQVQERLTEEIADFLEKELEPKGVGVVIEAEHLCMSMRGVMSPGHLTVTSALRGVFLKDIKTREEFLKLVKGV

SEQ ID NO: 4678 - protein, 184 aa, Aquifex sp.
  REGION 1..184: note = tr|A0A432Q0B3|A0A432Q0B3_9AQUI GTP cyclohydrolase 1; OS = Aquifex sp. OX=313370 GN=folE PE=3 SV=1
MAIDKEKIKQAIRLLLEGIGEDPDREGLKETPERVARMWEEFERMRSFDMKLFEEFGGYNEMVLVKDIRFYSLCEHHLLPFFGKVHIAYIPDKKISGLSKLVRAVRAFALRPQVQERLTEEIADFLERELEPKGVGVVIEAEHLCMSMRGVMSPGHLTVTSALRGVFLKDIRTREEFLKLIKGS

SEQ ID NO: 4679 - protein, 184 aa, Aquifex sp.
  REGION 1..184: note = tr|A0A432PVK7|A0A432PVK7_9AQUI GTP cyclohydrolase 1; OS = Aquifex sp. OX=313370 GN=folE PE=3 SV=1
MAIDKEKIKQAIRLFLEGIGEDPDREGLRETPERVARMWEEFERMRTFDMKLFEEFGGYNEMVLVKDIRFYSLCEHHLLPFFGKVHIAYIPNKKISGLSKLVRTVRAFALRPQVQERLTEEIADFLERELEPKGVGVVIEAEHLCMSMRGVMSPEHLTVTSALRGVFLKDIRTREEFLKLVKGK

SEQ ID NO: 4680 - protein, 324 aa, unidentified
  source 1..324: note = Aquificaceae bacterium
  REGION 1..324: note = tr|A0A432F8P5|A0A432F8P5_9AQUI GTP cyclohydrolase FolE2 OS=Aquificaceae bacterium OX=2053503 GN=folE2 PE=3; SV = 1
MSANEDCLNKQCDLPDIANEPHSGPNARLNWVGMSEIEMPVFLLNGKQERIQSVARVQAYVNLTDPESKGIHMSRLYLSVDEMLSEDTLTPALLRQVVESFAASHIGISDSAYLECRVDFFERRKSLKSDNTGWKTYKVRPIVSLRKGVINTELCVEVPYSSTCPCSAALARDLIQQGFQSQFGEQEAVDFDAVHQWLGTTAGISATPHSQRSMAQVRVKLNDSVNDLPISRLIDQIENALQTPVQAAVKREDEQEFARLNASNLMFCEDAARRLYMALDQDNTLDDFWIRVNHMESLHPHNAVSVVVKGIEEGYRDDPREFPH

SEQ ID NO: 4681 - protein, 186 aa, unidentified
  source 1..186: note = Aquificaceae bacterium
  REGION 1..186: note = tr|A0A350D1K7|A0A350D1K7_9AQUI GTP cyclohydrolase 1; OS = Aquificaceae bacterium OX=2053503 GN=folE PE=3 SV=1
MPIDKEKIKQAIRLFLEGIGEDPNREGLLETPDRVARMWEEFERQRDFDFKLFEEFGSYNEMVLVKDVNIYSLCEHHLLPFFGKAHIAYIPDGIVCGLSKLVRTVRAFALRPQVQERLTNQIADFLMEQLKPKGVAVVLEMEHLCMSMRGVMSPGHLTVTSALRGLFLSDLRTREEFLKLIGRKTL

SEQ ID NO: 4682 - protein, 140 aa, unidentified
  source 1..140: note = Aquificae bacterium
  REGION 1..140: note = tr|A0A3M1BK62|A0A3M1BK62_9BACT GTP cyclohydrolase 1; OS = Aquificae bacterium OX=2202151 GN=D6804_06555 PE=3 SV=1
MPIDRDKIKQAIRLFLEGIGEDPDREGLKETPDRIARMWEEFEGQRSFDFKLFEEFGSYNEMVLVKDITIYSLCEHHLLPFFGKAHIAYIPDGILDATRVAFHKAEPIAAFLSLSRLQRPVWARSYVGTWGAEPALLLLR

SEQ ID NO: 4683 - protein, 185 aa, unidentified
  source 1..185: note = Aquificae bacterium
  REGION 1..185: note = tr|A0A3M2B0Y3|A0A3M2B0Y3_9BACT GTP cyclohydrolase 1; OS = Aquificae bacterium OX=2202151 GN=folE PE=3 SV=1
MAIDKEKIKQAIRLFLEGIGEDPDREGLKETPERVARMWEEFERQRTFDFKLFEEFGSYNEMVVVKDISVYSLCEHHLLPFFGKAHIAYIPNGIICGLSKLVRTVRAFALRPQVQERLTNQIADFLMEQLKPKGVAVVLEMEHLCMSMRGVMSPGHITTTSALRGLFLSDLRTREEFLKLIGKRL

SEQ ID NO: 4684 - protein, 231 aa, Aquiflexum balticum
  REGION 1..231: note = tr|A0A1W2H2W5|A0A1W2H2W5_9BACT GTP cyclohydrolase 1; OS = Aquiflexum balticum DSM 16537 OX=758820 GN=folE PE=3; SV = 1
MKQKEILLNTMGINGSRPTDEIGDEHIGTSLETPLREDAFEMDDELKIELIEKHFKEIMHILGLDLSDDSLKGTPHRVAKMYIKEIFSGLNPKNKPVAKLFENKYKYNEMLVEKDITFFSNCEHHFVPIYGKAHVAYISNGSVIGLSKINRIVQYYAKRPQVQERLTMQIGNELKEALGTDDVAVVIDAHHMCVSTRGVQDVNSSTVTSFYSGKFDRDDNTKSEFMKYISL

SEQ ID NO: 4685 - protein, 225 aa, unidentified
  source 1..225: note = Aquimarina aggregata
  REGION 1..225: note = tr|A0A163AHP3|A0A163AHP3_9FLAO GTP cyclohydrolase 1; OS = Aquimarina aggregata OX=1642818 GN=folE PE=3 SV=1
MKIDKALEAIEALGDNHVATSATTPLREDAFKLSDKEKIALIKDDVKHILETLGLDLTDDSLKGTPQRVAKMFVNEIFSGLHPQRKPDASTFENNYKYGEMLVEKNITVYSTCEHHLLPIVGRAHVAYISNGTVVGLSKMNRIVDYYAKRPQVQERMTMQIVQDLQVVLGTKDVACVIDAKHLCVNSRGIRDIESSTVTSEFGGKFKEDAVRREFLDYIKLDTTF

SEQ ID NO: 4686 - protein, 222 aa, unidentified
  source 1..222: note = Aquimarina aggregata
  REGION 1..222: note = tr|A0A162DK24|A0A162DK24_9FLAO GTP cyclohydrolase 1; OS = Aquimarina aggregata OX=1642818 GN=folE PE=3 SV=1
MNREKIEYEGDAHISSSVDTPLVKNAFETSDNDKIKNIQHHFSEIMKELGLDLTDDSLRGTPYRVAKMYVKELFYGLNPHNRPKISTFENKYGYQKMLVEQNINIDSACEHHFLPIVGTAHVGYIPKDKVVGLSKINRLVDYYSHRPQVQERLCLQILKDLQQTLETKDVIVVINAKHLCVSSRGIKDKSSFTTTLEYGGQFKEVSLRNEFLEIIKNDNNTF

SEQ ID NO: 4687 - protein, 198 aa, unidentified
  source 1..198: note = Aquimarina algiphila
  REGION 1..198: note = tr|A0A554VBV1|A0A554VBV1_9FLAO GTP cyclohydrolase 1; OS = Aquimarina algiphila OX=2047982 GN=folE PE=3 SV=1
MPYKNFEEYNIKVTEEVKQKFESIIEDLGEDVNREGIVKTPERAAKAMQFLTQGYHQDPAEILKGAMFKEGYDDMVIVKDIELYSLCEHHMLPFFGKAHIAYIPDGQIVGLSKLPRIVDVFARRLQVQERLTHDILECINDTLKPKGVAVVIEASHMCMMMRGVQKQNSVTTTSGFRGQFEKIETRTEFLRLITADLG

SEQ ID NO: 4688 - protein, 225 aa, unidentified
  source 1..225: note = Aquimarina algiphila
  REGION 1..225: note = tr|A0A554VBI2|A0A554VBI2_9FLAO GTP cyclohydrolase 1; OS = Aquimarina algiphila OX=2047982 GN=folE PE=3 SV=1
MKIDKALEAIEALGDNHVATSATNPLREDAFKLSDNEKIALIKEDVKHILETLGLDLTDDSLKGTPQRVAKMFVNEIFSGLHPQRKPDASTFKNHYKYGEMLVEKNITVYSTCEHHLLPIVGRAHVAYISNGTVVGLSKMNRIVDYYAKRPQVQERMTMQIVQDLQVVLGTKDVACVIDAKHLCVNSRGIRDIESSTVTSEFGGKFKEDSVRREFLDYIKLDTTF

SEQ ID NO: 4689 - protein, 225 aa, unidentified
  source 1..225: note = Aquimarina amphilecti
  REGION 1..225: note = tr|A0A1H7U9Z9|A0A1H7U9Z9_9FLAO GTP cyclohydrolase 1; OS = Aquimarina amphilecti OX=1038014 GN=folE PE=3 SV=1
MKIDKALEAIEALGDNHVATSATTPLREDAFKLSDQEKIASIREDVKHIMETLGLDLSDDSLKGTPQRVAKMFVNEIFSGLHPERKPDASTFDNNYKYGEMLVEKNITVYSTCEHHLLPIVGRAHVAYISNGTVVGLSKMNRIVDYYAKRPQVQERLTMQIVQDLQVVLNTKDVACVIDAKHLCVNSRGIRDIESSTVTSEFGGKFKEDAVRREFLDYIKLDTTF

SEQ ID NO: 4690 - protein, 232 aa, unidentified
  source 1..232: note = Aquimarina amphilecti
  REGION 1..232: note = tr|A0A1H7FFD1|A0A1H7FFD1_9FLAO GTP cyclohydrolase 1; OS = Aquimarina amphilecti OX=1038014 GN=folE PE=3 SV=1
MKVGIETLMNSNGYNLNGFSIEEIGDDHISTGMETPMRRDAFDISNDEKKKKISHLFKEIMEVMGLDLTDDSLKGTPDRVAKMYIEEIFSGLDPKNKPKVALFDNKYKYEQMLVEKNITFYSNCEHHFVPIIGKAHIAYVSSGKVIGLSKLNRIVQYFAKRPQVQERLTNQIAMELKQILQTEDIAVIIDAKHLCVSSRGIKDDTSATVTSYYGGVFRTSDKITELQNYLNN

SEQ ID NO: 4691 - protein, 220 aa, unidentified
  source 1..220: note = Aquimarina atlantica
  REGION 1..220: note = tr|A0A023BTQ8|A0A023BTQ8_9FLAO GTP cyclohydrolase 1; OS = Aquimarina atlantica OX=1317122 GN=folE PE=3 SV=1
MNRKKIELIGDAHISNTVETPLREDAFEKSDNEKIKTIQHHFSEIMKELGLDLTDDSLSGTPYRVAKMYVKELFYGLDPKNRPKISTFDNKYGYQKMLVEHNITIDSACEHHFLPIVGTAHVGYIPKNKVVGLSKINRLVDYYSHRPQVQERLCLQILKDLQQTLDTKDVIVVVNAKHLCVSSRGIKDKSSFTTTIEYGGQFIEPSLRNEFFGMIKKNNE

SEQ ID NO: 4692 - protein, 225 aa, unidentified
  source 1..225: note = Aquimarina atlantica
  REGION 1..225: note = tr|A0A023BRY4|A0A023BRY4_9FLAO GTP cyclohydrolase 1; OS = Aquimarina atlantica OX=1317122 GN=folE PE=3 SV=1
MKIDKALEAIEALGDNHVATSATTPLREDAFKLSDAEKIALIKEDVKHIMETLGLDLTDDSLKGTPQRVAKMFVNEIFSGLHPQRKPDASTFDNHYKYGEMLVEKNITVYSTCEHHLLPIVGRAHVAYISNGTVVGLSKMNRIVDYYAKRPQVQERLTMQIVQDLQVVLGTKDVACVIDAKHLCVNSRGIRDIESSTVTSEFGGKFKEQSVKREFLDYIKLDTTF

SEQ ID NO: 4693 - protein, 198 aa, Aquimarina brevivitae
  REGION 1..198: note = tr|A0A4Q7P1D6|A0A4Q7P1D6_9FLAO GTP cyclohydrolase 1; OS = Aquimarina brevivitae OX=323412 GN=folE PE=3 SV=1
MPYKNFEEYNIKVTDEVKEKFSDIITELGEDVTREGIAKTPERAAKAMLFLTQGYQQNAEEILKSAMFKEDYDDMVIVKDIELYSLCEHHMLPFFGKAHIAYIPDGYIVGLSKIPRIVDVFARRMQVQERLTHDILECINKTLKPKGVAVVIEAAHMCMMMRGVQKQNSVTTTSGFRGQFEKNETRSEFLRLITADLA

SEQ ID NO: 4694 - protein, 233 aa, Aquimarina brevivitae
  REGION 1..233: note = tr|A0A4Q7PHR2|A0A4Q7PHR2_9FLAO GTP cyclohydrolase 1; OS = Aquimarina brevivitae OX=323412 GN=folE PE=3 SV=1
MIEEKILPQKKINGNHLENFTINEIGDDHLYTSLETPMRSDAFKLTNDEKKERIASLFGEIMDVLGLDRSDDSLQGTPDRVAKMYVEEIFSGLDPANKPKIALFDNKYQYNQMLVEKNITFYSNCEHHFVPIIGKAHVAYISSGKVIGLSKLNRMVQYYAKRPQVQERLTNQIAKALEEILETKDIAVIIDAKHLCVASRGVKDDTSSTVTTYYGGAFNTPEKITELQNYIKE

SEQ ID NO: 4695 - protein, 198 aa, Aquimarina sp.
  REGION 1..198: note = tr|A0A3A9V8D5|A0A3A9V8D5_9FLAO GTP cyclohydrolase 1; OS = Aquimarina sp. AD10 OX=1714849 GN=folE PE=3 SV=1
MPYRNFEEYNIKVTDDVKDKFESIIENLGEDTTREGIVKTPERAAKAMQFLTQGYHQDPAEILRSAMFKEGYDDMVIVKDIELYSLCEHHMLPFFGKAHIAYIPDGHIVGLSKLPRVVDVFARRLQVQERLTHDILECINNTLKPKGVAVVIEASHMCMMMRGVQKQNSVTTTSGFRGQFEKIETRTEFLRLITSDLT

SEQ ID NO: 4696 - protein, 225 aa, Aquimarina sp.
  REGION 1..225: note = tr|A0A3A9W394|A0A3A9W394_9FLAO GTP cyclohydrolase 1; OS = Aquimarina sp. BL5 OX=1714860 GN=folE PE=3 SV=1
MKIDKALEAIEALGDNHVATSATTPLREDAFKLSDKEKIALIKDDVRHIMETLGLDLSDDSLKGTPQRVAKMFVNEIFSGLHPERKPDASTFDNHYKYGEMLVEKNITVYSTCEHHLLPIVGRAHVAYISNGTVVGLSKMNRIVDYYAKRPQVQERLTMQIVQDLQVVLNTKDVACVIDAKHLCVNSRGIRDIESSTVTSEFGGKFKDEAVRREFLDYIKLDTTF

SEQ ID NO: 4697 - protein, 198 aa, Aquimarina spongiae
  REGION 1..198: note = tr|A0A1M6BET4|A0A1M6BET4_9FLAO GTP cyclohydrolase 1; OS = Aquimarina spongiae OX=570521 GN=folE PE=3 SV=1
MPYKNFEEYNIEVTEEVKGKFKSIIEDIGEDTERDGILKTPERAAKAMLFLTQGYHQNPEEILKGAMFKEDYDDMVIVKDIELYSLCEHHMLPFFGKAHIAYIPNGHIVGLSKLPRIVDVFARRLQVQERLTHDILECINDTLKPKGVAVVIEASHMCMMMRGVQKQNSVTTTSGFRGQFEKIETRTEFLRLITSDLT

SEQ ID NO: 4698 - protein, 213 aa, Aquimarina spongiae
  REGION 1..213: note = tr|A0A1M6KZ64|A0A1M6KZ64_9FLAO GTP cyclohydrolase 1; OS = Aquimarina spongiae OX=570521 GN=folE PE=3 SV=1
MMGDSHISGATETPLRADAFEKSDDAKIERIQHHFSEIMKELGLDLTDDSLSGTPYRVAKMYVKELFYGLNPKNRPKVSTFDNKYEYQKILVEQNITIDSACEHHFLPIVGNAHVGYIPKDKVVGLSKLNRLVDYYAHRPQVQERLCLQILRDLQKTLGTEDVIVVVNAKHLCVSSRGIKDKSSFTTTVEFGGQFADPMIRKEFFDMVSFQLD

SEQ ID NO: 4699 - protein, 384 aa, unidentified
  source 1..384: note = Aquimixticola soesokkakensis
  REGION 1..384: note = tr|A0A1Y5S4P3|A0A1Y5S4P3_9RHOB GTP cyclohydrolase FolE2 OS=Aquimixticola soesokkakensis OX=1519096 GN=folE2; PE = 3 SV=1
MTGKRLHPSQPPLGKDPMNLHKADLTAATPDRAEAADALAVLRAWALKATPTEVAELDPSIARLLPQEGLSNYPALRRAYPEDFAVDEAYRATLPDLQNGPESLIKGAHRQIQHVGISNFRLPIRYRTRAGGDLVLETSVTGTVSLEAEKKGINMSRIMRSFYKHAENRFSLETIEAALDDYKSDLDSFDARIMMRLSFPAKVQSLRSNLAGYQYYNIALELVEQAGVRKKILHLDYVYSSTCPCSLELSEHARQTRGQLATPHSQRSVARISVEVPKGPILWFEDLIDLCRAAVPTETQVMVKREDEQAFAELNAANPIFVEDAARLFAQALEAEQRVRDFRVVASHQESLHSHDAVSVLTEGATFASQSLDPKLFATLFHIG

SEQ ID NO: 4700 - protein, 336 aa, Aquimonas voraii
  REGION 1..336: note = tr|A0A1G6RRW9|A0A1G6RRW9_9GAMM GTP cyclohydrolase FolE2 OS=Aquimonas voraii OX=265719 GN=folE2 PE=3 SV=1
MTDYEETPVSPPIADNTVRAMPDIASEAKPAVAGVLDWVGMGQIEVPVSVANAEGQTVTSGARVTAFVNLKRPDVRGIHMSRLYLHVDKTLSNEALSPTSLRRLLKDFLESHADLSDRAFVRVEFEHLVRRRALKSDNSGWKSYPCVITGLMEHGQFQVELSVQIPYSSTCPCSAALARQLIQEQFQTDFPAGAGIDRESVLAWLGTERGIRATPHSQRSTAEVRVRLLPSFANFPIIDVIDRIEDALKTPVQSAVKREDEQAFALLNGENLMFCEDAARRMQAALNADERIADFWVRASHYESLHPHNAVAVAVKGVPGGYASGLDWIARLSDHH

SEQ ID NO: 4701 - protein, 307 aa, Aquisalibacillus elongatus
  REGION 1..307: note = tr|A0A3N5C8L2|A0A3N5C8L2_9BACI GTP cyclohydrolase FolE2 OS=Aquisalibacillus elongatus OX=485577 GN=folE2; PE = 3 SV=1
MNETQSKKSLPSKNERHKLFGSVEPGPRTKPQEKSKMPDLQNTKKDFLFELDAVGISNVKHPIVVPSSIKPQNQTTIGHFYFASSISQESKGTNMSRFTQQLQAYYKKGFKVNIPTMKEFTKELQERLKQKDAELTVEFPWFFEREAPYTTEAGMNHADAWMKVMYHCEDGYDVKVGLNAKITTLCPCSKEISEYSAHNQRGNVMIEVTLDPSFNDEEIDWKALLIEAAESNASARIHPVLKRPDEKMVTEQAYENPRFVEDMVRLVSSDLYEMDMVQKFHVKCINEESIHLHDAIASITYDKRKEQ

SEQ ID NO: 4702 - protein, 185 aa, Aquisalimonas asiatica
  REGION 1..185: note = tr|A0A1H8U206|A0A1H8U206_9GAMM GTP cyclohydrolase 1; OS = Aquisalimonas asiatica OX=406100 GN=folE PE=3 SV=1
MSIDDMTASFEQIIRSVGEDVTRDGLEKTPERAAQAFAFLTEGYNQNLQELVNGAIFPSDNDEMVIVRDVEFYSLCEHHLLPFIGRANVAYIPNGKVIGLSKIARIIDMYARRFQIQENMTKEIADAVMSVTDAKGVAVHITANHLCMMMRGVGKQNSSMSTSVMLGTFRDSQPTRNEFLQLIRG

SEQ ID NO: 4703 - protein, 208 aa, Aquisphaera giovannonii
  REGION 1..208: note = tr|A0A5B9W4Z5|A0A5B9W4Z5_9BACT GTP cyclohydrolase 1; OS = Aquisphaera giovannonii OX=406548 GN=folE PE=3 SV=1
MEQTAAGDSGTGRGEPREAGRVDLERIRRAIREILLAVGEDPDREGLQETPDRVARMYAEVFQGLHQDPRVHLKKLFTQKYDEMVLVRDIRLVSFCEHHLLPVIGRAHVAYLPNGRVVGLSKIPRVIDVLAKRPQLQERLTEEVAELLMKELDAKGVAVVIEASHSCMTIRGVNKPDSSFVTSAVRGAFKERSATRAEVMSLIFGSKV

SEQ ID NO: 4704 - protein, 235 aa, Aquitalea magnusonii
  REGION 1..235: note = tr|A0A3G9GEJ4|A0A3G9GEJ4_9NEIS GTP cyclohydrolase I type 1 OS=Aquitalea magnusonii OX=332411 GN=DLM_2270 PE=4; SV = 1
MSKTDNNATPTESVSSRIRYRLQNAGVRFHANDNIADFIEGDELDLLQQEVAAKMQGVLESLVIDTVNDHNTQDTARRVAKMFVREVFRGRYVASPPNTEFPNIEQLNELMIVGPITVRSACSHHLCPIMGRVWVGVMPNEHSNLIGLSKYARLIDWVMTRPQIQEEAVMQIADLLMDKLQPDGLAIVMEADHFCMHWRGVKDSNSKMTNSVMRGSFLRDANLRREFLSLLHKGN

SEQ ID NO: 4705 - protein, 198 aa, unidentified
  source 1..198: note = Arachidicoccus ginsenosidivorans
  REGION 1..198: note = tr|A0A5B8VLG9|A0A5B8VLG9_9BACT GTP cyclohydrolase 1; OS = Arachidicoccus ginsenosidivorans OX=496057 GN=folE PE=3; SV = 1
MAYTKQESYDQDVTDALASHYKSALSLLGEDPEREGLLKTPDRLAKAMQYLTQGYQMDAVEILNSAKFHEPISEMVIVKDIELYSLCEHHLLPFIGKAHVAYIPNGWITGLSKVARVVDVFSHRLQVQERLTVQILEAIKEALNPLGVAVVIEAKHLCMMMRGVAKQNSYTTTSSFDGEFENDRTRSEFMKLISANLH

SEQ ID NO: 4706 - protein, 198 aa, unidentified
  source 1..198: note = Arachidicoccus rhizosphaerae
  REGION 1..198: note = tr|A0A1H3VKS2|A0A1H3VKS2_9BACT GTP cyclohydrolase 1; OS = Arachidicoccus rhizosphaerae OX=551991 GN=folE PE=3 SV=1
MAYIKQESYDQEITDELAGHYRSALSLLGENPDREGLLKTPDRLAKAMQYLTQGYQMDAVEILNSAKFHEPISEMVIVKDIELYSLCEHHLLPFIGKAHVAYIPNGWITGLSKVARVVDVFSHRLQVQERLTVQILEAIKEALNPLGVAVVIEAKHLCMMMRGVAKQNSYTTTSSFDGEFENDRTRSEFMKLISANLH

SEQ ID NO: 4707 - protein, 198 aa, unidentified
  source 1..198: note = Arachidicoccus sp.
  REGION 1..198: note = tr|A0A386HUD9|A0A386HUD9_9BACT GTP cyclohydrolase 1; OS = Arachidicoccus sp. KIS59-12 OX=2341117 GN=folE PE=3 SV=1
MAYKKTEHYDEDITNQLAGLYSNALELLGENSAREGLVKTPERIAKAMQYLTQGYQLDAVKILNSAKFHEPISEMVIVKDIEIYSLCEHHLLPFIGKAHIAYIPNGWITGLSKIARVVDVFARRLQVQERLTVEILESIKEALNPMGVAVVIEAKHLCMMMRGVSKQNSFTTTSAFSGEFENDRTRSEFMKLISADLH

SEQ ID NO: 4708 - protein, 198 aa, unidentified
  source 1..198: note = Arachidicoccus sp.
  REGION 1..198: note = tr|A0A191TMS9|A0A191TMS9_9BACT GTP cyclohydrolase 1; OS = Arachidicoccus sp. BS20 OX=1850526 GN=folE PE=3 SV=1
MAYRKTEHYDETVTNGLMNHYKEILNLLGENSEREGLLKTPERIAKAMQFMTQGYEQNAVEILNSAKFHEPISEMVIVKDIELYSLCEHHLLPFIGKAHVAYIPNGWITGLSKIARVVDIFSRRLQVQERLTVEILDAIKEALQPLGVAVVIEAKHLCMMMRGVSKQNSSTTTSAFFGEFENDRTRSEFMKLISAELH

SEQ ID NO: 4709 - protein, 225 aa, unidentified
  source 1..225: note = Arboricoccus pini
  REGION 1..225: note = tr|A0A212RBN3|A0A212RBN3_9PROT GTP cyclohydrolase 1; OS = Arboricoccus pini OX=1963835 GN=folE PE=3 SV=1
MSSDRSLVELLARPQGAHITKTPPRLDPRAKPSAQEAQDAVRTLLRWIGEDPSREGLQDTPTRVTKAFLEHFAGYTQEPHEILARTFSEVEGYDDVVVLKDISFESHCEHHMAPIIGRAHVAYMPNSRVVGISKLARLVEVFAKRLQIQERMTAQIADTIQEVLQPRGVAVMIEATHHCMTTRGIHKPGSLMVTSRVSGIFKTNPDTRREFLSIIGKSGAESLAR

SEQ ID NO: 4710 - protein, 197 aa, Arcanobacterium haemolyticum
  REGION 1..197: note = tr|D7BM61|D7BM61_ARCHD GTP cyclohydrolase 1; OS = Arcanobacterium haemolyticum (strain ATCC 9345 / DSM 20595 / NBRC 15585 / NCTC 8452 / 11018) OX=644284 GN=folE; PE = 3 SV =1
MSDLPKLHIGHYDEEAVVDAIKRLLIAVGEDPNRDGLLDTPDRMGRAYKEMFAGLGEDPADVLNTTFDIRHEELVLVRDISMYSMCEHHLLPFHGVAHIGYIPGPDGLVTGLSKLARLVEGFARRPQVQERLTSQIVDAIMERLNAQGAIVVVEAEHLCMSMRGVKKPGSHTVTSAVRGKLRETATRAEAMSLIMSK

SEQ ID NO: 4711 - protein, 196 aa, Arcanobacterium phocae
  REGION 1..196: note = tr|A0A1H2L9V2|A0A1H2L9V2_9ACTO GTP cyclohydrolase 1; OS = Arcanobacterium phocae OX=131112 GN=folE PE=3 SV=1
MSEPAVHVGHYDEDAVVSAVRQLLIAVGEDPDRDGLQDTPARMGRAYKEIFAGLEKDPADVLNTTFDIHHEELVLVRDISMYSMCEHHLLPFHGVAHVGYIPSADGLVTGLSKLARLVDGFARRPQIQERLTSQIADAMMERLHAQGVIVVVEAEHLCMSMRGVQKPGSRTVTSAVRGILRDSATRAEAMSLIMAK

SEQ ID NO: 4712 - protein, 189 aa, Arcanobacterium sp.
  REGION 1..189: note = tr|A0A095X6W2|A0A095X6W2_9ACTO GTP cyclohydrolase 1; OS = Arcanobacterium sp. S3PF19 OX=1219585 GN=folE PE=3 SV=1
MYDADGVEKAVYDLLVAIGEDPGREGLRGTPLRIARSYREIFSGLQSDPAQVLQTTFDINHQELIVVRDIALYSMCEHHLLPFFGVAHIGYIPCEEGKVTGLSKLARLVEGYARRPQVQERLTGQVAEALSQVLAARGVIVVIEAEHMCMTMRGVRKPASRTVTSAVRGILHDSAARAEAMSLIMAAKR

SEQ ID NO: 4713 - protein, 188 aa, Arcanobacterium sp.
  REGION 1..188: note = tr|A0A4Q9V160|A0A4Q9V160_9ACTO GTP cyclohydrolase 1; OS = Arcanobacterium sp. C605018/01/1 OX=2529275 GN=folE; PE = 3 SV=1
MAYDEEGVRKAIYDLLVAVGEDPQRDGLLDTPTRMARAYREIFAGLESDPSEVLDTTFDIDHQEMILVRDIPMYSVCEHHLLPFHGVAHVGYIPSDDGKVTGLSKLARLVEGFSRRPQVQERITTNVADALMDRLQARGVIVVIEAEHMCMSMRGVRKPGSRTVTSAVRGCLRDGTTRAEAMSLIMAK

SEQ ID NO: 4714 - protein, 233 aa, Arcicella aurantiaca
  REGION 1..233: note = tr|A0A316E8H3|A0A316E8H3_9BACT GTP cyclohydrolase 1; OS = Arcicella aurantiaca OX=591202 GN=folE PE=3 SV=1
MKPNETLLNTLLVDNNKKIMFTDEEIGDEHIMTSVDTPMRDDAFEMSDEEKMAQIEYHFRQIMETLGLDLKDDSLKGTPKRVAKMYVKEIFSGLDPKNMPSVALFDNKYQYNEMLVEKNISFYSNCEHHFVPIFGKAHVAYIANGQVIGLSKLNRIVQHFAKRPQVQERLTMQIAKELQKILGTEDVAIMIDAKHLCVASRGVKDDTSSTITSYYGGKFQDDATKAEFLKYIS

SEQ ID NO: 4715 - protein, 190 aa, unidentified
  source 1..190: note = Arcobacter anaerophilus
  REGION 1..190: note = tr|A0A4Q0Y0T0|A0A4Q0Y0T0_9PROT GTP cyclohydrolase 1; OS = Arcobacter anaerophilus OX=877500 GN=folE PE=3 SV=1
MNKETQFEDSVKNILEYIGEDANREGLIKTPSRVRKAFEFMCSGYKQDPKEIINSALFTSSNDEMVVIKDIEFYSMCEHHMLPIIGKAHVAYIPDGKVVGLSKIPRVVDVFARRLQIQEQMTEQICDALHEALNPKGVAVMIDARHMCMEMRGVEKICSTTVTSALRGLFKKEKKTKDEFLSIIAQSLHK

SEQ ID NO: 4716 - protein, 190 aa, unidentified
  source 1..190: note = Arcobacter aquimarinus
  REGION 1..190: note = tr|A0A4Q0UNA5|A0A4Q0UNA5_9PROT GTP cyclohydrolase 1; OS = Arcobacter aquimarinus OX=1315211 GN=folE PE=3 SV=1
MHSEIEFENAIKTMLEHIGEDVNREGLIDTPKRVRKAYEFMCSGYKQDPKEIIQKALFTSTNDEMVVVKDIEFYSFCEHHMLPIIGKAHVAYIPNGKVIGLSKIPRVVDVFARRLQIQEQLTEQICDALNEHLKPKGVAVMIDARHMCMEMRGVEKICSTTVTSALRGLFKSNKGTKDEFLSIIAQSLHK

SEQ ID NO: 4717 - protein, 190 aa, unidentified
  source 1..190: note = Arcobacter bivalviorum
  REGION 1..190: note = tr|A0A345IZM1|A0A345IZM1_9PROT GTP cyclohydrolase 1; OS = Arcobacter bivalviorum OX=663364 GN=folE PE=3 SV=1
MSKELEFENSVKNILEYIGEDVNREGLEKTPSRVRKAFEFMCGGYKQNPEDIINSALFTSSNDEMVVIKDIEFYSMCEHHMLPIIGKAHVAYIPDGKVVGLSKIPRVVDVFARRLQIQEQMTEQICDALHKALNPKGVAVMIDARHMCMEMRGVEKICSTTVTSALRGLFKKDKKTKDEFLSIVNSSLRK

SEQ ID NO: 4718 - protein, 190 aa, Arcobacter butzleri
  REGION 1..190: note = tr|A0A2W5JVY1|A0A2W5JVY1_9PROT GTP cyclohydrolase 1; OS = Arcobacter butzleri OX=28197 GN=folE PE=3 SV=1
MNKEIDFENAIKNILTYIGEDINREGLLDTPKRVRKAFEFMFSGYNQDPKEIIQKALFTSTNDEMVVVKDIEFYSFCEHHMLPIIGKAHVAYIPNGKVVGLSKIPRVVDVFARRLQIQEQMTEQICEALNEHLRPKGVAVMIDARHMCMEMRGVEKICSTTVTSSLRGLFKSDKKTKDEFLSIVASSFHK

SEQ ID NO: 4719 - protein, 190 aa, Arcobacter butzleri
  REGION 1..190: note = tr|A8EVB6|A8EVB6_ARCB4 GTP cyclohydrolase 1; OS = Arcobacter butzleri (strain RM4018) OX=367737 GN=folE; PE = 3 SV=1
MNKEIDFENAIKNILTYIGEDINREGLLDTPKRVRKAFEFMCSGYNQDPKEIIQKALFTSTNDEMVVVKDIEFYSFCEHHMLPIIGKAHVAYIPNGKVVGLSKIPRVVDVFARRLQIQEQMTEQICEALNEHLRPKGVAVMIDARHMCMEMRGVEKICSTTVTSSLRGLFKSDKKTKDEFLSIVASSFHK

SEQ ID NO: 4720 - protein, 190 aa, unidentified
  source 1..190: note = Arcobacter canalis
  REGION 1..190: note = tr|A0A2G1CSZ2|A0A2G1CSZ2_9PROT GTP cyclohydrolase 1; OS = Arcobacter canalis OX=1912871 GN=folE PE=3 SV=1
MGKEQEFEDSIRNILEYIGEDITREGLEKTPSRVRKAFEFICGGYKENPEDILKSALFTSTNDEMVVIKDIEFYSQCEHHMLPIIGKAHVAYIPNGKVVGLSKIPRVVNVFARRLQIQEQMTEQICDALNDTLKPKGVAVMIDARHMCMEMRGVEKICSTTVTSALRGLFKQNKKTKDEFLTIVSSSLQK

SEQ ID NO: 4721 - protein, 190 aa, Arcobacter cibarius
  REGION 1..190: note = tr|A0A5J6RIB8|A0A5J6RIB8_9PROT GTP cyclohydrolase I; OS = Arcobacter cibarius OX=255507 GN=folE PE=4 SV=1
MSKEFEFENSIKNILNYIGEDIEREGLLDTPKRVRKAFEFMCSGYKECPKEIIQKALFTSTNDEMVVVKDIEFYSFCEHHMLPIIGKAHVAYIPNGKVVGLSKIPRVVDVFARRLQIQEQMTEQICDALNEHLKPKGVAVIIDARHMCMEMRGVQKICSTTITSSLRGLFKSDKKTKDEFLSIVSASFQK

SEQ ID NO: 4722 - protein, 190 aa, unidentified
  source 1..190: note = Arcobacter cloacae
  REGION 1..190: note = tr|A0A4Q0ZKI5|A0A4Q0ZKI5_9PROT GTP cyclohydrolase 1; OS = Arcobacter cloacae OX=1054034 GN=folE PE=3 SV=1
MHSEIEFENAIKTMLEHIGEDVNREGLIDTPKRVRKAYEFMCSGYKQDPKEIIQKALFTSTNDEMVVVKDIEFYSFCEHHMLPIIGKAHVAYIPNGKVIGLSKIPRVVDVFARRLQIQEQLTEQICDALNEHLKPKGVAVMIDARHMCMEMRGVEKICSTTVTSALRGLFKSNKGTKDEFLSIVAQSLHK

SEQ ID NO: 4723 - protein, 146 aa, unidentified
  source 1..146: note = Arcobacter cloacae
  REGION 1..146: note = tr|A0A4Q0UQF5|A0A4Q0UQF5_9PROT GTP cyclohydrolase 1 (Fragment) OS=Arcobacter cloacae OX=1054034 GN=folE PE=3; SV = 1
MKEIEFENSIKNILEYIDEDVNREGLLDTPKRVRKAYEFMFSGYKLDPKEIIQKALFTSTNDEMVVVKDIEFYSFCEHHMLPIIGKAHVAYIPNGKVVGLSKIPRVVDVFARRLQIQEQMTEQICDALNEHLKPKGVAVIVDARHM

SEQ ID NO: 4724 - protein, 190 aa, Arcobacter cryaerophilus
  REGION 1..190: note = tr|A0A494TB67|A0A494TB67_9PROT GTP cyclohydrolase 1; OS = Arcobacter cryaerophilus D2610 OX=1032071 GN=folE PE=3; SV = 1
MNKELEFENSIKNILNYIDEDVTREGLLDTPKRVRKAYEFMFSGYKLDPKEIIQKALFTSTNDEMVVVKDIEFYSFCEHHMLPIIGKAHVAYIPNGKVVGLSKIPRVVDVFARRLQIQEQMTEQICDALNEHLKPKGVAVIVDARHMCMEMRGVQKICSTTITSSLRGLFKSDKKTKDEFLSIVSASFQK

SEQ ID NO: 4725 - protein, 190 aa, Arcobacter cryaerophilus
  REGION 1..190: note = tr|A0A5B7XBV0|A0A5B7XBV0_9PROT GTP cyclohydrolase 1; OS = Arcobacter cryaerophilus ATCC 43158 OX=1032070 GN=folE; PE = 3 SV=1
MDKELKFENSIKNILEYIDEDVTREGLLDTPKRVRKAYEFMFSGYKLDPKEIIQKALFTSTNDEMVVVKDIEFYSFCEHHMLPIIGKAHVAYIPNGKVVGLSKIPRVVDVFARRLQIQEQMTEQICDALNEHLKPKGVAVIVDARHMCMEMRGVQKICSTTITSSLRGLFKSDKKTKDEFLSIVSASFQK

SEQ ID NO: 4726 - protein, 190 aa, Arcobacter defluvii
  REGION 1..190: note = tr|A0A4Q0ULL0|A0A4Q0ULL0_9PROT GTP cyclohydrolase 1; OS = Arcobacter defluvii OX=873191 GN=folE PE=3 SV=1
MTKEIEFENAVKKILTHIGEDINREGLIDTPSRVRKAFEFMCSGYKQDPKEIIEKALFTSTNDEMVVVKDIEFYSQCEHHMLPIIGKAHIAYIPNGKVIGLSKIPRVVDVFARRLQIQEQLTEQICDALNEHLKPKGVAVMIDARHMCMEMRGVEKICSTTVTSALRGLFKTNKTTKDEFLSIVAQSLHK

SEQ ID NO: 4727 - protein, 190 aa, unidentified
  source 1..190: note = Arcobacter ebronensis
  REGION 1..190: note = tr|A0A4Q1AME0|A0A4Q1AME0_9PROT GTP cyclohydrolase 1; OS = Arcobacter ebronensis OX=1462615 GN=folE PE=3 SV=1
MTKESEFENSIKNILEYVGEDVNREGLIKTPQRVRKAFEFMCSGYNQDPKEIINSALFTSSNDEMVVIKDIEFYSMCEHHMLPIIGKAHVAYIPNGKVVGLSKIPRVVDIFAKRLQIQEQMTEQICDALHEALNPKGVAVMIDARHMCMEMRGVEKICSTTVTSALRGLFKKEKKTKDEFLSIVAHSLHK

SEQ ID NO: 4728 - protein, 190 aa, Arcobacter ellisii
  REGION 1..190: note = tr|A0A347UA04|A0A347UA04_9PROT GTP cyclohydrolase 1; OS = Arcobacter ellisii OX=913109 GN=folE PE=3 SV=1
MAKEVEFENAVKTILTHIGEDITREGLIDTPSRVRKAFEFMCSGYNQNPKEIIEKALFTSTNDEMVVVKDIEFYSFCEHHMLPIIGKAHVAYIPNGKVVGLSKIPRVVDVFARRLQIQEQMTEQICDALNEYLKPKGVAVMIDARHMCMEMRGVEKICSTTVTSALRGLFKSNKKTKDEFLSIVSNSLHK

SEQ ID NO: 4729 - protein, 190 aa, Arcobacter halophilus
  REGION 1..190: note = tr|A0A2N1J0K8|A0A2N1J0K8_9PROT GTP cyclohydrolase 1; OS = Arcobacter halophilus OX=197482 GN=folE PE=3 SV=1
MSKEQEFEDSIRNILEYIGEDVNREGLEKTPSRVRKAFEFICGGYKENPEEILNSALFTSSNDEMVVIKDIEFYSQCEHHMLPIIGKAHVAYIPNGKVVGLSKIPRVVNVFARRLQIQEQMTEQICDALNDALKPKGVAVMIDARHMCMEMRGVEKICSTTVTSALRGLFKQNKKTKDEFLTIVSSSLQK

SEQ ID NO: 4730 - protein, 190 aa, Arcobacter marinus
  REGION 1..190: note = tr|A0A1T5CIK6|A0A1T5CIK6_9PROT GTP cyclohydrolase 1; OS = Arcobacter marinus OX=505249 GN=folE PE=3 SV=1
MGKEQEFEDSIRNILEYIGEDVTREGLEKTPSRVRKAFEFICGGYKENPEDILKSALFTSTNDEMVVIKDIEFYSQCEHHMLPIIGKAHVAYIPNGKVVGLSKIPRVVNVFARRLQIQEQMTEQICDALNDTLKPKGVAVMIDARHMCMEMRGVEKICSTTVTSALRGLFKQNKKTKDEFLTIVSSSLQK

SEQ ID NO: 4731 - protein, 190 aa, Arcobacter molluscorum
  REGION 1..190: note = tr|A0A2G1DHX0|A0A2G1DHX0_9PROT GTP cyclohydrolase 1; OS = Arcobacter molluscorum LMG 25693 OX=870501 GN=folE PE=3; SV = 1
MVSEKEFEDSIKKILEYVGEDVNREGLEKTPSRVRKAFEFMCGGYNQDPKEVINSALFTSTNDEMVVIKDIEFYSQCEHHMLPIIGKAHVAYIPDGKVVGLSKIPRVVDIFARRLQIQEQLTEQICDALNDALKPKGVAVIIDARHMCMEMRGVEKICSTTVTSALRGLFKQNKKTKDEFLSIVSSSFNK

SEQ ID NO: 4732 - protein, 190 aa, Arcobacter mytili
  REGION 1..190: note = tr|A0A345J768|A0A345J768_9PROT GTP cyclohydrolase 1; OS = Arcobacter mytili LMG 24559 OX=1032238 GN=folE PE=3 SV=1
MISEKEFENSIKNILEYIGEDVTREGLVKTPSRVRKAFEFMCGGYKQNPEEIINSALFTSTNDEMVVIKDIEFYSQCEHHMLPIIGKAHVAYIPNGKVVGLSKIPRVVDVFARRLQIQEQMTEQICDALNNALNPKGVAVMIEARHMCMEMRGVEKICSTTVTSALRGLFKQNKKTKDEFLSIVSTASIK

SEQ ID NO: 4733 - protein, 190 aa, Arcobacter nitrofigilis
  REGION 1..190: note = tr|D5V1A0|D5V1A0_ARCNC GTP cyclohydrolase 1; OS = Arcobacter nitrofigilis (strain ATCC 33309 / DSM 7299 / LMG 7604 / NCTC 12251 / CI) OX=572480 GN=folE PE=3 SV=1
MKDEKKFEDAIKSVLEYVGEDVTREGLEKTPSRVRKAFDFMCSGYKQDPKEIINSALFTSSNDEMVVIKDIEFYSMCEHHMLPIIGKAHVAYIPNGKVVGLSKIPRVVDVFARRLQIQEQMTEQICDALHEALNPKGVAVMIDARHMCMEMRGVEKICSTTVTSALRGLFKKEKKTKDEFLSIVAQSLHK

SEQ ID NO: 4734 - protein, 190 aa, unidentified
  source 1..190: note = Arcobacter pacificus
  REGION 1..190: note = tr|A0A5C2H872|A0A5C2H872_9PROT GTP cyclohydrolase 1; OS = Arcobacter pacificus OX=1080223 GN=folE PE=3 SV=1
MSSELEFENAVKKILEHIGEDVNREGLIDTPSRVRKAYEFMCSGYKEDPKEIIQKALFTSTNDEMVVVKDIEFYSQCEHHMLPIIGKAHVAYIPNGKVVGLSKIPRVVDVFARRLQIQEQMTEQICDALNEHLKPKGVAVIIDARHMCMEMRGVQKICSTTVTSALRGLFKKEKKTKDEFLSIVAQSLHK

SEQ ID NO: 4735 - protein, 250 aa, unidentified
  source 1..250: note = [Arcobacter] porcinus
  REGION 1..250: note = tr|A0A1C0B1D5|A0A1C0B1D5_9PROT GTP cyclohydrolase 1 type 2 OS=[Arcobacter] porcinus OX=1935204 GN=AAX28_01103; PE = 4 SV=1
MQIKDIYEYLNTLSPFELQEKWDNSGLLVGNMEDNFENLYLSMDLDLELVETLKPNSLVITHHPLIFSGLKRVNYNTYSTKIVRELIKKDISLISMHTNIDKTHLNRFVIERILDFKVDNQNEFIANCSVDFSFDDLLKHLNKKLNLKNIKYVKTKEEIKKIAICTGSAMSLIDEVDADCFLTGDIKYHDAMEAKARGISLIDIRHYESENAFSLLLEELLKDYLKKNQFKAIILASKNPFEFFKGETVE

SEQ ID NO: 4736 - protein, 190 aa, unidentified
  source 1..190: note = [Arcobacter] porcinus
  REGION 1..190: note = tr|A0A5C2HDH8|A0A5C2HDH8_9PROT GTP cyclohydrolase 1; OS = [Arcobacter] porcinus OX=1935204 GN=folE PE=3 SV=1
MKNEKEFEDSIKNILNYIDEDINREGLVDTPKRVRKAYEFMFSGYKECPKEIIQKALFTSTNDEMVVVKDIEFYSFCEHHMLPIIGKVHVAYIPNGKVVGLSKIPRVVDVFARRLQIQEQMTEQICDALNEYLNPKGVAVIIDARHMCMEMRGVQKICSTTVTSSLRGLFKSDKKTKDEFLSIVSSSFSK

SEQ ID NO: 4737 - protein, 190 aa, Arcobacter skirrowii
  REGION 1..190: note = tr|A0A2U2BZ43|A0A2U2BZ43_9PROT GTP cyclohydrolase 1; OS = Arcobacter skirrowii OX=28200 GN=folE PE=3 SV=1
MMKEIEFENSIKNILEYIDEDVNREGLLDTPKRVRKAYEFMFSGYKLDPKEIIQKALFTSTNDEMVVVKDIEFYSFCEHHMLPIIGKAHVAYIPNGKVVGLSKIPRVVDVFARRLQIQEQMTEQICDALNEHLKPKGVAVMIDARHMCMEMRGVEKICSTTVTSSLRGLFKSDKKTKDEFLSIVSSSFNK

SEQ ID NO: 4738 - protein, 190 aa, Arcobacter skirrowii; identical to SEQ ID NO: 4737
  REGION 1..190: note = tr|A0A4Q0UCL4|A0A4Q0UCL4_9PROT GTP cyclohydrolase 1; OS = Arcobacter skirrowii CCUG 10374 OX=1032239 GN=folE PE=3; SV = 1

SEQ ID NO: 4739 - protein, 190 aa, Arcobacter sp.
  REGION 1..190: note = tr|A0A4V1LTU8|A0A4V1LTU8_9PROT GTP cyclohydrolase 1; OS = Arcobacter sp. F155 OX=2044512 GN=folE PE=3 SV=1
MSKELEFENSVKNILEYIGEDINREGLEKTPSRVRKAFEFMCGGYKQNPEEIINSALFTSSNDEMVVIKDIEFYSMCEHHMLPIIGKAHIAYIPNGKVVGLSKIPRVVDVFARRLQIQEQMTEQICDALHETLNPKGVAVMIDARHMCMEMRGVEKICSTTVTSALRGLFKKDKKTKDEFLSIVAQSLHK

SEQ ID NO: 4740 - protein, 188 aa, Arcobacter sp.
  REGION 1..188: note = tr|A0A1Y5DW04|A0A1Y5DW04_9PROT GTP cyclohydrolase 1; OS = Arcobacter sp. 31_11_sub10_T18 OX=1856277 GN=folE PE=3; SV = 1
MEEKFENAVRDMLEAIGEDVNREGLEKTPSRVRKAYEFMCSGYKQDPKEIIQKALFTSTNEEMVILKDIEFYSQCEHHMLPIIGKAHIAYIPNGKVVGLSKIPRVVDVFARRLQIQEQMTEQIADALNEHLQPKGVAVVLDARHMCMEMRGVEKICSTTVTSALRGIFKKEKKTKDEFLSIISSSFRK

SEQ ID NO: 4741 - protein, 190 aa, unidentified
  source 1..190: note = Arcobacter suis
  REGION 1..190: note = tr|A0A443TMS7|A0A443TMS7_9PROT GTP cyclohydrolase 1; OS = Arcobacter suis OX=1278212 GN=folE PE=3 SV=1
MSSEIEFENAIKKMLEHVGEDINREGLIDTPKRVRKAYEFMCSGYKQDPKEIIEKALFTSTNDEMVVVKDIEFYSQCEHHMLPIIGKAHVAYIPNGKVIGLSKIPRVVDVFARRLQIQEQLTEQICDALNEHLKPKGVAVMIDARHMCMEMRGVEKICSTTVTSALRGLFKSNKTTKDEFLSIVAQSLHK

SEQ ID NO: 4742 - protein, 190 aa, Arcobacter thereius
  REGION 1..190: note = tr|A0A1C0B580|A0A1C0B580_9PROT GTP cyclohydrolase 1; OS = Arcobacter thereius OX=544718 GN=folE PE=3 SV=1
MKNEKEFEDSIKNILNYIDEDINREGLIDTPKRVRKAYEFMFGGYKECPKEIIQKALFTSSNDEMVVVKDIEFYSFCEHHMLPIIGKVHVAYIPNGKVVGLSKIPRVVDVFARRLQIQEQMTEQICDALNEYLKPKGVAVIIDARHMCMEMRGVQKICSTTVTSSLRGLFKSDKKTKDEFLSIVSSSFNK

SEQ ID NO: 4743 - protein, 250 aa, Arcobacter thereius
  REGION 1..250: note = tr|A0A1C0ATP0|A0A1C0ATP0_9PROT GTP cyclohydrolase 1 type 2 OS=Arcobacter thereius OX=544718 GN=AAX27_01840; PE = 4 SV=1
MQIKDIYEYLNTISPFELQEKWDNSGLLVGNMEDNFENLYLSMDLDLELVETLKPNSLVITHHPLIFSGLKRVNYNTYSTKIVRELIKKDISLISMHTNIDKTHLNRFVIERILDFKVDNQNEFIANCSVDFSFDDLLKHLNKKLNLKNIKYVKTKEEIKKIAICTGSAMSLIDEVDADCFLTGDIKYHDAMEAKARGISLIDIRHYESENAFSLLLEELLKDYLKKNQFKAIILASKNPFEFFKGETVE

SEQ ID NO: 4744 - protein, 190 aa, Arcobacter trophiarum
  REGION 1..190: note = tr|A0A4Q0ZYP1|A0A4Q0ZYP1_9PROT GTP cyclohydrolase 1; OS = Arcobacter trophiarum LMG 25534 OX=1032241 GN=folE PE=3; SV = 1
MNKELEFENSIKSILEYIGEDTQREGLLDTPKRVRKAYEFMCSGYKQCPKEIIQKALFTSTNDEMVVVKDIEFYSFCEHHMLPIIGKAHVAYIPNGKVVGLSKIPRVVDVFARRLQIQEQMTEQICDALNEHLKPKGVAVIIDARHMCMEMRGVEKICSTTITSSLRGLFKSDKKTKDEFLSIVSASFQK

SEQ ID NO: 4745 - protein, 190 aa, unidentified
  source 1..190: note = Arcobacter venerupis
  REGION 1..190: note = tr|A0A443TV44|A0A443TV44_9PROT GTP cyclohydrolase 1; OS = Arcobacter venerupis OX=1054033 GN=folE PE=3 SV=1
MSSEIEFENAIKKMLEHVGEDITREGLIDTPKRVRKAYEFMCSGYKQDPKEIIEKALFTSTNDEMVVVKDIEFYSQCEHHMLPIIGKAHVAYIPNGKVIGLSKIPRVVDIFARRLQIQEQLTEQICDALNEHLKPKGVAVMIDARHMCMEMRGVEKICSTTVTSALRGLFKSNKTTKDEFLSIVAQSLHK

SEQ ID NO: 4746 - protein, 212 aa, unidentified
  source 1..212: note = Arcticibacter pallidicorallinus
  REGION 1..212: note = tr|A0A2T0U7K4|A0A2T0U7K4_9SPHI GTP cyclohydrolase 1; OS = Arcticibacter pallidicorallinus OX=1259464 GN=folE PE=3; SV = 1
MKEHDLDHSGEENEIGYVKVDRYDPLKIERIASHYSDILSDLGEDPQREGLLKTPERVAKALQFLTHGYDLKPEEILKSAMFKEEYSQMVVVKDIEVYSMCEHHLLPFFGKAHIAYIPNGHIVGLSKIPRVVDAFARRLQVQERLTNEIRDCIQSTLAPLGVAVVIECKHLCMSMRGIQKQNSVTTTSAFTGAFANERTRSEFLTLITASLD

SEQ ID NO: 4747 - protein, 132 aa, unidentified
  source 1..132: note = Arcticibacter svalbardensis
  REGION 1..132: note = tr|R9GRU5|R9GRU5_9SPHI GTP cyclohydrolase 1; OS = Arcticibacter svalbardensis MN12-7 OX=1150600; GN = ADIARSV_2435 PE=3 SV=1
MFKEEYSQMVVVKDIEVYSMCEHHLLPFFGKAHIAYIPNGHIVGLSKIPRVVEAYSRRLQVQERLTNEIRDCIQKTLAPLGVAVVIECKHLCMSMRGIQKQNSVTTTSAFTGAFANERTRSEFLTLITASLD

SEQ ID NO: 4748 - protein, 238 aa, unidentified
  source 1..238: note = Arcticibacterium luteifluviistationis
  REGION 1..238: note = tr|A0A2Z4G792|A0A2Z4G792_9BACT GTP cyclohydrolase 1; OS = Arcticibacterium luteifluviistationis OX=1784714; GN = folE PE=3 SV=1
MKQKEIMSNTQDNKIERQIDEIGDDHISTNIFDTPLREDAFEMDDDTKMQKIEEHFSQIMQIMGLDLTDDSLSGTPRRVAKMYVKELFSGLNPKNLPALTHFKNHYKYNEMLVERDIMFHSNCEHHFVPIVGKAHIAYIANGHVIGLSKLHRVVNHFARRPQVQERMTIQIGEALKTVLGTDSVAVILDADHMCVSSRGINDQTSSTVTSFYGGEFNKSETRDEFIRMISLRRGELKY

SEQ ID NO: 4749 - protein, 199 aa, unidentified
  source 1..199: note = Ardenticatena maritima
  REGION 1..199: note = tr|A0A0P6Y1I4|A0A0P6Y1I4_9CHLR GTP cyclohydrolase 1; OS = Ardenticatena maritima OX=872965 GN=folE PE=3 SV=1
MRAQARTAALANTDTTAQAVRALLEAIGEDPTREGLERTPERVARMYAELTAGYYVDPEELVNDALFDISYDEMVIVRDIEFYSLCEHHLLPFFGHAHVAYIPNGRVIGLSKIPRVVDMFARRLQVQERMTVQIADFLEETLSPKGVAVVVEGMHMCSMMRGVKKANARMVSSAMRGIFRTDPRTRNEFVNLVQRGEHL

SEQ ID NO: 4750 - protein, 216 aa, unidentified
  source 1..216: note = Ardenticatena maritima
  REGION 1..216: note = tr|A0A0M9UD87|A0A0M9UD87_9CHLR GTP cyclohydrolase 1; OS = Ardenticatena maritima OX=872965 GN=folE PE=3 SV=1
MTHAHDEHPILNQLDTAIRAQARTAALANTDTTAQAVRALLEAIGEDPTREGLERTPERVARMYAELTAGYYVDPEELVNDALFDISYDEMVIVRDIEFYSLCEHHLLPFFGHAHVAYIPNGRVIGLSKIPRVVDMFARRLQVQERMTVQIADFLEETLSPKGVAVVVEGMHMCSMMRGVKKANARMVSSAMRGIFRTDPRTRNEFVNLVQRGEHL

SEQ ID NO: 4751 - protein, 216 aa, unidentified; identical to SEQ ID NO: 4750
  source 1..216: note = Ardenticatenia bacterium
  REGION 1..216: note = tr|A0A3M1BUV8|A0A3M1BUV8_9CHLR GTP cyclohydrolase 1; OS = Ardenticatenia bacterium OX=2099665 GN=folE PE=3 SV=1

SEQ ID NO: 4752 - protein, 199 aa, unidentified
  source 1..199: note = Arenibacter algicola
  REGION 1..199: note = tr|A0A221V211|A0A221V211_9FLAO GTP cyclohydrolase 1; OS = Arenibacter algicola OX=616991 GN=folE PE=3 SV=1
MTQYRNLEEYNLEITDEVKSRYSSIINEIGEDLNRDGLVKTPERAAKAMLFLTQGYKQDAVEILKGAMFKESYDEMVIIKDIEVYSLCEHHMLPFFGKAHIAYIPNGHIVGLSKIPRVVDVFARRLQVQERLTNDILECINNTLKPQGVAVVIEASHMCMMMRGVQKQNSVTTTSGFRGQFEKIETRNEFLKLISSKLS

SEQ ID NO: 4753 - protein, 226 aa, unidentified
  source 1..226: note = Arenibacter algicola
  REGION 1..226: note = tr|A0A221UYB4|A0A221UYB4_9FLAO GTP cyclohydrolase 1; OS = Arenibacter algicola OX=616991 GN=folE PE=3 SV=1
MKIDNALEKHFEELGDDHVSAAEDTPLRKDAFVLSDEEKIERIRGSVNEIMLTLGLDLDDDSLKGTPNRVAKMFVQEIFGGLNPKKRPKSSTFDNKYKYGEMLVEKNITLYSTCEHHLLPIVGKAHVAYISKGTVVGLSKMNRIVDYYAKRPQVQERLNIQIVRELQQVLGTEDVACVIDAKHLCVNSRGIRDIESSTVTAEYGGKFKEEAVRREFLDYINIDTKF

SEQ ID NO: 4754 - protein, 199 aa, Arenibacter echinorum
  REGION 1..199: note = tr|A0A327R722|A0A327R722_9FLAO GTP cyclohydrolase 1; OS = Arenibacter echinorum OX=440515 GN=folE PE=3 SV=1
MTQYRNLEEYNLEVTDEVKSRYSSIIKEIGEDLNRDGLIKTPERAAKAMLFLTQGYKQDAVEILKGAMFKESYDEMVIIKDIEVYSLCEHHMLPFFGKAHIAYIPNGHIVGLSKIPRVVDVFARRLQVQERLTNDILECINNTLKPQGVAVVIEASHMCMMMRGVQKQNSVTTTSGFRGQFEKIETRNEFLKLISSKLS

SEQ ID NO: 4755 - protein, 238 aa, Arenibacter echinorum
  REGION 1..238: note = tr|A0A327RFN4|A0A327RFN4_9FLAO GTP cyclohydrolase 1; OS = Arenibacter echinorum OX=440515 GN=folE PE=3 SV=1
MYIFAALKSNILMKIDNALEKHFEELGDDHVSAAEDTPLRKDAFVLSDEEKIARIRASVNEIMLTLGLDLEDDSLKGTPNRVAKMFVQEIFGGLNPKRRPKSSTFDNKYKYGEMLVEKNITLYSTCEHHLLPIVGKAHVAYISKGTVVGLSKMNRVVDYYAKRPQVQERLNIQIVRELQQVLGTEDVACVIDAKHLCVNSRGIRDIESSTVTAEYGGKFKEEAVRREFLDYINIDTKF

SEQ ID NO: 4756 - protein, 238 aa, Arenibacter nanhaiticus
  REGION 1..238: note = tr|A0A1M6JT02|A0A1M6JT02_9FLAO GTP cyclohydrolase 1; OS = Arenibacter nanhaiticus OX=558155 GN=folE PE=3 SV=1
MYIFAALKSHILMKIDNALEKQFEELGDDHVSAAEDTPLRKDAFVLSDEEKIAKIQGNVNEIMLTLGLDLEDDSLKGTPNRVAKMFVSEIFGGLNPRRKPKSSTFSNKYKYGEMLVEKNITLYSTCEHHLLPIVGKAHVAYISKGTVVGLSKMNRIVDYFAKRPQVQERLNIQIVRELQKVLGTEDVACVIDAKHLCVNSRGIRDIESSTVTAEYGGKFKDEAVRREFLDYINIDTKF

SEQ ID NO: 4757 - protein, 199 aa, Arenibacter nanhaiticus
  REGION 1..199: note = tr|A0A1M6DIJ6|A0A1M6DIJ6_9FLAO GTP cyclohydrolase 1; OS = Arenibacter nanhaiticus OX=558155 GN=folE PE=3 SV=1
MAPYKSLEEYNLEITDEVKNRYSSIINEIGEDVSREGLLKTPERAAKAMLFLTQGYKQDAVEILEGALFKESYDDMVIIKDIELYSLCEHHMLPFFGKAHIAYIPDGQIVGLSKIPRVVDVFARRLQVQERLTHDILECLNNTLKPKGVAVVIEASHMCMMMRGVQKQNSVTTTSGFRGQFEKIETRNEFLKLISAKLS

SEQ ID NO: 4758 - protein, 230 aa, Arenibacter palladensis
  REGION 1..230: note = tr|A0A543W7Q1|A0A543W7Q1_9FLAO GTP cyclohydrolase 1; OS = Arenibacter palladensis OX=237373 GN=folE PE=3 SV=1
MNIDTLNKKNGHKLNGFTHEDIGDDHLYTGLETPMKPDAFKLSDTEKKQRIALLFQEIMDVMGLDLTDDSLKGTPERVAKMYIDEIFSGLNPANKPKIALFDNKYQYNQMLVEKNITFYSNCEHHFVPIIGKAHVAYISSGKVIGLSKLNRIVQYYAKRPQVQERLTNQIAEDLKRILGTDDVAVIIDAKHLCVSSRGIKDETSATVTSYYGGKFNTPSKVAELQNYLKN

SEQ ID NO: 4759 - protein, 226 aa, Arenibacter palladensis; identical to SEQ ID NO: 4753
  REGION 1..226: note = tr|A0A1M5BGE5|A0A1M5BGE5_9FLAO GTP cyclohydrolase 1; OS = Arenibacter palladensis OX=237373 GN=folE PE=3 SV=1

SEQ ID NO: 4760 - protein, 232 aa, Arenibacter sp.
  REGION 1..232: note = tr|A0A3S0C6W4|A0A3S0C6W4_9FLAO GTP cyclohydrolase 1; OS = Arenibacter sp. GUO666 OX=2489054 GN=folE PE=3 SV=1
MKIDALVASKEKTATLNGFTHGEIGDDHLSTGLETPMKSEAFALSDSEKKERIAQLFHEIMDVMGLDLTDDSLKGTPERVAKMYIDEIFSGLNPENKPKVALFDNKYQYNQMLVEKNITFYSNCEHHFVPIIGKAHVAYISSGKVIGLSKLNRIVQYYAKRPQVQERLTNQIAEDLKQILGTNDVAVIIDAKHLCVSSRGIKDDTSATVTSFYGGAFSSPTKITELLNYINQ

SEQ ID NO: 4761 - protein, 232 aa, Arenibacter sp.
  REGION 1..232: note = tr|A0A318IBV2|A0A318IBV2_9FLAO GTP cyclohydrolase 1; OS = Arenibacter sp. ARW7G5Y1 OX=2135619 GN=folE PE=3 SV=1
MNTKTVAPNKINGHKLNGFTLADIGDDHLYTGLDTPLKANAFELSDTEKKQRIALLFQEIMDVMGMDLTDDSLKGTPERVAKMYIDEIFSGINPKNRPKIALFDNKYQYNQMLVEKNITFYSNCEHHFVPIIGKAHVAYISTGKVIGLSKLNRIVQYYAKRPQVQERLTNQIAEDLKTILGTEDVAVIIDAKHLCVSSRGIKDESSTTVTSYYGGKFNTASKITELQNYIKD

SEQ ID NO: 4762 - protein, 232 aa, Arenibacter troitsensis
  REGION 1..232: note = tr|A0A1X7ID52|A0A1X7ID52_9FLAO GTP cyclohydrolase 1; OS = Arenibacter troitsensis OX=188872 GN=folE PE=3 SV=1
MNTETLTLNKINGQNLNGFTHEDIGDDHLYTGFETPLKADAFELSDTEKKQRIALLFQEIMEVMGLDLRDDSLKGTPERVAKMYIDEIFSGLNPANKPKIALFDNKYQYNQMLVEKNITFYSNCEHHFVPIIGKAHVAYISSGKVIGLSKLNRIVQYYAKRPQVQERLTNQIAEDLKRILGTENVAVIIDAKHLCVSSRGIKDESSTTVTAFYGGKFNSSSKITELQNYIKT

SEQ ID NO: 4763 - protein, 199 aa, Arenibacter troitsensis
  REGION 1..199: note = tr|A0A1X7JC67|A0A1X7JC67_9FLAO GTP cyclohydrolase 1; OS = Arenibacter troitsensis OX=188872 GN=folE PE=3 SV=1
MTQYRNLEEYNLEITDEVKARYSSIINEIGEDLNRDGLIKTPERAAKAMLFLTQGYKQDAVEILKGAMFKESYDEMVIIKDIEVYSLCEHHMLPFFGKAHIAYIPNGHIVGLSKIPRVVDVFARRLQVQERLTNDILECLNNTLKPQGVAVVIEASHMCMMMRGVQKQNSVTTTSGFRGQFEKIETRNEFLKLISSNLS

SEQ ID NO: 4764 - protein, 258 aa, Arenicella xantha
  REGION 1..258: note = tr|A0A395JKQ9|A0A395JKQ9_9GAMM GTP cyclohydrolase FolE2 OS=Arenicella xantha OX=644221 GN=folE2 PE=3 SV=1
MEDVQGSVDTRQIPINRVGIKDIQHPITVLGKDGRRSASIATFSMSVSLPHDQKGTHMSRFIQMLNETETEISAKNFNKMLSSMVERLEAESGYIEMQFPYFIEKTAPVSGVKSLMDYQVNLVGQIEQGHIDATLEVTIPVKSLCPCSKKISEYGAHNQRSHITVGINCSSKLWLDELIKSVEAQASAELFAILKRPDEKYITERAYNNPKFVEDVVRDVADVFDQNDRILRYYVHAENFESIHNHSAFAVVEHDKSV

SEQ ID NO: 4765 - protein, 180 aa, Arenicella xantha
  REGION 1..180: note = tr|A0A395JHC9|A0A395JHC9_9GAMM GTP cyclohydrolase 1; OS = Arenicella xantha OX=644221 GN=folE PE=3 SV=1
MEEAYRKIIEECGEDLTRPGLVDTPKRAASAMKFLTRGYDQKLDDVINNALFPSDSREMVIVKDIELYSMCEHHLLPFIGRAHVAYIPNGKVLGLSKIARIVDMYARRMQIQEQLTTEIAETIREVTGAEGVGVIIEAKHMCMMMRGVEKQNSSMKTSSMLGIFRSNQSTRSEFLSLVSN

SEQ ID NO: 4766 - protein, 434 aa, unidentified
  source 1..434: note = Arenimonas caeni
  REGION 1..434: note = tr|A0A2P6M6L8|A0A2P6M6L8_9GAMM GTP cyclohydrolase FolE2 OS=Arenimonas caeni OX=2058085 GN=folE2 PE=3 SV=1
MASPPPRSPPAGASLCCATGPASCSPRCRRRGTRCCIVVFAAVSTVPAWPGWPPAAASTRRRPSPRCGGPGASRAPRPDTQRCIRRAGNGPRLDVTCIAPHLALTASPTRRAALAPSNHENTARVLPDIANEARAALAGALDWVGMGEIEMPVVLAGDGGRSVAKVNAFVNLTQPDVRGIHMSRLYLHVDKMLSNEPASPASLRRLLKDFLDSHAGLSDRAMVSLRFEHLVRRKALASDNSGWKAYPVSITAVMDRGHFALELGLSVAYSSTCPCSAALARQLIQEQFEADFAAGKALDREAVLAWLGSEQGIRATPHSQRSHAEVKLRLVPSFQDFPIVEAIDRIEDALKTPVQTAVKRVDEQAFALLNGQNLMFCEDAARRIQSTLRKDERIADFWLRVSHLESLHPHDAVAVATKGVAGGYTALPDGLAAR

SEQ ID NO: 4767 - protein, 194 aa, unidentified
  source 1..194: note = Arenimonas caeni
  REGION 1..194: note = tr|A0A2P6M7E5|A0A2P6M7E5_9GAMM GTP cyclohydrolase 1; OS = Arenimonas caeni OX=2058085 GN=folE PE=3 SV=1
MSKPVNQAEAEEAVRTLLRWAGEDPAREGLLDTPRRVAEAYGDWFRGYREDPTAYLARTFEEVEGYDEMIVLRDIEFESHCEHHMAPIIGKAHIGYLPSGKVVGISKLARVVEAYARRFQVQEKMTAQIARCIQDVLQPRGVGVVIEGAHECMTTRGIHKRGVSMVTSKMLGSFREDARTRAEFLRFIDVGPGR

SEQ ID NO: 4768 - protein, 194 aa, Arenimonas composti
  REGION 1..194: note = tr|A0A091BGB0|A0A091BGB0_9GAMM GTP cyclohydrolase 1; OS = Arenimonas composti TR7-09 = DSM 18010 OX=1121013; GN = folE PE=3 SV=1
MNEPVTREQAEDAVRVLLRWAGEDPAREGLVDTPKRVAKAYRDWFSGYGIDPTEYLARTFEEVAGYDEMIVLRDIEYESHCEHHMAPIIGKVHIGYLPDGKVVGISKLARVVEAYARRFQVQEKMTAQIARCIQDVLQPRGVGVVVEGAHECMTTRGIHKRGVSMITSKMLGTFRDDARTRSEFLQFIDVGPGR

SEQ ID NO: 4769 - protein, 323 aa, Arenimonas composti
  REGION 1..323: note = tr|A0A091BH26|A0A091BH26_9GAMM GTP cyclohydrolase FolE2 OS=Arenimonas composti TR7-09 = DSM 18010 OX=1121013; GN = folE2 PE=3 SV=1
MAPFDQTSTARALPDIAADGRPALAGALDWVGMGRIEMPVSLQADDGRVVTSPAKVDAFVNLRREDARGIHMSRLYLHVDRMLSAEPVTPAGLRRLLKDFLESHAGLSDRALLRLQFDHLVRRKALASDNSGWKAYPVTLTAVMERGHFALELGLQVQYSSTCPCSAALARQLIQQQFSADFAAGLLDREAVLAWLGSEQGIVATPHAQRSIAEVKLRLVPAFADIPIVGFIDRIEAALKTPVQTAVKRVDEQAFALLNGQNLMFCEDAARRVQQALDVDERIADFLVRVAHQESLHPHDAVAVASKGVAGGYSTLPDGLVPR

SEQ ID NO: 4770 - protein, 194 aa, Arenimonas donghaensis
  REGION 1..194: note = tr|A0A087MGY6|A0A087MGY6_9GAMM GTP cyclohydrolase 1; OS = Arenimonas donghaensis DSM 18148 = HO3-R19 OX=1121014; GN = folE PE=3 SV=1
MSDPVTQDQAEEAVRTLLRWAGEDPAREGLIDTPRRVAKAYGDWFSGYRVDPREYLARTFEEVEGYDELIVLRDIEFESHCEHHMAPIIGKAHIGYLPAGKVVGISKLARVVEAYARRFQVQEKMTAQIANCIQDVLQPRGVGVVVEGAHECMTTRGIHKRGVSMITSKMLGGFREDARTRAEFLRFIDVGPGR

SEQ ID NO: 4771 - protein, 324 aa, Arenimonas donghaensis
  REGION 1..324: note = tr|A0A087ML82|A0A087ML82_9GAMM GTP cyclohydrolase FolE2 OS=Arenimonas donghaensis DSM 18148 = HO3-R19; OX = 1121014 GN=folE2 PE=3 SV=1
MAPSNLDNTARVLPDVANEPRAALAGALDWVGMGEIEMPVTLVGDGGRQSTAAARVNAFVNLAQPDVRGIHMSRLYLHVDKLLSSEPATPTSLRRLLKEFLDSHAGLSDRAMVSLRFEHLVRRPALASDNSGWKAYPVTITAVMDRGHFAVELGLSVAYSSTCPCSAALARQLIQEQFEADFAAGKPLDRDAVLAWLGTEQGIRATPHSQRSHAEVKLRLVPSFQDFPVIDAIDRIEAALKTPVQTAVKRVDEQAFALLNGQNLMFCEDAARRIKAALQDDERISDFWLRASHLESLHPHDAVAVATKGVAGGYSALPEGLAPR

SEQ ID NO: 4772 - protein, 324 aa, Arenimonas malthae
  REGION 1..324: note = tr|A0A091B959|A0A091B959_9GAMM GTP cyclohydrolase FolE2 OS=Arenimonas malthae CC-JY-1 OX=1384054 GN=folE2; PE = 3 SV=1
MAPSNLDNTARVLPDVAKEAQPAHAGVLDWVGMGEIEMPVSLAGDDGRTSTAGARVNAFVNLKRPDVRGIHMSRLYLHVDKALSNEPATPGAVRRLLKDFLESHADLSDRAMVSLRFEHLVRRPALASDNSGWKTYPVSITGVMDRGQFALELGLTVAYSSTCPCSAALARQLIQEQFANDFAEGGTLDREAVLAWLGTEQGIRATPHSQRSYAEVKLRLVPSFQNFPIVEIIDRIEQALKTPVQTAVKRVDEQAFALLNGQNLMFCEDAARRMQAALERDERISDFWLRASHHESLHPHDAVAVATKGVPGGYTALPDGLASR

SEQ ID NO: 4773 - protein, 194 aa, Arenimonas malthae
  REGION 1..194: note = tr|A0A091BGX2|A0A091BGX2_9GAMM GTP cyclohydrolase 1; OS = Arenimonas malthae CC-JY-1 OX=1384054 GN=folE PE=3 SV=1
MTKPVTQADAENAVRVLLQWAGEDPAREGLLDTPRRVAEAYGDWFSGYREDPRAYLSRTFEEVAGYDEMIVLRDIEFESHCEHHMAPIIGKAHIGYLPAGKVVGISKLARVVEAYARRFQVQEKMTAQIARCIEEVLQPRGVGVVVVGAHECMTTRGIHKRGVSMVTSKMLGDFRDDARTRSEFLKFIDVGPGR

SEQ ID NO: 4774 - protein, 312 aa, unidentified
  source 1..312: note = Arenimonas metalli
  REGION 1..312: note = tr|A0A091B1D5|A0A091B1D5_9GAMM GTP cyclohydrolase FolE2 OS=Arenimonas metalli CF5-1 OX=1384056 GN=folE2 PE=3; SV = 1
MPDIAAEARPALSGVLDWVGMGEIEMPVALQADDGRTVSSGARVNAFVNLKRGDVRGIHMSRLYLHVDKALSSEPVTPASIRRLLKDFLESHADLSDRAMVSLRFDHLVRRAALASDNSGWKSYPVSITGVMDRGHFALELGVEAAYSSTCPCSAALARQLIQEQFDADFAAGKPLDRDAVMAWLGSEQGIRATPHSQRSFATVKLRLVPSFADFPIVEIIDRIENALKTPVQTAVKRVDEQAFALLNGQNLMFCEDAARRIQDALDQDERISDFWLRASHHESLHPHDAVAVATKGIPGGYTAVPDGLQSR

SEQ ID NO: 4775 - protein, 193 aa, unidentified
  source 1..193: note = Arenimonas metalli
  REGION 1..193: note = tr|A0A091AVH1|A0A091AVH1_9GAMM GTP cyclohydrolase 1; OS = Arenimonas metalli CF5-1 OX=1384056 GN=folE PE=3 SV=1
MDKPSKEEAEAAVRTLLRWAGEDPSREGLLDTPRRVVDAYGDWFSGYGEDPRGYLERTFEEVAGYDEMIVLRDIEFESHCEHHMAPIIGKAHIGYLPRGKVVGISKLARVVEAYARRFQVQEKMTAQIARCIEEVLQPRGVGVVVVGAHECMTTRGIHKRGVSMVTSKMLGDFRDDARTRAEFLRFIEVGPGR

SEQ ID NO: 4776 - protein, 314 aa, Arenimonas oryziterrae
  REGION 1..314: note = tr|A0A091AW92|A0A091AW92_9GAMM GTP cyclohydrolase FolE2 OS=Arenimonas oryziterrae DSM 21050 = YC6267; OX = 1121015 GN=folE2 PE=3 SV=1
MAPINQENLARVLPDIANEARPSVAGALEWVGMGEIHAPVGVVGADGQTITSGARVNAFVNLTRPEARGIHMSRLYLHVDKALSSEPVSPCSIRRLLKDFLDSHADLSDRAMLQIHFDYLVRRPALVSDNTGWKSYPVSVNALLDRGQFSLEVGVDVTYSSTCPCSAALARQLIQERFREDFAAGSPLDHDAVLQWLGSEQGIMATPHSQRSTAEVKVRLVPSFQNLPFIDIIDRIEAALKTPVQTAVKRVDEQAFARLNGQNLMFCEDAARRMQKTLDEDERVADFWVRATHFESLHAHNAVAVATKGVAGGY

SEQ ID NO: 4777 - protein, 193 aa, Arenimonas oryziterrae
  REGION 1..193: note = tr|A0A091AU73|A0A091AU73_9GAMM GTP cyclohydrolase 1; OS = Arenimonas oryziterrae DSM 21050 = YC6267 OX=1121015; GN = folE PE=3 SV=1
MSEPTTQAEAEAAVRVLLRWAGEDPAREGLIDTPKRVAKAYKDWFSGYGEDPAEYLARTFEEVAGYDEMIVLRDIEFESHCEHHMAPIIGKAHVGYLPDGKVVGISKLARVVETYARRFQVQEKMTAQIARCIEHVLQPRGVAVVIEGAHECMTTRGIHKRGVSMVTSKMLGAFRDDARTRMEFLQFIDMSGR

SEQ ID NO: 4778 - protein, 312 aa, Arenimonas sp.
  REGION 1..312: note = tr|A0A352QUR1|A0A352QUR1_9GAMM GTP cyclohydrolase FolE2 OS=Arenimonas sp. OX=1872635 GN=folE2 PE=3 SV=1
MPDVAKEAQPAHAGVLDWVGMGEIEMPVSLAGDDGRTTTAGARVNAFVNLKRPDVRGIHMSRLYLHVDKALSNEPATPGAVRRLLKDFLESHADLSDRAMVSLRFEHLVRRPALASDNSGWKTYPVSITGVMDRGQFALELGLTVAYSSTCPCSAALARQLIQEQFANDFAEGGTLDREAVLAWLGTEQGIRATPHSQRSYAEVKLRLVPSFQNFPIVEIIDRIEQALKTPVQTAVKRVDEQAFALLNGQNLMFCEDAARRMQAALERDERISDFWLRASHHESLHPHDAVAVATKGVPGGYTALPDGLASR

SEQ ID NO: 4779 - protein, 197 aa, Arenimonas sp.
  REGION 1..197: note = tr|A0A5B2Z5E2|A0A5B2Z5E2_9GAMM GTP cyclohydrolase 1; OS = Arenimonas sp. 3729k OX=2608255 GN=folE PE=3 SV=1
MSRKEKTVSQAEAEEAVRTLLRWAGEDPDREGLLDTPRRVVEAYGDWFRGYREDPHDYLARTFEEVAGYDEMIVLRDIEFESHCEHHMAPIIGKVHIGYLPDGKVVGISKLARVVEAYARRFQVQEKMTAQIARCIQDVLQPRGVGVVVEGAHECMTTRGIHKRGVGMVTSKMLGSFREDARTRAEFLRFIDVGPGR

SEQ ID NO: 4780 - protein, 225 aa, unidentified
  source 1..225: note = Arenitalea lutea
  REGION 1..225: note = tr|A0A1M6FZZ1|A0A1M6FZZ1_9FLAO GTP cyclohydrolase 1; OS = Arenitalea lutea OX=1178825 GN=folE PE=3 SV=1
MKFDNNLEDFDALGNEHIGTSENTPMRNDAFKLSNEEKIDIIKDDVRHIMETLGLDLTDDSLKGTPNRVAKMFVKEIFGGLDPNKKPSASTFENKYKYGEMLVEKNITVYSTCEHHLLPIVGRAHIAYISNGTVVGLSKMNRIVDYFAKRPQVQERLTIQVVRELQEVLGTKDVACVIDAKHLCVNSRGIRDIESSTVTSEFGGKFKDMATRREFLDYIKLDTKF

SEQ ID NO: 4781 - protein, 231 aa, unidentified
  source 1..231: note = Arenitalea lutea
  REGION 1..231: note = tr|A0A1M6CAY7|A0A1M6CAY7_9FLAO GTP cyclohydrolase 1; OS = Arenitalea lutea OX=1178825 GN=folE PE=3 SV=1
MEIEKLITKKNGNKLNGFTLEDIGNDHLFTGLETPMKPDAFKLSDSEKKARIAILFEEIMDVMGLDLNDDSLQGTPERVAKMYIDEIFSGLNPANKPKVALFDNKYQYNQMLIEKNITFYSNCEHHFVPIIGKAHVAYISSGKVIGLSKLNRIVQYYAKRPQVQERLTNQIANELKSILETDNVAVIIDAKHLCVSSRGIKDDTSSTVTAYYGGQFNTSEKITELQNYINT

SEQ ID NO: 4782 - protein, 260 aa, unidentified
  source 1..260: note = Armatimonadetes bacterium
  REGION 1..260: note = tr|A0A3D4ZRZ2|A0A3D4ZRZ2_9BACT GTP cyclohydrolase FolE2 OS=Armatimonadetes bacterium OX=2033014 GN=folE2; PE = 3 SV=1
MKDVASEVDARGITIDRVGIRDLHLPVRIRARDGGYARVLGRVDAAVELPGIQRGTHMSRFVNTLSEWSKQPVSVIEIEHTLRAMLERFAAPAAEVVLQFKYFLAKQAPASGRVSELDYDCAFEGRISSEGFRFVLGASVPIMTLCPCSKEISERGAHSQRATLSVRVNARPGVILWLEELIPLLEQQGSCEIYPLLKRADEKVVTETAYDNPKFVEDVVRDTIVALRGIPGVIGCSAECESMESIHNHTAYAYAEHGEL

SEQ ID NO: 4783 - protein, 189 aa, unidentified
  source 1..189: note = Armatimonadetes bacterium
  REGION 1..189: note = tr|A0A1Q7QQJ5|A0A1Q7QQJ5_9BACT GTP cyclohydrolase 1; OS = Armatimonadetes bacterium 13_1_40CM_3_65_7 OX=1805024; GN = folE PE=3 SV=1
MDKPVIERAVHQIIEAIGEDPKREGLIGTPRRIAEMYEELFAGLKEDPRELLEVGFDDEDHHELVIVKDIPFYSMCEHHFLPFHGVAHVGYIPKGRILGVSKVARLVEILARRPQVQERLTTQIADFLCQGGLNAAGAGVVIEAEHLCVTMRGIKKPGSKVVTSATRGVFREDARTRAEFFAIVEGKRS

SEQ ID NO: 4784 - protein, 272 aa, unidentified
  source 1..272: note = Aromatoleum aromaticum
  REGION 1..272: note = sp|Q5P229|GCH4_AROAE GTP cyclohydrolase FolE2; OS = Aromatoleum aromaticum (strain EbN1) OX=76114 GN=folE2; PE = 3 SV=2
MTSQQAHAIPDVQNLNDSRKLAIDKVGIKSIRHPVRVSDKNGGVQHTIAVFNMYVGLPHNFKGTHMSRFIEIINGNEREISVESIEPMLREMVKRLEAETGQIELTFPYFINKSAPISGVQSLMDYEVTFTAEIREGGAYTFTMKTVVPVTSLCPCSKKISEYGAHNQRSHVTVTAQTNSFLWIEELVQLVESQASCQLYGLLKRPDEKYVTEHAYDNPKFVEDMVRDVAGLLNAEARIDCYRVESENFESIHNHSAYALIECDKRLVVGAN

SEQ ID NO: 4785 - protein, 216 aa, unidentified
  source 1..216: note = Aromatoleum aromaticum
  REGION 1..216: note = tr|Q5NZ59|Q5NZ59_AROAE GTP cyclohydrolase 1; OS = Aromatoleum aromaticum (strain EbN1) OX=76114 GN=folE; PE = 3 SV=1
MSDIHDQHQHPQPPSAAGIGIPRSGSFDPAAFERAVNDLLRACGVAPDAIHTGKTSTRVRELWQRRLLGGYDMDPAEALGDGFDDDRTDMVVIRGIAVHGVCPHHLVPFRGVAHVAYLPGGRLHGFGRIARLVDAIGHRFTYQEWMTRDIADALLRHGHARGAACIVEAEQLCLLLGEDRRGDERVVTQAFAGEFETREHLRGEFLHAISGRTSGR

SEQ ID NO: 4786 - protein, 246 aa, unidentified
  source 1..246: note = Arsenicibacter rosenii
  REGION 1..246: note = tr|A0A1S2VFX6|A0A1S2VFX6_9BACT GTP cyclohydrolase 1; OS = Arsenicibacter rosenii OX=1750698 GN=folE PE=3 SV=1
MKPNGTLLNTRPLNGNGKHNDFELVDDLHAEEIGESHAATSIETPMRPDAFAMDDDHKIELITEHFREIMNILGLDLTDDSLKGSPRRVAKMYVKEAFSGLNPANKPKPTLFDNKFKYNEMLVEKDILVQSYCEHHFVPIIGKAHVAYISSGKVIGLSKLNRIVQYYAKRPQVQERLTVQIANELKDVLETENVAVIIDAKHLCVSTRGVRDVHSSTVTAAYHGKFEEEATRQEFLRYISGMNATL

SEQ ID NO: 4787 - protein, 205 aa, Arsenicicoccus sp.
  REGION 1..205: note = tr|A0A2W6WBX9|A0A2W6WBX9_9MICO GTP cyclohydrolase 1; OS = Arsenicicoccus sp. OX=1872639 GN=folE PE=3 SV=1
MSTPATPEVTAGGQPVLQGVDHARIEAAVREILLAVGEDPDRDGLQDTPARVARSYAEIFGGLRQDPRAVLGTTFDVDHDEMILVKDISLYSVCEHHLVPFHGSAHVAYIPGADGRVVGLSKLARLVDVYARRPQVQERLTTQIADALEDHLAPRGVLVVVEAEHLCMSMRGVRRPGARTLTSTVRGQLRNQATRAEAMSLITGR

SEQ ID NO: 4788 - protein, 191 aa, Arsenicicoccus sp.
  REGION 1..191: note = tr|A0A0K1FD91|A0A0K1FD91_9MICO GTP cyclohydrolase 1; OS = Arsenicicoccus sp. oral taxon 190 OX=1658671 GN=folE; PE = 3 SV=1
MVVDHARAEAAVRELLLAIGEDPDREGLRNTPARVARAYDEMFAGLRQDPGAVLDAVFEIGGHSELIMVRDIEVYSTCEHHLVPFHGVAHVGYIPGKDGRVTGLSKLARLVDVYAKRPQVQERLTTQIADALIDHLNPGGVIVVIECEHLCMSMRGVRKPGSRTLTSAVRGQLRDPATRAEAMQLALGGRG

SEQ ID NO: 4789 - protein, 207 aa, unidentified
  source 1..207: note = Arsenicitalea aurantiaca
  REGION 1..207: note = tr|A0A433XG37|A0A433XG37_9RHIZ GTP cyclohydrolase 1; OS = Arsenicitalea aurantiaca OX=1783274 GN=folE PE=3 SV=1
MDASVKTDRVTEISYADLVRPTQEEAEAAVRTLIAWAGDDPDREGLLDTPRRVARAYRELYSGYDLDAREVLARTFKEVGGYDDIVLVRDIPFASHCEHHMVPFTGKAHIAYLPHDGVVGLSKLARVVEIFARRLQTQENLTAQIIDAINEALNPRGAAVMIEAEHMCMSMRGVHAHGVSTLTHRFTGVFAEDRNEQDRFYALVGKR

SEQ ID NO: 4790 - protein, 178 aa, unidentified
  source 1..178: note = Arsenophonus endosymbiont
  REGION 1..178: note = tr|A0A3B0IVH8|A0A3B0IVH8_9GAMM GTP cyclohydrolase 1 type 2 OS=Arsenophonus endosymbiont of Aleurodicus floccissimus OX=2152761 GN=ybgI PE=4 SV=1
MTASQALLDEAVKLAADAIIVHHGYFWKNEATIILNMKRNRLKTLLCNDINLYGYHLLIDAQPILGNNVQLANIMVVRFEKLISPLLPMGSFAQPITADDLMSRLTNKLVRQPLYCGDNGPKEISTIDWCTGGGQNFIQQAAEAGVDAFVTGEVSEQTIHIAREMGIHFYGEGHHATE

SEQ ID NO: 4791 - protein, 219 aa, unidentified
  source 1..219: note = Arsenophonus endosymbiont
  REGION 1..219: note = tr|A0A3B0IRF6|A0A3B0IRF6_9GAMM GTP cyclohydrolase 1; OS = Arsenophonus endosymbiont of Aleurodicus floccissimus; OX = 2152761 GN=folE PE=3 SV=1
MSSLSQEAHLVRKALEVRGLETPLCGQSLSSSNERKQQIEGHMIEIMRLLNLDLKDDSLAETPKRVAKMYVDEIFSGLDYNNFPKITLIENKMDFDEMVTVRDITLTSVCEHHFVTIDGKATVAYIPKDKVIGLSKINRIVQFFSQRPQVQERLTQQILIALQILLGTSNVAVSIDAVHYCVKARGVRDVSSSTMTTSLGGLFKSSQNTRQEFLRNISR

SEQ ID NO: 4792 - protein, 222 aa, Arsenophonus nasoniae
  REGION 1..222: note = tr|A0A4P7KWL4|A0A4P7KWL4_9GAMM GTP cyclohydrolase 1; OS = Arsenophonus nasoniae OX=638 GN=folE PE=3 SV=1
MSSLSQEAHLVRKALEARGLETPLCGQSLSSNERKQQIELHMGEIMRLLNLDLSDDSLAETPKRVAKMYVDEIFSGLDYNNFPKITLIENKMDFDEMVTVRDITLTSICEHHFVTIDGKATVAYIPKEKVVGLSKINRIVQFFSQRPQVQERLTQQILIALQTLLGTANVAVSIDAVHYCVKARGVRDVSSSTMTTSLGGLFKSSQNTRQEFLRNISRLRNY

SEQ ID NO: 4793 - protein, 227 aa, Arsenophonus nasoniae
  REGION 1..227: note = tr|D2TY99|D2TY99_9GAMM GTP cyclohydrolase 1; OS = Arsenophonus nasoniae OX=638 GN=folE PE=3 SV=1
MLEKCMSSLSQEAHLVRKALEARGLETPLCGQSLSSNERKQQIELHMGEIMRLLNLDLSDDSLAETPKRVAKMYVDEIFSGLDYNNFPKITLIENKMDFDEMVTVRDITLTSICEHHFVTIDGKATVAYIPKEKVVGLSKINRIVQFFSQRPQVQERLTQQILIALQTLLGTANVAVSIDAVHYCVKARGVRDVSSSTMTTSLGGLFKSSQNTRQEFLRNISRLRNY

SEQ ID NO: 4794 - protein, 222 aa, Arsenophonus sp.
  REGION 1..222: note = tr|A0A2A2HIP7|A0A2A2HIP7_9GAMM GTP cyclohydrolase 1; OS = Arsenophonus sp. ENCA OX=1987579 GN=folE PE=3 SV=1
MSSLSQEAHLVRKALEARGLETPLCGQSLSSNERKQQIEGHMIEIMRLLNLDLKDDSLAETPKRVAKMYVDEIFSGLDYNNFPKITLIENKMDFDEMVTVRDITLTSVCEHHFVTIDGKATVAYIPKDKVIGLSKINRIVQFFSERPQVQERLTQQILIALQTLLGTSNVAVSIDAVHYCVKARGVRDVSSSAMTTSLGGLFKSSQNTRQEFLRNISRLRYR

SEQ ID NO: 4795 - protein, 214 aa, unidentified
  source 1..214: note = Arsukibacterium ikkense
  REGION 1..214: note = tr|A0A0M2V197|A0A0M2V197_9GAMM GTP cyclohydrolase 1; OS = Arsukibacterium ikkense OX=336831 GN=folE PE=3 SV=1
MLSEEAIIVRSALEAQGLETPMLDNGLSRDEKYQKISQLMTQVVSTLGLDLADDSLRETPHRIAKMYVDEIFGGLNYQNFPKIALIENKMQVREMVKVKDISFTSTCEHHFVTIDGSATVAYIPQGRIIGLSKINRIVRFFAQRPQVQERLTQQILLALQALLQTKDVAVTMDAVHYCVKSRGVMDMNSKTQTTALGGIFKDDGRTRAEFLARY

SEQ ID NO: 4796 - protein, 214 aa, unidentified
  source 1..214: note = Arsukibacterium sp.
  REGION 1..214: note = tr|A0A0M2VG79|A0A0M2VG79_9GAMM GTP cyclohydrolase 1; OS = Arsukibacterium sp. MJ3 OX=1632859 GN=folE PE=3 SV=1
MLPDEAVLVRSALEAQGLETPMLDNGLSRDEKYQKISKLMTEVISTLGLDLTDDSLSETPHRIAKMYVDEVFSGLNYSNFPKIALIDNKMQVREMVKVKDISFTSTCEHHFVTIDGSATVAYIPQGKIIGLSKINRIVRFFAQRPQVQERLTQQILLALQTLLQTKDVAVTMDAVHYCVKSRGVMDMNSKTQTTALGGIFKDDGRTRAEFLARY

SEQ ID NO: 4797 - protein, 212 aa, unidentified
  source 1..212: note = Arsukibacterium sp.
  REGION 1..212: note = tr|A0A0M2VDI7|A0A0M2VDI7_9GAMM GTP cyclohydrolase 1; OS = Arsukibacterium sp. MJ3 OX=1632859 GN=folE PE=3 SV=1
MLSNEAELVKSALQAKGLETPMRGNGLTREQKYVKINQLMTEVISTLGLDLHDDSLRETPHRIAKMYVDEVFGGLDYGNFPKIALIDNKMRVDEMIKVKNISFNSTCEHHFVTIDGTATVAYIPAERIIGLSKINRIVRFFAQRPQVQERLTQQILIALQTLLNTDNVAVTLNAVHYCVKSRGVMDVNSSTQTTALGGIFKESSRTRAEFLC

SEQ ID NO: 4798 - protein, 205 aa, Arthrobacter agilis
  REGION 1..205: note = tr|A0A1Y3M0E7|A0A1Y3M0E7_9MICC GTP cyclohydrolase 1; OS = Arthrobacter agilis OX=37921 GN=folE PE=3 SV=1
MTDFDDEVVEAALVATGSPVDQPRIARAVREILAAIGEDPDRDGLLDTPNRVAKAYAEMFAGLHQDAGEVLSTSFDLNHQELVLVKDIPFYSTCEHHLVPFRGTAHIGYIPSADGRVTGLSKLARLVEVYARRPQVQERLTTQIVDAMMEHLKPKGAIVVIECEHMCMSMRGVRKPGAKTVTSAVRGQIRETATRAEAMSLILGR

SEQ ID NO: 4799 - protein, 186 aa, Arthrobacter agilis
  REGION 1..186: note = tr|A0A1Y3M8U1|A0A1Y3M8U1_9MICC GTP cyclohydrolase 1; OS = Arthrobacter agilis OX=37921 GN=folE PE=3 SV=1
MDQDRIQRAVREILAAIGEDPDRDGLLDTPRRVAKAYAEMFAGLHQDAGEVLSTSFDLNHQELVLVKDIPFYSTCEHHLVPFHGAAHVGYIPSEEGRVTGLSKLARLVEVYARRPQVQERLTTQIVDAMMEHLKPKGAIVVIECEHMCMSMRGIRKPGAKTVTSAVRGQIRETATRAEAMSLILGR

SEQ ID NO: 4800 - protein, 200 aa, Arthrobacter alpinus
  REGION 1..200: note = tr|A0A1H5E1Q6|A0A1H5E1Q6_9MICC GTP cyclohydrolase 1; OS = Arthrobacter alpinus OX=656366 GN=folE PE=3 SV=1
MSISSAPPPELLDFEDPLTGDSPIDLPRAQAAVAELLRALGRDDNDPHLRDTPRRVAAAYAQMLTPRETSWTTFPNDDGYQGLVLVKDIPFNSLCQHHLLPFRGVAHVGYLPGERLFGLSKLARGVELFARDLQVQERLTQQLANWLEDTLSPRGVGVVMEAEHMCMSLRGVQTAGTLTRTSVFTGLLSDAGPLREQFPH

SEQ ID NO: 4801 - protein, 212 aa, Arthrobacter alpinus
  REGION 1..212: note = tr|A0A0U3RBT3|A0A0U3RBT3_9MICC GTP cyclohydrolase 1; OS = Arthrobacter alpinus OX=656366 GN=folE PE=3 SV=1
MTYYDDEHDPTQGGASGAALPGDEFQVDLPRIEAAVREILLAIGEDPERSGLLETPKRVAKAYGEVFAGLHQDPAEVLGVTFDIAHEEMVLVKDIPFYSTCEHHLVPFHGSAHVGYIPALDGRVTGLSKLARLVDIYAKRPQVQERLTTQIADALIEHLKPRGAIVVVECEHMCMSMRGVRKPGAKTVTSAVRGLLHEPATRAEAMSLILGR

SEQ ID NO: 4802 - protein, 213 aa, unidentified
  source 1..213: note = Arthrobacter bacterium
  REGION 1..213: note = tr|A0A3D0ZKR7|A0A3D0ZKR7_9MICC GTP cyclohydrolase 1; OS = Arthrobacter bacterium OX=2053508 GN=folE PE=3 SV=1
MTHFDDDAPASAGHPAEDGSHHKKHENVDRPRIEAAVREILLAIGEDPDRGGLVDTPKRVAKAYAEVFSGLHLDPADVLSTTFDLDHEELVLVKDIPFYSTCEHHLVPFHGVAHVGYIPSHDGKVTGLSKLARLVDIYALRPQVQERLTTQIVEAMVSHLKPRGAIVVVECEHMCMSMRGVRKPGAKTVTSAVRGQLHDPATRAEAMSLILGR

SEQ ID NO: 4803 - protein, 186 aa, unidentified
  source 1..186: note = Arthrobacter bacterium
  REGION 1..186: note = tr|A0A353ZR75|A0A353ZR75_9MICC GTP cyclohydrolase 1; OS = Arthrobacter bacterium OX=2053508 GN=folE PE=3 SV=1
MDRPRIEAAVREILLAIGEDPDRGGLVDTPKRVAKAYAEVFSGLHLDPADVLSTTFDLDHEELVLVKDIPFYSTCEHHLVPFHGVAHVGYIPSHDGKVTGLSKLARLVDIYALRPQVQERLTTQIVEAMVSHLKPRGAIVVVECEHMCMSMRGVRKPGAKTVTSAVRGQLHDPATRAEAMSLILGR

SEQ ID NO: 4804 - protein, 202 aa, Arthrobacter crystallopoietes
  REGION 1..202: note = tr|N1UYR6|N1UYR6_9MICC GTP cyclohydrolase 1; OS = Arthrobacter crystallopoietes BAB-32 OX=1246476 GN=folE; PE = 3 SV=1
MTEYDDVIAELEIDTSIDLPRIEKAVREILIAVGEDPDREGLQDTPKRVARSYAEIFAGLHQDPGDLLATTFDLDHEEMVLVKDIPFYSTCEHHLVPFHGTAHIGYIPSHDGKVTGLSKLARLVEIYARRPQVQERLTTQIVDALVEHLEPKGALVVVECEHMCMSMRGVRKPGAKTVTSAVRGQLREPATRAEAMSLIIGR

SEQ ID NO: 4805 - protein, 202 aa, Arthrobacter crystallopoietes
  REGION 1..202: note = tr|A0A1H1CH53|A0A1H1CH53_9MICC GTP cyclohydrolase 1; OS = Arthrobacter crystallopoietes OX=37928 GN=folE PE=3 SV=1
MTEYDDVIAELEIDSSIDLPRIERAVREILIAVGEDPDREGLVETPRRVAKSYAEVFAGLHQDPAELLATTFDIDHEEMVLVKDIPFYSTCEHHLVPFHGTAHIGYIPSHEGKVTGLSKLARLVEVFARRPQVQERLTTQIVDALMEHLEPKGAIVVVECEHMCMSMRGVRKPGAKTVTSAVRGQLRETATRAEAMSLIIGR

SEQ ID NO: 4806 - protein, 219 aa, unidentified
  source 1..219: note = Arthrobacter cupressi
  REGION 1..219: note = tr|A0A1G8QM45|A0A1G8QM45_9MICC GTP cyclohydrolase 1; OS = Arthrobacter cupressi OX=1045773 GN=folE PE=3 SV=1
MTHIDDDDFSGAFGVVSAGDSGGSAGHGKHSHKVDRPRIEAAVREILIAVGEDPDRGGLLDTPKRVAKAYAEVFAGLHQDPADVLSTTFDLDHEELVLVKDIPFYSTCEHHLVPFHGMAHVGYIPSHDGRVTGLSKLARLVDIYARRPQVQERLTTQIVEALVEHLNPRGAIVVVECEHMCMSMRGIRKPGAKTVTSAVRGQLHDPATRAEAMSLILGR

SEQ ID NO: 4807 - protein, 205 aa, unidentified
  source 1..205: note = Arthrobacter echini
  REGION 1..205: note = tr|A0A4S5E1B4|A0A4S5E1B4_9MICC GTP cyclohydrolase 1; OS = Arthrobacter echini OX=1529066 GN=folE PE=3 SV=1
MTDFDDDEMDAALAAAGQPVDQERIRRAVREILVAIGEDPDRDGLLETPTRVARAYAEIFAGLHQDAGEVLSTSFDLNHQELVLVKDIPFYSTCEHHLVPFHGTAHLGYIPSEEGRVTGLSKLARLVEVFARRPQVQERLTTQIVDAMMEHLTPKGAIVVVECEHLCMSMRGVRKPGAKTVTSAVRGQIRDTATRAEAMSLILGR

SEQ ID NO: 4808 - protein, 197 aa, unidentified
  source 1..197: note = Arthrobacter echini
  REGION 1..197: note = tr|A0A5D0XVM3|A0A5D0XVM3_9MICC GTP cyclohydrolase 1; OS = Arthrobacter echini OX=1529066 GN=folE PE=3 SV=1
MDADLQAVAQPVDQARIRRAVREILVAIGEDPDRDGLLETPTRVAKAYAEIFAGLHQDAGEVLATSFDLNHQELVLVKDIPFYSTCEHHLVPFHGTAHLGYIPSEEGRVTGLSKLARLVEVFARRPQVQERLTTQIVDAMMEHLTPKGAIVVVECEHLCMSMRGVRKPGAKTVTSAVRGQIRDTATRAEAMSLILGR

SEQ ID NO: 4809 - protein, 214 aa, unidentified
  source 1..214: note = Arthrobacter enclensis
  REGION 1..214: note = tr|A0A0V8IML4|A0A0V8IML4_9MICC GTP cyclohydrolase 1; OS = Arthrobacter enclensis OX=993070 GN=folE PE=3 SV=1
MTSFDDDAVPASAAYATEDGSSQASHQKVDRPRIEAAVREILLAIGEDPDRGGLIDTPKRVAKAYAEVFAGLHHDPADVLSTTFDLDHEELVLVKDIPFYSTCEHHLVPFHGVAHIGYIPSHDGRVTGLSKLARLVDIYARRPQVQERLTTEIVEALVQHLKPRGAIVVIECEHMCMSMRGIRKPGAKTVTSAVRGQLHDPATRAEAMSLILGR

SEQ ID NO: 4810 - protein, 186 aa, unidentified
  source 1..186: note = Arthrobacter glacialis
  REGION 1..186: note = tr|A0A2S3ZYQ2|A0A2S3ZYQ2_ARTGL GTP cyclohydrolase 1; OS = Arthrobacter glacialis OX=1664 GN=folE PE=3 SV=1
MDLPRIEAAVREILLAIGEDPERSGLIDTPKRVAKAYAEVFSGLHSDAAEILGTTFDIAHQEMVLVKDIPFYSTCEHHLVPFHGSAHVGYIPGDDGRVTGLSKLARLVDIYAKRPQVQERLTTQIADALVEHLKPRGAIVVIECEHMCMSMRGVRKPGAKTVTSAVRGSLHEPATRAEAMSLILGR

SEQ ID NO: 4811 - protein, 203 aa, unidentified
  source 1..203: note = Arthrobacter glacialis
  REGION 1..203: note = tr|A0A2S3ZZI0|A0A2S3ZZI0_ARTGL GTP cyclohydrolase 1; OS = Arthrobacter glacialis OX=1664 GN=folE PE=3 SV=1
MSISNAPLPDILAFEDPEPLTPGSGVDLPRAQAAITDFLRALGRDDSDPHLLDTPRRVAAAYAEMLTPRETSWTTFPNDDGYQGLVLVKDIPFHSLCQHHLLPFRGVAHVGYLPGERLFGLSKLARGVELFSRDLQVQERLTQQVANWLEATLAPRGVGVVMEAEHLCMSLRGVHTAGTMTRTSVFTGLLADAGPLRGQFPNH

SEQ ID NO: 4812 - protein, 212 aa, Arthrobacter globiformis
  REGION 1..212: note = tr|H0QJI8|H0QJI8_ARTGO GTP cyclohydrolase 1; OS = Arthrobacter globiformis NBRC 12137 OX=1077972 GN=folE; PE = 3 SV=1
MTHFDDDDLTATADHSAVGGSGHHHKVDRPRIEAAVREILLAIGEDPDRGGLQDTPKRVAKAYAEVFAGLHQDPGSVLGTTFDLDHEELVLVKDIPFYSTCEHHLVPFHGVAHVGYIPSHDGRVTGLSKLARLVDIYARRPQVQERLTTQIVEALVTFLKPRGAIVVVECEHMCMSMRGIRKPGAKTVTSAVRGQLHDPATRAEAMSLILGR

SEQ ID NO: 4813 - protein, 212 aa, Arthrobacter globiformis
  REGION 1..212: note = tr|A0A328HLJ0|A0A328HLJ0_ARTGO GTP cyclohydrolase 1; OS = Arthrobacter globiformis OX=1665 GN=folE PE=3 SV=1
MTHFDDDDLTATAEHSAVGGSGHHHKVDKPRIEAAVREILLAIGEDPDRGGLQDTPKRVAKAYAEVFAGLHQDPGSVLGTTFDLDHEELVLVKDIPFYSTCEHHLVPFHGVAHVGYIPSHDGRVTGLSKLARLVDIYARRPQVQERLTTQIVEALVTFLKPRGAIVVVECEHMCMSMRGIRKPGAKTVTSAVRGQLHDPATRAEAMSLILGR

SEQ ID NO: 4814 - protein, 214 aa, Arthrobacter humicola
  REGION 1..214: note = tr|A0A315TYT1|A0A315TYT1_9MICC GTP cyclohydrolase 1; OS = Arthrobacter humicola OX=409291 GN=folE PE=3 SV=1
MTSNFDDDVPAPAAASAGGGEAPHPSTKVDRPRIEAAVREILLAIGEDPDRGGLLDTPKRVAKAYAEMFAGLHHDPAEILATTFDLDHEELVLVKDIPFYSTCEHHLVPFHGVAHVGYIPSHDGKVTGLSKLARVVDMFARRPQVQERLTTQIVEALVTHLKPRGAIVVVECEHLCMSMRGIRKPGAKTVTSAVRGQLHDPATRAEAMSLILGR

SEQ ID NO: 4815 - protein, 201 aa, Arthrobacter livingstonensis
  REGION 1..201: note = tr|A0A2V5LZ79|A0A2V5LZ79_9MICC GTP cyclohydrolase 1; OS = Arthrobacter livingstonensis OX=670078 GN=folE PE=3 SV=1
MSISSATLPDLLAFEDPALEVRAPIDLPAAQAAIADFLRALGRDVNDPHLLDTPRRVAAAYAEMLTPRETNWTTFPNDEGYAGLVLVKDVPFHSLCQHHLLPFRGVAHVGYLPGDRLFGLSKLARGVELFARDLQVQERLTQQVADWLEETLSPRGVGVVLEAEHMCMSLRGVQVSGSLTRTSVFTGKLADAGPLRDQFLQ

SEQ ID NO: 4816 - protein, 186 aa, Arthrobacter livingstonensis
  REGION 1..186: note = tr|A0A2V5L955|A0A2V5L955_9MICC GTP cyclohydrolase 1; OS = Arthrobacter livingstonensis OX=670078 GN=folE PE=3 SV=1
MDLPRIEAAVREILLAVGEDPDRSGLEETPKRVAKAYAEVFAGLHQDPADVLGTTFDISHEEMVLVKDIPFYSTCEHHLVPFHGSAHVGYIPSSDGRVTGLSKLARLVDIYARRPQVQERLTSQIADSLVEHLKPRGAIVVIECEHMCMSMRGVRKPGAKTVTSAVRGLLHEPATRAEAMSLILGR

SEQ ID NO: 4817 - protein, 214 aa, unidentified
  source 1..214: note = Arthrobacter nitrophenolicus
  REGION 1..214: note = tr|A0A4R5Y092|A0A4R5Y092_9MICC GTP cyclohydrolase 1; OS = Arthrobacter nitrophenolicus OX=683150 GN=folE PE=3 SV=1
MTSFDDDDVPASADTLAEDGSSHSKHQKVDRPRIEAAVREILLAIGEDPDRGGLVDTPKRVAKAYAEVFAGLHHDPADVLSTTFDLDHEELVLVKDIPFYSTCEHHLVPFHGMAHVGYIPSHDGKITGLSKLARLVDIYARRPQVQERLTTEIVEALVRHLNPRGAIVVVECEHMCMSMRGIRKPGAKTVTSAVRGQLHDPATRAEAMSLILGR

SEQ ID NO: 4818 - protein, 214 aa, unidentified
  source 1..214: note = Arthrobacter nitrophenolicus
  REGION 1..214: note = tr|L8TMH1|L8TMH1_9MICC GTP cyclohydrolase 1; OS = Arthrobacter nitrophenolicus OX=683150 GN=folE PE=3 SV=1
MTSFDDDDVPASADTLAEDGSSHSKHQKVDRPRIEAAVREILLAIGEDPDRSGLVDTPKRVAKAYAEVFAGLHHDPADVLSTTFDLDHEELVLVKDIPFYSTCEHHLVPFHGMAHVGYIPSHDGKITGLSKLARLVDIYARRPQVQERLTTEIVEALVRHLNPRGAIVVVECEHMCMSMRGIRKPGAKTVTSAVRGQLHDPATRAEAMSLILGR

SEQ ID NO: 4819 - protein, 195 aa, Arthrobacter oryzae
  REGION 1..195: note = tr|A0A3N0CJD0|A0A3N0CJD0_9MICC GTP cyclohydrolase 1; OS = Arthrobacter oryzae OX=409290 GN=folE PE=3 SV=1
MTTATASKGVDGPRVEQAVREYLLAIGEDPDRPGLVDTPARVARAAAEIFGGLHEDPLAVLDKTFDLGHGEMVIVKDIPFYSTCEHHLVPFHGVAHVGYIPSAEGLVTGLSKLARLVDVFARRPQVQERLTTQVVDALVSSLRPLGAIVVIECEHLCMSMRGIRKPGAKTITSAVRGELRLPAARAEALSLIHGR

SEQ ID NO: 4820 - protein, 214 aa, Arthrobacter oryzae
  REGION 1..214: note = tr|A0A495ESI0|A0A495ESI0_9MICC GTP cyclohydrolase 1; OS = Arthrobacter oryzae OX=409290 GN=folE PE=3 SV=1
MTSNFDDDVPAPAAAPAGDGEAQHAKPKVDRPRIEAAVREILLAIGEDPDRGGLLDTPKRVAKAYAEMFAGLHHDPAEILATTFDLDHEELVLVKDIPFYSTCEHHLVPFHGVAHVGYIPSHDGKVTGLSKLARVVDMFARRPQVQERLTTQIVEALVTHLKPRGAIVVVECEHLCMSMRGIRKPGAKTVTSAVRGQLHDPATRAEAMSLILGR

SEQ ID NO: 4821 - protein, 205 aa, unidentified
  source 1..205: note = Arthrobacter pityocampae
  REGION 1..205: note = tr|A0A2S5IV84|A0A2S5IV84_9MICC GTP cyclohydrolase 1; OS = Arthrobacter pityocampae OX=547334 GN=folE PE=3 SV=1
MTDFDDEVVDAVLVATGSPVDLLRIERAVREILEAIGEDPGRDGLLDTPKRVAKAYAEMFAGLHQDAGEVLSTSFDIGHQELVLVKDIPFYSTCEHHLVPFHGTAHVGYIPSEEGRVTGLSKLARLVEVYARRPQIQERLTSQIVDAMMEHLKPKGAIVVIECEHMCMSMRGVRKPGAKTVTSAVRGQLRETATRAEAMSLILGR

SEQ ID NO: 4822 - protein, 201 aa, Arthrobacter psychrochitiniphilus
  REGION 1..201: note = tr|A0A2V3DPX5|A0A2V3DPX5_9MICC GTP cyclohydrolase 1; OS = Arthrobacter psychrochitiniphilus OX=291045 GN=folE; PE = 3 SV=1
MTITSTALPDILTLDETEILAVPGIDLPRAQAAIAEFLRALGRDETSPHLLDTPRRVAGAYAEMLTPRETSWTTFPNDDGYQGLVLVKAIPFHSLCQHHLLPFRGVAHVGYLPGDRLFGLSKLARGVELFSRDLQVQERLTQQVADWLEDTLAPRGVGVVMEAEHMCMSLRGVQTAGTLTRTSVFTGLLHEDGPLQRQFPH

SEQ ID NO: 4823 - protein, 186 aa, Arthrobacter psychrochitiniphilus
  REGION 1..186: note = tr|A0A2V3DUS3|A0A2V3DUS3_9MICC GTP cyclohydrolase 1; OS = Arthrobacter psychrochitiniphilus OX=291045 GN=folE; PE = 3 SV=1
MDLPRIEAAVREILLAIGEDPERSGLLETPKRVAKAYGEVFAGIHQDPAAVLGVTFDISHEEMVLVKDIPFYSTCEHHLVPFHGSAHVGYIPSSDGRVTGLSKLARLVDIYAKRPQVQERLTSQIADALIEHLKPRGAIVVIECEHMCMSMRGVRKPGAKTVTSAVRGLLHEPATRAEAMSLILGR

SEQ ID NO: 4824 - protein, 200 aa, Arthrobacter psychrolactophilus
  REGION 1..200: note = tr|A0A2V5JNE2|A0A2V5JNE2_9MICC GTP cyclohydrolase 1; OS = Arthrobacter psychrolactophilus OX=92442 GN=folE PE=3; SV = 1
MSISSAQLPELLSFEDPQTENPAIDLPRAQNAIAEFLRALGRDENDPHLLDTPRRVAAAYAEMLTPRETSWTTFPNEDGYQGLVLVKDIPFHSLCQHHLLPFRGVAHVGYLPGDRLFGLSKLARGVELFARDLQVQERLTQQIANWLEDTLAPRGVGVVMEAEHMCMSLRGVQTAGTMTRTSVFTGILSDAGPLREQFPH

SEQ ID NO: 4825 - protein, 186 aa, Arthrobacter psychrolactophilus
  REGION 1..186: note = tr|A0A2V5IV32|A0A2V5IV32_9MICC GTP cyclohydrolase 1; OS = Arthrobacter psychrolactophilus OX=92442 GN=folE PE=3; SV = 1
MDLPRIEAAVREILIAVGEDPDRGGLLETPKRVAKAYAEVFAGLHQDPAEVLGTTFDIAHEEMVLVKDIPFYSTCEHHLVPFHGSAHVGYIPSSDGKVTGLSKLARLVDIYAKRPQVQERLTTQIADALIEHLKPRGAIVVVECEHMCMSMRGVRKPGAKTVTSAVRGLLHEPATRAEAMSLILGR

SEQ ID NO: 4826 - protein, 203 aa, Arthrobacter rhombi
  REGION 1..203: note = tr|A0A1R4ESZ7|A0A1R4ESZ7_9MICC GTP cyclohydrolase 1; OS = Arthrobacter rhombi OX=71253 GN=folE PE=3 SV=1
MSTLEEEGTIVSETANPVDQERIARAVREILFAIGEDPDRDGLVDTPKRVAKAYTEFFAGLHGDAGELLSTTFDIDHDELVLVKDIPFYSTCEHHLVPFHGSAHIGYIPGPDGKVTGLSKLARLVELYARRPQVQERLTTQIVMALMDHLQPRGAIVVIECEHMCMSMRGVQKPGAKTVTSAMRGQLRDPATRAEAMSLILGK

SEQ ID NO: 4827 - protein, 204 aa, unidentified
  source 1..204: note = Arthrobacter saudimassiliensis
  REGION 1..204: note = tr|A0A078MP05|A0A078MP05_9MICC GTP cyclohydrolase 1; OS = Arthrobacter saudimassiliensis OX=1461584 GN=folE PE=3; SV = 1
MTDFDDELAAMDLAASDAIDQPRIERAVREILLAIGEDPDRDGLQDTPKRVARAYAEVFAGLHESPEDLLATTFDLDHEEMVLVKDIPFYSTCEHHLVPFHGTAHIGYIPSHEGKVTGLSKLARLVELYARRPQVQERLTTQIVDALVENLQPRGAIVVIECEHLCMSMRGVRKPGARTVTSAVRGQLRETATRAEAMSLILGR

SEQ ID NO: 4828 - protein, 186 aa, Arthrobacter sp.
  REGION 1..186: note = tr|J7LKW5|J7LKW5_9MICC GTP cyclohydrolase 1; OS = Arthrobacter sp. Rue61a OX=1118963 GN=folE PE=3 SV=1
MDRPRIEAAVREILLAIGEDPERGGLLDTPKRVAKAYAEMFAGLHQHPVDVLSTTFDLDHEELVLVKDIPFYSTCEHHLVPFHGVAHVGYIPSHDGKVTGLSKLARLVDIYARRPQVQERLTTQIVEALVTHLNPRGAIVVVECEHMCMSMRGIRKPGAKTVTSAVRGQLHDPATRAEAMSLILGR

SEQ ID NO: 4829 - protein, 205 aa, Arthrobacter sp.
  REGION 1..205: note = tr|A0A496PG29|A0A496PG29_9MICC GTP cyclohydrolase 1; OS = Arthrobacter sp. JZ R-183 OX=2283632 GN=folE PE=3 SV=1
MSSSHDFEVIDPQTVIDPNVDQPRIAAAVHEILLAIGEDPERDGLKDTPARVAKAYAEIFSGLHQDPAAILDKSFDIGHSELVVVKDIPFYSTCEHHLVPFHGRAHVGYIPGEGGKVTGLSKLARLVDLFAKRPQVQERLTTQIVEALETHLEPRGAIVVVECEHLCMSMRGVKKPGTLTTTSAVRGQLREPATRAEAMSLILGR

SEQ ID NO: 4830 - protein, 205 aa, Arthrobacter subterraneus
  REGION 1..205: note = tr|A0A1G8IIU7|A0A1G8IIU7_9MICC GTP cyclohydrolase 1; OS = Arthrobacter subterraneus OX=335973 GN=folE PE=3 SV=1
MTDFDDQMVDAALAASGSTVDQPRIERAVREILAAIGEDPERDGLLDTPKRVARAYAEFFAGLHQNPKDVLSTTFELDHEELVLVKDIPFYSTCEHHLVPFHGTAHIGYIPSAEGKVTGLSKLARLVEIYARRPQVQERLTTQIVDALMHHLQPKGAIVVIECEHMCMSMRGIRKPGAKTVTSAVRGQVRDAATRAEAMSLILGR

SEQ ID NO: 4831 - protein, 200 aa, Arthrobacter subterraneus
  REGION 1..200: note = tr|A0A1G8H2P0|A0A1G8H2P0_9MICC GTP cyclohydrolase 1; OS = Arthrobacter subterraneus OX=335973 GN=folE PE=3 SV=1
MSSHSEVALRLLEEDIEPDVAGAIDLPAARSAVADLLRALGRDVNDPHLSDTPRRVAGAFEEMLTPRATSWTTFPNDEGYSDLVLVRNIPFNSLCQHHLLPFRGIAHIGYLPGARLLGLSKLARALEQFSRDLQVQERLTKQVADWLSDLLNPRGVGVVLEAEHLCMSLRGVQSAGTTTRTSTFYGELAVAGPLRDQFPN

SEQ ID NO: 4832 - protein, 207 aa, Arthrobacter woluwensis
  REGION 1..207: note = tr|A0A1H4JV43|A0A1H4JV43_9MICC GTP cyclohydrolase 1; OS = Arthrobacter woluwensis OX=156980 GN=folE PE=3 SV=1
MTHIDDDVPNTASDAASADGPMDLPRIEAAVREILIAVGEDPDRSGLADTPARVARAYAEMFSGIHQDPGSVLQTMFDMDHEELVLVKDIPFYSTCEHHLVPFHGVAHVGYIPSHDGMVTGLSKLARLVDIIARRPQVQERLTTQIVEALVTHLKPRGAIAVVECEHMCMSMRGIRKPGAKTVTSAVRGQLHDPATRAEAMSLILGR

SEQ ID NO: 4833 - protein, 186 aa, Arthrobacter woluwensis
  REGION 1..186: note = tr|A0A2T3BWP2|A0A2T3BWP2_9MICC GTP cyclohydrolase 1; OS = Arthrobacter woluwensis OX=156980 GN=folE PE=3 SV=1
MDLPRIEAAVREILIAVGEDPDRSGLADTPARVARAYAEMFSGIHQDPGSVLQTMFDMDHEELVLVKDIPFYSTCEHHLVPFHGVAHVGYIPSHDGMVTGLSKLARLVDIIARRPQVQERLTTQIVEALVTHLKPRGAIAVVECEHMCMSMRGIRKPGAKTVTSAVRGQLHDPATRAEAMSLILGR

SEQ ID NO: 4834 - protein, 215 aa, unidentified
  source 1..215: note = Arthrospira maxima
  REGION 1..215: note = tr|B5VY61|B5VY61_LIMMA GTP cyclohydrolase 1; OS = Arthrospira maxima CS-328 OX=513049 GN=folE PE=3 SV=1
MTLAQELQASINGNLPNLTTETAPLVSEEEMRQAVRTLLLGLGENPDREGLKDTPKRVVKALKFLTSGYHQSLDELLNGAVFHENTDEMVLVRDIDIFSSCEHHILPILGRAHVAYIPDGKVIGLSKVARICEMYARRLQVQERLTAQIADALQGLLKPKGVAVVVEASHMCMVMRGVQKVGSWTSTSAVRGVFSEDAKTRQEFMSLIRHTPNFS

SEQ ID NO: 4835 - protein, 239 aa, unidentified
  source 1..239: note = Arthrospira maxima
  REGION 1..239: note = tr|B5W0I2|B5W0I2_LIMMA GTP cyclohydrolase 1; OS = Arthrospira maxima CS-328 OX=513049 GN=folE PE=3 SV=1
MTIASSNSLNSADTSNPNGMKNVDNQSRIATRPDRSSSWHASPQTLGRREVTQEEMMGAVETILLGVGEDPEREGLLKTPKRVADAMRFLTNGYSQSLEELVNDAIFDEGHEEMVLVRDINFFSLCEHHMLPFMGKAHVAYIPNQKVIGLSKLARVVEMYSRRLQVQERLTRQVAEAIQSVLEPQGVAVVMEASHMCMAMRGVQKPGSWTVTSAMIGVFQDDQKTREEFLNLIRHQPSF

SEQ ID NO: 4836 - protein, 239 aa, unidentified
  source 1..239: note = Arthrospira platensis
  REGION 1..239: note = tr|K1X045|K1X045_ARTPT GTP cyclohydrolase 1; OS = Arthrospira platensis C1 OX=459495 GN=folE PE=3 SV=1
MTIASSNSFNSADTSNPNGMKNVDNQSRIATRPDRSSSWHASPQNLGRREVTQEEMMGAVETILLGVGEDPEREGLLKTPKRVAEAMRFLTNGYSQSLEELVNDAIFDEGHEEMVLVRDINFFSLCEHHMLPFMGKAHVAYIPNQKVIGLSKLARVVEMYSRRLQVQERLTRQVAEAIQSVLEPQGVAVVMEASHMCMAMRGVQKPGSWTVTSAMIGVFQDDQKTREEFLNLIRHQPSF

SEQ ID NO: 4837 - protein, 215 aa, unidentified
  source 1..215: note = Arthrospira platensis
  REGION 1..215: note = tr|D5A155|D5A155_ARTPN GTP cyclohydrolase 1; OS = Arthrospira platensis (strain NIES-39 / IAM M-135); OX = 696747 GN=folE PE=3 SV=1
MTLAKEIPTSLNGNLPNFSTEAAPVVSEEEMRQAVRTLLLGLGENPDREGLKDTPKRVVKALKFLTSGYHQSLDELLNGAVFHENTDEMVLVRDIDIFSSCEHHILPILGRAHVAYIPDGKVIGLSKVARICEMYGRRLQVQERLTAQIADALQGLLKPKGVAVVVEASHMCMVMRGVQKVGSWTSTSAVRGVFSEDAKTRQEFMSLIRHTPNFS

SEQ ID NO: 4838 - protein, 215 aa, Arthrospira sp.; identical to SEQ ID NO: 4834
  REGION 1..215: note = tr|A0A328V3A9|A0A328V3A9_9CYAN GTP cyclohydrolase 1; OS = Arthrospira sp. O9.13F OX=1982223 GN=folE PE=3 SV=1

SEQ ID NO: 4839 - protein, 187 aa, Asaccharobacter celatus
  REGION 1..187: note = tr|A0A369P341|A0A369P341_9ACTN GTP cyclohydrolase 1; OS = Asaccharobacter celatus OX=394340 GN=folE PE=3 SV=1
MDTAKIEAGVRLILEGVGEDPEREGLRETPARVARMYEEVLGGLEEDPSRHFDVTFDEGHEEIVLVGDIPFFSMCEHHLAPFFGKAHVAYIPGEDGRICGISKLARLVDGFAKRPQVQERLTGQIADTLVEALHPAGVIVVLEAEHMCMSMRGVKKPGAKTTTRAVRGCFETDAAARAEALSLIFRH

SEQ ID NO: 4840 - protein, 187 aa, Asaccharobacter celatus
  REGION 1..187: note = tr|A0A369P547|A0A369P547_9ACTN GTP cyclohydrolase 1; OS = Asaccharobacter celatus OX=394340 GN=folE PE=3 SV=1
MDTAKIEAGVRLILEGVGEDPEREGLRETPARVARMYEEVLGGLEEDPSRHFDVTFDEGHEEIVLVGDIPFFSMCEHHLAPFFGKAHVAYIPGEDGRICGISKLARLVDGFAKRPQVQERLTGQIADTLVEALHPAGVIVVLEAEHMCMSMRGVKKPGAKTTTRAVRGCFETDADARSEALSLIFRH

SEQ ID NO: 4841 - protein, 191 aa, unidentified
  source 1..191: note = Asaccharospora irregularis
  REGION 1..191: note = tr|A0A1M5N8D6|A0A1M5N8D6_9FIRM GTP cyclohydrolase 1; OS = Asaccharospora irregularis DSM 2635 OX=1121321 GN=folE; PE = 3 SV=1
MMNNVDKEKIKNAVRDILEAIGENPDREGLLETPARVARMYEEIYSGINQDPREHLKVIFQDEKHEEMVLVKDIPFHSCCEHHLVPFFGKAHIAYIPKDGRLTGLSKLARVIETLAKRPQLQERITKEAAEILMQELKPYGVIVVVEAEHMCMTMRGVKKPGSKTITSAVRGVFETEIATRSEAMSLINMR

SEQ ID NO: 4842 - protein, 218 aa, Asaia bogorensis
  REGION 1..218: note = tr|A0A0P0YEG0|A0A0P0YEG0_9PROT GTP cyclohydrolase 1; OS = Asaia bogorensis NBRC 16594 OX=1231624 GN=folE PE=3 SV=1
MTKPTADLVALDAARHKGQGGERPIAPIARPDDAETRIAGAVREILEALGEDPDREGLFETPGRVARMYLDVLGGLHEDPRDHLHKQFLADQHEGAVIVRDIGFHSMCEHHLLPFFGKAHVAYLPEGGRLTGLSKIARTVNVLARRPQLQERLTDQIAASIIEVLEPKAVMVLVEAEHMCMAMRGIRNVGSRTVTTVVRGTWQRDAALRAEIMSLLKG

SEQ ID NO: 4843 - protein, 218 aa, Asaia platycodi
  REGION 1..218: note = tr|A0A060QDN3|A0A060QDN3_9PROT GTP cyclohydrolase 1; OS = Asaia platycodi SF2.1 OX=1382230 GN=folE PE=3 SV=1
MTKPTADLVALDAARHKGQGGERPIAPIAKPEDAETRIAGAVREILEALGEDPDREGLFETPGRVARMYLDVLGGLHEDPRDHLHKQFLADQHEGAVIVRDIGFHSMCEHHLLPFFGKAHVAYLPEGGRLTGLSKIARTVNVLARRPQLQERLTDQIAASIIEVLEPKAVMVLVEAEHMCMAMRGIRNVGSRTVTTVVRGTWQRDAALRAEIMSLLKG

SEQ ID NO: 4844 - protein, 218 aa, Asaia sp.
  REGION 1..218: note = tr|A0A433WR72|A0A433WR72_9PROT GTP cyclohydrolase 1; OS = Asaia sp. W19 OX=2067395 GN=folE PE=3 SV=1
MTKPTADLVALDAARHKGQGGERPIAPIAKPEDAEARIAGAVREILQALGEDPDREGLFETPGRVARMYLDVLGGLHEDPRTHLHKQFLADQHEGAVIVRDIGFHSMCEHHLLPFFGKAHVAYLPEGGRLTGLSKIARTVNVLARRPQLQERLTDQIAASIIEVLEPKAVMVLVEAEHMCMAMRGIRNVGSRTVTTVVRGTWQRDAALRAEIMSLLKG

SEQ ID NO: 4845 - protein, 195 aa, Asanoa ferruginea
  REGION 1..195: note = tr|A0A3D9ZIC0|A0A3D9ZIC0_9ACTN GTP cyclohydrolase 1; OS = Asanoa ferruginea OX=53367 GN=folE PE=3 SV=1
MAGRPVEEAVDLGRIEKAVREILIAIGEDPDRDGLVKTPLRVARAYAELFAGLRVDPGQVLNTTFDAQHEELVLVRDIEVMSVCEHHLLPFKGVAHIGYIPGPNGRITGLSKLARLVEIFARRPQVQERLTSQIADILMEKLDPRGVIAVLECEHLCMAMRGIQKDGAKTVTSAVRGIFQSDAKSRSEAMALIIG

SEQ ID NO: 4846 - protein, 193 aa, Asanoa ferruginea
  REGION 1..193: note = tr|A0A3D9ZGY1|A0A3D9ZGY1_9ACTN GTP cyclohydrolase 1; OS = Asanoa ferruginea OX=53367 GN=folE PE=3 SV=1
MTLQRTAGDGVNLAAAEQAAGQFLRALGLRTDTESMRGTPGRMARAYAELFSPRPFDLTTFPNDEGYDELVLARAIPLRSVCEHHLLPFVGTAHVGYLPGQRILGLSKLARVVEHFACRPQVQERLTKQIADWLQTQLTPKGVGVVIEAEHTCMTLRGVQATGSTTITSTMLGLLRDDPRSRSEFLALTRVVG

SEQ ID NO: 4847 - protein, 160 aa, Asanoa hainanensis
  REGION 1..160: note = tr|A0A239PG30|A0A239PG30_9ACTN GTP cyclohydrolase 1; OS = Asanoa hainanensis OX=560556 GN=folE PE=3 SV=1
MKTPLRVARAYAELFAGLRVDPAQVLNTTFDASHEELVLVRDIEVMSVCEHHLLPFKGVAHIGYIPGPNGRITGLSKLARIVEIYARRPQVQERLTTQIADLLMNKLDPRGVIAVLECEHLCMAMRGIQKDGAKTITSAVRGIFQSDAKSRSEAMALIIN

SEQ ID NO: 4848 - protein, 208 aa, Asanoa hainanensis
  REGION 1..208: note = tr|A0A239NSS6|A0A239NSS6_9ACTN GTP cyclohydrolase 1; OS = Asanoa hainanensis OX=560556 GN=folE PE=3 SV=1
MSIERATHRTGRTPAPLRVVHESDGIDLDAAEQAAGQFLRALGVRTDTESMRRTPRRMAHAYAELFSPRPFDLTTFPNDEGYDELVLARSIPVRSVCKHHLLPFVGTAHVGYLPGQRILGLSKLARVVEHFACRPQVQERLTKQVADWLRTQLDPKGVGVVIEAEHTCMTLRGVRADGSSTITSTLLGLLRDDARSRSEFLALTGVVR

SEQ ID NO: 4849 - protein, 265 aa, Asanoa ishikariensis
  REGION 1..265: note = tr|A0A1H3UB73|A0A1H3UB73_9ACTN GTP cyclohydrolase FolE2 OS=Asanoa ishikariensis OX=137265 GN=folE2 PE=3 SV=1
MLPDVQGLSDERGVTLDDVGIEGLRYPLLIADGQGVKRETVATVDMSVGIEADVKGAHLSRFVEVLHAWRDQLDATSAISLAEDVRTRLGTRDARVRLSFAYFLERRAPVTGACSFSEYQCTLTVATSGGAASLLLQVRVPVTSVCPCSKAISDRGAHNQRGYVTIEVEPATGAQLWFDDLIDVAEASASSPVYALLKRPDERHVTMAGYDNPVFVEDMARHVAVVLRGDVRIARFRARVVNDESIHNHAAFARLDWTATDDGNA

SEQ ID NO: 4850 - protein, 208 aa, Asanoa ishikariensis
  REGION 1..208: note = tr|A0A1H3LHR0|A0A1H3LHR0_9ACTN GTP cyclohydrolase 1; OS = Asanoa ishikariensis OX=137265 GN=folE PE=3 SV=1
MSIERVAHRTGRTPAPLRVVHESDGIDLDAAEEAAGHFLRALGVRTDTESMRRTPRRMAHAYAELFSPRPFDLTTFPNDEGYDELVLARAIPVRSVCEHHLLPFVGTAHVGYLPGQRILGLSKLARVVEHFACRPQVQERLTKQIADWLQTQLDPKGVGVVIEAEHTCMTLRGVRADGSSTITSTLLGLLREDARSRSEFLALTGVIR

SEQ ID NO: 4851 - protein, 367 aa, unidentified
  source 1..367: note = Ascidiaceihabitans donghaensis
  REGION 1..367: note = tr|A0A2R8BFP0|A0A2R8BFP0_9RHOB GTP cyclohydrolase FolE2 OS=Ascidiaceihabitans donghaensis OX=1510460; GN = folE2 PE=3 SV=1
MNIHSPDITAIPERDEAEAALDVLRRWAETATTTEILELDPSVAKLVPGKTSVDYPALSRKFPDGFVVDDAYKSTLPDLQNGPSSLIKGAKQQIQHVGISNFRLPLRFKTRDAGELMLETSVTGSVSLEADKKGINMSRIMRSFYKHAEKAFSFDVIDAALNDYIADLESFDARIQMRFSFPMKVQSLRSGLSGYQYYDIALELVEKDGLRQKMVHLDYVYSSTCPCSLELSEHARATRGQLATPHSQRSVARVSVVLDNDAGPLWFEDLIEACRRAVPTETQVMVKREDEQAFAELNAANPIFVEDAARLFSEQLLADVRIGDFRVIASHQESLHSHDAVSVLTEGQTFAQDSFDPRLFETLFHTG

SEQ ID NO: 4852 - protein, 218 aa, Asticcacaulis benevestitus
  REGION 1..218: note = tr|V4NUP1|V4NUP1_9CAUL GTP cyclohydrolase 1; OS = Asticcacaulis benevestitus DSM 16100 = ATCC BAA-896; OX = 1121022 GN=folE PE=3 SV=1
MDSLDPVSNLTTEANNLLNTSKPKSVVTYTNRPSREEAMAAVKTLLAWAGDDPEREGLLDTPKRVVDAYGEWFQGYTEDPAKELSRTFEDVQGYDDMVMLREIDVESHCEHHMAPFLGKAWVAYMPTSKVVGISKIARVVEIFAKRLQTQETMTKQVADALEESLAPLGVAVLIDAEHQCMSTRGVHHKNVTTVTTRFTGVFKTDQALQDRFLRLIHR

SEQ ID NO: 4853 - protein, 210 aa, unidentified
  source 1..210: note = Asticcacaulis biprosthecum
  REGION 1..210: note = tr|F4QM94|F4QM94_9CAUL GTP cyclohydrolase 1; OS = Asticcacaulis biprosthecum C19 OX=715226 GN=folE PE=3; SV = 1
MDSLDPKSLLATSKPVSVTTFTNRPSREQAMEAVRTLLAWAGDNPDREGLIDTPKRVVDAYQEWFQGYDADPKKELSRTFEDVQGYDDMVMLREIDVESHCEHHMAPFLGKAWVAYMPTEKVVGISKIARVVEIFAKRLQTQETMTKQVADALEDSLAPLGVAVLIDAEHQCMSTRGVHHKNVSTVTTRFTGVFKTDTVLQERFLRLTQK

SEQ ID NO: 4854 - protein, 226 aa, Asticcacaulis excentricus
  REGION 1..226: note = tr|A0A3G9G646|A0A3G9G646_9CAUL GTP cyclohydrolase 1; OS = Asticcacaulis excentricus OX=78587 GN=folE PE=3 SV=1
MDSLDPNSRPNSEDPLTQALAQNLAQTRSKGFSEILNVERPSKEEAMAAVRTLLAWAGDDPTREGLIDTPKRVVEAYDEWFSGYQADPAKELSRTFEDVQGYDDMVMLRHIDVESHCEHHMASFLGKAYVAYMPTAKVVGISKIARVVEIFSKRLQTQETLTKQIADAIEQSLAPLGVAVLIDAEHQCMTTRGVHHKNVTTVTTRFTGVFKTDLALQDRFMRFCQA

SEQ ID NO: 4855 - protein, 222 aa, Asticcacaulis excentricus
  REGION 1..222: note = tr|E8RRI5|E8RRI5_ASTEC GTP cyclohydrolase 1; OS = Asticcacaulis excentricus (strain ATCC 15261 / DSM 4724 / VKM B-1370 / CB 48) OX=573065 GN=folE PE=3 SV=1
MDSLDPNSRPHSEDPLTQALAQTRSKGFSEILNVERPSKEEAMAAVRTLLAWAGDDPTREGLIDTPKRVVEAYDEWFSGYQADPAKELSRTFEDVQGYDDMVMLRHIDVESHCEHHMASFLGKAYVAYMPTAKVVGISKIARVVEIFSKRLQTQETLTKQIADAIEQSLAPLGVAVLIDAEHQCMTTRGVHHKNVTTVTTRFTGVFKADLALQDRFMRFCQA

SEQ ID NO: 4856 - protein, 240 aa, Asticcacaulis sp.
  REGION 1..240: note = tr|V4PDS8|V4PDS8_9CAUL GTP cyclohydrolase 1; OS = Asticcacaulis sp. AC466 OX=1282362 GN=folE PE=3 SV=1
MSRVIPEPSFRRYSALKGKFMDSLDSKATLTSSEHNLLNTSKPKSVVTYTNRPSREEAMKAVKTLLAWAGDDPEREGLIDTPKRVVDAYEEWFQGYAADPKKELSRTFEDVQGYDDMVMLREIDVESHCEHHMAPFLGKAWVAYMPTDKVVGISKIARVVEIFAKRLQTQETMTKQVADALEESLAPLGVAVLIDAEHQCMSTRGVHHKNVTTVTTRFTGVFKTDLSLQERFLRLAQPRK

SEQ ID NO: 4857 - protein, 221 aa, Asticcacaulis sp.
  REGION 1..221: note = tr|V4NVF4|V4NVF4_9CAUL GTP cyclohydrolase 1; OS = Asticcacaulis sp. YBE204 OX=1282363 GN=folE PE=3 SV=1
MDSFEPEHRESNDPLVAALNASRSKGFSESLNVERPTKAQAMEAVKTLLAWAGDDPSREGLIDTPKRVVEAYEEWFQGYQADPAKELSRTFEDVQGYDDMVMLRQIDVESHCEHHMAAFLGKAYVAYMPTSKVVGISKIARVVEIFSKRLQTQETLTKQIADALVDSLSPLGVAVLIDAEHQCMSTRGVHHKNVTTVTTRFTGVFKTDLALQDRFMRFCQS

SEQ ID NO: 4858 - protein, 218 aa, Asticcacaulis taihuensis
  REGION 1..218: note = tr|A0A1G4QPC2|A0A1G4QPC2_9CAUL GTP cyclohydrolase 1; OS = Asticcacaulis taihuensis OX=260084 GN=folE PE=3 SV=1
MDSLDPVSNLTSAENSLLNTSKPKSIVTFTNRPSREEAMKAVKTLLAWAGDDPEREGLIDTPKRVVDAYEEWFQGYQADPKKELSRTFEDVQGYDDMVMLREIDVESHCEHHMAPFLGKAWVAYMPTSKVVGISKIARVVEIFAKRLQTQETMTKQVADAIEESLAPLGVAVMIDAEHQCMSTRGVHHKNVTTVTTRFTGVFKTDIALQERFMRLTHR

SEQ ID NO: 4859 - protein, 153 aa, unidentified
  source 1..153: note = Atelocyanobacterium thalassa
  REGION 1..153: note = tr|D3EPF6|D3EPF6_ATETH GTP cyclohydrolase 1; OS = Atelocyanobacterium thalassa (isolate ALOHA) OX=1453429; GN = folE PE=3 SV=1
MKFLTEGYNQSLTQLVNEAIFDEGHNEMVLIRDINFFSLCEHHMLPFMGRAHVAYIPDGKVIGLSKIARIVEMYSRRLQVQERLTRQIANAMQEVLKPLGVAVVMEATHMCMVMRGVQKPGSWTLTSTMLGKFNEEQKTREEFLNSVRHQPKF

SEQ ID NO: 4860 - protein, 222 aa, unidentified
  source 1..222: note = Atlantibacter hermannii
  REGION 1..222: note = tr|A0A447LLI8|A0A447LLI8_ATLHE GTP cyclohydrolase 1; OS = Atlantibacter hermannii OX=565 GN=folE PE=3 SV=1
MSSLSKEAALVHEALVARGLETPLRPPLRELDNETRKRLISEHMSEIMQLLNLDLSDDSLMETPHRIAKMYVDEIFSGLDYANFPKITVIENKMKVDEMVTVRDITLTSTCEHHFVTIDGQATVAYIPKDSVIGLSKINRIVQFFAQRPQVQERLTQQILVALQTLLGTNNVAVSIDAVHYCVKARGIRDATSATTTTSLGGLFKSSQNTRQEFLRAVRHHR

SEQ ID NO: 4861 - protein, 222 aa, unidentified; identical to SEQ ID NO: 4860
  source 1..222: note = Atlantibacter hermannii
  REGION 1..222: note = tr|H5UXG0|H5UXG0_ATLHE GTP cyclohydrolase 1; OS = Atlantibacter hermannii NBRC 105704 OX=1115512 GN=folE; PE = 3 SV=1

SEQ ID NO: 4862 - protein, 222 aa, unidentified
  source 1..222: note = Atlantibacter subterranea
  REGION 1..222: note = tr|A0A427V798|A0A427V798_9ENTR GTP cyclohydrolase 1; OS = Atlantibacter subterranea OX=255519 GN=folE PE=3 SV=1
MSSLSKEAALVHEALVARGLETPLRPPLRELDNETRKRLISEHMSEIMQLLNLDLSDDSLMETPHRIAKMYVDEIFSGLDYANFPKITVIENKMKVDEMVTVRDITLTSTCEHHFVTIDGKATVAYIPKESVIGLSKINRIVQFFAQRPQVQERLTQQILVALQTLLGTNNVAVSIDAVHYCVKARGIRDATSATTTTSLGGLFKSSQNTRQEFLRAVRHHS

SEQ ID NO: 4863 - protein, 356 aa, Atopobacter sp.
  REGION 1..356: note = tr|A0A421BG15|A0A421BG15_9LACT GTP cyclohydrolase 1; OS = Atopobacter sp. AH10 OX=2315861 GN=folE PE=3 SV=1
MIKVYLSLGSNLGNRLAYLKEAVKRLAEDPQIEVEKVSRVYETSPVGGVEQGAFLNIAVRLSTLLPPLDLLDRMQKIEQDLKRERLVHWGPRTIDLDMLYYGDQTIEHERLIVPHKEMYKRLFVLVPLTDVWTDEFFCQEEVLNTIIQLKGEKQEIQCIGEWTMEKTKQERIEAAVREILSAVGEDPNREGLLETPKRVAKMYDEILASTTEKEFTNYKLFESETAQNAQMVSVNDIPFYSMCEHHMLPFFGKVHVAYIPKAGRIIGLSKIPRLVDHVSRQLNLQERITKDIADTLEDILDPYGVAVVVDARHMCVEMRGVKKTNSVTRTTFFTGEFDRDRDLRKEFLQTVNRYRD

SEQ ID NO: 4864 - protein, 192 aa, unidentified
  source 1..192: note = Atopobium deltae
  REGION 1..192: note = tr|A0A133XUT0|A0A133XUT0_9ACTN GTP cyclohydrolase 1; OS = Atopobium deltae OX=1393034 GN=folE PE=3 SV=1
MPLDASRVEAAISELLSALGEDPTREALRETPARVARAYKELLGGMDEDPSQHLRKQFFEPHNEEMVIVKDIVFSSMCEHHMLPFVGTAAVAYIPRDGRITGLSKISRCVKGYARRLQVQERLTAQIADAFVDVLNPLGVLVVLRAEHMCMTIRGVQSFGSTTLTSAVRGAFKTNAKTCEEAMGLLGLRGQS

SEQ ID NO: 4865 - protein, 190 aa, Atopobium minutum
  REGION 1..190: note = tr|A0A1H4JTN4|A0A1H4JTN4_9ACTN GTP cyclohydrolase 1; OS = Atopobium minutum OX=1381 GN=folE PE=3 SV=1
MAVDKLRAQAAVRELLIAIGEDPDREGLLGTPDRVARAYEELLSGMEEDPAHHLLKQFHEQDNQEMVLVRDIPFSSMCEHHMLPFVGRAHVAYIPREGCITGLSKIARCVSGYSHRLQVQERLTAQIADALVDTLNPLGVLVVLQAEHTCMTIRGIHSAGSQTFTSAVRGCFKANVKTREEAMGLLGLRG

SEQ ID NO: 4866 - protein, 190 aa, Atopobium minutum; identical to SEQ ID NO: 4865
  REGION 1..190: note = tr|N2BN95|N2BN95_9ACTN GTP cyclohydrolase 1; OS = Atopobium minutum 10063974 OX=997872 GN=folE PE=3 SV=1

SEQ ID NO: 4867 - protein, 195 aa, Atopobium parvulum
  REGION 1..195: note = tr|C8WAB6|C8WAB6_ATOPD GTP cyclohydrolase 1; OS = Atopobium parvulum (strain ATCC 33793 / DSM 20469 / JCM 10300 / VPI 0546) OX=521095 GN=folE PE=3 SV=1
MAAENNYKELDQERVKAAVTEFLLAIGEDPEREGLLDTPDRVARACVELFGGMQEDPAVHLRKQFHEEGNKEMVIVRDIPFSSTCEHHILPFVGKAHVCYIPQNGRITGLSKIARCVSGYSRRLQVQERLTGQIADAMVEELDPLGVLVVMEAEHTCMSMRGIRASGALTTTSAVRGIFKTNEKTRAEAMRLLGL

SEQ ID NO: 4868 - protein, 221 aa, Atopobium rimae
  REGION 1..221: note = tr|B9CK26|B9CK26_9ACTN GTP cyclohydrolase 1; OS = Atopobium rimae ATCC 49626 OX=553184 GN=folE PE=3 SV=1
MTEETHATEAQKETHATEIHTKAVHTNTAHSEFAPLDQARVRAAVREFLLAIGEDPTREGLLETPDRVARACAELFSGMQEDPAAHLRKQFFEEGNHEMVIVRDIPFSSTCEHHILPFVGKAHVCYIPKGGRITGLSKIARCVMGYSRRLQVQERLCGQVADAMMAELDPLGVLVVMEAEHTCMTMRGVRSAGALTLTSAVRGIFKDNEKTRAEAMRLLGL

SEQ ID NO: 4869 - protein, 195 aa, Atopobium sp.
  REGION 1..195: note = tr|Z4X1L9|Z4X1L9_9ACTN GTP cyclohydrolase 1; OS = Atopobium sp. BS2 OX=936550 GN=folE PE=3 SV=1
MAAENNYKELDQERVKAAVKEFLLAIGEDPEREGLLDTPDRVARACVELFGGMQENPAAHLRKQFHEEGNKEMVIVRDIPFSSTCEHHILPFVGKAHVCYIPQNGRITGLSKIARCVSGYSRRLQVQERLTGQIADAMVEELDPLGVLVVMEAEHTCMSMRGIRASGALTTTSAVRGIFKTNEKTRAEAMRLLGL

SEQ ID NO: 4870 - protein, 195 aa, Atopobium sp.
  REGION 1..195: note = tr|Z4X2N1|Z4X2N1_9ACTN GTP cyclohydrolase 1; OS = Atopobium sp. ICM42b OX=1190620 GN=folE PE=3 SV=1
MAAVNNYKELDQERVKAAVKEFLLAIGEDPEREGLLDTPDRVARACVELFGGMQEDPAAHLRKQFHEEGNKEMVIVRDIPFSSTCEHHILPFVGKAHVCYIPQNGRITGLSKIARCVSGYSRRLQVQERLTGQIADAMVEELDPLGVLVVMEAEHTCMSMRGIRASGALTTTSAVRGIFKTNEKTRAEAMRLLGL

SEQ ID NO: 4871 - protein, 232 aa, Atopobium vaginae
  REGION 1..232: note = tr|E1L0V2|E1L0V2_9ACTN GTP cyclohydrolase 1; OS = Atopobium vaginae PB189-T1-4 OX=866774 GN=folE PE=3 SV=1
MNLHSNTTCADIPAVPGVAAGAKAAATTLSTTGDAAAQMNCAGGTTPYNFDQIEEGVRLILQGMGEDITRPGLRDTPNRVARALHECTAGGDVPIEDLFEKRFDSSYQDIVCVRDIEFTSVCEHHLLPFWGVAHVAYVPAQHGYVCGLSKLARLVDAYARRLQMQERLCEQVADALMSGIDAQGVYVYMDAVHACMSLRGVRMRKAHTTTQVARGILLQPEKKQEVQRLLFG

SEQ ID NO: 4872 - protein, 238 aa, Atopobium vaginae
  REGION 1..238: note = tr|A0A135PB71|A0A135PB71_9ACTN GTP cyclohydrolase 1; OS = Atopobium vaginae OX=82135 GN=folE PE=3 SV=1
MVRALAWVTFLKRKYCPTVYHITCLLKRIEDIHMNKKCSDSAHAPGLSADMDEQQLNKIQDGVRLILEGLGEDTTRSGLLDTPARVARALHEFIQPTRLSNQTIFEKSFNAQCNDIVVVKNIAFSSLCEHHLLPFYGVAHIAYLPSTDGHVCGLSKLARIVDKYAHRLQIQEGLTQQIAEAIMDGTHAQGVYVCMDATHTCMSLRGVCKRESTTRTQSTLGVFTNMDKKQEVMRLLFG

SEQ ID NO: 4873 - protein, 235 aa, Aulosira laxa
  REGION 1..235: note = tr|A0A1Z4U172|A0A1Z4U172_9CYAN GTP cyclohydrolase 1; OS = Aulosira laxa NIES-50 OX=1541988 GN=folE PE=3 SV=1
MTIASPNGSNRSQSPLIPDLAEAITLRPDRNTHDGHEPNLHPPQEEEMEQMTAAVRQILLGVGEDPEREGLLKTPKRVAEAMRFLTSGYNQSLEELVNGAIFNEGHNEMVLVRDINFFSLCEHHMLPFMGRAHIAYIPNQKVVGLSKLARIVEMYSRRLQVQERLTRQIAEAVQTILNPQGVAVVMEATHMCMVMRGVQKPGSWTVTSAMLGVFQDEQKTREEFLNLIRHQAAFF

SEQ ID NO: 4874 - protein, 194 aa, unidentified
  source 1..194: note = Aurantimicrobium minutum
  REGION 1..194: note = tr|A0A173LY35|A0A173LY35_9MICO GTP cyclohydrolase 1; OS = Aurantimicrobium minutum OX=708131 GN=folE PE=3 SV=1
MAIDRARIEAAVVELLHAIGEDPTKEGFSTTPERVAQAYSEFFAGVGEDPLVHLAESVPVDQLSDAVVVTNITVRSMCEHHLLPFLGVAHLAYLPGDRVVGLGKLPRVVNTLAARPQMQESLTEQIADALVEGLDPRGVVVVVEAKHQCVGARGVEQTDSRTITIASRGELTDPVARAEIMTLIGTSTAGHDHD

SEQ ID NO: 4875 - protein, 194 aa, unidentified
  source 1..194: note = Aurantimicrobium sp.
  REGION 1..194: note = tr|A0A2Z3RV58|A0A2Z3RV58_9MICO GTP cyclohydrolase 1; OS = Aurantimicrobium sp. MWH-Mo1 OX=1987356 GN=folE PE=3; SV = 1
MAIDRARIEAAVVELLHAIGEDPTKANFSSTPVRVAEAYAEFFAGVGQDPLEHLRESVPIDQLSDAVVVTDITVRSMCEHHLLPFLGVAHVAYLPGDRVVGLGKLPRVVNTLAARPQMQESLTEQIADALVEGLDPRGVLVVVEARHQCVAARGVEQTNSRTITIASRGELTEPAARAEIMTLIGASRGEESHD

SEQ ID NO: 4876 - protein, 271 aa, unidentified
  source 1..271: note = Aurantimicrobium sp.
  REGION 1..271: note = tr|A0A344W334|A0A344W334_9MICO GTP cyclohydrolase 1 type 2 OS=Aurantimicrobium sp. MWH-Uga1 OX=2079575; GN = AURUGA1_00935 PE=4 SV=1
MTTLREVVDYAHTLWPLSGAEEWDAPGLVVGSLNQEVTRILLAVDAVSETVTQACDINADLLLTHHPLLMRSVTSVAEDRYKGHLVSKLIRSGVALLAAHTNADVVTDGVSDVIAQRIGLSNLKPLVASSEVGTGIGRTGELSSPMTLGALAQHLATVLPHTAGGVKVSGNFDQEVSTISLCGGAGDSLLSNHLVLSSDVYITSDLRHHPAQEFREQALLGSGPALIDISHWAAEWLWLDVAGAQLKKAFPNIHIEVSDVRTDPWDFLVVQ

SEQ ID NO: 4877 - protein, 207 aa, Aurantimonas manganoxydans
  REGION 1..207: note = tr|Q1YNB3|Q1YNB3_AURMS GTP cyclohydrolase 1; OS = Aurantimonas manganoxydans (strain ATCC BAA-1229 / DSM 21871 / SI85-9A1) OX=287752 GN=folE PE=3 SV=1
MESVVKKFPEAADERADDRPSRAEAEAAVKTLLRWIGEDPSREGLLETPARVVKAYEELFGGYKLEAGDVLGRTFQDVSGYDDMVLVRDIDFHSHCEHHMVPIIGKAHVAYVPDGRVLGLSKIARVVDIYGRRLQTQESMTAQIASAIAGMLVPKGIAVMIEAEHMCMSMRGIRSKGSMTITSAFQGVFAEDGEFKSRFLAQASSRS

SEQ ID NO: 4878 - protein, 207 aa, Aurantimonas sp.
  REGION 1..207: note = tr|A0A1X0T8J0|A0A1X0T8J0_9RHIZ GTP cyclohydrolase 1; OS = Aurantimonas sp. 22II-16-19i OX=1317114 GN=folE PE=3; SV = 1
MEAVVKKFPEKPEDDDLQRPSRAEAEAAVATLLRWIGENPKREGLKETPKRVVKAYEELFGGYGHEPSEVLGRVFEEVAGYNDIVLVKDISFHTHCEHHMVPVLGKAHVAYLPDGKVLGLSKIARLVDMFGRRLQTQEAMTAQIADALDRTLKPRGVAVILEAEHLCMSMRGIRSHGSSTYTGTYRGVFADDQVQQDRILRLIGLSA

SEQ ID NO: 4879 - protein, 207 aa, Aurantimonas sp.
  REGION 1..207: note = tr|A0A2E2JIS4|A0A2E2JIS4_9RHIZ GTP cyclohydrolase 1; OS = Aurantimonas sp. OX=1872654 GN=folE PE=3 SV=1
MESVVKKFPEAADERADDRPSRAEAEAAVKTLLRWIGEDPSREGLLETPARVVKAYEELFGGYRLEAGDVLGRTFQDVSGYDDMVLVRDIDFHSHCEHHMVPIIGKAHVAYVPDGRVLGLSKIARVVDIYGRRLQTQESMTAQIASAIAGMLVPKGIAVMIEAEHMCMSMRGIRSKGSMTITSAFQGVFAEDGEFKSRFLAQASSRS

SEQ ID NO: 4880 - protein, 211 aa, Auraticoccus monumenti
  REGION 1..211: note = tr|A0A1G6RUF5|A0A1G6RUF5_9ACTN GTP cyclohydrolase 1; OS = Auraticoccus monumenti OX=675864 GN=folE PE=3 SV=1
MDDHAPSPLTARSQPSPVEPTQPPGFDHARVAAAVRELLIGIGEDPDRDGLLDTPARVARAYAEMFSGLHADPADVLSTTFELSHDELVLVTDIEVWSSCEHHLVPFTGKAHVGYIPGAGGKITGLSKLARLVDLFAKRPQVQERLTTQIADALVEHLSPRGVIVVIDCEHLCMTMRGVRKAGSRTVTSAVRGQLRDPATRAEAMALIARS

SEQ ID NO: 4881 - protein, 304 aa, unidentified
  source 1..304: note = Aureibacillus halotolerans
  REGION 1..304: note = tr|A0A4R6TUT9|A0A4R6TUT9_9BACI GTP cyclohydrolase FolE2 OS=Aureibacillus halotolerans OX=1508390 GN=folE2; PE = 3 SV=1
MSSSKSLPTKADRLALFGSVPPGERTKPSKKEDMPDLQNLEKDFLFSIKSVGITNVKFPVALHSPFTPTQQTVVGTFALTSSLLQHQKGTNMSRFTEMLTQHREENGAFDVSLRSCHSFLQKLADRLAQPDASMRIDFPWGIDRKAPLSDFSAFHYVDVFIKADYDRASDQTSFSVGLQARITTLCPCSKEISEYSAHNQRGIVTMETTLYSDHALDFQWKEALLEAAESNASSILYPVLKRPDEKYVTEKAYENPRFVEDMVRLVASDLFEMDAVQSFSVHCQNEESIHLHDAVAEIEFDKEA

SEQ ID NO: 4882 - protein, 227 aa, unidentified
  source 1..227: note = Aureicoccus marinus
  REGION 1..227: note = tr|A0A2S7T4W7|A0A2S7T4W7_9FLAO GTP cyclohydrolase 1; OS = Aureicoccus marinus OX=754435 GN=folE PE=3 SV=1
MKIDEHIDQRWEENEEDHLSSAQDTPLRRDAFALSDQEKMDRIQENVKDILWTLGMDLEDDSIKGTPKRVAKMFVKEIFGGLHPDRKPTSSTFDNKYKYGEMLVEKNITLYSTCEHHLLPIVGKAHIAYISNGTVVGLSKMNRIVDYFAKRPQVQERLTMQIVKEMQAVLGTEDVACVIDAKHLCVNSRGIRDIESSTVTAEYGGVFKEEAKQRAFLDYIKLDTDFH

SEQ ID NO: 4883 - protein, 222 aa, unidentified
  source 1..222: note = Aureicoccus marinus
  REGION 1..222: note = tr|A0A2S7T4S1|A0A2S7T4S1_9FLAO GTP cyclohydrolase 1; OS = Aureicoccus marinus OX=754435 GN=folE PE=3 SV=1
MTKNASQVEELGDNHIATSVETPLRPDAFEHSDEEKIENIQGLFGQIMEELGLDLTDESLSGTPYRFAKMYVKELFYGLNPQKKPKISTFPNTYGYKQLLVEQNINIDSSCEHHFLPIVGKAHVGYIPKDRVVGLSKINRLVDYYAHRPQVQERLCLQIMKDLQKILDTPDVIVLVEAKHLCVSSRGIKDKDSFTSTLEYGGCFSEESLRKEFYDLLKPTLD

SEQ ID NO: 4884 - protein, 206 aa, Aureimonas altamirensis
  REGION 1..206: note = tr|A0A1M6CMA5|A0A1M6CMA5_9RHIZ GTP cyclohydrolase 1; OS = Aureimonas altamirensis DSM 21988 OX=1121026 GN=folE; PE = 3 SV=1
MDATVRKFSGSAGQDSHPRPTREEAEAAVQTLIRWAGDDPRREGLVDTPQRVVRAYEEIFGGYCINPADILARTFEEVSGYDDMVLVRDIDFVSHCEHHMVPIIGKAHVAYFPDGQVLGLSKVARVVDLYARRLQTQETMTEEIAAIIDGALAPRGVAVLIEAEHMCMSMRGIRSKGSITTTSSFYGVFKDDKSERDRFLSMILNR

SEQ ID NO: 4885 - protein, 206 aa, Aureimonas altamirensis
  REGION 1..206: note = tr|A0A0B1Q3Y9|A0A0B1Q3Y9_9RHIZ GTP cyclohydrolase 1; OS = Aureimonas altamirensis OX=370622 GN=folE PE=3 SV=1
MDATVRKFPGPTGQDSPPRPTREEAEAAVQTLIRWAGDDPRREGLVDTPQRVVRAYEEIFGGYGIDPADVLSRTFEEVSGYDDMVLVRDIDFVSHCEHHMVPIIGKAHVAYFPDGRVLGLSKVARVVDLYARRLQTQETMTEEIAAIIDGALAPRGVAVLIEAEHMCMSMRGIRSKGSITTTSSFYGVFKDDKSERDRFLSMILNR

SEQ ID NO: 4886 - protein, 206 aa, unidentified
  source 1..206: note = Aureimonas flava
  REGION 1..206: note = tr|A0A3A1WPA4|A0A3A1WPA4_9RHIZ GTP cyclohydrolase 1; OS = Aureimonas flava OX=2320271 GN=folE PE=3 SV=1
MDATIRKLAPAAAAEPVSRPSREEAEAAVETLLRWIGEDPAREGLVDTPRRVVKAYEELYGGYGQQPADVLTRTFEEVAGYQEMVLLRDIPFTSHCEHHMVPIIGKAHVAYVPDGRVLGLSKIPRVVEIFARRLQTQEKLTEQVAAVIDGALTPKGVAVMLEAEHMCMSMRGIRTHGSTTVTTSFYGVFRDDREEQTRFLAMVGRR

SEQ ID NO: 4887 - protein, 206 aa, Aureimonas frigidaquae
  REGION 1..206: note = tr|A0A0P0Z2B4|A0A0P0Z2B4_9RHIZ GTP cyclohydrolase 1; OS = Aureimonas frigidaquae OX=424757 GN=folE PE=3 SV=1
MDATVRSFPGLAGQEKPPRPTREEAQAAVETLIRWAGDDPRREGLIETPARVVRAYEEIFAGYRIDPADVLVRTFEEVSGYDDMVLVRDIDFVSHCEHHMVPIIGKAHVAYVPDGRVLGLSKIARVVDLYARRLQTQEAMTEEVAAIIDGALAPRGVAVLIEAEHMCMSMRGIRTRGAVTTTSAYYGVFKDDKSERDRFLSMILHR

SEQ ID NO: 4888 - protein, 205 aa, unidentified
  source 1..205: note = Aureimonas jatrophae
  REGION 1..205: note = tr|A0A1H0JNG2|A0A1H0JNG2_9RHIZ GTP cyclohydrolase 1; OS = Aureimonas jatrophae OX=1166073 GN=folE PE=3 SV=1
MDAIADKTTNQPVLDEARPSRTEAEAAVEVLLRWIGENPKREGLIDTPRRVVKAFEEIYGGYRQDPAAVLERTFEEVAGYDEMVLVRDIDFTSHCEHHMVPIIGRAHVAYLPEGRVLGLSKIARIVDIYARRLQTQEAMTEQVAAMIDGALTPRGVAVMIEAEHMCMSMRGIRTKGSSTVTTAFYGAFRNDAAQQARFTTLALKR

SEQ ID NO: 4889 - protein, 206 aa, unidentified
  source 1..206: note = Aureimonas phyllosphaerae
  REGION 1..206: note = tr|A0A1I2JH60|A0A1I2JH60_9RHIZ GTP cyclohydrolase 1; OS = Aureimonas phyllosphaerae OX=1166078 GN=folE PE=3 SV=1
MDATIRKLAPAATAEPVVRPTREEAEAAVETLLRWIGEDPAREGLIDTPRRVVKAYEELYGGYGQQPADVLSRTFEEVAGYQEMVLLRDIPFTSHCEHHMVPIIGKAHVAYVPDGRVLGLSKIPRVVEIFARRLQTQEKLTEQIAAVIDGALTPKGVAVLLEAEHMCMSMRGIRTHGSTTVTSSFYGSFRDDREEQTRFLAMVGGR

SEQ ID NO: 4890 - protein, 208 aa, Aureimonas sp.
  REGION 1..208: note = tr|A0A0S2EPM1|A0A0S2EPM1_9RHIZ GTP cyclohydrolase 1; OS = Aureimonas sp. AU20 OX=1349819 GN=folE PE=3 SV=1
MMDASVRKTSQTMQPDETKRPSREEAEAAVETLLRWIGEDPSREGLIDTPRRVVKAYEELFSGYNQEPAAILNRTFEEVAGYDDMVLLKNIDFTSHCEHHMVPIIGKAHVAYLPSGGRVVGLSKIPRIIDVYARRLQTQEALTEQIAGVIDGALNARGVAVMLEAEHMCMSMRGIRTKGSTTLTTSFYGAFREDKSEQARFLAMVGVK

SEQ ID NO: 4891 - protein, 206 aa, Aureimonas sp.
  REGION 1..206: note = tr|A0A5B0DY12|A0A5B0DY12_9RHIZ GTP cyclohydrolase 1; OS = Aureimonas sp. CAU 1482 OX=2565783 GN=folE PE=3 SV=1
MDATLSKFSGFPGQEKPARPTREEAEAAVEVLIRWAGDDPRREGLIETPARVVRAYEEIYGGYQLDPAEVLNRTFSEVSGYDDMVLVRDIDFTSHCEHHMVPIIGKAHVAYMPDGSVLGLSKIARVVDMFARRLQTQEAMTEEIAAVIDSAFAPRGVAVLIESEHMCMSMRGIRTKGSTTSTSAFYGVFKDDKAERDRFLSMILNR

SEQ ID NO: 4892 - protein, 207 aa, Aureimonas ureilytica
  REGION 1..207: note = tr|A0A175R901|A0A175R901_9RHIZ GTP cyclohydrolase 1; OS = Aureimonas ureilytica OX=401562 GN=folE PE=3 SV=1
MDAIVRKTSQTMQPDETNRPSREEAEAAVETLLRWIGEDPSREGLLDTPRRVVKAYEELFSGYRQEPASILNRTFDEVAGYDDMVLLKNIDFTSHCEHHMVPIIGKAHVAYLPNGGRVVGLSKIPRIVEVYARRLQTQEALTEQIAGIIDGALGARGVAVMLEAEHMCMSMRGIRTKGSTTITTSFYGTFRDDKSEQTRFLTMVGAK

SEQ ID NO: 4893 - protein, 225 aa, Aureitalea marina
  REGION 1..225: note = tr|A0A2S7KQH9|A0A2S7KQH9_9FLAO GTP cyclohydrolase 1; OS = Aureitalea marina OX=930804 GN=folE PE=3 SV=1
MNLEKQLQEIEAMGDDHVSSSADTPLRADAFDLSDIEKVALIKKDVERILHTLGMDLTDDSLRGTPHRVAKMFVQEIFSGLHPDNKPNAATFENKYKYGEMLVEKNITLYSTCEHHLLPIVGKAHIAYISSGSVIGLSKMNRIVDYYAKRPQVQERLTMQIVQELQQALGTEDVACVIDAKHLCVNSRGIRDIDSSTVTSEFGGVFKNTDVKREFLDYIKLETEY

SEQ ID NO: 4894 - protein, 199 aa, Aureitalea marina
  REGION 1..199: note = tr|A0A2S7KPC3|A0A2S7KPC3_9FLAO GTP cyclohydrolase 1; OS = Aureitalea marina OX=930804 GN=folE PE=3 SV=1
MTSYKFLEEYAQPVTEELQESFSRILTDIGEDVSRDGIQKTPERAAKAIQFLTSGYIQDAGAILESAMFDEDYHDMVIVKDIEFYSLCEHHMLPFFGKAHIAYIPNGKIVGLSKIPRIVNVFARRLQVQERLTHDILECINKTLKPAGVAVVIEASHMCMAMRGVQKQNSATTTSGFRGQFEKIETRNEFLKLIGSNLS

SEQ ID NO: 4895 - protein, 225 aa, Aureitalea sp.
  REGION 1..225: note = tr|A0A2S0HTQ8|A0A2S0HTQ8_9FLAO GTP cyclohydrolase 1; OS = Aureitalea sp. RR4-38 OX=2094025 GN=folE PE=3 SV=1
MDLEKQLREIEAMGNDHVGSSTDTPLRSDAFELSDIEKIAKIKEDVRNIMNTLGLDLTDDSLKGTPTRVAKMFVQEIFGGLHPDRKPKASTFENKYKYGEMLVEKNITLYSTCEHHLLPIVGKAHIAYISNGTVVGLSKMNRIVDYFAKRPQVQERLTMQIVEELQHILQTKDVACVIDAKHLCVNSRGIRDIDSSTVTSEFGGKFKDPNVRRDFLDYINLDTEF

SEQ ID NO: 4896 - protein, 215 aa, Aureitalea sp.
  REGION 1..215: note = tr|A0A2S0HSV6|A0A2S0HSV6_9FLAO GTP cyclohydrolase 1; OS = Aureitalea sp. RR4-38 OX=2094025 GN=folE PE=3 SV=1
MPTNKNNSSHNGVYNSNTSQVIDPCVLDHDKQKVIAFHFAKIMDSLGLDRTDPSLQETPNRVAKMYVNEVFRGLNENNFPKITLFENTSGYNEMILVDRIALYSYCEHHFVPFFGEATIAYIPNDHVIGLSKINRIVQFIASKPQIQEKLTTEIGQKFNEILQTQDVAVFIKAHHLCVASRGVEDNRSVTRTSFFSGKFQKEKMKTKFFDSMDKF

SEQ ID NO: 4897 - protein, 294 aa, unidentified
  source 1..294: note = Auricoccus indicus
  REGION 1..294: note = tr|A0A1Q1G389|A0A1Q1G389_9STAP GTP cyclohydrolase FolE2 OS=Auricoccus indicus OX=1849491 GN=folE2 PE=3 SV=1
MTEEKYDLTTRVGRFKHFGSVDPIEGTKPTQKEDMKDLQQTKKDFLFAIDHVGINQVKYPVIIDHMQSVGNFSLSTSLTRDEKGINMSRLIESLELHYHNGIELSFESLSSLTESIRTKMKQSAAQVEVKSTWFYDKASPVTQLTGRAHAQIGYTINKDENNEDRKFYMQSDVTTLCPCSKEISEYSAHNQRGTVTVSLDLYDHKDIPKNHKEIVLEIMEANASSQLYPILKRTDEKKVTERAYENPRFVEDILRLIAYDLVELDWVKGFTLICENKESIHQHDAYSQLTYNKE

SEQ ID NO: 4898 - protein, 186 aa, Auritidibacter sp.
  REGION 1..186: note = tr|A0A318A8E7|A0A318A8E7_9MICC GTP cyclohydrolase 1; OS = Auritidibacter sp. NML120636 OX=2170743 GN=folE PE=3; SV = 1
MDLPRIEAAVREILEAIGEDPDRDGLRETPARVARSYAEIFGGLGQEPGEVLEKTFDLVHDEMVLVKDIAFYSTCEHHLLPFHGQAHIGYIPSESGKVTGLSKLARLVNVYARRPQVQERLTDQLVEALMTHLHPRGAIVVVEAEHLCMSMRGVKSPGAMTVTSAVRGQLRDASTRSEAMSLILRK

SEQ ID NO: 4899 - protein, 186 aa, Auritidibacter sp.
  REGION 1..186: note = tr|A0A318ABZ4|A0A318ABZ4_9MICC GTP cyclohydrolase 1; OS = Auritidibacter sp. NML120779 OX=2170744 GN=folE PE=3; SV = 1
MDLPRIEAAVREILEAIGEDPDRDGLRETPARVARSYAEMFGGLGQEPGEVLEKTFDLVHDEMVLVKDIAFYSTCEHHLLPFHGQAHIGYIPSESGKVTGLSKLARLVNVYARRPQVQERLTDQLVEALMTHLHPRGAIVVVEAEHLCMSMRGVKSPGAMTVTSAVRGQLRDASTRSEAMSLILRK

SEQ ID NO: 4900 - protein, 212 aa, Austwickia chelonae
  REGION 1..212: note = tr|K6VJQ0|K6VJQ0_9MICO GTP cyclohydrolase 1; OS = Austwickia chelonae NBRC 105200 OX=1184607 GN=folE PE=3; SV = 1
MAEDSCAVTSARPDDVERPDRSSRVDLGRAEAAVRELLLALGEDPDRDGLRDTPGRVARAYAEMFAGTQQDPAQILERRFDIDHDEMIMVHDIEVFSTCEHHLLPFHGVAHVGYIPAQDGQVTGLSKLARLVDCFARRPQVQERLTTQVADALVTHLEARGVIVVVEAEHLCMSMRGARKPGARTTTSAVRGLLRNPATRAEAMGLILRGRG

SEQ ID NO: 4901 - protein, 218 aa, Avibacterium avium
  REGION 1..218: note = tr|A0A379AS02|A0A379AS02_AVIAV GTP cyclohydrolase 1; OS = Avibacterium avium OX=751 GN=folE PE=3 SV=1
MNKISPEAEKVRQALVSKGIETPMVDTQLTKSQRREGIEQHMREVMKLIGLDLRDDSLEETPVRLAKMFVDEIFSGLDYANFPKITNIENRMKVSEMVLVNDVTLTSTCEHHFVTIDGMVSVAYYPKKWVIGLSKINRVVAFFAQRPQVQERLTEQILLAFQTILETEDVAVYVKATHFCVKCRGIKDTNSYTVTSAFGGVFLDDRETRKEFLTLINK

SEQ ID NO: 4902 - protein, 218 aa, Avibacterium endocarditidis
  REGION 1..218: note = tr|A0A2S5AI81|A0A2S5AI81_9PAST GTP cyclohydrolase 1; OS = Avibacterium endocarditidis OX=380674 GN=folE PE=3 SV=1
MNKISPEAEKVRQALVSKGIETPMVDTQLTKSQRREGIEQHMREVMKLIGLDLRDDSLEETPVRLAKMFVDEIFSGLDYANFPKITNIENRMKVSEMVLVNDVTLTSTCEHHFVTIDGMVSVAYYPKKWVIGLSKINRVVAFFAQRPQVQERLTEQILLAFQTILETENVAVYVKATHFCVKCRGIKDTNSYTVTSAFGGVFLDDRETRKEFLTLINK

SEQ ID NO: 4903 - protein, 218 aa, Avibacterium gallinarum
  REGION 1..218: note = tr|A0A379AVB2|A0A379AVB2_AVIGA GTP cyclohydrolase 1; OS = Avibacterium gallinarum OX=755 GN=folE PE=3 SV=1
MNKISPEAEKVRQALVSKGIETPMVDTQLTKSQRREGIEQHMREVMKLIGLDLRDDSLEETPVRLAKMFVDEVFSGLDYANFPKITNIENRMKVSEMVLVNDVTLTSTCEHHFVTIDGMVSVAYYPKKWVIGLSKINRVVAFFAQRPQVQERLTEQILLAFQTILETEDVAVYVKATHFCVKCRGIKDTNSYTVTSAFGGVFLDDRETRKEFLTLINK

SEQ ID NO: 4904 - protein, 217 aa, Avibacterium paragallinarum
  REGION 1..217: note = tr|A0A0F5EQU6|A0A0F5EQU6_AVIPA GTP cyclohydrolase 1; OS = Avibacterium paragallinarum OX=728 GN=folE PE=3 SV=1
MSKISPEAEKVRQALLSKGIETPMIDTSLTKSQRREGIEQHMREVMKLIGLDLRDDSLEETPVRLAKMFVDEIFSGLDYANFPKITNIENRMKVSEMVLVNDVTLTSTCEHHFVTIDGTVSVAYYPKKWVIGLSKINRVVAFFAQRPQVQERLTEQILLAFQTILETDDVAVYVKATHFCVKCRGIKDSNSYTVTSAFGGVFLDDRETRKEFLTLLK

SEQ ID NO: 4905 - protein, 217 aa, Avibacterium paragallinarum
  REGION 1..217: note = tr|A0A2V4EUY3|A0A2V4EUY3_AVIPA GTP cyclohydrolase 1; OS = Avibacterium paragallinarum OX=728 GN=folE PE=3 SV=1
MSKISPEAEKVRQALLSKGIETPMIDTSLTKSQRREGIEQHMREVMKLIGLDLRDDSLEETPVRLAKMFVDEIFSGLDYANFPKITNIENRMKVSEMVLINDVTLTSTCEHHFVTIDGTVSVAYYPKKWVIGLSKINRVVAFFAQRPQVQERLTEQILLAFQTILETDDVAVYVKATHFCVKCRGIKDSNSYTVTSAFGGVFLDDRETRKEFLTLLK

SEQ ID NO: 4906 - protein, 218 aa, Avibacterium volantium
  REGION 1..218: note = tr|A0A3S4GZM6|A0A3S4GZM6_AVIVO GTP cyclohydrolase 1; OS = Avibacterium volantium OX=762 GN=folE PE=3 SV=1
MNKISPEAEKVRQALVSKGIETPMVDMQLTKSQRREGIEQHMREVMKLIGLDLRDDSLEETPVRLAKMFVDEIFSGLDYANFPKITNIENRMKVSEMVLVNDVTLTSTCEHHFVTIDGKVSVAYYPKKWVIGLSKINRVVAFFAQRPQVQERLTEQILLAFQTILETEDVAVYVKATHFCVKCRGIKDTNSYTVTSAFGGVFLDDRETRKEFLTLINK

SEQ ID NO: 4907 - protein, 304 aa, Azoarcus communis
  REGION 1..304: note = tr|A0A323UPG0|A0A323UPG0_9RHOO GTP cyclohydrolase FolE2 OS=Azoarcus communis SWub3 = DSM 12120 OX=1121029; GN = folE2 PE=3 SV=1
MNAALPDVSLTDLAPSLSSLAWVGMQGIDLPIIIAEPGYWRDLHATADVQVDLPAAHVKGIHMSRLYRLLDVLSQGEPLSPAGIHALLQAMIDSHRDCDSRCARLRLNLTLLVRRPALVTQGLSGWKSYPVRLDTSLISGRFRFRAQVTVAYSSTCPCSAALSRQSVEQGFLQAFGQHSQVEPTKVAAWLHRHATLATPHSQRSEAQVAVDINGDDTMLGLQALIDRVEQAVGTPVQTAVKRADEQAFALLNGQNLMFVEDAARRIESALNGYANPSVHVRHKESLHPHDAVAWATPPHEGVPT

SEQ ID NO: 4908 - protein, 273 aa, Azoarcus communis
  REGION 1..273: note = tr|A0A323UWS3|A0A323UWS3_9RHOO GTP cyclohydrolase FolE2 OS=Azoarcus communis SWub3 = DSM 12120 OX=1121029; GN = folE2 PE=3 SV=1
MNAPDKFFLPDVQASQDHRALAIQRVGVRGLRYPLVLLDGDSAQHTVATIEMTVGLPADVKGTHMSRFVELLEVERGGLDLSGLRALFADMLVRLEATSGRIEARFPWFMRKTAPVSGVASLLDLDVTLVFEQTEHASLSSTLIVTVPVTSLCPCSKKISEYGAHNQRSHITIAACLRGDLEIGELVRMAEEEASCEVFGLLKRPDEKWVTERAYDNPKFVEDLVRDIALRLGADRRIASWRVESENFESIHNHSAYALIEGENPEAYDHAHG

SEQ ID NO: 4909 - protein, 267 aa, Azoarcus indigens
  REGION 1..267: note = tr|A0A4V3BP19|A0A4V3BP19_9RHOO GTP cyclohydrolase FolE2 OS=Azoarcus indigens OX=29545 GN=folE2 PE=3 SV=1
MNAPDFLRLPDVQASADERALAIQRVGVRGLRHPLALRGADGTVAHTVATVESTVALPAAVKGAHMSRFVAVLEESRGTVFDSAAFAALHAHMLARLESERGRIQFRFPCFLEKRAPVSGIASLLDIDATVEVDGALGEPPRQTLSLVVPVTSLCPCSKEISAYGAHNQRSHITLTVAPRAPLTLEELARVAEEEASSELYGLLKRADEKWVTERAYENPKFVEDLVRDIALRLRADSRLSAWRVESENFESIHNHSAYALIESGGI

SEQ ID NO: 4910 - protein, 215 aa, Azoarcus indigens
  REGION 1..215: note = tr|A0A4R6EH32|A0A4R6EH32_9RHOO GTP cyclohydrolase 1; OS = Azoarcus indigens OX=29545 GN=folE PE=3 SV=1
MNARHDHDHDHAAVPPPAGIGIPRQGSFDPIAFERAVGDLLAACGVAPDSAHTGRTAQRVRELWQRRLLGGYDMDPADALGDGFEDERRDMVVVRGIAIHGVCPHHLVPFRGVAHVAYLPGGRLHGFGRIARLVDAIGHRFTYQEWMTRDIADALMHHGRAQGAACVIEAEQLCLLLGEDRRGDERVVTQAYSGVFAESDQLRNEFLRAVDRRML

SEQ ID NO: 4911 - protein, 269 aa, Azoarcus sp.
  REGION 1..269: note = sp|A1K4Q9|GCH4_AZOSB GTP cyclohydrolase FolE2; OS = Azoarcus sp. (strain BH72) OX=62928 GN=folE2 PE=3 SV=1
MNSPLAHAIPDVQNSEDSRQIAINKVGIKSIRHPVKVSDKNGGVQHTVANFNMYVGLPHNFKGTHMSRFIEILNSNEREISVESFEPMLREMVKRLEAETGHVEMTFPYFINKSAPVSGVQSLMDYEVTFTGEIHEGGRYEFTMKVVVPVTSLCPCSKKISAYGAHNQRSHVTVTATLNDHLWIEDVVQLVEGQASCEVYGLLKRPDEKYVTERAYDNPKFVEDMVRDVAGLLNKEVRIDAYAVESENFESIHNHSAYALIERDKRIEA

SEQ ID NO: 4912 - protein, 269 aa, Azoarcus sp.
  REGION 1..269: note = tr|A0A558CVQ0|A0A558CVQ0_9RHOO GTP cyclohydrolase FolE2 OS=Azoarcus sp. PHD OX=1628740 GN=folE2 PE=3 SV=1
MNTQAAQAIPDVQSSIDRREIAINKVGIKAIRHPIKVSDKSGGVQHTVATFNMYVGLPHNFKGTHMSRFVEILNSNEREISVESFEPMLREMVTRLEAETGHVEMNFPYFINKAAPVSGVQSLMDYEVTFIGTIHEGGRYAFTMRIMVPVTSLCPCSKKISEYGAHNQRSHVTVTATLNDHLWIEDVVQLVEGQASCEVYGLLKRPDEKYVTERAYENPKFVEDMVRDVAGLLNHEPRIDAYSVESENFESIHNHSAYALIERDKRQAA

SEQ ID NO: 4913 - protein, 213 aa, Azoarcus tolulyticus
  REGION 1..213: note = tr|A0A1N6PW94|A0A1N6PW94_9RHOO GTP cyclohydrolase 1; OS = Azoarcus tolulyticus OX=34027 GN=SAMN05421829_102228; PE = 3 SV=1
MSHFDEQHPPHAPCTGIGIPRSGPFDPVAFERAVNDLVAACGIAPDTTHMGRTATRVRELWQRRLLGGYELDPAEALGDGFPDERSDMVVIRGIAVHGVCPHHLVPFRGVAHVAYLPGGRLHGFGRIARLVDAIGHRFTYQEWMTRDIADALLQHGHARGAACIIEAEQLCLLLGEDRRGDERVVTQAFAGEFETREHLRSEFLHAVAGRGAR

SEQ ID NO: 4914 - protein, 269 aa, Azoarcus tolulyticus
  REGION 1..269: note = tr|A0A1N6WTH0|A0A1N6WTH0_9RHOO GTP cyclohydrolase FolE2 OS=Azoarcus tolulyticus OX=34027 GN=folE2 PE=3 SV=1
MKSHESHAIPDVQNANDSRQLAINKVGIKSIRHPIRVSDKSGGVQHTIATFSMYVGLPHNFKGTHMSRFIEILNGNEREISVESIEPMLREMVKRLEAETGVIEMSFPYFINKTAPVSGVQSLMDYEVTFVAEMREGGEYVFEMKVVVPVTSLCPCSKKISEYGAHNQRSHVTVTAQTNDFLWIEELVQLVESQASCELYGLLKRTDEKFVTERAYENPKFVEDMVRDVAGLLNAEKRIDRFVVESENFESIHNHSAYALIERDKRRDA

SEQ ID NO: 4915 - protein, 192 aa, unidentified
  source 1..192: note = Azobacteroides pseudotrichonymphae
  REGION 1..192: note = tr|B6YRU3|B6YRU3_AZOPC GTP cyclohydrolase 1; OS = Azobacteroides pseudotrichonymphae genomovar. CFP2; OX = 511995 GN=folE PE=3 SV=1
MKRTAEELRKEEKLAFHYTQILKLLGEDPKRQGLLNTPKRVVESIMYLTKGYAQSAEEILSSAIFVEDYRQMVIVRNIDFFSLCEHHLLPFFGKAHVAYIPNNVVSGLSKIPRVVDVYARRLQIQERMTTQIKSCIQEILNPLGVMVVIEAQHMCIQMRGVEKQNSITTTSDFTGVFNQAKTREEFIKLIKN

SEQ ID NO: 4916 - protein, 183 aa, Azomonas agilis
  REGION 1..183: note = tr|A0A562I276|A0A562I276_9GAMM GTP cyclohydrolase 1; OS = Azomonas agilis OX=116849 GN=folE PE=3 SV=1
MSLEQHYSAILQHLGEDITREGLIDTPKRAAKAMQYLCKGYQQTLEEVTNGALFSSDTSEMVLIKDIELYSLCEHHILPFIGKAHVAYLPAGKVLGLSKVARIVDMYARRLQIQENLTRQIAEAIQQVTEAAGVAVVIEAQHMCMMMRGVEKQNSSMVTSVMLGQFRENTATRSEFLSLVRAR

SEQ ID NO: 4917 - protein, 264 aa, Azonexus fungiphilus
  REGION 1..264: note = tr|A0A495WF01|A0A495WF01_9RHOO GTP cyclohydrolase FolE2 OS=Azonexus fungiphilus OX=146940 GN=folE2 PE=3 SV=1
MTATSIPDVQSSADTRQIAINKVGIKSIRHPIKVQDKSVGIQHTIATFNMYVGLPHNFKGTHMSRFVEILNSHEREISVENFPAMLQDMIVRLEAETGHIEMNFPFFINKTAPVSGVQSLLDYDVTFIGDISGGEIVTSVKVVVPVTSLCPCSKKISERGAHNQRSHVTVTARTNDFMWIEELVQLVEAEASCELYGLLKRPDEKYVTERAYDNPKFVEDMVRDVAARLNAEARIDSYVVESENFESIHNHSAYALIERDKKNA

SEQ ID NO: 4918 - protein, 264 aa, Azonexus hydrophilus
  REGION 1..264: note = tr|A0A1R1I581|A0A1R1I581_9RHOO GTP cyclohydrolase FolE2 OS=Azonexus hydrophilus OX=418702 GN=folE2 PE=3 SV=1
MTSTSIPDVQNSADTRQIAINKVGIKSIRHPVKVGDKAAGIQHTIAVFNMYVGLPHNFKGTHMSRFVEILNSHEREISVENFPAMLQDMIVKLEAETGHIEMNFPYFINKTAPVSGVQSLMDYDVTFIGDISNGEIVTSTRVVVPVTSLCPCSKKISERGAHNQRSHVTVTARTNDFVWIEELVQLVEAEASCELFGLLKRPDEKYVTERAYDNPKFVEDMVRDVAARLNAEARVDAYVVESENFESIHNHSAYALIERDKKNG

SEQ ID NO: 4919 - protein, 266 aa, Azonexus hydrophilus
  REGION 1..266: note = tr|A0A1R1ID36|A0A1R1ID36_9RHOO GTP cyclohydrolase FolE2 OS=Azonexus hydrophilus OX=418702 GN=folE2 PE=3 SV=1
MNAPEKIFLPDVQSTADHRLLAIHNVGVKGLRYPMQLQAADGETISTVATLAMSVGLPADVKGTHMSRFVELLEARRGVLSQDGLFRMLEEMLLRLDAFSGRIEMAFPYFIRKAAPVSGVESLLDYDAVLIIDKQEGRYPTLTMRVTAPVTSLCPCSKKISDYGAHNQRSHITLEATLRSLMSIEELVRIAEEEASCEVFGLLKRPDEKWVTERAYDNPKFVEDLVRDIALRLMKETRIKHWKVASENFESIHNHSAYAELYGSNA

SEQ ID NO: 4920 - protein, 218 aa, Azorhizobium caulinodans
  REGION 1..218: note = sp|A8HUG2|GCH1_AZOC5 GTP cyclohydrolase 1; OS = Azorhizobium caulinodans (strain ATCC 43989 / DSM 5975 / JCM 20966 / NBRC 14845 / NCIMB 13405 / ORS 571); OX = 438753 GN=fo lE PE=3 SV=1
MDAVVKLFKEQAETEAQRQMPVHRPVDAPRPSRAEAEAAVRTLLAYIGEDPHREGLQETPARVIRSYDEIYGGYALSPDDVLDRTFGEIGSFDDFVLLKDIPFTSHCEHHMVPFMGKAHVAYFPVERVVGLSKIARLVDLYARRLQTQEHLTSQITTALDEALKPRGVAVMIEAEHMCMSMRGILKPGVTTLTSQFTGAFRDDPAEQVRFITMLRGLR

SEQ ID NO: 4921 - protein, 214 aa, Azorhizobium sp.
  REGION 1..214: note = tr|A0A258K668|A0A258K668_9RHIZ GTP cyclohydrolase 1; OS = Azorhizobium sp. 32-67-21 OX=1970319 GN=folE PE=3 SV=1
MDAVVKSLMDARPAGLPAANDAQVSRPSREEAEEAVRTLLAYIGEDIGREGLQDTPRRVIRAYDELYGGYGHDAEEILGRTFGEIGTFDDFVLLHNIPFFSHCEHHMVPFVGKAHVAYFPVERVVGLSKIARVVDAYARRLQTQEHLTSQIVRALDDVLKPRGVAVMIEAEHMCMSMRGISKPGVTTITSQFTGAFRNDPAEQVRFITMVRGRS

SEQ ID NO: 4922 - protein, 214 aa, Azorhizobium sp.
  REGION 1..214: note = tr|A0A258JQU0|A0A258JQU0_9RHIZ GTP cyclohydrolase 1; OS = Azorhizobium sp. 35-67-5 OX=1970321 GN=folE PE=3 SV=1
MDAVVKSLMDARPAGLPAANDAQVSRPSREEAEEAVRTLLAYIGEDTGREGLQDTPRRVIRAYDELYGGYGHDAEEILGRTFGEIGTFDDFVLLHNIPFFSHCEHHMVPFVGKAHVAYFPVERVVGLSKIARVVDAYARRLQTQEHLTSQIVRALDDVLKPRGVAVMIEAEHMCMSMRGISKPGVTTITSQFTGAFRNDPAEQVRFITMVRGRS

SEQ ID NO: 4923 - protein, 267 aa, Azospira oryzae
  REGION 1..267: note = tr|G8QMU6|G8QMU6_AZOOP GTP cyclohydrolase FolE2; OS = Azospira oryzae (strain ATCC BAA-33 / DSM 13638 / PS); OX = 640081 GN=folE2 PE=3 SV=1
MNAPDKMFHLPDVQATPDQRQLAIQKVGVKGLRYPLALAAADGAVQHTVAELTMAVGLAPEVKGTHMSRFVEILERPRGALQAADLPALLQEMLGHLQAESGSIDLAFPYFIAKAAPVSGVSSLLDYDVRLQVEQQPGAPIRTTLAVTAPVTSLCPCSKKISEYGAHNQRSHITISAELRQPMAVEELVRLAEEEASCEVFGLLKRPDEKWVTERAYDNPKFVEDLVRDIALRLMAEPRVGRWSVASENFESIHNHSAYAELCGENV

SEQ ID NO: 4924 - protein, 279 aa, Azospira oryzae
  REGION 1..279: note = tr|A0A2W5GCQ4|A0A2W5GCQ4_9RHOO GTP cyclohydrolase FolE2 OS=Azospira oryzae OX=146939 GN=folE2 PE=3 SV=1
MNRKAEFSLMPDVQSSPDSRHLAIDRVGIKAIRHPVRVADKSGGVQHTVATFNMYVQLPHNFKGTHMSRFVEILNGQEREISVESFETMLRKMVRRLEAESGHIEMSFPYFINKSAPVSGVQSLMDYDVTFTGEIHRGQYQFTMKVVVPVTSLCPCSKKISDYGAHNQRSHVTVTARTCGFVWIEELVRIVEDQASCELYGLLKRPDEKYVTEKAYDNPKFVEDMVRDVASVLNQDPRIVAYVVESENFESIHNHSAYALIERDKTTSPASLEPRIPKA

SEQ ID NO: 4925 - protein, 268 aa, Azospira sp.
  REGION 1..268: note = tr|A0A2R5ECU5|A0A2R5ECU5_9RHOO GTP cyclohydrolase FolE2 OS=Azospira sp. I13 OX=1765050 GN=folE2_2 PE=3 SV=1
MNAPDKMFHLPDVQATPDQRQLAIQKVGVKGLRYPLALATPNGTIQNTVAQLTMAVGLPPEVKGTHMSRFVEILERPRGALQAAELPALLAEMLTHLQAESGSIDLAFPYFIAKVAPVSGVESLLDYDVALKVEKRQGSAQADLTLAVTAPVTSLCPCSKKISEYGAHNQRSHITITAQLRQPMAVEELVRLAEEEASCEVFGLLKRPDEKWVTERAYDNPKFVEDLVRDIALRLMAEPRIGRWSVASENFESIHNHSAYAELSGENA

SEQ ID NO: 4926 - protein, 268 aa, Azospira sp.
  REGION 1..268: note = tr|A0A2R5EET2|A0A2R5EET2_9RHOO GTP cyclohydrolase FolE2 OS=Azospira sp. I13 OX=1765050 GN=folE2_1 PE=3 SV=1
MHTMSTAPIPDIQNSEDTRRIPIDKVGIKDIRHPVKIRDKSGDVRHTVANFNMTVGLPHNFKGTHMSRFVEILNSHEREISVESFPAMLEAMVARLEAKTGQIEMRFPYFISKTAPVSGVPSLMDYDVTFIGDIDGGRIRSTVRVLVPVTSLCPCSKEISAYGAHNQRSHVTVTAQLNAFVWIEDLIQMVEAQASCELYGLLKRPDEKYVTERAYDNPKFVEDMVRDVAARLDADARIDHYVVESENFESIHNHSAYALIEKDKRADV

SEQ ID NO: 4927 - protein, 195 aa, Azospirillum brasilense
  REGION 1..195: note = tr|A0A4D8PLG3|A0A4D8PLG3_AZOBR GTP cyclohydrolase 1; OS = Azospirillum brasilense OX=192 GN=folE PE=3 SV=1
MARPTRAEAEDAVRTLIRWAGDNPSREGLVGTPDRVVRSYEEFFAGYAIDPEEILARTFEETDGYDEMVVLRDIRLESYCEHHMVPIIGKAHVAYLPRQRVVGISKLARLVEAYAKRLQIQEKMTAQIANAIDQVLQPEGVAVVIEAQHQCMTTRGVHKTGVTMVTSRMLGAFRSDPSTRREFLSMIGNPGSRAE

SEQ ID NO: 4928 - protein, 229 aa, Azospirillum brasilense
  REGION 1..229: note = tr|G8AEE9|G8AEE9_AZOBR GTP cyclohydrolase I; OS = Azospirillum brasilense Sp245 OX=1064539 GN=AZOBR_10095; PE = 4 SV=1
MTVQANVLALVQEAMEARRSNEALDTPLDAAGEAAMIDAAARKVEELLDVLRIDHRNDHNTRDTPRRVAKMLVRELLKGRFTAAPELTEFRNAEEFDHLIVTGPIAVRSTCAHHLMPIYGTAFIGILPAKGGNILGLSKYDRIVDHFAARFQIQEELVKQIGNFIVEATRPRGLAVRISAVHMCKTHRGVRAGHDSRMVNSSFHGEMLESRDLREEFLRECATLERSAR

SEQ ID NO: 4929 - protein, 218 aa, Azospirillum doebereinerae
  REGION 1..218: note = tr|A0A3S1CI24|A0A3S1CI24_9PROT GTP cyclohydrolase 1; OS = Azospirillum doebereinerae OX=92933 GN=folE PE=3 SV=1
MTAPTLPPAETKLRGLQRLRAPDDRRPSRAEAEEAVRTLLRWAGDDPEREGLTGTPDRVVRSYEEFFAGYDVDPVAILQRTFEETDGYDEMVILRDIRVESYCEHHMVPIVGRAHVAYLPRRRVVGISKLARLVEAYAKRLQIQEKMTAQIANTIDEVLQPEGVAVVIEAQHQCMTTRGIHKTGVTMVTSRMLGAFRTDPSTRREFLTMIGNPVSRAE

SEQ ID NO: 4930 - protein, 202 aa, unidentified
  source 1..202: note = Azospirillum humicireducens
  REGION 1..202: note = tr|A0A160JJP6|A0A160JJP6_9PROT GTP cyclohydrolase 1; OS = Azospirillum humicireducens OX=1226968 GN=folE PE=3 SV=1
MSRPDTIARPSRAEAEEAVRTLIRWAGDDPAREGLVGTPDRVVRSYDEFFAGYRIDPVEILSRTFEETDGYDEMVILRDIRVESYCEHHMVPIIGKAHVAYLPRRRVVGISKLARLVEAYGKRLQIQEKMTAQIANTIDEVLQPEGVAVVVEAQHQCMTTRGVHKTGVTMVTSRMLGAFRTDPSTRREFLTMIGNPSSRGGE

SEQ ID NO: 4931 - protein, 202 aa, Azospirillum lipoferum
  REGION 1..202: note = tr|A0A5A9GYP7|A0A5A9GYP7_AZOLI GTP cyclohydrolase 1; OS = Azospirillum lipoferum OX=193 GN=folE PE=3 SV=1
MSRPDAAARPSRAEAEEAVRTLIRWAGDDPAREGLVGTPDRVVRSYEEFFAGYGIDPVEILSRTFEETDGYDEMVVLRDIRVESYCEHHMVPIIGKAHVAYLPRRRVVGISKLARLVEAYGKRLQIQEKMTAQIANTIDEVLQPEGVAVVVEAQHQCMTTRGVHKTGVTMVTSRMLGAFRTDPSTRREFLTMIGNPSSRGME

SEQ ID NO: 4932 - protein, 224 aa, Azospirillum lipoferum
  REGION 1..224: note = tr|G7Z767|G7Z767_AZOL4 GTP cyclohydrolase 1; OS = Azospirillum lipoferum (strain 4B) OX=862719 GN=folE; PE = 3 SV=1
MTATKTPHVNPPAVDNVLRGPGLSRPGAIVRPSRAEAEEAVRTLIRWAGDDPAREGLVGTPDRVVRSYEEFFAGYGIDPVEILSRTFEETDGYDEMVILRDIRVESYCEHHMVPIIGKAHVAYLPRRRVVGISKLARLVEAYGKRLQIQEKMTAQIANTIDEVLQPEGVAVVVEAQHQCMTTRGVHKTGVTMVTSRMLGAFRTDPSTRREFLTMIGNPTSRGMD

SEQ ID NO: 4933 - protein, 224 aa, Azospirillum oryzae
  REGION 1..224: note = tr|A0A1X7HDT5|A0A1X7HDT5_9PROT GTP cyclohydrolase 1; OS = Azospirillum oryzae OX=286727 GN=folE PE=3 SV=1
MTATKTPHAKPPVADNVLRGPGLSRPDAVARPSRAEAEEAVRTLIRWAGDDPAREGLVGTPDRVVRSYEEFFAGYGIDPVEILSRTFEETDGYDEMVVLRDIRVESYCEHHMVPIIGKAHVAYLPRRRVVGISKLARLVEAYGKRLQIQEKMTAQIANTIDEVLQPEGVAVVVEAQHQCMTTRGVHKTGVTMVTSRMLGAFRTDPSTRREFLTMIGNPSSRGME

SEQ ID NO: 4934 - protein, 202 aa, Azospirillum oryzae
  REGION 1..202: note = tr|A0A5A9FV62|A0A5A9FV62_9PROT GTP cyclohydrolase 1; OS = Azospirillum oryzae OX=286727 GN=folE PE=3 SV=1
MSRPDAVARPSRTEAEEAVRTLIRWAGDDPAREGLVGTPDRVVRSYEEFFAGYGIDPVEILSRTFEETDGYDEMVVLRDIRVESYCEHHMVPIIGKAHVAYLPRRRVVGISKLARLVEAYGKRLQIQEKMTAQIANTIDEVLQPEGVAVVVEAQHQCMTTRGVHKTGVTMVTSRMLGAFRTDPSTRREFLTMIGNPSSRGME

SEQ ID NO: 4935 - protein, 202 aa, unidentified
  source 1..202: note = Azospirillum palustre
  REGION 1..202: note = tr|A0A2B8BB89|A0A2B8BB89_9PROT GTP cyclohydrolase 1; OS = Azospirillum palustre OX=2044885 GN=folE PE=3 SV=1
MSRPDALARPSRAEAEEAVRTLIRWAGDDPAREGLVGTPDRVVRSYEEFFAGYGIDPVEILSRTFEETDGYDEMVVLRDIRVESYCEHHMVPIIGKAHVAYLPRRRVVGISKLARLVEAYGKRLQIQEKMTAQIANTIDEVLQPEGVAVVVEAQHQCMTTRGIHKTGVTMVTSRMLGAFRTDPSTRREFLTMIGNPSSRGME

SEQ ID NO: 4936 - protein, 202 aa, Azospirillum sp.
  REGION 1..202: note = tr|A0A2U1WL28|A0A2U1WL28_9PROT GTP cyclohydrolase 1; OS = Azospirillum sp. TSA6c OX=709813 GN=folE PE=3 SV=1
MSRPDALARPSRADAEEAVRTLIRWAGDDPAREGLVGTPDRVVRSYEEFFAGYGIDPVEILSRTFEETDGYDEMVVLRDIRVESYCEHHMVPIIGKAHVAYLPRRRVVGISKLARLVEAYGKRLQIQEKMTAQIANTIDEVLQPEGVAVVVEAQHQCMTTRGIHKTGVTMVTSRMLGAFRTDPSTRREFLTMIGNPSSRGME

SEQ ID NO: 4937 - protein, 208 aa, Azospirillum sp.
  REGION 1..208: note = tr|A0A2U1X7K7|A0A2U1X7K7_9PROT GTP cyclohydrolase 1; OS = Azospirillum sp. TSH20 OX=652754 GN=folE PE=3 SV=1
MLRGPGLSRPDPVARPSRTEAEEAVRTLIRWAGDDPAREGLVGTPDRVVRSYEEFFAGYGIDPVEILSRTFEETDGYDEMVVLRDIRVESYCEHHMVPIIGKAHVAYLPRRRVVGISKLARLVEAYGKRLQIQEKMTAQIANTIDEVLQPEGVAVVVEAQHQCMTTRGVHKTGVTMVTSRMLGAFRTDPSTRREFLTMIGNPSSRGME

SEQ ID NO: 4938 - protein, 210 aa, Azospirillum thiophilum
  REGION 1..210: note = tr|A0A0F2L3N7|A0A0F2L3N7_9PROT GTP cyclohydrolase 1; OS = Azospirillum thiophilum OX=528244 GN=folE PE=3 SV=1
MLRGLGRPRSETPAVVRPSRADAEEAVRTLIRWAGDDPTREGLAGTPDRVVRSYEEFFAGYGIDPVEILSRTFEETDGYDEMVVLRDIRVESYCEHHMVPIIGKAHVAYLPRRRVVGISKLARLVEAYGKRLQIQEKMTAQIANTIDEVLQPEGVAVVVEAQHQCMTTRGIHKTGVTMVTSRMLGAFRTDPSTRREFLTMIGNPSSRGME

SEQ ID NO: 4939 - protein, 181 aa, Azotobacter beijerinckii
  REGION 1..181: note = tr|A0A1H9T0K2|A0A1H9T0K2_9GAMM GTP cyclohydrolase 1; OS = Azotobacter beijerinckii OX=170623 GN=folE PE=3 SV=1
MSLEQQYTEILASLGEDIFREGLVDTPKRAAKAMQYLCRGYQQTLEEVVNGALFSSDNSEMVMVKNIELYSLCEHHILPFIGKAHVAYLPNGKVLGLSKVARIVDMYARRLQIQENLTRQIAEAVEQVTGALGVGVVIEAQHMCMMMRGVEKQNSTMVTSVMLGHFRSNAATRSEFLSLIN

SEQ ID NO: 4940 - protein, 181 aa, Azotobacter beijerinckii
  REGION 1..181: note = tr|A0A1I4I960|A0A1I4I960_9GAMM GTP cyclohydrolase 1; OS = Azotobacter beijerinckii OX=170623 GN=folE PE=3 SV=1
MSLEQQYTEILASLGEDISREGLIDTPKRAAKAMQYLCRGYQQTLEEVVNGALFSSDNSEMVMVKNIELYSLCEHHILPFIGKAHVAYLPNGKVLGLSKVARIVDMYARRLQIQENLTRQIAEAVEQVTGALGVGVVIEAQHMCMMMRGVEKQNSTMVTSVMLGHFRSNAATRSEFLSLIN

SEQ ID NO: 4941 - protein, 181 aa, Azotobacter chroococcum
  REGION 1..181: note = tr|A0A0C4WMT7|A0A0C4WMT7_9GAMM GTP cyclohydrolase 1; OS = Azotobacter chroococcum NCIMB 8003 OX=1328314 GN=folE; PE = 3 SV=1
MSLEQQYTAILAHLGEDISREGLVDTPKRAAKAMQYLCRGYQQTLEEVVNGALFSSDNSEMVMVKNIELYSLCEHHMLPFIGKAHVAYLPNGKVLGLSKVARIVDMYARRLQIQENLTRQIAEAVEQVTGASGVGVVIEAQHMCMMMRGVEKQNSTMVTSVMLGHFRSNAATRSEFLSLIN

SEQ ID NO: 4942 - protein, 181 aa, Azotobacter chroococcum; identical to SEQ ID NO: 4941
  REGION 1..181: note = tr|A0A4Q9VPX0|A0A4Q9VPX0_9GAMM GTP cyclohydrolase 1; OS = Azotobacter chroococcum OX=353 GN=folE PE=3 SV=1

SEQ ID NO: 4943 - protein, 181 aa, Azotobacter vinelandii
  REGION 1..181: note = sp|C1DHG2|GCH1_AZOVD GTP cyclohydrolase 1; OS = Azotobacter vinelandii (strain DJ / ATCC BAA-1303); OX = 322710 GN=folE PE=3 SV=1
MSLEQQYTAILAQLGEDVSREGLVDTPKRAAKAMQYLCRGYQQTLEEVVNGALFSSDNSEMVMVKNIELYSLCEHHMLPFIGKAHVAYLPNGKVLGLSKVARIVDMFARRLQIQENLTRQIAEAVEQVTGASGVGVVIEAQHMCMMMRGVEKQNSTLVTSVMLGHFRSNTATRSEFLSLIK

SEQ ID NO: 4944 - protein, 298 aa, Azotobacter vinelandii
  REGION 1..298: note = tr|M9YKD4|M9YKD4_AZOVI GTP cyclohydrolase FolE2; OS = Azotobacter vinelandii CA6 OX=1283331 GN=folE2 PE=3 SV=1
MSIPLPDVALTELSATRAPLDWVGMDGIDVPILLDEPEFAYPVHARAEVQVDLPDPAIKGIHMSRLYRLLDGFAGRDRLNPASLAVLLREMVFSHADCNSTRARLTLAFSLLCRRPALLTQGLSGWKSYPVRLEAVWEAGRLSLDATLQIGYSSTCPCSAALTRQLIEQAFVERFSAAGQVEPAAVAAWLQRNATLATPHSQRSVAEVRVRIPEGATRLGLLALIERIETCLGTPVQTAVKRADEQAFARLNGQNLMYVEDAARKIRQAVAEGFSQFSVSVRHVESLHPHDAVASSSS

SEQ ID NO: 4945 - protein, 188 aa, unidentified; identical to SEQ ID NO: 4102
  source 1..188: note = Bacillaceae bacterium
  REGION 1..188: note = tr|A0A3E0JVR7|A0A3E0JVR7_9BACI GTP cyclohydrolase 1; OS = Bacillaceae bacterium OX=1889774 GN=folE PE=3 SV=1

SEQ ID NO: 4946 - protein, 188 aa, unidentified
  source 1..188: note = Bacillaceae bacterium
  REGION 1..188: note = tr|A0A271M7I6|A0A271M7I6_9BACI GTP cyclohydrolase 1; OS = Bacillaceae bacterium SAOS 7 OX=2015052 GN=folE PE=3; SV = 1
MAEVNRAQIEEAVRLILEAVGEDPNREGLLDTPKRVAKMYEEVFSGLNKDPKEYFETVFGEDYEELVLVKDIPFYSMCEHHLVPFFGHAHVAYFPKNGKVTGLSKLARAVETVARRPQLQERITSEVADAIMETLEPHGVMVVVEAEHMCMAMRGVKKPGSKTVTTAARGKYADDVHARSELLQLIKA

SEQ ID NO: 4947 - protein, 185 aa, unidentified
  source 1..185: note = Bacilli bacterium
  REGION 1..185: note = tr|A0A0K0GDT2|A0A0K0GDT2_9FIRM GTP cyclohydrolase 1; OS = Bacilli bacterium VT-13-104 OX=1637974 GN=folE PE=3 SV=1
MDKEKIQLAVRQILEAIGEDPDRQGLLDTPKRVANMYEEVFSGLSKNPAIHCETVFEEQHEEMVLVKDIPFSSMCEHHLVPFIGTAHVAYIPKNGRVIGLSKMARIVDDISKRPQLQERITKSVADLLMEELDPVGVMVILEAEHMCMSIRGVKKQGSKTVTSAVRGSFRENSKSRNEVLALISK

SEQ ID NO: 4948 - protein, 189 aa, Bacillus aerius
  REGION 1..189: note = tr|A0A3A9DH94|A0A3A9DH94_9BACI GTP cyclohydrolase 1; OS = Bacillus aerius OX=293388 GN=folE PE=3 SV=1
MREINKEQIEQAVRQILEAIGEDPNREGLLDTPKRVAKMYAEVFAGLNEDPKEHFKTIFGEDHEELVLVKDIPFYSMCEHHLVPFYGKAHVAYIPKGGKVTGLSKLARAVEAVAKRPQLQERITSTIADSIVETLTPHGVMVVVEAEHMCMTMRGVKKPGSKTVTSAVRGTFRQDVAARSEVLELIKTS

SEQ ID NO: 4949 - protein, 300 aa, Bacillus aerius
  REGION 1..300: note = tr|A0A3A9DBJ8|A0A3A9DBJ8_9BACI GTP cyclohydrolase FolE2 OS=Bacillus aerius OX=293388 GN=folE2 PE=3 SV=1
MERILHLPAKPERHRRFGSVEAVKGIKPTDKEQMKDIQNTPNDYFFDIDHVGVSNVSHPILIASSLKPFTQTTIGAFSFTTSLARGRKGINMSRLTEQLQRYHEANWTIDVHTLKDFAKDLADNMEQQSASVSVSFPWYFERLSPETKLSGLMHADIHMTVSYHENKGFSQTVGITAHVTTLCPCSKEISEYSAHNQRGIIKITAHINEQAEMPYDFKTELLAAAETNASAKLHPVLKRPDEKRVTEQAYENPRFVEDVIRLTAADLYEMNWISAFEIECRNEESIHMHDAVARLSFSKI

SEQ ID NO: 4950 - protein, 298 aa, Bacillus aerophilus
  REGION 1..298: note = tr|A0A410KT82|A0A410KT82_9BACI GTP cyclohydrolase FolE2 OS=Bacillus aerophilus OX=293389 GN=folE2 PE=3 SV=1
MCSFPSKKERHAQFGSVPPSARTKPCQKEDMIDIQQTEQDFYFDLEQVGICRVSYPVNILSKTTPQHQTASADFTLSTYLPAHQKGIHMSRLTEQLHSFYESGKPVDVDSLKELTAQLAKQMNQPSASIQVSFPWYMEKKSPISGKSGLMHADVQYDIHFHEENGWICYIGCTAQVTTLCPCSKEISEYGAHNQRGTVSIQVELFEQSQLPDDMKADLLQIIESNASAPLYPVLKRPDEKQVTEEAYENPRFVEDVARLIAAELYEQNWIKGFQIECRNEESIHQHDAYAKCSYQKKL

SEQ ID NO: 4951 - protein, 189 aa, Bacillus aerophilus
  REGION 1..189: note = tr|A0A410KWB4|A0A410KWB4_9BACI GTP cyclohydrolase 1; OS = Bacillus aerophilus OX=293389 GN=folE PE=3 SV=1
MSEINKELIEHAVRDILKAIGEDPDREGLLDTPKRVAKMYEEVFSGLNEDPKEHFKTIFGEDHEELVLVKDIAFHSMCEHHLVPFYGKAHVAYIPRGGKVTGLSKLARAVEAVAKRPQLQERITSTIADSMVETLNPHGVMIVVEAEHMCMTMRGVKKPGAKTVTSAVRGTFANDAAARAEVLSFIKND

SEQ ID NO: 4952 - protein, 294 aa, Bacillus akibai
  REGION 1..294: note = tr|W4QN73|W4QN73_BACA3 GTP cyclohydrolase FolE2; OS = Bacillus akibai (strain ATCC 43226 / DSM 21942 / JCM 9157 / 1139) OX=1236973 GN=folE2 PE=3 SV=1
MKRSLPPKAERHRHFGTVDPIIGSKPTDKEKMPDLQNKPADFYFPIQQVGISDVKYPVMIESLIAPTTQTTTATFALTTSLEQDFKGINMSRLTEQLHLFFQTHLLTDETLREFTAILAREMNQKAANVRVTFPWFFTKTSPALQKEGMAHAEVTYDVSFDETKGYTTVISLTGAVTTLCPCSKEISEYSAHNQRSFVTMTVTVDEGQAADWKVVLLEAAESNASSILYPVLKRPDEKAVTERAYENPRFVEDLVRLVSADLYENDAVQSFTVECRNEESIHQHDAIAKLSYTK

SEQ ID NO: 4953 - protein, 189 aa, unidentified
  source 1..189: note = Bacillus albus
  REGION 1..189: note = tr|A0A1J9UYD8|A0A1J9UYD8_9BACI GTP cyclohydrolase 1; OS = Bacillus albus OX=2026189 GN=folE PE=3 SV=1
MAKVNLEQIEHAVRLILEAIGDDPNREGVLDTPKRVAKMYAEVFSGMHEDPKEHLHKVFGEDHEELVLVKDIPFYSMCEHHLVPFYGVAHVAYIPQGGKVTGLSKLARTVDTIARRPQLQERITSTVANSIMEVLEPHGVMVVVEAEHMCMTMRGVKKPGAKTVTTAVRGVLENDAAARSEILSFIKTK

SEQ ID NO: 4954 - protein, 188 aa, Bacillus alcalophilus
  REGION 1..188: note = tr|A0A094WSV1|A0A094WSV1_BACAO GTP cyclohydrolase 1; OS = Bacillus alcalophilus ATCC 27647 = CGMCC 1.3604; OX = 1218173 GN=folE PE=3 SV=1
MQSVDHKKIQQAVTMILEAIGEDPSREGLEDTPKRVAKMYAEVFQGLNQDPKEHFQTVFGEDHEELVLVKDIPFFSMCEHHLVPFFGHAHVGYIPRGGKVTGLSKLARAVEAVAKRPQLQERITATIADSVVESLDPHGVIVVVEAEHMCMTMRGVKKPGAKTITTAVRGKYAEDASLRAEVLGFIKS

SEQ ID NO: 4955 - protein, 298 aa, Bacillus altitudinis
  REGION 1..298: note = tr|A0A5D4P962|A0A5D4P962_9BACI GTP cyclohydrolase FolE2 OS=Bacillus altitudinis OX=293387 GN=folE2 PE=3 SV=1
MRSFPSKKERHAQFGSVPPSARTKPCQKEDMIDIQQTEQDFYFDLEQVGICRVSYPVHILSKTAPQHQTSSADFTLSTYLPAHQKGIHMSRLTEQLHSFYESGKPVDVDSLKELTAQLAKQMHQPSASIQVSFPWYMEKKSPISGKSGLMHADVQYDIHFHEENGWLCHIGCTTQVTTLCPCSKEISEYGAHNQRGTVSIQVELFEQRQLPDDMKADLLQIIESNASAPLYPVLKRPDEKQVTEEAYENPRFVEDVTRLIAAELYEQNWIKGFQIECRNEESIHQHDAYAKCSYQKKL

SEQ ID NO: 4956 - protein, 189 aa, Bacillus altitudinis
  REGION 1..189: note = tr|A0A5K1NBV5|A0A5K1NBV5_9BACI GTP cyclohydrolase I type 1 OS=Bacillus altitudinis OX=293387 GN=B4133_0468; PE = 4 SV=1
MSDDLRMGLLEDQVRNMLELLGEDPTREGLRDTPKRVAKMYKEVFEGIGVNPETALTTTFEEEYEGMVVVKDINYYTFCEHHLIPFFGKAHIGYMPKGRVIGLSKFARLVELISKRPQVQERMTQQMANAIMNVLQPEGVIVSVEGQHLCMCARGVKKPGSSTVTTIKKGLFKEQQSLVHEFEQALTRD

SEQ ID NO: 4957 - protein, 190 aa, Bacillus amyloliquefaciens
  REGION 1..190: note = tr|A0A0D7XQI6|A0A0D7XQI6_BACAM GTP cyclohydrolase 1; OS = Bacillus amyloliquefaciens OX=1390 GN=folE PE=3 SV=1
MKEVNKEQIEQAVRQILEAIGEDPDREGLLDTPKRVAKMYAEVFSGLNEDPKEHFKTVFGEDHEELVLVKDIAFHSMCEHHLVPFYGKAHIAYIPRGGKVTGLSKLARAVEAVSKRPQLQERITSTIAESIVETLDPHGVMVVVEAEHMCMTMRGVRKPGAKTVTSAVRGIFKDDAAARSEVLEHIKRAD

SEQ ID NO: 4958 - protein, 190 aa, Bacillus amyloliquefaciens
  REGION 1..190: note = tr|A0A5C2Q8C1|A0A5C2Q8C1_BACAM GTP cyclohydrolase 1; OS = Bacillus amyloliquefaciens OX=1390 GN=folE PE=3 SV=1
MKEVNKEQIEQAVRQILEAIGEDPDREGLLDTPKRVAKMYAEVFSGLNEDPKEHFKTVFGEEHEELVLVKDIAFHSMCEHHLVPFYGKAHIAYIPRGGKVTGLSKLARAVEAVSKRPQLQERITSTIAESIVETLDPHGVMVVVEAEHMCMTMRGVRKPGAKTVTSAVRGIFKDDAAARSEVLEHIKRAD

SEQ ID NO: 4959 - protein, 189 aa, Bacillus anthracis; identical to SEQ ID NO: 4953
  REGION 1..189: note = sp|C3P598|GCH1_BACAA GTP cyclohydrolase 1; OS = Bacillus anthracis (strain A0248) OX=592021 GN=folE; PE = 3 SV=1

SEQ ID NO: 4960 - protein, 189 aa, Bacillus anthracis; identical to SEQ ID NO: 4953
  REGION 1..189: note = tr|A0A0B5V284|A0A0B5V284_BACAN GTP cyclohydrolase 1; OS = Bacillus anthracis OX=1392 GN=folE PE=3 SV=1

SEQ ID NO: 4961 - protein, 188 aa, Bacillus aquimaris
  REGION 1..188: note = tr|A0A1J6WH89|A0A1J6WH89_9BACI GTP cyclohydrolase 1; OS = Bacillus aquimaris OX=189382 GN=folE PE=3 SV=1
MAEVNHSQIEEAVRLILEAIGENPNREGLLDTPKRVAKMYAEVFSGIDHDPKGYFETIFSEDHEELVLVKDIPFYSMCEHHLVPFYGRAHVAYIPRNGRVTGLSKLARAVESVARRPQLQERITSTVADSIMETLEPYGVMVVVEAEHMCMTMRGVKKPGSSTVTTAVRGTFKEDSQARNEVLSFIKK

SEQ ID NO: 4962 - protein, 212 aa, Bacillus aquimaris
  REGION 1..212: note = tr|A0A5D4TU67|A0A5D4TU67_9BACI GTP cyclohydrolase 1; OS = Bacillus aquimaris OX=189382 GN=folE PE=3 SV=1
MLMTEDQFMLQKLQDLFKGTSGDIDKDIIKAQQYMDGIKNLIEICGDDPDRDGLQETPFRVLKAFLEYTEGYREDPKVHLEKVFDVDHKELVMVKDIEFYSMCEHHFAPFFGVAHVGYVPDRKITGLSKIGRLVEGYAKRFQVQERLTNEIAQAVEEVLEPQGVMVVVEAKHMCMCGRGIKKSTASTTTTAVRGIYAEKTENRMEFLSLLNR

SEQ ID NO: 4963 - protein, 188 aa, Bacillus aryabhattai
  REGION 1..188: note = tr|A0A264YZ25|A0A264YZ25_9BACI GTP cyclohydrolase 1; OS = Bacillus aryabhattai OX=412384 GN=folE PE=3 SV=1
MSAVNKEQIEQAVRQILEAIGEDPNREGLLDTPKRVAKMYEEVFSGLKEDPNEHFKTIFGEEHEELVLVKDINFHSMCEHHLVPFYGKVHVAYIPKGGRVTGLSKLARAVEAVSKRPQLQERITSTVADSIVETLTPHGVMVIVEAEHMCMTMRGVRKPGAMTVTSAVRGVFEHDQAARAEVLSLIKS

SEQ ID NO: 4964 - protein, 188 aa, Bacillus aryabhattai
  REGION 1..188: note = tr|A0A0J6SY62|A0A0J6SY62_9BACI GTP cyclohydrolase 1; OS = Bacillus aryabhattai OX=412384 GN=folE PE=3 SV=1
MSSVNKPQIEQAVRLILEAIGEDPNREGLLDTPKRVAKMYEEVFSGLNEDPKEHFKTVFGEDHEELVLVKDIPFYSMCEHHLVPFYGKAHVAYIPKGGRVTGLSKLARAVEAVAKRPQLQERITSTVADSIVETLEPHGVMVVVEAEHMCMTMRGIKKPGAMTITSAVRGVLEHDASSRAEVLSLIKS

SEQ ID NO: 4965 - protein, 188 aa, Bacillus asahii
  REGION 1..188: note = tr|A0A3Q9RPV9|A0A3Q9RPV9_9BACI GTP cyclohydrolase 1; OS = Bacillus asahii OX=228899 GN=folE PE=3 SV=1
MANVNHAKIEEAVKMILEAVGEDPEREGLLDTPQRVARMYEEIFSGLKQDPKECFETVFGEDHEELVLVKDIPFYSVCEHHLVPFYGKAHVAYIPRNGRVTGLSKLARAVEAVCRRPQLQERITATVVDAIMDKLEPHGAMVVIEAEHMCMTMRGVKKPGSKTVTSAVRGVFAEDYRMRTEVLAFIKE

SEQ ID NO: 4966 - protein, 217 aa, Bacillus asahii
  REGION 1..217: note = tr|A0A3T0KQQ7|A0A3T0KQQ7_9BACI GTP cyclohydrolase 1; OS = Bacillus asahii OX=228899 GN=folE PE=3 SV=1
MSFNEQKLIAQKFPDIFEQDDATEIHRKIDQSQHFMEAVKGLIELCGDNPNRDGLIETPYRVLKAFLEYTEGYREDPKAHLLKTFDVNHQELVLVRDIEFYSMCEHHFAPFFGVAHVGYIPNEKITGLSKIARMVEGYAKRFQVQERLTTEIAEAIEEILQPKGTMVVIEAKHMCMCGRGIKKSNASTATSSVRGIFADKSETRAEFLSILQRPNVL

SEQ ID NO: 4967 - protein, 299 aa, Bacillus atrophaeus
  REGION 1..299: note = tr|A0A0H3E6X2|A0A0H3E6X2_BACA1 GTP cyclohydrolase FolE2 OS=Bacillus atrophaeus (strain 1942) OX=720555; GN = folE2 PE=3 SV=1
MKRNIMLPKKAERHQYFGSVDPVKGEKPVEKEKMKDLQNTNKDYFFEIDHVGVSNVSHPMSITSAMEPFEQATVGNFTMATNLKRNQKGINMSRLTEQLQDYHQRGWVLSLDSLQQFTKELAEKMNQMSAAVEVRFPWYFERKSPMLQKAGLMHADITIHMTYQEDLPYLQRVGISAKVTTLCPCSKEISEYSAHNQRGTVNILADIHPEAPLPKDFKTDLLHAAESNASAMLHPVLKRPDEKAVTETAYENPRFVEDLIRLIAADLYELDWVSAFEIECHNEESIHLHDAYAKLSFSK

SEQ ID NO: 4968 - protein, 190 aa, Bacillus atrophaeus
  REGION 1..190: note = tr|A0A080UIG0|A0A080UIG0_BACAT GTP cyclohydrolase 1; OS = Bacillus atrophaeus OX=1452 GN=folE PE=3 SV=1
MKEVNKEQIEQAVRQILEAIGEDPNREGLLDTPKRVAKMYAEVFSGLNEDPKEHFQTVFGEDHEELVLVKDIAFHSMCEHHLVPFYGKAHIAYIPRGGKVTGLSKLARAVEAVAKRPQLQERITSTIAESIVETLDPHGVMVVVEAEHMCMTMRGVRKPGAKTVTSAVRGIFKNDAAARSEVLDHIKRHD

SEQ ID NO: 4969 - protein, 298 aa, unidentified
  source 1..298: note = Bacillus australimaris
  REGION 1..298: note = tr|A0A0N8HVR4|A0A0N8HVR4_9BACI GTP cyclohydrolase FolE2 OS=Bacillus australimaris OX=1326968 GN=folE2 PE=3; SV = 1
MRSFPPKEVRHQLFGSVPPSLGTKPCQKEDMTDIQKTEQDFYFHLEQVGICRMSYPVHIMSKTAPQHQTTAAAFTLSTSLAAHQKGIHMSRPSEQLHMFYESSKPLDVNALKELTAALALQMNQSTASVHVSFPWYMEKQSPVTGKSGLMHATIKYDVHFHEKDGWTCHVGCDAQVTTLCPCSKEISEYGAHNQRGSVSIQVKLFEHAPLPDDMKAALLQIIESNASAPLYPVLKRPDEKKVTEEAYENPRFVEDMTRLIAIELYEQPWIQGFQVECRNEESIHQHDAYAKCSYEKNL

SEQ ID NO: 4970 - protein, 189 aa, unidentified
  source 1..189: note = Bacillus australimaris
  REGION 1..189: note = tr|A0A0P7GCM6|A0A0P7GCM6_9BACI GTP cyclohydrolase 1; OS = Bacillus australimaris OX=1326968 GN=folE PE=3 SV=1
MSEVNKELIEHAVRDILKAIGEDPDREGLLDTPKRVAKMYEEVFSGLNEDPKEHFKTIFGEDHEELVLVKDIAFHSMCEHHLVPFYGKAHVAYIPRGGKVTGLSKLARAVEAVAKRPQLQERITSTIADSMVETLDPHGVMIVVEAEHMCMTMRGVKKPGAKTVTSAVRGTFANDAAARAEVLSFIKND

SEQ ID NO: 4971 - protein, 187 aa, Bacillus azotoformans
  REGION 1..187: note = tr|A0A072NS74|A0A072NS74_BACAZ GTP cyclohydrolase 1; OS = Bacillus azotoformans MEV2011 OX=1348973 GN=folE PE=3; SV = 1
MNINHEQIEHAVRLILEAVGEDPNREGLLDTPKRVAKMYAEVFAGLRKDPKEYFDTIFSENHEELVLVKDIPFYSMCEHHLVPFFGKAHVAYIPKGGKVVGLSKLARSVEAVAGRPQLQERITTTVAESIVDKLTPYGVMVVVEAEHMCMTMRGVKKPGSKTVTSAVRGIFEKDAAARAEVLSLIKE

SEQ ID NO: 4972 - protein, 187 aa, Bacillus azotoformans
  REGION 1..187: note = tr|K6DGY5|K6DGY5_BACAZ GTP cyclohydrolase 1; OS = Bacillus azotoformans LMG 9581 OX=1131731 GN=folE PE=3; SV = 1
MNINHEQIEHAVRLILEAVGEDPNREGLLDTPKRVAKMYAEVFAGLRKDPKEYFDTIFSENHEELVLVKDIPFYSMCEHHLVPFFGKAHVAYIPKGGKVVGLSKLARSVEAVAGRPQLQERITTTVAETIVDKLTPYGVMVVVEAEHMCMTMRGVKKPGSKTVTSAVRGIFEKDAAARAEVLSLIKE

SEQ ID NO: 4973 - protein, 188 aa, unidentified
  source 1..188: note = Bacillus bacterium
  REGION 1..188: note = tr|A0A3D0E2R4|A0A3D0E2R4_9BACI GTP cyclohydrolase 1; OS = Bacillus bacterium OX=2053512 GN=folE PE=3 SV=1
MGKFDRKQIEEAVRMILEAIGEDPNREGLLDTPKRVAKMYEEVFAGINIDPEQYFETIFGEDHEELVLVKDIPFYSLCEHHLVPFFGKAHVAYIPRNGRVTGLSKLARAVEAVARRPQLQERITSTVADAIMKKLEPHGVMVIIEAEHMCMTMRGVKKPGSKTVTSAVRGIFLKDNQSRNEVLSLIKQ

SEQ ID NO: 4974 - protein, 189 aa, unidentified; identical to SEQ ID NO: 4953
  source 1..189: note = Bacillus bacterium
  REGION 1..189: note = tr|A0A506QM61|A0A506QM61_9BACI GTP cyclohydrolase 1; OS = Bacillus bacterium OX=2053512 GN=folE PE=3 SV=1

SEQ ID NO: 4975 - protein, 188 aa, Bacillus badius
  REGION 1..188: note = tr|A0A0C2U5S2|A0A0C2U5S2_BACBA GTP cyclohydrolase 1; OS = Bacillus badius OX=1455 GN=folE PE=3 SV=1
MAEVNRAQIEEAVRMILEAVGEDPNREGLIDTPKRVAKMYEEVFSGLNKDPREYFETIFGEDYEELVLVKDIPFYSLCEHHLVPFFGHAHVAYLPKNGKVTGLSKLARAVETVARRPQLQERITAEVADAIMEKLQPHGVMVVVEAEHMCMAMRGVKKPGAKTVTTAARGKFANDVHSRSELLNLIKG

SEQ ID NO: 4976 - protein, 187 aa, Bacillus bataviensis
  REGION 1..187: note = tr|K6DMQ5|K6DMQ5_9BACI GTP cyclohydrolase 1; OS = Bacillus bataviensis LMG 21833 OX=1117379 GN=folE PE=3; SV = 1
MPEVNRAQIEDAVRLILEAIGENPNREGLLDTPKRVAKMYEEVFSGLNEDPKQHFETIFSEDHEELVLVKDIPFYSMCEHHLVPFFGKAHVAYIPRNGRVTGLSKLARAVEAVAKRPQLQERITSTIAESMMEKLEPHGVMVVVEAEHMCMTMRGVKKPGSKTVTTAVRGVLADDAIARSEVLSLIK

SEQ ID NO: 4977 - protein, 188 aa, Bacillus bataviensis
  REGION 1..188: note = tr|A0A561DS70|A0A561DS70_9BACI GTP cyclohydrolase 1; OS = Bacillus bataviensis OX=220685 GN=folE PE=3 SV=1
MSEVNRAQIEEAVRLILEAIGEDPNREGLLDTPKRVAKMYEEVFSGLNEDPKQHFETIFSEDHEELVLVKDIPFYSMCEHHLVPFFGKAHVAYIPQNGRVTGLSKLARAVEAVAKRPQLQERITSTIADSMMEKLDPRGVMVVVEAEHMCMTMRGVKKPGSKTVTTAVRGVLADDAVARSEVLSLIKY

SEQ ID NO: 4978 - protein, 191 aa, Bacillus beveridgei
  REGION 1..191: note = tr|A0A1D7QV12|A0A1D7QV12_9BACI GTP cyclohydrolase 1; OS = Bacillus beveridgei OX=632773 GN=folE PE=3 SV=1
MSGNVDHEKIQQAVTMILEAVGEDPEREGLLDTPKRVARMYEEIFEGLHQDPKEHFKTVFGEDHEELVLVKDITFHSVCEHHLVPFFGKVHIGYIPKGGQVTGLSKMARAVESITRKPQLQERITSTLADSIVDTLTPLGVIVIVEAEHMCMTMRGVRKPGAKTVTSAVRGAFQRSEAARAEVMSLIRDQG

SEQ ID NO: 4979 - protein, 189 aa, unidentified; identical to SEQ ID NO: 4953
  source 1..189: note = Bacillus bombysepticus
  REGION 1..189: note = tr|A0A023P3H4|A0A023P3H4_9BACI GTP cyclohydrolase 1; OS = Bacillus bombysepticus str. Wang OX=1330043 GN=folE; PE = 3 SV=1

SEQ ID NO: 4980 - protein, 188 aa, Bacillus boroniphilus
  REGION 1..188: note = tr|W4RHU9|W4RHU9_9BACI GTP cyclohydrolase 1; OS = Bacillus boroniphilus JCM 21738 OX=1294265 GN=folE PE=3; SV = 1
MSNVNRAQIEEAVRLILEAVGEDLNREGLLDTPKRVAKMYEEVFSGLNQDPKEYFDTIFGEDHEELVLVKDIPFYSMCEHHLVPFFGKAHVAYIPRGGKVTGLSKLARAVEAVAKRPQLQERITSTIANSIMEKLDPHGVMVVVEAEHMCMTMRGVKKPGSKTVTSAVRGTLAEDVYARAEILSLIKG

SEQ ID NO: 4981 - protein, 188 aa, Bacillus butanolivorans
  REGION 1..188: note = tr|A0A0M0EXB1|A0A0M0EXB1_9BACI GTP cyclohydrolase 1; OS = Bacillus butanolivorans OX=421767 GN=folE PE=3 SV=1
MANVDHAKIEEAVKMLLEAVGEDPTREGLLDTPGRVARMYEEIFSGLTQDPKEYFDTVFGEDHEELVLVKDIPFYSVCEHHLVPFYGKAHVAYIPKNGKVTGLSKLARAVEAVSKRPQLQERITSTVADSIMEKLEPHGVMVVVEAEHMCMTMRGVKKPGSKTVTSAVRGTFAKDHRTRAEVLAFIKD

SEQ ID NO: 4982 - protein, 188 aa, unidentified; identical to SEQ ID NO: 4631
  source 1..188: note = Bacillus caldolyticus
  REGION 1..188: note = tr|A0A2H5KLT2|A0A2H5KLT2_BACCL GTP cyclohydrolase 1; OS = Bacillus caldolyticus OX=1394 GN=folE PE=3 SV=1

SEQ ID NO: 4983 - protein, 188 aa, unidentified
  source 1..188: note = Bacillus camelliae
  REGION 1..188: note = tr|A0A2N3LMY1|A0A2N3LMY1_9BACI GTP cyclohydrolase 1; OS = Bacillus camelliae OX=1707093 GN=folE PE=3 SV=1
MDEVSLKKIEQGVRMILEAIGENPEREGLVDTPERVAKMYKEIFSGLEQDPSEFFDTIYSEDHEELVLVKDISFYSMCEHHLIPFFGKAHIAYIPQEGKVAGLSKLARAVESIASRPQLQERMTAALADLLMNKLNPLGVFIMLEAEQLCMTMRGIKKPGTKTITTGARGIFKTNDSIRSEVLLLMKN

SEQ ID NO: 4984 - protein, 195 aa, unidentified
  source 1..195: note = Bacillus camelliae
  REGION 1..195: note = tr|A0A2N3LM33|A0A2N3LM33_9BACI GTP cyclohydrolase 1; OS = Bacillus camelliae OX=1707093 GN=folE PE=3 SV=1
MNQVTTMDYDLKKRKISEHFARIIEELGLDLDDPSIKDTPERVAKMLVNETCNGLFTEPPIITTFPIDKNTSRDLVVIENIPFNSLCEHHFQPFVGTATIAYLPNDRVMGLSKGARVLDYFASRPQIQERLTNEVAAYLYEQLNAKGVFVIMKAEHFCMKVRGVKKHQSTTITTASLGEIDKKEVLASIQLASSK

SEQ ID NO: 4985 - protein, 188 aa, unidentified
  source 1..188: note = Bacillus campisalis
  REGION 1..188: note = tr|A0A0M2SV57|A0A0M2SV57_9BACI GTP cyclohydrolase 1; OS = Bacillus campisalis OX=1408103 GN=folE PE=3 SV=1
MAKVNHAQIEEGVRLILEAVGEDPNREGLLDTPKRVARMYEEVFAGLNQDPQEYFETIFGEDHEEVVLVKDIPFYSMCEHHLVPFFGKAHVAYIPKGGKVTGLSKLARAVEAVAKRPQLQERITSSIANAIMEKLQPHGVMVVVEAEHMCMTMRGVKKPGSKTVTSAVRGTLAEDVNARAEILALIKD

SEQ ID NO: 4986 - protein, 189 aa, Bacillus canaveralius
  REGION 1..189: note = tr|A0A2N5GRQ7|A0A2N5GRQ7_9BACI GTP cyclohydrolase 1; OS = Bacillus canaveralius OX=1403243 GN=folE PE=3 SV=1
MSNVNRTQIEEAVRLILQAIGEDPDREGLVDTPKRVAKMYEEVFAGLNKDPKEHFETIFGEDHEELVLVKDIPFYSMCEHHLVPFFGQAHIAYIPKNGRVTGLSKLARALEDVVRRPQLQERITATVADAIMEKLEPHGVMVVVEAEHMCMTMRGVKKPGSKTITSAVRGVLQEDPRARAEVLALINKQ

SEQ ID NO: 4987 - protein, 193 aa, Bacillus canaveralius
  REGION 1..193: note = tr|A0A2N5GN55|A0A2N5GN55_9BACI GTP cyclohydrolase 1; OS = Bacillus canaveralius OX=1403243 GN=folE PE=3 SV=1
MAVELKKESTIDSMEENVKSILQLIGEDTSREGLKDTPKRVAKMYKEVFAGVGVNPETALTTTFEEAYDGLVVVKDITYYTFCEHHLIPFFGKAHIGYIPNGRVVGLSKFARLVELVSQRPQVQERMTQQIADSIMNVLGPEGVIVSVEGQHLCMCARGVKKPGASTVTTIKKGVFTENVSLAEEFERALLRD

SEQ ID NO: 4988 - protein, 188 aa, unidentified
  source 1..188: note = Bacillus caseinilyticus
  REGION 1..188: note = tr|A0A1H3NF12|A0A1H3NF12_9BACI GTP cyclohydrolase 1; OS = Bacillus caseinilyticus OX=1503961 GN=folE PE=3 SV=1
MTKVDHKKIEEAVVMILEAIGEDPQREGLLDTPKRVARMYEEVFQGLNQDPREHFATVFGEDHEELVLVKDIPFYSMCEHHLVPFFGKAHIGYIPRGGKVTGLSKLARAVEAVAKRPQLQERITSTIADSIVETLEPLGVIVVVEAEHMCMTMRGVKKPGSKTVTSAVRGAFGKSAAARAEVLSLIKD

SEQ ID NO: 4989 - protein, 302 aa, unidentified
  source 1..302: note = Bacillus caseinilyticus
  REGION 1..302: note = tr|A0A1H3SWI0|A0A1H3SWI0_9BACI GTP cyclohydrolase FolE2 OS=Bacillus caseinilyticus OX=1503961 GN=folE2 PE=3; SV = 1
MKTKHWPDKTERQKRFGSVPPTPGNKPIHKEEMTDLQNMPHDFLFALDSVGICNVKHPLMIHSDLKPYEQTTVGTFSLTTSLEQRSKGINMSRLTEVLHEYHQAGFTLNFNNLQAFTADLAGRMEQSSAHVHVTFPWFFARHSPALNKIGLGHAEALIKVHFDQASGFTHEVGLTAAVTTLCPCSKEISEYSAHNQRGYVTMNAELYDPTVGSSDWKVTLLQAAESNASSILYPVLKRPDEKAVTEKAYENPRFVEDMVRLIAADLYEDETIKAFTVACRNEESIHQHDAIATLTYSKDRRP

SEQ ID NO: 4990 - protein, 188 aa, unidentified
  source 1..188: note = Bacillus cavernae
  REGION 1..188: note = tr|A0A433HLP5|A0A433HLP5_9BACI GTP cyclohydrolase 1; OS = Bacillus cavernae OX=1674310 GN=folE PE=3 SV=1
MANVNHAKIEEAVKMILEAVGEDPEREGLLDTPKRVARMYEEIFAGLAQDPKEYFETVFGEDHEELVLVKDIPFYSVCEHHLVPFYGKAHVAYIPRNGRVTGLSKLARAVEAVSKRPQLQERITSTVADSIMEKLEPHGVMIVVEAEHMCMTMRGVKKPGAKTVTSAVRGVFAEDARSRAEVLAFIKE

SEQ ID NO: 4991 - protein, 188 aa, Bacillus cellulosilyticus
  REGION 1..188: note = tr|E6TZF1|E6TZF1_BACCJ GTP cyclohydrolase 1; OS = Bacillus cellulosilyticus (strain ATCC 21833 / DSM 2522 / FERM P-1141 / JCM 9156 / N-4) OX=649639 GN=folE PE=3 SV=1
MSQVDHQKIQQAVTMILEAIGEDPNREGLLDTPKRVARMYEEVFEGVKQDPKEHFATVFGEDHEELVLVKDIPFYSMCEHHLVPFYGKAHIGYIPKGGKVTGLSKLARALEAVTRRPQLQERITSTVADSIVDTLEPLGVIVVVEAEHMCMTMRGVKKPGSKTVTSAVRGAFENNPAARAEVLSLIKE

SEQ ID NO: 4992 - protein, 189 aa, Bacillus cereus; identical to SEQ ID NO: 4953
  REGION 1..189: note = sp|B7JGZ6|GCH1_BACC0 GTP cyclohydrolase 1; OS = Bacillus cereus (strain AH820) OX=405535 GN=folE PE=3; SV = 1

SEQ ID NO: 4993 - protein, 189 aa, Bacillus cereus; identical to SEQ ID NO: 4953
  REGION 1..189: note = tr|J8FWJ6|J8FWJ6_BACCE GTP cyclohydrolase 1; OS = Bacillus cereus VD102 OX=1053228 GN=folE PE=3 SV=1

SEQ ID NO: 4994 - protein, 189 aa, Bacillus circulans
  REGION 1..189: note = tr|A0A0J1IAA9|A0A0J1IAA9_BACCI GTP cyclohydrolase 1; OS = Bacillus circulans OX=1397 GN=folE PE=3 SV=1
MTVEVNRNLLEEHIEAILKLVGEDPNREGLIDTPKRVAKMYREVFSGVGVDPKTALTTTFEEDYEGIVVVKDINYYTFCEHHLIPFFGRAHIGYIPKGRVVGLSKFARLVELVSKRPQVQERMTQQIANAVMNVLQPEGVIVSIEGQHLCMCARGVKKPGSSTVTTIKKGVFKESVALVDEFERALQRD

SEQ ID NO: 4995 - protein, 187 aa, Bacillus circulans
  REGION 1..187: note = tr|A0A0J1IM10|A0A0J1IM10_BACCI GTP cyclohydrolase 1; OS = Bacillus circulans OX=1397 GN=folE PE=3 SV=1
MSKINTPQIEEAIRLLLEAVGEDPNREGLLDTPKRVAKMYEEVFSGLTIDPKEYFETIFHEDHEELVLVKDIPFYSMCEHHLVPFYGKAHVAYIPKGGRVAGLSKLARAIEAVSKRPQLQERITSTVADTMMETLEPHGVMVVVEAEHMCMTMRGVKKPGAKTVTSAVRGVFQTDSDKRAEVFALIK

SEQ ID NO: 4996 - protein, 189 aa, Bacillus clausii
  REGION 1..189: note = tr|Q5WGT7|Q5WGT7_BACSK GTP cyclohydrolase 1; OS = Bacillus clausii (strain KSM-K16) OX=66692 GN=mtrA PE=3; SV = 1
MVDHDKLQQAVRMILEAIGEDPEREGLADTPRRVAQMYEEMFSGLHEDPSEHLKTVFGEEHEELVLVKDIPFFSMCEHHLVPFFGKAHIAYIPKNGIVTGLSKLARTVDGIARRPQVQERMTKTLADVLMSTLDAKGAMVVLSAEHMCMAMRGIKKPGSKTVTTAVRGSFANDGEARAEVLQLIQTKEV

SEQ ID NO: 4997 - protein, 189 aa, Bacillus clausii
  REGION 1..189: note = tr|A0A268RZB2|A0A268RZB2_BACCS GTP cyclohydrolase 1; OS = Bacillus clausii OX=79880 GN=folE PE=3 SV=1
MVDHDKLQQAVRMILEAIGEDPEREGLADTPRRVAQMYEEMFSGLHEDPSEHLKTVFGEEHEELVLVKDIPFFSMCEHHLVPFFGKAHIAYIPQNGIVTGLSKLARTVDGIARRPQVQERMTKTLADVLMSTLDAKGAMVVLSAEHMCMAMRGIKKPGSKTVTTAVRGSFANDREARAEVLQLIQTKEA

SEQ ID NO: 4998 - protein, 227 aa, Bacillus coagulans
  REGION 1..227: note = tr|A0A0C5C8F8|A0A0C5C8F8_BACCO GTP cyclohydrolase 1; OS = Bacillus coagulans OX=1398 GN=folE PE=3 SV=1
MKTSLQKELYPFMIVSGQKEHQLIEETFKDQIDHHTVISKKLEQSGQFMEAVRSLIDLCGDDPDRDGLQETPYRVLKAFLEYTEGYREDPKLHLAKTFDVDHDHKELVLVKDIEFYSICEHHFAPFFGVAHVAYFPNEKITGLSKIARMVDGYARRFQVQERLTKQIADAVEEVLEPQGTMVVLEAKHMCMCGRGVKKSDASTTTMSYRGIFEGRADLRAEFLSLLK

SEQ ID NO: 4999 - protein, 215 aa, Bacillus coagulans
  REGION 1..215: note = tr|F7Z4J5|F7Z4J5_BACC6 GTP cyclohydrolase 1; OS = Bacillus coagulans (strain 2-6) OX=941639 GN=folE PE=3; SV = 1
MIVSGQKEHQLIEETFKDQIDHPAVISKKLEQSGQFMEAVRSLIDLCGDDPGRDGLQETPYRVLKAFLEYTEGYREDPKLHLAKTFDVDHDHKELVLVKDIEFYSICEHHFAPFFGVAHVAYLPNEKITGLSKIARMVDGYARRFQVQERLTKQIADAVEEVLEPQGTMVVLEAKHMCMCGRGVKKADASTTTMSYRGIFEGRADLRAEFLSLLK

SEQ ID NO: 5000 - protein, 188 aa, Bacillus coahuilensis
  REGION 1..188: note = tr|A0A147K8R0|A0A147K8R0_9BACI GTP cyclohydrolase 1; OS = Bacillus coahuilensis p1.1.43 OX=1150625 GN=folE PE=3; SV = 1
MKEVNREQIEQAVRLIIEAVGEDPNREGLVDTPKRVAKMYEEVFSGLNEDPKEHFETVFSEEHEELVLVKDIPFYSMCEHHLVPFFGKAHVAYIPKDGRVTGLSKLARAVEVIAKRPQLQERITATVADSIMEKLLPHGAMVMVEAEHMCMTMRGVKKPGASTITTAVRGVFADDPTKRAEIFALIKN

SEQ ID NO: 5001 - protein, 188 aa, Bacillus cohnii
  REGION 1..188: note = tr|A0A223KS49|A0A223KS49_9BACI GTP cyclohydrolase 1; OS = Bacillus cohnii OX=33932 GN=folE PE=3 SV=1
MGQVNKSQIEQAVRLILEAIGEDPNREGLLDTPKRVAKMYEEVFSGLNEDPKEHFKTVFGEPHEELVLVKDIPFFSMCEHHLVPFFGRAHVAYIPKGGKVTGLSKLARAVEAVAKRPQLQERITATIADSIVESLEPHGVMVVVEAEHMCMTMRGVKKPGAVTVTSAVRGTLENDSAARAEILSYIKK

SEQ ID NO: 5002 - protein, 189 aa, unidentified
  source 1..189: note = Bacillus cucumis
  REGION 1..189: note = tr|A0A2N5HFE0|A0A2N5HFE0_9BACI GTP cyclohydrolase 1; OS = Bacillus cucumis OX=1740721 GN=folE PE=3 SV=1
MKEQDINKLEQAVTMILEAIGEDPTREGLLETPKRVAKMYQEVFEGLNKDPREYFDTVFHENHDEVVLVKDIPFYSMCEHHLVPFFGVAHVAYIPRNGVVAGLSKLARAVETAARRPQLQERITSSVADAMMEKLNPHGVYIIIEAEHMCMTMRGIKKPGAKTITTVARGIYEHDDVKRAEILSLIRTN

SEQ ID NO: 5003 - protein, 188 aa, unidentified
  source 1..188: note = Bacillus cucumis
  REGION 1..188: note = tr|A0A2N5H9C9|A0A2N5H9C9_9BACI GTP cyclohydrolase 1; OS = Bacillus cucumis OX=1740721 GN=folE PE=3 SV=1
MSEFNRAQIEDAVRLILEAIGEDPNREGLLDTPKRVAKMYEEVFSGLNEDPKEHFETIFSEDHEELVLVKDIPFYSMCEHHLVPFFGKAHVAYIPQNGRVTGLSKLARAVEAVAKRPQLQERITSTIADSMMEKLEPRGVMVVVEAEHMCMTMRGVKKPGSKTVTTAVRGILADDAVARSEVLSLIKY

SEQ ID NO: 5004 - protein, 189 aa, unidentified
  source 1..189: note = Bacillus cytotoxicus
  REGION 1..189: note = sp|A7GN48|GCH1_BACCN GTP cyclohydrolase 1; OS = Bacillus cytotoxicus (strain DSM 22905 / CIP 110041 / 391-98 / NVH 391-98) OX=315749 GN=folE PE=3 SV=1
MAKVNLEQIEHAVRLILEAIGDDPNREGVLDTPRRVAKMYAEVFSGMHEDPKEHLHKVFGEDHEELVLVKDIPFYSMCEHHLVPFYGVAHVAYIPRGGKVTGLSKLARTVDTIARRPQLQERITSTVADSIMEVLEPHGVMVVVEAEHMCMTMRGVKKPGAKTVTTAVRGVLENDAAARSEILSFIKSK

SEQ ID NO: 5005 - protein, 189 aa, unidentified; identical to SEQ ID NO: 5004
  source 1..189: note = Bacillus cytotoxicus
  REGION 1..189: note = tr|A0A2S1A8X6|A0A2S1A8X6_9BACI GTP cyclohydrolase 1; OS = Bacillus cytotoxicus OX=580165 GN=folE PE=3 SV=1

SEQ ID NO: 5006 - protein, 187 aa, Bacillus daliensis
  REGION 1..187: note = tr|A0A1H0AVT7|A0A1H0AVT7_9BACI GTP cyclohydrolase 1; OS = Bacillus daliensis OX=745820 GN=folE PE=3 SV=1
MSQVDHQKIQQAVTMILEAIGEDPTREGLEDTPKRVARMYEEVFQGLNEDPKEHFKTVFGEDHEELVLVKDIPFYSMCEHHLVPFFGNVHIAYIPKGGKVTGLSKLARAVEAVTRRPQLQERITSTIAESMVETLQPGGVMVVVEAEHMCMTMRGVKKPGSKTVTSAVRGTFVENDAARAEVLSFIK

SEQ ID NO: 5007 - protein, 211 aa, unidentified
  source 1..211: note = Bacillus deserti
  REGION 1..211: note = tr|A0A2N5M214|A0A2N5M214_9BACI GTP cyclohydrolase 1; OS = Bacillus deserti OX=673318 GN=folE PE=3 SV=1
MLRWDYIFTREHYIRFRANRRKKMSAVNHAQIEEAVRMILEAVGEDPSREGLMDTPKRVARMYEEIFTGINQDPAEYFETIFGEEHEELVLVKDIPFYSVCEHHLVPFFGHAHVAYIPRNGRVTGLSKLARAVEAVAKRPQLQERITSTVADTIMNKLEPHGVMVVVEAEHMCMTMRGIKKPGSKTVTSAVRGIFREDDRSRAEVLSLIKN

SEQ ID NO: 5008 - protein, 214 aa, unidentified
  source 1..214: note = Bacillus deserti
  REGION 1..214: note = tr|A0A2N5M9L4|A0A2N5M9L4_9BACI GTP cyclohydrolase 1; OS = Bacillus deserti OX=673318 GN=folE PE=3 SV=1
MNILLKNININENQLMKLQNVIGRNLNQEEIALAENIMSSIQDLIQLAGDDPSRDGLQESPYRFLKAILEYTKGYQEDPSEHLDKTFEVTHDDIVLVKNIPFNSLCEHHFAPFFGMAHIAYIPSDKITGLSKFARLVDGYANRFQVQERLTQEIADAINKVLNPKAIAVILEAEHYCMCGRGVKKAGATTVTSTMRGMFEEDRHARAEVLHLLK

SEQ ID NO: 5009 - protein, 188 aa, unidentified
  source 1..188: note = Bacillus enclensis
  REGION 1..188: note = tr|A0A0V8HLW4|A0A0V8HLW4_9BACI GTP cyclohydrolase 1; OS = Bacillus enclensis OX=1402860 GN=folE PE=3 SV=1
MAEVNHSQIEEAVRLILEAIGENPNREGLLDTPKRVAKMYAEVFSGIDHDPKEYFETIFSEDHEELVLVKDIPFYSMCEHHLVPFYGRAHVSYIPRNGRVTGLSKLARAVESVARRPQLQERITSTVADSIMETLEPYGVMVVVEAEHMCMTMRGVKKPGSSTVTTAVRGTFKEDSQARNEVLSFIKK

SEQ ID NO: 5010 - protein, 190 aa, Bacillus endophyticus
  REGION 1..190: note = tr|A0A329EYA7|A0A329EYA7_9BACI GTP cyclohydrolase 1; OS = Bacillus endophyticus OX=135735 GN=folE PE=3 SV=1
MSEQNVNKEQIEHAVRLILEAIGEDPNREGLLDTPKRVAKMYEEVFSGLKEDPKEHFKTVFGEDHEELVLVKDIPFYSMCEHHLVPFYGKAHIAYIPRGGRVTGLSKLARAVEAVAKRPQLQERITSTIANSIVESLDPHGVMVVVEAEHMCMTMRGVKKPGSKTVTSAVRGILESDAAARAEVLSLIKS

SEQ ID NO: 5011 - protein, 190 aa, Bacillus endophyticus
  REGION 1..190: note = tr|A0A3N6B5M1|A0A3N6B5M1_9BACI GTP cyclohydrolase 1; OS = Bacillus endophyticus OX=135735 GN=folE PE=3 SV=1
MSEQNVNKEQIEHAVRLILEAIGEDPNREGLLDTPKRVAKMYEEVFSGLKEDPKEHFKTVFGEDHEELVLVKDIPFYSMCEHHLVPFYGKAHIAYIPRGGRVTGLSKLARAVEAVAKRPQLQERITSTIANSIVESLDPHGVMVIVEAEHMCMTMRGVKKPGSKTVTSAVRGILESDAAARAEVLSLIKS

SEQ ID NO: 5012 - protein, 188 aa, unidentified
  source 1..188: note = Bacillus endozanthoxylicus
  REGION 1..188: note = tr|A0A5J5HVD6|A0A5J5HVD6_9BACI GTP cyclohydrolase I FolE OS=Bacillus endozanthoxylicus OX=2036016 GN=folE PE=4; SV = 1
MSNVNRTQIEEAVRLILEAIGEDPNREGIRDTPKRVAKMYEEVFSGLNQNPKEYFETIFGEDHEELVLVKDIPFYSMCEHHLVPFFGKAHVAYIPRNGKVTGLSKLARAVEAVAKRPQLQERITSTIADSIYETLEPYGVMVVIEAEHMCMTMRGVKKPGSKTVTSAVRGTFLNDAASRAEVLSLIKE

SEQ ID NO: 5013 - protein, 190 aa, unidentified
  source 1..190: note = Bacillus filamentosus
  REGION 1..190: note = tr|A0A1X7D337|A0A1X7D337_9BACI GTP cyclohydrolase 1; OS = Bacillus filamentosus OX=1402861 GN=folE PE=3 SV=1
MSEQNVNKEQIEHAVRLILEAIGEDPNREGLLDTPKRVAKMYEEVFSGLKEDPKEHFKTIFGEDHEELVLVKDIPFYSMCEHHLVPFYGKAHIAYIPRGGRVTGLSKLARAVEAVAKRPQLQERITSTIANSIVESLDPHGVMVVVEAEHMCMTMRGVKKPGSKTVTSAVRGILESDAAARAEVLSLIKS

SEQ ID NO: 5014 - protein, 188 aa, Bacillus firmus
  REGION 1..188: note = tr|W7KXJ6|W7KXJ6_BACFI GTP cyclohydrolase 1; OS = Bacillus firmus DS1 OX=1307436 GN=folE PE=3 SV=1
MAEVNRAQIEDAVRLILEAIGEDPNREGLLDTPKRVAKMYEEVFMGLNQDPKEYFETVFGEDHEELVLVKDIPFYSMCEHHLVPFFGVAHVAYIPRNGRVTGLSKLARAVEAVAKRPQLQERITSTVANSILEKLEPHGVMVVVEAEHMCMTMRGVKKPGSKTVTSAVRGVFAEDARARAEVLSLIKQ

SEQ ID NO: 5015 - protein, 188 aa, Bacillus firmus
  REGION 1..188: note = tr|A0A366JM91|A0A366JM91_BACFI GTP cyclohydrolase 1; OS = Bacillus firmus OX=1399 GN=folE PE=3 SV=1
MAEVNRAQIEDAVRLILEAIGEDPNREGLLDTPKRVAKMYEEVFMGLNQDPKEYFETVFGEDHEELVLVKDIPFYSMCEHHLVPFFGVAHVAYIPRGGRVTGLSKLARAVEAVAKRPQLQERITSTVANSILEKLEPHGVMVVVEAEHMCMTMRGVKKPGSKTVTSAVRGVFAEDARARAEVLSLIKQ

SEQ ID NO: 5016 - protein, 188 aa, Bacillus flexus
  REGION 1..188: note = tr|A0A4P8XC75|A0A4P8XC75_9BACI GTP cyclohydrolase 1; OS = Bacillus flexus OX=86664 GN=folE PE=3 SV=1
MSTVNKEQIEQAVRQILEAIGEDPNREGLLDTPKRVAKMYEEVFSGLNEDPNEHFKTIFGEEHEELVLVKDINFHSMCEHHLVPFYGKVHVAYIPKGGRVTGLSKLARAVEAVSKRPQLQERITSTVADSIVETLSPHGVMVIVEAEHMCMTMRGVRKPGAMTVTSAVRGVFEHDQAARAEVLSLIKS

SEQ ID NO: 5017 - protein, 300 aa, Bacillus flexus
  REGION 1..300: note = tr|A0A4P8XFF5|A0A4P8XFF5_9BACI GTP cyclohydrolase FolE2 OS=Bacillus flexus OX=86664 GN=folE2 PE=3 SV=1
MTTINLPSKQERHKLFGSVDPGPKTKPTKKEEMADLQNKKKDFLFDIQAVGVSNVKIPVNIYAPGGATPTIATFTLTSSIPKDSKGTNMSRFTELLEEYRKRSELNLTFASLTSFVTELSDRLRIPDAKVEISFPWFYDQVAPSSGLSGLNHSEARLKVSYTKEAGVTFEVGLTAVVKTLCPCSKEISEYSAHNQRGYVSVDVRLADSINDAIDWKHALLEAIESNASAKIHPILKRPDEKMVTEQAYENPRFVEDMVRLVAADLYEYPFVEAFTVSCRNKESIHLHDAVATITFDKQPC

SEQ ID NO: 5018 - protein, 188 aa, Bacillus foraminis
  REGION 1..188: note = tr|A0A4R2B8I6|A0A4R2B8I6_9BACI GTP cyclohydrolase 1; OS = Bacillus foraminis OX=279826 GN=folE PE=3 SV=1
MANVNHAQIEEAVRLILEAVGEDPNREGLLDTPKRVARMYEEVFAGLNQDPKEYFETIFGEDHEELVLVKDIPFYSMCEHHLVPFFGKAHVAYIPRGGKVTGLSKLARAVEAVAKRPQLQERITSTIANAIMEKLDPHGVMVVVEAEHMCMTMRGVKKPGSKTVTSAVRGTLAKDVSARSEILALIKE

SEQ ID NO: 5019 - protein, 188 aa, Bacillus fortis
  REGION 1..188: note = tr|A0A443J3T9|A0A443J3T9_9BACI GTP cyclohydrolase 1; OS = Bacillus fortis OX=254758 GN=folE PE=3 SV=1
MGKFDRKQIEEAVRMILEAIGEDPNREGLLDTPKRVAKMYEEVFAGINTDPQTYFETIFGEDHEELVLVKDIPFYSLCEHHLVPFFGKAHVAYIPRNGRVTGLSKLARAVEAVARRPQLQERITSTVADAIMKKLEPHGVMVIIEAEHMCMTMRGVKKPGSKTVTSAVRGIFLKDSQSRNEVLSLIKQ

SEQ ID NO: 5020 - protein, 211 aa, Bacillus fortis
  REGION 1..211: note = tr|A0A443INT5|A0A443INT5_9BACI GTP cyclohydrolase 1; OS = Bacillus fortis OX=254758 GN=folE PE=3 SV=1
MPADMKLISEKLPDLFSGDSVDIAEKIDKSQDFMEGVRNLIELCGDDPNREGLEETPYRVLKAFLEYTEGYKENPAVHLEKTFDVKHKELVLVKNIEFYSMCEHHFAPFFGVAHVGYMPDAKITGLSKIGRMVEGYAKRFQVQERLTNEIADAIEEILEPQGAMVVIEAKHMCMCGRGIKKSNSSTATTAVRGLFEERSDARMEFLSLINR

SEQ ID NO: 5021 - protein, 211 aa, unidentified
  source 1..211: note = Bacillus freudenreichii
  REGION 1..211: note = tr|A0A3S4Q0H2|A0A3S4Q0H2_9BACI GTP cyclohydrolase 1; OS = Bacillus freudenreichii OX=1783501 GN=folE_1 PE=3 SV=1
MPTDTKLITEKLPDLFSGDAVDIANKIDKSQDFMEGVRNLIELCGDDPNREGLEETPYRVLKAFLEYTEGYKENPAVHLEKTFDVKHKELVLVKNIEFHSMCEHHFAPFFGVAHVGYIPDAKITGLSKIGRMVEGYAKRFQVQERLSNEIADAIEEVLHPQGAMVVIEAKHMCMCGRGIKKTSSSTTTTSVRGLFEDRADLRMEFLSLINR

SEQ ID NO: 5022 - protein, 188 aa, unidentified
  source 1..188: note = Bacillus freudenreichii
  REGION 1..188: note = tr|A0A3S4S8Q9|A0A3S4S8Q9_9BACI GTP cyclohydrolase 1; OS = Bacillus freudenreichii OX=1783501 GN=folE_2 PE=3 SV=1
MGNFDRKQIEEAVRMILEAIGEDPNREGLLDTPKRVAKMYEEIFAGIGKDPEQYFETIFGEDHEELVLVKDIPFYSLCEHHLVPFFGKAHVAYIPRNGRVTGLSKLARAVETVARRPQLQERITSTVADAIMKKLEPHGVMVIIEAEHMCMTMRGVKKPGSKTVTSAVRGIFLKDRQSRNEVLSLIKQ

SEQ ID NO: 5023 - protein, 189 aa, unidentified
  source 1..189: note = Bacillus gaemokensis
  REGION 1..189: note = tr|A0A073K856|A0A073K856_9BACI GTP cyclohydrolase 1; OS = Bacillus gaemokensis OX=574375 GN=folE PE=3 SV=1
MAKVNLEQIEQAVRLILEAIGDDPNREGVLDTPKRVAKMYAEVFSGMHEDPKEHLHKVFGEDHEELVLVKDIPFYSMCEHHLVPFYGVAHVAYIPRGGKVTGLSKLARTVDTIARRPQLQERITSTVADSIMEVLEPHGVMIVVEAEHMCMTMRGVKKPGAKTVTTAVRGVLENDAAARSEILSFIKAK

SEQ ID NO: 5024 - protein, 211 aa, Bacillus galactosidilyticus
  REGION 1..211: note = tr|A0A0Q9XZA5|A0A0Q9XZA5_9BACI GTP cyclohydrolase 1; OS = Bacillus galactosidilyticus OX=217031 GN=folE PE=3 SV=1
MSTTDKKRIIVQQLIDRFGNEPGIEKVVQKSENYMEAIRDLIEICGDDPNREGLEETPYRVLKAFLEYTEGNREDPKQHLEKVFAVEHDGLIMVKDIEFHSMCEHHFAPFFGVAHIAYIPSEKITGLSKIARMVDGYAKRFQVQERLSNQIVDAMNDVLQPQGAMVVIEAKHMCMCGRGVKKSDAMTVTTATRGVFSKNPDLRKEFMSLLG

SEQ ID NO: 5025 - protein, 188 aa, Bacillus ginsengihumi
  REGION 1..188: note = tr|A0A0A6VDS8|A0A0A6VDS8_9BACI GTP cyclohydrolase 1; OS = Bacillus ginsengihumi OX=363870 GN=folE PE=3 SV=1
MQELKHGLLEDHIRCILELIGENPEREGLLDTPKRVAKMYKEVFAGVGVNPETALTTTFEEQYDGLVVVKDISYYTFCEHHLIPFFGKAHIGYIPNGRVVGLSKFARLVELASKRPQVQERMTQQIADAIMNVLQPAGVIVSIEGQHLCMCARGVKKPGSSTVTTVKKGIFQENTALAEEFERALLRD

SEQ ID NO: 5026 - protein, 180 aa, Bacillus ginsengihumi
  REGION 1..180: note = tr|A0A0A6VJX1|A0A0A6VJX1_9BACI GTP cyclohydrolase 1; OS = Bacillus ginsengihumi OX=363870 GN=folE PE=3 SV=1
MSNYFAKILAELGLDLDDPSIKDTPNRVAKMLVDETCNGLFTEPPEITTFPIDEHTSRDLIVIEDIPFSSLCEHHFQPFIGKATVAYLPNDRIMGLSKAARVLDYFAARPQVQERLTGEVAQFLYEQLNAKGVLVIVQAEHFCMKVRGVKKHGSSTITTAIRGDIDKQEVISSLKLAGKV

SEQ ID NO: 5027 - protein, 300 aa, unidentified
  source 1..300: note = Bacillus glycinifermentans
  REGION 1..300: note = tr|A0A291KUY1|A0A291KUY1_9BACI GTP cyclohydrolase FolE2 OS=Bacillus glycinifermentans OX=1664069 GN=folE2; PE = 3 SV=1
MKRDLQLPAKPERHRLFGSVEEVKGTKPTVKEQMKDIQNTPNDYLFDIDQVGVTNISHPIRITSAVKPFSQTTIGSFSLTTHLARSRKGINMSRLTEQLQRYHAENWIVGLDSLKDFTKELAVNMEQQGAAVSLAFPWYFERLSPELKFPGLMHADIHMNVSYHEKEGWTGTVGITAKAATLCPCSKEISEYGAHNQRGVIKITAHINDRAAMPEDFKTELLAAAETNASAKLYPVLKRPDEKKVTEQAYENPRFVEDVIRLTAADLYEMDWISAFEIECRNEESIHLHDAIARLSYSKI

SEQ ID NO: 5028 - protein, 190 aa, unidentified
  source 1..190: note = Bacillus glycinifermentans
  REGION 1..190: note = tr|A0A0J6EW62|A0A0J6EW62_9BACI GTP cyclohydrolase 1; OS = Bacillus glycinifermentans OX=1664069 GN=folE PE=3 SV=1
MSEINKEKIEQAVRQILEAIGEDPNREGLLDTPKRVAKMYAEVFAGLNEDPKEHFKTVFGEDHEELVLVKDIPFYSMCEHHLVPFYGKAHVAYIPKGGKVTGLSKLARAVEAVAKRPQLQERITSTIADSIVESLSPHGVMVVVEAEHMCMTMRGVKKPGSKTVTSAVRGTFREDVAARSEVLELIKHHD

SEQ ID NO: 5029 - protein, 188 aa, unidentified
  source 1..188: note = Bacillus gobiensis
  REGION 1..188: note = tr|A0A0M4FG40|A0A0M4FG40_9BACI GTP cyclohydrolase 1; OS = Bacillus gobiensis OX=1441095 GN=folE PE=3 SV=1
MNEMNIEKIELAVRQILEAIGEDPNREGLEDTPKRVAKMYREVFSGLNEDPKEHFQTIFGEEHEELVLVKDIPFYSMCEHHLVPFFGKAHVAYIPRGGKVTGLSKLARAVDAVAKRPQLQERITSTIADSILDTLDPHGVMVVVEAEHMCMTMRGVKKPGSKTITSAVRGTFRDDVAARSEVLSLINN

SEQ ID NO: 5030 - protein, 188 aa, Bacillus halodurans
  REGION 1..188: note = sp|Q9KCC7|GCH1_BACHD GTP cyclohydrolase 1; OS = Bacillus halodurans (strain ATCC BAA-125 / DSM 18197 / FERM 7344 / JCM 9153 / C-125) OX=272558 GN=folE PE=3 SV=1
MSKVDHEKIQQAVVMILEAIGEDPAREGLEDTPKRVAKMYEEVFAGLNQDPKEHFATIFGEDHEELVLVKDIPFFSMCEHHLVPFFGKAHVGYIPKGGKVTGLSKLARAVEAVARRPQLQERITSTVADALVETLEPHGVIVVVEAEHMCMTMRGVKKPGAATVTSAVRGTFANDAAARAEVLSLIKG

SEQ ID NO: 5031 - protein, 299 aa, Bacillus halodurans
  REGION 1..299: note = tr|A0A4Y7WH62|A0A4Y7WH62_BACHO GTP cyclohydrolase FolE2 OS=Bacillus halodurans OX=86665 GN=folE2 PE=3 SV=1
MKTKQWPSKTERHKRFGSVPPVAGKKPIHKEEMADLQNMPNDFLFALDSVGIHNVKHPCIIQSNLKPYEQTTVGTFSLTTGLEQMSKGINMSRLTELLQEYHQTGFILSLKNMQAFTKDLAERMEQSSAHVHVTFPWFFERESPSLNKIGLAHAEARLNVHFDETLGFTHEVGLTAAVTTLCPCSKEISEYSAHNQRGYVTIKATFYEPTEGSDDWKVTLLEAAESNASSILYPVLKRPDEKAVTEKAYENPRFVEDMVRLTAADLYENETIKAFTVECRNEESIHQHDAIATLSYSKK

SEQ ID NO: 5032 - protein, 304 aa, unidentified
  source 1..304: note = Bacillus halotolerans
  REGION 1..304: note = tr|A0A3Q9RUZ0|A0A3Q9RUZ0_9BACI GTP cyclohydrolase FolE2 OS=Bacillus halotolerans OX=260554 GN=folE2 PE=3 SV=1
MEQHILLPEKTERLQYFGSVSPVKGQKPVEKENMKDLQNIRKDYFFDIQQVGVTNVSHPVTVASAMKPCQQTTAANFTMTASLQRNQKGINMSRLTEQLQRYHQNGWILTFSSLQQFTKELAENMDQISACVEVRFPWYFERKSPMLGKAGLMHAEMLMSVTYHEDQPFKQRAGISAKVTTLCPCSKEISEYSAHNQRGTVSILADIHPTALLPVDVKADLLHVAESNASARLHPVLKRPDEKAVTETAYENPRFVEDLARLIAADLYELEWVSAFDIECRNEESIHLHDAYAKLRFSKQEECL

SEQ ID NO: 5033 - protein, 190 aa, unidentified
  source 1..190: note = Bacillus halotolerans
  REGION 1..190: note = tr|A0A2S9WIZ7|A0A2S9WIZ7_9BACI GTP cyclohydrolase 1; OS = Bacillus halotolerans OX=260554 GN=folE PE=3 SV=1
MKEVNKEQIEQAVRQILEAIGEDPNREGLLDTPKRVAKMYAEVFSGLNEDPKEHFQTIFGEDHEELVLVKDIAFHSMCEHHLVPFYGKAHVAYIPRGGKVTGLSKLARAVEAVAKRPQLQERITSTIAESIVETLDPHGVMVVVEAEHMCMTMRGVRKPGAKTVTSAVRGIFKDDAAARSEVLEHIKRQD

SEQ ID NO: 5034 - protein, 300 aa, unidentified
  source 1..300: note = Bacillus haynesii
  REGION 1..300: note = tr|A0A1R1RRZ2|A0A1R1RRZ2_9BACI GTP cyclohydrolase FolE2 OS=Bacillus haynesii OX=1925021 GN=folE2 PE=3 SV=1
MERKLHLPAKPERHRRFGSVEAVKGIKPTDKEQMKDIQNTPNDYFFDIDHVGVSNVSHPILIASSLKPFTQTTIGTFSFTTSLARDRKGINMSRLTEQLQRYYEANWTVDFHTLKDFAKDLADNMEQQSASVSVSFPWYFERLSPETKLSGLMHADIHMTVSYHENKGFSQTAGITAHVTTLCPCSKEISEYSAHNQRGIIKITAHIDAQAEMPEDFKSELLAAAETNASAKLHPVLKRPDEKRVTEQAYENPRFVEDVIRLTAADLYEMDWISAFEIECRNEESIHLHDAVARLSFSKC

SEQ ID NO: 5035 - protein, 189 aa, unidentified; identical to SEQ ID NO: 4948
  source 1..189: note = Bacillus haynesii
  REGION 1..189: note = tr|W7RGM8|W7RGM8_9BACI GTP cyclohydrolase 1; OS = Bacillus haynesii OX=1925021 GN=folE PE=3 SV=1

SEQ ID NO: 5036 - protein, 293 aa, Bacillus hemicellulosilyticus
  REGION 1..293: note = tr|W4QFE2|W4QFE2_9BACI GTP cyclohydrolase FolE2; OS = Bacillus hemicellulosilyticus JCM 9152 OX=1236971; GN = folE2 PE=3 SV=1
MKQLPPKAERHRHFGSVDPIVGTKPTEKEKMPDLQNKPDDFYFPIQQVGISDVKYPVMIESDLAPTTQTTTATFAMTTSLEQDFKGINMSRLTEQLHVYFQSHLLSLESLREFSAILAREMKQQAADVQVQFPWFFTKTSPSMQKEGMAHADITYNVHFDEKEGYTSEITMRAAVTTLCPCSKEISEYSAHNQRGFVTMTVRVAESADVDWKAILLEAAESNASSILYPVLKRPDEKAVTERAYENPRFVEDLIRLVASDLYEHEYIQSFDIECRNEESIHQHDAIARLSFKK

SEQ ID NO: 5037 - protein, 187 aa, unidentified
  source 1..187: note = Bacillus hisashii
  REGION 1..187: note = tr|A0A267TYL2|A0A267TYL2_9BACI GTP cyclohydrolase 1; OS = Bacillus hisashii OX=996558 GN=folE PE=3 SV=1
MKEMNLEQIEKGVRLILEGIGEDPNREGLLDTPKRVAKMYAEMFHGLNIDPREYFNTVFHEETEELVLVKDIPFYSMCEHHLVPFFGHVHVAYIPRNGKITGLSKLARAVEAVAKRPQLQERITRLVADSIMEKLDPLGVMVVVEAEHMCMTMRGVKKPGSKTVTTVARGCFDTDAEKRKEVLSLIK

SEQ ID NO: 5038 - protein, 188 aa, Bacillus horikoshii
  REGION 1..188: note = tr|A0A1Y0CPA0|A0A1Y0CPA0_9BACI GTP cyclohydrolase 1; OS = Bacillus horikoshii OX=79883 GN=folE PE=3 SV=1
MTEVNKAQIEEAVRMILEAIGEDPNREGLLDTPKRVAKMYTEVFAGLNEDPKEHFKTVFGEAHEELVLVKDISFFSMCEHHLVPFFGKAHVAYIPKGGKVTGLSKLARAVEAVAKRPQLQERITSTIAESIVESLDPHGVMVVVEAEHMCMTMRGVKKPGAMTITSAVRGVLENDPAARAEVLSLIKG

SEQ ID NO: 5039 - protein, 188 aa, Bacillus horikoshii
  REGION 1..188: note = tr|A0A5D4TG63|A0A5D4TG63_9BACI GTP cyclohydrolase 1; OS = Bacillus horikoshii OX=79883 GN=folE PE=3 SV=1
MIEVNKAQIEEAVRMILEAIGEDPNREGLLDTPKRVAKMYTEVFAGLNEDPKEHFKTVFGETHEELVLVKDISFFSMCEHHLVPFFGKAHVAYIPKGGKVTGLSKLARAVEAVAKRPQLQERITSTIAESIVESLDPHGVMVVVEAEHMCMTMRGVKKPGAMTITSAVRGVLENDPAARAEVLSLIKG

SEQ ID NO: 5040 - protein, 188 aa, Bacillus horneckiae
  REGION 1..188: note = tr|A0A2N0ZCT8|A0A2N0ZCT8_9BACI GTP cyclohydrolase 1; OS = Bacillus horneckiae OX=549687 GN=folE PE=3 SV=1
MSEINRPQIENAVRLILEAIGEDPSREGLLDTPKRVAKMYEEVFMGMNQDPEEYFDTVFGEDHEELVLVKDIPFYSMCEHHLVPFFGKAHVAYIPKDGKVTGLSKLARAVEAVAKRPQLQERITATVADAIVDKLKPHGVMVVVEAEHMCMTMRGVKKPGSKTITSAVRGVFAEDVSARSEVLSLIKS

SEQ ID NO: 5041 - protein, 188 aa, Bacillus hwajinpoensis
  REGION 1..188: note = tr|A0A4U1MHC1|A0A4U1MHC1_9BACI GTP cyclohydrolase 1; OS = Bacillus hwajinpoensis OX=208199 GN=folE PE=3 SV=1
MYEVNHDKIQEAVKMILEAIGEDPEREGLLDTPKRVARMYEEIFQGLHQDPKEHFQTIFGEDHEELVLVKDIPFYSTCEHHLVPFFGKAHVAYIPKGGKVTGLSKLARAVESVTKRPQLQERITSTIANSMVETLEPHGVMVVVEAEHMCMTMRGVKKPGSSTVTSAVRGVFESDAAARSEVLGLIKG

SEQ ID NO: 5042 - protein, 188 aa, Bacillus indicus
  REGION 1..188: note = tr|A0A084H0E1|A0A084H0E1_BACID GTP cyclohydrolase 1; OS = Bacillus indicus OX=246786 GN=folE PE=3 SV=1
MGQINTQQIEEAVRLILEAIGEDPNREGLLDTPKRVAKMYAEVFSGLNEDPKEHFKTVFGEDHEELVLVKDIPFHSMCEHHLVPFFGKAHIAYIPKGGKVTGLSKLARAVEAVCRRPQLQERITSTIAESIVDSLEPHGVMVVVEAEHMCMTMRGVKKPGSKTITSAVRGVFTNDPAARAEVLSFIKE

SEQ ID NO: 5043 - protein, 300 aa, Bacillus indicus
  REGION 1..300: note = tr|A0A084GQX8|A0A084GQX8_BACID GTP cyclohydrolase FolE2 OS=Bacillus indicus OX=246786 GN=folE2 PE=3 SV=1
MKRELQLPPKKERHRLFGSVEPGLKTKPVEKDKMPDLQNSKKDFLFHINAVGISNVKYPVVIQSSLSPEQQTTVAAFKMTSSISYEAKGTNMSRFTEQLEKYRLNGGFTMSINELYDFTKELAERLKQKDAEIDVTFPWFYERKGPSSELAGLNHATAGMKIRYEEGKGFTASAKLTCAVTTLCPCSKEISEYSAHNQRGFITMEVEFAEGYNEERDWKEALLAAAETNASAMIHPVLKRPDEKMVTETAYENPRFVEDMVRLVAADLYEFDFVSAFRVECRNEESIHLHDAIAELSFRK

SEQ ID NO: 5044 - protein, 188 aa, Bacillus infantis
  REGION 1..188: note = tr|U5L428|U5L428_9BACI GTP cyclohydrolase 1; OS = Bacillus infantis NRRL B-14911 OX=1367477 GN=folE PE=3; SV = 1
MANVNRAQIEEAVRSILEAIGEDPNREGLLDTPKRVAKMYEEVFMGIGQDPEEYFETIFGEEHEELVLVKDIPFYSMCEHHLVPFFGKAHVAYIPRNGRVTGLSKLARAVEAVAKRPQLQERITSTVANAIMKKLEPHGVMVIVEAEHMCMTMRGVKKPGSKTVTSAVRGVLAEDARARAEVLSLIKD

SEQ ID NO: 5045 - protein, 188 aa, Bacillus infantis; identical to SEQ ID NO: 5044
  REGION 1..188: note = tr|A0A4Q4CD64|A0A4Q4CD64_9BACI GTP cyclohydrolase 1; OS = Bacillus infantis OX=324767 GN=folE PE=3 SV=1

SEQ ID NO: 5046 - protein, 304 aa, unidentified
  source 1..304: note = Bacillus intestinalis
  REGION 1..304: note = tr|A0A136GB20|A0A136GB20_9BACI GTP cyclohydrolase FolE2 OS=Bacillus intestinalis OX=1963032 GN=folE2 PE=3; SV = 1
MNQHMPLPGKPERLQYFGSVSPIKGEKPVEKEKMKDLQNIRKDYFFDIQHVGVANVSHPVTITSAMTPAEQTTTANFTMTCDLRRNQKGINMSRLTELLQIYHQNGWILSFSSLQQFTKELAENMDQSSASVEVRFPWFFERKSPKLEKAGLMHADILMSVTYREDQPFEQRAGISAKVTTLCPCSKEISEYSAHNQRGTVSIWADIHPAVSLPSDFKADLLDAAESNASARLHPVLKRPDEKAVTETAYENPRFVEDLARLIAADLYELEWVSAFEIECRNEESIHLHDAYAKLRFSKQEDRI

SEQ ID NO: 5047 - protein, 190 aa, unidentified
  source 1..190: note = Bacillus intestinalis
  REGION 1..190: note = tr|A0A136G3G4|A0A136G3G4_9BACI GTP cyclohydrolase 1; OS = Bacillus intestinalis OX=1963032 GN=folE PE=3 SV=1
MKEVNKEQIEQAVRQILEAIGEDPNREGLLDTPKRVAKMYAEVFSGLNEDPKEHFQTIFGENHEELVLVKDIAFHSMCEHHLVPFYGKAHVAYIPRGGKVTGLSKLARAVEAVAKRPQLQERITSTIAESIVETLDPHGVMVVVEAEHMCMTMRGVRKPGAKTVTSAVRGVFKDDAAARAEVLEHIKRQD

SEQ ID NO: 5048 - protein, 188 aa, Bacillus kochii
  REGION 1..188: note = tr|A0A248TM39|A0A248TM39_9BACI GTP cyclohydrolase 1; OS = Bacillus kochii OX=859143 GN=folE PE=3 SV=1
MSEVNRAQIEEAVRLILDAIGEDPNREGLLDTPKRVAKMYEEVFSGIHQDPEEYFETVFGEDHEELVLVKDIPFFSMCEHHLVPFFGKAHVAYIPRNGKVTGLSKLARAVETVARRPQLQERITATVADAILHKLDPHGVMVVVEAEHMCMTMRGVKKPGSKTVTSAVRGVFAEDGNTRAEVLSFIKG

SEQ ID NO: 5049 - protein, 188 aa, Bacillus koreensis
  REGION 1..188: note = tr|A0A0M0KZ45|A0A0M0KZ45_9BACI GTP cyclohydrolase 1; OS = Bacillus koreensis OX=284581 GN=folE PE=3 SV=1
MSQVNKEQIEHAIRLLLEAVGEDPNREGLLDTPKRVAKMYEEVFSGLNEDPKEHFKTVFGEDHEELVLVKDIPFYSMCEHHLVPFYGKAHIAYIPKGGKVTGLSKLARAVEAVAKRPQLQERITSTVADSIVESLEPHGVMVVVEAEHMCMTMRGVKKPGASTVTSAVRGVLATDAAARSEVLSLIKS

SEQ ID NO: 5050 - protein, 294 aa, Bacillus krulwichiae
  REGION 1..294: note = tr|A0A1X9MBB9|A0A1X9MBB9_9BACI GTP cyclohydrolase FolE2 OS=Bacillus krulwichiae OX=199441 GN=folE2 PE=3 SV=1
MKRSLPPKAERHRHFGSVEPIIGTKPTEKEKMPDLQNKPADFYFPIQQVGISDVKYPVMIESLIAPTTQTTTATFALTTSLEQDFKGINMSRLTEQLHNFFQAHLLTDETLREFTAILAREMKQRAANVQVTFPWFFTKTSPAMEKEGMAHAEVKYDVSFDEEKGYTSVITLTGAVTTLCPCSKEISEYSAHNQRSFVTMSATVDEGHDADWKTVLLEAAESNASSILYPVLKRPDEKAVTEHAYENPRFVEDLVRLVAADLYENEAVKSFTVECRNEESIHQHDAIAKLSFTK

SEQ ID NO: 5051 - protein, 188 aa, unidentified
  source 1..188: note = Bacillus kyonggiensis
  REGION 1..188: note = tr|A0A4U1DCC5|A0A4U1DCC5_9BACI GTP cyclohydrolase 1; OS = Bacillus kyonggiensis OX=1037680 GN=folE PE=3 SV=1
MTKVNRAQIEEAVRLILEAVGDDPNREGVLDTPKRVAKMYEEVFQGLNQDPREYFETIFSEDHEELVLVKDIPFYSMCEHHLVPFYGKAHVAYIPRNGRVTGLSKLARAVEAVAKRPQLQERITSTVADAIMEKLEPHGVMIVVEAEHMCMTMRGVKKPGAKTITTAVRGTFADDSNARAEILSLIKQ

SEQ ID NO: 5052 - protein, 189 aa, unidentified
  source 1..189: note = Bacillus kyonggiensis
  REGION 1..189: note = tr|A0A4U1D2P7|A0A4U1D2P7_9BACI GTP cyclohydrolase 1; OS = Bacillus kyonggiensis OX=1037680 GN=folE PE=3 SV=1
MSVEIKKGLIEEHVRAILDLIGEDTNREGLLETPKRVAKMYGEVFAGVGVDPETALTTTFAEDYDGMVVVKDINYYTFCEHHLIPFFGKAHIGYIPKGRVIGLSKFARLVELVSQRPQVQERMTTQMADAIMNVLNPEGVIVSVEGQHLCMCARGVKKPGSATVTTVKRGAFQNNVALVEEFERALARD

SEQ ID NO: 5053 - protein, 296 aa, Bacillus lehensis
  REGION 1..296: note = tr|A0A4Y7WMC2|A0A4Y7WMC2_9BACI GTP cyclohydrolase FolE2 OS=Bacillus lehensis OX=300825 GN=folE2 PE=3 SV=1
MEIPLKAERHALFGSVSPSVKTKPTEKEHMQDLQNTHKDFLFDVNLVGVANVKRPVQIKSTSSPVNQTTVATFSMGAQLNRYAKGTNMSRFLTALEEFNGQNQTLSLASLKNLARSLADRLNQDMIHIHVAFPWFYSREAPTSLQSAHNHSEIEISLNYSKTLGFKTELTLACLVTTLCPCSKEISEYSAHNQRGEVKMSVELCEDFDEDKIDWKNELLVAAESNASARIHPILKRPDEKVVTEQAFENPRFVEDLVRLVAADLYEYDWVTAFKVTCQNQESIHLHDAVAKITYKK

SEQ ID NO: 5054 - protein, 296 aa, Bacillus lehensis
  REGION 1..296: note = tr|A0A060LPM7|A0A060LPM7_9BACI GTP cyclohydrolase FolE2 OS=Bacillus lehensis G1 OX=1246626 GN=folE2 PE=3 SV=1
MKIPLKAARHALFGSVSPSVKTKPTEKEHMQDLQNTHKDFLFDVNLVGVANVKQPVQIKSTSSPVNQTTVATFSMGAQLNRYAKGTNMSRFLTALEEFNGQNQTLSLASLKDLVRSLADRLNQDMIHIHVTFPWFYSREAPTSLQSAHNHSEIEISLNYSKTLGFKTELTLACLVTTLCPCSKEISEYSAHNQRGEVKMSVELCEDFDEDKIDWKNELLVAAESNASARIHPILKRPDEKVVTEQAFENPRFVEDLVRLVAADLYEYDWVTAFKVTCQNQESIHLHDAVAKITYKK

SEQ ID NO: 5055 - protein, 188 aa, Bacillus lentus
  REGION 1..188: note = tr|A0A2X4W9A8|A0A2X4W9A8_BACLE GTP cyclohydrolase 1; OS = Bacillus lentus OX=1467 GN=folE PE=3 SV=1
MKKFNHPQIEEAVRMILEAIGEDPNREGLIDTPKRVAKMYEEVFSGLDKNPEEYFETIFGEEHEELVLVKDIPFFSMCEHHLVPFFGKAHVAYIPRNGKVTGLSKLARAVETVAARPQLQERITSTVANVMMEKLEPYGVMVILEAEHMCMTMRGIKKPGAKTVTSAVRGAFANDSQARAEVLSLIKE

SEQ ID NO: 5056 - protein, 300 aa, Bacillus licheniformis
  REGION 1..300: note = sp|Q65ML7|GCH4_BACLD GTP cyclohydrolase FolE2; OS = Bacillus licheniformis (strain ATCC 14580 / DSM 13 / JCM 2505 / NBRC 12200 / NCIMB 9375 / NRRL NRS-1264 / Gibson 46)OX=279010 GN=folE2 PE=3 SV=1
MERKLHLPAKPERHRRFGSVEAVKGIKPTDKEQMKDIQNTPNDYFFDIDHVGVSNVSHPILIASSLKPFTQTTIGAFSFTTSLARDRKGINMSRLTEQLQRYHEANWTVDFHTLKDFAKDLAGNMEQESASVSVSFPWYFERISPETKLSGLMHADIHMTVSYHENKGFSQTAGITAHATTLCPCSKEISEYSAHNQRGIIKITAHINEQAEMPDDFKAELLAAAETNASAKLHPVLKRPDEKRVTEQAYENPRFVEDVLRLTAADLYEMDWISAFEIECRNEESIHLHDAVARLSFSKC

SEQ ID NO: 5057 - protein, 189 aa, Bacillus licheniformis
  REGION 1..189: note = tr|T5HNV2|T5HNV2_BACLI GTP cyclohydrolase 1; OS = Bacillus licheniformis CG-B52 OX=1368424 GN=folE PE=3; SV = 1
MREINKDQIEQAVRQILEAIGEDPNREGLLDTPKRVAKMYAEVFAGLNEDPKEHFKTIFGEDHEELVLVKDIPFYSMCEHHLVPFYGKAHVAYIPKGGKVTGLSKLARAVEAVAKRPQLQERITSTIADSIVETLTPHGVMVVVEAEHMCMTMRGVKKPGSKTVTSAVRGTFRQDVAARSEVLELIKTS

SEQ ID NO: 5058 - protein, 302 aa, Bacillus litoralis
  REGION 1..302: note = tr|A0A179T3Y8|A0A179T3Y8_9BACI GTP cyclohydrolase FolE2 OS=Bacillus litoralis OX=152268 GN=folE2 PE=3 SV=1
MMTRKINLPPKKERHKLFGSVEPGLKLKPTEKEHMPDLQNAKMDFLFTIDSVGISNVKHPIMLKSDLNPKQQTTIASFKMTSKISHDSKGTNMSRFTEQLEKYRQNGGFTPSIKSLFDFTKELAERLKQKDASIEIKFPWFYERKGPSSELIGLNHAEATITVSYVKDVGFTSSASLTCAVTTLCPCSKEISEYSAHNQRGYVTMNVEFTEDYNEEKDWKAVLLNAAESNASAMIHPVLKRPDEKMVTETAYENPRFVEDMVRLVAADLYELDFVQAFTVECRNEESIHLHDAIASLSYRKD

SEQ ID NO: 5059 - protein, 188 aa, Bacillus litoralis
  REGION 1..188: note = tr|A0A179SXI8|A0A179SXI8_9BACI GTP cyclohydrolase 1; OS = Bacillus litoralis OX=152268 GN=folE PE=3 SV=1
MGQVDFGKIEQAVKLILEAIGEDPTREGLLDTPKRVAKMYGEVFSGLDEDPSEHFKTIFGEDHEELVLVKDIPFYSMCEHHLVPFYGKAHVAYIPKGGKVTGLSKLARAVEAVAKRPQLQERITSTIADSINRSLEPHGVMVVVEAEHMCMTMRGVKKPGSQTVTSAVRGIFRKDEASRAEVLSLIKG

SEQ ID NO: 5060 - protein, 188 aa, unidentified
  source 1..188: note = Bacillus loiseleuriae
  REGION 1..188: note = tr|A0A0K9GWG9|A0A0K9GWG9_9BACI GTP cyclohydrolase 1; OS = Bacillus loiseleuriae OX=1679170 GN=folE PE=3 SV=1
MTKVNHAKIEEAVRMILEAVGEDPEREGLLDTPKRVARMYEEIFAGLEQDPKEYFETVFGEDHEELVLVKDIPFYSVCEHHLVPFYGKAHVAYIPKNGKVTGLSKLARAVEAISKRPQLQERITSTIASSIMEKLEPHGVMVVVEAEHMCMTMRGVKKPGAMTVTSAVRGIFAENHSTRAEVLSFIKN

SEQ ID NO: 5061 - protein, 185 aa, unidentified
  source 1..185: note = Bacillus lonarensis
  REGION 1..185: note = tr|A0A1G6J1H5|A0A1G6J1H5_9BACI GTP cyclohydrolase 1; OS = Bacillus lonarensis OX=1464122 GN=folE PE=3 SV=1
MINHDKLQQAVKMILEAVGEDPDREGLKDTPKRVAKMYGEMFSGLYEDPSEHLKTVFAESHEELVLVKDIPFYSMCEHHLVPFFGKAHIAYIPSDGVVTGLSKLARTVDTVARRPQVQERMTKTLADTFMQALQPQGVMVIVSAEHMCMSMRGIQKPGAKTVTTAVRGMFEEDATARAEVLNLVQ

SEQ ID NO: 5062 - protein, 190 aa, Bacillus luciferensis
  REGION 1..190: note = tr|A0A1E2W657|A0A1E2W657_9BACI GTP cyclohydrolase 1; OS = Bacillus luciferensis OX=178774 GN=folE PE=3 SV=1
MNEVNLEKIEQAVRLILEAIGDDPNREGIYETPKRVAKMYAEVFSGMRQDEKAHLHKVFGEDHEELVLVKDIPFHSMCEHHLLPFYGVAHVAYIPRNGRVTGLSKLARTVETVAKRPQLQERITASVVDAIMDVLQPHGAMVVVEAEHMCMSMRGVRKPGSKTVTTAVRGSLKEDVQGRNEILAMIHSSK

SEQ ID NO: 5063 - protein, 189 aa, unidentified
  source 1..189: note = Bacillus luti
  REGION 1..189: note = tr|A0A1K0BD07|A0A1K0BD07_9BACI GTP cyclohydrolase 1; OS = Bacillus luti OX=2026191 GN=folE PE=3 SV=1
MAKVNLEQIEHAVRLILEAIGDDPNREGVLDTPKRVAKMYAEVFAGMHEDPKEHLHKVFGEDHEELVLVKDIPFYSMCEHHLVPFYGVAHVAYIPQGGKVTGLSKLARTVDTIARRPQLQERITSTVANSIMEVLEPHGVMVVVEAEHMCMTMRGVKKPGAKTVTTAVRGVLENDAAARSEILSFIKTK

SEQ ID NO: 5064 - protein, 189 aa, unidentified
  source 1..189: note = Bacillus manliponensis
  REGION 1..189: note = tr|A0A073K1V7|A0A073K1V7_9BACI GTP cyclohydrolase 1; OS = Bacillus manliponensis OX=574376 GN=folE PE=3 SV=1
MANVNLEQIEHAVRLILEAIGDDPNREGVLDTPKRVAKMYAEVFSGMHEEPKEHLHKVFGEDHEELVLVKDIPFFSMCEHHLVPFYGVAHVAYIPRGGKVTGLSKLARTVDTVARRPQLQERITSTVADSIMEVLEPHGVMIVVEAEHMCMTMRGVKKPGAKTVTTAVRGVLQDDAAARSEILSFIKTN

SEQ ID NO: 5065 - protein, 188 aa, Bacillus marisflavi
  REGION 1..188: note = tr|A0A0J5VEM5|A0A0J5VEM5_9BACI GTP cyclohydrolase 1; OS = Bacillus marisflavi OX=189381 GN=folE PE=3 SV=1
MAEVNYRQIEDAVRLILEAIGDNPNREGLLDTPKRVAKMYAEVFSGMHQDPKEYFETIFGEDHEELVLVKDIPFHSMCEHHLVPFFGKAHVAYIPRNGRVTGLSKLARAVETVAKRPQLQERITSTVADTIMETLEPHGVMVVVEAEHMCMTMRGVKKPGASTVTTAVRGSFKEDAQARNEVLSFIKD

SEQ ID NO: 5066 - protein, 188 aa, Bacillus marisflavi
  REGION 1..188: note = tr|A0A5D4S077|A0A5D4S077_9BACI GTP cyclohydrolase 1; OS = Bacillus marisflavi OX=189381 GN=folE PE=3 SV=1
MAEVNYRQIEDAVRLILEAIGDNPNREGLLDTPKRVAKMYAEVFSGMNQDPKEYFETIFGEDHEELVLVKDIPFHSMCEHHLVPFFGKAHVAYIPRNGRVTGLSKLARAVETVAKRPQLQERITSTVADTIMETLDPHGVMVVVEAEHMCMTMRGVKKPGASTVTTAVRGSYKEDAQARNEVLSFIKD

SEQ ID NO: 5067 - protein, 295 aa, Bacillus marmarensis
  REGION 1..295: note = tr|U6SRX4|U6SRX4_9BACI GTP cyclohydrolase FolE2; OS = Bacillus marmarensis DSM 21297 OX=1188261 GN=folE2 PE=3; SV = 1
MNRQLPPKAERHRHFGSVEPIEGTKPKEKDQMPDLQNKPDDYYFPIQKVGISKVKYPVMIESALAPTTQTTTAEFAMTTSLDAEFKGINMSRLTEQLHMYFQTHLLSLETLREFAAILAREMDQKASDVKVTFPWFFTKSSPSMKKEGMAHADVTFDVSFNEETGYTSKITLVAAVTTLCPCSKEISEYSAHNQRGFVTMSAVVDDVADIDWKQALLEAAESNASSILYPVLKRPDEKAVTEHAYENPRFVEDLVRLVASDLYENEAIRSFEIECRNEESIHQHDAIAQLSFSKE

SEQ ID NO: 5068 - protein, 188 aa, Bacillus megaterium; identical to SEQ ID NO: 4964
  REGION 1..188: note = tr|D5DL21|D5DL21_BACMD GTP cyclohydrolase 1; OS = Bacillus megaterium (strain DSM 319) OX=592022 GN=folE; PE = 3 SV=1

SEQ ID NO: 5069 - protein, 188 aa, Bacillus megaterium; identical to SEQ ID NO: 4964
  REGION 1..188: note = tr|D5DRG3|D5DRG3_BACMQ GTP cyclohydrolase 1; OS = Bacillus megaterium (strain ATCC 12872 / QMB1551); OX = 545693 GN=folE PE=3 SV=1

SEQ ID NO: 5070 - protein, 188 aa, unidentified
  source 1..188: note = Bacillus mesonae
  REGION 1..188: note = tr|A0A3Q9QY88|A0A3Q9QY88_9BACI GTP cyclohydrolase 1; OS = Bacillus mesonae OX=1193713 GN=folE PE=3 SV=1
MSEVNRAQIEEAVRLILEAFGEDPNREGLLDTPKRVAKMYEEVFSGLNEDPKKHFETIFSEDHEELVLVKDIPFYSMCEHHLVPFFGKAHVAYIPQNGRVTGLSKLARAVEAVAKRPQLQERITATIADSIMEKLEPHGVMIVVEAEHMCMTMRGVKKPGSKTVTTAVRGTLKDDATARSEILSLIKN

SEQ ID NO: 5071 - protein, 306 aa, Bacillus methanolicus
  REGION 1..306: note = tr|I3E3E3|I3E3E3_BACMM GTP cyclohydrolase FolE2; OS = Bacillus methanolicus (strain MGA3 / ATCC 53907); OX = 796606 GN=folE2 PE=3 SV=1
MKNIKLPPKNERFKLFGSIEPGIKMKPSEKEKMPDLQNIREDFLFEIDAVGITNVKIPVSVTSTLNPKTQSTIATFTLTSTLPRDVKGTNMSRFTEQLELYRRQGFTLNFSQLHDFVKELSERLGQRDAKLEVSFPWFYEQTAPSSSLAGLNHADARILLSYQHENVVERTVELTCAVTTLCPCSKEISEYSAHNQRGFIKMTTVLTDNYDESVDWKVVLLHAAQSNASAVIHPILKRPDEKIVTEKAYENPRFVEDMVRLVAADLYEIPFIQSFIIECRNEESIHLHDAYAFVTFDKTIGSGAKS

SEQ ID NO: 5072 - protein, 188 aa, Bacillus methanolicus
  REGION 1..188: note = tr|I3DWR6|I3DWR6_BACMT GTP cyclohydrolase 1; OS = Bacillus methanolicus PB1 OX=997296 GN=folE PE=3 SV=1
MSNFNRAQIEEAVRLILEAIGEDPNREGLLDTPKRVAKMYEEVFAGLNKDPKEYFETVFGEEHEELVLVKDIPFYSMCEHHLVPFFGHAHVAYIPRNGKVTGLSKLARAVEAVARRPQLQERITSTIADTIMEKLDPHGVMIVVEAEHMCMTMRGVKKPGSKTVTSAVRGILQNDARARAEVLSLIKN

SEQ ID NO: 5073 - protein, 189 aa, unidentified
  source 1..189: note = Bacillus mobilis
  REGION 1..189: note = tr|A0A1J9ZR12|A0A1J9ZR12_9BACI GTP cyclohydrolase 1; OS = Bacillus mobilis OX=2026190 GN=folE PE=3 SV=1
MAKVNLEQIEHAVRLILEAIGDDPNREGVLDTPKRVAKMYAEVFAGMHEDPKEHLHKVFGEDHEELVLVKDIPFYSMCEHHLVPFYGVAHVAYIPQGGKVTGLSKLARTVDTIARRPQLQERITSTVANSIMEVLEPHGVMVVVEAEHMCMTMRGVKKPGAKTVTTAVRGVLENDAAARSEILSFIKSK

SEQ ID NO: 5074 - protein, 188 aa, Bacillus muralis
  REGION 1..188: note = tr|A0A1B3XQN3|A0A1B3XQN3_9BACI GTP cyclohydrolase 1; OS = Bacillus muralis OX=264697 GN=folE PE=3 SV=1
MANVDHAKIEEAVKMLLEAVGEDPNREGLLDTPGRVARMYEEIFSGLNQDPKEYFDTVFGEDHEELVLVKDIPFYSVCEHHLVPFYGKAHVAYIPKNGKVTGLSKLARAVEAVSKRPQLQERITSTVADSIMEKLEPHGVMVVVEAEHMCMTMRGVKKPGSKTITSAVRGTFAKDHRTRAEVLAFIKN

SEQ ID NO: 5075 - protein, 189 aa, Bacillus mycoides
  REGION 1..189: note = sp|A9VMC0|GCH1_BACMK GTP cyclohydrolase 1; OS = Bacillus mycoides (strain KBAB4) OX=315730 GN=folE PE=3; SV = 1
MAKVNLEQIEHAVRLILEAIGDDPNREGVLDTPKRVAKMYAEVFSGMHEDPKEHLHKVFGEDHEELVLVKDIPFYSMCEHHLVPFYGVAHVAYIPQGGKVTGLSKLARTVDTIARRPQLQERITSTVANSIMEVLEPHGVMVVVEAEHMCMTMRGVKKPGAKTVTTAVRGVLENDAAARSEILSFIKTN

SEQ ID NO: 5076 - protein, 189 aa, Bacillus mycoides
  REGION 1..189: note = tr|A0A076VZZ0|A0A076VZZ0_BACMY GTP cyclohydrolase 1; OS = Bacillus mycoides OX=1405 GN=folE PE=3 SV=1
MAKVNLEQIEQAVRLILEAIGDDPNREGVLDTPKRVAKMYAEVFSGMHEDPKEHLHKVFGEEHEELVLVKDIPFYSMCEHHLVPFYGVAHVAYIPRGGKVTGLSKLARTVDTIARRPQLQERITSTVANSIMEVLEPHGVMVVVEAEHMCMTMRGVKKPGAKTVTTAVRGVLENDAAARSEILSFIKAK

SEQ ID NO: 5077 - protein, 190 aa, unidentified
  source 1..190: note = Bacillus nakamurai
  REGION 1..190: note = tr|A0A150F994|A0A150F994_9BACI GTP cyclohydrolase 1; OS = Bacillus nakamurai OX=1793963 GN=folE PE=3 SV=1
MKEVNKEQIEQAVRQILEAIGEDPNREGLLDTPKRVAKMYAEVFSGLNEDPKEHFQTVFGEDHEELVLVKDIAFHSMCEHHLVPFYGKAHIAYIPRGGKVTGLSKLARAVEAVSKRPQLQERITSTIAESIVDTLDPHGVMVVVEAEHMCMTMRGVRKPGAKTVTSAVRGIFKDDAAARSEVLEHIKRAD

SEQ ID NO: 5078 - protein, 309 aa, unidentified
  source 1..309: note = Bacillus nakamurai
  REGION 1..309: note = tr|A0A150FDJ6|A0A150FDJ6_9BACI GTP cyclohydrolase FolE2 OS=Bacillus nakamurai OX=1793963 GN=folE2 PE=3 SV=1
MNQHILLPSKAERYRHFGSVDPKNGKKPIEKEKMKDLQNTEKEYFFAIEQVGVTNVSHPVSITSSLAPYEQTASGQFTLTAHLRRHQKGINMSRLTEQLQDYYESGWVLSLESLKPFTRELAEKMNQTSAVSEVKFPWYFERKSPMLHKTGLMHAEAVIHTEYKAGLPYKQRVGISAKVTTLCPCSKEISEYSAHNQRGIVTIMADVDPQAQLPDDFKTDLLEAAETNASAKLHPVLKRPDEKAVTETAYENPRFVEDLIRLIAADLYELPWVSAFEIECRNEESIHLHDAYAKLKYAKQNGKTGGSVS

SEQ ID NO: 5079 - protein, 294 aa, Bacillus nanhaiisediminis
  REGION 1..294: note = tr|A0A562QNX6|A0A562QNX6_9BACI GTP cyclohydrolase FolE2 OS=Bacillus nanhaiisediminis OX=688079 GN=folE2 PE=3; SV = 1
MKRSLPPKAERHRHFGSVDPIIGTKPTDKEKMPDLQNKPDDFYFPIQQVGISKVKYPVMIESDLAPTTQTTTAEFAMTTSLDQDFKGINMSRLTEQLHLFFQTHLLSVETLREFTTILAREMKQRSSNVRVTFPWFFTKTSPSLQKEGMAHADVTYDVTFDENHGFTSAITLTAAVTTLCPCSKEISEYSAHNQRGFVTMTVTVDEAHEADWKAVLLEAAESNASSILYPVLKRPDEKAVTERAYENPRFVEDLARLVASDLYEHEAVHAFEIECRNEESIHQHDAIAKLTFTK

SEQ ID NO: 5080 - protein, 187 aa, Bacillus nealsonii
  REGION 1..187: note = tr|A0A2N0Z3N3|A0A2N0Z3N3_9BACI GTP cyclohydrolase 1; OS = Bacillus nealsonii OX=115979 GN=folE PE=3 SV=1
MSKVNIPKIEEAVKLILEAIGEDPDREGLIDTPTRVAKMYSEIFSGLQEDPKEYFQTIFGEDHEELVLVKDIPFYSMCEHHLVPFFGNAHVAYIPRNGKVTGLSKLARAVEVVAKRPQLQERITSTVADSIYEMLEPHGVMVVIEAEHMCMTMRGVNKPGAKTITTAVRGRYAEDSDARAEVLSLLK

SEQ ID NO: 5081 - protein, 187 aa, Bacillus nealsonii
  REGION 1..187: note = tr|R9CCV8|R9CCV8_9BACI GTP cyclohydrolase 1; OS = Bacillus nealsonii AAU1 OX=1202533 GN=folE PE=3 SV=1
MSKINTPQIEEAIRLLLEAVGEDPNREGLLDTPKRVAKMYEEVFSGLTIDPKEYFETIFHEDHEELVLVKDIPFYSMCEHHLVPFYGKAHVAYIPKGGRVAGLSKLARAIEAVSKRPQLQERITSTVADTMMETLEPYGVMIVVEAEHMCMTMRGVKKPGAKTVTSAVRGVFQTDSDKRAEVFAMIK

SEQ ID NO: 5082 - protein, 188 aa, unidentified
  source 1..188: note = Bacillus notoginsengisoli
  REGION 1..188: note = tr|A0A417YVB0|A0A417YVB0_9BACI GTP cyclohydrolase 1; OS = Bacillus notoginsengisoli OX=1578198 GN=folE PE=3 SV=1
MPTVNKAQIEEAVRMILQAIGEDPEREGLLDTPKRVAKMYEEVFSGLNQDPGEYFETIFGEDHEELVLVKDIPFYSMCEHHLVPFFGKAHVAYLPRNGKVTGLSKLARAVEAVAKRPQLQERITSEIANSIMDRLQPHGVMVVVEAEHMCMTMRGVKKPGSKTVTSAVRGIFVENAIARSEVLSFINN

SEQ ID NO: 5083 - protein, 188 aa, unidentified
  source 1..188: note = Bacillus obstructivus
  REGION 1..188: note = tr|A0A1L8ZLR3|A0A1L8ZLR3_9BACI GTP cyclohydrolase 1; OS = Bacillus obstructivus OX=1914540 GN=folE PE=3 SV=1
MVEINHSQIEEAIRMILEAVGENPDREGLLDTPKRVAKMYEEIFEGINLDPKESFDLVFSEEHEELVLVKDISFISMCEHHLLPFYGKAHIAYLPRNGKVTGLSKLARAIEIVAKRPQIQERMTSTVADSIYEILDPHGVMVVIEAEHMCMTMRGVKKPGAKAITTAVRGSLVNDSYARSEILNLIHN

SEQ ID NO: 5084 - protein, 326 aa, Bacillus oceanisediminis
  REGION 1..326: note = tr|A0A562JJB1|A0A562JJB1_9BACI GTP cyclohydrolase FolE2 OS=Bacillus oceanisediminis OX=665099 GN=folE2 PE=3; SV = 1
MNLKLPSKQERHKLFGSVQPGEKLKPAIKDEMVDLQSQKNDFLFNIDSVGISNVKIPVTINSFIEPVKQGTIAAFTLTSSIPGNQKGTNMSRFIEQLEEYRLRGFTMEQEQLYQFVSDLSARLGQKNVRVEVEFPWFYERKGPSSELSGLNHATVRMTVQQDSDKNYKISGELSCAVTTLCPCSKEISEYSAHNQRGIVKISVDPTVLSEDWKEQLLYAAESNASACIHPLLKRTDEKIVTETAYENPRFVEDMVRLVAADLYEKEWINGFTVECRNEESIHLHDAIATLTYKKKIKVEQPDIKKSGWCHLVNKFSAIDFFYEIFF

SEQ ID NO: 5085 - protein, 188 aa, Bacillus oceanisediminis; identical to SEQ ID NO: 5015
  REGION 1..188: note = tr|A0A1S1YKR5|A0A1S1YKR5_9BACI GTP cyclohydrolase 1; OS = Bacillus oceanisediminis OX=665099 GN=folE PE=3 SV=1

SEQ ID NO: 5086 - protein, 294 aa, Bacillus okhensis
  REGION 1..294: note = tr|A0A0B0IGR2|A0A0B0IGR2_9BACI GTP cyclohydrolase FolE2 OS=Bacillus okhensis OX=333138 GN=folE2 PE=3 SV=1
MKRSLPPKAERHRHFGTVDPVIGTKPTDKEKMPDLQNKPDDFYFPIQQVGISDVKYPVMIESELAPTTQTTTATFALTTSLEQDFKGINMSRLTEQLHLFFQSHLLTDQTLREFTAILAREMKQKAANVRVTFPWFFTKTSPAMQKEGMAHADITYDVSFDEDQGYTSIITLTGAVTTLCPCSKEISEYSAHNQRSFVTMTVTVDDAFEADWKAVLLEAAESNASSILFPVLKRPDEKAVTERAYENPRFVEDLVRLVAADLYEHEAIRSFEVQCRNEESIHQHDAIAKLSFTK

SEQ ID NO: 5087 - protein, 299 aa, Bacillus okuhidensis
  REGION 1..299: note = tr|A0A0M0KMF4|A0A0M0KMF4_9BACI GTP cyclohydrolase FolE2 OS=Bacillus okuhidensis OX=136160 GN=folE2 PE=3 SV=1
MKTKQWPSKTERHKRFGSVPPVAGKKPIHKEEMADLQNMPNDFLFALDSVGIHNVKHPCIIQSNLKPYEQTTVGTFSLTTSLEQMSKGINMSRLTELLQEYHQTGFILSLKNMQAFTKDLAERMEQSRAHVHVTFPWFFERESPSLNKIGLAHAEARLNVHFDETLGFTHEVGLTAAVTTLCPCSKEISEYSAHNQRGYVTIKATFYEPTEGSDDWKVTLLEAAESNASSILYPVLKRPDEKAVTEKAYENPRFVEDMVRLTAADLYENETIKAFTVECRNEESIHQHDAIATLSYSKK

SEQ ID NO: 5088 - protein, 188 aa, Bacillus okuhidensis
  REGION 1..188: note = tr|A0A0M0KKN6|A0A0M0KKN6_9BACI GTP cyclohydrolase 1; OS = Bacillus okuhidensis OX=136160 GN=folE PE=3 SV=1
MSKVDHEKIQQAVVMILEAIGEDPAREGLEDTPKRVAKMYEEVFAGLNQDPKEHFATIFGEDHEELVLVKDIPFFSMCEHHLVPFFGKAHVGYIPKGGKVTGLSKLARAVEAVARRPQLQERITSTVADALVETLEPHGVIVVVEAEHMCMTMRGVKKPGATTVTSAVRGTFANDAAARAEVLSLIKG

SEQ ID NO: 5089 - protein, 187 aa, unidentified
  source 1..187: note = Bacillus oleivorans
  REGION 1..187: note = tr|A0A285CM58|A0A285CM58_9BACI GTP cyclohydrolase 1; OS = Bacillus oleivorans OX=1448271 GN=folE PE=3 SV=1
MNEINLNQIEQAVRLILEAIGEDPNREGLLDTPKRVAKMYKEVFSGLNEDPKSYFDTIFSEDHEELVLVKDIPFYSMCEHHLVPFFGHAHVAYIPKGGKVTGLSKLARAVEAVAKRPQLQERLTSTIADAIFEKLEPFGVMVVVEGEHMCMSMRGVKKPGSKTVTTAARGVFAEDQKKRAEVLTLIK

SEQ ID NO: 5090 - protein, 189 aa, unidentified; identical to SEQ ID NO: 4953
  source 1..189: note = Bacillus pacificus
  REGION 1..189: note = tr|A0A1J9ZT03|A0A1J9ZT03_9BACI GTP cyclohydrolase 1; OS = Bacillus pacificus OX=2026187 GN=folE PE=3 SV=1

SEQ ID NO: 5091 - protein, 300 aa, unidentified; identical to SEQ ID NO: 4949
  source 1..300: note = Bacillus paralicheniformis
  REGION 1..300: note = tr|A0A1Q8GSR7|A0A1Q8GSR7_9BACI GTP cyclohydrolase FolE2 OS=Bacillus paralicheniformis OX=1648923 GN=folE2; PE = 3 SV=1

SEQ ID NO: 5092 - protein, 300 aa, unidentified
  source 1..300: note = Bacillus paralicheniformis
  REGION 1..300: note = tr|A0A5A9T1P0|A0A5A9T1P0_9BACI GTP cyclohydrolase FolE2 OS=Bacillus paralicheniformis OX=1648923 GN=folE2; PE = 3 SV=1
MERILHLPAKPERHRRFGSVEAVKGIKPTDKEQMKDIQNTPNDYFFDIDHVGVSNVSHPILIASSLKPFTQTTIGAFSFTTSLARGRKGINMSRLTEQLQRYHEANWTIDVHTLKDFAKDLADNMEQQSASVSVSFPWYFERLSPETKLSGLMHADIHMTVSYHENKGFSQTVGITAHVTTLCPCSKEISEYSAHNQRGIIKITAHINEQAEMPDDFKTELLAAAETNASAKLHPVLKRPDEKRVTEQAYENPRFVEDVIRLTAADLYEMNWISAFEIECRNEESIHMHDAVARLSFSKI

SEQ ID NO: 5093 - protein, 189 aa, unidentified
  source 1..189: note = Bacillus paramycoides
  REGION 1..189: note = tr|A0A1J9V984|A0A1J9V984_9BACI GTP cyclohydrolase 1; OS = Bacillus paramycoides OX=2026194 GN=folE PE=3 SV=1
MAKVNLEQIEHAVRLILEAIGDDPNREGVLDTPKRVAKMYAEVFSGMHEDPKEHLHKVFGEDHEELVLVKDIPFYSMCEHHLVPFYGVAHVAYIPQGGKVTGLSKLARTVDTIARRPQLQERITSTVANSIMEVLEPHGVMVIVEAEHMCMTMRGVKKPGAKTVTTAVRGVLEKDAAARNEILSFIKTK

SEQ ID NO: 5094 - protein, 189 aa, unidentified; identical to SEQ ID NO: 4953
  source 1..189: note = Bacillus paranthracis
  REGION 1..189: note = tr|A0A1J9Y031|A0A1J9Y031_9BACI GTP cyclohydrolase 1; OS = Bacillus paranthracis OX=2026186 GN=folE PE=3 SV=1

SEQ ID NO: 5095 - protein, 188 aa, unidentified
  source 1..188: note = Bacillus persicus
  REGION 1..188: note = tr|A0A1H8BQP2|A0A1H8BQP2_9BACI GTP cyclohydrolase 1; OS = Bacillus persicus OX=930146 GN=folE PE=3 SV=1
MTKVNHAQIEEAVRLILEAVGEDPDREGLLDTPKRVARMYEEVFAGLNKDPKEYFETIFGEEHEELVLVKDIPFYSICEHHLVPFYGKAHVAYIPRGGKVTGLSKLARAVEAVAQRPQLQERITSTIANAIMEKLEPHGVMVVVEAEHMCMTMRGVKKPGSKTVTSAVRGTLAEDVSARAEILALIKE

SEQ ID NO: 5096 - protein, 188 aa, unidentified
  source 1..188: note = Bacillus praedii
  REGION 1..188: note = tr|A0A4R1B2K8|A0A4R1B2K8_9BACI GTP cyclohydrolase 1; OS = Bacillus praedii OX=1742358 GN=folE PE=3 SV=1
MAEVNRAQIEDAVRLILEAIGEDPNREGLLDTPKRVAKMYEEVFQGLNQDPKEYFETVFGEDHEEVVLVKDIPFYSMCEHHLVPFYGKAHVAYIPRNGKVTGLSKLARAVDAVAKRPQLQERITSTIADSILEKLDPHGVMVVVEAEHMCMTMRGVKKPGSQTVTTAVRGVYADDERARAEVLSLIKF

SEQ ID NO: 5097 - protein, 194 aa, Bacillus pseudofirmus
  REGION 1..194: note = tr|A0A1Q8V3F2|A0A1Q8V3F2_BACPF GTP cyclohydrolase 1; OS = Bacillus pseudofirmus OX=79885 GN=folE PE=3 SV=1
MEAYKLNNNFDLEKIKQGVTMILEAIGEDPNREGLLDTPKRVAKMYQEVFSGLNEDPAKHFETIFGEDHEEIVLVKDIPFFSMCEHHLVPFYGQAHVGYIPRGGKVTGLSKLARAVDAVAKRPQLQERITSTIADTLVKELDPHGVIVVVEAEHMCMTMRGVKKPGSKTVTSAVRGTFSEDATARAEVLSFIKG

SEQ ID NO: 5098 - protein, 295 aa, Bacillus pseudofirmus
  REGION 1..295: note = tr|D3FZ66|D3FZ66_BACPE GTP cyclohydrolase FolE2; OS = Bacillus pseudofirmus (strain OF4) OX=398511 GN=yciA; PE = 3 SV=1
MNRQLPPKAERHRHFGSVEPIEGTKPKEKDQMPDLQNKPDDYYFPIQKVGISKVKYPVMIESALAPTTQTTTAEFAMTTSLDAEFKGINMSRLTEQLHMYFQTHLLSIETLREFAAILAREMKQKASDVKVTFPWFFTKSSPSMKKEGMAHADVTFDVSFNEETGYTSKITLVAAVTTLCPCSKEISEYSAHNQRGFVTMSAVVDDVEDIDWKQAMLEAAESNASSILYPVLKRPDEKAVTEHAYENPRFVEDLVRLVASDLYENEAIRSFEIECRNEESIHQHDAIAQLSFSKE

SEQ ID NO: 5099 - protein, 195 aa, Bacillus pseudomycoides
  REGION 1..195: note = tr|C3BW12|C3BW12_9BACI GTP cyclohydrolase 1; OS = Bacillus pseudomycoides DSM 12442 OX=527000 GN=folE; PE = 3 SV=1
MSLKTIQSVEIDTDKIEVAVKMILEAIGEDINREGILETPKRVAKMYKEVFQGLGQNPSEHLLKIFNENHEELVLVKDIPFYSMCEHHLVPFFGRAHIGYIPNNGKVTGLSKLARALETICKRPQLQERITNELANVIFETLEPKGVIVVIEAEHMCMTMRGVKKPGSMTITSSYKGIFKDNNTLRSETLNLIEG

SEQ ID NO: 5100 - protein, 189 aa, Bacillus pseudomycoides; identical to SEQ ID NO: 5076
  REGION 1..189: note = tr|A0A1S9X563|A0A1S9X563_9BACI GTP cyclohydrolase 1; OS = Bacillus pseudomycoides OX=64104 GN=folE PE=3 SV=1

SEQ ID NO: 5101 - protein, 189 aa, Bacillus pumilus; identical to SEQ ID NO: 4951
  REGION 1..189: note = sp|A8FEL2|GCH1_BACP2 GTP cyclohydrolase 1; OS = Bacillus pumilus (strain SAFR-032) OX=315750 GN=folE; PE = 3 SV=1

SEQ ID NO: 5102 - protein, 298 aa, Bacillus pumilus
  REGION 1..298: note = tr|A0A5D4RPR5|A0A5D4RPR5_BACPU GTP cyclohydrolase FolE2 OS=Bacillus pumilus OX=1408 GN=folE2 PE=3 SV=1
MFSFPSKKERHKQFGSVQPSLGTKPCQKENMTDIQKTEQDFYFPLEQVGICRVSYPVRILSKTAPQEQTTSADFALSTSLSAHEKGIHMSRLTEQLHSFYESGKPLDVNSLKELTAALARQMSQPSASVQVSFPWYKEKQSPVSGKAGLMHATITYDIHFHEKDGWTCHVGCDAQVMTLCPCSKEISEYGAHNQRGSVSIQVELFEQVLLSGDMKEALLHIIESNASAQLYPVLKRPDEKKVTEEAYENPRFVEDLARLMAMELYEQPWIKGFQVECRNEESIHQHDAYAKCSYQKKL

SEQ ID NO: 5103 - protein, 298 aa, Bacillus safensis
  REGION 1..298: note = tr|A0A5C0WE13|A0A5C0WE13_9BACI GTP cyclohydrolase FolE2 OS=Bacillus safensis OX=561879 GN=folE2 PE=3 SV=1
MRSFPSKEERHQLFGSVPPSLGTKPLQKEDMTDIQKTERDFYFHLEQVGICRMSYPVHIVSKMAPQSQTTTAEFTLSTSLPAHQKGIHMSRLTEQLHSFYESSKPLDVNSLKELTAALARRMNQPSASVQVAFPWYMEKQSPVTGQSGLMHATIKYDVHFHEKDGWTCHVGCDTQVTTLCPCSKEISEYGAHNQRGSVSILVGLFEQASHPDDIKAVLLHIIESNASAPLYPVLKRPDEKKVTEEAYENPRFVEDITRLIAIELYEQPWIKGIQVECRNEESIHQHDAYAKCSYEKNL

SEQ ID NO: 5104 - protein, 189 aa, Bacillus safensis; identical to SEQ ID NO: 4951
  REGION 1..189: note = tr|A0A0M2ED15|A0A0M2ED15_9BACI GTP cyclohydrolase 1; OS = Bacillus safensis OX=561879 GN=folE PE=3 SV=1

SEQ ID NO: 5105 - protein, 212 aa, unidentified
  source 1..212: note = Bacillus salacetis
  REGION 1..212: note = tr|A0A3A1QRD8|A0A3A1QRD8_9BACI GTP cyclohydrolase 1; OS = Bacillus salacetis OX=2315464 GN=folE PE=3 SV=1
MLMTEDQFMIKKLQDLFKGTSGDIDKDIIKAQQYMDGIKTLIELCGDDPERDGLQDTPFRVLKAFREYTEGYREDPKLHLEKTFDVEHKELVMVKDIEFYSMCEHHFAPFFGVAHVGYVPDKKITGLSKIGRMVEGYAKRFQVQERLTNEIAQAVEDILEPQGTMVVVEAKHMCMCGRGIKKSNASTTTTAVRGLYADKADARMEFISLLNR

SEQ ID NO: 5106 - protein, 189 aa, Bacillus salarius
  REGION 1..189: note = tr|A0A3R9RER1|A0A3R9RER1_9BACI GTP cyclohydrolase 1; OS = Bacillus salarius OX=284579 GN=folE PE=3 SV=1
MSTVNHDKIQEAVKLILEAVGEDPDRNGLIDTPKRVAKMYEEVFQGLHEDESDHLKTVFGENHEELVLVRDIPFYSMCEHHLVPFYGKAHVGYIPKGGQVTGLSKLARTIETVAKRPQLQERITSTVADTIIDTLDPHGVIVVVEAEHMCMTMRGIQKPGTETVTSAVRGSFEKDEASRAEVLSLINRK

SEQ ID NO: 5107 - protein, 189 aa, Bacillus salarius
  REGION 1..189: note = tr|A0A3R9P5W7|A0A3R9P5W7_9BACI GTP cyclohydrolase 1; OS = Bacillus salarius OX=284579 GN=folE PE=3 SV=1
MSTVNHDKIQEAVKLILEAVGEDPDRNGLIDTPKRVAKMYEEVFQGLHEDEAEHLKTVFGENHEELVLVRDIPFYSMCEHHLVPFYGKAHVGYIPKGGQVTGLSKLARTVETVAKRPQLQERITSTVADTIIDTLDPHGVIVVVEAEHMCMTMRGIQKPGTETVTSAVRGSFEKDEASRAEVLSLINRS

SEQ ID NO: 5108 - protein, 187 aa, unidentified
  source 1..187: note = Bacillus salsus
  REGION 1..187: note = tr|A0A1H0Q4K9|A0A1H0Q4K9_9BACI GTP cyclohydrolase 1; OS = Bacillus salsus OX=930152 GN=folE PE=3 SV=1
MTTINHAQIEEAVRLILEAVGEDPNREGLLDTPKRVAKMYEEAFSGLKIDPREYFETIFSEDHEELVLVKDIPFHSMCEHHLVPFYGIAHVAYIPQNGRVAGLSKLARAVEAVSRRPQLQERITSTIADTMMQTLEPHGVMVVVEAEHMCMTMRGVKKPGAKTVTSAVRGVFKTDSDARKEVLSYIR

SEQ ID NO: 5109 - protein, 188 aa, Bacillus selenatarsenatis
  REGION 1..188: note = tr|A0A0A8X6V3|A0A0A8X6V3_9BACI GTP cyclohydrolase 1; OS = Bacillus selenatarsenatis SF-1 OX=1321606 GN=folE PE=3; SV = 1
MSNVNRAQIEEAVRLILEAVGEDPNREGLLDTPKRVAKMYEEVFSGLNQDPKEYFETIFGEDHEELVLVKDIPFYSMCEHHLVPFFGKAHVAYIPRGGKVTGLSKLARAVEAVAKRPQLQERITSTIANSIMEKLDPHGVMVVVEAEHMCMTMRGVKKPGSKTVTSAVRGTLAEDVNARAEILSLIKG

SEQ ID NO: 5110 - protein, 191 aa, Bacillus selenitireducens
  REGION 1..191: note = tr|D6XVA4|D6XVA4_BACIE GTP cyclohydrolase 1; OS = Bacillus selenitireducens (strain ATCC 700615 / DSM 15326 / MLS10) OX=439292 GN=folE PE=3 SV=1
MSEHVDHEKIQQAVTMILEAVGEDPNREGLLDTPKRVARMYAEIFEGLHQDPKEHFKTVFGEDHEELVLVKDITFHSVCEHHLVPFFGKVHIGYIPKGGQVTGLSKMARAVEAVTKRPQLQERITSTLADSIVETLTPLGVIVIVEAEHMCMTMRGVRKPGAKTVTSAVRGAFQKSEAARAEVMALIRDHG

SEQ ID NO: 5111 - protein, 174 aa, Bacillus shackletonii
  REGION 1..174: note = tr|A0A0Q3WZQ6|A0A0Q3WZQ6_9BACI GTP cyclohydrolase 1; OS = Bacillus shackletonii OX=157838 GN=folE PE=3 SV=1
MILEAIGENPEREGLVDTPERVAKMYEEIFAGLKQDPSEFFDVIYSENHEELVLVKDIAFFSMCEHHLIPFYGKAHIAYIPQDGKVAGLSKLARAVESIAGRPQLQERITTNLADVLMEKLNPMGVLIMLEAEHMCMTMRGIKKPGTKAITTAARGIFKTNNSVRSEVLSIMRD

SEQ ID NO: 5112 - protein, 200 aa, Bacillus shackletonii
  REGION 1..200: note = tr|A0A0Q3WX84|A0A0Q3WX84_9BACI GTP cyclohydrolase 1; OS = Bacillus shackletonii OX=157838 GN=folE PE=3 SV=1
MNHVYTVENKEIDVEIKKQKISQHFASIIEELGLDLNDPSIKDTPERVAKMLVNETCNGLFSNPPNITTFPLDKNTSRELVVIENIPFSSLCEHHFQPFVGTATIAYLPNDRVMGLSKGARVLDYFASRPQIQERLTNEVAAYLYEQLNAKGVFVMIKAEHFCMKVRGVKKHQSATITTASLGDIDKKDVLSSIQLAKMK

SEQ ID NO: 5113 - protein, 190 aa, Bacillus siamensis
  REGION 1..190: note = tr|A0A2K9KAU0|A0A2K9KAU0_9BACI GTP cyclohydrolase 1; OS = Bacillus siamensis OX=659243 GN=folE PE=3 SV=1
MKEVNKEQIEQAVRQILEAIGEDPDREGLLDTPKRVAKMYAEVFSGLNEDPKEHFKTVFGEDHEELVLVKDIAFHSMCEHHLVPFYGKAHIAYIPRGGKVTGLSKLARAVEAVSKRPQLQERITSTIAESIVDTLDPHGVMVVVEAEHMCMTMRGVRKPGAKTVTSAVRGIFKDDAAARSEVLEHIKRAD

SEQ ID NO: 5114 - protein, 190 aa, Bacillus siamensis
  REGION 1..190: note = tr|A0A268DQV7|A0A268DQV7_9BACI GTP cyclohydrolase 1; OS = Bacillus siamensis OX=659243 GN=folE PE=3 SV=1
MKEVNKEQIEQAVRQILEAIGEDPDREGLLDTPKRVAKMYAEVFSGLNEDPKEHFKTVFGEDHEELVLVKDIAFHSMCEHHLVPFYGKAHIAYIPRGGKVTGLSKLARAVEAVSKRPQLQERITSTIAESIVDTLDPHGVMVVVEAEHMCMTMRGVRKPGAKTVTSAVRGIFKEDAAARSEVLEHIKRAD

SEQ ID NO: 5115 - protein, 303 aa, Bacillus simplex
  REGION 1..303: note = tr|A0A3R8MER7|A0A3R8MER7_9BACI GTP cyclohydrolase FolE2 OS=Bacillus simplex OX=1478 GN=folE2 PE=3 SV=1
MPILELPNKLDRLQYFGSTYPINGVKPTDKQYMPDLQNIEKNYFFKIDNVGIKKIKYPVIVKAESEPVIQQTIGEFTLTTELCSNKKGINMSRLPEILQEAYSKGIEMNPQSLRHLAKRMAERMEQKSSAVQVSFPWFFERTSPVLSMSGLMSADVNIEVGYQEPAIWKEKIGMIATVTTLCPCSKEISEYSAHNQRGIVSIEIETYSDRGFPRNFKEIMLEVIESNASAKLYSILKRPDEKKVTEQAFENPRFVEDLIRLVAADLYELRWVQSFHIECRNEESIHLHDAYASLSYDKEKVIP

SEQ ID NO: 5116 - protein, 188 aa, Bacillus simplex
  REGION 1..188: note = tr|A0A127D9D6|A0A127D9D6_9BACI GTP cyclohydrolase 1; OS = Bacillus simplex OX=1478 GN=folE PE=3 SV=1
MANVNHAKIEEAVKMLLEAVGEDPTREGLLDTPGRVARMYEEIFSGLNQDPKEYFETVFGEDHEELVLVKDIPFYSVCEHHLVPFYGKAHVAYIPKNGRVTGLSKLARAVEAVSKRPQLQERITSTVADSIMEKLEPHGVMVVVEAEHMCMTMRGVKKPGSKTVTSAVRGTFAKDHRTRAEVLAFIKD

SEQ ID NO: 5117 - protein, 189 aa, Bacillus smithii
  REGION 1..189: note = tr|G9QP68|G9QP68_9BACI GTP cyclohydrolase 1; OS = Bacillus smithii 7_3_47FAA OX=665952 GN=folE PE=3 SV=1
MQKTEVNLTQIEQAVRLILEAIGEDPEREGLIDTPKRVARMYQEVFSGLRQDPGEYFETIFSEDHEELVLVKDIPFYSMCEHHLVPFFGKAHVAYIPKNGKVTGLSKLARAVEAVAKRPQLQERITDEVIEAIMKKLDPHGAMVVVEAEHMCMTMRGVKKPGSKTVTTAVRGIFEQDAQARAEVLALIK

SEQ ID NO: 5118 - protein, 260 aa, Bacillus smithii
  REGION 1..260: note = tr|A0A0H4P0F5|A0A0H4P0F5_9BACI GTP cyclohydrolase 1; OS = Bacillus smithii OX=1479 GN=folE PE=3 SV=1
METDFLKDKTFIERKKLIQIHKSLFGCLSFSIGKKNPSRSQIASLPPSYSCAIMKISICLRMKIPLGVVLYMQKTEVNLTQIEQAVRLILEAIGEDPEREGLIDTPKRVARMYQEVFSGLRQDPGEYFETIFSEDHEELVLVKDIPFYSMCEHHLVPFFGKAHVAYIPKNGKVTGLSKLARAVEAVAKRPQLQERITDEVIEAIMKKLDPHGAMVVVEAEHMCMTMRGVKKPGSKTVTTAVRGIFEQDAQARAEVLALIK

SEQ ID NO: 5119 - protein, 188 aa, unidentified
  source 1..188: note = Bacillus solani
  REGION 1..188: note = tr|A0A0Q3TAD1|A0A0Q3TAD1_9BACI GTP cyclohydrolase 1; OS = Bacillus solani OX=1637975 GN=folE PE=3 SV=1
MAEVNRAQIEDAVRLILEAIGEDPNREGLLDTPKRVAKMYEEVFQGLNQDPKEYFETVFGEDHEEVVLVKDIPFYSMCEHHLVPFYGKAHVAYIPRNGKVTGLSKLARAVDAVAKRPQLQERITSTIAESILEKLDPHGVMVVVEAEHMCMTMRGVKKPGSQTVTTAARGVFADDERARAEVLSLIKF

SEQ ID NO: 5120 - protein, 188 aa, unidentified
  source 1..188: note = Bacillus solimangrovi
  REGION 1..188: note = tr|A0A1E5LHA2|A0A1E5LHA2_9BACI GTP cyclohydrolase 1; OS = Bacillus solimangrovi OX=1305675 GN=folE PE=3 SV=1
MSKVNHEQIEQAVRLILEAIGEDPNREGLLDTPKRVAKMYAEVFRGLNQDPKEYFATIFSEDHEELVLVKDIPFYSMCEHHLVPFFGTAHVAYIPKNGKVTGLSKLARAVESVAARPQLQERITSTVVDSIMETLEPHGAMVIVEAEHMCMTMRGVKKPGSKTVTSAVRGIFQNDDVARSEVLSLIRA

SEQ ID NO: 5121 - protein, 190 aa, Bacillus sonorensis
  REGION 1..190: note = tr|M5PI99|M5PI99_9BACI GTP cyclohydrolase 1; OS = Bacillus sonorensis L12 OX=1274524 GN=folE PE=3 SV=1
MSEINKEQIEQAVRLILEAIGEDPNREGLLDTPKRVAKMYAEVFAGLNEDPKEHFKTIFGEDHEELVLVKDIPFYSMCEHHLVPFYGKAHVAYIPKGGKVTGLSKLARAVEAVAKRPQLQERITATIADSIVESLTPHGVMVVVEAEHMCMTMRGVKKPGAKTVTSAVRGTFRESVAARSEVLELIKHHD

SEQ ID NO: 5122 - protein, 300 aa, Bacillus sonorensis
  REGION 1..300: note = tr|M5PEE9|M5PEE9_9BACI GTP cyclohydrolase FolE2; OS = Bacillus sonorensis L12 OX=1274524 GN=folE2 PE=3 SV=1
MKYDLQLPAKPERHRLFGSVEAVKGTKPTDKEQMKDIQNTPNDYLFDIDQVGITNVSHPIRITSAVKPFSQTTIGSFSLMTHLARGRKGINMSRLTEQLQRYHTENWIVGLDSLKDFTKELAVNMEQQGAAVSLAFPWYFERLSPELEFPGLMHADIHMNVSYHQKEGWTGTVGITAKVATLCPCSKEISEYSAHNQRGVIKITAHINDRAAMPEDFKTELLAAAETNASAKLHPVLKRPDEKKVTEQAYENPRFVEDLIRLIAADLYEMDWIAAFEIECRNEESIHLHDAAARLAYSKI

SEQ ID NO: 5123 - protein, 189 aa, unidentified
  source 1..189: note = [Bacillus] sp.
  REGION 1..189: note = tr|A0A150YDA8|A0A150YDA8_9BACI GTP cyclohydrolase 1; OS = [Bacillus] sp. KCTC 13219 OX=1811976 GN=folE PE=3 SV=1
MSNVDLAKIEEAVKMILEAVGEDAQREGLLDTPKRVAKMYAEMFSGLAQDPREYFSTVFHEEHEELVLVKDIPFYSMCEHHLVPFYGKAHIAYIPKDGKVAGLSKLGRCVEAVARRPQLQERITSTVADTMMEMLQPKGVYVVIEAEHMCMTMRGLKKPGSKTVTSVARGIYEEDEVKRREVISFIQMS

SEQ ID NO: 5124 - protein, 188 aa, Bacillus sp.; identical to SEQ ID NO: 4964
  REGION 1..188: note = tr|A0A0Q9HQY5|A0A0Q9HQY5_9BACI GTP cyclohydrolase 1; OS = Bacillus sp. Root239 OX=1736499 GN=folE PE=3 SV=1

SEQ ID NO: 5125 - protein, 189 aa, Bacillus sp.; identical to SEQ ID NO: 4953
  REGION 1..189: note = tr|A0A2B4NVT5|A0A2B4NVT5_9BACI GTP cyclohydrolase 1; OS = Bacillus sp. AFS075960 OX=2034282 GN=folE PE=3 SV=1

SEQ ID NO: 5126 - protein, 188 aa, Bacillus sporothermodurans
  REGION 1..188: note = tr|A0A2T6ES15|A0A2T6ES15_9BACI GTP cyclohydrolase 1; OS = Bacillus sporothermodurans OX=46224 GN=folE PE=3 SV=1
MEEINREQIEEAIRLIIEAVGEDPNREGLLDTPKRVANMYEEIFSGINQDPKELFELVFSENYEELVLVKDIPFYSICEHHLIPFFGKAHIAYLPRNGKVTGLSRLARAIETVAKRPQLQERITSTVADAINEKLDPHGVMVVIEAEHMCMTMRGVKKPGSKTITTAVRGSFETDQCARSEILTLIKS

SEQ ID NO: 5127 - protein, 151 aa, Bacillus sporothermodurans
  REGION 1..151: note = tr|A0A150KKT4|A0A150KKT4_9BACI GTP cyclohydrolase 1; OS = Bacillus sporothermodurans OX=46224 GN=B4102_3932 PE=3; SV = 1
MLVHETCSGLFTKPPVITTFPLDKTTSSDLVVIENIPFSSLCEHHFQPFVGTATIAYLPNDRVMGLSKGARVLDYFAARPQIQERLTNEVAAYLYEQLNAKGVFVIIKAEHYCMKVRGVKKHNSATITTASLGEIDKQDVLSSNQLATNLK

SEQ ID NO: 5128 - protein, 298 aa, Bacillus stratosphericus
  REGION 1..298: note = tr|A0A4Y9JRU7|A0A4Y9JRU7_9BACI GTP cyclohydrolase FolE2 OS=Bacillus stratosphericus OX=293386 GN=folE2 PE=3; SV = 1
MRSFPSKEERHQLFGSVPPSLGTKPWQKEDMTDIQKTEQDFYFHLEQVGICRMSYPVHIVSKTAPQRQTTTAEFSLSTSLPAHQKGIHMSRLTEQLHSFYESSKPLDVNALKELTAALARRMNQPSASVQVAFPWYMEKQSPVTGQSGLMHATIKYDVHFHEKDGWTCHVGCDAQVTTLCPCSKEISEYGAHNQRGSVSILVGLFEQASHPDDIKAALLHIIESNASAPLYPVLKRPDEKKVTEETYENPRFVEDNTRLIAIELYEQPWIKSFQVECRNEESIHQHDAYAKCSYEKNL

SEQ ID NO: 5129 - protein, 189 aa, Bacillus stratosphericus; identical to SEQ ID NO: 4951
  REGION 1..189: note = tr|A0A1V9CGI6|A0A1V9CGI6_9BACI GTP cyclohydrolase 1; OS = Bacillus stratosphericus OX=293386 GN=folE PE=3 SV=1

SEQ ID NO: 5130 - protein, 188 aa, Bacillus subterraneus
  REGION 1..188: note = tr|A0A3R9FW27|A0A3R9FW27_9BACI GTP cyclohydrolase 1; OS = Bacillus subterraneus OX=285983 GN=folE PE=3 SV=1
MSNVNRAQIEEAVRLILEAVGEDPNREGLLDTPKRVAKMYEEVFSGLNQDPKEYFETIFGEDHEELVLVKDIPFYSMCEHHLVPFFGKAHVAYIPRGGKVTGLSKLARAVEAVAKRPQLQERITSTIANAIMEKLDPHGVMVVVEAEHMCMTMRGVKKPGSKTVTSAVRGTLAEDVNARAEILSLIKS

SEQ ID NO: 5131 - protein, 188 aa, Bacillus subterraneus
  REGION 1..188: note = tr|A0A0D6ZBY2|A0A0D6ZBY2_9BACI GTP cyclohydrolase 1; OS = Bacillus subterraneus OX=285983 GN=folE PE=3 SV=1
MSNVNRAQIEEAVRLILEAIGEDPDREGLLDTPKRVARMYEEVFSGMNQDPKEYFETIFGEDHEELVLVKDIPFYSMCEHHLVPFFGKAHVAYIPKGGKVTGLSKLARAVEAVARRPQLQERITSTIANAIMEKLDPHGVMVVVEAEHMCMTMRGVKKPGSKTVTSAVRGNLAEDVNARAEILSLIKD

SEQ ID NO: 5132 - protein, 190 aa, Bacillus subtilis; identical to SEQ ID NO: 5047
  REGION 1..190: note = sp|P19465|GCH1_BACSU GTP cyclohydrolase 1; OS = Bacillus subtilis (strain 168) OX=224308 GN=folE PE=1; SV = 1

SEQ ID NO: 5133 - protein, 304 aa, Bacillus subtilis
  REGION 1..304: note = tr|A0A162RBE9|A0A162RBE9_BACIU GTP cyclohydrolase FolE2 OS=Bacillus subtilis OX=1423 GN=folE2 PE=3 SV=1
MNQHTLLPKKTERLQYFGSVSPIKGEKPVEKEKMKDLQNIRKDYFFDIQHVGVANVSHPVTITSAMMPAEQTTAANFTMTCNLPRNQKGINMSRLTELLQVYHQNGWILSFSSLQQFTKELAENMDTSSATVEVRFPWFFERKSPKLEKAGLMHADIFMSVTYRKDQPFKQRAGISAKVTTLCPCSKEISEYSAHNQRGTVSIWADIHPAASLPSDVKADLLHAAESNASARLHPVLKRPDEKAVTETAYENPRFVEDLARLIAADLFELEWVSAFEIECRNEESIHLHDAYAKLCFSKEVDKI

SEQ ID NO: 5134 - protein, 300 aa, unidentified
  source 1..300: note = Bacillus swezeyi
  REGION 1..300: note = tr|A0A5D4QB11|A0A5D4QB11_9BACI GTP cyclohydrolase FolE2 OS=Bacillus swezeyi OX=1925020 GN=folE2 PE=3 SV=1
MKHELHLPAKPERHRRFGSVEAIKGTKPTDKENMSDLQNMPNDYFFDIDHVGVSNVSHPIQIESSAIPHTQTTIGSFSFTTNLGKSRKGINMSRLTEQLQRYYEKNWTVDLNTLKDFTKELADNMEQQNAAVSVSFPWYFQRRSPETELPGLMHADIHMKVSYKENTGWAQTVGMTSRVTTLCPCSKEISEYSAHNQRGIISITAHIHDKAEMPDDFKTELLAAAETNASAKLHPVLKRPDEKRVTEQAYENPRFVEDIIRLTAADLYEMDWISAFDIECRNEESIHMHDAVARLSFSKN

SEQ ID NO: 5135 - protein, 190 aa, unidentified
  source 1..190: note = Bacillus swezeyi
  REGION 1..190: note = tr|A0A1R1S2T6|A0A1R1S2T6_9BACI GTP cyclohydrolase 1; OS = Bacillus swezeyi OX=1925020 GN=folE PE=3 SV=1
MREINKEQIEQAVRQILEAIGEDPNREGLLDTPKRVAKMYAEVFAGLNEDPKEHFKTIFGEDHEELVLVKDIPFYSMCEHHLVPFYGKAHVAYIPKGGKVTGLSKLARAVEAVAKRPQLQERITSTIADSIVETLTPHGVMVVVEAEHMCMTMRGVKKPGAKTVTSAVRGTFRQDVAARSEVLELIKYHD

SEQ ID NO: 5136 - protein, 188 aa, Bacillus taeanensis
  REGION 1..188: note = tr|A0A366XWK7|A0A366XWK7_9BACI GTP cyclohydrolase 1; OS = Bacillus taeanensis OX=273032 GN=folE PE=3 SV=1
MSNINHEKIQEAVKMIIEAIGDDPNREGLLDTPKRVARMYEEVFRGLNEDPKEHFQTIFGEDHEELVLVKDIPFYSMCEHHLVPFFGKAHVAYIPKGGKVTGLSKLARAVEAVSRRPQLQERITSTIADSLVETLKPHGVMVVVEAEHMCMTMRGVKKPGSKTITSAVRGVLEKDASARAEVLSLIKH

SEQ ID NO: 5137 - protein, 190 aa, Bacillus tequilensis
  REGION 1..190: note = tr|A0A2X0ZIY3|A0A2X0ZIY3_9BACI GTP cyclohydrolase 1; OS = Bacillus tequilensis OX=227866 GN=folEA PE=3 SV=1
MKEVNKEQIEQAVRQILEAIGEDPNREGLLDTPKRVAKMYAEVFSGLNEDPKEHFQTVFGENHEELVLVKDIAFHSMCEHHLVPFYGKAHVAYIPRGGKVTGLSKLARAVEAVAKRPQLQERITSTIAESIVETLDPHGVMVVVEAEHMCMTMRGVRKPGAKTVTSAVRGVFKDDAAARAEVLEHIKRQD

SEQ ID NO: 5138 - protein, 188 aa, unidentified
  source 1..188: note = Bacillus terrae
  REGION 1..188: note = tr|A0A429X4D7|A0A429X4D7_9BACI GTP cyclohydrolase 1; OS = Bacillus terrae OX=1914933 GN=folE PE=3 SV=1
MGNFDRKQIEEAVRMILDAIGENPNREGLLDTPKRVAKMYEEIFSGINTDPEQYFETIFGEDHEELVLVKDIPFYSLCEHHLVPFFGKAHVAYIPRNGRVTGLSKLARAVEAVARRPQLQERITSTVADAIMKKLEPHGVMVIIEAEHMCMTMRGVKKPGSKTVTSAVRGIFLKDSQSRNEVLTLIKQ

SEQ ID NO: 5139 - protein, 211 aa, unidentified
  source 1..211: note = Bacillus terrae
  REGION 1..211: note = tr|A0A429X3U4|A0A429X3U4_9BACI GTP cyclohydrolase 1; OS = Bacillus terrae OX=1914933 GN=folE PE=3 SV=1
MPADIKLISEKLPDLFSGDTDDIARKIDKSQDYMEGVRNLIELCGDDPNREGLEETPFRVLKAFLEYTEGYKENPAVHLKKTFDVQHKELVLVKNIEFYSMCEHHFAPFFGVAHVGYMPDTKITGLSKIGRMVEGYAKRFQVQERLTNEIADAITDILEPQGTMVVVEAKHMCMCGRGIKKSNSSTTTTAVRGLFEERSDARMEFLSLINR

SEQ ID NO: 5140 - protein, 187 aa, Bacillus thermoamylovorans
  REGION 1..187: note = tr|A0A0D0F0N3|A0A0D0F0N3_9BACI GTP cyclohydrolase 1; OS = Bacillus thermoamylovorans OX=35841 GN=folE PE=3 SV=1
MKEMNLEQIEKGVRLILEGIGEDPNREGLLDTPKRVAKMYAEMFHGLNIDPREYFNTVFHEETEELVLVKDIPFYSMCEHHLVPFFGHVHVAYIPRNGKITGLSKLARAVEAVAKRPQLQERITRLVADSIMEKLDPLGVMVIVEAEHMCMTMRGVKKPGSKTVTTVARGCFDTDAEKRKEVLSLIK

SEQ ID NO: 5141 - protein, 187 aa, Bacillus thermoamylovorans; identical to SEQ ID NO: 5037
  REGION 1..187: note = tr|A0A090IW37|A0A090IW37_9BACI GTP cyclohydrolase 1; OS = Bacillus thermoamylovorans OX=35841 GN=folE PE=3 SV=1

SEQ ID NO: 5142 - protein, 187 aa, unidentified
  source 1..187: note = Bacillus thermocopriae
  REGION 1..187: note = tr|A0A410XK18|A0A410XK18_9BACI GTP cyclohydrolase 1; OS = Bacillus thermocopriae OX=1215031 GN=folE PE=3 SV=1
MQQMNVQQIEQAVRLILEAIGEDPNREGLLDTPKRVAKMYAEVFSGLTEDPKVHLQTVFSEDHEELVLVKDIPFYSMCEHHLVPFFGVAHVAYIPRGGKVTGLSKLARTVETVARRPQLQERITATVADAIMETLEPHGVMVVVEAEHMCMTMRGVKKPGAKTVTTAVRGTFATDDKARSEILALIK

SEQ ID NO: 5143 - protein, 187 aa, unidentified
  source 1..187: note = Bacillus thermozeamaize
  REGION 1..187: note = tr|A0A1Y3PQU6|A0A1Y3PQU6_9BACI GTP cyclohydrolase 1; OS = Bacillus thermozeamaize OX=230954 GN=folE PE=3 SV=1
MPIDQQKIRQAVRMILEAIGEDPEREGLVETPDRVARMYAEVFSGMQEDPEEYFKVIFSEDHEELVLVKDIPFYSICEHHLVPFYGVAHVGYIPKGGRVVGLSKLARAVEAVAKRPQLQERITSTVADAIVNALQPHGVVVVIEAEHMCMTMRGVKKPGAKTVTSAVRGIFATDPMARAEAFQLIRS

SEQ ID NO: 5144 - protein, 189 aa, Bacillus thuringiensis; identical to SEQ ID NO: 4953
  REGION 1..189: note = sp|Q6HL44|GCH1_BACHK GTP cyclohydrolase 1; OS = Bacillus thuringiensis subsp. konkukian (strain 97-27); OX = 281309 GN=folE PE=3 SV=1

SEQ ID NO: 5145 - protein, 189 aa, Bacillus thuringiensis; identical to SEQ ID NO: 4953
  REGION 1..189: note = tr|A0A0K0S5A9|A0A0K0S5A9_BACT3 GTP cyclohydrolase 1; OS = Bacillus thuringiensis subsp. indiana OX=180850 GN=folE; PE = 3 SV=1

SEQ ID NO: 5146 - protein, 188 aa, unidentified
  source 1..188: note = Bacillus timonensis
  REGION 1..188: note = tr|A0A4V3V717|A0A4V3V717_9BACI GTP cyclohydrolase 1; OS = Bacillus timonensis OX=1033734 GN=folE PE=3 SV=1
MANINCNKIEEAVRLILQAVGEDPNREGLLETPKRVAKMYEEVFSGLTIDPKEYFETIFSEDHEELVLVKDIPFYSMCEHHLVPFYGTAHVAYIPRNGRVAGLSKLARAVESVSRRPQLQERITSTVADTIMDTLEPHGVMVVVEAEHMCMTMRGVKKPGTKTITSAVRGVFVKDGNARSEILSYINN

SEQ ID NO: 5147 - protein, 189 aa, unidentified
  source 1..189: note = Bacillus timonensis
  REGION 1..189: note = tr|A0A4S3PNA7|A0A4S3PNA7_9BACI GTP cyclohydrolase 1; OS = Bacillus timonensis OX=1033734 GN=folE PE=3 SV=1
MTVELKNSLIEDHIRSILAIIGEDPTREGLLDTPKRVAKMFGEVFEGVGIDPETALTTTFEENYDGIVIVKDITYYTFCEHHLIPFFGKAHIGYIPNGRVVGLSKFARLVELVAKRPQVQERMTQQIASAVMNVLQPEGVIVSVEGQHLCMCARGIKKPGSSTVTTVKKGAFKENEALVEEFERALLRD

SEQ ID NO: 5148 - protein, 195 aa, unidentified
  source 1..195: note = Bacillus toyonensis
  REGION 1..195: note = tr|A0A4Q9YB20|A0A4Q9YB20_9BACI GTP cyclohydrolase 1; OS = Bacillus toyonensis OX=155322 GN=folE PE=3 SV=1
MSLKTIQSVEIDTDKIEVAVKMILEAIGEDINREGILETPKRVAKMYKEVFQGLGQNPSEHLLKIFNENHEELVLVKEIPFYSMCEHHLVPFFGIANIGYIPNNGKVTGLSKLARALETICKRPQLQERITNELANVIFETLEPKGVIVVIEAEHMCMTMRGVKKPGSMTITSSYKGIFKDNSTLRSETLNLIER

SEQ ID NO: 5149 - protein, 189 aa, unidentified; identical to SEQ ID NO: 5063
  source 1..189: note = Bacillus toyonensis
  REGION 1..189: note = tr|A0A420GIT8|A0A420GIT8_9BACI GTP cyclohydrolase 1; OS = Bacillus toyonensis OX=155322 GN=folE PE=3 SV=1

SEQ ID NO: 5150 - protein, 189 aa, unidentified; identical to SEQ ID NO: 4953
  source 1..189: note = Bacillus tropicus
  REGION 1..189: note = tr|A0A4Y6ER83|A0A4Y6ER83_9BACI GTP cyclohydrolase 1; OS = Bacillus tropicus OX=2026188 GN=folE PE=3 SV=1

SEQ ID NO: 5151 - protein, 301 aa, Bacillus trypoxylicola
  REGION 1..301: note = tr|A0A162ENW7|A0A162ENW7_9BACI GTP cyclohydrolase FolE2 OS=Bacillus trypoxylicola OX=519424 GN=folE2 PE=3; SV = 1
MRAIHLPSQSKRHEHFGSTGPIKGEKPLKKSEMTDLQSMEKDYFFHINQVGVEKLHYPMLIHSSIEPKVQQTFGNFKISTSLPSHQKGINMSRIPETLHQYYSEGAILNQKLLRRFSKQLAQKMEQSEVYMKVSYPWFFTRSSPVSNFEGLVEAKIWLETKFAQDTWHEKVGLQAMITTLCPCSKEISEYSAHNQRGIVNVEVESAEGELCSEHFKEELLEVIESNASARIHSILKRPDEKKVTETAFENPRFVEDLIRLIAASLVELEWVSKFTITCNNEESIHQHDAYASLTYKKDHFN

SEQ ID NO: 5152 - protein, 188 aa, Bacillus trypoxylicola
  REGION 1..188: note = tr|A0A162EGU3|A0A162EGU3_9BACI GTP cyclohydrolase 1; OS = Bacillus trypoxylicola OX=519424 GN=folE PE=3 SV=1
MQSVDYKKIQEAVTMILEAIGEDPTREGLEDTPKRVAKMYAEVFQGLNEDPKEHFKTIFGEDHEELVLVKDIPFFSMCEHHLVPFFGHAHIGYIPRGGKVTGLSKLARAVEAVARRPQLQERITATIADSMIESLDPHGVIVVIEAEHMCMTMRGVKKPGAKTVTSAVRGVYAEDAQLRAEVISHIKG

SEQ ID NO: 5153 - protein, 192 aa, unidentified
  source 1..192: note = Bacillus urumqiensis
  REGION 1..192: note = tr|A0A2P6MKJ6|A0A2P6MKJ6_9BACI GTP cyclohydrolase 1; OS = Bacillus urumqiensis OX=1548213 GN=folE PE=3 SV=1
MSQVNHDKIQQAVTMILEAIGEDPSREGLQDTPQRVARMYEEVFQGLHQDPKEHFKTVFGEDHEELVLVKDIPFYSMCEHHLVPFFGKAHIGYLPQGGKVTGLSKLARAVEAVTKRPQLQERITSTIADSMVETLDPRGVMVIVEAEHMCMTMRGVKKPGSSTVTSAVRGAFRTDEAARAEVLSLIRSQGAS

SEQ ID NO: 5154 - protein, 190 aa, Bacillus vallismortis; identical to SEQ ID NO: 4957
  REGION 1..190: note = tr|A0A1W6HJ90|A0A1W6HJ90_BACVA GTP cyclohydrolase 1; OS = Bacillus vallismortis OX=72361 GN=folE PE=3 SV=1

SEQ ID NO: 5155 - protein, 304 aa, Bacillus vallismortis
  REGION 1..304: note = tr|A0A410WLA9|A0A410WLA9_BACVA GTP cyclohydrolase FolE2 OS=Bacillus vallismortis OX=72361 GN=folE2 PE=3 SV=1
MNQHTLLPEKPERLQYFGSVSPLKGDKPVEKEKMTDLQNIRKDYFFDIQHVGVANVSHPVTITSAMAPAKQTTAANFTMTCDLRRNQKGINMSRLTDLLQAYHQNGWILSFSTLQQFTKDLAENMGQSSASVEVRFPWFFERKSPKLEKAGLMHADIWMSVTYREDQPFEQRAGISAKVTTLCPCSKEISEYSAHNQRGTVSIWADIHPAASLPSDVKADLLHAAESNASARLHPVLKRPDEKAVTETAYENPRFVEDLIRLIAADLYELEWVTAFEIECRNEESIHLHDAYAKLRFSKQEDRI

SEQ ID NO: 5156 - protein, 190 aa, unidentified; identical to SEQ ID NO: 4957
  source 1..190: note = Bacillus velezensis
  REGION 1..190: note = sp|A7Z630|GCH1_BACVZ GTP cyclohydrolase 1; OS = Bacillus velezensis (strain DSM 23117 / BGSC 10A6 / FZB42) OX=326423 GN=folE PE=3 SV=1

SEQ ID NO: 5157 - protein, 190 aa, unidentified; identical to SEQ ID NO: 4957
  source 1..190: note = Bacillus velezensis
  REGION 1..190: note = tr|S6FHJ7|S6FHJ7_9BACI GTP cyclohydrolase 1; OS = Bacillus velezensis UCMB5033 OX=1338518 GN=folEA PE=3; SV = 1

SEQ ID NO: 5158 - protein, 188 aa, Bacillus vietnamensis
  REGION 1..188: note = tr|A0A0P6W1S6|A0A0P6W1S6_9BACI GTP cyclohydrolase 1; OS = Bacillus vietnamensis OX=218284 GN=folE PE=3 SV=1
MAQVNHGQIEEAVRLILEAIGENPNREGLLDTPKRVAKMYAEVFSGLDHDPKEYFETIFSEEHEELVLVKDIPFYSMCEHHLVPFFGKAHVAYIPRDGKVAGLSKLARAVESVAKRPQLQERITSTVADTIMETLLPHGAMVVVEAEHMCMTMRGVKKPGSSTVTTAVRGTFKEDAQARSEVLSFIKN

SEQ ID NO: 5159 - protein, 212 aa, Bacillus vietnamensis
  REGION 1..212: note = tr|A0A5D4NXD7|A0A5D4NXD7_9BACI GTP cyclohydrolase 1; OS = Bacillus vietnamensis OX=218284 GN=folE PE=3 SV=1
MLMTEDQFMLQKLQDLFKGTSGDIDRDIIKAQQYMDGIKNLIEICGDDPDRDGLQETPFRVLKAFLEYTEGYREDPKTHLEKVFDVDHKELVMVKDIEFHSMCEHHFAPFFGVAHVGYVPDKKITGLSKIGRLVEGYAKRFQVQERLTNEIAQAVEEVLEPQGVMVVVEAKHMCMCGRGIKKSTASTTTTAVRGIYSEKTENRMEFLSLLNR

SEQ ID NO: 5160 - protein, 188 aa, Bacillus vireti
  REGION 1..188: note = tr|W1SBA0|W1SBA0_9BACI GTP cyclohydrolase 1; OS = Bacillus vireti LMG 21834 OX=1131730 GN=folE PE=3 SV=1
MSEVNRAQIEEAVRLILEAIGEDPNREGLLDTPKRVAKMYEEVFSGLNEDPKQHFETIFSEDHEELVLVKDIPFYSMCEHHLVPFFGKAHVAYIPQNGRVTGLSKLARAVEAVAKRPQLQERITSTIADSMMDKLDPHGVMVVVEAEHMCMTMRGVKKPGSKTVTTAVRGVLADDAIARSEVLSLIKY

SEQ ID NO: 5161 - protein, 294 aa, Bacillus wakoensis
  REGION 1..294: note = tr|W4PYM2|W4PYM2_9BACI GTP cyclohydrolase FolE2; OS = Bacillus wakoensis JCM 9140 OX=1236970 GN=folE2 PE=3; SV = 1
MKRSLPPKAERHRHFGTVDPIIGTKPTDKEKMPDLQNKPDDFYFPIQQVGISEVKYPVMIESELAPTTQTTTATFALTTSLDQNFKGINMSRLTEQLHLFFQSHLLTDQTLREFTAILAREMKQRAANVRVTFPWFFTKTSPAMEKEGMAHADVTYDVTFDEDKGYTSIITLTGAVTTLCPCSKEISEYSAHNQRSFVTMTVTVDDAYEADWKTVLLEAAESNASSILFPVLKRPDEKAVTERAYENPRFVEDLVRLVAADLYEHEAIRSFEVQCRNEESIHQHDAIAKLSYTK

SEQ ID NO: 5162 - protein, 189 aa, unidentified
  source 1..189: note = Bacillus weihaiensis
  REGION 1..189: note = tr|A0A1L3MQH0|A0A1L3MQH0_9BACI GTP cyclohydrolase 1; OS = Bacillus weihaiensis OX=1547283 GN=folE PE=3 SV=1
MGQVNHEQIEHAVRLILEAIGEDPTREGLVDTPKRVAKMYAEVFSGLNEEPSEYFQTVFGEDHEELVLVKDIPFYSMCEHHLVPFFGKAHVAYIPKGGKVTGLSKLARAVEAVAKRPQLQERITSTIADSISHSLHPHGVMVVVEAEHMCMTMRGVKKPGARTITSAVRGVFQKDDASRQEVLALIKGF

SEQ ID NO: 5163 - protein, 300 aa, unidentified
  source 1..300: note = Bacillus weihaiensis
  REGION 1..300: note = tr|A0A1L3MNT3|A0A1L3MNT3_9BACI GTP cyclohydrolase FolE2 OS=Bacillus weihaiensis OX=1547283 GN=folE2 PE=3 SV=1
MSKKINLPPKKERHRLFGSVEPGVKLKPTEKDKMPDLQNSKKDFLFTIDAVGISNVKHPVIIESSLNPAQQTTIATFKMTSKISHDAKGTNMSRFTEQLEKYRQDGGFVISTQNLYDFTKELAARLKQKDASIELTFPWFYERKGPSSELVGLNHAEASISVTYDEEAGFRTTASLTCAVTTLCPCSKEISEYSAHNQRGFITMEVELSEDYQEQVDWKAALLEAAETNASAMIHPVLKRPDEKMVTETAYENPRFVEDMVRLVAADLYELDFVQAFTVKCRNEESIHLHDAIASLSYRK

SEQ ID NO: 5164 - protein, 189 aa, unidentified
  source 1..189: note = Bacillus wiedmannii
  REGION 1..189: note = tr|A0A2B5P8A2|A0A2B5P8A2_9BACI GTP cyclohydrolase 1; OS = Bacillus wiedmannii OX=1890302 GN=folE PE=3 SV=1
MAKVNLEQIEYAVRLILEAIGDDPNREGVLDTPKRVAKMYAEVFAGMHEDPKEHLHKVFGEDHEELVLVKDIPFYSMCEHHLVPFYGVAHVAYIPQGGKVTGLSKLARTVDTIARRPQLQERITSTVANSIMEVLEPHGVMVVVEAEHMCMTMRGVKKPGAKTVTTAVRGVLENDAAARSEILSFIKTK

SEQ ID NO: 5165 - protein, 189 aa, unidentified
  source 1..189: note = Bacillus wiedmannii
  REGION 1..189: note = tr|A0A4U2NKD2|A0A4U2NKD2_9BACI GTP cyclohydrolase 1; OS = Bacillus wiedmannii OX=1890302 GN=folE PE=3 SV=1
MAKVNLEQIEHAVRLILEAIGDDPNREGVLDTPKRVAKMYAEVFAGMHEDPKEHLHKVFGEDHEELVLVKDIPFYSMCEHHLVPFYGVAHVAYIPQGGKVTGLSKLARTVDTIARRPQLQERITSTVANAIMEVLEPHGVMVVVEAEHMCMTMRGVKKPGAKTVTTAVRGVLENDAAARSEILSFIKTK

SEQ ID NO: 5166 - protein, 188 aa, unidentified
  source 1..188: note = Bacillus wudalianchiensis
  REGION 1..188: note = tr|A0A1B9B9I4|A0A1B9B9I4_9BACI GTP cyclohydrolase 1; OS = Bacillus wudalianchiensis OX=1743143 GN=folE PE=3 SV=1
MAEVNRAQIEEAVRMILEAVGEDPNREGLLDTPKRVAKMYEEIFSGLNKDPKEYFETIFGEDYEELVLVKDIPFYSLCEHHLVPFFGHAHVAYLPKNGKVTGLSKLARAVETVARRPQLQERITAEVADAIMEKLQPHGVMVVIEAEHMCMAMRGVKKPGAKTVTTAARGKYANDVHLRSELLNLIKG

SEQ ID NO: 5167 - protein, 189 aa, unidentified
  source 1..189: note = Bacillus xiamenensis
  REGION 1..189: note = tr|K2N591|K2N591_9BACI GTP cyclohydrolase 1; OS = Bacillus xiamenensis OX=1178537 GN=folE PE=3 SV=1
MSDDLRMGLLEDQIRNMLELLGEDPTREGLRDTPKRVAKMYKEVFEGIGVDPETALTTTFEEEYEGMVVVKDINYYTFCEHHLIPFFGKAHIGYIPKGRVVGLSKFARLVELISKRPQVQERMTQQMANAIMNVLQPEGVIVSVEGQHLCMCARGVKKPGSSTVTTIKKGLFKEQQSLVHEFEQALIRD

SEQ ID NO: 5168 - protein, 189 aa, unidentified
  source 1..189: note = Bacillus xiamenensis
  REGION 1..189: note = tr|K2MLT9|K2MLT9_9BACI GTP cyclohydrolase 1; OS = Bacillus xiamenensis OX=1178537 GN=folE PE=3 SV=1
MSEINKERIERAVRDILEAIGEDPDREGLLDTPKRVAKMYEEVFSGLNEDPKEHFKTIFGEDHEELVLVKDIAFHSMCEHHLVPFYGKAHVAYIPRGGKVTGLSKLARAVEAVAKRPQLQERITSTIADSMVETLNPHGVMIVVEAEHMCMTMRGVKKPGAKTVTSAVRGTFANDAAARAEVLSFIKND

SEQ ID NO: 5169 - protein, 188 aa, unidentified
  source 1..188: note = Bacillus zeae
  REGION 1..188: note = tr|A0A398BEQ3|A0A398BEQ3_9BACI GTP cyclohydrolase 1; OS = Bacillus zeae OX=1917180 GN=folE PE=3 SV=1
MAEFNRAQIEEAVRLILGAVGEDPNREGLLDTPKRVARMYEEVFAGLNQDPKEYFETIFGEDHEELVLVKDIPFYSMCEHHLVPFFGVAHVAYIPKGGKVTGLSKLARAVEAVAKRPQLQERITSTIADSIMEKLQPYGTMVVIEAEHMCMTMRGVKKPGSKTVTSAVRGTLAEDVNARSEILTLIKG

SEQ ID NO: 5170 - protein, 189 aa, unidentified
  source 1..189: note = Bacillus zhangzhouensis
  REGION 1..189: note = tr|A0A081LDI9|A0A081LDI9_9BACI GTP cyclohydrolase 1; OS = Bacillus zhangzhouensis OX=1178540 GN=folE PE=3 SV=1
MSEINKQLIEHAVRDILKAIGEDPDREGLLDTPKRVAKMYEEVFSGLNEDPKEHFKTIFGEDHEELVLVKDIAFHSMCEHHLVPFYGKAHVAYIPRGGKVTGLSKLARAVEAVAKRPQLQERITSTIADSMVETLNPHGVMIVVEAEHMCMTMRGVKKPGAKTVTSAVRGTFANDAAARAEVLSFIKND

SEQ ID NO: 5171 - protein, 298 aa, unidentified
  source 1..298: note = Bacillus zhangzhouensis
  REGION 1..298: note = tr|A0A081LC87|A0A081LC87_9BACI GTP cyclohydrolase FolE2 OS=Bacillus zhangzhouensis OX=1178540 GN=folE2 PE=3; SV = 1
MLSFKPKKERHQLFGSVPPTLGTKPCQKEDMMDIQKTEQDFYFHLEQVGICRVSYPVHIVSKTTPQTQTTSAVFALSTYLPAHQKGIHMSRLTEQLHSFYESGKPLDMNSLRELTAQLAKQMNQPSASVQVSFPWFIEKKSPVSGTSGLMHATVQYDIHFHEKNGWTCHVGCTAQVTTLCPCSKEISEYGAHNQRGSVSIQVELFEQALLPDDMKAVLLHIIESNASASLYPVLKRPDEKKVTEEAYENPRFVEDVARLIAVELYEQQWIRGFQVECRNEESIHQHDAYAKCSYQKKL

SEQ ID NO: 5172 - protein, 221 aa, unidentified
  source 1..221: note = Unknown
  REGION 1..221: note = tr|A0A0J8YU83|A0A0J8YU83_9GAMM GTP cyclohydrolase 1; OS = bacteria symbiont BFo2 of Frankliniella occidentalis; OX = 1628856 GN=folE PE=3 SV=1
MSELSQEAMLVHDALLARGLETPLNAPVNSQDSQQRKQKIAEHMREVMLLLNLDLTDDSLMETPNRLAKMYVDEIFSGLDYANFPKITVIENKMNVDEMVTVRDITLTSTCEHHFVTIDGKATVAYIPKDKVIGLSKINRIVQFFAERPQVQERLTQQVLVALQTLLGTNNVAVCIDAVHYCVKARGVKDATSATTTTSLGGLFKSSQNTRQEFLRTIRNN

SEQ ID NO: 5173 - protein, 221 aa, unidentified
  source 1..221: note = Unknown
  REGION 1..221: note = tr|A0A0J8YN34|A0A0J8YN34_9GAMM GTP cyclohydrolase 1; OS = bacteria symbiont BFo1 of Frankliniella occidentalis; OX = 1628855 GN=folE PE=3 SV=1
MATLSQEATLVHEALLARGLETPLRSPVRDMDDDTRKALIAGHMTEIMQLLNLDLEDDSLAETPQRIAKMYVNEVFSGLDYANFPKITLIENKMKVDEMVTVRDITLTSTCEHHFVIIDGQATVAYIPKDKVIGLSKINRIVQFFSSRPQVQERLTQQILLALQTLLGTNNVAVSIDAVHYCVKARGIRDATSATTTTSLGGLFKSSQNTRQEFLRSVRHR

SEQ ID NO: 5174 - protein, 207 aa, unidentified
  source 1..207: note = Bacteriodetes bacterium
  REGION 1..207: note = tr|A0A521WKI8|A0A521WKI8_9BACT GTP cyclohydrolase 1; OS = Bacteriodetes bacterium OX=2507565 GN=folE PE=3 SV=1
MKHQLTTRSTGDRMRKKNLNKKDELEILISKLLSLIGEDSSREGLLKTPERVARSWRFLTKGYQEQVDEILNKAIFKEKYDEMVIVKDIDFFSMCEHHLLPFYGRAHIAYIPNGKIVGLSKIPRIVEIFSRRLQVQERMTQQIAETLFNALEPDGVGVVIEAKHLCMVMRGVEKQNSVATTSAMLGSFRDDERTRVEFLKLLNTKLL

SEQ ID NO: 5175 - protein, 200 aa, unidentified
  source 1..200: note = Bacteriodetes bacterium
  REGION 1..200: note = tr|A0A522F5D9|A0A522F5D9_9BACT GTP cyclohydrolase 1; OS = Bacteriodetes bacterium OX=2507565 GN=folE PE=3 SV=1
MSNYKKIDEYDQKITQKLSEHYKGILKLSGDDIDREGVLKTPERAAKAMQFLTHGNCINPADILKSAIFKEEYKQMVLIKDIEVYSLCEHHLLPFFGKAHIAYIPNGKIVGLSKIPRVVDAFARRLQVQERLTTQIRDCIQETLNPLGVAVVIEAKHLCMLMRGVQKQNSVATTSAFTGEFLENSKTRDEFIQLVSGKLH

SEQ ID NO: 5176 - protein, 184 aa, unidentified
  source 1..184: note = Bacterioplanes sanyensis
  REGION 1..184: note = tr|A0A222FLH7|A0A222FLH7_9GAMM GTP cyclohydrolase 1; OS = Bacterioplanes sanyensis OX=1249553 GN=folE PE=3 SV=1
MSKLESLYHDVLSELGEDVEREGLLDTPKRAAKAMQFLTSGYDMDLQEVVNGAVFTSDNDEMVVVQGIEFYSLCEHHTLPFLGRCHIGYLPSGKVLGLSKFARIVDMFARRLQIQENMTKQIADAVIEATDCRGVGVIVEAQHMCMMMRGVQKQNSMMRTSVMRGAFREDQATRQEFMGLIDKA

SEQ ID NO: 5177 - protein, 216 aa, Bacteriovorax stolpii
  REGION 1..216: note = tr|A0A2K9NU54|A0A2K9NU54_9PROT GTP cyclohydrolase 1; OS = Bacteriovorax stolpii OX=960 GN=folE PE=3 SV=1
MIDPKKILKKVTPTPMIANDLTAAEKKEKITALFTEIMETLGLDLNDDSLKETPHRVAKMYVDEVFYGLESSSFPKITVVDNKFEYDHPVMEINIVTNSHCEHHFVPIIGKTHIAYIPNKKVLGLSKLNRIVDYFAKRPQIQERLTLQIHQALVEILETQNVAVVTDAMHACVKTRGIKDVTSMTRTSKLSGVFLQDSSHRAEFMSAIPRVQEVIY

SEQ ID NO: 5178 - protein, 191 aa, unidentified
  source 1..191: note = Unknown
  REGION 1..191: note = tr|A0A539D0A1|A0A539D0A1_9BACT GTP cyclohydrolase 1; OS = bacterium OX=1869227 GN=folE PE=3 SV=1
MTKPPVSQSDAEAAVRTLIEWAGDNPDREGLLDTPARVVRSYKELFAGYEVEPRAYLERTFEEVGGYNQLVVLKDIRFVSFCEHHMLPVVGVAHVGYLPTDRVVGISKLARVVRGFARRLQIQEKMTSEIANAIDEVLKPQGVGVVIEAEHSCMTLRGVDVPGASLTTSALLGVVRDDARTREEFLRLVRG

SEQ ID NO: 5179 - protein, 189 aa, unidentified
  source 1..189: note = Unknown
  REGION 1..189: note = tr|A0A520WG03|A0A520WG03_9BACT GTP cyclohydrolase 1; OS = bacterium OX=1869227 GN=folE PE=3 SV=1
MKPNQKLEELTQKLLVEIGEDPNREGLERTPVRVSKAWQYFSKGYTQDLDKIVNKAIFNESSRDMVVVRDVEFFSLCEHHLLPFFGKAHVGYIPDGRVIGLSKIPRIIDMFSRRLQVQERLTNQIAEAVHTVLKPVGVAIVMEGRHMCMQMRGVEKQNSLATTSTMLGKFRESVRTRNEFMSLINRYST

SEQ ID NO: 5180 - protein, 186 aa, unidentified
  source 1..186: note = Unknown
  REGION 1..186: note = tr|A0A532UEB1|A0A532UEB1_9BACT GTP cyclohydrolase 1; OS = bacterium (candidate division B38) B3_B38 OX=2012999; GN = folE PE=3 SV=1
MYMDLEKIERGMRLILEGIGEDPNRPGLVDTPRRYARMCQEIFGGLEQDPAPLMTVVPGESHDEMVIIKKLPLYSVCEHHLLPFIGEAHIAYIPDGGRIVGLSKLARVLEILSRRPQIQERLTTQMAGLVNETLKPMGVMVVIEAEHLCMSMRGVKRPHSKVVTSALQGVFRKNRVTRQEALELFK

SEQ ID NO: 5181 - protein, 187 aa, unidentified
  source 1..187: note = Unknown
  REGION 1..187: note = tr|A0A532TZV4|A0A532TZV4_9BACT GTP cyclohydrolase 1; OS = bacterium (candidate division B38) B3_B38 OX=2012999; GN = folE PE=3 SV=1
MFDESKIRAAVVSMIEAIGENPEREGLVDTPGRVAEMYAELFMGLEVDPRKELQVGYELGHREMVVVRDIPFYSMCEHHLLPFYGVAHIGYIPSADGRVVGISKLARVVEIIAKRPQIQERMTTEIADAIMDGLKPDGVAVVIQAEHLCMIMRGIKKQGSSIITSALRGTFRSKTETRTEFFSLLHG

SEQ ID NO: 5182 - protein, 162 aa, unidentified
  source 1..162: note = Unknown
  REGION 1..162: note = tr|A0A2M7M3P8|A0A2M7M3P8_9BACT GTP cyclohydrolase 1 (Fragment) OS=bacterium (Candidatus Ratteibacteria) CG_4_10_14_3_um_filter_41_18 OX=2014287 GN=folE PE=3 SV=1
EGLKQTPERVARMAEELFSGPGRNPREELKPIFREDYDELVLIRDIPIFSICEHHLLPFMGKAHIAYIPEKNRVVGLSKLIRVIDIFAKRLQLQERLTTQIANTIMKILKPKGVLVIIEAEHLCLTMRGVKKPGSFTVTSAVRGIFLRDIRTRNEAMSLINK

SEQ ID NO: 5183 - protein, 189 aa, unidentified
  source 1..189: note = Unknown
  REGION 1..189: note = tr|A0A2G9YAM5|A0A2G9YAM5_9BACT GTP cyclohydrolase 1 (Fragment) OS=bacterium (Candidatus Ratteibacteria) CG23_combo_of_CG06-09_8_20_14_all_48_7 OX=2014292 GN=folE; PE = 3 SV=1
MDKKKIMRAVRLFLEGIGENPARPELVETPRRIANMAEELFAGIDKKPETALEVVFIEEYNELVLVRDIPLYSMCEHHLLPFLGKAHIAYIPDNHRITGLSKIARVVEILSRRLQLQERLTSQIADTIMKTLKPRGVMVVVEAEHLCMTMRGVKKPGSRATTSVMRGIFLDDARTRNEALNLIHKVPAL

SEQ ID NO: 5184 - protein, 199 aa, unidentified
  source 1..199: note = Unknown
  REGION 1..199: note = tr|A0A3A9A1T7|A0A3A9A1T7_9BACT GTP cyclohydrolase 1; OS = bacterium 0.1xD8-71 OX=2320099 GN=folE PE=3 SV=1
MVDQNKIKEAVKLLLEGIGEDAGREGLRETPDRIARMYGEIFAGMEEDAADHLSKTFPVDSNEIVVVKDITFYSVCEHHLMPFYGRAHIAYLPAGRVVGLSKLARTVEVFARRPQIQEQMTIQIVDAIMQHLHPQGAMVMLEAEHMCMTMRGVKKPGSKTVTVASRGCFQEDPKWQRLFFEIQQQQEGGNGNEDWTEGL

SEQ ID NO: 5185 - protein, 310 aa, unidentified
  source 1..310: note = Unknown
  REGION 1..310: note = tr|A0A3A9FV67|A0A3A9FV67_9BACT GTP cyclohydrolase FolE2 OS=bacterium 1XD42-44 OX=2320106 GN=folE2 PE=3 SV=1
MDHQTKAFPIKQLPSKEKRHQLFGSVKPAPRTKPVDKMHMADLQNTKKDFLFDLDAVGVTKVKNPIMIYSSLAPYTQTSIGQFTFTSSLKQTNKGTNMSRFMEQLAHYQKNGFSTELNVLKKFTKEIAKRVEQPDATLEVNFPWFFERQAPDTSLTGLNHADAGIRIEYHELKGFYIYLSLSVAITTLCPCSKEISEYSAHNQRGNVIMEISVSEDYQEENLDWKKILLEAAESNASARLHPILKRTDEKMVTEQAYENPRFVEDMVRLIAADLYETSFITKFKVTCQNEESIHLHDAIAAVTYDKTKDV

SEQ ID NO: 5186 - protein, 188 aa, unidentified
  source 1..188: note = Unknown
  REGION 1..188: note = tr|A0A3A9ELQ5|A0A3A9ELQ5_9BACT GTP cyclohydrolase 1; OS = bacterium 1XD42-8 OX=2320102 GN=folE PE=3 SV=1
MVNRQKVEEGVRLLLEGLGENLKREGLLETPSRIARMYEEIFGGTEEDPKDHLKKTFHLPNNELIVEKDIFFHSMCEHHMMPFFGKAHVAYIPDGKAVGLSKLARTVDTYAKRLQVQERMTAQIADALMEHLQPKGAAVFIEAEHMCMTMRGIKKPGSKTVTFVTRGEFVDNDILQRRFFLMVRRNEG

SEQ ID NO: 5187 - protein, 194 aa, unidentified
  source 1..194: note = Unknown
  REGION 1..194: note = tr|A0A3A8ZK68|A0A3A8ZK68_9BACT GTP cyclohydrolase 1; OS = bacterium 1xD42-87 OX=2320113 GN=folE PE=3 SV=1
MVDQTKIKEAVRLLLEGIGEDVDRAGLRETPDRIARMYGEIFAGMDEDAGEHLAKTFAVASNEIVLVKDITFYSICEHHLMPFYGKAHIAYLPDGKVVGLSKLARTVEVYARRPQIQEQMTIQIVEAVMEHLKPQGAIVMLEAEHLCMTMRGVEKPGSRTMTLASRGCFQEDPKWQALFFSMIGEKGYNQDLAK

SEQ ID NO: 5188 - protein, 191 aa, unidentified
  source 1..191: note = Unknown
  REGION 1..191: note = tr|A0A3A8YC25|A0A3A8YC25_9BACT GTP cyclohydrolase 1; OS = bacterium 1xD8-6 OX=2320116 GN=folE PE=3 SV=1
MAVDTEAIKEHIRGILIALGDDPDREGLKETPDRVARMYEEVFEGMNYSNHEIAQMFDKTFEDKMDFTDAGQDMVMVKDIEIFSYCEHHLALMYDMHVTVAYIPKGKVIGLSKIARIADMVGKRLQLQERIGADIAEILQEILGSEDVAVVIEGTHSCMTARGIKKGSASTKTYTLRGAFREDRFLQMRLG

SEQ ID NO: 5189 - protein, 185 aa, unidentified
  source 1..185: note = Unknown
  REGION 1..185: note = tr|A0A3A9F0R1|A0A3A9F0R1_9BACT GTP cyclohydrolase 1; OS = bacterium 1XD8-76 OX=2320115 GN=folE PE=3 SV=1
MVDQEKIKEAVKLLLEGIGEDGEREGLLETPDRIARMYGEICGGMEADAAEVLSKTFATEKTEMVLEKDIVFYSMCEHHMLPFFGKVHIAYIPDGKIAGLSKLARCVEIYAKRLQLQERMTEQIAEAVMKHLSARGVMVLTEAEHLCMTMRGVKKPGSRTVTYAVKGVFREDAQLQQNFFRMLER

SEQ ID NO: 5190 - protein, 184 aa, unidentified
  source 1..184: note = Unknown
  REGION 1..184: note = tr|A0A4Q2BQX8|A0A4Q2BQX8_9BACT GTP cyclohydrolase 1; OS = bacterium 1XD8-92 OX=2320884 GN=folE PE=3 SV=1
MVNREKIEEAIRLLLEGVGEDADREGLRETPERVARMYEELLAGMEADAGVHLSKTFEADNNEMVIEKDITFYSTCEHHLMPFFGKVHIAYIPDGQVVGLSKLARTVEVFAGRLQIQERMTVQIADAIMDSLKPKGVMVMAQAEHMCMTMRGVKKPGSCTVTIAARGEFERDEKLKDRFLMLVK

SEQ ID NO: 5191 - protein, 278 aa, unidentified
  source 1..278: note = Unknown
  REGION 1..278: note = tr|A0A0S4M0W1|A0A0S4M0W1_9BACT GTP cyclohydrolase FolE2 OS=bacterium 2013Arg42i OX=1561003 GN=folE2 PE=3 SV=1
MSSQIFEKMPDVMDKIDSRRLDIQRVGVRSVRRPISFEDRKGIIVPTIGNFGTYVRLDNRKRGTHMSRFIQLLEEIEEPLSVESFIPLVKSMIKRLESVEGVITVDFPFFLVKKAPITAIAGHMDYDVGLTGFVNKQGSRVQLTLRVPVSTLCPCSREISEYGAHNQRSSVRLTIQTNLHIWITDLIELIEKSASCDLFSVLKRPDEKFVTEYAYDNPKFVEDIVRDIARILTRDPRILFFEVESENFESIHNHSAYAYLRHGIPFKPLEESFTPHNH

SEQ ID NO: 5192 - protein, 234 aa, unidentified
  source 1..234: note = Unknown
  REGION 1..234: note = tr|A0A0M9DTD5|A0A0M9DTD5_9BACT GTP cyclohydrolase 1; OS = bacterium 336/3 OX=1664068 GN=folE PE=3 SV=1
MKQNETSLNTLPKNWTTEDLGDNHVATSLETPLREDAFELDDDLKIELIEKHFKEIMHILGLDLTDDSLSGTPHRVAKMYIKEIFSGLNPANKPKISLFENKYQYNQMLVEKDITFFSNCEHHFVPIVGKAHIAYISNGQVIGLSKLNRIVQYYAKRPQVQERLTMQIGKELQDILQTDNVAVVIDAKHLCVSSRGVQDVNSATITAFYEGKFKEEATKNEFLKYLSLGTEYGI

SEQ ID NO: 5193 - protein, 213 aa, unidentified
  source 1..213: note = Unknown
  REGION 1..213: note = tr|A0A1H8JJ98|A0A1H8JJ98_9BACT GTP cyclohydrolase 1; OS = bacterium A37T11 OX=1855384 GN=folE PE=3 SV=1
MNPINQNTPNHDEDMDGYIKIDRYNDEKINRIKEHYTDILQVLGEDPSREGLQKTPERVAKALQFLTHGYDLDPAAVLHTAMFKEDYSQMVVVKDIEVFSMCEHHMLPFFGKAHIAYIPNGYIVGLSKIPRVVDIYARRLQVQERLTNEIRDCIQETLKPAGVAVVIECKHLCMAMRGVQKQNSVTTTSAFTGEFANDKTRAEFLRLITASLH

SEQ ID NO: 5194 - protein, 255 aa, unidentified
  source 1..255: note = Unknown
  REGION 1..255: note = tr|A0A1V6C3C7|A0A1V6C3C7_9BACT Putative GTP cyclohydrolase 1 type 2 OS=bacterium ADurb.Bin132; OX = 1866923 GN=BWX90_01179 PE=4 SV=1
MGILPGQIAKWLNEALVVSQAANDSSVNGLQVDALEPVTKLGFAVDACMDAFTEAKDQGCQMLLCHHGLYWKGDDQRAIGLMGNRISYLVKNGISLWACHLPLDMHPEYGNNAGLATTLQIKNRKPFGFYHDLAIGFYGEVEANPTCSELVQRLNKDIPECKPWVWSFGKKSCKNIGVVSGGGSYAIEEAARLGLDCLVTGEVFHQDYHTAKELGVNVIVAGHWATETVGILSVGKAAATFFGLESVFINKPTGL

SEQ ID NO: 5195 - protein, 260 aa, unidentified
  source 1..260: note = Unknown
  REGION 1..260: note = tr|A0A1V6AF11|A0A1V6AF11_9BACT Putative GTP cyclohydrolase 1 type 2 OS=bacterium ADurb.Bin157; OX = 1866935 GN=BWY02_00140 PE=4 SV=1
MKKQIKVTREDIVKHLNMLFAEVMMPDYSYNGLQFEGKKEVKKIVSGVDANVEFFKEAAKRKADFALVHHGLFWKGGEWTKLDRINTAVVKILVQADLNLYAMHLPLDAHPVFGNNVMLAKLIGSEVTAPFGAGKSGAVGCLCKLTKPMKIADFKKLVEKNIGKVMVHLDFGKPTVQNIAIVSGGGSSYLTANEIYNGEVDVLLTGEVLHQNVGTCREREVHLVSAGHYNTEIWGVKELGKIVAEEFKLEYEFIDMPTGL

SEQ ID NO: 5196 - protein, 190 aa, unidentified
  source 1..190: note = Unknown
  REGION 1..190: note = tr|A0A1V5VB60|A0A1V5VB60_9BACT GTP cyclohydrolase 1; OS = bacterium ADurb.Bin236 OX=1866925 GN=folE PE=3 SV=1
MEKKNKKKIEKAIRDILEAIGEDPDRGELVETPARVAAMYEEIFAGMNCDPKEVLKVLPDDFFDEIIMVRDIPIYSMCEHHMLPFFGKAHIAYIPSDGRITGLSKLVRVTHMYSRRLQLQERLTNQIATAINEILQPKGVMVVIEAEHLCMAMRGVREAGTMTVTSSVKGAFRTHQKTRMETLALLRDKK

SEQ ID NO: 5197 - protein, 257 aa, unidentified
  source 1..257: note = Unknown
  REGION 1..257: note = tr|A0A1V5V4B8|A0A1V5V4B8_9BACT Putative GTP cyclohydrolase 1 type 2 OS=bacterium ADurb.Bin236; OX = 1866925 GN=ybgI PE=4 SV=1
MVKRDELINFINDCFGREFRANAKRKDNYVNGVQIRGRSEVNTVALGVSASLDFLKLCRKSGADLVIIHHGIGLDGLDHHISPLLKNRLRELIDGDMTLLAFHYMLDAHPVFGNNAQIIEKAGARIVAPFHDDWGFVGELPSPLTLDSVIATLSRVFGSEPTLFRNGPKRVRRIGTVSGGGAPRMSNVAEIIDSGVDLYVTGEAKEEIPAISKEININYAAFGHYNTEKFGVTALGDLIKKQYPALDVRFIDVPCAL

SEQ ID NO: 5198 - protein, 285 aa, unidentified
  source 1..285: note = Unknown
  REGION 1..285: note = tr|A0A1V5UHF2|A0A1V5UHF2_9BACT GTP cyclohydrolase FolE2 OS=bacterium ADurb.Bin243 OX=1866936 GN=folE2 PE=3; SV = 1
MNSEKKLKVKKIEKASKSSDFSALADVQSERDLRDMDIDKVGVSGLSYPVCVLDRNNEKQNTVASVSMYVDLPKHFRGTHMSRFVEILSEYRGLITMHNIDKILKRMIKKFEATSAHFQMNFNYFIEKTAPVSKVKSLMNYDCEFIGNYSAADGYDFVLGVKTPVNTLCPCSKEISPGAGAHNQRSFINIHVRFKKLAWIEDIAAVAENAASAPVFALLKRPDEKYITELAYTNPRFVEDVVRNVAKAFMEDDNITWFTVEAENYESIHAHNAYAIIKRDKRNKT

SEQ ID NO: 5199 - protein, 189 aa, unidentified
  source 1..189: note = Unknown
  REGION 1..189: note = tr|A0A1V5T260|A0A1V5T260_9BACT GTP cyclohydrolase 1; OS = bacterium ADurb.Bin270 OX=1866926 GN=folE PE=3 SV=1
MSSAGLKGIPMEKIIRDLLIAIGEDPDREGLLKTPGRVKHSLAFLMEGYLQDPRSLIMNSVFSDKHEEMILVKNIPLYSMCEHHLLPFFGHAHVGYLPNDKIVGISKIARMVDLFARRLQLQERLTNQIADTLMDVLQPKGVAVVVEAEHLCMQMRGVQKRGTSVITSAMHGAFRRRPETRSEFMNLIK

SEQ ID NO: 5200 - protein, 244 aa, unidentified
  source 1..244: note = Unknown
  REGION 1..244: note = tr|A0A1V5PBC5|A0A1V5PBC5_9BACT Putative GTP cyclohydrolase 1 type 2 OS=bacterium ADurb.Bin363; OX = 1866927 GN=BWY64_03151 PE=4 SV=1
MNLYEITQYLDDLLKIKDIEDKSLNGLLVENGGDVESLTAGVDISIKLVESSPDNSLILVHHGIFWGKPLPITRNIYKIIHSLITKNCALYVSHLPLDNHEEFGNNYGFYKLAGWDKYKIEKFDLSGIIEFSQERTIEDVLEEVYKVLGKDIILWNFGKKGVKRVLFVSGGAAYQIPEVLSKNVDLYITGETSHNSYWIAKDNNINVVFGGHYNTEKIGVNLLVKHLAEKFVLKYKFIDLPTGF

SEQ ID NO: 5201 - protein, 405 aa, unidentified
  source 1..405: note = Unknown
  REGION 1..405: note = tr|A0A1V5PIG0|A0A1V5PIG0_9BACT GTP cyclohydrolase FolE2 OS=bacterium ADurb.Bin363 OX=1866927 GN=folE2 PE=3; SV = 1
MLDIQNQQDNRNINIQRVGVKRVYLPLQILEKTGTYQTVTAEISLCADLAKDLRGTHMSRFMEILHRWSKEKISSREIKIILQEVLNKLNADRSEISIKFRYFIEKPAPKSQIKGLLDYICEFKGLYDSNSFCFILGVEVPVTTVCPCSKEISDYGAHNQRAIVRVNIEYLPDEFIWLEDLISDIEKTGSSELFPILKRNDEKYVTENAYENPKFVEDVVRDIVIILRQDKKLCRFKVECEASESIHNHNAFACHREEVKEKIRKVVVKYATSEHLDQIKVIADKNRDSLGFIIRSAVVKAIDNKEVFVALYNDNVVGFLIFHLRKDQQATLYDICISKNFRGRSVGKKLAKRLIVEAKKHNKLYIQLKCPENLPSNEFYKALNFELVGKETGKKRNLNIWKLSI

SEQ ID NO: 5202 - protein, 220 aa, unidentified
  source 1..220: note = Unknown
  REGION 1..220: note = tr|A0A1V5M8V4|A0A1V5M8V4_9BACT GTP cyclohydrolase 1; OS = bacterium ADurb.Bin425 OX=1866929 GN=folE PE=3 SV=1
MKTECQDRTIQGDVFFAQAEKLQLAKTCRSQPAAFDSNRIEKAVKEILIAIGEDPEREGLLETPSRVARMLKELTEGLHKNEKEELSCRFHEEKAGVVLVKDITFSSTCEHHMLPFTGVAHVAYLPKEGQITGLSKLARVVECVSKRLQVQERMTSQIADAIETTLDPLGVFVMVEAEHSCMVLRGIKKPGSLTVTMESRGVYKEDQDLRRELLSLVTRA

SEQ ID NO: 5203 - protein, 188 aa, unidentified
  source 1..188: note = Unknown
  REGION 1..188: note = tr|A0A1V5LMW7|A0A1V5LMW7_9BACT GTP cyclohydrolase 1; OS = bacterium ADurb.Bin429 OX=1866930 GN=folE PE=3 SV=1
MNIKRVEELIRELLIEIGEDPEREGLEKTPLRVAGAYEYLTSGYHMNTERLINGAVFEAESNNMIIVRDIELYSLCEHHMLPFYGRCHIGYIPKEKIFGVSKLARLVDMYSRRLQIQERLTEQIASAIMDSIDPEGVGVIIEARHLCMMMRGVQKQNSLMTTSSVIGSFRNSIATRNEFLTLIGRERP

SEQ ID NO: 5204 - protein, 246 aa, unidentified
  source 1..246: note = Unknown
  REGION 1..246: note = tr|A0A1V5LIV0|A0A1V5LIV0_9BACT Putative GTP cyclohydrolase 1 type 2 OS=bacterium ADurb.Bin431; OX = 1866931 GN=BWY77_00857 PE=4 SV=1
MLLRDDVVTYLADYLRVGEIKDYGPVGLQVEGRTQVRRIVTGVSASLALFEEAFKREADMILVHHGILWDKESRVVQGPFKQRLKALLDHDVSLLAYHLCLDVHEEVGNNALAAKALGMHNVAPLGEIGLKGSIEELDFAELQQLLLYVFDHEPFAFSFGPAKIRHIGYCSGGAAGDLALAIEEGLDAFITGDVREPTMHLAQEAGIHFFAAGHYATERLGIRALGENLMRKTGVEVEFIDIPNPA

SEQ ID NO: 5205 - protein, 246 aa, unidentified
  source 1..246: note = Unknown
  REGION 1..246: note = tr|A0A1V5KTF1|A0A1V5KTF1_9BACT Putative GTP cyclohydrolase 1 type 2 OS=bacterium ADurb.Bin478; OX = 1866932 GN=BWY83_00885 PE=4 SV=1
MVPRDDLIQYVNDYLQVDQVKDYSPAGLQVEGKEQVHKIVTAVSAGARLFQQAVEWQADMIIVHHGLFWDREPRVVQGPLKGRLKILLQNDITLLGYHLALDKHPVLGNNALAARALGLEQVTPLGEVGVQGRVAGLTIGQLTQQVEAVFQHSALVFAAGPEQIQRIGFCSGGAARDLSDAVEAGLDAFITGEAKEETMNLAEENAVHFIAAGHYATERMGIRALGEHLARTFPVQVRFIERNNPV

SEQ ID NO: 5206 - protein, 186 aa, unidentified
  source 1..186: note = Unknown
  REGION 1..186: note = tr|A0A1V5KLP6|A0A1V5KLP6_9BACT GTP cyclohydrolase 1; OS = bacterium ADurb.Bin478 OX=1866932 GN=folE PE=3 SV=1
MENEIKPLIRQLLGRLGEDPDREGLLRTPQRVENALHYLTRGYSMDLNELLNNALFHETCDEMVLVRNIELYSLCEHHLLPFIGKAHVAYIPTGKVLGLSKVARIVDMFARRLQIQENLTRQIADAIQKVTNAAGVAVVIEAQHMCMMMRGVEKQNSLVTSSAMLGSFKTERATRMEFLNLIKCWS

SEQ ID NO: 5207 - protein, 190 aa, unidentified
  source 1..190: note = Unknown
  REGION 1..190: note = tr|A0A1V5JIG5|A0A1V5JIG5_9BACT GTP cyclohydrolase 1; OS = bacterium ADurb.BinA028 OX=1866933 GN=folE_1 PE=3 SV=1
MPVDHPRAQAAVRELLCAIGEDPDREGLRETPARVARALGEFFAGLDQRPEDILSTTFDIDHDEMILVRDIEVYSTCEHHLVPFHGVAHVGYIPAKDGKVTGLSKIARLVDVFAKRPQVQERLTTQVADALVDHLGVQGCIVVLECEHLCMSMRGVKKPGSRTITSAVRGQLRNPATRAEAMALLLGGKR

SEQ ID NO: 5208 - protein, 189 aa, unidentified
  source 1..189: note = Unknown
  REGION 1..189: note = tr|A0A1V5JH52|A0A1V5JH52_9BACT GTP cyclohydrolase 1; OS = bacterium ADurb.BinA028 OX=1866933 GN=folE_2 PE=3 SV=1
MPVAYRESVANRVSEILSKWGDVTNAEVLENTPARVERALDELLSGYDLDPEAILARTFETDCDDMVIVADIPVCSMCEHHMMPFIGHAHVGYIPDGRLLGVSKVARLVECYSRRLQLQERITSQVADAIMSHLAPKGVGVVIAAEHTCMTTRGVNRPGTRTITSATRGLFRDDEKTRAEFMSLIGVSP

SEQ ID NO: 5209 - protein, 203 aa, unidentified
  source 1..203: note = Unknown
  REGION 1..203: note = tr|A0A244C067|A0A244C067_9BACT GTP cyclohydrolase 1; OS = bacterium AM6 OX=1954209 GN=folE PE=3 SV=1
MSKNNEKAAPQGEVTQVQAEDAVRTLLRWAGEDPTREGLLDTPRRVAEAYGDWFSGYRDDPRAYMERTFEEVAGYDELIVLRDIEYESHCEHHMAPIIGRVHVGYLPAGKVVGISKLARVVEAYARRFQVQEKMTAQIAQCIQDVLQPVGVGVVVEGAHECMTTRGIHKRGVSMVTSKMLGSFREDARTRAEFLRFIEVGGKR

SEQ ID NO: 5210 - protein, 190 aa, unidentified
  source 1..190: note = Unknown
  REGION 1..190: note = tr|A0A202DCK6|A0A202DCK6_9BACT GTP cyclohydrolase 1; OS = bacterium B17 OX=1932704 GN=folE PE=3 SV=1
MKDDNTNIERMTAAYKELLEGLGEDLSRPGLDNTPNRAAKALSFIAGGYNQNVEEIINEALFESPADDMIIVKDIELYSLCEHHMLPFIGKCHVGYLPRGKVLGLSKVARIVDVFARRLQIQENLTRQIGETIMKHTDALGVGVVVEAQHLCMMMRGVSKQNSSMKTSCMLGDFRSCTDTRMEFLSLIEK

SEQ ID NO: 5211 - protein, 186 aa, unidentified
  source 1..186: note = Unknown
  REGION 1..186: note = tr|A0A2N5Z9B6|A0A2N5Z9B6_9BACT GTP cyclohydrolase 1; OS = bacterium BM706 OX=2053465 GN=folE PE=3 SV=1
MNKEVIIKSVRAILEAIGEDPEREGLVRTPERVANMYVELFSGMGVDPEKVINVQFNEPHEEMIIVKDIPFSSMCEHHMIPFIGKAHIVYIPQDNKITGLSKLIRLVDLYSKRLQLQERLTTQVADSLMKTLNPLGVVVVIEAEHMCMSIRGVKKPGSKTITSAVRGIFHNDIAARSEALSLIREY

SEQ ID NO: 5212 - protein, 190 aa, unidentified
  source 1..190: note = Unknown
  REGION 1..190: note = tr|A0A2H6K2R4|A0A2H6K2R4_9BACT GTP cyclohydrolase 1; OS = bacterium BMS3Abin01 OX=2005709 GN=folE PE=3 SV=1
MDLEKIRNGTRLILEGIGEDADRDGLKNTPARVASMYEDVLSGLKVEPASILEPMPSDRHQEMVLLKDISFFSMCEHHLLPFFGMAHVAYIPSEGGMITGLSKLSRLVQVVARRPQLQERMTSVIADSMVEALQPLGVMVLVSAEHLCMSMRGIRSPGTQTITSAVRGIFRSNAATRAEVLSVINARSDI

SEQ ID NO: 5213 - protein, 188 aa, unidentified
  source 1..188: note = Unknown
  REGION 1..188: note = tr|A0A2H6EF63|A0A2H6EF63_9BACT GTP cyclohydrolase 1; OS = bacterium BMS3Abin03 OX=2005711 GN=folE PE=3 SV=1
MDIPKIENLVGELLLEIGEEPQREGLLNTPTRVAKAYEFLTRGYRQDICEVMNKAIFNEKYDEMVLVKNIDFYSLCEHHILPFYGKVHVAYIPDGKIVGLSKIPRIVEVFSRRLQVQERMTQQIADTFDKYLQPRGVAVVSEAYHMCMMMRGVEKQNSSATTSAMHGVFKEDARTRMEFLDLISHRNL

SEQ ID NO: 5214 - protein, 189 aa, unidentified
  source 1..189: note = Unknown
  REGION 1..189: note = tr|A0A2H6EJP1|A0A2H6EJP1_9BACT GTP cyclohydrolase 1; OS = bacterium BMS3Abin04 OX=2005712 GN=folE PE=3 SV=1
MNLEKVEKNVESILVEIGEDPSRQGLVKTPKRVAKAYEFLTQGYHKDIDKILNGAVFDEKYDEMVIVKDIDFYSLCEHHMIPFYGKVHVAYIPNGKIVGLSKIPRIVDVFARRLQVQERMTQQIADTINKYLSPIGVAVVAEGYHMCMMMRGVEKQNSYSITSAVHGIFKEDLRTRSEFLDLISHQRLK

SEQ ID NO: 5215 - protein, 180 aa, unidentified
  source 1..180: note = Unknown
  REGION 1..180: note = tr|A0A2H6EW88|A0A2H6EW88_9BACT GTP cyclohydrolase 1; OS = bacterium BMS3Abin05 OX=2005713 GN=folE PE=3 SV=1
MEKLVYELLKKIGEDPDRKGLKYTPERVAKAYKYFMRGYRQNLKDILNGALFEEKYDEMVIVKNIDYYSMCEHHLLPFFGKAHVAYIPNGKIIGISKIPRIVDMYARRLQVQERMTTQIADALQGLLNPLGVAVVVEGQHLCMMMRGVEKQNSVMITSAMYGAFRNRTSTREEFLRLIKS

SEQ ID NO: 5216 - protein, 247 aa, unidentified
  source 1..247: note = Unknown
  REGION 1..247: note = tr|A0A2H6EYT8|A0A2H6EYT8_9BACT Putative GTP cyclohydrolase 1 type 2 OS=bacterium BMS3Abin05 OX=2005713; GN = ybgI PE=4 SV=1
MNRNTLIAYLNDLLEIDNFQDYCVNGLQVGGNPEVGKIAGGVSISRRFLKQAIDWGADLALLHHGLFWRSDPHPFYLTGVQKARLEMVIKHDLNLAAYHLPLDAHKVFGNNIQILKNLALQPVESLEIGFIGKFKKGLSQDAFLKLVNEKLDCNATPFFYGKKKIETVLAISGASSSAFEEAAAGGVDAFIGGDIREENVRGIEEVGLNYIAAGHYNTERFGVRALLNHLSEKFGLQTKFIEIPNPV

SEQ ID NO: 5217 - protein, 187 aa, unidentified
  source 1..187: note = Unknown
  REGION 1..187: note = tr|A0A2H6F276|A0A2H6F276_9BACT GTP cyclohydrolase 1; OS = bacterium BMS3Abin06 OX=2005714 GN=folE PE=3 SV=1
MNKSKIKKGVRMILEGIGEDPDRPGLKDTPKRIANLYEEIFSGLKTPTKEILKPIEGESHDEMVLLKDIPFYSICEHHLLPFIGKAHVAYIPSGGKIVGISKLARAVEIFAKRPQVQERLTAQLADMIMEKLKPKGAMVIVDAEHLCMSMRGVKKLHTKTVTSAVRGLFRTKESTRMELLALIKKSD

SEQ ID NO: 5218 - protein, 187 aa, unidentified
  source 1..187: note = Unknown
  REGION 1..187: note = tr|A0A2H6FCK1|A0A2H6FCK1_9BACT GTP cyclohydrolase 1; OS = bacterium BMS3Abin07 OX=2005715 GN=folE PE=3 SV=1
MDRKKIEKGVRLILEGIGEEPERPGLRNTPGRVASMCEEIFAGLESSPEDILKHIEGESHDEMVMLKDIPFYSVCEHHLLPFFGRAHIGYIPAGGRIVGIGELAKALEMLARRPQVQERLNTQLADMIMDKLNPKGAMVIIDAEHLCLSMRGIKKPGSKTVTSAVRGIFRSKQSTREEMLELLKRRD

SEQ ID NO: 5219 - protein, 187 aa, unidentified
  source 1..187: note = Unknown
  REGION 1..187: note = tr|A0A2H6FM01|A0A2H6FM01_9BACT GTP cyclohydrolase 1; OS = bacterium BMS3Abin08 OX=2005716 GN=folE PE=3 SV=1
MNTKKIEKGVRLIIEGIGEDPERPGLKRTPQRVASMFEEIFSGLVTQPEDILTPIEGETHDEMVILKDIPFYSVCEHHLLPFFGRAHIAYIPEKGRIVGIGELARALEILAKRPQVQERLSAQLVDMIMKRLKPKGAMVIIDAEHLCLSMRGIKKPGSRTVTSAVRGLFRSKQSTREEMLSLIKSRN

SEQ ID NO: 5220 - protein, 187 aa, unidentified
  source 1..187: note = Unknown
  REGION 1..187: note = tr|A0A2H6FWM5|A0A2H6FWM5_9BACT GTP cyclohydrolase 1; OS = bacterium BMS3Abin10 OX=2005718 GN=folE PE=3 SV=1
MDRKKIMKGVKLILEGIGEDPERPGLKDTPGRIAGMYEEIFSGLQTPTEEILKPIEGESHDEMVLLKDIPFYSVCEHHLLPFLGRAHVAYIPSGGKIVGLSSLAKAVEIFAKRPQVQERLTTQLADLIMERLKPRGAMVIVDAEHLCLSMRGTKKPGARTVTSAVRGIFRTKESTRVELLELIKKRD

SEQ ID NO: 5221 - protein, 295 aa, unidentified
  source 1..295: note = Unknown
  REGION 1..295: note = tr|A0A2H6G095|A0A2H6G095_9BACT GTP cyclohydrolase FolE2 OS=bacterium BMS3Abin11 OX=2005719 GN=folE2 PE=3 SV=1
MLNPPKIRPPFKPKPRIPDVTEDSNTRDSDNDSEIADVQSRHDSRQITIDKVGIKDIRHPVRVKDRSEGEQHTVATFNMYVELPHNFKGTHMSRFVEILNQHEREISIKSFHDMLEEMRERLEAETGRIEMSFPYFISKKAPVTGVQSLMDYQVSFNGEIEKGETSIELKVIVPVTSLCPCSKKISDYGAHNQRSHVTVTIRANSFIWIEELIEMVEKQASSELYGLLKRPDEKHVTEYAYDHPKFVEDMVRDVAATLNTDDRVDAYIVESENFESIHNHSAYALIERDKLSETT

SEQ ID NO: 5222 - protein, 189 aa, unidentified
  source 1..189: note = Unknown
  REGION 1..189: note = tr|A0A2H6GJP8|A0A2H6GJP8_9BACT GTP cyclohydrolase 1; OS = bacterium BMS3Abin14 OX=2005722 GN=folE PE=3 SV=1
MDRKKIERGMRLILEGIGEDPERPGLQGTPGRVADLFSEVFAGVDVDAMQFLVPVAGETHDEMVLVKDISMHSMCEHHLLPFIGVAHVAYIPEGGRIVGLSKIVRVLDTFAHQPQVQERLTTQVAEAVMNGLRPKGVMVVIEAEHMCMSMRGVNKPNSRTVTSAVRGSFRRDERTRSETLSLIYGSRSR

SEQ ID NO: 5223 - protein, 191 aa, unidentified
  source 1..191: note = Unknown
  REGION 1..191: note = tr|A0A2H6H8M7|A0A2H6H8M7_9BACT GTP cyclohydrolase 1; OS = bacterium BMS3Bbin01 OX=2005724 GN=folE PE=3 SV=1
MDNVPDVEAIVGAVRTILEAIGEDPEREGLAKTPERVARMYAEVFDGLHRDPKEILEMVFVQEEHREIVMVKDIPFYSMCEHHLMPFHGRAHVAYLPKGTLTGLSKLARLVEVFARRPQLQERLTTQIADTLMDAVDPYGVLVVVEAEHLCMSMRGVKKPGSITTTSAVRGAFAESAATRSEAFALLFGNR

SEQ ID NO: 5224 - protein, 187 aa, unidentified
  source 1..187: note = Unknown
  REGION 1..187: note = tr|A0A2H6IER5|A0A2H6IER5_9BACT GTP cyclohydrolase 1; OS = bacterium BMS3Bbin07 OX=2005730 GN=folE PE=3 SV=1
MDIKKIEKGVKLILEGIGEDPERPGLRRTPQRVSAMFQEIFSGLQTPPEDLLQHIEGETHDEMVMLKDIPFYSVCEHHLLPFFGRAHIAYIPEKGRIVGIGELAKALEMLAKRPQVQERLTAQLADMIMERLRPRGAMVIIDAEHLCLSMRGIKKPGARTVTSAVRGIFRSKQSTREEMLELIKKRD

SEQ ID NO: 5225 - protein, 185 aa, unidentified
  source 1..185: note = Unknown
  REGION 1..185: note = tr|A0A2H6IRV9|A0A2H6IRV9_9BACT GTP cyclohydrolase 1; OS = bacterium BMS3Bbin09 OX=2005732 GN=folE PE=3 SV=1
MDKNKIKKGVKLILEGIGENPDRPGLKDTPKRVANLYEEIFSGLSTPTEEILKPIEGESHDEMVLVKDIPFYSVCEHHLLPFIGKAHVAYVPSKGKIVGLSKLARAVEIFAKRPQVQERLTAQLADLIMKKLKPKGAMVIVDAEHLCMSMRGVKKPGSRTVTSAVRGIFRTKKSTRTEVLELIKK

SEQ ID NO: 5226 - protein, 211 aa, unidentified
  source 1..211: note = Unknown
  REGION 1..211: note = tr|A0A2H6J0Y6|A0A2H6J0Y6_9BACT GTP cyclohydrolase 1; OS = bacterium BMS3Bbin10 OX=2005733 GN=folE PE=3 SV=1
MDALVKKIPAAGPQLGAGPDIQRPERAEAEEAVRTLIAWAGDDPAREGLLDTPGRVVNAFREFFQGYDECPIEALSRTFDDVGGYDDIVMLRDIDLNSHCEHHMVPFVGNAHVAYIPDNAVVGISKLARVVDIYSRRLQTQETMTAQITLTIDKVLKPLGVAVMIEAVHQCMSMRGVRKPNVATITTQFTGIFKENQAQQDRFMMLARGKD

SEQ ID NO: 5227 - protein, 288 aa, unidentified
  source 1..288: note = Unknown
  REGION 1..288: note = tr|A0A2H6JBJ5|A0A2H6JBJ5_9BACT GTP cyclohydrolase FolE2 OS=bacterium BMS3Bbin12 OX=2005735 GN=folE2 PE=3 SV=1
MKATNPAPGDPATIADVQSSADTRRIAINKVGIKAIRHPVRVKDRSEGEQHTIATFNMYVNLPHDFKGTHMSRFVEILNRHEREISVQSFKDMLREMTGVLEVGSGHIEMRFPYFVTKTAPVTKVKSLMDYDVSLIGEIRDGAVHTHIRVVVPVTSLCPCSKEISDYGAHNQRSHVTIMARTRGFIWIEELIDLVEKEASCELYGLLKRPDEKYITERAYDNPKFVEDMVRDVAVRLNEDGRIEAYVVESENFESIHNHSAYAMIQRDKTLDDDGTDDPRSPSRPPAG

SEQ ID NO: 5228 - protein, 252 aa, unidentified
  source 1..252: note = Unknown
  REGION 1..252: note = tr|A0A2H6JCN5|A0A2H6JCN5_9BACT Putative GTP cyclohydrolase 1 type 2 OS=bacterium BMS3Bbin12 OX=2005735; GN = BMS3Bbin12_01687 PE=4 SV=1
MVALLELVSYTDRLLDSAAFADYCPNGLQVEGRAQVRRLISGVSASRALIEAGIAAGADLLLVHHGYFWKGEDPRITGMKRARLAALLGAQMSLMAYHLPLDAHPELGNNAQLARRLGLEVAGRFGHGPGPAVGCRGRLEPGLAPAVLAQRITEVLGRAPLHVPGRADSIRTVAWCSGAAQSYIEEAAALGVDAYLTGEVSESTVHVARETGMHFFAAGHHATERYGVQALGAHLAGRFSLEHEFVDIDNPA

SEQ ID NO: 5229 - protein, 244 aa, unidentified
  source 1..244: note = Unknown
  REGION 1..244: note = tr|A0A2H6JLY2|A0A2H6JLY2_9BACT GTP cyclohydrolase FolE2 OS=bacterium BMS3Bbin14 OX=2005737 GN=folE2_1 PE=4; SV = 1
MKLQTVGIKNFTCPVSIREKIGSRQQTVATISMQAAMPSRLRESCVPVFTHVLGKYREDISATIFPAMLAEVRERLQAEKARMTMSFPYFIAKQAPVTQTGSLMEYQCSFIGSINETAGLQLSVQVPLTTLCPCSKEISSAGAHNQRAEVTLTVRAPRFIWLEDLISLVEHCGSCELYALLKRPDEKFVTEAAYANPMFVEDVARMVAQQALAHPDIARFSVSVESFESIHKHSAYALVNSDDL

SEQ ID NO: 5230 - protein, 267 aa, unidentified
  source 1..267: note = Unknown
  REGION 1..267: note = tr|A0A2H6JS89|A0A2H6JS89_9BACT Putative GTP cyclohydrolase 1 type 2 OS=bacterium BMS3Bbin14 OX=2005737; GN = BMS3Bbin14_02083 PE=4 SV=1
MSATVQDILNIIETLAPANLAEPWDNVGLMIGSPAGPVTSILLGLDPTAALLDEAGSLNADLAITHHPVIFHPLKSISLNQPDGRFIQQALIRKINVISCHTNLDSTVNGVSDTLAGQLGLDDVTVLVAGGKTDKTCGLGRIGDYSAPISAAEFVRRLKETCHPPWLLTAGPRPEKISRVAVCGGSCSEYAEIALQSGAQVFVTAEVKHNVARWAEQAGLWIIDAGHYATENPAMHQFARRLARAAKPLGHIDIHVTERQASPLQLL

SEQ ID NO: 5231 - protein, 189 aa, unidentified
  source 1..189: note = Unknown
  REGION 1..189: note = tr|A0A101VQU1|A0A101VQU1_9BACT GTP cyclohydrolase 1; OS = bacterium BRH_c32 OX=1734400 GN=folE PE=3 SV=1
MDSNKIEKCITSILEEIGEDTKREGLIKTPHRVAKAYEFLTQGYNTNIEDVLNGAIFEEEYDEMVVVKDIDFYSMCEHHMLPFYGKVHVAYLPQGKIVGLSKIPRIVDVFARRLQVQERMTTQIAETLEKYLEPRGVAVVIEGFHMCMMMRGVQKQNSITTTSSMCGVFKNTMRTRAEFLDLIKLQNLR

SEQ ID NO: 5232 - protein, 184 aa, unidentified
  source 1..184: note = Unknown
  REGION 1..184: note = tr|A0A3A9C949|A0A3A9C949_9BACT GTP cyclohydrolase 1; OS = bacterium C-53 OX=2320109 GN=folE PE=3 SV=1
MDKEKIEQGIRLILEGIGENIEREGLLDTPERVSRMYEEIYGGLTEDAKVHLSRTFRAEKNEMVVERDITFYSMCEHHLMPFYGKAHVAYLPDGRVVGLSKLARTVEVYAKRPQIQEQLTAQIADALMEYLEPRGAMVMIEAEHMCMTMRGVKKPGSTTVTVASRGAFEGNESLQNMFFQMIKV

SEQ ID NO: 5233 - protein, 182 aa, unidentified
  source 1..182: note = Unknown
  REGION 1..182: note = tr|A0A2M7YW04|A0A2M7YW04_9BACT GTP cyclohydrolase 1; OS = bacterium CG_4_9_14_3_um_filter_65_15 OX=1975567; GN = folE PE=3 SV=1
MEDLVRGMLEAIGEDPQREGLIDTPARVSRSWGELAAGYAMDPGAMVRGALFAAESRDMIVVNDIDFYSVCEHHMLPFFGKAHVAYIPDGRIVGLSKIARVVEAFARRLQVQERMTAQIAACLMENLEPLGVAVTLHAQHLCMMMRGIQKQNSYAVTSEMLGCFRTDSKTRSEYLTLIRETP

SEQ ID NO: 5234 - protein, 188 aa, unidentified
  source 1..188: note = Unknown
  REGION 1..188: note = tr|A0A3A9BBT2|A0A3A9BBT2_9BACT GTP cyclohydrolase 1; OS = bacterium D16-34 OX=2320120 GN=folE PE=3 SV=1
MDRAKIEQGVRLILEGVGEDPSREGLRKTPERVAKMYEEVFAGMNEDPAVHFETTFDEHHEEMVLVRDIPFYSMCEHHLAPFFGHAHIAYIPSPDGRICGLSKLARLLDVFARRPQVQERLTSQVADTLMKELKPQGAIVVLEAEHLCMSMRGVKKPGTQTTTSAIRGIFDEDTAARAEALSLIFARR

SEQ ID NO: 5235 - protein, 185 aa, unidentified
  source 1..185: note = Unknown
  REGION 1..185: note = tr|A0A3A9D0X5|A0A3A9D0X5_9BACT GTP cyclohydrolase 1; OS = bacterium D16-50 OX=2320112 GN=folE PE=3 SV=1
MVDQGKIREAVRLLLEGIGEDASRPGLEDTPDRVARMYTEIFEGMDKEASEPLSRVFPMDSGQMVLEKDIVFYSMCEHHMMPFYGKAHIAYIPEDRVVGLSKLARTVEIYARRLQIQERMTGQIADALMEYLAPCGVMVMVEAEHMCMTMRGIKKPGSKTVSIASRGCFEKDAALQDRFFQLLKP

SEQ ID NO: 5236 - protein, 192 aa, unidentified
  source 1..192: note = Unknown
  REGION 1..192: note = tr|A0A3A8WBM3|A0A3A8WBM3_9BACT GTP cyclohydrolase 1; OS = bacterium D16-59 OX=2320098 GN=folE PE=3 SV=1
MAIDTEAIKKHVRGILMALGDDPDREGLKETPDRVAKMYEEVFEGMNYSNHEIAQMFNKTFTDKMEFAGGSQDMVMVKDIEIFSYCEHHLALMYDMKVSVAYIPQEKVIGLSKIARIADMVGKRLQLQERIGSDIAEILQEILGSEDVAVIIEGTHSCMTARGIKKGTASTKTYTLRGAFREDRYLQMRLEG

SEQ ID NO: 5237 - protein, 186 aa, unidentified
  source 1..186: note = Unknown
  REGION 1..186: note = tr|A0A3A9BF20|A0A3A9BF20_9BACT GTP cyclohydrolase 1; OS = bacterium D16-63 OX=2320119 GN=folE PE=3 SV=1
MDKTKIEEGVRLILEGVGEDPDREGLRETPARVARMYEEVFAGLSENPARHFEVTFDEHHEEMVLVKDIPFYSMCEHHLVPFFGKAHVAYIPATDGRICGLSKLARLVDAFAKRPQVQERLTSQIADTLIEQLNPQGVIVVLEAEHMCMSMRGVKKPGSQTVTSAVRGVFEKSAPARSEALSLILR

SEQ ID NO: 5238 - protein, 182 aa, unidentified
  source 1..182: note = Unknown
  REGION 1..182: note = tr|A0A2G6G274|A0A2G6G274_9BACT GTP cyclohydrolase 1; OS = bacterium DOLZORAL124_64_63 OX=2044883 GN=folE PE=3 SV=1
MEKLVREMLVKIGEDPDREGLVKTPERVVRAWRENTVGYRVDPGEMVRSALFQAEGQEMVIVSDIDFYSVCEHHLLPFFGKAHVAYIPNGKIVGLSKIARVVEAYARRLQVQERMTAQIAGCLMDNLQPLGVAVTLHAQHLCMMMRGIQKQNSFATTSEMLGCFQNDPKTRGEFLTLIRHKP

SEQ ID NO: 5239 - protein, 260 aa, unidentified
  source 1..260: note = Unknown
  REGION 1..260: note = tr|A0A202DK14|A0A202DK14_9BACT GTP cyclohydrolase FolE2 OS=bacterium E08(2017) OX=1932693 GN=folE2 PE=3 SV=1
MKDVQNSPDNRNIPIKKAGIKSLQYPITVLDRQNKSQETTAIVSMYVDLPHNFKGTHMSRFVEVLNKHHGRISVEETDSILYTMLERFDCETAHFDITFPYFIEKEAPSSKARSLMNYNCSLLTSLEMKSGTEVFDRIIEVSVPVTMLCPCSKEISDEGAHNQRSIVTVRVRSSELVWLEELIEIAESEASAPVFSLLKREDEKALTEAAYQNPLFAEDAVRAVASRLKEDERIIWYQVESENQESIHNHNAYAMVEETK

SEQ ID NO: 5240 - protein, 218 aa, unidentified
  source 1..218: note = Unknown
  REGION 1..218: note = tr|A0A1V8NDA6|A0A1V8NDA6_9BACT GTP cyclohydrolase 1; OS = bacterium endosymbiont of Pedicinus badii OX=1719126; GN = AOQ89_00935 PE=3 SV=1
MNSIIKKIKNILVKKKLENPILKKKTNFLKSQKKIQNCIEKILIYLNLDSKNSNIIDTPKRISSMLIKEIFSGLYYENFPKISFIKNTIQVEEMIKIFNISFTSFCEHHFLITEGKAFIAYFPNRKILGISTVNKIVNFFAKRPQIQERMTKQIAICLQTLLQIEDVAVLIQAKHFCAQIRKMENQKNYVITSNFCGKFEKSYSIKKEFYKFINVKFY

SEQ ID NO: 5241 - protein, 270 aa, unidentified
  source 1..270: note = Unknown
  REGION 1..270: note = tr|A0A497TJ46|A0A497TJ46_9BACT GTP cyclohydrolase FolE2 OS=bacterium endosymbiont of Escarpia laminata; OX = 1221601 GN=folE2 PE=3 SV=1
MAENTPHTGTQIADVQSSEDTRRIAIDKVGIKDIRHPVRIKDRSEGEQHTIANFNMYVNLPHNFKGTHMSRFVEILNSHDYEITVESFKDMLTEMAERLEAESGHIEMSFPFFINKTAPVSNVQSLLDYDVTLIGEIHSGVAHIDIKVVVPVTSLCPCSKKISDRGAHNQRSHVTIQARTRGFIWIEEIIDMVEQEASCELFGLLKRPDEKHVTERAYDNPKFVEDMVRDVAVRLNNEDRIGAYIIESENFESIHNHSAYALIERDKTAE

SEQ ID NO: 5242 - protein, 201 aa, unidentified
  source 1..201: note = Unknown
  REGION 1..201: note = tr|A0A132HZ97|A0A132HZ97_9BACT GTP cyclohydrolase 1; OS = bacterium F083 OX=1768114 GN=folE PE=3 SV=1
MEKGYLKIDQYDEACVKEMAGHYREILRLLGEDPEREGLRKSPERIAKAMLFFTNGYDLDPEEILRSAMFHEDYKQMVVVKDIELYSLCEHHMVPFVGKAHVAYIPNGTIVGLSKLPRVVDAYARRLQVQERLTKQIKDCIQRTLNPLGVAVVIEAQHMCMSMRGVQKQNSVTTTSDFTGAFLNSPKTREEFMHIIGVNLH

SEQ ID NO: 5243 - protein, 192 aa, unidentified
  source 1..192: note = Unknown
  REGION 1..192: note = tr|A0A202DLF2|A0A202DLF2_9BACT GTP cyclohydrolase 1; OS = bacterium F11 OX=1932698 GN=folE PE=3 SV=1
MTVEALESKVHKLPSLVTEILTMLGEDPNREGLKKTPGRVARALMELTRGYDADVDSLINKAIFHENYNEMVVVKDIRFYSLCEHHLLPFFGTVHIAYIPNGKIVGLSKLPRLVEVFSKRLQVQERMTQQIANILKDKLDPMGVGVVIKARHLCMEMRGIESQDSPTVTSAMLGAFRSDPRTRKEFLSFIHE

SEQ ID NO: 5244 - protein, 204 aa, unidentified
  source 1..204: note = Unknown
  REGION 1..204: note = tr|A0A3D8UPP5|A0A3D8UPP5_9BACT GTP cyclohydrolase 1; OS = bacterium HD9-500m-PIT-SAG08 OX=2283597 GN=folE PE=3; SV = 1
MKLVKDIDNNQNSKKISDKDAEEAFKTILSWMGEDPNREGLLETPKRVVKAFKEYFKGYKEDPIQVLDKTFGDVDGYDDMVIQKNISVQSHCEHHMAPIIGKAHVAYIPNERVVGLSKLARVVEVFSKRLQTQERLTMQIANTLMQSLDAKGVAVTIDSTHQCMTMRGIKKEQATTVTNYYLGQFKEDLSYQNRYLRLISNSKD

SEQ ID NO: 5245 - protein, 191 aa, unidentified
  source 1..191: note = Unknown
  REGION 1..191: note = tr|A0A2H5VKS6|A0A2H5VKS6_9BACT GTP cyclohydrolase 1; OS = bacterium HR08 OX=2035403 GN=folE PE=3 SV=1
MEPTRETRLREIRRHVAEILRLLRLDPTRDPELRHTPERVAEWYVDFFGDADREEEPEIAPLAREGNEEEMIVVANVPFYSVCAHHLLPFFGKAHIGYVPDRALLGLGSVGRLLEHYARRPQLQERLTEQVAEALMRAARPHGVIVLLQARQLCMEMRGARRPGRVTTSAARGCCQEPSWREEFFRRLSTR

SEQ ID NO: 5246 - protein, 206 aa, unidentified
  source 1..206: note = Unknown
  REGION 1..206: note = tr|A0A2H5VTR9|A0A2H5VTR9_9BACT GTP cyclohydrolase 1; OS = bacterium HR09 OX=2035404 GN=folE PE=3 SV=1
MRPELLRKSKASAPASEEELIKRLAPHVEAILDQLGVDRSDPNLQDTPRRVAAMFLEMFHGLKEGAEPSVTVFPNEERYSAMVMERDIPFYSMCAHHLVPFYGHAHIAYIPGKHIVGLSKIPRILEFYAKRPQIQERLTEQVADYLWQRLEPLGVMVVIEARHLCMEMRGVKKPGTLTVTSAIRGAFENAKVREEFLGFLNRSQKW

SEQ ID NO: 5247 - protein, 191 aa, unidentified
  source 1..191: note = Unknown
  REGION 1..191: note = tr|A0A2H5W282|A0A2H5W282_9BACT GTP cyclohydrolase 1; OS = bacterium HR10 OX=2035405 GN=folE PE=3 SV=1
MERTRETTLRELRWHIAEILRLLHLDPTRDPELRDTPERVAEWYVDFFGGADREEEPEIVPLAREGGEGEMIVVADVPFYSVCAHHLLPFFGKAHVGYVPDRALLGLGSVGRLLEHYARRPQLQERLTEQVADALVRTAHPRGAIVLLQARQLCMEMRGARKPGWVTTSAARGCFQEPSWREEFFRRLRTR

SEQ ID NO: 5248 - protein, 187 aa, unidentified
  source 1..187: note = Unknown
  REGION 1..187: note = tr|A0A2H5WE37|A0A2H5WE37_9BACT GTP cyclohydrolase 1; OS = bacterium HR12 OX=2035407 GN=folE PE=3 SV=1
MDRAKIERAVRMIIEAIGDDPEREGVQDTPARVAEMYEEIFAGIGRDPEELITVVRGAEHDEMIMVKDIPLYSVCEHHLLPWVGRAHVAYIPSKDGRITGLSKIARVVDLCAKRLQVQERLTTEIADAIERALEPRGVFVVIEAEHLCMTMRGIRKPGSRTVTSAVRGLFRTDARTRQEAMNLIGAP

SEQ ID NO: 5249 - protein, 186 aa, unidentified
  source 1..186: note = Unknown
  REGION 1..186: note = tr|A0A2H5WH58|A0A2H5WH58_9BACT GTP cyclohydrolase 1; OS = bacterium HR13 OX=2035408 GN=folE PE=3 SV=1
MAVDKEKIKQAVRLFLEGIGEDPNREGLKETPDRVARMWEEFDSMREFDFKLFEEFGSYNEMVLVKDINIYSICEHHLLPFFGKAHVAYIPDGIVCGLSKLVRTVRAFALRPQLQEKLTNQIADFLMEQLKPKGVAVVLEMEHLCMSMRGVMSPGHITTTSALRGIFLSDIRTREEFLKLIKRGRE

SEQ ID NO: 5250 - protein, 268 aa, unidentified
  source 1..268: note = Unknown
  REGION 1..268: note = tr|A0A2H5WSD6|A0A2H5WSD6_9BACT GTP cyclohydrolase FolE2 OS=bacterium HR15 OX=2035410 GN=folE2 PE=3 SV=1
MRSVFEQLPDVAMEMDSRGVALQAVGIRELRLPLRLLTPTGAEQAVVASVELSVDIEANQRGTHMSRLVETLYEWTAQPLSPADVRTLLQLTQERLGSRRAHLRMRFPYFLPLAAPVTGAPGLLDVEVEWDAQLNNGASCSTTSFEVPALTLCPCSKAIADFGAHNQRALVRLWLQTKERTLLLPDDYLPLIEQSVSALVYPVLKRPDEKFVTEKTYETPRFVEDVVRELVLRLQGREELRWFRVECESIESIHNHNAFAVYEEPRPK

SEQ ID NO: 5251 - protein, 272 aa, unidentified
  source 1..272: note = Unknown
  REGION 1..272: note = tr|A0A2H5X8E0|A0A2H5X8E0_9BACT GTP cyclohydrolase FolE2 OS=bacterium HR16 OX=2035411 GN=folE2 PE=3 SV=1
MSEIGVALSLPDVANQEDLRQIPIPRVGVRGVQLPVQIANSDGSAFHTIASVDFAVSLQPNKKGTHMSRLMQILDETSRAPLTLHELQRMLDRARDALDADQAEVTMRFKYFLRKHAPVTGATGWLDADAEWVVMLENGTCTRLVRVNVPVKSLCPCSKQIALYGAHNQRAYIRAEIELLPSTREPDMEELCRLLEEQGSSPLYPVLKRPDEKHVTESAYDNAKFVEDMLRDSVLALRRLPGIRRFKVECESIESIHNHNAFAATEEWLSPL

SEQ ID NO: 5252 - protein, 266 aa, unidentified
  source 1..266: note = Unknown
  REGION 1..266: note = tr|A0A2H5XA77|A0A2H5XA77_9BACT GTP cyclohydrolase FolE2 OS=bacterium HR17 OX=2035412 GN=folE2 PE=4 SV=1
MAFKVPADELEAQKQALPDIQSERPEHAIALTRVGVAHFRYPVTLRRKGEVLRTFVTIEAAVNLPSEQRGAHMSRFAEEIVQAFSLPMEAALFEELAERLANELLDAHDYAHHCTVTLEAEAHVDGHPYKLFASYNTATQQRILGVEVHGALACPCAMAMTGGLSHNQRGRLRIELQTNGYHIPAEELVAIAESAFSTPVRLLLKRPQEKAIVEAMHRNPKFVEDVVRDCVVALKARYLGVWARVRCDSFESIHPYDVFAEWEGVL

SEQ ID NO: 5253 - protein, 219 aa, unidentified
  source 1..219: note = Unknown
  REGION 1..219: note = tr|A0A2H5XIL0|A0A2H5XIL0_9BACT GTP cyclohydrolase 1; OS = bacterium HR18 OX=2035413 GN=folE PE=3 SV=1
MATNNKQHAHSDVWPEAFDGHPVGRYERQDLYCPEATAAIERHVREILRWIGEDPDREGLQRTPERVAMAFQYLTQGYHQDPRAILESALFEEDYNEMILVKDIQIYSLCEHHLLPFFGKAHVAYIPNRKIVGLSKIPRVVDVFARRLQVQERLTIQIRDALESVLQPLGVAVVIEAQHLCMMMRGVEKQHAVTTTSAMSGAFLKEATRAEFMRLINGG

SEQ ID NO: 5254 - protein, 219 aa, unidentified
  source 1..219: note = Unknown
  REGION 1..219: note = tr|A0A2H5XSX5|A0A2H5XSX5_9BACT GTP cyclohydrolase 1; OS = bacterium HR19 OX=2035414 GN=folE PE=3 SV=1
MSKGNSKDTLENSADGKVRSIEETLSLDQRVEIIKKSVENIIYALGDDPKREGLLKTPQRYAKAILEILWGYFADPEDIIGDAIFEQDYSGIVLVRHIKFFSMCEHHLLPFFGNCSIAYIPDGKIIGLSKLPRVVKFFAGRLQVQERLTEDIGKFIEKVLKPRGVAIYVSAYHLCLAMRGVKKEGVKMDTVFFSGKFQHDDNLKNFFLKQIREDRKIEI

SEQ ID NO: 5255 - protein, 222 aa, unidentified
  source 1..222: note = Unknown
  REGION 1..222: note = tr|A0A2H5XXT8|A0A2H5XXT8_9BACT GTP cyclohydrolase 1; OS = bacterium HR20 OX=2035415 GN=folE PE=4 SV=1
MNLEQKNGNGCVAIEQLQSFDANGNMPIPDHERQRMIEQLEQKFAEMMDILRIDRTRDPNSRETPRRLARMWVNELFIGRYTPPPPVTIFPNRKNVNELIISKGIKVMSVCSHHWQPISGTCTIGYMPGDYIIGLSKLTRIVEWFSRRGQIQEEMGEQIADYLESMLKPRALGVIITAKHYCMIARGVEADHEQSDMITSVLRGALQHDANLRNEFFRLAQS

SEQ ID NO: 5256 - protein, 228 aa, unidentified
  source 1..228: note = Unknown
  REGION 1..228: note = tr|A0A2H5XZ12|A0A2H5XZ12_9BACT GTP cyclohydrolase 1; OS = bacterium HR21 OX=2035416 GN=folE PE=4 SV=1
MQGNGCRQALREITPGFADANGNLRLSPEELQQMEAALEEHFAAILRVLRIDPTDPNSADTPKRLARMWVRELFRGRYEPPPRCTVFPNRRKVSGLVMSRGIDVRSVCSHHWQPIIGQCTIGYVPDQHIIGLSKLNRVVEWFSRRGQVQEELTEQIADFLHEKLRPRALGVVLACRHYCMILRGVEGDQEQAVMVTAAWRGELAENAQLRTEFLRLAALEVPQHDVVR

SEQ ID NO: 5257 - protein, 205 aa, unidentified
  source 1..205: note = Unknown
  REGION 1..205: note = tr|A0A2H5Y9T1|A0A2H5Y9T1_9BACT GTP cyclohydrolase 1; OS = bacterium HR22 OX=2035417 GN=folE PE=3 SV=1
MEPQEGITKAPWIAHPPDPIRLARVIRELLAALGEDPEREGLQRTPARVAEMLQEVLAGYWMDPVDLVNGAIFEVEDNDLVLVRDIEFYSMCEHHLLPFYGRAHVAYIPSGRIIGLSKIPRVVELFARRLQVQERMTRQIADFLETVLHPQGVAVIVEAAHLCAMMRGVRKSQARMVTQALTGVFRTDPRHRSELLAHLRRPLEK

SEQ ID NO: 5258 - protein, 188 aa, unidentified
  source 1..188: note = Unknown
  REGION 1..188: note = tr|A0A2H5YCN6|A0A2H5YCN6_9BACT GTP cyclohydrolase 1; OS = bacterium HR23 OX=2035418 GN=folE PE=3 SV=1
MFQAERIQRAIRDILEAVGEDPQREGLRETPQRVAEMLGELLRGLQEDPKAHLAQGFTAEGPQGMVLVRDIPFYSLCEHHLLPFFGHAHIGYLPRERIVGASKLVRAFDALARRPQLQERLTNQTADAIYEALRPRGVFVLVSAEHLCMSMRGVQKPGTRLVTQAIRGDEARSPEQFREFLALLRQSV

SEQ ID NO: 5259 - protein, 196 aa, unidentified
  source 1..196: note = Unknown
  REGION 1..196: note = tr|A0A2H5YIU4|A0A2H5YIU4_9BACT GTP cyclohydrolase 1; OS = bacterium HR24 OX=2035419 GN=folE PE=3 SV=1
MQGTPAKTTPDLERVAQAVRQIIEAIGEDPERPGLTDTPRRIARLYAEMFSGLQEDPLSVLATTFPEPHQEMVVLRDIPFYSLCEHHFLPFFGHAHVGYVPDGRIVGASKIARLVDILARRPQVQERLTSQIADCLMEGLRPQGAAVVIEAEHLCMSMRGVKKPGTLMVTSAVRGVFRRRGVTRAEFLALLREGKR

SEQ ID NO: 5260 - protein, 198 aa, unidentified
  source 1..198: note = Unknown
  REGION 1..198: note = tr|A0A2H5YL41|A0A2H5YL41_9BACT GTP cyclohydrolase 1; OS = bacterium HR25 OX=2035420 GN=folE PE=3 SV=1
METSEPLARPTVDLHRIADAVRQIIEAIGEDPGRPGLADTPRRIADLYAEMFAGLREDPLVLLQRTFPEPHQEMVILRQIPFYSLCEHHFVPFFGQAHVGYVPKGQIVGASKIARLVDVLARRPQVQERLTSQIADYLMEGLRPQGVAVVVEAEHLCMSMRGIKKPGSVLVTSAVRGVFRGSGVTRSEFLALVRGSAS

SEQ ID NO: 5261 - protein, 184 aa, unidentified
  source 1..184: note = Unknown
  REGION 1..184: note = tr|A0A2H5YV16|A0A2H5YV16_9BACT GTP cyclohydrolase 1; OS = bacterium HR26 OX=2035421 GN=folE PE=3 SV=1
MREIDRARLETAVRMILEAVGEDLDRPELRETPRRAAEMLRELLGGLELDPASFLAEPLAEQHEGLVVIRDIPVRSVCEHHLVPMVGRAHVAYLPAGRIVGSDRIIKLVDALARRPQLQERLTRQIAEAIERALQPQGVAVQLELEQMCMTIRGVQARESRVVTAVYHGAFEDDPSLRPLLASW

SEQ ID NO: 5262 - protein, 207 aa, unidentified
  source 1..207: note = Unknown
  REGION 1..207: note = tr|A0A2H5YWE3|A0A2H5YWE3_9BACT GTP cyclohydrolase 1; OS = bacterium HR27 OX=2035422 GN=folE PE=3 SV=1
MRRQERIVEFEDTGLRFATACDLERLQELVAEWLQLIGEDPQREGLQRTPQRVAETWAFLTRGYRQDLNEIVNGAVFHVDHDTMVVVKGIEFYSLCEHHLLPFFGHVHIGYVPRGRILGLSKFARVVDLYARRLQVQERLTQQIAQAIQEVLDPQGVAVVADGIHLCMMMRGVEKQHARTTTSAMLGIFESSAGARDEFYRLLSTTT

SEQ ID NO: 5263 - protein, 207 aa, unidentified
  source 1..207: note = Unknown
  REGION 1..207: note = tr|A0A2H5Z4N8|A0A2H5Z4N8_9BACT GTP cyclohydrolase 1; OS = bacterium HR28 OX=2035423 GN=folE PE=3 SV=1
MTQPERVIEAEDTGLRFTTSCDLARLQELVAEWLELIGEDPQREGLERTPQRVAEAWAFLTRGYRQNLQEIVNGAIFHVEENTMVVVKGIEFYSMCEHHLLPFFGHIHIGYLPQGKILGLSKFARIVDLYARRLQVQERLTQQVAQAIQDLLAPQGVAVVADGIHLCMMMRGVEKQHARTTTSAMLGIFRESSEARDEFYRLLSTTT

SEQ ID NO: 5264 - protein, 206 aa, unidentified
  source 1..206: note = Unknown
  REGION 1..206: note = tr|A0A2H5ZF75|A0A2H5ZF75_9BACT GTP cyclohydrolase 1; OS = bacterium HR29 OX=2035424 GN=folE PE=3 SV=1
MAFEPRAIGLDGRGAVTERGVDRERIQAAVRELILAIGEDPARDGLRDTPRRIADMYAEIFEGLTIDPREYLRVGFEVPHDEMVILRNIPFYSMCEHHFLPFHGEAHVGYVPDSRVVGISKLARVVEAYARRPQIQEKLTSQIAEAIMEVLEPDGVAVVIEAEHLCMTMRGVKKPGSRMVTSAMRGQFRRSAVTRSEFLALVRGTV

SEQ ID NO: 5265 - protein, 207 aa, unidentified
  source 1..207: note = Unknown
  REGION 1..207: note = tr|A0A2H5ZN95|A0A2H5ZN95_9BACT GTP cyclohydrolase 1; OS = bacterium HR30 OX=2035425 GN=folE PE=3 SV=1
MILKPTLLRRTGVSLTCRHMAEQTRLEQVVSELLRLIGENPDREGLRKTPARVARALKYLTKGYAEDPKHVINNALFTEDYSEMIVMKDVDFFSLCEHHILPFFGRATIAYIPRHKIVGISKLARLVDVYARRLQVQERMTTQIATTLMEELDPLGVGVVLRAEHLCMRMRGVEKQNSVVVTSAMLGVFRTHQETREEFMTLVNGTR

SEQ ID NO: 5266 - protein, 204 aa, unidentified
  source 1..204: note = Unknown
  REGION 1..204: note = tr|A0A2H5ZV35|A0A2H5ZV35_9BACT GTP cyclohydrolase 1; OS = bacterium HR32 OX=2035427 GN=folE PE=3 SV=1
MDGREPTARLVPNPRRGTVDRERIEAAVLEILRAIGEDPEREGLRETPRRIAEMYAELFSGLHRDPAVHLEVGFEDEEHHEMVVLKDIPFYSSCEHHLLPFHGVAHVGYVPNGRIVGISKVARVVETLARRPQVQERLTSQIADLLMDRLHAKGAAVVIEAEHLCMTMRGVKKPGSVMVTSAMRGLFRDDARTRAEFLSLIRAR

SEQ ID NO: 5267 - protein, 205 aa, unidentified
  source 1..205: note = Unknown
  REGION 1..205: note = tr|A0A2H6A0Z2|A0A2H6A0Z2_9BACT GTP cyclohydrolase 1; OS = bacterium HR33 OX=2035428 GN=folE PE=3 SV=1
MSGSKTKSASVEVVPAGARPIAPLVREILEILGEDPRRPGLRRTPERVEQTLRTLTRGYTESVDEVVGGAVFEEKHENMVLVRDIEIYSLCEHHLLPFFGKAHVAYLPNGKIVGLSKIPRLVDVFARRLQIQERLTDEIADALMSVVNPLGVGVVIEAYHLCMMMRGVEKQNSKAVTSAMRGVFRDDAKTRDEFLRLVHGGSWLE

SEQ ID NO: 5268 - protein, 151 aa, unidentified
  source 1..151: note = Unknown
  REGION 1..151: note = tr|A0A2H6AHB2|A0A2H6AHB2_9BACT GTP cyclohydrolase 1; OS = bacterium HR36 OX=2035431 GN=folE PE=3 SV=1
MYAELFGGLHEDPRRHLEKCFVEKYDEIVLVKGISFESLCEHHLLPFLGQAHIAYIPNGKIVGLSKLARVVEVLAHRPQVQERLTEQLADLLMQELEPKGVAVIMEATHTCMTIRGIRKPTSVCTTSAMRGVFKSNLSTRTELMSLIYGSK

SEQ ID NO: 5269 - protein, 184 aa, unidentified
  source 1..184: note = Unknown
  REGION 1..184: note = tr|A0A2H6ALC9|A0A2H6ALC9_9BACT GTP cyclohydrolase 1; OS = bacterium HR37 OX=2035432 GN=folE PE=3 SV=1
MSIEDAVREILVEIGENPERQGLKDTPLRIARMYKELTSGYRMSPHDIINGAIFDIKYDEMVVVKDIEFYSLCEHHLLPFFGTCHVAYIPNGKIIGLSKIPRIVELFSRRLQVQERLTVEIADFLNRILNPDGVAVVMEAYHLCMAMRGIKKAKASMLTSAMHGVFKEDERTRIEFLSLIGKKA

SEQ ID NO: 5270 - protein, 200 aa, unidentified
  source 1..200: note = Unknown
  REGION 1..200: note = tr|A0A2H6AZT5|A0A2H6AZT5_9BACT GTP cyclohydrolase 1; OS = bacterium HR40 OX=2035435 GN=folE PE=3 SV=1
MTRERPSRAEAEAAVRTLLAFSGDDPGREELRATPARVVEAFEEYFSGYRREAAELFRDRMPAGPMRGQPVVLRGIDFASHCEHHLAPFFGTAQVGFIAGENLVGLGQLVELVRIYSRRLQIQERLTRQIADALEAHLAPLGVGVLLEATHTCAAVRGPCQPRGRFVTACFRGAFAEDSALRELLRSGTTGSSSPSVVCG

SEQ ID NO: 5271 - protein, 334 aa, unidentified
  source 1..334: note = Unknown
  REGION 1..334: note = tr|A0A2H6B7Z2|A0A2H6B7Z2_9BACT GTP cyclohydrolase FolE2 OS=bacterium HR41 OX=2035436 GN=folE2 PE=3 SV=1
MSQLPTTDAPDVQARRPQATVSLTRVGVIGVEKVLRIRSNGDEQLFYAQLECFVDLPPDQKGAHMSRFEEVVNEAIDTVVLGEAFRAETLAAHIAERVRERQGGLRAEARIAARYPISRPAPASGVPTQEIYTMFGVAIASERGTRRLVGVQAQGMTACPCAQELVRDRAERRLREAGVDAAVVEEVLREVPVATHNQRGIGTLYIGAVEACREGIEATDLLEIVESSMSAEIYELMKRSDEALVVERAHRTPRFVEDCVREMVRQAVARYEPLGPEAFVYARQENLETIHRHNVVAERSGLLGELASELAGEQHVLHHVTMREWLEGREASAT

SEQ ID NO: 5272 - protein, 190 aa, unidentified
  source 1..190: note = Unknown
  REGION 1..190: note = tr|A0A3L8A266|A0A3L8A266_9BACT GTP cyclohydrolase 1; OS = bacterium J10(2018) OX=2320122 GN=folE PE=3 SV=1
MDKDQVIARIAEHYEGIIRLLGDDPSRHGLEKTPVRAAKALYYATQGYRENADDIMKSAIFEYAGSQMVIVKDIEFYSFCEHHILPFFGRVSVGYIPDGEMIGLSKLARAVNVYARRLQVQERLTAEICASISRSLHTKGVIVACNAQHLCMKMRGVEKQDSSTTTIEYNGLFSTPEMRAEFFSLLRDIH

SEQ ID NO: 5273 - protein, 200 aa, unidentified
  source 1..200: note = Unknown
  REGION 1..200: note = tr|A0A202DZQ3|A0A202DZQ3_9BACT GTP cyclohydrolase 1; OS = bacterium K02(2017) OX=1932696 GN=folE PE=3 SV=1
MNPKIIQIKEKENNTNNQIISESVTSILNAIGENTQREGLLKTPHRVAKSLQFLTKGYQEDPYEIINNAIFEEEIDEMVVVKDIQLYSLCEHHLLPFVGKAHIAYIPNGKIIGLSKVARLVEIFARRLQVQERLTKQIAEIIDETLQPQGVAVVIQAAHMCMQMRGVQKQNSLMITSSMKGAFQQPATRNEFMNFVKGSL

SEQ ID NO: 5274 - protein, 203 aa, unidentified
  source 1..203: note = Unknown
  REGION 1..203: note = tr|A0A4S1HG26|A0A4S1HG26_9BACT GTP cyclohydrolase 1; OS = bacterium M00.F.Ca.ET.141.01.1.1 OX=2563898 GN=folE; PE = 3 SV=1
MSKNNEKAAPQGDVTQDQAEDAVRTLLRWAGEDPSREGLLDTPRRVAEAYGDWFSGYRDDPRAYMERTFEEVAGYDELIVLRDIEYESHCEHHMAPIIGRVHVGYLPAGKVVGISKLARVVEAYARRFQVQEKMTAQIAQCIQDVLQPIGVGVVVEGAHECMTTRGIHKRGVSMVTSKMLGSFRDDARTRAEFLRFIEVGGKR

SEQ ID NO: 5275 - protein, 211 aa, unidentified
  source 1..211: note = Unknown
  REGION 1..211: note = tr|A0A4S1IBW4|A0A4S1IBW4_9BACT GTP cyclohydrolase 1; OS = bacterium M00.F.Ca.ET.141.01.1.1 OX=2563898 GN=folE; PE = 3 SV=1
MDAVIKKLMPQSAYMEKPVTDRPSEAEVEAAVHTLLRWTGDNPDREGLIDTPKRVAKAYREMFGGYDMCPADELGRTFEEVAGYDDLVIVKDIQFHSHCEHHMVPIIGKAHVGYLPDGKVVGLSKIARVVDIFAHRLQTQEALTAQIAGVIQDVLNPRGVAVMIEAEHMCMAMRGIRKQGSTTLTSTFTGVFKDTPEEQVRFVTMVRGGGA

SEQ ID NO: 5276 - protein, 210 aa, unidentified
  source 1..210: note = Unknown
  REGION 1..210: note = tr|A0A4S1AYK9|A0A4S1AYK9_9BACT GTP cyclohydrolase 1; OS = bacterium M00.F.Ca.ET.146.01.1.1 OX=2563899 GN=folE; PE = 3 SV=1
MDAVIKKIMPPSEYMEKPVTDRPTEAEVEAAVRTLLRWTGDNPDREGLIDTPKRVTKAFREMFNGYDMCAADELGRTFEEVAGYDDLVIVRNIKFHSHCEHHMVPIIGKAHVGYLPDGKVVGLSKIARVVDIFAHRLQTQEAMTAQIAGVIQDVLNPRGVAVMLEAEHMCMAMRGIRKQDSTTLTSTFTGVFKDAPEEQVRFVTMVRAGG

SEQ ID NO: 5277 - protein, 211 aa, unidentified
  source 1..211: note = Unknown
  REGION 1..211: note = tr|A0A4S1B3X8|A0A4S1B3X8_9BACT GTP cyclohydrolase 1; OS = bacterium M00.F.Ca.ET.152.01.1.1 OX=2563900 GN=folE; PE = 3 SV=1
MDAVIKKLMPQSAYMEKPVTDRPSEAEVEAAVHTLLRWTGDNPDREGLIDTPKRVAKAFREMFGGYDMCPAEELGRTFEEVAGYDDLVIVRDIKFHSHCEHHMVPIIGKAHVGYLPDGKVVGLSKIARVVDIFAHRLQTQEALTAQIAGVIQDVLNPRGVAVMIEAEHMCMAMRGIRKQGSTTLTSTFTGVFKDTPEEQVRFVTMVRGGGA

SEQ ID NO: 5278 - protein, 212 aa, unidentified
  source 1..212: note = Unknown
  REGION 1..212: note = tr|A0A4S0YSR3|A0A4S0YSR3_9BACT GTP cyclohydrolase 1; OS = bacterium M00.F.Ca.ET.155.01.1.1 OX=2563901 GN=folE; PE = 3 SV=1
MTSSNKEHTTPAAGNGRPSREEAEAAVRVLLRWAGDDPSREGLIDTPARVVRSYEEFFAGYQVDPREILARTFSEVDGYDEMIVLKDIRFESYCEHHMVPIIGRAHVAYLPGHRVVGISKLARLVDAFAKRLQIQEKMTVQIADTLNEVLQPVGVGVILEAAHQCMSTRGVHKAGVTMVTSRMLGSFRTDPSTRREFLSIVGNPGAVAVPNT

SEQ ID NO: 5279 - protein, 268 aa, unidentified
  source 1..268: note = Unknown
  REGION 1..268: note = tr|A0A4S0XWQ8|A0A4S0XWQ8_9BACT GTP cyclohydrolase FolE2 OS=bacterium M00.F.Ca.ET.155.01.1.1 OX=2563901; GN = folE2 PE=3 SV=1
MNQMNPAFVMPDVQSTHDTRQIPIQRVGVKAVRHPLTVRTASGEVQPTVGTWNLDVHLPADQKGTHMSRFVALLEEHKAPLEAATFRTMLAAMLEKLEAEAGRIEVSFPYFVNKTAPVSGVQSLLDYEVTLTGDTRNGATRLYLKVLVPVTSLCPCSKKISQYGAHNQRSHVTINAELAGEVAVEDLIRIAEEEASCELWGLLKRPDEKFVTERAYENPKFVEDLVRDVAQRLNADERIVAYVLEAENFESIHNHSAYALIERDKRVL

SEQ ID NO: 5280 - protein, 210 aa, unidentified; identical to SEQ ID NO: 5276
  source 1..210: note = Unknown
  REGION 1..210: note = tr|A0A4S1A3C1|A0A4S1A3C1_9BACT GTP cyclohydrolase 1; OS = bacterium M00.F.Ca.ET.156.01.1.1 OX=2563902 GN=folE; PE = 3 SV=1

SEQ ID NO: 5281 - protein, 211 aa, unidentified; identical to SEQ ID NO: 5275
  source 1..211: note = Unknown
  REGION 1..211: note = tr|A0A4S0ZLG3|A0A4S0ZLG3_9BACT GTP cyclohydrolase 1; OS = bacterium M00.F.Ca.ET.156.01.1.1 OX=2563902 GN=folE; PE = 3 SV=1

SEQ ID NO: 5282 - protein, 210 aa, unidentified; identical to SEQ ID NO: 5276
  source 1..210: note = Unknown
  REGION 1..210: note = tr|A0A4V3NEM8|A0A4V3NEM8_9BACT GTP cyclohydrolase 1; OS = bacterium M00.F.Ca.ET.157.01.1.1 OX=2563903 GN=folE; PE = 3 SV=1

SEQ ID NO: 5283 - protein, 210 aa, unidentified; identical to SEQ ID NO: 5276
  source 1..210: note = Unknown
  REGION 1..210: note = tr|A0A4S0W9A2|A0A4S0W9A2_9BACT GTP cyclohydrolase 1; OS = bacterium M00.F.Ca.ET.159.01.1.1 OX=2563904 GN=folE; PE = 3 SV=1

SEQ ID NO: 5284 - protein, 211 aa, unidentified; identical to SEQ ID NO: 5277
  source 1..211: note = Unknown
  REGION 1..211: note = tr|A0A4S2JUI6|A0A4S2JUI6_9BACT GTP cyclohydrolase 1; OS = bacterium M00.F.Ca.ET.162.01.1.1 OX=2563905 GN=folE; PE = 3 SV=1

SEQ ID NO: 5285 - protein, 210 aa, unidentified; identical to SEQ ID NO: 5276
  source 1..210: note = Unknown
  REGION 1..210: note = tr|A0A4S0YXJ9|A0A4S0YXJ9_9BACT GTP cyclohydrolase 1; OS = bacterium M00.F.Ca.ET.163.01.1.1 OX=2563906 GN=folE; PE = 3 SV=1

SEQ ID NO: 5286 - protein, 203 aa, unidentified; identical to SEQ ID NO: 5274
  source 1..203: note = Unknown
  REGION 1..203: note = tr|A0A4S0YDT9|A0A4S0YDT9_9BACT GTP cyclohydrolase 1; OS = bacterium M00.F.Ca.ET.163.01.1.1 OX=2563906 GN=folE; PE = 3 SV=1

SEQ ID NO: 5287 - protein, 208 aa, unidentified; identical to SEQ ID NO: 4184
  source 1..208: note = Unknown
  REGION 1..208: note = tr|A0A4S1H9Y8|A0A4S1H9Y8_9BACT GTP cyclohydrolase 1; OS = bacterium M00.F.Ca.ET.168.01.1.1 OX=2563907 GN=folE; PE = 3 SV=1

SEQ ID NO: 5288 - protein, 203 aa, unidentified; identical to SEQ ID NO: 5274
  source 1..203: note = Unknown
  REGION 1..203: note = tr|A0A4S0QN68|A0A4S0QN68_9BACT GTP cyclohydrolase 1; OS = bacterium M00.F.Ca.ET.177.01.1.1 OX=2563908 GN=folE; PE = 3 SV=1

SEQ ID NO: 5289 - protein, 208 aa, unidentified
  source 1..208: note = Unknown
  REGION 1..208: note = tr|A0A4S0QRP4|A0A4S0QRP4_9BACT GTP cyclohydrolase 1; OS = bacterium M00.F.Ca.ET.177.01.1.1 OX=2563908 GN=folE; PE = 3 SV=1
MDAVIKKLMPPSSYMEKPVTDRPSEAEVEAAVRTLLRWTGDNPDREGLVDTPKRVTKAFREMFNGYDMCPAEELGRTFEEVAGYDDLVIVRDIKFHSHCEHHMVPIIGKAHVGYLPDGKVVGLSKIARVVDIFAHRLQTQEAMTAQIAGVIQDVLNPRGVAVMIEAEHMCMAMRGIRKQDSTTLTSTFTGVFKDTPEEQVRFVTMVRG

SEQ ID NO: 5290 - protein, 208 aa, unidentified; identical to SEQ ID NO: 4184
  source 1..208: note = Unknown
  REGION 1..208: note = tr|A0A4V3MJ35|A0A4V3MJ35_9BACT GTP cyclohydrolase 1; OS = bacterium M00.F.Ca.ET.179.01.1.1 OX=2563909 GN=folE; PE = 3 SV=1

SEQ ID NO: 5291 - protein, 210 aa, unidentified
  source 1..210: note = Unknown
  REGION 1..210: note = tr|A0A4S0LS29|A0A4S0LS29_9BACT GTP cyclohydrolase 1; OS = bacterium M00.F.Ca.ET.180.01.1.1 OX=2563910 GN=folE; PE = 3 SV=1
MEDKGLEEKVNDLISNNFVNNVEEKKRQMNLAMESVRNIIELCGDDPERDGLIDTPYRFIKAFLEYTEGYNEDPKTHLTKTFDVKQDDMVLVKDIEFYSMCEHHFAPFYGVVHVGYIPNEKVTGLSKIARVVEGYARRFQVQERLTTQIAQAINEVLEPRGVMVVIEAKHMCMCSRGIKKEQSSTITSAVHGLFHKNYNTRNEFLTLINK

SEQ ID NO: 5292 - protein, 292 aa, unidentified
  source 1..292: note = Unknown
  REGION 1..292: note = tr|A0A4S0LTR2|A0A4S0LTR2_9BACT GTP cyclohydrolase FolE2 OS=bacterium M00.F.Ca.ET.180.01.1.1 OX=2563910; GN = folE2 PE=3 SV=1
MTEFDLSTREGRWKHFGSVDPIEGTKPTVKEEMTDLQSTNKNYLFEIEEVGIKNLVYPVLVDRFQTAGNFSFSTSLNQDEKGINMSRILESVEKHYDNGIELDFDSLYRLLRSLQERMEQNAAGVDVSAKWFFDRHSPITNIKAVGHADVTYGMAIDKDSITRKEITLQAAVTTLCPCSKEISEYSAHNQRGIITVKAILNNEAILTDDYKEKILDAMEANASSILYPILKRPDEKSVTERAYENPRFVEDLIRLIAADLVDFDWIEGFDIECRNEESIHQHDAFAKIKYRK

SEQ ID NO: 5293 - protein, 212 aa, unidentified; identical to SEQ ID NO: 5278
  source 1..212: note = Unknown
  REGION 1..212: note = tr|A0A4S0JB81|A0A4S0JB81_9BACT GTP cyclohydrolase 1; OS = bacterium M00.F.Ca.ET.191.01.1.1 OX=2563911 GN=folE; PE = 3 SV=1

SEQ ID NO: 5294 - protein, 268 aa, unidentified; identical to SEQ ID NO: 5279
  source 1..268: note = Unknown
  REGION 1..268: note = tr|A0A4V3M3P8|A0A4V3M3P8_9BACT GTP cyclohydrolase FolE2 OS=bacterium M00.F.Ca.ET.191.01.1.1 OX=2563911; GN = folE2 PE=3 SV=1

SEQ ID NO: 5295 - protein, 208 aa, unidentified; identical to SEQ ID NO: 4184
  source 1..208: note = Unknown
  REGION 1..208: note = tr|A0A4S0GR64|A0A4S0GR64_9BACT GTP cyclohydrolase 1; OS = bacterium M00.F.Ca.ET.194.01.1.1 OX=2563912 GN=folE; PE = 3 SV=1

SEQ ID NO: 5296 - protein, 203 aa, unidentified; identical to SEQ ID NO: 5274
  source 1..203: note = Unknown
  REGION 1..203: note = tr|A0A4S0EAM8|A0A4S0EAM8_9BACT GTP cyclohydrolase 1; OS = bacterium M00.F.Ca.ET.199.01.1.1 OX=2563913 GN=folE; PE = 3 SV=1

SEQ ID NO: 5297 - protein, 211 aa, unidentified; identical to SEQ ID NO: 5275
  source 1..211: note = Unknown
  REGION 1..211: note = tr|A0A4S0EE85|A0A4S0EE85_9BACT GTP cyclohydrolase 1; OS = bacterium M00.F.Ca.ET.199.01.1.1 OX=2563913 GN=folE; PE = 3 SV=1

SEQ ID NO: 5298 - protein, 211 aa, unidentified; identical to SEQ ID NO: 5277
  source 1..211: note = Unknown
  REGION 1..211: note = tr|A0A4R9ZAK4|A0A4R9ZAK4_9BACT GTP cyclohydrolase 1; OS = bacterium M00.F.Ca.ET.205.01.1.1 OX=2563914 GN=folE; PE = 3 SV=1

SEQ ID NO: 5299 - protein, 210 aa, unidentified; identical to SEQ ID NO: 5276
  source 1..210: note = Unknown
  REGION 1..210: note = tr|A0A4R9V6H6|A0A4R9V6H6_9BACT GTP cyclohydrolase 1; OS = bacterium M00.F.Ca.ET.221.01.1.1 OX=2563915 GN=folE; PE = 3 SV=1

SEQ ID NO: 5300 - protein, 210 aa, unidentified; identical to SEQ ID NO: 5276
  source 1..210: note = Unknown
  REGION 1..210: note = tr|A0A4R9VCK3|A0A4R9VCK3_9BACT GTP cyclohydrolase 1; OS = bacterium M00.F.Ca.ET.222.01.1.1 OX=2563916 GN=folE; PE = 3 SV=1

SEQ ID NO: 5301 - protein, 210 aa, unidentified; identical to SEQ ID NO: 5276
  source 1..210: note = Unknown
  REGION 1..210: note = tr|A0A4R9TKJ1|A0A4R9TKJ1_9BACT GTP cyclohydrolase 1; OS = bacterium M00.F.Ca.ET.227.01.1.1 OX=2563917 GN=folE; PE = 3 SV=1

SEQ ID NO: 5302 - protein, 268 aa, unidentified; identical to SEQ ID NO: 5279
  source 1..268: note = Unknown
  REGION 1..268: note = tr|A0A4R9R6N8|A0A4R9R6N8_9BACT GTP cyclohydrolase FolE2 OS=bacterium M00.F.Ca.ET.228.01.1.1 OX=2563918; GN = folE2 PE=3 SV=1

SEQ ID NO: 5303 - protein, 212 aa, unidentified; identical to SEQ ID NO: 5278
  source 1..212: note = Unknown
  REGION 1..212: note = tr|A0A4V6QPR6|A0A4V6QPR6_9BACT GTP cyclohydrolase 1; OS = bacterium M00.F.Ca.ET.228.01.1.1 OX=2563918 GN=folE; PE = 3 SV=1

SEQ ID NO: 5304 - protein, 292 aa, unidentified; identical to SEQ ID NO: 5292
  source 1..292: note = Unknown
  REGION 1..292: note = tr|A0A4R9SH55|A0A4R9SH55_9BACT GTP cyclohydrolase FolE2 OS=bacterium M00.F.Ca.ET.229.01.1.1 OX=2563919; GN = folE2 PE=3 SV=1

SEQ ID NO: 5305 - protein, 210 aa, unidentified; identical to SEQ ID NO: 5291
  source 1..210: note = Unknown
  REGION 1..210: note = tr|A0A4R9SES3|A0A4R9SES3_9BACT GTP cyclohydrolase 1; OS = bacterium M00.F.Ca.ET.229.01.1.1 OX=2563919 GN=folE; PE = 3 SV=1

SEQ ID NO: 5306 - protein, 210 aa, unidentified; identical to SEQ ID NO: 5276
  source 1..210: note = Unknown
  REGION 1..210: note = tr|A0A4V6QPU4|A0A4V6QPU4_9BACT GTP cyclohydrolase 1; OS = bacterium M00.F.Ca.ET.230.01.1.1 OX=2563920 GN=folE; PE = 3 SV=1

SEQ ID NO: 5307 - protein, 194 aa, unidentified
  source 1..194: note = Unknown
  REGION 1..194: note = tr|A0A4V3KEI3|A0A4V3KEI3_9BACT GTP cyclohydrolase 1; OS = bacterium M00.F.Ca.ET.230.01.1.1 OX=2563920 GN=folE; PE = 3 SV=1
MTMPANFDEIIQQNSDAYRTLIASTGEDLTREGLLNTPERAAKAFSFLTQGYHQDLVEITNNAIFPTDNNELVMVKNIEFYSMCEHHMLPFYGVAHVAYLPDGKVIGLSKMARIVDMYARRLQIQENLTRQIAQAVMDMTGAKGAAVVMDAAHMCMMMRGVMKQKSDTRSMSLLGEFKHNTEARQALLMAIPSA

SEQ ID NO: 5308 - protein, 214 aa, unidentified
  source 1..214: note = Unknown
  REGION 1..214: note = tr|A0A5J4DY61|A0A5J4DY61_9BACT GTP cyclohydrolase 1; OS = bacterium MnTg02 OX=2080452 GN=folE PE=4 SV=1
MDAIVKKMPSSKPSVLGSARKHARPSREEAEQAVRTLIRWAGDDPEREGLMDTPKRVVNAYSEFFRGYDECPIDALSRTFEEVGGYDDIVMLRDIDVNSHCEHHMIPFVGKVHLAYFPTKRVVGISKLARVVEIFARRLQTQETMTAQIAEAINVALEPKGVAVMIEAVHQCMSLRGVQKPNVATITTQYLGLFKEEPNRQANFLNLVRSGITG

SEQ ID NO: 5309 - protein, 268 aa, unidentified
  source 1..268: note = Unknown
  REGION 1..268: note = tr|A0A5J4E6M8|A0A5J4E6M8_9BACT GTP cyclohydrolase FolE2 OS=bacterium MnTg03 OX=2080453 GN=folE2 PE=4 SV=1
MSQTATTTPGIPDIQGSADTRRLAINKVGIKDIRHPIIVKDRSDGVQHTIATFNMFVYLPHQFKGTHMSRFVKILNDHEKEISVSSFRDMLAEMASMLEAESGNVEMNFPYFVNKKAPISGVESLLDYDVTLIGEIDKGVTSTRIKVQVPVTSLCPCSKSISDYGAHNQRSHVTVNARTSGFIWIEEIIDIVEKQASCELYGLLKRPDEKYVTERAYDNPKFVEDMVRDIAVELNKDERIRQYVLESENFESIHNHSAYAMIEYDKDG

SEQ ID NO: 5310 - protein, 269 aa, unidentified
  source 1..269: note = Unknown
  REGION 1..269: note = tr|A0A5J4ECM2|A0A5J4ECM2_9BACT GTP cyclohydrolase FolE2 OS=bacterium MnTg04 OX=2080454 GN=folE2 PE=4 SV=1
MAREQQKHEAGAIEDVQGSADLRQIPINKVGIKDIYHPVIVGDRSGREQHTIANFNMYVNLPHNFKGTHMSRFVEILNLHEREITVKSFKEMLSELTDRLDADAGHIEMSFPYFVNKTAPVSGVQSLLDYQVTFAGERRNGKNSIWIKVVVPVTSLCPCSKSISDRGAHNQRSHVTINARIEGFMWLEELIDLAESEASCQLYGILKRPDEKYVTEQAYDNPKFVEDMVRDIAARLNADDRVRAYVIESENFESIHNHSAYALIEYDKD

SEQ ID NO: 5311 - protein, 183 aa, unidentified
  source 1..183: note = Unknown
  REGION 1..183: note = tr|A0A0S8HT10|A0A0S8HT10_9BACT GTP cyclohydrolase 1; OS = bacterium SM23_31 OX=1703762 GN=folE PE=3 SV=1
MEALIRELLAKIGEDPTREGLINTPGRVAAAYEYFSEGYRADLNEIVNGAIFQENYDEMVLVKNIDIFSLCEHHLLPFYGVCHVGYIPDGKIIGLSKIPRIVEVFAKRLQIQERLTDQIAETIENILNPKGIGVVISARHLCMIMRGVKKQNTVVTTSSMLGCFKSDQRTRAEFLSLINQTQM

SEQ ID NO: 5312 - protein, 194 aa, unidentified
  source 1..194: note = Unknown
  REGION 1..194: note = tr|A0A1Z8MYL0|A0A1Z8MYL0_9BACT GTP cyclohydrolase 1; OS = bacterium TMED15 OX=1986651 GN=folE PE=3 SV=1
MSSYNFDEKTALVDNSIEEHYQNLLQQIGEDPERQGLVKTPKRAALAMQYLTQGYQQDIGKIVNQAIFDEEYDDMVIVKDIEFYSLCEHHILPFFGKCHVGYLPQNKIIGLSKIPRLVDVFARRLQVQERLTYQVAQILDEVLSPKGVAVVIEAQHMCMMVRGVEKQSSSTVTNVMLGEFREGHATRAEFMNCL

SEQ ID NO: 5313 - protein, 179 aa, unidentified
  source 1..179: note = Unknown
  REGION 1..179: note = tr|A0A1Z9IT15|A0A1Z9IT15_9BACT GTP cyclohydrolase 1; OS = bacterium TMED161 OX=1986652 GN=folE PE=3 SV=1
  VARIANT 17: note = Xaa can be any naturally occurring amino acid
  VARIANT 19: note = Xaa can be any naturally occurring amino acid
  VARIANT 26: note = Xaa can be any naturally occurring amino acid
MEKITKELLIELGEDPXRXGLIKTPXRVSKSWKFLTGGYNQTIDQVVNDAIFSVDNQDMIIVKDINYYSLCEHHLLPFMGKVHVGYIPNGKVLGLSKIPRIIDIYARRLQLQEQLTHQIAQGITEFLNPKGVGVVIEGEHMCMRMRGVQKQNASMQTSTMTGIFRKEKKTREEFLNLIN

SEQ ID NO: 5314 - protein, 221 aa, unidentified
  source 1..221: note = Unknown
  REGION 1..221: note = tr|A0A1Z9VRA5|A0A1Z9VRA5_9BACT GTP cyclohydrolase 1; OS = bacterium TMED178 OX=1986653 GN=folE PE=3 SV=1
MEFKIKSLLEKLQNYISIFRKKEKKKNHGEKNEETVEKMESAVRTILEGIGEDPTRAGLVDTPSRVTKALLYMTKGYHEGLSNIVGNAVFDEHHSEMVLLRDIDIFSLCEHHMVPFLGKVHIAYIPRSKVLGLSKLARIAEIFSRRLQVQERLTKQIAEAVEEAISPRGVAVVIQSTHMCMVMRGVEKSGSSTMTSSMRGCFKKQRYQEEFFALLGHPSLT

SEQ ID NO: 5315 - protein, 189 aa, unidentified
  source 1..189: note = Unknown
  REGION 1..189: note = tr|A0A1Z9VSB4|A0A1Z9VSB4_9BACT GTP cyclohydrolase 1; OS = bacterium TMED178 OX=1986653 GN=folE PE=3 SV=1
MSTKVSRTEAKKAIETLLKYIGEDLKREGLVDTPERVIKSFDTFYGGYQQDPKAPLQKTFRYYKDYNEVVLVKDIDIMSHCEHHLVPIIGKAHIAYIPHKKIVGLSKLARVADIFSRRLQTQESLTVSIAETIYECLEPKGVAVYINAVHQCMTTRGIQNKHSSTTTTHFKGIFTEIQHRQEFLALLRS

SEQ ID NO: 5316 - protein, 231 aa, unidentified
  source 1..231: note = Unknown
  REGION 1..231: note = tr|A0A1Z9M5X9|A0A1Z9M5X9_9BACT GTP cyclohydrolase 1; OS = bacterium TMED198 OX=1986779 GN=folE PE=3 SV=1
MSKKSIDKVLKEEQLKFENQGDDHSVKSIDTPMREGAFEKSSSEKINLIKDHFYEIMDILGLDMSDDSLKGTPYRVAKMYVSEIFNGLDEEHKPKVTLFDNKYQYGKMLVERDISYYSMCEHHFMPIYGKAHIAYISSGKVIGLSKLHRIVKYFASRPQVQERMTVQVFQELKKVLNTEDVAVMIDGFHMCVSARGTKDITSSTVTMESGGSFREDRKWAEFMELVKPSKR

SEQ ID NO: 5317 - protein, 187 aa, unidentified
  source 1..187: note = Unknown
  REGION 1..187: note = tr|A0A1Z9RVQ7|A0A1Z9RVQ7_9BACT GTP cyclohydrolase 1; OS = bacterium TMED250 OX=1986657 GN=folE PE=3 SV=1
MNDKIEKISQITADLIESIGEDKNREGLLKTPMRSAKAWDFFTQGYSAKIDEVINDAIFDEDCNDMVVVRDIEFFSMCEHHMVPFFGRAHVGYIPNGKVIGLSKIPRIVDMFSRRLQVQERLTHQVANTVQETLEPTGVAVVMEGRHMCMQMRGVAKQNSFTTTSAMLGQFRKSNETRAEFLSFIGK

SEQ ID NO: 5318 - protein, 202 aa, unidentified
  source 1..202: note = Unknown
  REGION 1..202: note = tr|A0A1Z9TJS8|A0A1Z9TJS8_9BACT GTP cyclohydrolase 1; OS = bacterium TMED277 OX=1986659 GN=folE PE=3 SV=1
MDKNVKKETTSNKINNGVSEDDARHAIKTLLQWIGEDSEREGLVETPKRVLKAYKEWFAGYNQDPKEILSKTFSEVDGYDSLIVLRDISFSSYCEHHIAPITGKVSIGYLPKEKVVGLSKLARLVNVFAKRLQVQEKMTAQIANALQLNLQCDGVGVVMEAEHHCMCTRGVNKLGASMKTSYFTGELKKDLARREEFFRSII

SEQ ID NO: 5319 - protein, 189 aa, unidentified
  source 1..189: note = Unknown
  REGION 1..189: note = tr|A0A3R7V5Z0|A0A3R7V5Z0_9BACT GTP cyclohydrolase 1; OS = bacterium TMED46 OX=1986782 GN=folE PE=3 SV=1
MSNKQTIEQLTKALLENIGENPDREGLIKTPTRVAKAWEFISRGYNQNIDDIINGAIFNEDAKDMVIVRDIEFFSLCEHHLLPFFGKAHVGYIPNGKVIGLSKIPRIIDMYSRRLQVQERLTHQIADAIKAVLEPKGVAMVMEGRHMCMQMRGVEKQNSLASTSAMSGQFKKSAETRSEFLSIINRRSD

SEQ ID NO: 5320 - protein, 232 aa, unidentified
  source 1..232: note = Unknown
  REGION 1..232: note = tr|A0A1Z8KNU1|A0A1Z8KNU1_9BACT GTP cyclohydrolase 1; OS = bacterium TMED6 OX=1986783 GN=folE PE=3 SV=1
  VARIANT 212: note = Xaa can be any naturally occurring amino acid
MSKNLSDDIEILDSIKKKIDEEGDDHILTNIETPILDNAFDMSDEEKIERIQSHFEEIMLILGLDLSDDSLKGTPYRVAKMYVKEMFSGLNPSNKPNYSLFDNKYEYDKMIIEKNITFYSNCEHHFLPIIGKVHIGYISSGNVIGLSKMHRIVNYFAKRPQVQERMTVQIFNELKLVLNTDNVGLIVDADHLCVSSRGIKDITSSTITVEAXGKFKDKNHWNEFLVLTNSDK

SEQ ID NO: 5321 - protein, 188 aa, unidentified
  source 1..188: note = Unknown
  REGION 1..188: note = tr|A0A1Z8ZAC4|A0A1Z8ZAC4_9BACT GTP cyclohydrolase 1; OS = bacterium TMED80 OX=1986784 GN=folE PE=3 SV=1
MENKNIEKLTIQLLKEIGEDPSREGLLRTPKRVSKAWQFFAKGYNQDLEKIINNAIFNEDAKDMVIVRDIEFFSLCEHHLIPFFGRAHVGYLPNGKVVGLSKIPRIIDMFSRRLQVQERLTRQIAETVKDILDPVGVAVIMEGQHMCMQMRGVEKQNSWTTTSSMLGKFRESDRTRTEFLSIIGLNRT

SEQ ID NO: 5322 - protein, 210 aa, unidentified
  source 1..210: note = Unknown
  REGION 1..210: note = tr|A0A0A1PHQ4|A0A0A1PHQ4_9BACT GTP cyclohydrolase 1; OS = bacterium YEK0313 OX=1522316 GN=folE_2 PE=3 SV=1
MDAAVSTLPVHKGPEARRRRRPTREEAEAAVRTLIEWVGDDPGREGLVDTPRRMVKAWDDLFRGYHLSAAEELGTVFEEVGGYGDVVLVRDIPFFSHCEHHIVPIMGKAHIAYYPREGVVGLSKLARVVDIYARRLQTQENLTAEIVGAIEASLKPRGLAVLIEAEHMCMAMRGIQKQGVSTVTTGFTGLFKDDATEQVRFMTMVRGFRA

SEQ ID NO: 5323 - protein, 197 aa, unidentified
  source 1..197: note = Bacteroidaceae bacterium
  REGION 1..197: note = tr|A0A5C6HRZ0|A0A5C6HRZ0_9BACT GTP cyclohydrolase 1; OS = Bacteroidaceae bacterium HV4-6-C5C OX=2600309 GN=folE; PE = 3 SV=1
MSKKEEVVSPASVELQEHYKRIITLLGEDADREGLLRTPERVAKAMMSLTKGYRLDPHAVLRSAKFKEAYSQMVIVKDIDFFSLCEHHMLPFYGKAHVAYIPNGYITGLSKIARVVDIFSHRLQVQERMTLQIKECIQETLNPLGVMVVVEAKHMCMQMRGVEKQNSITTTSDFTGAFNQAKTREEFMNLIRHNSPI

SEQ ID NO: 5324 - protein, 199 aa, unidentified
  source 1..199: note = Bacteroidales bacterium
  REGION 1..199: note = tr|U5Q3Y7|U5Q3Y7_9BACT GTP cyclohydrolase 1; OS = Bacteroidales bacterium CF OX=1400053 GN=folE PE=3 SV=1
MAYTKIEHYDEEVTQKLALLYKEVLHLIGEDPEREGLQLTPIRVARSIQFLTQGYEMDGAAILNSAKFKEDYKQMVIVKDIELYSMCEHHMLPFYGKAHVAYIPNGYITGLSKIARVVESYARRLQVQERLTVQIRDCIQNTLNPLGVAVVIEASHMCMQIRGVQKQNSVTTTSAFTGAFLKDIRTREEFMSLIGTSLH

SEQ ID NO: 5325 - protein, 191 aa, unidentified
  source 1..191: note = Bacteroidales bacterium
  REGION 1..191: note = tr|A0A4U1FW35|A0A4U1FW35_9BACT GTP cyclohydrolase 1; OS = Bacteroidales bacterium OX=2030927 GN=folE PE=3 SV=1
MTNQDEKIISEIAGHYREILKLIGENPDREGLQKTPLRAAKAIYDITAGYRQNPDKIATQAIFEHDGSRIVIVKDIEFYSMCEHHILPFFGKIAVGYIPKGKMIGLSKLARIVDCYARRLQVQERLTSQICKLLTTSLPNEGVIVACEAGHLCMKMRGVEKQESTTVTFDYSGKFVEDYNIRSEFLSLIKS

SEQ ID NO: 5326 - protein, 196 aa, Bacteroides acidifaciens
  REGION 1..196: note = tr|A0A3L8A991|A0A3L8A991_9BACE GTP cyclohydrolase 1; OS = Bacteroides acidifaciens OX=85831 GN=folE PE=3 SV=1
MLGKEEIISPNLEELKSHYHSIITLLGEDTEREGLLKTPERVAKAMLSLTKGYHMDPHEVLQSAKFQEEYSQMVIVKDIDFFSLCEHHMLPFYGKAHVAYIPNGYITGLSKIARVVDIFSHRLQVQERMTLQIKECIQETLNPLGVMVVVEAKHMCMQMRGVEKQNSITTTSDFTGAFNQAKTREEFMNLIQHGTL

SEQ ID NO: 5327 - protein, 197 aa, Bacteroides caccae
  REGION 1..197: note = tr|R5U1L3|R5U1L3_9BACE GTP cyclohydrolase 1; OS = Bacteroides caccae CAG:21 OX=1263037 GN=folE PE=3 SV=1
MLGKEEIVSPNLEELKSHYHSIITLLGEDAEREGLLKTPERVAKAMLSLTKGYHMDPHEVLRSAKFQEEYSQMVIVKDIDFFSLCEHHMLPFYGKAHVAYIPNGYITGLSKIARVVDIFSHRLQVQERMTLQIKECIQETLNPLGVMVVVEAKHMCMQMRGVEKQNSITTTSDFTGAFNQAKTREEFMNLIQHGTTL

SEQ ID NO: 5328 - protein, 197 aa, Bacteroides caccae; identical to SEQ ID NO: 5327
  REGION 1..197: note = tr|A0A174VYI9|A0A174VYI9_9BACE GTP cyclohydrolase 1; OS = Bacteroides caccae OX=47678 GN=folE PE=3 SV=1

SEQ ID NO: 5329 - protein, 196 aa, unidentified
  source 1..196: note = Bacteroides caecimuri
  REGION 1..196: note = tr|A0A4S2DEX9|A0A4S2DEX9_9BACE GTP cyclohydrolase 1; OS = Bacteroides caecimuri OX=2516958 GN=folE PE=3 SV=1
MLEKEEIVSPNLEELKSHYRSIITLLGEDAEREGLLKTPERVAKAMLSLTKGYHMDPHEVLRSAKFQEEYSQMVIVKDIDFFSLCEHHMLPFYGKAHVAYIPNGYITGLSKIARVVDIFSHRLQVQERMTLQIKECIQETLNPLGVMVVVEAKHMCMQMRGVEKQNSITTTSDFTGAFNQAKTREEFMNLIQHGTL

SEQ ID NO: 5330 - protein, 188 aa, unidentified; identical to SEQ ID NO: 5234
  source 1..188: note = Bacteroides caecimuris
  REGION 1..188: note = tr|A0A3A9BRP8|A0A3A9BRP8_9BACE GTP cyclohydrolase 1; OS = Bacteroides caecimuris OX=1796613 GN=folE PE=3 SV=1

SEQ ID NO: 5331 - protein, 196 aa, unidentified; identical to SEQ ID NO: 5329
  source 1..196: note = Bacteroides caecimuris
  REGION 1..196: note = tr|A0A1C7GXF5|A0A1C7GXF5_9BACE GTP cyclohydrolase 1; OS = Bacteroides caecimuris OX=1796613 GN=folE PE=3 SV=1

SEQ ID NO: 5332 - protein, 197 aa, Bacteroides cellulosilyticus
  REGION 1..197: note = tr|E2N8U8|E2N8U8_9BACE GTP cyclohydrolase 1; OS = Bacteroides cellulosilyticus DSM 14838 OX=537012; GN = folE PE=3 SV=1
MLGKEEIVSPALDELKEHYQRIITLLGEDAEREGLLKTPERVAKAMLSLTKGYFMDPHEVLRSAKFKEEYSQMVIVKDIDFFSLCEHHMLPFYGKAHVAYIPNGYITGLSKIARVVDIFSHRLQVQERMTLQIKECIQETLNPLGVMVVVEAKHMCMQMRGVEKQNSITTTSDFTGAFNQAKTREEFMNLIRQNSFT

SEQ ID NO: 5333 - protein, 197 aa, Bacteroides cellulosilyticus; identical to SEQ ID NO: 5332
  REGION 1..197: note = tr|R6L6I1|R6L6I1_9BACE GTP cyclohydrolase 1; OS = Bacteroides cellulosilyticus CAG:158 OX=1263038 GN=folE; PE = 3 SV=1

SEQ ID NO: 5334 - protein, 195 aa, Bacteroides clarus
  REGION 1..195: note = tr|F3PKV1|F3PKV1_9BACE GTP cyclohydrolase 1; OS = Bacteroides clarus YIT 12056 OX=762984 GN=folE PE=3 SV=1
MLGKEEIVSPSLDELKEHYHRILTLLGEDPEREGLLKTPERVAKAMLTLTKGYSMDPHEVLRSAKFKEDYNQMVIVKDIDFFSLCEHHMLPFYGKAHVAYIPNGYITGLSKIARVVDIFSHRLQVQERMTLQIKECIQETLNPLGVMVVVEAKHMCMQMRGVEKQNSITTTSDFTGAFNQAKTREEFMNLIRHNS

SEQ ID NO: 5335 - protein, 195 aa, Bacteroides clarus; identical to SEQ ID NO: 5334
  REGION 1..195: note = tr|A0A1Y4JM78|A0A1Y4JM78_9BACE GTP cyclohydrolase 1; OS = Bacteroides clarus OX=626929 GN=folE PE=3 SV=1

SEQ ID NO: 5336 - protein, 189 aa, Bacteroides coprocola
  REGION 1..189: note = tr|A0A412GVN3|A0A412GVN3_9BACE GTP cyclohydrolase 1; OS = Bacteroides coprocola OX=310298 GN=folE PE=3 SV=1
MKFPEEKVQKLMSHYKEILSLLGEDPEREGLLKTPERVAKAMLTLTRGYEVDPKEVLRAAKFKEEYSQMVIVKDIDFFSMCEHHMLPFYGKAHVAYIPNGYITGLSKIARVVDIFSHRLQVQERMTLQIKECIQETLNPLGVMVVVEAKHMCMQMRGVEKQNSVTTTSDFTGAFNQAKTREEFMNLIGR

SEQ ID NO: 5337 - protein, 195 aa, Bacteroides coprocola
  REGION 1..195: note = tr|B3JJU4|B3JJU4_9BACE GTP cyclohydrolase 1; OS = Bacteroides coprocola DSM 17136 OX=470145 GN=folE PE=3; SV = 1
MIDTNLMKFPEEKVQKLMSHYKEILSLLGEDPEREGLLKTPERVAKAMLTLTRGYEVDPKEVLRAAKFKEEYSQMVIVKDIDFFSMCEHHMLPFYGKVHVAYIPNGYITGLSKIARVVDIFSHRLQVQERMTLQIKECIQETLNPLGVMVVVEAKHMCMQMRGVEKQNSVTTTSDFTGAFNQAKTREEFMNLIGR

SEQ ID NO: 5338 - protein, 197 aa, Bacteroides coprophilus
  REGION 1..197: note = tr|R6T4X3|R6T4X3_9BACE GTP cyclohydrolase 1; OS = Bacteroides coprophilus CAG:333 OX=1263041 GN=folE PE=3; SV = 1
MIDTNLVNWPEERVAKLMSHYKEILSLLGEDPEREGLLKTPERVAKAMLTLTRGYEVDPKAVLNAAKFKEPYSQMVIVKDIDFFSMCEHHMLPFYGKAHVAYIPNGYITGLSKIARVVDIFSHRLQVQERMTLQIKECIQETLNPLGVMVVVEAKHMCMQMRGVEKQNSVTTTSDFTGAFNQAKTREEFMNLIRNRQ

SEQ ID NO: 5339 - protein, 197 aa, Bacteroides coprophilus; identical to SEQ ID NO: 5338
  REGION 1..197: note = tr|S0FAB3|S0FAB3_9BACE GTP cyclohydrolase 1; OS = Bacteroides coprophilus DSM 18228 = JCM 13818 OX=547042; GN = folE PE=3 SV=1

SEQ ID NO: 5340 - protein, 196 aa, Bacteroides coprosuis
  REGION 1..196: note = tr|F3ZPJ8|F3ZPJ8_9BACE GTP cyclohydrolase 1; OS = Bacteroides coprosuis DSM 18011 OX=679937 GN=folE PE=3; SV = 1
MQNKDNFDALQSEIKSLKEHYTEVLSLLGEDPEREGLIKTPERVAKAMLTLTRGYRMDPHEVLMSARFKEDYKQMVIVKDIDFFSLCEHHMLPFYGKAHVAYIPSGYITGLSKIARVVDVFSHRLQVQERMTLQIKECIQEALNPLGVMVVIEAKHMCMQMRGVEKQNSITTTSDFTGAFNQAKTREEFMNLIRQK

SEQ ID NO: 5341 - protein, 197 aa, Bacteroides dorei
  REGION 1..197: note = tr|A0A5C6L192|A0A5C6L192_9BACE GTP cyclohydrolase 1; OS = Bacteroides dorei OX=357276 GN=folE PE=3 SV=1
MEELLHPEWSAEKIEQLKGHYQSILSLLGEDVEREGLLKTPERVAKAMLTLTRGYEQDPHAILLGAKFKEEYSQMVIVKDIDFFSLCEHHMLPFYGKAHVAYIPNGYITGLSKIARVVDVFSHRLQVQERMTLQIKECIQETLNPLGVMVVVEAKHMCMQMRGVEKQNAITTTSDFTGAFNQAKTREEFMNLIRHNR

SEQ ID NO: 5342 - protein, 197 aa, Bacteroides dorei
  REGION 1..197: note = tr|I9QH88|I9QH88_9BACE GTP cyclohydrolase 1; OS = Bacteroides dorei CL02T12C06 OX=997876 GN=folE PE=3 SV=1
MEELLHPEWSAEKIEQLKGHYQSILSLLGEDVEREGLLKTPERVAKAMLTLTRGYEQDPHAILLGAKFKEEYSQMVIVKDIDFFSLCEHHMLPFYGKAHVAYIPNGYITGLSKIARVVDVFSHRLQVQERMTLQIKECIQETLNPLGVMVVVEAKHMCMQMRGVEKQNAITTTSDFTGAFNQAKTREEFMDLIRHNR

SEQ ID NO: 5343 - protein, 195 aa, Bacteroides eggerthii; identical to SEQ ID NO: 5334
  REGION 1..195: note = tr|R5K6Y2|R5K6Y2_9BACE GTP cyclohydrolase 1; OS = Bacteroides eggerthii CAG:109 OX=1263043 GN=folE PE=3; SV = 1

SEQ ID NO: 5344 - protein, 195 aa, Bacteroides eggerthii; identical to SEQ ID NO: 5334
  REGION 1..195: note = tr|A0A380ZCW8|A0A380ZCW8_9BACE GTP cyclohydrolase 1; OS = Bacteroides eggerthii OX=28111 GN=folE PE=3 SV=1

SEQ ID NO: 5345 - protein, 196 aa, Bacteroides faecichinchillae
  REGION 1..196: note = tr|A0A1M5AQ96|A0A1M5AQ96_9BACE GTP cyclohydrolase 1; OS = Bacteroides faecichinchillae OX=871325 GN=folE PE=3 SV=1
MLEKEEIDSPNLEELKSHYRSIITLLGEDVEREGLLKTPERVAKAMLSLTKGYHMDPHEVLRSAKFKEEYSQMVIVKDIDFFSLCEHHMLPFYGKAHVAYIPNGYITGLSKIARVVDIFSHRLQVQERMTLQIKECIQETLNPLGVMVVVEAKHMCMQMRGVEKQNSITTTSDFTGAFNQAKTREEFMNLIQHGYL

SEQ ID NO: 5346 - protein, 196 aa, Bacteroides faecis
  REGION 1..196: note = tr|A0A1H2QJ79|A0A1H2QJ79_9BACE GTP cyclohydrolase 1; OS = Bacteroides faecis MAJ27 OX=1077285 GN=folE PE=3 SV=1
MLEKEEIVSPNLEELKSHYHSIITLLGEDAGREGLLKTPERVAKAMLSLTKGYHMDPHEVLRSAKFQEEYSQMVIVKDIDFFSLCEHHMLPFYGKAHVAYIPNGYITGLSKIARVVDIFSHRLQVQERMTLQIKDCIQETLNPLGVMVVVEAKHMCMQMRGVEKQNSITTTSDFTGAFNQAKTREEFMNLIQHGRV

SEQ ID NO: 5347 - protein, 196 aa, Bacteroides faecis; identical to SEQ ID NO: 5346
  REGION 1..196: note = tr|R6UTX0|R6UTX0_9BACE GTP cyclohydrolase 1; OS = Bacteroides faecis CAG:32 OX=1263044 GN=folE PE=3 SV=1

SEQ ID NO: 5348 - protein, 195 aa, Bacteroides finegoldii
  REGION 1..195: note = tr|A0A174BE39|A0A174BE39_9BACE GTP cyclohydrolase 1; OS = Bacteroides finegoldii OX=338188 GN=folE PE=3 SV=1
MLEKEEIVSPNLEELKNHYRSIITLLGEDAEREGLLKTPERVAKAMLSLTKGYHIDPHEVLRSAKFKEEYSQMVIVKDIDFFSLCEHHMLPFYGKAHVAYIPNGYITGLSKIARVVDIFSHRLQVQERMTLQIKECIQETLNPLGVMVVVEAKHMCMQMRGVEKQNSITTTSDFTGAFNQAKTREEFMNLIQHGS

SEQ ID NO: 5349 - protein, 195 aa, Bacteroides finegoldii
  REGION 1..195: note = tr|R6RPN5|R6RPN5_9BACE GTP cyclohydrolase 1; OS = Bacteroides finegoldii CAG:203 OX=1263045 GN=folE PE=3; SV = 1
MLEKEEIVSPNLEELKNHYRSIITLLGEDAEREGLLKTPERVAKAMLSLTKGYHIDPHEVLRSAKFKEEYSQMVIVKDIDFFSLCEHHMLPFYGKAHVAYIPNGYITGLSKIARVVDIFSHRLQVQERMTLQIKECIQETLNPLGVMVVVEAKHMCMQMRGVEKQNSITTTSDFTGAFNQAKTREEFMNLIQHRS

SEQ ID NO: 5350 - protein, 195 aa, Bacteroides fluxus
  REGION 1..195: note = tr|F3PUH4|F3PUH4_9BACE GTP cyclohydrolase 1; OS = Bacteroides fluxus YIT 12057 OX=763034 GN=folE PE=3 SV=1
MLGKEEIVSPSLDELKEHYQRILTLLGEDPGREGLLKTPERVAKAMLSLTKGYYMDPHEVLRSAKFQEEYSQMVIVKDIDFFSLCEHHMLPFYGKAHVAYIPNGYITGLSKIARVVDIFSHRLQVQERMTLQIKECIQETLNPLGVMVVVEAKHMCMQMRGVEKQNSVTTTSDFTGAFNQAKTREEFMNLIRHNS

SEQ ID NO: 5351 - protein, 194 aa, Bacteroides fragilis
  REGION 1..194: note = sp|Q64P85|GCH1_BACFR GTP cyclohydrolase 1; OS = Bacteroides fragilis (strain YCH46) OX=295405 GN=folE; PE = 3 SV=1
MLEKEEIISPALEDLKNHYRSIITLLGEDAEREGLLKTPERVAKAMLTLTKGYHMDPHEVLRSAKFQEEYSQMVIVKDIDFFSLCEHHMLPFYGKAHVAYIPNGYITGLSKIARVVDIFSHRLQVQERMTLQIKECIQETLNPLGVMVVVEAKHMCMQMRGVEKQNSVTTTSDFTGAFNQAKTREEFMNLIRQR

SEQ ID NO: 5352 - protein, 194 aa, Bacteroides fragilis
  REGION 1..194: note = tr|A0A081TUQ8|A0A081TUQ8_BACFG GTP cyclohydrolase 1; OS = Bacteroides fragilis OX=817 GN=folE PE=3 SV=1
MLEKEEINSPALEDLKKHYRSIITLLGEDAEREGLLKTPERVAKAMLTLTKGYHMDPHEVLRSAKFQEEYSQMVIVKDIDFFSLCEHHMLPFYGKAHVAYIPNGYITGLSKIARVVDIFSHRLQVQERMTLQIKECIQETLNPLGVMVVVEAKHMCMQMRGVEKQNSVTTTSDFTGAFNQAKTREEFMNLIRQR

SEQ ID NO: 5353 - protein, 194 aa, Bacteroides graminisolvens
  REGION 1..194: note = tr|A0A069D3H9|A0A069D3H9_9BACE GTP cyclohydrolase 1; OS = Bacteroides graminisolvens DSM 19988 = JCM 15093; OX = 1121097 GN=folE PE=3 SV=1
MLDKEEVNSPHLEELMGHYRGIISLLGEDVQREGLLKTPERVAKAMLTLTKGYTMDPHEVLRSAKFKEEYSQMVIVKDIDFFSLCEHHMLPFYGKVHVAYIPNGYITGLSKIARVVDIFSHRLQVQERMTLQIKECIQQTLNPLGVMVVVEAKHMCMQMRGVEKQNSITTTSDFTGAFNQAKTREEFMNLIMHK

SEQ ID NO: 5354 - protein, 194 aa, Bacteroides graminisolvens
  REGION 1..194: note = tr|A0A351M2J6|A0A351M2J6_9BACE GTP cyclohydrolase 1; OS = Bacteroides graminisolvens OX=477666 GN=folE PE=3 SV=1
MLDKEEVNSPHLEELMGHYHSIISLLGEDAQREGLLKTPERVAKAMLTLTKGYTMNPHEVLSSAKFKEEYSQMVIVKDIDFFSLCEHHMLPFYGKVHVAYIPNGYITGLSKIARVVDIFSHRLQVQERMTLQIKECIQQTLNPLGVMVVVEAKHMCMQMRGVEKQNAITTTSDFTGAFNQAKTREEFMNLIMHK

SEQ ID NO: 5355 - protein, 195 aa, Bacteroides helcogenes
  REGION 1..195: note = tr|E6SRU9|E6SRU9_BACT6 GTP cyclohydrolase 1; OS = Bacteroides helcogenes (strain ATCC 35417 / DSM 20613 / JCM 6297 / P 36-108) OX=693979 GN=folE PE=3 SV=1
MLGKEEIVSPSLDELKEHYHRILTLLGEDPSREGLLKTPERVAKAMLSLTKGYFMDPHEVLRSAKFQEEYSQMVIVKDIDFFSLCEHHMLPFYGKAHVAYIPNGYITGLSKIARVVDIFSHRLQVQERMTLQIKDCIQETLNPLGVMVVVEAKHMCMQMRGVEKQNSVTTTSDFTGAFNQAKTREEFMNLIRHNS

SEQ ID NO: 5356 - protein, 195 aa, unidentified
  source 1..195: note = Bacteroides heparinolyticus
  REGION 1..195: note = tr|A0A3P2AEW7|A0A3P2AEW7_9BACE GTP cyclohydrolase 1; OS = Bacteroides heparinolyticus OX=28113 GN=folE PE=3 SV=1
MLGKEEIVSPSLDELKEHYHRILTLLGEDAGREGLQKTPERVAKAMLSLTKGYYMDPHEVLRSAKFQEEYSQMVIVKDIDFFSLCEHHMLPFYGRAHVAYIPNGYITGLSKIARVVDIFSHRLQVQERMTLQIKECIQDTLNPLGVMVVVEAKHMCMQMRGVEKQNSITTTSDFTGAFNQAKTREEFMNLIRNNS

SEQ ID NO: 5357 - protein, 195 aa, unidentified
  source 1..195: note = Bacteroides heparinolyticus
  REGION 1..195: note = tr|A0A2R3MQX9|A0A2R3MQX9_9BACE GTP cyclohydrolase 1; OS = Bacteroides heparinolyticus OX=28113 GN=folE PE=3 SV=1
MLGKEEIVSPSLDELKEHYHRILTLLGEDAEREGLQKTPERVAKAMLSLTKGYYMDPHEVLRSAKFQEEYSQMVIVKDIDFFSLCEHHMLPFYGRAHVAYIPNGYITGLSKIARVVDIFSHRLQVQERMTLQIKECIQDTLNPLGVMVVVEAKHMCMQMRGVEKQNSITTTSDFTGAFNQAKTREEFMNLIRNNS

SEQ ID NO: 5358 - protein, 197 aa, Bacteroides intestinalis
  REGION 1..197: note = tr|A0A415A9F8|A0A415A9F8_9BACE GTP cyclohydrolase 1; OS = Bacteroides intestinalis OX=329854 GN=folE PE=3 SV=1
MLGKEEIVSPALDELKEHYQRIITLLGEDAEREGLLKTPERVAKAMLSLTKGYFMDPHEVLRSAKFKEEYSQMVIVKDIDFFSLCEHHMLPFYGKAHVAYIPNGYITGLSKIARVVDIFSHRLQVQERMTLQIKECIQETLNPLGVMVVVEAKHMCMQMRGVEKQNSITTTSDFTGAFNQAKTREEFMNLIRQNSFI

SEQ ID NO: 5359 - protein, 197 aa, Bacteroides intestinalis; identical to SEQ ID NO: 5332
  REGION 1..197: note = tr|A0A139LST1|A0A139LST1_9BACE GTP cyclohydrolase 1; OS = Bacteroides intestinalis OX=329854 GN=folE PE=3 SV=1

SEQ ID NO: 5360 - protein, 194 aa, unidentified
  source 1..194: note = Bacteroides luti
  REGION 1..194: note = tr|A0A1M5FIZ5|A0A1M5FIZ5_9BACE GTP cyclohydrolase 1; OS = Bacteroides luti OX=1297750 GN=folE PE=3 SV=1
MMTKEEALNFQIEELKKNYHNILEILGEDVNREGLLKTPERVAKAMITLTRGYGEDPHEVLRSAKFKEDYNQMVIVKDIDFFSLCEHHIIPFYGKVHVAYIPNGYITGLSKIARVVDIFSHRLQVQERMTLQIKECIQQTLNPLGVMVVVEAKHMCMQMRGVEKQNAITTTSDFSGAFKNATTRSEFMDLIAHK

SEQ ID NO: 5361 - protein, 197 aa, Bacteroides massiliensis
  REGION 1..197: note = tr|U6RBW3|U6RBW3_9BACE GTP cyclohydrolase 1; OS = Bacteroides massiliensis B84634 = Timone 84634 = DSM 17679 = JCM 13223 OX=1121098 GN=folE PE=3 SV=1
MEELLHPEWSAEKIEQLKGHYESILSLLGEDVEREGLLKTPERVAKAMLTLTRGYEQDPHAILLGAKFKEEYSQMVIVKDIDFFSLCEHHMLPFYGKAHVAYIPNGYITGLSKIARVVDVFSHRLQVQERMTLQIKECIQETLNPLGVMVVVEAKHMCMQMRGVEKQNAITTTSDFTGAFNQAKTREEFMNLIRHQR

SEQ ID NO: 5362 - protein, 193 aa, Bacteroides nordii
  REGION 1..193: note = tr|I9RPS8|I9RPS8_9BACE GTP cyclohydrolase 1; OS = Bacteroides nordii CL02T12C05 OX=997884 GN=folE PE=3; SV = 1
MLGKEEIVSPALEDLKSHYRSIITLLGEDAEREGLLKTPERVAKAMLSLTKGYHLDPHEVLRSAKFKEEYSQMVIVKDIDFFSLCEHHMLPFYGKAHVAYIPNGYITGLSKIARVVDIFSHRLQVQERMTLQIKECIQETLNPLGVMVVVEAQHMCMQMRGVEKQNSITTTSDFTGAFNQAKTREEFMNLINR

SEQ ID NO: 5363 - protein, 193 aa, Bacteroides nordii; identical to SEQ ID NO: 5362
  REGION 1..193: note = tr|A0A413VAM1|A0A413VAM1_9BACE GTP cyclohydrolase 1; OS = Bacteroides nordii OX=291645 GN=folE PE=3 SV=1

SEQ ID NO: 5364 - protein, 199 aa, Bacteroides oleiciplenus
  REGION 1..199: note = tr|A0A3E5BRU3|A0A3E5BRU3_9BACE GTP cyclohydrolase 1; OS = Bacteroides oleiciplenus OX=626931 GN=folE PE=3 SV=1
MLGKEEIVSPALDELKEHYHRIITLLGEDAEREGLLKTPERVAKAMLSLTKGYFMDPHEVLRSAKFKEEYSQMVIVKDIDFFSLCEHHMLPFYGKAHVAYIPNGYITGLSKIARVVDIFSHRLQVQERMTLQIKECIQETLNPLGVMVVVEAKHMCMQMRGVEKQNSVTTTSDFTGAFNQAKTREEFMNLIRQNSFTLL

SEQ ID NO: 5365 - protein, 197 aa, Bacteroides oleiciplenus
  REGION 1..197: note = tr|A0A1Q6G2W5|A0A1Q6G2W5_9BACE GTP cyclohydrolase 1; OS = Bacteroides oleiciplenus OX=626931 GN=folE PE=3 SV=1
MLGKEEIVSPALDELKEHYHRIITLLGEDAEREGLLKTPERVAKAMLSLTKGYYMDPHEVLRSAKFKEEYSQMVIVKDIDFFSLCEHHMLPFYGKAHVAYIPNGYITGLSKIARVVDIFSHRLQVQERMTLQIKECIQETLNPLGVMVVVEAKHMCMQMRGVEKQNSITTTSDFTGAFNQAKTREEFMNLIHHKAGF

SEQ ID NO: 5366 - protein, 196 aa, Bacteroides ovatus
  REGION 1..196: note = tr|I9H6M7|I9H6M7_BACOV GTP cyclohydrolase 1; OS = Bacteroides ovatus CL02T12C04 OX=997885 GN=folE PE=3; SV = 1
MLEKEEIVSPNLEELKSHYRSIITLLGEDAEREGLLKTPERVAKAMLSLTKGYHMDPHEVLRSAKFQEEYSQMVIVKDIDFFSLCEHHMLPFYGKAHVAYIPNGYITGLSKIARVVDIFSHRLQVQERMTLQIKECIQETLNPLGVMVVVEAKHMCMQMRGVEKQNSITTTSDFTGAFNQAKTREEFMNLIQHGRV

SEQ ID NO: 5367 - protein, 197 aa, Bacteroides ovatus
  REGION 1..197: note = tr|A0A413VFQ2|A0A413VFQ2_BACOV GTP cyclohydrolase I FolE OS=Bacteroides ovatus OX=28116 GN=DW890_01905 PE=4; SV = 1
METKSTDTKDIECAVRTILSYIGDNPEREGLKGTPERIVRMWKELFRGYDPEQAPKITTFPNGKDGLSFNSIVADSGNYYSMCEHHMMPFFGKYWFAYIPNSEGSILGISKIGRVIDYCAARLQVQERLAQDVVTMIVDALGKEHPPLAVGIIMEGEHLCKTMRGVKKQGKMRSSFYFDNGRLPELKAELSQFASFG

SEQ ID NO: 5368 - protein, 197 aa, Bacteroides plebeius
  REGION 1..197: note = tr|A0A3E4MT38|A0A3E4MT38_9BACE GTP cyclohydrolase 1; OS = Bacteroides plebeius OX=310297 GN=folE PE=3 SV=1
MTDTNSINWPQEKVEKLVGHYKEILSLLGEDPEREGLLKTPERVAKAMLTLTRGYEMDPREVLNAAKFKEPYSQMVIVKDIDFFSMCEHHMLPFYGKAHVAYIPNGYITGLSKIARVVDIFSHRLQVQERMTLQIKECIQETLNPLGVMVVVDAKHMCMQMRGVEKQNSVTTTSDFTGAFNQAKTREEFMNLIRAKY

SEQ ID NO: 5369 - protein, 197 aa, Bacteroides plebeius
  REGION 1..197: note = tr|A0A3E4Z6J2|A0A3E4Z6J2_9BACE GTP cyclohydrolase 1; OS = Bacteroides plebeius OX=310297 GN=folE PE=3 SV=1
MTDTSSINWPQEKVEKLVGHYKEILSLLGEDPEREGLLKTPERVAKAMLTLTRGYEMDPREVLNAAKFKEPYSQMVIVKDIDFFSMCEHHMLPFYGKAHVAYIPNEYITGLSKIARVVDIFSHRLQVQERMTLQIKECIQETLNPLGVMVVVEAKHMCMQMRGVEKQNSVTTTSDFTGAFNQAKTREEFMNLIRAKY

SEQ ID NO: 5370 - protein, 196 aa, Bacteroides pyogenes
  REGION 1..196: note = tr|W4P9I2|W4P9I2_9BACE GTP cyclohydrolase 1; OS = Bacteroides pyogenes JCM 6292 OX=1235809 GN=folE PE=3; SV = 1
MFEKEKNYSPNLEELKSHYRSVITLLGEDADREGLLKTPERVAKAMLNLTHGYRVDPHEVLLSAKFKEEYSQMVIVKDIDFFSLCEHHMLPFYGKAHVAYIPNGYITGLSKIARVVDIFSHRLQVQERMTLQIKQCIQDTLNPLGVMVVVEAKHMCMQMRGVEKQNSITTTSDFTGAFNQAKTREEFMNLIQHGSL

SEQ ID NO: 5371 - protein, 196 aa, Bacteroides pyogenes; identical to SEQ ID NO: 5370
  REGION 1..196: note = tr|A0A5D3FF99|A0A5D3FF99_9BACE GTP cyclohydrolase 1; OS = Bacteroides pyogenes OX=310300 GN=folE PE=3 SV=1

SEQ ID NO: 5372 - protein, 196 aa, unidentified
  source 1..196: note = Bacteroides reticulotermitis
  REGION 1..196: note = tr|W4UMT5|W4UMT5_9BACE GTP cyclohydrolase 1; OS = Bacteroides reticulotermitis JCM 10512 OX=1445607; GN = folE PE=3 SV=1
MLEKEEIISPNLEELKSHYRSIIGLLGEDVEREGLLKTPERVAKAMLSLTKGYHMNPHEVLLSAKFKEEYSQMVIVKDIDFFSLCEHHMLPFYGKAHVAYIPNGYITGLSKIARVVDIFSHRLQVQERMTLQIKECIQQTLNPLGVMVVIEAKHMCMQMRGVEKQNSITTTSDFTGAFNQAKTREEFMNLIQHGTL

SEQ ID NO: 5373 - protein, 195 aa, Bacteroides salanitronis
  REGION 1..195: note = tr|F0R868|F0R868_BACSH GTP cyclohydrolase 1; OS = Bacteroides salanitronis (strain DSM 18170 / JCM 13567 / BL78) OX=667015 GN=folE PE=3 SV=1
MIDTDLLKFPEEKVQKLMAHYKEILALLGEDTGREGLLKTPERVAKAMLTLTRGYDVDPKEILLGAKFKEEYSQMVVVKDIDFFSMCEHHMLPFYGKAHVAYIPNGYITGLSKIARVVDVFSHRLQVQERMTLQIKECIQETLHPLGVMVVVEAKHMCMQMRGVEKQNSITTTSDFTGAFNQAKTREEFMNLIRK

SEQ ID NO: 5374 - protein, 193 aa, Bacteroides salyersiae
  REGION 1..193: note = tr|I9SLG3|I9SLG3_9BACE GTP cyclohydrolase 1; OS = Bacteroides salyersiae CL02T12C01 OX=997887 GN=folE; PE = 3 SV=1
MLEKEEIVSPALEDLKSHYRSIITLLGEDAEREGLLKTPERVAKAMLSLTKGYHMDPHEVLRSAKFKEEYSQMVIVKDIDFFSLCEHHMLPFYGKAHVAYIPNGYITGLSKIARVVDIFSHRLQVQERMTLQIKECIQETLNPLGVMVVVEAKHMCMQMRGVEKQNSITTTSDFTGAFNQAKTREEFMNLINR

SEQ ID NO: 5375 - protein, 193 aa, Bacteroides salyersiae; identical to SEQ ID NO: 5374
  REGION 1..193: note = tr|A0A4Q5FBH8|A0A4Q5FBH8_9BACE GTP cyclohydrolase 1; OS = Bacteroides salyersiae OX=291644 GN=folE PE=3 SV=1

SEQ ID NO: 5376 - protein, 197 aa, Bacteroides sartorii; identical to SEQ ID NO: 5341
  REGION 1..197: note = tr|R9IKF0|R9IKF0_9BACE GTP cyclohydrolase 1; OS = Bacteroides sartorii OX=671267 GN=folE PE=3 SV=1

SEQ ID NO: 5377 - protein, 195 aa, Bacteroides sp.
  REGION 1..195: note = tr|A0A285SE22|A0A285SE22_9BACE GTP cyclohydrolase 1; OS = Bacteroides sp. AR29 OX=93975 GN=folE PE=3 SV=1
MLGKEEIVSPSLDELKEHYHRILTLLGEDAEREGLQKTPERVAKAMLSLTKGYYMDPHEVLRSAKFQEEYSQMVIVKDIDFFSLCEHHMLPFYGKAHVAYIPNGYITGLSKIARVVDIFSHRLQVQERMTLQIKECIQETLNPLGVMVVVEAKHMCMQMRGVEKQNSITTTSDFTGAFNQAKTREEFMNLIRHNS

SEQ ID NO: 5378 - protein, 196 aa, Bacteroides sp.
  REGION 1..196: note = tr|R6CV98|R6CV98_9BACE GTP cyclohydrolase 1; OS = Bacteroides sp. CAG:530 OX=1262741 GN=folE PE=3 SV=1
MIDTNLLKFPEDKIQKLMGHYKEILTLLGEDPEREGLVKTPERVAKAMLTLTRGYEVDPKEVLLAAKFKEEYSQMVIVKDIDFFSMCEHHMLPFYGKVHVAYIPNGYITGLSKIARVVDIFSHRLQVQERMTLQIKECIQETLNPLGVMVVVEAKHMCMQMRGVEKQNSITTTSDFTGAFNRATTREEFMNLINRK

SEQ ID NO: 5379 - protein, 197 aa, Bacteroides stercorirosoris; identical to SEQ ID NO: 5365
  REGION 1..197: note = tr|A0A1M6K8D6|A0A1M6K8D6_9BACE GTP cyclohydrolase 1; OS = Bacteroides stercorirosoris OX=871324 GN=folE PE=3 SV=1

SEQ ID NO: 5380 - protein, 195 aa, Bacteroides stercoris
  REGION 1..195: note = tr|S3YCI9|S3YCI9_BACSE GTP cyclohydrolase 1; OS = Bacteroides stercoris CC31F OX=1073351 GN=folE PE=3 SV=1
MLGKEEIVSPSLDELKEHYHHILTLLGEDPEREGLLKTPERVAKAMLALTKGYSMDPHEVLRSAKFKEDYNQMVIVKDIDFFSLCEHHMLPFYGKAHVAYIPNGYITGLSKIARVVDIFSHRLQVQERMTLQIKECIQETLNPLGVMVVVEAKHMCMQMRGVEKQNSITTTSDFTGAFNQAKTREEFMNLIRHTS

SEQ ID NO: 5381 - protein, 195 aa, Bacteroides stercoris; identical to SEQ ID NO: 5380
  REGION 1..195: note = tr|B0NVZ6|B0NVZ6_BACSE GTP cyclohydrolase 1; OS = Bacteroides stercoris ATCC 43183 OX=449673 GN=folE PE=3; SV = 1

SEQ ID NO: 5382 - protein, 196 aa, Bacteroides thetaiotaomicron; identical to SEQ ID NO: 5346
  REGION 1..196: note = sp|Q8A0U0|GCH1_BACTN GTP cyclohydrolase 1; OS = Bacteroides thetaiotaomicron (strain ATCC 29148 / DSM 2079 / NCTC 10582 / E50 / VPI-5482) OX=226186 GN=folE PE=3; SV = 1

SEQ ID NO: 5383 - protein, 196 aa, Bacteroides thetaiotaomicron; identical to SEQ ID NO: 5346
  REGION 1..196: note = tr|R7KI31|R7KI31_9BACE GTP cyclohydrolase 1; OS = Bacteroides thetaiotaomicron CAG:40 OX=1263054 GN=folE; PE = 3 SV=1

SEQ ID NO: 5384 - protein, 195 aa, Bacteroides uniformis
  REGION 1..195: note = tr|A7V6P7|A7V6P7_BACUC GTP cyclohydrolase 1; OS = Bacteroides uniformis (strain ATCC 8492 / DSM 6597 / CIP 103695 / JCM 5828 / NCTC 13054 / VPI 0061) OX=411479; GN = folEPE=3 SV=1
MLGKEEIVSPSLDELKEHYHRILTLLGEDAGREGLQKTPERVAKAMLSLTKGYHMDPHEVLRSAKFQEEYSQMVIVKDIDFFSLCEHHMLPFYGKAHVAYIPNGYITGLSKIARVVDIFSHRLQVQERMTLQIKECIQETLNPLGVMVVVEAKHMCMQMRGVEKQNSITTTSDFTGAFNQAKTREEFMNLIRHNS

SEQ ID NO: 5385 - protein, 195 aa, Bacteroides uniformis; identical to SEQ ID NO: 5384
  REGION 1..195: note = tr|A0A078S2W1|A0A078S2W1_BACUN GTP cyclohydrolase 1; OS = Bacteroides uniformis str. 3978 T3 ii OX=1339349; GN = folE PE=3 SV=1

SEQ ID NO: 5386 - protein, 193 aa, Bacteroides vulgatus
  REGION 1..193: note = tr|A0A069SGW6|A0A069SGW6_BACVU GTP cyclohydrolase 1; OS = Bacteroides vulgatus str. 3975 RP4 OX=1339352 GN=folE; PE = 3 SV=1
MHPEWSAEKIEQLKGHYQSILSLLGEDVEREGLLKTPERVAKAMLTLTRGYEQDPHAILLGAKFKEEYSQMVIVKDIDFFSLCEHHMLPFYGKAHVAYIPNGYITGLSKIARVVDVFSHRLQVQERMTLQIKECIQETLNPLGVMVVVEAKHMCMQMRGVEKQNAITTTSDFTGAFNQAKTREEFMNLIRHNR

SEQ ID NO: 5387 - protein, 197 aa, Bacteroides vulgatus; identical to SEQ ID NO: 5341
  REGION 1..197: note = tr|A0A0P0M623|A0A0P0M623_BACVU GTP cyclohydrolase 1; OS = Bacteroides vulgatus OX=821 GN=folE PE=3 SV=1

SEQ ID NO: 5388 - protein, 196 aa, Bacteroides xylanisolvens; identical to SEQ ID NO: 5366
  REGION 1..196: note = tr|D4VHK8|D4VHK8_9BACE GTP cyclohydrolase 1; OS = Bacteroides xylanisolvens SD CC 1b OX=702447 GN=folE; PE = 3 SV=1

SEQ ID NO: 5389 - protein, 196 aa, Bacteroides xylanisolvens; identical to SEQ ID NO: 5329
  REGION 1..196: note = tr|I9ALB9|I9ALB9_9BACE GTP cyclohydrolase 1; OS = Bacteroides xylanisolvens CL03T12C04 OX=997892 GN=folE; PE = 3 SV=1

SEQ ID NO: 5390 - protein, 188 aa, Bacteroides xylanolyticus
  REGION 1..188: note = tr|A0A2S6HN02|A0A2S6HN02_9BACE GTP cyclohydrolase 1; OS = Bacteroides xylanolyticus OX=384636 GN=folE PE=3 SV=1
MDKERIRFAVRELLIAIGEDPDREGLKETPERISNMYSEIFAGLETSPQSVLKYFGESCTEEMVVVKDIPFYSMCEHHLLPFYGTASICYIPAPGRLLGLSKLARVVDICAKKPQLQERLGAEIVNILENDAQAIGAAILIKAEHLCMNMRGIRKPGTKTVTTCFAGIFKTDDKARKEALQLLSLEKD

SEQ ID NO: 5391 - protein, 188 aa, Bacteroides xylanolyticus
  REGION 1..188: note = tr|A0A2S6HN84|A0A2S6HN84_9BACE GTP cyclohydrolase 1; OS = Bacteroides xylanolyticus OX=384636 GN=folE PE=3 SV=1
MAIDTEAIQTHVRGILKALGEDPDREGLKETPSRVAKMYGEVFEGINYSNQEIALMFGKTFEEDMDTNGAGDDMVVVKDIEVFSYCEHHMALMYDMKVAVAYIPNGKVIGLSKIARIADMVARRLQLQERIGSDIAEIMAEVTGSEDIEVVIEGSHSCMTARGIKSFSARTKTVTLRGRFKTEPELRI

SEQ ID NO: 5392 - protein, 195 aa, unidentified
  source 1..195: note = Bacteroides zoogleoformans
  REGION 1..195: note = tr|A0A562UZR3|A0A562UZR3_9BACE GTP cyclohydrolase 1; OS = Bacteroides zoogleoformans OX=28119 GN=folE PE=3 SV=1
MLEKEEIASPSLNQLKEHYHRILTLLGEDAEREGLLKTPERVAKAMLSLTKGYHMDPHEVLRSAKFQEEYSQMVIVKDIDFFSLCEHHMLPFYGKAHVAYIPNGYITGLSKIARVVDIFSHRLQVQERMTLQIKECIQATLNPLGVMVVVEAKHMCMQMRGVEKQNSITTTSDFTGAFNQAKTREEFMNLIRNNS

SEQ ID NO: 5393 - protein, 219 aa, unidentified
  source 1..219: note = Bacteroidetes bacterium
  REGION 1..219: note = tr|A0A2T2TRW5|A0A2T2TRW5_9BACT GTP cyclohydrolase 1; OS = Bacteroidetes bacterium QH_2_63_10 OX=1919092 GN=folE; PE = 3 SV=1
MAEKKIPSDTLRENGTPDGGPPKLYERRDVYDEETTEALADHVSSILDILGEDPSREGLEETPERVARAYQFLMHGYALDPKDILRQAMFEEEYDEMILVKDIEVYSLCEHHMLPFYGKAHVAYIPDGKIVGLSKIPRTVEVFARRLQVQERLTLQIRNAIDEVVEPLGTAVVIEARHLCMMMRGAEKQNSMTTTSSVSGEFDEHATRAEFMRLTQTTE

SEQ ID NO: 5394 - protein, 199 aa, unidentified
  source 1..199: note = Bacteroidetes bacterium
  REGION 1..199: note = tr|A0A2N2W348|A0A2N2W348_9BACT GTP cyclohydrolase 1; OS = Bacteroidetes bacterium HGW-Bacteroidetes-8 OX=2013698; GN = folE PE=3 SV=1
MAYTKIEQYDEETTQSIAKHYKEILRLLGEDTSREGLILTPVRIARSVQFLTQGYEMDGPSILNSAKFKEEYQQMVLVKDIELYSLCEHHMLPFYGKAHIAYIPNGYITGLSKIARVVEAYARRLQVQERLTVQIRDCIQETLNPLGVAVVIEASHMCMQIRGVQKQNSVTTTSAFTGAFLKDIRTREEFIHLIGVSLH

SEQ ID NO: 5395 - protein, 196 aa, unidentified
  source 1..196: note = Bacteroidetes oral
  REGION 1..196: note = tr|D7JCV3|D7JCV3_9BACT GTP cyclohydrolase 1; OS = Bacteroidetes oral taxon 274 str. F0058 OX=575590; GN = folE PE=3 SV=1
MEKEFVFNDLNEEVTQKLSKYYSDVITALGEDVGREGLQKTPRRVAKAMQFLTSGYRQDPAEVLLSARFHEDYRQMVIVKDIEFFSMCEHHLLPFFGKAHVAYIPNGTVTGLSKIARVVDIFAHRLQLQERLTSQIKDCIQETLNPMGVMVVIEAQHLCMQMRGVQKQHSTTTTSDFTGIFKVQKTREEFISLINK

SEQ ID NO: 5396 - protein, 190 aa, unidentified
  source 1..190: note = Bacteroidia bacterium
  REGION 1..190: note = tr|A0A1M3FPC5|A0A1M3FPC5_9BACT GTP cyclohydrolase 1; OS = Bacteroidia bacterium 44-10 OX=1895721 GN=folE PE=3 SV=1
MSSEELEVKKSAIADRMRDILTLLGEDAHREGLVKTPDRVAKAYQYLTKGYWQDPEAILRSALFKENYRQMVIVKDIDLFSLCEHHMLPFFGKAHVAYIPDGYITGLSKIARVVDVFARRLQVQERLTTQIKECIQKTLNPMGVMVVIEAQHMCMQMRGVEKQNSITTTSDFTGVFREQRTREEFIALIK

SEQ ID NO: 5397 - protein, 190 aa, unidentified
  source 1..190: note = Bacteroidia bacterium
  REGION 1..190: note = tr|A0A1Q3QF08|A0A1Q3QF08_9BACT GTP cyclohydrolase 1; OS = Bacteroidia bacterium 43-41 OX=1895720 GN=folE PE=3 SV=1
MSPEETENRKLIIADHIKEVISLLGEDVTRDGLVKTPDRVAKAWQYLTRGYYQDPEEILRSALFRENYRQMVIVKDIDLFSLCEHHILPFFGKAHVAYIPDGYITGLSKIARVVEVYARRLQVQERLTTQIKECIQKTLNPMGVMVVIEAQHMCMQMRGVEKQNSITTTSDFTGVFKEQKTREEFIALIK

SEQ ID NO: 5398 - protein, 207 aa, unidentified
  source 1..207: note = Baekduia soli
  REGION 1..207: note = tr|A0A5B8UCA1|A0A5B8UCA1_9ACTN GTP cyclohydrolase 1; OS = Baekduia soli OX=496014 GN=folE PE=3 SV=1
MVSIQELTDGPETLHLDPRHGAGGRRIDLPAAQRAAADLLIALGADLGHEGLADTPRRMAEAYAELLTPEPFTVTTFPNEGAYDELVLVRDVPFHSLCMHHLLPFQGVAHIAYLPGERIVGLSKLARVVEHVARDLQVQERMTRQIADWIDTTLQPRGVGVVLEAEHLCMTLRGVRKAGSRTVTSALHGLVRQDPRTRQEFLELVRG

SEQ ID NO: 5399 - protein, 211 aa, unidentified
  source 1..211: note = Baekduia soli
  REGION 1..211: note = tr|A0A5B8U6G5|A0A5B8U6G5_9ACTN GTP cyclohydrolase 1; OS = Baekduia soli OX=496014 GN=folE PE=3 SV=1
MTAPHQHLTGLALAPLHDAGDQGRDIDQGALVRAARDLLSALGADVDAEGLRETPRRVAEALTELLTPQPFRATTFANDDGYDQLIVARRIPFHSLCMHHMLPFHGVAHIGYLPGGRILGLSKLARVVELYARDLQTQERLTTQIAGWLQRELEPVGIGVVLEAEHMCMTLRGVQKSGSTTVTSALYGLVRDDARTRQEFLALATSSCPDR

SEQ ID NO: 5400 - protein, 192 aa, unidentified
  source 1..192: note = Baia soyae
  REGION 1..192: note = tr|A0A4V2SYD7|A0A4V2SYD7_9BACL GTP cyclohydrolase 1; OS = Baia soyae OX=1544746 GN=folE PE=3 SV=1
MKHVDHDKIEQAVRMILEAVGEDPEREGLLDTPARVARMYAEVFQGLDQDPKEHFSVVFGEDHEEVVLVKDIPFFSTCEHHLVPFFGHAHIAYIPRGGRVTGLSKLARAVDSVTKRPQLQERITSTIADSMMETLDPHGVFVVLEAEHMCMTMRGVKKPGSKTVTSVARGIYAEDVVKRDEVFKMIRMGSLT

SEQ ID NO: 5401 - protein, 186 aa, Balnearium lithotrophicum
  REGION 1..186: note = tr|A0A521C8H0|A0A521C8H0_9BACT GTP cyclohydrolase 1; OS = Balnearium lithotrophicum OX=223788 GN=folE PE=3 SV=1
MIDRERIEKAVKEILIAIGEDPDREGLKETPKRVAKMYEEVLSGYSDNPENHLVLFTEKYDEMIIVKDIPIYSMCEHHMLPFFGRAHVAYIPNDNKVTGLSKIARIVDVYAKRLQLQERMTEQIANAIMEKLRAKGVMVVIEAQHLCMIMRGVKKTGSYTVTSAVKGVMRNEPTRMEALFLIKGRQ

SEQ ID NO: 5402 - protein, 228 aa, Balneola sp.
  REGION 1..228: note = tr|A0A2D9FX60|A0A2D9FX60_9BACT GTP cyclohydrolase 1; OS = Balneola sp. OX=2024824 GN=folE PE=3 SV=1
MKTLDLDKITAEEIGEDHIGTSVKTPLREDAFDKTDAEKIEIIEEHFAEIMKTLGLDLDDDSLKGTPYRVAKMYVKEIFEGLNPKNKPIARQFSNSYDYNGMVIEKNIEVTSFCEHHFLPFLGKAHVAYIPSGKKVIGLSKINRIVDYYSRRPQVQERLTLQIADELQGALETDDVAVFIDSKHLCVSTRGIKDHSSTTITAEYRGAFQDKDTQQKFIDYIRTNTQID

SEQ ID NO: 5403 - protein, 226 aa, Balneola sp.
  REGION 1..226: note = tr|A0A3D2IJI0|A0A3D2IJI0_9BACT GTP cyclohydrolase 1; OS = Balneola sp. OX=2024824 GN=folE PE=3 SV=1
MDNLDLDKITAEDLGEAHIGTSELTPLRDDAFDLSDSEKIDIIQDHFKEIMETLGLDLNDDSLKGTPYRVAKMFVKEIFNGLDPKNKPEARTFSNNYDYNDMVMEKNIQVTSFCEHHFLPFIGKAHVAYIASGKVIGLSKINRLVDYFSRRPQVQERLTLQIADALSEAMETDDVAVFIDSKHLCVSTRGIRDVSSSTITTEFRGAFKEEATQRKFIDFIKTDTEL

SEQ ID NO: 5404 - protein, 299 aa, unidentified
  source 1..299: note = Balneolaceae bacterium
  REGION 1..299: note = tr|A0A3D1G899|A0A3D1G899_9BACT GTP cyclohydrolase FolE2 OS=Balneolaceae bacterium OX=2053516 GN=folE2 PE=3; SV = 1
MISNQVQRFYDPTFTVTPEYKASLPDLQNGPASLIEGANVPIQQVGISNFKLPLQIKKRDGKPVTLEVSVDGYVSLDAGKKGINMSRIMRTFYKFKDEVFSLDMLERVLKAYKEDLESQESFLRLSFSYPMVMESLRSGMEGYQYYDVSFEGHLDNYDQFHKHMHLSFVYSSACPCSYELAEHAREDRGVAAIPHSQRSIADVTVALKDEFFVEDLVQVCRAALKTETQVMVKREDEQAFAELNGAYQKFVEDAARLLYEELDSYNSVRDFVVRCAHLESLHSHDAVSRICKGLPNGLR

SEQ ID NO: 5405 - protein, 145 aa, unidentified
  source 1..145: note = Balneolaceae bacterium
  REGION 1..145: note = tr|A0A359E8R8|A0A359E8R8_9BACT GTP cyclohydrolase 1 (Fragment) OS=Balneolaceae bacterium OX=2053516; GN = DEG32_16015 PE=3 SV=1
NPKNKPVARQFNNDYDYNGMVVEKNIQVTSFCEHHFLPFIGKAHVGYISSGKKVIGLSKINRIVDYYSRRPQVQERLTLQIADELSAALETDDIAVFIDSKHLCVSTRGIKDITSTTITSEYRGAFKEEATQQKFIDYIKTNTDI

SEQ ID NO: 5406 - protein, 202 aa, Barnesiella intestinihominis
  REGION 1..202: note = tr|K0XPV0|K0XPV0_9BACT GTP cyclohydrolase 1; OS = Barnesiella intestinihominis YIT 11860 OX=742726; GN = folE PE=3 SV=1
MEEEQSVWASEEQRRICKELAEHYRAIISLLGDDPDREGLRKTPERTAKAMMQLTRGYRQSAQEIISSAVFEHTGSRIVVVRDIEFYSFCEHHLLPFFGKVHVGYIPSGGIVGLSKVARLVEVFARRFQVQERLTAQICQSLTDTLSTEGVMVVVEARHLCMQMRGVEKQGAVTVTYDSSGKFEQEEWRREFYSLIGKNSIG

SEQ ID NO: 5407 - protein, 195 aa, Barnesiella sp.
  REGION 1..195: note = tr|A0A1Y3WKI3|A0A1Y3WKI3_9BACT GTP cyclohydrolase 1; OS = Barnesiella sp. An55 OX=1965646 GN=folE PE=3 SV=1
MSPEEQQRVCKELAEHYRAIISLLGDDPDREGMRKTPERAAKAMMKLTKGYHQSARDIISSAVFEHTGSRIVIVRDIEFYSFCEHHLLPFFGKVHVGYIPTNGIVGLSKVARVVDAFARRFQVQERLTAQICQSLAEALATEGVMVMVEARHLCMQMRGVEKQGAVTVTYDCTGKFEQEEWRREFYSLIGKNSCQ

SEQ ID NO: 5408 - protein, 201 aa, Barnesiella sp.
  REGION 1..201: note = tr|A0A1Y4GXQ3|A0A1Y4GXQ3_9BACT GTP cyclohydrolase 1; OS = Barnesiella sp. An22 OX=1965590 GN=folE PE=3 SV=1
MDEQVMSPEEQQRVCKELAEHYRAIISLLGDDPDREGLRKTPERAAKAMMKLTKGYRQSAHDVISSAIFEHTGSRIVIVRDIEFYSFCEHHLLPFFGKVHVGYIPTKGIVGLSKVARLVEVYARRFQVQERLTAQICHSLADTLEAEGVIVMVEARHLCMQMRGVEKQGAVTVTYDCTGKFEQPEWRREFYSLIGKNSCEQ

SEQ ID NO: 5409 - protein, 201 aa, Barnesiella viscericola
  REGION 1..201: note = tr|W0ER22|W0ER22_9BACT GTP cyclohydrolase 1; OS = Barnesiella viscericola DSM 18177 OX=880074 GN=folE; PE = 3 SV=1
MEEQVVMSPEEQQRVCKELAEHYRAIISLLGDDPNREGLLKTPERAAKAMMKLTKGYRQSASDVISSAIFEHTGSRIVIVRDIEFYSFCEHHLLPFFGKVHVGYIPSKGIVGLSKVARVVDVFARRFQVQERLTAQICHSLAEALSTEGVIVMVEARHLCMQMRGVEKQGAVTVTYDCTGKFEQEEWRREFYSLIGKNSCE

SEQ ID NO: 5410 - protein, 192 aa, unidentified
  source 1..192: note = Barrientosiimonas humi
  REGION 1..192: note = tr|A0A542X7Y0|A0A542X7Y0_9MICO GTP cyclohydrolase 1; OS = Barrientosiimonas humi OX=999931 GN=folE PE=3 SV=1
MSTRAKIDHRRAAAAVRELLIAVGEDPEREGLRDTPDRVARAYAEMFAGLQQDPAEVLQRTFEIDHDELVMVKDIEVYSTCEHHLLPFHGVAHVSYIPAKDGRVTGLSKLARLVDVYAKRPQVQERLTSQIADAIMRHLKAQGALVVLDCEHLCMSMRGVRKPGARTQTSAVRGLLRDSATRAEAMSLVTGR

SEQ ID NO: 5411 - protein, 206 aa, Bartonella alsatica
  REGION 1..206: note = tr|J1IV41|J1IV41_9RHIZ GTP cyclohydrolase 1; OS = Bartonella alsatica IBS 382 OX=1094551 GN=folE PE=3 SV=1
MHNVVKGGTIDPFLPGEKHPSLEEVKEAIRTLLLWVGENPNREGLLDTPERVAKAYRELFIGYSKSIEETLDTVFEEVSGYNEAIIVKNIPFYSHCEHHMIPIVGKAYIGYFPDIKIVGLSKIARVVDIFSRRLQTQEAMTAQIADALEVYLKPRGVAVLVEAEHMCMAMRGIQKQGTTTITTCFHGCYKKDQAVQTNFMMMVQGS

SEQ ID NO: 5412 - protein, 200 aa, unidentified
  source 1..200: note = Bartonella ancashensis
  REGION 1..200: note = tr|A0A0M3T321|A0A0M3T321_9RHIZ GTP cyclohydrolase 1; OS = Bartonella ancashensis OX=1318743 GN=folE PE=3 SV=1
MKKNVANQFLSEKESPDLEKVQEAIRTLLSWIGEDPNREGLLDTPKRVIKVYSELFGGYNESAEEILGTVFEEVSGYDEAVLVKDISFYSHCEHHMLPIIGKAHVAYFPDTKIVGLSKIARIVDVFARRLQTQEAMTAQIADALKIHLQPRGVAVLVEAEHTCMSMRGVQKQGAITVTTRFLDCYEKNQSVQANFMEMIR

SEQ ID NO: 5413 - protein, 206 aa, unidentified
  source 1..206: note = Bartonella apis
  REGION 1..206: note = tr|A0A1R0F766|A0A1R0F766_9RHIZ GTP cyclohydrolase 1; OS = Bartonella apis OX=1686310 GN=folE PE=3 SV=1
MQSVRKSAPHSVNQAMNQRPSREEAEAAVRTLLLWVGENPEREGLVNTPKRVIKAYEEMFAGYNQSPEEILGTVFDEVSGYNDPVLIKDIPFYSHCEHHMVPIIGKAHVAYLPDGKVVGLSKIPRVVDVYAKRLQTQESITAQVADALYKYLKPRGVAVLIEAEHMCMAMRGVKKQGSTTITATYRGYYKDNVEAQVNFVKMIRGF

SEQ ID NO: 5414 - protein, 206 aa, unidentified
  source 1..206: note = Bartonella apis
  REGION 1..206: note = tr|A0A1U9MB71|A0A1U9MB71_9RHIZ GTP cyclohydrolase 1; OS = Bartonella apis OX=1686310 GN=folE PE=3 SV=1
MQSAQKNATDAAHQTKNKRPSREEAEAAVRTLLLWAGENPDREGLVNTPKRVVKAYEEMFAGYNQSAEEILGTVFDEVSGYNDPVLIKDIPFYSHCEHHMVPIIGKAHIAYMPDGRVVGLSKIPRVVDVYAKRLQTQESITAEVADALYRYLKPRGVAVLIEAEHMCMAMRGVKKQGSTTVTATYRGFYKDNVEAQVNFLKMIRGL

SEQ ID NO: 5415 - protein, 203 aa, unidentified
  source 1..203: note = Bartonella australis
  REGION 1..203: note = tr|M1NT47|M1NT47_BARAA GTP cyclohydrolase 1; OS = Bartonella australis (strain Aust/NH1) OX=1094489; GN = folE PE=3 SV=1
MQGKAANLFLSKKERPSFEEVKVAIRTLLLWVGEDPNREGLLDTPSRVAKAYSELFTGYNESAEEILGTVFEEISGYNEPVVAKGIPFYSHCEHHMLPIIGKAHVAYLPGEKVVGLSKIARVVDIFSRRLQTQEAMTAQVANALEKHLKPRGVAVLIEAEHMCMAMRGVQKQGAKAITMSFHGYYETDRVARANFITMTHGTQ

SEQ ID NO: 5416 - protein, 206 aa, Bartonella bacilliformis
  REGION 1..206: note = sp|A1USJ5|GCH1_BARBK GTP cyclohydrolase 1; OS = Bartonella bacilliformis (strain ATCC 35685 / NCTC 12138 / KC583) OX=360095 GN=folE PE=3 SV=1
MHSAVEKVAEDLSLSRENLSLEEVEKAIRTLLLWVGENPDREGLLETPKRIAKVYKELFSGYGESVDEILGVVFEEVAGYDEPVIVKDIFFYSHCEHHMIPIIGKAHVAYLPDKKIVGLSKIARVVDVFAHRLQTQETMTAQVANSLKKYLKPRGLAVLIEAEHMCMAMRGVQKQGAATITTSFHGYYKKDQVAQANFMTITRGIR

SEQ ID NO: 5417 - protein, 206 aa, Bartonella bacilliformis
  REGION 1..206: note = tr|A0A072R2I0|A0A072R2I0_BARBA GTP cyclohydrolase 1; OS = Bartonella bacilliformis Ver097 OX=1293911 GN=folE PE=3; SV = 1
MHSAVEKVAADLSLSGECPSLKEVEKAIRTLLLWVGENPDREGLLETPKRIAKVYKELFSGYGESVDEILGVVFEEVGGYNEPVIVKDISFYSHCEHHMIPIIGKVHVAYLPDKKIVGLSKIARVIDVFARRLQTQETMTAQVANSLKKYLKPRGLAVLIEAEHMCMAMRGVQKQGATTITTSFHGYYEKDQVAQANFMRIIRGIH

SEQ ID NO: 5418 - protein, 206 aa, Bartonella birtlesii
  REGION 1..206: note = tr|J0YRZ8|J0YRZ8_9RHIZ GTP cyclohydrolase 1; OS = Bartonella birtlesii LL-WM9 OX=1094552 GN=folE PE=3 SV=1
MHNVVKGSKRDSFLPREERPSFEEVKEAVRTLLLWVGENPNREGLLDTPERVVRAYRELFLGYEKSVEKILGTVFKEVSGYNEAIILKDIPFYSHCEHHMIPIVGKAYIGYLPDTKVVGLSKIARVVDIFSRRLQTQEAMTAQIADALAVHLQPCGVAVLIEAEHMCMAMRGIQKQGATTITTCFRGCYEEDRAVQDNFIKMIQRA

SEQ ID NO: 5419 - protein, 206 aa, Bartonella bovis
  REGION 1..206: note = tr|N6UU26|N6UU26_9RHIZ GTP cyclohydrolase 1; OS = Bartonella bovis m02 OX=1094492 GN=folE PE=3 SV=1
MHNLTEGIATNLSLSEKKRPSFEEVEAAVRTLLLWVGENPDREGLLDTPKRVAKVYSELFSGYDESVEEILGTVFEEVSGYNEPIIMKDINFYSHCEHHVLPIVGKVHIAYLPDTKIVGLSKIARVIDIFSHRLQTQEAMTAQVANALKTQLKPRGVAVVIEAEHMCMAMRGIRKYGTTTITTSFHGSYKEDQVIQANLMMLLRPL

SEQ ID NO: 5420 - protein, 206 aa, Bartonella bovis
  REGION 1..206: note = tr|N6UIJ6|N6UIJ6_9RHIZ GTP cyclohydrolase 1; OS = Bartonella bovis 91-4 OX=1094491 GN=folE PE=3 SV=1
MHNLTEGIATDFSLSEKKRPSFEEVEAAVRTLLLWVGENPNREGLLDTPKRVAKVYSELFSGYDESIEEILGTVFEEVSGYNEPIIMKDISFYSHCEHHILPIVGKVHIAYLPDTKIVGLSKVARVIDIFSHRLQTQEAMTAQVANALKTQLKPRGVAVVIEAEHMCMAMRGIRKYGTTTITTSFHGSYKEDQIAQANLMMVLRSL

SEQ ID NO: 5421 - protein, 204 aa, Bartonella clarridgeiae
  REGION 1..204: note = tr|E6YI05|E6YI05_BARC7 GTP cyclohydrolase 1; OS = Bartonella clarridgeiae (strain CIP 104772 / 73); OX = 696125 GN=folE PE=3 SV=1
MRDVIEEGATNSFLSEQKKPSVEEIEMAIHTLLLWIGENPNREGLLNTPSRVAKAYRELFTGYNESVEEILGTVFEEVSGYNEPVIMKNISFYSHCEHHMLPIIGKAHIAYLPDKKVVGLSKIARVVDAFSRRLQTQETMTAQIVDALETHLKPHGVAVVVEAEHMCMNMRGIRKQGTTTITTSFHGYYQSDQVAQASFMSLIR

SEQ ID NO: 5422 - protein, 205 aa, Bartonella doshiae
  REGION 1..205: note = tr|A0A380ZDJ1|A0A380ZDJ1_BARDO GTP cyclohydrolase 1; OS = Bartonella doshiae OX=33044 GN=folE PE=3 SV=1
MHNIVKKGGATDLSEKRRPCFEEVEAAVRTLLLWVGENPDREGLLDTPKRVAKAYNELFAGYSESVEEILGTAFEEVSDYKEPVIVKNIPFYSHCEHHMIPIIGKAYIAYLPDAKIVGLSKIARIVDVFSRRLQTQETMTAQIAHTLEMYLKPRGVAVLIEAEHMCMAMRGIQKHGATTITTSFHGYYEKDQVAQDHFMMMVHRS

SEQ ID NO: 5423 - protein, 207 aa, Bartonella elizabethae
  REGION 1..207: note = tr|J0RIG2|J0RIG2_BAREL GTP cyclohydrolase 1; OS = Bartonella elizabethae F9251 = ATCC 49927 OX=1094555; GN = folE PE=3 SV=1
MRNGVKRGAKDSLLSEKKHPSLEEVEEAIRTLLLWVGENPRREGLLETPKRIAKAYRELFNGYHQSVEETLGTVFEEVSGYNEAVIVKNIPFYSHCEHHMIPIIGKAHIGYLPDAKIVGLSKIARIVDIFSRRLQTQEAMTAQVADALEMHLKPRGVAVLIEAEHMCMVMRGIQKQGSTTITKKFHGYYEKDQAAQAHFMMMVQRSS

SEQ ID NO: 5424 - protein, 206 aa, Bartonella grahamii
  REGION 1..206: note = tr|C6ADY3|C6ADY3_BARGA GTP cyclohydrolase 1; OS = Bartonella grahamii (strain as4aup) OX=634504 GN=folE; PE = 3 SV=1
MRNIVKEDAKDSFLSEEKRPSIEEVEEAIRTLLLWIGENPNREGLLDTPRRIAKAYRELFSGYSQSVKETLGTVFEEVSGYNEAVIVKNIPFYSHCEHHMIPIIGKAHIAYLPNEKIVGLSKIVRVVDTFSRRLQTQEAMTAQVAHALKTYLKPHGVAVLIEAEHMCMAMRGIQKQGSTTITKNFHGYYEKDHVAQAHFMMMIQRS

SEQ ID NO: 5425 - protein, 206 aa, Bartonella grahamii; identical to SEQ ID NO: 5424
  REGION 1..206: note = tr|A0A336NJ81|A0A336NJ81_BARGR GTP cyclohydrolase 1; OS = Bartonella grahamii OX=33045 GN=folE PE=3 SV=1

SEQ ID NO: 5426 - protein, 206 aa, Bartonella henselae
  REGION 1..206: note = sp|Q6G3J8|GCH1_BARHE GTP cyclohydrolase 1; OS = Bartonella henselae (strain ATCC 49882 / DSM 28221 / Houston 1) OX=283166 GN=folE PE=3 SV=1
MHNIKVGTKNPFLSGRKRPPFEEVEAAIRTFLLWIGENPNREGLLDTPGRVAKAYRDLFTGYDESVEEILGTVFEEVSGYNEPVIMKDLSFYSHCEHHMIPIVGKAHIAYFPDEKIVGLSKIARVVNVFSRRLQTQEAMTAQIANALETHLKPRGVAVLIEAEHMCMTMRGVQKQGAKTITTSFHGSYEKDQVAQAHFMMIVRRSS

SEQ ID NO: 5427 - protein, 206 aa, Bartonella henselae; identical to SEQ ID NO: 5426
  REGION 1..206: note = tr|X5MH33|X5MH33_BARHN GTP cyclohydrolase 1; OS = Bartonella henselae OX=38323 GN=folE_1 PE=3 SV=1

SEQ ID NO: 5428 - protein, 206 aa, Bartonella koehlerae
  REGION 1..206: note = tr|A0A067W862|A0A067W862_9RHIZ GTP cyclohydrolase 1; OS = Bartonella koehlerae C-29 OX=1134510 GN=folE PE=3 SV=1
MHNIKVGTKNLFLSGRKRPPFEEVEAAIRTFLLWIGENPNREGLLETPERVAKTYRDLFTGYDESVEEILGTIFEEVSGYNQPVIVKDISFYSHCEHHMIPIVGKAHIAYLPDTKVVGLSKIARVVNVFSRRLQTQEAMTAQIANALETHLRPRGVAVLIEAEHMCMAMRGVQKQGAKTITTSFHGSYEKDQVAQAHFMMMVRRSS

SEQ ID NO: 5429 - protein, 206 aa, unidentified
  source 1..206: note = Bartonella melophagi
  REGION 1..206: note = tr|J0QVH5|J0QVH5_9RHIZ GTP cyclohydrolase 1; OS = Bartonella melophagi K-2C OX=1094557 GN=folE PE=3 SV=1
MHSPTKGIAKNLSLSEKKRPSFEEVEAAVRTLLLWVGENPDREGLLNTPKRVAKVYSELFSGYDKSVKEILGTVFEEVSGYNEPIIMKDISFYSHCEHHVLPIVGKAHIAYLPDTKIVGLSKVARVIDIFSRRLQTQEAMTAQIANALETYLRPRGVAVVIEAEHMCMAMRGIRKHGTTTITTSFHGFYKKDQVARANLMMVLLQL

SEQ ID NO: 5430 - protein, 206 aa, Bartonella quintana
  REGION 1..206: note = sp|Q6FZZ4|GCH1_BARQU GTP cyclohydrolase 1; OS = Bartonella quintana (strain Toulouse) OX=283165 GN=folE; PE = 3 SV=1
MHNIKGGTKNPFLSGRKRPHFEEVEAAIRTLLLWIGENPNREGLLDTPRRVAKAYRDLFIGYGESVEEILGTVFEEVSGYNEPVIVKDISFYSHCEHHMIPIVGKAHIAYLPDEKVVGLSKIARIVDVFSRRLQTQETMTAQIADALEEYLKPCGIAVLIEAEHMCMTMRGVQKQGATTITTSFHGSYEKDQVAQTNFMMIVRRSS

SEQ ID NO: 5431 - protein, 206 aa, Bartonella quintana; identical to SEQ ID NO: 5430
  REGION 1..206: note = tr|W3TZT7|W3TZT7_BARQI GTP cyclohydrolase 1; OS = Bartonella quintana JK 73 OX=1402976 GN=folE PE=3 SV=1

SEQ ID NO: 5432 - protein, 206 aa, unidentified
  source 1..206: note = Bartonella rattimassiliensis
  REGION 1..206: note = tr|J0ZGM7|J0ZGM7_9RHIZ GTP cyclohydrolase 1; OS = Bartonella rattimassiliensis 15908 OX=1094556 GN=folE; PE = 3 SV=1
MRNVVKEGAKDSLLFEEKRPSIEEVEDAIRTLLLWVGENPNREGLLDTPRRIAKAYRELFNGYTQSVEETLGTVFEEVSGYNESVIVKNIPFYSHCEHHMIPIIGKAHIAYLPKAKIVGLSKIARVVDIFSRRLQTQESMTAQVANALKMYLKPRGVAVLIEAEHMCMAMRGIQKQGVTTITKNFHGYYEKDQAAQTHFMMTVQRS

SEQ ID NO: 5433 - protein, 204 aa, Bartonella rochalimae
  REGION 1..204: note = tr|E6YLZ5|E6YLZ5_9RHIZ GTP cyclohydrolase 1; OS = Bartonella rochalimae ATCC BAA-1498 OX=685782 GN=folE; PE = 3 SV=1
MCDIIKGGATNSFFSEQKKPSVEEVEMAIHTLLLWIGENPNREGLLDTPSRVAKAYRELFSGYNESVKEILATVFEEVSGYSEPVILKNISFYSHCEHHMLPIIGKAHVAYLPDKKVVGLSKIARIVDVFSRRLQTQETMTAQIVDALKTHLKPRGIAVVIEAEHMCMGMRGIRKQGATTITTSFHGYYQTNQMAQDSFMSLIR

SEQ ID NO: 5434 - protein, 206 aa, Bartonella schoenbuchensis
  REGION 1..206: note = tr|N6UND6|N6UND6_9RHIZ GTP cyclohydrolase 1; OS = Bartonella schoenbuchensis m07a OX=1094496 GN=folE PE=3; SV = 1
MHSPTKGIAKDLSLSKKKRPSFEKVEAAVRTLLLWVGENPDREGLLNTPKRVAKVYSELFSGYDESVEEILGTVFEEVSGYNEPIIMKDISFYSHCEHHVLPIVGKAHIAYLPDTKIVGLSKIARVIDIFSRRLQTQEAMTAQVANALKTHLKPRGVAVVIEAEHMCMAMRGIRKQGATTITTSFHGSYKEDQVAQANLMMVLRQL

SEQ ID NO: 5435 - protein, 206 aa, Bartonella schoenbuchensis
  REGION 1..206: note = tr|E6YYV5|E6YYV5_BARSR GTP cyclohydrolase 1; OS = Bartonella schoenbuchensis (strain DSM 13525 / NCTC 13165 / R1) OX=687861 GN=folE PE=3 SV=1
MHSPTKGIAKDLSLSEKKRPSFKEVEAAVRTLLLWVGENPDREGLLNTPKRVAKVYSELFSGYDESVEEILGTVFEEVSGYNEPIIMKDISFYSHCEHHVLPIVGKAHIAYLPDTKIVGLSKIARVIDVFSRRLQTQEAMTAQVANALKTHLKPRGVAVVIEAEHMCMAMRGIRKQGATTITTSFHGSYKEDQVAQANLMMVLRQL

SEQ ID NO: 5436 - protein, 207 aa, Bartonella sp.
  REGION 1..207: note = tr|A0A5B9D229|A0A5B9D229_9RHIZ GTP cyclohydrolase 1; OS = Bartonella sp. OE 1-1 OX=545612 GN=folE PE=3 SV=1
MRNVVKEGAKDSFLSKEECPSIEEVEEAIRTLLLWVGENPRREGLLETPKRIAKAYRELFNGYRQSVEETLGTVFEEVSGYNESVIVKNIPFYSHCEHHMIPIIGKAHIAYLPDAKIVGLSKIARIVDIFSRRLQTQEAMTAQVAHALEVHLKPRGVAVLIEAEHMCMAMRGIQKQGSTTITKKFHGYYEKDQAARAHFMMMVQKSS

SEQ ID NO: 5437 - protein, 206 aa, Bartonella sp.
  REGION 1..206: note = tr|A0A1S6WTI5|A0A1S6WTI5_9RHIZ GTP cyclohydrolase 1; OS = Bartonella sp. WD16.2 OX=1933904 GN=folE PE=3 SV=1
MHSPMKGIAKDLFLSEKKRPSFEEVEAAVRTLLLWVGENPDREGLLNTPKRVAKVYSELFSGYDESVEEILGTVFEEVSGYNEPIIMKDIGFYSHCEHHVLPIVGKAHIAYLPDTKIVGLSKIARVIDIFSRRLQTQEAMTAQVANALETHLKPRGVAVVIEAEHMCMAMRGIRKHGATTITTSFHGSYKKDQVAQANLMMVLRQL

SEQ ID NO: 5438 - protein, 207 aa, unidentified
  source 1..207: note = Bartonella tamiae
  REGION 1..207: note = tr|J0ZQ50|J0ZQ50_9RHIZ GTP cyclohydrolase 1; OS = Bartonella tamiae Th239 OX=1094558 GN=folE PE=3 SV=1
MQPVVTNAAILSDDSDRNKPTREEAEEAVRVLLRWAGENPDREGLKDTPKRVTKAYDELFAGYRQSAKDILGTVFEEVSGYNDPVLIRDIPFYSHCEHHMVPIIGKAHVAYLPNGQVVGLSKIPRVVDVFARRLQTQETITAQIADALMNYLKPRGVAVLIEAEHMCMAMRGVQKQGSTTLTATFRGVYETEFHLQADFMTMLRGFK

SEQ ID NO: 5439 - protein, 206 aa, Bartonella taylorii
  REGION 1..206: note = tr|J0RJ16|J0RJ16_BARTA GTP cyclohydrolase 1; OS = Bartonella taylorii 8TBB OX=1094560 GN=folE PE=3 SV=1
MHNVIKGATIDPFLSGKRRPSSEEVEAAIRTLLLWVGENPNREGLLDTPRRVTKAYRELFIGYSKSVEEILGTVFEEVSGYNESIIVKDISFYSHCEHHMIPIVGRAHIGYLPDKKVVGLSKIARVVDVFSRRLQTQEAMTAQVARALEEHLEPRGVAVLIEAEHMCMAMRGIQKQGATTITTSFHGCYAKDQGIQAHFMTMVQRL

SEQ ID NO: 5440 - protein, 206 aa, Bartonella tribocorum
  REGION 1..206: note = tr|A9IVA6|A9IVA6_BART1 GTP cyclohydrolase 1; OS = Bartonella tribocorum (strain CIP 105476 / IBS 506); OX = 382640 GN=folE PE=3 SV=1
MRNVVKEGAKDSFLSEEKRPSIEEVEEAIRTLLLWVGENPRREGLLETPKRIAKAYHELFNGYRQSVEETLGTVFEEVSGYNESVIVKNIPFYSHCEHHMIPIIGKAHIAYLPDTKIVGLSKIARVVDIFSRRLQTQEAMTAQVAHALEMHLKPRGVAVLIEAEHMCMAMRGIQKQGSTTITKKFHGYYEKDQAAQAHFMMMVQSS

SEQ ID NO: 5441 - protein, 206 aa, Bartonella tribocorum
  REGION 1..206: note = tr|A0A2M6UTG1|A0A2M6UTG1_9RHIZ GTP cyclohydrolase 1; OS = Bartonella tribocorum OX=85701 GN=folE PE=3 SV=1
MRNILKEGAKDSFLSEEKRPSIEEVEEAIRTLLLWIGENPSREGLLETPKRITKAYRELFNGYRQSVEETLGTVFEEVSGYNESVIVKNIPFYSHCEHHMIPIIGKAHIAYLPDAKIVGLSKIARVVDIFSRRLQTQEAMTAQVAHALEMHLKPRGVAVLIEAEHMCMAMRGIQKQGSTTITKKFHGYYEKDQAAQAHFMLMVQKS

SEQ ID NO: 5442 - protein, 205 aa, Bartonella vinsonii
  REGION 1..205: note = tr|J0QXP3|J0QXP3_BARVI GTP cyclohydrolase 1; OS = Bartonella vinsonii subsp. arupensis OK-94-513; OX = 1094562 GN=folE PE=3 SV=1
MQDVIKGGVIDPFLSGKRPSIEEVEAAIRTLLLWVGENPNREGLVDTPKRVAKAYCELFTGYSKSVEEILDTVFEEVAGYNEAIIVKNIPFYSHCEHHMIPIVGKAHIGYFPDTKIVGLSKIARVVDVFARRLQTQEAMTAQIANALGVHLKPRGVAVLIEAEHMCMAMRGIQKQGATTITTNFLGCYEKDQGAQANFMMMVQRS

SEQ ID NO: 5443 - protein, 205 aa, Bartonella vinsonii
  REGION 1..205: note = tr|A0A3S4ZCM2|A0A3S4ZCM2_BARVI GTP cyclohydrolase 1; OS = Bartonella vinsonii OX=33047 GN=folE PE=3 SV=1
MRDVIKGGSRDPFLSEKRPSVEEVEAAIRTLLLWVGENPNREGLVDTPKRVAKAYRDLFTGYSKSVEEILDTVFEEASGYHEAIIVKNIPFYSHCEHHMIPIVGKAHIGYFPDTKIVGLSKIARVVDVFARRLQTQEAMTAQIAHALGVHLKPRGVAVLIEAEHMCMAMRGVQKQGATTITTSFQGCYEKDQGLQANFMRMVQRS

SEQ ID NO: 5444 - protein, 205 aa, unidentified
  source 1..205: note = Bartonella washoeensis
  REGION 1..205: note = tr|J0Q7Q8|J0Q7Q8_9RHIZ GTP cyclohydrolase 1; OS = Bartonella washoeensis Sb944nv OX=1094563 GN=folE PE=3; SV = 1
MHNVQGDNKNPFLSGGKRPSFEEVEAAIRTLLLWIGEDPNREGLLDTPSRVAKAYRNLFTGYSESVEEILGTVFEEVSGYNESVIMKDLSFYSHCEHHMIPIVGKAHIAYLPDKKVVGLSKIARVVDAFSRRLQTQEAMTAQIANALEVHLKPRGVAVLIEAEHMCMAMRGVQKQGATTITTSFHGSYEKDKVAQANFMMMVCRP

SEQ ID NO: 5445 - protein, 205 aa, unidentified
  source 1..205: note = Bartonella washoeensis
  REGION 1..205: note = tr|J0QLM9|J0QLM9_9RHIZ GTP cyclohydrolase 1; OS = Bartonella washoeensis 085-0475 OX=1094564 GN=folE PE=3; SV = 1
MHNVQGDTKNPFLSGGKRPSFEEVKAAIRTLLLWMGENPNREGLLDTPTRVAKAYRHLFTGYSESVEEILGTVFEEVSGYNESVIVKDLSFYSHCEHHMIPIVGKAHIAYLPDKKVVGLSKIARVVDAFSRRLQTQEAMTAQIANALDVHLKPRGVAVLIEAEHMCMAMRGVQKQGATTITTSFHGSYEKDKVAQANFMMMVCRP

SEQ ID NO: 5446 - protein, 259 aa, unidentified
  source 1..259: note = Basilea psittacipulmonis
  REGION 1..259: note = tr|A0A077DCA8|A0A077DCA8_9BURK GTP cyclohydrolase FolE2 OS=Basilea psittacipulmonis DSM 24701 OX=1072685; GN = folE2 PE=3 SV=1
MQTQNMPDVQSSKDLRATPIQKVGVRGVKYPIIIKTGKEIQHSVGNWTMTVYLPAEEKGTHMSRFLALLEEHDKQAMNPHDFMQLTEKMKGLLQSQKANIKVTFPYFMQKVAPVSGVTSPMDYEVTWHANVEEGVSDFEVTVVVPVMSLCPCSKAISKYGAHNQRSYITVTLGCSPDLDLDELIRQIEAQGSCQLWGLLKRPDEKYVTEHSYDNPKFVEDLIRDVAVTIQSLPSIRYYHIEVENLESIHNHSAYASISG

SEQ ID NO: 5447 - protein, 264 aa, unidentified
  source 1..264: note = Bathymodiolus azoricus
  REGION 1..264: note = tr|A0A1H6KHB8|A0A1H6KHB8_9GAMM GTP cyclohydrolase FolE2 OS=Bathymodiolus azoricus thioautotrophic gill symbiont OX=235205 GN=folE2 PE=3 SV=1
MSAANLPDTQNNADTRQIVIDKVGIKDISHPITFIDRDGNKNPTIGNFTMTVTLPEHVKGTHMSRFIEILNDGPCEFNSGNFDKIIDKVCERLESDTAHITLDFPFFRKKKAPSSGVESLMDYQVTLYGILNQGTSEVMIKVVVPVTSLCPCSKSISKYGAHNQRSHITIKARVVKGKTLHLEDLIELAEQKASCELYAILKRDDEKVVTERAYDNPAFVEDLVRDIAVGLNANDNIDYYRLESENFESIHNHSAYALIENNKY

SEQ ID NO: 5448 - protein, 264 aa, unidentified
  source 1..264: note = Bathymodiolus brooksi
  REGION 1..264: note = tr|A0A482YQX4|A0A482YQX4_9BACT GTP cyclohydrolase FolE2 OS=Bathymodiolus brooksi thiotrophic gill symbiont; OX = 1052209 GN=folE2 PE=3 SV=1
MNASSLPDTQNNPDSRQIVIDKVGIKDISHPIIFIDRDGKKNPTVGNFTMTVELPEHVKGTHMSRFIEILNEGPCEFNSENFNKIIDKVREKLESKTAHIVLEFPFFRTKKAPSSGVESLMDYQVTLYGILNQGISEVMMKVVVPVTSLCPCSKSISKYGAHNQRSHITIKVRIAKGKTLYLEDLIELAEQKASCELYAILKRDDEKVVTERAYENPAFVEDLVRDIAVGLNINDNLDYYRLESENFESIHNHSAYAVIENYKC

SEQ ID NO: 5449 - protein, 264 aa, unidentified
  source 1..264: note = Bathymodiolus heckerae
  REGION 1..264: note = tr|A0A483A316|A0A483A316_9BACT GTP cyclohydrolase FolE2 OS=Bathymodiolus heckerae thiotrophic gill symbiont; OX = 1052212 GN=folE2 PE=3 SV=1
MSATNLPDTQNNTDIRQIVIDKVGIKDILHPITFIDRDGNKNATIGNFTMTVTLPECVKGTHMSRFIEILNEGPCEFNSGNFGKIITKVCEKLNSETAYIALDFPFFRKKKAPSSGVESLMDYQVTLYGILNQDKSEVMMKVVVPVTSLCPCSKSISKYGAHNQRSHITIKARIAEGKTLYLEDLIDLAEQKASCELYAILKRDDEKVVTERAYDNPAFVEDLVRDIAVGLNANDNIDYYRLESENFESIHNHSAYALIENNKC

SEQ ID NO: 5450 - protein, 263 aa, unidentified
  source 1..263: note = Bathymodiolus heckerae
  REGION 1..263: note = tr|A0A482YZN0|A0A482YZN0_9BACT GTP cyclohydrolase FolE2 OS=Bathymodiolus heckerae thiotrophic gill symbiont; OX = 1052212 GN=folE2 PE=3 SV=1
MKSCDLPDTQNNLDTRQIVIDRVGIKDISHPITYVDRDGNKSPTVGNFTMTVTLPENVKGTHMSRFIQILNEGPCEFNSGDFGKIIEKVRDRLESETAYITVNFPFFRKKKAPSSGVESLMDYQVTLYGSLENGVVEVMMKVVVPVTSLCPCSKSISKYGAHNQRSHITIKAKASTGKTLYLEDLIDLAEKKASCELYAILKREDEKVVTERAYDNPAFVEDLVRDIAVALNANKHISYYRLESENFESIHNHSAYALIENQK

SEQ ID NO: 5451 - protein, 181 aa, unidentified
  source 1..181: note = Bathymodiolus platifrons
  REGION 1..181: note = tr|A0A1Z5H7R9|A0A1Z5H7R9_9GAMM GTP cyclohydrolase 1; OS = Bathymodiolus platifrons methanotrophic gill symbiont; OX = 113268 GN=folE PE=3 SV=1
MMEEYFSKIIEEIGEDVTREGLVDTPKRAAKAFKFLNNGYEKNLEEVLNGAIFEADTEDMVIVKDIELYSLCEHHLLPFVGKCHIAYLPQGHVLGLSKLARIVDMYARRLQIQERLTKQIADAVNEAVNAKGVAVVIEAKHMCMMMRGVEKQNSVMTTSVMTGIFRDEMSTRAEFLSLINR

SEQ ID NO: 5452 - protein, 264 aa, unidentified
  source 1..264: note = Bathymodiolus thermophilus
  REGION 1..264: note = tr|A0A1J5TXH7|A0A1J5TXH7_9GAMM GTP cyclohydrolase FolE2 OS=Bathymodiolus thermophilus thioautotrophic gill symbiont OX=2360 GN=folE2 PE=3 SV=1
MNASSLPDTQNNPDSRQIVIDKVGIKDISHPIVFIDRDGKKNPTVGNFTMTVELPEHVKGTHMSRFIEILNEGPCEFNSDNFNKIIDKVREKLESNTAHIVLEFPFFRTKKAPSSGVESLMDYQVTLYGILNQGVTEVMMKVVVPVTSLCPCSKSISKYGAHNQRSHITIKVRIAKGKTLHLEDLIELAEQKASCELYAILKRDDEKVVTERAYDNPAFVEDLVRDIAVGLNANDNLDYYCLESENFESIHNHSAYAVIENYKC

SEQ ID NO: 5453 - protein, 208 aa, Bauldia litoralis
  REGION 1..208: note = tr|A0A1G6DIF2|A0A1G6DIF2_9RHIZ GTP cyclohydrolase 1; OS = Bauldia litoralis OX=665467 GN=folE PE=3 SV=1
MDVPLKKPASDGVIAPRPWARPDRAEAEAAVRTLIAWAGDDPDRDGLRDTPRRVTEAFGEFYSGYDADPSALLERTFEDLGGYDDIVVVRDIPFSSHCEHHMVPFVGKAHVAYYPGEAVVGLSKLARVVDVYARRLQTQERLTGQVVAAIDETLKPRGIAVMIEAEHQCMTLRGAHKHGASTVTTQFTGVFRDDPAEQQRFVSLVRSG

SEQ ID NO: 5454 - protein, 220 aa, unidentified
  source 1..220: note = Baumannia cicadellinicola
  REGION 1..220: note = sp|Q1LT77|GCH1_BAUCH GTP cyclohydrolase 1; OS = Baumannia cicadellinicola subsp. Homalodisca coagulata; OX = 374463 GN=folE PE=3 SV=1
MVILTKEASMVRQALLANGLEPFLRGEERLGIEARKRRIAAHMKKIMTLLNLDLADDSLAKTPYRIAYMYIEEIFPGLDYANFPQITLISNKMKADEMVTVRNITLTSTCEHHFLMIDGKATVSYIPKSNVIGLSKINRIVRFFAQRPQVQERLTQQILLALQTILGTNNVAVSIYAVHYCVKARGICDSTSTTTTTSLGGIFKSSQNTRQEFLRTINQT

SEQ ID NO: 5455 - protein, 304 aa, Bdellovibrio bacteriovorus
  REGION 1..304: note = sp|Q6MKE9|GCH4_BDEBA GTP cyclohydrolase FolE2; OS = Bdellovibrio bacteriovorus (strain ATCC 15356 / DSM 50701 / NCIB 9529 / HD100) OX=264462 GN=folE2 PE=3 SV=1
MTKQSLPDVAKETHSERFAPIDWVGMGAIELPVMLKQADGVYRIPARVDAKVSLDKKPSRGIHMSRLYLLSQELLTKSELSLGLLGTVTSEFLRTHEDLSTKALVQVQFEAPLVRKALKSNNQAWRSYPVITSAFNEEGQISYFVEVVVTYSSTCPASAALSRQLIQDGFKQNFSTDKPLDFDVVHSWLGTPQGIVATPHAQRSFARVKAEVGANYNYGDLIDIVEEALQTAVQGAVKREDEQEFALRNGQNLMFCEDAARRVKEALDAKADVLDYVAEFSHVESLHPHNAVSHISKGLKLRSF

SEQ ID NO: 5456 - protein, 216 aa, Bdellovibrio bacteriovorus
  REGION 1..216: note = tr|A0A150WDF1|A0A150WDF1_BDEBC GTP cyclohydrolase 1; OS = Bdellovibrio bacteriovorus OX=959 GN=folE PE=3 SV=1
METLEIPVSVKKILQNVRPTPTIENGLTNEEKIEQITTKFTEIMEILGLDLEDDSLNQTPHRVAKMYVNEVFSGLDPKKFPKMTVIDNKMKYDQMIVVQKISCLSFCEHHFLPIDGFATVAYIPNEKVIGLSKINRIVQYFGRRPQVQERLTKQIADSLQYILGTEHVAVHINAKHYCVVMRGIEDTTSITGTADLRGHFKSRQETREEFLHHCRS

SEQ ID NO: 5457 - protein, 227 aa, unidentified
  source 1..227: note = Bdellovibrio exovorus
  REGION 1..227: note = tr|M4V705|M4V705_9PROT GTP cyclohydrolase 1; OS = Bdellovibrio exovorus JSS OX=1184267 GN=folE PE=3 SV=1
MSKATNKSNTTGTEIALEILTNVRPSPTVTSNLSDEEKISTIQKHFSEIMKVLGLDLEDDSLKDTPKRMAKMYVNEIFGGLSPQNFPKITVIENKMQYDQMVCVQDIEVMSVCEHHFQPIDGFATVAYIPKNKVIGLSKLNRIVSYFAKRPQVQERLTKQVADCLQYILDTEDVAVHINAKHYCVISRGIQDTHSTTTTSDLRGAFKSSESTRLEFLKQCRSRFNNG

SEQ ID NO: 5458 - protein, 240 aa, Bdellovibrio sp.
  REGION 1..240: note = tr|A0A514XJZ6|A0A514XJZ6_9PROT GTP cyclohydrolase 1; OS = Bdellovibrio sp. ZAP7 OX=2231053 GN=folE PE=3 SV=1
MSKAKAKKITKQGAGKKALKKVVDSEIEHVLSTKDILDNVRPTPMIDNGLSNEEKIEKITEKFTEILEVLGLDLNDDSLADTPKRVAKMYVNEVFGGLDPHKFPKMTVIDNKMNYDQMIVVQNIKCLSFCEHHLLPIDGFATVAYIPYKKVIGLSKINRIVQYFARRPQVQERLTKQIADCLQYVLDTDHVAVHINAKHYCVMMRGIEDTDSTTATSDVRGHFKTLPETREEFLHHCRLK

SEQ ID NO: 5459 - protein, 239 aa, Bdellovibrio sp.
  REGION 1..239: note = tr|A0A514WXU7|A0A514WXU7_9PROT GTP cyclohydrolase 1; OS = Bdellovibrio sp. NC01 OX=2220073 GN=folE PE=3 SV=1
MAKKKNSKKTPKKQIEIAPEETHIIPMSVKKILDNVRPTPMIHNGLSNEQKIEKITTKFTEILEVLGLDLNDDSLVDTPKRIAKMYVNEVFGGLDPHKFPKMTVIENTMKYDQMIVVQNIECLSFCEHHFLPIDGIATVAYIPNKKVIGLSKINRIVQYFSRRPQVQERLTKQIADCLQYVLETDHVAVHINAKHYCVMMRGIEDTHSTTATSDLRGHFKTLPHTREEFLRHCHLQHKG

SEQ ID NO: 5460 - protein, 307 aa, unidentified
  source 1..307: note = Bdellovibrionaceae bacterium
  REGION 1..307: note = tr|A0A2E3UTM1|A0A2E3UTM1_9PROT GTP cyclohydrolase FolE2 OS=Bdellovibrionaceae bacterium OX=2026715 GN=folE2; PE = 3 SV=1
MNKDQPDVTSDMLIKRDSLKSKLKKVGMESVEVPVRLELPEAGSGFQVASADIYVNLDSSRAKGIHMSRLYISLHKNLESQPLSFKLIRQILSEFLVSHKGLSTCSYLNLRFDLPLERKSLISSNKSWRKYPVEIIGKYDGKNFDINCSFGVLYSSTCPCSAALSRQLIQQHFLESFKVLKDNDQVSTHDIFEWLGEEKNILATPHSQRSKATVTVKIQQQDLSCIENYINMVEEGLQTPVQGIVKREDEQAFAKQNGQNLMFAEDACRTIKAQLASQPDLEDFQIKVSHYESLHPHNAVSYASKSF

SEQ ID NO: 5461 - protein, 185 aa, unidentified
  source 1..185: note = Bdellovibrionaceae bacterium
  REGION 1..185: note = tr|A0A2E7GCJ0|A0A2E7GCJ0_9PROT GTP cyclohydrolase 1; OS = Bdellovibrionaceae bacterium OX=2026715 GN=folE PE=3; SV = 1
MQEQIKHILNQIGENPERQGLLSTPKRVEKSYEFLTSGYHQTVEEVIGEGVFDAESNDMVVVRDIEFYSLCEHHMIPFFGKAHVAYIPDQKILGLSKIPRVVDVFARRLQVQERLTNQVAEGLMNTLAPQGVGVVIEAYHLCMMMRGVQKQNSKTITSAMKGDFYDDPATRKEFFDILKSGPIIS

SEQ ID NO: 5462 - protein, 197 aa, unidentified
  source 1..197: note = Bdellovibrionales bacterium
  REGION 1..197: note = tr|A0A1F3STN7|A0A1F3STN7_9PROT GTP cyclohydrolase 1; OS = Bdellovibrionales bacterium GWA2_49_15 OX=1797384; GN = folE PE=3 SV=1
MFEAHKLMASGYKTVLQALKMAYPAFDLNDPNITDSHNRMARALLEMCSGLGATNGDTVNATFPSEKYNEVILLKDIDFTSLCAHHFIPFTGVAHVAYLPDVTQQDGRVVGLSKLARIVDVHAQRPQLQERMCYSIMEALKSELRPAGVMVVVQAAHGCLTCRGARKANAIMLTSALDGKFKEDPKLRQEFLALIHP

SEQ ID NO: 5463 - protein, 317 aa, unidentified
  source 1..317: note = Bdellovibrionales bacterium
  REGION 1..317: note = tr|A0A1F3S8H7|A0A1F3S8H7_9PROT GTP cyclohydrolase FolE2 OS=Bdellovibrionales bacterium RBG_16_40_8; OX = 1797388 GN=folE2 PE=3 SV=1
MRLDAQQTPQNNKDLPDISLGQETEFSGSLSQVGMGKIEMPILYTLDNNEPILLPALISAFVSLDKPEAKGIHMSRLYLELKNNLHIKPITQENLQTTLKNFIFSHEGMSESAYIEIRFSVPLERKALISGELGFRQYPVVINAELIKNKFAFTITTEILYSSTCPCSAALARQLIQQAFIEKFKDKNELKKNDVVKWLMGSDSIVAFPHAQRSLARISLRVKEGVELSLLEIINAAENAVGTPVQSAVKRIDEQEFARLNASNLMFCEDAARRLRGAFESDLRVTDYRIYVEHQESLHPHDAVSTVVKSVPGGFTV

SEQ ID NO: 5464 - protein, 272 aa, Beggiatoa alba
  REGION 1..272: note = tr|I3CFV5|I3CFV5_9GAMM GTP cyclohydrolase FolE2; OS = Beggiatoa alba B18LD OX=395493 GN=folE2 PE=3 SV=1
MNKPLTLTPEMLIPDTQRYKDTRQLVINKVGIKSIRHPILISDRAQQAQPTIATFNMYVMLAADNKGTHMSRFVKLLNELQTPLSVDNFPHLLAEMTTLLEAEQGFIEAQFPYFVNKSAPITGVKSLLDYTVTLTGEYKNGMSTQTTQVLVPVTSLCPCSKEISEYGAHNQRAHITVAVKTQETLWIEEIIDIVEAEASSELFGLLKRPDEKAVTERAYENPKFVEDVVRDVAARLNAEPRILAYTVESENFESIHNHSAYALIERDKRNRI

SEQ ID NO: 5465 - protein, 202 aa, Beggiatoa alba
  REGION 1..202: note = tr|I3CHL7|I3CHL7_9GAMM GTP cyclohydrolase 1; OS = Beggiatoa alba B18LD OX=395493 GN=folE PE=3 SV=1
MFQDASKYPIQDNAVDVLTSVYRDIITNVGEDVTRDGLLKTPERAAKAILRLTSGYQQDLQSIVNGALFESDSDQVVLVRDIEFYSLCEHHLLPFFGKCHVGYLPRGKVLGLSKVARIVDMFSRRLQIQEQLTHQVALAIQECTDAYGVGVVMDARHMCMIMRGVEKQSSSTTTSAMLGTFRQNPAARAEFLSLIASSNSSL

SEQ ID NO: 5466 - protein, 270 aa, unidentified
  source 1..270: note = Beggiatoa leptomitoformis
  REGION 1..270: note = tr|A0A2N9YAW3|A0A2N9YAW3_9GAMM GTP cyclohydrolase FolE2 OS=Beggiatoa leptomitoformis OX=288004 GN=folE2 PE=3; SV = 1
MNKPLTSIPDLSIPDTQRYKDTRQLVINKVGIKSIRHPICISDRAKRSQPTIATFNMYVMLSADNKGTHMSRFVKLLNELETPLSVETFPTLLAEMTKRLEAEQGFIETQFTYFVNKAAPITGVKSLLDYTVTLTGDYQNGITTQTTQVLVPVTSLCPCSKEISEYGAHNQRAHITVAVKTQATVWIEEIIEMVEAEASSELFGLLKRPDEKAVTERAYENPKFVEDVVRDVAARLNAESRILAYTVESENFESIHNHSAYALIERDKRK

SEQ ID NO: 5467 - protein, 207 aa, unidentified
  source 1..207: note = Beggiatoa leptomitoformis
  REGION 1..207: note = tr|A0A2N9YIM9|A0A2N9YIM9_9GAMM GTP cyclohydrolase 1; OS = Beggiatoa leptomitoformis OX=288004 GN=folE PE=3 SV=1
MSQETPENKKSQYIVGENAVENLTTMYRNIIVNVGENVERDGLLKTPERAAKAILRLTSGYQQNLNAIVNDALFESDSDQVVLVRDIEFYSLCEHHLLPFFGKCHVGYLPCGKVLGLSKVARIVDMFSRRLQIQEQLTHQVALAIQECTGAYGVGVVMDARHMCMIMRGVEKQSSSTTTSAMLGTFRQNPAARAEFLSLIASSNSSL

SEQ ID NO: 5468 - protein, 265 aa, Beggiatoa sp.
  REGION 1..265: note = tr|A7C3Q8|A7C3Q8_9GAMM GTP cyclohydrolase FolE2; OS = Beggiatoa sp. PS OX=422289 GN=folE2 PE=3 SV=1
MMNKPVTFDMPDVQNSEDTRRIAIDKVGIKDIKYPVQVKDRSGREQHTIANFNMYVNLPHNFKGTHMSRFVEILNEHEYEITVESFKDMLVEMTERLEAESGHIEMTFTYFVIKTAPISKVKSLLDYEVTFIGEIINENPSITVKVIVPVTSLCPCSKEISDYGAHNQRSHVTITAKTNGFLWIEDIIDLVEKQASSELYGLLKRPDEKYVTQNAYENPKFVEDMVRDIATQLNKDNRVAAYIVESENFESIHNHSAYAMIQNDK

SEQ ID NO: 5469 - protein, 270 aa, Beggiatoa sp.
  REGION 1..270: note = tr|A0A1W9L6E9|A0A1W9L6E9_9GAMM GTP cyclohydrolase FolE2 OS=Beggiatoa sp. IS2 OX=1934247 GN=folE2 PE=3 SV=1
MNKPMIIPDVQSSTDNRCLAIDKVGIKSIKHPVCVKDRSGREQNTIATFSMYVSLPHNFKGTHMSRFVEILNEHEYAITVESFKRMLIEMTLRLEAESGHIEMTFTYFVRKVAPISGVKSLLDYEVTFIGEITDNVPSLAVKVVVPVTSLCPCSKKISKYGAHNQRSHVTVSVKTNGFLWIEDIIDLVEKEASCELYGLLKRSDEKRVTERAYENPKFVEDMVRDVAAKLNVDDRVAAYMVESENFESIHNHSAYAMIQRDKQIATNLSC

SEQ ID NO: 5470 - protein, 213 aa, Beijerinckia indica
  REGION 1..213: note = sp|B2IBC4|GCH1_BEII9 GTP cyclohydrolase 1; OS = Beijerinckia indica subsp. indica (strain ATCC 9039 / DSM 1715 / NCIB 8712) OX=395963 GN=folE PE=3 SV=1
MDDVVKSLLQRTTSSLTKPAPARPSREEAEAAVEVLLRWTGDDPSREGLRDTPKRVVKAFEEFFSGYNADASDVLSRVFEEVHGYDNMVLVRDIPFSSHCEHHMVPFFGVAHIGYYPSEAGVIGLSKLARLVDIFAKRLQTQEALTAQIIGAIDEHLQPRGCAIMLEAEHMCMSMRGVQKHGTSTLTTQFTGVFKNDPAEQVRFFGMVRNPKS

SEQ ID NO: 5471 - protein, 217 aa, Beijerinckia sp.
  REGION 1..217: note = tr|A0A1H5AJE0|A0A1H5AJE0_9RHIZ GTP cyclohydrolase 1; OS = Beijerinckia sp. 28-YEA-48 OX=1882748 GN=folE PE=3 SV=1
MDAVVKTSTRQPIEERHTSPAEASTKHTLRPTREEAEEAVRTLLRWVGENPGREGLIDTPKRVVKAYEEFFQGYNQDPDEVLDKVFEEVDGYDDMVLVRDIPFSSHCEHHMVPFIGTAHVAYYPNGGVVGLSKLARIVDVFARRLQTQETMTAQIADALEQSLKPFGVAVLVDAEHMCMSLRGVRKAGSSTVTSRFTGRFRDPAEQARFFTMVRGAR

SEQ ID NO: 5472 - protein, 84 aa, unidentified
  source 1..84: note = Beijerinckiaceae bacterium
  REGION 1..84: note = tr|A0A539CVR3|A0A539CVR3_9RHIZ GTP cyclohydrolase 1; OS = Beijerinckiaceae bacterium OX=1978229 GN=folE_1 PE=4; SV = 1
MNSNVHALEGITPLRTEVGRPDRADVEAAFRTIIRWAGDDPEREGLIETPARMARSFEEFFVGYAQTQSNSCKKLSRKSKVMTK

SEQ ID NO: 5473 - protein, 221 aa, unidentified
  source 1..221: note = Beijerinckiaceae bacterium
  REGION 1..221: note = tr|A0A522GYH8|A0A522GYH8_9RHIZ GTP cyclohydrolase 1; OS = Beijerinckiaceae bacterium OX=1978229 GN=folE PE=3 SV=1
MDDVVKSLFERQPPKAPVPKSGTPTIKAATLARPTREEAEAAVRTLLLWAGDDPNREGLLATPQRVVKAYEEFYAGYRADPSDVLARIFEEVQGYDDLVLVRDIPFSSHCEHHMVPFIGKAHIAYYPSTHGVVGLSKLARLVDVFAHRLQTQEALTAQIVDAIDRYLQPRGCAVMIEAEHMCMSMRGVLKQGSTTVTNQFTGVFRDDPAEQVRFLTLVRDK

SEQ ID NO: 5474 - protein, 231 aa, Belliella baltica
  REGION 1..231: note = tr|I3Z0U7|I3Z0U7_BELBD GTP cyclohydrolase 1; OS = Belliella baltica (strain DSM 15883 / CIP 108006 / LMG 21964 / BA134) OX=866536 GN=folE PE=3 SV=1
MKQKETLLNTMGINISRDIDEIGDEHVGTSFETPLREDAFEMDDELKIELIEKHFREIMHVLGLDLTDDSLKGTPRRVAKMYIQEIFSGLDPKNKPDAKLFENKYKYNEMLVEKDITFFSNCEHHFVPIYGKAHVAYISNGTVIGLSKINRIVQYFAKRPQVQERLTMQIGNELKEILGTDDVAVVIDAHHMCVSSRGIKDVNSSTVTSFYSGKFEKEEHTRNEFMKYISL

SEQ ID NO: 5475 - protein, 231 aa, unidentified
  source 1..231: note = Belliella buryatensis
  REGION 1..231: note = tr|A0A239G3J4|A0A239G3J4_9BACT GTP cyclohydrolase 1; OS = Belliella buryatensis OX=1500549 GN=folE PE=3 SV=1
MKQKETLLNTMEINVNRDIDEIGDEHVGTSYDTPLREDAFEMDDELKIELIEKHFKEIMLIMGLDLTDDSLKGTPKRVAKMYVKEIFSGLNPKNKPAAKLFENKYKYNEMLVEKDITFFSNCEHHFVPIYGKAHVAYISNGNVIGLSKINRIVQYFAKRPQVQERLTMQIGNELKEILGTDDVAVVIDANHMCVSSRGINDVNSSTVTSYYSGKFERDEQSRNEFMKYISM

SEQ ID NO: 5476 - protein, 231 aa, Belliella pelovolcani; identical to SEQ ID NO: 5475
  REGION 1..231: note = tr|A0A1N7PV80|A0A1N7PV80_9BACT GTP cyclohydrolase 1; OS = Belliella pelovolcani OX=529505 GN=folE PE=3 SV=1

SEQ ID NO: 5477 - protein, 215 aa, Bellilinea caldifistulae
  REGION 1..215: note = tr|A0A0P6X2L0|A0A0P6X2L0_9CHLR GTP cyclohydrolase 1; OS = Bellilinea caldifistulae OX=360411 GN=folE PE=3 SV=1
MEKQLIIPGEDIYQAAELFNDGGIDYETIRQNVESILKAVGENPERDGLKRTPERVARMYEELLAGYRTDPVALVNDALFEVDYDEMVIVRDIEFYSLCEHHMLPFLGRAHVAYIPRGRVIGLSKIPRIVDMFARRLQVQERMTRQIADFLQEVLHPRGVAVVIEAIHMCSMIRGVKKHDSRMTTSSMLGAFRNNMATRMEFLDNISRSSEPLHF

SEQ ID NO: 5478 - protein, 198 aa, Belnapia rosea
  REGION 1..198: note = tr|A0A1G6M9K4|A0A1G6M9K4_9PROT GTP cyclohydrolase 1; OS = Belnapia rosea OX=938405 GN=folE PE=3 SV=1
MTAPAEMPSRPSRSEAEAAVRTLIRWACDDPTREGLLDTPSRVVRAYEELFSGYQVDPVALLERTFDEVEGYDEIVLLKNIRLESYCEHHMVPIIGHCHVAYLPDRRVVGISKLARVVEAYGKRLQIQEKLTAQIANTIDAVLQPRGVAVVIESAHQCMTTRGVHQTGVTMVTSRMLGAFRDNFDTRRELLSLIQSSS

SEQ ID NO: 5479 - protein, 237 aa, Belnapia rosea
  REGION 1..237: note = tr|A0A1G6JSD1|A0A1G6JSD1_9PROT GTP cyclohydrolase 1; OS = Belnapia rosea OX=938405 GN=folE PE=3 SV=1
MSEYNTGLLPGPRARQIRELRGIGTVNIQTPNHIIDAKATLEGRPSRAEAEAAIRTLLRWTGDDPDREGLIDTPARVARAYEEFFAGYAVDPVDLLARSFEETDGYDEMVVLRDIRIESHCEHHMVPIIGRAHIAYLPAGRVVGISKLARVLEVYAKRLQIQEKLTAQVANCINDVLKPKGVAVVVEAAHQCMTTRGIHKPGVTMVTSRMLGAFRDDASTRREFLAIIGGQRGVAEG

SEQ ID NO: 5480 - protein, 257 aa, Bergeriella denitrificans
  REGION 1..257: note = tr|A0A378UJF2|A0A378UJF2_BERDE GTP cyclohydrolase FolE2 OS=Bergeriella denitrificans OX=494 GN=folE2 PE=3; SV = 1
MNAIADVQSTRDLRNLPINQVGIKDLRFPITLRSDDGEQSTVARLTMTVYLPAEQKGTHMSRFVALMEQDTEALSFGHLQKLTRDMVTLLESRAGKITAAFPFFRKKTAPVSGIQSLLDYDVTLSGELADGAYRHTVKVMVPVTSLCPCSKEISAYGAHNQRSHVTVTLTVNEEVGIEEIIDCVENQASCQLYGLLKRPDEKYVTEKAYENPKFVEDMVRDVATALMADKRIDSFTVESENFESIHNHSAYAYIAYP

SEQ ID NO: 5481 - protein, 221 aa, Bergeyella zoohelcum
  REGION 1..221: note = tr|A0A376BYN1|A0A376BYN1_9FLAO GTP cyclohydrolase 1; OS = Bergeyella zoohelcum OX=1015 GN=folE PE=3 SV=1
MNDFFDNDDDVFSGKEHTPLRADAFEKTPEEKIAIIEKHFAEIMHTLGMDMTDDSLKDSPKRVAKMYVNEIFGGLLPENKPGISTFSNKYKYRQMLVEKDITVYSFCEHHFLPIIGRAHVAYISNGEVIGLSKINRIVNYYAKRPQVQERLTMQIVDAMKEALNTKDVACVIDAKHLCVNCRGIRDTASSTITAELSGIFRTNPITRQEFLHYVGIHSKLD

SEQ ID NO: 5482 - protein, 221 aa, Bergeyella zoohelcum; identical to SEQ ID NO: 5481
  REGION 1..221: note = tr|K1MU02|K1MU02_9FLAO GTP cyclohydrolase 1; OS = Bergeyella zoohelcum ATCC 43767 OX=883096 GN=folE PE=3; SV = 1

SEQ ID NO: 5483 - protein, 318 aa, Bermanella marisrubri
  REGION 1..318: note = tr|Q1N6S8|Q1N6S8_9GAMM GTP cyclohydrolase FolE2; OS = Bermanella marisrubri OX=207949 GN=folE2 PE=3 SV=1
MSDKRQNEMPDVAASQAPQVNGTLNWVGMNRIALPVMLRDSQLGDSKVDAFVQTYVNICNENVKGIHMSRLYLLLAKFSDEQVLSAGNLREFLTHMLDSHEDISDRATLHFSFDYVIQRKALKSQFSGWKDYPTEIKATLEEGGNVAIELAVHVPYSSTCPCSAALARQLIQEQFAKDFGDRTDLSSEEVQAWIRSDKGTFATPHSQRSIAKVWVKLDQQTQDFPITELIEHIEQALQTPVQTAVKREDEQEFARLNGHNLMFCEDAARRAKNALNQQEGLYKDFWLRIEHLESLHAHDAVAIATKGIQGGYEPLLSR

SEQ ID NO: 5484 - protein, 214 aa, Bermanella marisrubri
  REGION 1..214: note = tr|Q1MZB6|Q1MZB6_9GAMM GTP cyclohydrolase 1; OS = Bermanella marisrubri OX=207949 GN=folE PE=3 SV=1
MTELSAEAVMVRDMLVEKGLETPLNDNGLSSEVKRERIEGYFTEILGTLGLDLDDDSLNETPHRMAKLYVNEIFSGLDYSNFPRISVIENKMSVDEMVKISEIQVSSTCEHHLITIDGKAKVAYIPNKKIIGLSKINRLVRFFAQRPQVQERLTQQILVALQALLETDNVAVSIDATHYCVKARGVMDVNSETSTTALGGIFKTNIHTRAEFLN

SEQ ID NO: 5485 - protein, 317 aa, Bermanella sp.
  REGION 1..317: note = tr|A0A1Y5DFI3|A0A1Y5DFI3_9GAMM GTP cyclohydrolase FolE2 OS=Bermanella sp. 47_1433_sub80_T6 OX=1856278; GN = folE2 PE=3 SV=1
MTDKRLTEMPDVASTQAPQINGTLDWVGMNRIALPLTVRDSDLGDSKVNAFVQTYVNLFNPDVKGIHMSRLYLLLTEFSDNQVLSASNLREFLSHMLDSHHDISDQATLNFEFDYVIKRKALKSQFSGWKDYPAQIKATLKDNKVSLELGIEVTYSSTCPCSAALARQIIQEAFHADFKDKEQVSPSEVEAWLRSEKGTHATPHSQRSTAMVWVKLNDNLDDFPITDVIGVIEDALQTPVQTAVKREDEQEFARLNGQNLMFCEDAARRVKNALNKQEDMFKDFWLRIEHLESLHAHDAVALATKGIREGYEPLLAR

SEQ ID NO: 5486 - protein, 212 aa, Bermanella sp.
  REGION 1..212: note = tr|A0A2D4S210|A0A2D4S210_9GAMM GTP cyclohydrolase 1; OS = Bermanella sp. OX=2024825 GN=folE PE=3 SV=1
MISDSALLVRDTLIARGLETPMKDTGLSNDEKYARIKDAMTTVVETLGLDLNDDSLNETPHRIAKMYVNEIFGGLDYANFPKMSVIENKMQVDEMVKVNDIHLTSTCEHHFVTIDGFAKVAYIPKNKIIGLSKINRLVRFFAQRPQVQERLTQQVLISLQTLLETEHVAVSIDATHYCVKSRGVMDTHSTTSTTALGGIFKSNVHTRAEFLA

SEQ ID NO: 5487 - protein, 226 aa, unidentified
  source 1..226: note = Bernardetia litoralis
  REGION 1..226: note = tr|I4AJN6|I4AJN6_BERLS GTP cyclohydrolase 1; OS = Bernardetia litoralis (strain ATCC 23117 / DSM 6794 / NBRC 15988 / NCIMB 1366 / Sio-4) OX=880071 GN=folE PE=3; SV = 1
MPIINKEQIEIIETIGDNHIFSGIETPLLSDAFEKSDDEKIKNIEHYFGQIMNELGLDLSDDSLSGTPYRVAKMYVKELFYGLDPKNKPKISTFLNKYGYKKMLVEQNITIDSACEHHFLPITGHAHVGYIPKDKVIGLSKINRLVDYYAHRPQVQERLALQILNDLQTSLETEDVIVMLSAKHLCVSSRGIKDKDSFTTTIEYGGCFENKSNREEFFGIVGNTSI

SEQ ID NO: 5488 - protein, 264 aa, unidentified
  source 1..264: note = Bernardetia litoralis
  REGION 1..264: note = tr|I4AMN4|I4AMN4_BERLS GTP cyclohydrolase 1; OS = Bernardetia litoralis (strain ATCC 23117 / DSM 6794 / NBRC 15988 / NCIMB 1366 / Sio-4) OX=880071 GN=folE PE=3; SV = 1
MKLKETSSNAQPKKVNGIHNHDKQDSQNFTTSTNKKKQVKKTKEKLLTHKQEDLEIIGENHIATSIETPLRKDAFELDDDTKIEKIAVHFKEIMDILGLDLTDDSLQGTPKRVAKMYVQEIFKGLNPENKPATKMFENKFGYNQLLVEKNISFHSHCEHHFVPIHGKAHIAYISNEGVIGLSKLHRIVDYFARRPQVQERLTNQIGEELKKMLGTEDIAVVLDAAHMCVSMRGIKDQTSTTITSFYSGKFNEEATRTEFLKYIQ

SEQ ID NO: 5489 - protein, 275 aa, unidentified
  source 1..275: note = Unknown
  REGION 1..275: note = tr|A0A0N1L038|A0A0N1L038_9PROT GTP cyclohydrolase FolE2 OS=beta proteobacterium AAP51 OX=1523421 GN=folE2; PE = 3 SV=1
MNTLTDALHIPDTQSERDDRHLAIQRVGVKDVRYPLQIEVAGAVQQTAALWALDVALPAEKKGTHMSRLIAWLDALALSGDVLDAATLRERHAAMLDKLGASEGRIEAAFSFFIRKRAPVSGLQSLLDYQGRWISETRHSLAPDGQPTSKTSVWAEVAVPVKSLCPCSKEISDYGAHNQRSLVTVRVELLQPVPWQELVRFAEDSASSEIWPMLKRPDEKWVTERAYENPKFVEDLVRDVALRLNGDARIGRYRVDVENFESIHNHSAYARIERN

SEQ ID NO: 5490 - protein, 266 aa, unidentified
  source 1..266: note = Unknown
  REGION 1..266: note = tr|A0A0N0JES2|A0A0N0JES2_9PROT GTP cyclohydrolase FolE2 OS=beta proteobacterium AAP65 OX=1523424 GN=folE2; PE = 3 SV=1
MTNMTDALHIPDTQSERDDRHLAIQRVGVKDVRYPLSIEVAGAVQQTAALWALDVALPAEKKGTHMSRFVAWLDALALSGEPLDAASLRAKHAAMLDKLGADEGRIEAAFSFFIRKRAPVSGLQSLLDYQGRWISETRAGTTRVHAEVAVPVKSLCPCSKEISDYGAHNQRSLVTLRVELLQPVPWHELVRFAEDSASSEIWPMLKRPDEKWITEHAYENPKFVEDLVRDVALRLNSDARIGRYRVDVENFESIHNHSAYARIERA

SEQ ID NO: 5491 - protein, 267 aa, unidentified
  source 1..267: note = Betaproteobacteria bacterium
  REGION 1..267: note = tr|A0A1F4D0Z6|A0A1F4D0Z6_9PROT GTP cyclohydrolase FolE2 OS=Betaproteobacteria bacterium RIFCSPLOWO2_12_FULL_63_13 OX=1797498 GN=folE2 PE=3 SV=1
MNTREAAVIPDVQSAEDKRKLAIDRVGIKAIRHPIRVAERGGGTQHTVAVFNMYVSLPHHFKGTHMSRFVEILNMHEREISVETFQVMLDQMMERLEAEAGTIEMTFPYFINKQAPVSKVKSLMDYEVTFTGEICGDVKRFTMKVVVPVTSLCPCSKKISDYGAHNQRSHVTIAARTKEFVWIEELVDYAEKHASSELYGLLKRPDEKLVTERAYDNPKFVEDMVRDVAADLNRDKRITWYLVESENFESIHNHSAYAAIERDKTRR

SEQ ID NO: 5492 - protein, 267 aa, unidentified
  source 1..267: note = Betaproteobacteria bacterium
  REGION 1..267: note = tr|A0A536YBI3|A0A536YBI3_9PROT GTP cyclohydrolase FolE2 OS=Betaproteobacteria bacterium OX=1891241 GN=folE2; PE = 3 SV=1
MKARDLHNIPDVQASPDSRKLAIDQVGIKAIRHPVRIMERSGGVQHTIAMFNMYVGLPHHFKGTHMSRFVEILEAHEREITVETFQLMLREMVEKLEAEEGRIDMAFPYFIEKRAPISGVKSLMDYEVSFTGEIRKGRQGFTMKVLVPVTSLCPCSKEISERGAHNQRSHVTVTARTNDFVWIEELVDLVEKQASSELYGLLKRPDEKHVTERAYDNPKFVEDLVRDVAAVLNLDERVDAYVVESENFESIHNHSAYALIEKDKRAR

SEQ ID NO: 5493 - protein, 200 aa, Beutenbergia cavernae
  REGION 1..200: note = tr|C5BYK6|C5BYK6_BEUC1 GTP cyclohydrolase 1; OS = Beutenbergia cavernae (strain ATCC BAA-8 / DSM 12333 / NBRC 16432) OX=471853 GN=folE PE=3 SV=1
MASPAGDGRAVRPYDAAGVERAVRDLLIAIGEDPDRDGLRETPERLARSYEEMFAGLHTDPREAVQTFFDLEHNELVIVSDIAVYSVCEHHLLPFHGVAHVGYIPAPSGHVTGLSKLARLVEAYARRPQVQERLTTQIADALVHALEPRGVVVVLECEHMCMSMRGVRKPGARTVTSAVRGALREPATRAEAMSLIRGAR

SEQ ID NO: 5494 - protein, 189 aa, unidentified
  source 1..189: note = Bhargavaea beijingensis
  REGION 1..189: note = tr|A0A1G7ALU7|A0A1G7ALU7_9BACL GTP cyclohydrolase 1; OS = Bhargavaea beijingensis OX=426756 GN=folE PE=3 SV=1
MGKVDHGKIVEAVRMILQAVGEDPDREGLLDTPKRVAKMYEEVFGGIGEDPREYFKTVFHEDHDELVLVKDIHFQSMCEHHLLPFYGKAHVAYIPRNGEVAGLSKLARAVEAVSRRPQLQERITAEVADALTEMLDPLGVYIVVEAEHMCMTMRGIRKPGSKTVTAAARGIFNQDDNKRAEVISLIKMS

SEQ ID NO: 5495 - protein, 189 aa, Bhargavaea cecembensis
  REGION 1..189: note = tr|M7NJJ8|M7NJJ8_9BACL GTP cyclohydrolase 1; OS = Bhargavaea cecembensis DSE10 OX=1235279 GN=folE PE=3; SV = 1
MGKVDHGKIEEAVRLILEAVGEDPDREGLLDTPKRVAKMYEEVFGGIGQDPREYFKTVFHEDHDELVLVKDIHFQSMCEHHLLPFYGKAHVAYIPRNGEVAGLSKLARAVEAVSRRPQLQERITAEVADALTEMLDPLGVYIVVEAEHMCMTMRGIRKPGSKTVTAAARGIFDQDDSKRAEVISLIKMS

SEQ ID NO: 5496 - protein, 189 aa, Bhargavaea cecembensis
  REGION 1..189: note = tr|A0A161SKN9|A0A161SKN9_9BACL GTP cyclohydrolase 1; OS = Bhargavaea cecembensis OX=394098 GN=folE PE=3 SV=1
MGKVDHGKIEEAVRLILEAVGDDPDREGLLDTPKRVAKMYEEVFWGIGQDPREYFKTVFHEDHDELVLVKDIHFQSMCEHHLLPFYGKAHVAYIPRNGEVAGLSKLARAVEAVSRRPQLQERITAEVADALTEMLDPLGVYIVVEAEHMCMTMRGIRKPGSKTVTAAARGVFDQDDSKRAEVISLIKMS

SEQ ID NO: 5497 - protein, 189 aa, unidentified
  source 1..189: note = Bhargavaea ginsengi
  REGION 1..189: note = tr|A0A1H6SB87|A0A1H6SB87_9BACL GTP cyclohydrolase 1; OS = Bhargavaea ginsengi OX=426757 GN=folE PE=3 SV=1
MGKVDHGKIEEAVRLILEAVGEDPEREGLLDTPKRVAKMYEEVFWGIGEDPKEYFKTVFHEDHEELVLVKDIHFQSMCEHHLLPFYGKAHVAYIPRNGEVAGLSKLARAVEAVSRRPQLQERITAEVADALAEMLDPLGVYVVVEAEHMCMTMRGIRKPGSKTVTASAHGIFDQDDSKRAEIISLIKMS

SEQ ID NO: 5498 - protein, 218 aa, Bibersteinia trehalosi
  REGION 1..218: note = tr|A0A4V7I968|A0A4V7I968_BIBTR GTP cyclohydrolase 1; OS = Bibersteinia trehalosi USDA-ARS-USMARC-188 OX=1263829; GN = folE PE=3 SV=1
MNEISLEAKQVRQALVAKGIETPTVALTQSKAVRRDKIEQKMRDVLELLGLDLNDDSLEETPKRLAKMYVDEIFSGLDYTTFPKITKIQNRMKVSEMVLVDDITLTSTCEHHFVTIDGKVAVAYYPKDWVIGLSKINRVVQFFAQRPQVQERFTEQILTAFQTILETEDVAVYVKATHFCVKCRGVRDTNSQTITSAYGGVFLQDRETRKEFLAQIQK

SEQ ID NO: 5499 - protein, 218 aa, Bibersteinia trehalosi; identical to SEQ ID NO: 5498
  REGION 1..218: note = tr|M4R684|M4R684_BIBTR GTP cyclohydrolase 1; OS = Bibersteinia trehalosi USDA-ARS-USMARC-192 OX=1171377; GN = folE PE=3 SV=1

SEQ ID NO: 5500 - protein, 211 aa, Bifidobacterium adolescentis
  REGION 1..211: note = tr|A0A414C2P6|A0A414C2P6_BIFAD GTP cyclohydrolase 1; OS = Bifidobacterium adolescentis OX=1680 GN=folE PE=3 SV=1
MSDTDFDTLLDDKARAAHAAGPVGYDEEGVRQAVRLFLKSIGEDPEREGLLDTPDRIGRACKELFAGLGHGPEEVLKTRFKVDTDEMVLVRDIELFSVCEHHLLPFHGVAHVGYIPQNGQVAGLSKLARLVELYARRPQVQERLTQQVADALMEGIDARGVIVVTECDHMCMAMRGVKKAQSRTITSAVRGCMRDAATRTEAMSLILSNHS

SEQ ID NO: 5501 - protein, 211 aa, Bifidobacterium adolescentis
  REGION 1..211: note = tr|A0A0G9MBV5|A0A0G9MBV5_BIFAD GTP cyclohydrolase 1; OS = Bifidobacterium adolescentis OX=1680 GN=folE PE=3 SV=1
MSDTDFDTLFDDKARAAHAAGPVGYDEEGVRQAVRLFLKSIGEDPDREGLLDTPDRIGRACKELFAGLGHGPEEVLKTRFKVDTDEMVLVRDIELFSVCEHHLLPFHGVAHVGYIPQNGQVAGLSKLARLVELYARRPQVQERLTQQVADALMEGIDARGVIVVTECDHMCMAMRGVKKAQSRTVTSAVRGCMRDAATRTEAMSLILSNHS

SEQ ID NO: 5502 - protein, 199 aa, Bifidobacterium angulatum
  REGION 1..199: note = tr|C4FHA8|C4FHA8_9BIFI GTP cyclohydrolase 1; OS = Bifidobacterium angulatum DSM 20098 = JCM 7096; OX = 518635 GN=folE PE=3 SV=1
MAEQVQGISAARRPYDEEGVRQAVRLFLQSIGEDPEREGLLETPDRIARACRELFSGLDTSPADVLEKHFDVDTDELVLVKDIELYSVCEHHLLPFHGVAHVGYIPAKNGVMGLSKLARLVEVYARRPQVQERLTQQIADALVDYAGARGVIVVTECEHLCMSMRGIKKSEARTVTSAVRGLLRNPATRAEAMSLILNH

SEQ ID NO: 5503 - protein, 199 aa, Bifidobacterium angulatum
  REGION 1..199: note = tr|A0A126SUN6|A0A126SUN6_9BIFI GTP cyclohydrolase 1; OS = Bifidobacterium angulatum OX=1683 GN=folE PE=3 SV=1
MAEQVQGMSAARRPYDEEGVRQAVRLFLQSIGEDPEREGLLETPDRIARACRELFSGLDASPADVLEKHFDVDTDELVLVKDIELYSVCEHHLLPFHGVAHVGYIPAKNGVMGLSKLARLVEVYARRPQVQERLTQQIADALVDYAGARGVIVVTECEHLCMSMRGIKKSEARTVTSAVRGLLRNPATRAEAMSLILNH

SEQ ID NO: 5504 - protein, 196 aa, Bifidobacterium bifidum
  REGION 1..196: note = tr|E4VBZ2|E4VBZ2_BIFBI GTP cyclohydrolase 1; OS = Bifidobacterium bifidum NCIMB 41171 OX=398513 GN=folE; PE = 3 SV=1
MVREAGGYMAIDEEGVRKAVRLFLTSIGENPDREGLLETPDRIARACEEIFSGLGRSPQEVLSKRFPVETDEMVLVRDIELFSVCEHHLLPFHGVAHVGYIPSNGQVVGLSKLARLVELYARRPQVQERITQQVADALMEYADAKGVIVVTECEHMCMAMRGVNKPASRTITSAVRGVMRTPATRAEAMSLIMAKH

SEQ ID NO: 5505 - protein, 188 aa, Bifidobacterium bifidum
  REGION 1..188: note = tr|A0A0H3EBB5|A0A0H3EBB5_BIFBP GTP cyclohydrolase 1; OS = Bifidobacterium bifidum (strain PRL2010) OX=702459; GN = folE PE=3 SV=1
MAIDEEGVRKAVRLFLTSIGENPDREGLLETPDRIARACEEIFSGLGRSPQEVLSKRFPVETDEMVLVRDIELFSVCEHHLLPFHGVAHVGYIPSNGQVVGLSKLARLVELYARRPQVQERITQQVADALMEYADAKGVIVVTECEHMCMAMRGVNKPASRTITSAVRGVMRTPATRAEAMSLIMAKH

SEQ ID NO: 5506 - protein, 221 aa, Bifidobacterium breve
  REGION 1..221: note = tr|A0A0L7D0W9|A0A0L7D0W9_BIFBR GTP cyclohydrolase 1; OS = Bifidobacterium breve MCC 1114 OX=1365964 GN=folE PE=3; SV = 1
MKMNEYIESCPRWRGLAAQPTGGGSGSESRQREESSYDEEGVRQAVRLFLKSIGEDPEREGLVETPDRIARACRELFAGLQASPADVLEKHFDVDTDELVLVKDIELYSVCEHHLLPFHGVAHVGYIPAKDGVMGLSKLARLVEVYARRPQVQERLTQQIADALVEYAGARGVIVVTECEHLCMSMRGIKKSSARTVTSAVRGLLRNPATRAEAMSLILDK

SEQ ID NO: 5507 - protein, 219 aa, Bifidobacterium breve
  REGION 1..219: note = tr|F9Y2T3|F9Y2T3_BIFBU GTP cyclohydrolase 1; OS = Bifidobacterium breve (strain NCIMB 8807 / UCC2003); OX = 326426 GN=folE PE=3 SV=1
MNEYIESCPRWRGLAAQPTGGGSGAESRQREESSYDEGGVRQAVRLFLKSIGEDPEREGLVETPDRIARACRELFAGLQASPADVLEKHFDVDTDELVLVKDIELYSVCEHHLLPFHGVAHVGYIPAKDGVMGLSKLARLVEVYARRPQVQERLTQQIADALVEYAGARGVIVVTECEHLCMSMRGIKKSSARTVTSAVRGLLRNPATRAEAMSLILDK

SEQ ID NO: 5508 - protein, 198 aa, unidentified
  source 1..198: note = Bifidobacterium callitrichidarum
  REGION 1..198: note = tr|A0A2U2N3G8|A0A2U2N3G8_9BIFI GTP cyclohydrolase 1; OS = Bifidobacterium callitrichidarum OX=2052941 GN=folE; PE = 3 SV=1
MTEETTAVERAAHYDEEGVRQAVRLFLKSIGEDPEREGLVETPDRIARACKELFSGLQASPADVLEKHFDVDTDELVLVKDIELYSVCEHHLLPFHGVAHVGYIPAKDGVMGLSKLARLVEVYARRPQVQERLTQQIADALVEYAGARGVIVVTECEHLCMSMRGIKKSSARTVTSAVRGLLRNPATRAEAMSLILDK

SEQ ID NO: 5509 - protein, 195 aa, Bifidobacterium callitrichos
  REGION 1..195: note = tr|A0A2T3GBN5|A0A2T3GBN5_9BIFI GTP cyclohydrolase 1; OS = Bifidobacterium callitrichos OX=762209 GN=folE PE=3 SV=1
MTNTNPDYRGYDEEGVRRAVRLFLTSIGEDPDREGLVETPDRIARACRELFAGLGSSPAQVLEKHFDVDTDELVLVKNIELYSVCEHHLLPFHGVAHVGYIPAKDGVMGLSKLARLVEVYARRPQVQERLTQQIADALVEYAGARGVIVVTECEHLCMSMRGIKKSEARTVTSAVRGLLRNPATRSEAMSLIMSR

SEQ ID NO: 5510 - protein, 195 aa, Bifidobacterium callitrichos
  REGION 1..195: note = tr|A0A087ABJ6|A0A087ABJ6_9BIFI GTP cyclohydrolase 1; OS = Bifidobacterium callitrichos DSM 23973 OX=1437609; GN = folE PE=3 SV=1
MTSTNPDYRGYDEEGVRRAVRLFLTSIGEDPDREGLVETPDRIARACRELFAGLGSSPAQVLEKHFDVDTDELVLVKNIELYSVCEHHLLPFHGVAHVGYIPAKDGVMGLSKLARLVEVYARRPQVQERLTQQIADALVEYAGARGVIVVTECEHLCMSMRGIKKSEARTVTSAVRGLLRNPATRSEAMSLIMSR

SEQ ID NO: 5511 - protein, 212 aa, Bifidobacterium catenulatum
  REGION 1..212: note = tr|A0A1V8PP54|A0A1V8PP54_9BIFI GTP cyclohydrolase 1; OS = Bifidobacterium catenulatum OX=1686 GN=folE PE=3 SV=1
MSDTEAFDTLFDDKARAAHAAGPVGYDEEGVRQAVRLFLKSIGEDPDREGLLDTPDRIGRACKELFAGLGHGPEEVLKTKFKVDTDEMVLVRDIELFSVCEHHLLPFHGVAHVGYIPSNGQVAGLSKLARLVELYARRPQVQERLTQQVADALMEGIEARGVIVVTECDHMCMAMRGVKKAQSRTVTSAVRGCMRDATTRAEAMSLILSQHS

SEQ ID NO: 5512 - protein, 212 aa, Bifidobacterium catenulatum
  REGION 1..212: note = tr|A0A087B7F0|A0A087B7F0_9BIFI GTP cyclohydrolase 1; OS = Bifidobacterium catenulatum subsp. kashiwanohense JCM 15439 = DSM 21854 OX=1150460 GN=folE PE=3 SV=1
MSDTEEFDTLFDDKARAAHAAGPVGYDEEGVRQAVRLFLKSIGEDPDREGLLDTPDRIGRACKELFAGLGHGPEEVLKTKFKVDTDEMVLVRDIELFSVCEHHLLPFHGVAHVGYIPLNGQVAGLSKLARLVELYARRPQVQERLTQQVADALMEGIEARGVIVVTECDHMCMAMRGVKKAQSRTVTSAVRGCMRDATTRAEAMSLILSQHS

SEQ ID NO: 5513 - protein, 189 aa, unidentified
  source 1..189: note = Bifidobacterium catulorum
  REGION 1..189: note = tr|A0A2U2MUT5|A0A2U2MUT5_9BIFI GTP cyclohydrolase 1; OS = Bifidobacterium catulorum OX=1630173 GN=folE PE=3 SV=1
MAAYDEEGVRRAVRLYLKSIGEDPDREGLLDTPDRIARASREIFAGLHQDPKDVLSARFRVDTEEMVLVRDIELYSVCEHHLLPFHGVAHVGYIPSKEGVTGLSKLARLVEVYARRPQVQERLTQQIADALMEHVDARGVIVVTECEHLCMSMRGIRKSQARTVTSAVRGVLRNPATRAEAMSLIFSRH

SEQ ID NO: 5514 - protein, 203 aa, Bifidobacterium dentium
  REGION 1..203: note = tr|A0A5F0Y024|A0A5F0Y024_9BIFI GTP cyclohydrolase 1; OS = Bifidobacterium dentium OX=1689 GN=folE PE=3 SV=1
MLDDKARAAHAAGPVGYDEEGVRQAVRLFLRSIGEDPDREGLLDTPDRIGRACRELFAGLGHGPEEVLKTKFKVDTDEMVLVRDIELFSVCEHHLLPFHGVAHVGYIPSNGQVAGLSKLARLVELYARRPQVQERLTQQVADALMTGIEARGVIVVTECDHMCMAMRGVKKPQSRTVTSAVRGCMRDAATRSEAMSLILSQHS

SEQ ID NO: 5515 - protein, 212 aa, Bifidobacterium dentium
  REGION 1..212: note = tr|E0Q8C7|E0Q8C7_9BIFI GTP cyclohydrolase 1; OS = Bifidobacterium dentium ATCC 27679 OX=871562 GN=folE; PE = 3 SV=1
MSDTEAFDTMLDDKARAAHAAGPVGYDEEGVRQAVRLFLRSIGEDPDREGLLDTPDRIGRACRELFAGLGHGPEEVLKTKFKVDTDEMVLVRDIELFSVCEHHLLPFHGVAHVGYIPSNGQVAGLSKLARLVELYARRPQVQERLTQQVADALMTGIEARGVIVVTECDHMCMAMRGVKKPQSRTVTSAVRGCMRDAATRSEAMSLILSQHS

SEQ ID NO: 5516 - protein, 193 aa, unidentified
  source 1..193: note = Bifidobacterium felsineum
  REGION 1..193: note = tr|A0A2M9HMB1|A0A2M9HMB1_9BIFI GTP cyclohydrolase 1; OS = Bifidobacterium felsineum OX=2045440 GN=folE PE=3 SV=1
MTEEQVGTYDEEGVRKAVRLFLKSIGEDPDREGLVETPDRIARAGRELFAGLHASPADVLEKHFDVDTDELVLVKDIELYSVCEHHLLPFHGVAHVGYIPAKDGVMGLSKLARLVEVYARRPQVQERLTQQIADALVDYAGARGVIVVTECEHLCMSMRGIKKSSARTVTSAVRGLLRNPATRAEAMSLILDK

SEQ ID NO: 5517 - protein, 190 aa, unidentified
  source 1..190: note = Bifidobacterium hapali
  REGION 1..190: note = tr|A0A261FWA8|A0A261FWA8_9BIFI GTP cyclohydrolase 1; OS = Bifidobacterium hapali OX=1630172 GN=folE PE=3 SV=1
MTHTYDEEGVKQAVRLFLKSIGEDPDREGLLETPDRIARAGREIFAGLGRDPQEVLAKRFPVETDEMVLVRDIELFSVCEHHLLPFHGVAHVGYIPSNGQVVGLSKLARLVELYARRPQVQERITQQVADALMTYANARGVIVVTECEHMCMAMRGVNKPASRTVTSAVRGVMRNPATRAEAMSLIMAQH

SEQ ID NO: 5518 - protein, 193 aa, unidentified
  source 1..193: note = Bifidobacterium imperatoris
  REGION 1..193: note = tr|A0A2N5IQZ8|A0A2N5IQZ8_9BIFI GTP cyclohydrolase 1; OS = Bifidobacterium imperatoris OX=2020965 GN=folE PE=3 SV=1
MTEEKVGTYDEEGVREAVRLFLKSIGEDPDREGLVETPDRIARAGRELFAGLHASPADVLEKHFDVDTDELVLVKDIELYSVCEHHLLPFHGVAHVGYIPAKDGVMGLSKLARLVEVYARRPQVQERLTQQIADALVDYAGARGVIVVTECEHLCMSMRGIKKSSARTVTSAVRGLLRNPATRAEAMSLILDK

SEQ ID NO: 5519 - protein, 212 aa, Bifidobacterium kashiwanohense
  REGION 1..212: note = tr|A0A0A7I185|A0A0A7I185_9BIFI GTP cyclohydrolase 1; OS = Bifidobacterium kashiwanohense PV20-2 OX=1447716; GN = folE PE=3 SV=1
MSDTEAFDTLFDDKARAAHAAGPVGYDEEGVRQAVRLFLKSIGEDPDREGLLDTPDRIGRACKELFAGLGHGPEEVLKTKFKVDTDEMVLVRDIELFSVCEHHLLPFHGVAHVGYIPSNGQVAGLSKLARLVELYARRPQVQERLTQQVADALMEGIEARGVIVVTECDHMCMAMRGVKKAQSRTVTSAVRGCMRDAATRAEAMSLILSQHA

SEQ ID NO: 5520 - protein, 199 aa, Bifidobacterium longum
  REGION 1..199: note = sp|Q8G3S1|GCH1_BIFLO GTP cyclohydrolase 1; OS = Bifidobacterium longum (strain NCC 2705) OX=206672; GN = folE PE=3 SV=1
MNEYIESCHREKHTYDEEGVREAVRLFLKSIGEDPEREGLVETPDRIARACRELFTGLQASPADALEKHFDVDTDELVLVKDIELYSVCEHHLLPFHGVAHVGYIPAKDGVMGLSKLARLVEVYARRPQVQERLTQQIADALVEYAGARGVIVVTECEHLCMSMRGIKKSSARTVTSAVRGMLRNPATRAEAMSLILDK

SEQ ID NO: 5521 - protein, 199 aa, Bifidobacterium longum
  REGION 1..199: note = tr|A0A0M5L6M1|A0A0M5L6M1_BIFLN GTP cyclohydrolase 1; OS = Bifidobacterium longum OX=216816 GN=gch1 PE=3 SV=1
MNEYIESCQREKRTYDEEGVREAVRLFLKSIGEDPEREGLVETPDRIARACRELFAGLQASPADVLEKHFDVDTDELVLVKDIELYSVCEHHLLPFHGVAHVGYIPAKDGVMGLSKLARLVEVYARRPQVQERLTQQIADALVEYAGARGVIVVTECEHLCMSMRGIKKSSARTVTSAVRGMLRNPATRAEAMSLILDK

SEQ ID NO: 5522 - protein, 196 aa, unidentified
  source 1..196: note = Bifidobacterium margollesii
  REGION 1..196: note = tr|A0A2N5J898|A0A2N5J898_9BIFI GTP cyclohydrolase 1; OS = Bifidobacterium margollesii OX=2020964 GN=folE PE=3 SV=1
MTSNDNGMPYYDEEGVRKAVRMYLKAIGEDPDREGLLDTPDRIARAGREMYAGLRQDPAEVLAKRFRVDTEEMVLVRDIELYSVCEHHLLPFHGVAHVGYIPSKDGVTGLSKLARLVEVYARRPQVQERLTQQVADALMKYVDARGAIVVTECEHMCMAMRGVKKSQARTVTSAVRGIMRTPATRAEAMSLIFSQH

SEQ ID NO: 5523 - protein, 199 aa, Bifidobacterium merycicum
  REGION 1..199: note = tr|A0A087BJI7|A0A087BJI7_9BIFI GTP cyclohydrolase 1; OS = Bifidobacterium merycicum OX=78345 GN=folE PE=3 SV=1
MTEQEHGIGDAVKPYDEEGVRRSVRLFLQSIGEDPDREGLLETPDRIARACREIFAGLGSSPADVLEKHFDVDTDELVLVKDIELYSVCEHHLLPFHGVAHVGYIPAKNGVMGLSKLARLVEVYARRPQVQERLTQQIADALVDYAGARGVIVVTECEHLCMSMRGIKKSEARTVTSAVRGLLRNPATRAEAMSLILNH

SEQ ID NO: 5524 - protein, 213 aa, unidentified
  source 1..213: note = Bifidobacterium moukalabense
  REGION 1..213: note = tr|W4N7D9|W4N7D9_9BIFI GTP cyclohydrolase 1; OS = Bifidobacterium moukalabense DSM 27321 OX=1435051; GN = folE PE=3 SV=1
MSDTEVFDTTLDDNKARAAHAAGPVGYDEEGVRQAVRLFLRSIGEDPDREGLLDTPDRIGRACKELFAGLGHGPQEVLKTKFKVDTDEMVLVRDIELFSVCEHHLLPFHGVAHVGYIPSNGQVAGLSKLARLVELYARRPQVQERLTQQVADALMTGIEARGVIVVTECDHMCMAMRGVKKPQSRTVTSAVRGCMRDAATRSEAMSLILSQHS

SEQ ID NO: 5525 - protein, 211 aa, unidentified
  source 1..211: note = Bifidobacterium myosotis
  REGION 1..211: note = tr|A0A261FP97|A0A261FP97_9BIFI GTP cyclohydrolase 1; OS = Bifidobacterium myosotis OX=1630166 GN=folE PE=3 SV=1
MSEITNEPNSEESLESLESRNHRESHYDEDGVREAVRLFLKSIGEDPDREGLRETPDRIARAGRELFAGLGASPADVLEKHFDVDTDELVLVKDIELYSVCEHHLLPFHGVAHVGYIPAKDGVMGLSKLARLVEVYARRPQVQERLTQQIADALVEYAGARGVIVVTECEHLCMSMRGVRKSSARTVTSAVRGLLRNPATRAEAMSLILDR

SEQ ID NO: 5526 - protein, 274 aa, unidentified
  source 1..274: note = Bifidobacterium parmae
  REGION 1..274: note = tr|A0A2N5J6G4|A0A2N5J6G4_9BIFI GTP cyclohydrolase 1; OS = Bifidobacterium parmae OX=361854 GN=folE PE=3 SV=1
MARHAQNISLPDSPSLVRENADARNAGDVSRKPGMVQSRPHHAGHGGPGAPAQAQSRAAQDGSALQVSLPQSPRDHVAAGQTRGGDRPAYDEEGVRKAVRLFLQAIGEDPDREGLVETPDRIARAGRELFAGLSASPEQVLEKHFDVDTDELVLVKNIELYSVCEHHLLPFHGVAHVGYIPAKDGVMGLSKLARLVEVYARRPQVQERLTQQIADALVEYAGARGVIVVTECEHLCMSMRGVKKSEARTVTSAVRGLLRNPATRAEAMSLIMSR

SEQ ID NO: 5527 - protein, 189 aa, unidentified
  source 1..189: note = Bifidobacterium primatium
  REGION 1..189: note = tr|A0A2M9HAQ4|A0A2M9HAQ4_9BIFI GTP cyclohydrolase 1; OS = Bifidobacterium primatium OX=2045438 GN=folE PE=3 SV=1
MAAYDEEGVRQAVRLYLKSIGEDPDREGLLDTPDRIARASREIFAGLQQDPKDVLSARFRVDTEEMVLVRDIELYSVCEHHLLPFHGVAHVGYIPSKEGVTGLSKLARLVEVYARRPQVQERLTQQIADALMEHVDARGVIVVTECEHLCMSMRGIKKSQARTVTSAVRGVLKNPATRAEAMSLIFSQH

SEQ ID NO: 5528 - protein, 212 aa, Bifidobacterium pseudocatenulatum
  REGION 1..212: note = tr|C0BQ68|C0BQ68_9BIFI GTP cyclohydrolase 1; OS = Bifidobacterium pseudocatenulatum DSM 20438 = JCM 1200 = LMG 10505 OX=547043 GN=folE PE=3 SV=1
MSDTEAFDTLFDDKARAAHTAGPVGYDEEGVRQAVRLFLKSIGEDPDREGLLDTPDRIGRACKELFAGLGHGPEEVLKTKFKVDTDEMVLVRDIELFSVCEHHLLPFHGVAHVGYIPSNGQVAGLSKLARLVELYARRPQVQERLTQQVADALMEGIEARGVIVVTECDHMCMAMRGVKKAQSRTVTSAVRGCMRDATTRAEAMSLILSQHS

SEQ ID NO: 5529 - protein, 212 aa, Bifidobacterium pseudocatenulatum
  REGION 1..212: note = tr|A0A139B8S1|A0A139B8S1_9BIFI GTP cyclohydrolase 1; OS = Bifidobacterium pseudocatenulatum OX=28026 GN=folE PE=3; SV = 1
MSDTEAFDTLFDDKARAAHAAGPVGYDEEGVRQAVRLFLKSIGEDPDREGLLDTPDRIGRACKELFAGLGHGPEEVLKTKFKVDTDEMVLVRDIELFSVCEHHLLPFHGVAHVGYIPSNGQVAGLSKLARLVELYARRPQVQERLTQQVADALMEGIEARGVIVVTECDHMCMAMRGVKKAQSRTVTSAVRGCMRDATTRAEAMSLILSQHA

SEQ ID NO: 5530 - protein, 198 aa, Bifidobacterium reuteri
  REGION 1..198: note = tr|A0A087CTJ0|A0A087CTJ0_9BIFI GTP cyclohydrolase 1; OS = Bifidobacterium reuteri DSM 23975 OX=1437610 GN=folE; PE = 3 SV=1
MTEESTGADRVAQYDEEGVREAVRLFLKSIGEDPDREGLRETPDRIARAGRELFSGLGASPADVLEKHFDVDTDELVLVKDIELYSVCEHHLLPFHGVAHVGYIPAKDGVMGLSKLARLVEVYARRPQVQERLTQQIADALVEYAGARGVIVVTECEHLCMSMRGIKKSSARTVTSAVRGLLRNPATRAEAMSLILDK

SEQ ID NO: 5531 - protein, 198 aa, Bifidobacterium reuteri; identical to SEQ ID NO: 5530
  REGION 1..198: note = tr|A0A5J5E7I9|A0A5J5E7I9_9BIFI GTP cyclohydrolase I FolE OS=Bifidobacterium reuteri OX=983706 GN=folE PE=4 SV=1

SEQ ID NO: 5532 - protein, 211 aa, Bifidobacterium ruminantium
  REGION 1..211: note = tr|A0A087CWK5|A0A087CWK5_9BIFI GTP cyclohydrolase 1; OS = Bifidobacterium ruminantium OX=78346 GN=folE PE=3 SV=1
MSDTDFDTLLDDKARAAHAAGPVGYDEEGVRQAVRLFLKSIGEDPEREGLLDTPDRIGRACKELFAGLGHGPEEVLKTRFKVDTDEMVLVRDIELFSVCEHHLLPFHGVAHVGYIPSNGQVAGLSKLARLVELYARRPQVQERLTQQVADALMEGIDARGVIVVTECDHMCMAMRGVKKAQSRTVTSAVRGCMRDATTRAEAMSLILSNHS

SEQ ID NO: 5533 - protein, 193 aa, Bifidobacterium saguini
  REGION 1..193: note = tr|A0A087D648|A0A087D648_9BIFI GTP cyclohydrolase 1; OS = Bifidobacterium saguini DSM 23967 OX=1437607 GN=folE; PE = 3 SV=1
MTEEKVGTYDEEGVREAVRLFLKSIGEDPDREGLVETPDRIARAGRELFAGLHASPADVLEKHFDVDTDELVLVKDIELYSVCEHHLLPFHGVAHVGYIPAKDGVMGLSKLARLVEVYARRPQVQERLTQQIADALVDCAGARGVIVVTECEHLCMSMRGIKKSSARTVTSAVRGLLRNPATRAEAMSLILDK

SEQ ID NO: 5534 - protein, 197 aa, unidentified
  source 1..197: note = Bifidobacterium scaligerum
  REGION 1..197: note = tr|A0A2M9HRD7|A0A2M9HRD7_9BIFI GTP cyclohydrolase 1; OS = Bifidobacterium scaligerum OX=2052656 GN=folE PE=3 SV=1
MTETVDIEPTRTYDEEGVREAVRLFLKSIGEDPEREGLVETPDRIARACKELFAGLHSSPADVLEKHFDVDTDELVLVKDIELYSVCEHHLLPFHGVAHVGYIPAKDGVMGLSKLARLVEVYARRPQVQERLTQQIADALVDYAGARGVIVVTECEHLCMSMRGIKKSSARTVTSAVRGLLRNPATRAEAMSLILDK

SEQ ID NO: 5535 - protein, 188 aa, Bifidobacterium scardovii
  REGION 1..188: note = tr|A0A087D7M9|A0A087D7M9_9BIFI GTP cyclohydrolase 1; OS = Bifidobacterium scardovii OX=158787 GN=folE PE=3 SV=1
MPYDEEGVREAVRLFLRSIGEDPEREGLVETPDRIARACREIFSGLGRDPREVLSKRFPVDTDEMVLVRDIELYSVCEHHLLPFHGFAHVGYIPSNGRVVGLSKLARLVELYARRPQVQERITQQVADALMEYADARGVIVVTECEHMCMAMRGVNKPQSRTVTSAVRGVMRNPATRAEAMSLIMAKH

SEQ ID NO: 5536 - protein, 206 aa, unidentified
  source 1..206: note = Bifidobacterium simiarum
  REGION 1..206: note = tr|A0A2M9HD18|A0A2M9HD18_9BIFI GTP cyclohydrolase 1; OS = Bifidobacterium simiarum OX=2045441 GN=folE PE=3 SV=1
MTIDTVNTDVTDETAAAKPVYDEEGVRKAVRMYLKAIGEDPDREGLLDTPDRIARAGRELYAGLRQDPAEVLAKRFRVDTEEMVLVRDIELYSVCEHHLLPFHGVAHVGYIPSKDGVTGLSKLARLVEVYARRPQVQERLTQQIADALMKYVDARGAIVVTECEHMCMAMRGVKKSQARTVTSAVRGIMRTPATRAEAMSLIFSQR

SEQ ID NO: 5537 - protein, 195 aa, Bifidobacterium sp.
  REGION 1..195: note = tr|A0A430F8D0|A0A430F8D0_9BIFI GTP cyclohydrolase 1; OS = Bifidobacterium sp. 2028B OX=2306973 GN=folE PE=3 SV=1
MSDTAAQRPFDEEGVRQAVRLYLKSIGEDPDREGLLDTPDRIARASRELFAGLQQDPKDVLSARFKVDTEEMVLVRDIELYSVCEHHLLPFHGVAHVGYIPSKEGVTGLSKLARLVEVYARRPQVQERLTQQIADALMDYVDARGAIVVTECEHLCMSMRGVKKSQARTTTSAVRGLMRQPATRAEAMSLILSQH

SEQ ID NO: 5538 - protein, 212 aa, Bifidobacterium sp.
  REGION 1..212: note = tr|A0A3D0Q0K8|A0A3D0Q0K8_9BIFI GTP cyclohydrolase 1; OS = Bifidobacterium sp. OX=41200 GN=folE PE=3 SV=1
MSDIEPFDTLLDDKARAAHAAGPVGYDEEGVRKAVRLFLKSIGENPDREGLLDTPDRIARACKELFAGLGHDPQEVLKTKFKVDTDEMVLVRDIELFSVCEHHLLPFHGVAHVGYIPSNGQVAGLSKLARLVELYARRPQVQERLTQQVADALMKGMDAKGVIVVTECDHMCMAMRGVKKAQSRTVTSAVRGCMRDPATRAEAMSLILSNHS

SEQ ID NO: 5539 - protein, 272 aa, Bifidobacterium stellenboschense
  REGION 1..272: note = tr|A0A087E0K1|A0A087E0K1_9BIFI GTP cyclohydrolase 1; OS = Bifidobacterium stellenboschense OX=762211 GN=folE PE=3; SV = 1
MARHAQNISLPDSPSLVRENANAGDVSRKPGMVQSRPHHAGHGGPGAPAQVQSRASQDGSALQVSLPQSPRDHVAAGQTRGDGDRPAYDEDGVRRAVRLFLQAIGEDPDREGLVETPDRIARAGRELFAGLSASPEQVLERHFDVDTDELVLVKNIELYSVCEHHLLPFHGVAHVGYIPAKDGVMGLSKLARLVEVYARRPQVQERLTQQIADALVEYAGARGVIVVTECEHLCMSMRGVRKSEARTVTSAVRGLLRNPATRAEAMSLIMSR

SEQ ID NO: 5540 - protein, 211 aa, Bifidobacterium stercoris; identical to SEQ ID NO: 5501
  REGION 1..211: note = tr|A0A087DM37|A0A087DM37_BIFAD GTP cyclohydrolase 1; OS = Bifidobacterium stercoris JCM 15918 OX=1437612 GN=folE; PE = 3 SV=1

SEQ ID NO: 5541 - protein, 227 aa, Bifidobacterium thermacidophilum
  REGION 1..227: note = tr|A0A087E6I0|A0A087E6I0_9BIFI GTP cyclohydrolase 1; OS = Bifidobacterium thermacidophilum subsp. thermacidophilum OX=79262 GN=folE PE=3 SV=1
MNSTDETNRQAGQASQIATAAATGAAGAPCAAHQQGTPDDGIDDAAIRTAVRMYLKAIGEDPDRDGLLDTPDRIARASHELFAGLHSNPQQVLEKRFPVDTDEMVLVRDIELYSVCEHHLLPFHGVAHVGYIPSHGAVVGLSKLARLVDVYARRPQVQERLTQQIADALMEYADARGVIVVTECEHLCMSMRGVKKSQARTTTSAVRGIMKNPTTRAEAMSLIFSQR

SEQ ID NO: 5542 - protein, 227 aa, Bifidobacterium thermophilum
  REGION 1..227: note = tr|A0A2N3QK95|A0A2N3QK95_9BIFI GTP cyclohydrolase 1; OS = Bifidobacterium thermophilum OX=33905 GN=folE PE=3 SV=1
MNSTDETNRQAGQASQIATAATTGVAGAPCAAHQQGTPDDGIDDAAIRTAVRMYLKAIGEDPDRDGLLDTPDRIARASHELFAGLHSNPQQVLEKRFPVDTDEMVLVRDIELYSVCEHHLLPFHGVAHVGYIPSHGAVVGLSKLARLVDVYARRPQVQERLTQQIADALMEYADARGVIVVTECEHLCMSMRGVKKSQARTTTSAVRGIMKDPTTRAEAMSLIFSQR

SEQ ID NO: 5543 - protein, 227 aa, Bifidobacterium thermophilum
  REGION 1..227: note = tr|M4RGB7|M4RGB7_9BIFI GTP cyclohydrolase 1; OS = Bifidobacterium thermophilum RBL67 OX=1254439 GN=folE; PE = 3 SV=1
MNSTDETNRQAGQASQIATAATTGAAGAPCVARQQGTPDDGIDDAAIRTAVRMYLKAIGEDPDRDGLLDTPDRIARASHELFAGLHSNPQQVLEKRFPVDTDEMVLVRDIELYSVCEHHLLPFHGVAHVGYIPSHGAVVGLSKLARLVDVYARRPQVQERLTQQIADALMEYADARGVIVVTECEHLCMSMRGVKKSQARTTTSAVRGIMKDPTTRAEAMSLIFSQR

SEQ ID NO: 5544 - protein, 204 aa, unidentified
  source 1..204: note = Bifidobacterium tissieri
  REGION 1..204: note = tr|A0A261FCM8|A0A261FCM8_9BIFI GTP cyclohydrolase 1; OS = Bifidobacterium tissieri OX=1630162 GN=folE PE=3 SV=1
MSEVAQKAQAQEEQTQGAFDEEGVRQAVRLYLKSIGEDPDREGLLDTPDRIARASRELFAGLHQDPKDVLSARFKVDTEEMVLVRDIELYSVCEHHLLPFHGVAHVGYIPSKEGVTGLSKLARLVEVYARRPQVQERLTQQIADALMDYVDARGAIVVTECEHLCMSMRGVKKSQARTTTSAVRGIMRQPATRAEAMSLILSQH

SEQ ID NO: 5545 - protein, 195 aa, unidentified
  source 1..195: note = Bifidobacterium vansinderenii
  REGION 1..195: note = tr|A0A229VYN6|A0A229VYN6_9BIFI GTP cyclohydrolase 1; OS = Bifidobacterium vansinderenii OX=1984871 GN=folE PE=3; SV = 1
MSDTAAPRTFDEEGVRQAVRLYLKSIGEDPDREGLLDTPDRIARASRELFAGLRQDPKDVLSARFKVDTEEMVLVRDIELYSVCEHHLLPFHGVAHVGYIPSKEGVTGLSKLARLVEVYARRPQVQERLTQQIADALMDYVDARGAIVVTECEHLCMSMRGVKKSQARTTTSAVRGLMRQPATRAEAMSLILSQH

SEQ ID NO: 5546 - protein, 259 aa, Bilophila sp.
  REGION 1..259: note = tr|G1V3W0|G1V3W0_9DELT GTP cyclohydrolase FolE2; OS = Bilophila sp. 4_1_30 OX=693988 GN=folE2 PE=3 SV=1
MEDVQNSPAPVALPIDRVGVKGLKLPLLVRDRAQGTQHTVANVDVSVDLPAAFKGTHMSRFVQALANWTEDLDYAGMKRLLEDVRERLNARRAHIVFHFPYFVQKNAPATACPGILPYECRLTGELPEDGKPSFLLEVTVPVMTVCPCSKAISREGAHSQRADVRMAVRMRGFCWIEDFIEIAEASGSSPVYSLLKREDEKFVTEDAFSRPTFVEDVVRNVASRLADHPHVSGFRVEVESYESIHAHNAFACIEHGVTL

SEQ ID NO: 5547 - protein, 259 aa, Bilophila wadsworthia; identical to SEQ ID NO: 5546
  REGION 1..259: note = tr|E5Y3H2|E5Y3H2_BILWA GTP cyclohydrolase FolE2; OS = Bilophila wadsworthia 3_1_6 OX=563192 GN=folE2 PE=3 SV=1

SEQ ID NO: 5548 - protein, 221 aa, Biostraticola sp.
  REGION 1..221: note = tr|A0A4U2UFS5|A0A4U2UFS5_9ENTR GTP cyclohydrolase 1; OS = Biostraticola sp. BGMRC 2031 OX=2575567 GN=folE PE=3; SV = 1
MVSLTKEALLVHEALMARGLETPQSGEVLEAETRKRLIAEHMAGIMKLLNLDLTDDSLAETPHRIAKMYVDEIFSGLDYANFPKITLIENKMKVDEMVAVRNITLTSTCEHHFVIIDGKATVAYIPKDSVIGLSKINRIVQFFAQRPQVQERLTQQILIALQTLLGTNNVAVSIDAVHYCVKARGVKDATSATTTTSLGGLFKSSQNTRQEFLRAVRHHGD

SEQ ID NO: 5549 - protein, 299 aa, Biostraticola sp.
  REGION 1..299: note = tr|A0A4U2UB81|A0A4U2UB81_9ENTR GTP cyclohydrolase FolE2 OS=Biostraticola sp. BGMRC 2031 OX=2575567 GN=folE2; PE = 3 SV=1
MLPDIQSTKADADAESLSWVGMEQIDLPVEIAGRPVSARVNAGINLLSSMDAEKGIHMSRLYLLLDELTQHEITPVLLGTVLEGFLKSHRGRSDEASITITGELLLSRKSLNSNYFGWKAYPIHLRAELKKGLTVTLKAGIPYSSTCPASAALSRHVAALQFRNDFGNCIDRLPVEEVAEWLTNKGMPATPHSQRSWAWVTVLLHPDADSFPVHDVIDYAEIALGTAVQTVVKRSDEQAFAVANGQNLMFCEDAARRLSKAFHAAPFCEDFEIHVEHQESLHAHNAVARIYRKGTRNVT

SEQ ID NO: 5550 - protein, 219 aa, Biostraticola tofi
  REGION 1..219: note = tr|A0A4R3Z7P8|A0A4R3Z7P8_9ENTR GTP cyclohydrolase 1; OS = Biostraticola tofi OX=466109 GN=folE PE=3 SV=1
MLSLTKEAALVHQALLARGLETPLRGEMLDAEVRKARIAGHMTEIMNLLNLDLEDDSLAETPHRIAKMYVDEIFAGLDYANFPKITVIQNKMKVDEMVTVRDITLTSTCEHHFVIIDGKATVAYIPKDCVIGLSKINRIVQFFAQRPQVQERLTQQILIALQTLLGTNNVAVCIDAVHYCVKARGIRDATSATTTTSLGGLFKSSQNTRQEFLRAVRHL

SEQ ID NO: 5551 - protein, 218 aa, Bisgaardia hudsonensis
  REGION 1..218: note = tr|A0A4R2N1A9|A0A4R2N1A9_9PAST GTP cyclohydrolase 1; OS = Bisgaardia hudsonensis OX=109472 GN=folE PE=3 SV=1
MSNLLPEAIKVRNALVEKGIETPMLSLMENKEQRKISIEKHMREVMKLIGLDLKDDSLEETPFRLAKMFIDEIFSGLDYANFPKITNIENRMKVSEMVLVNDITLTSTCEHHFVTIDGMVSVAYYPKKWVIGLSKINRVVSFFAQRPQVQERLTEQILLAFQTILETEDVAVYVKATHFCVKCRGIKDTNSYTVTSAFGGVFLDDRETRKEFLSLINK

SEQ ID NO: 5552 - protein, 231 aa, Bizionia algoritergicola
  REGION 1..231: note = tr|A0A5D0QX62|A0A5D0QX62_9FLAO GTP cyclohydrolase 1; OS = Bizionia algoritergicola OX=291187 GN=folE PE=3 SV=1
MKIQTKSNNQNPNALNGFSTDMIGDDHLSTGLETPMKSDAFKLSDSEKKERISVLFEEIMDVLGLDLNDDSLKGTPDRVAKMYIDEIFSGLNPENKPKIALFENKYRYNQMVLEKNITFYSNCEHHFVPIIGKAHLAYISSGKVIGLSKLNRIVQYFAKRPQVQERLTNQIANELKTILDTEDIAVIIDAKHLCVSSRGVKDDASATVTAYYGGAFNSPEKIIELQNYLNH

SEQ ID NO: 5553 - protein, 225 aa, Bizionia algoritergicola
  REGION 1..225: note = tr|A0A5D0QTA0|A0A5D0QTA0_9FLAO GTP cyclohydrolase 1; OS = Bizionia algoritergicola OX=291187 GN=folE PE=3 SV=1
MKINDNTADFDAIGDDHVGTSADTPLRSDAFVLNSEEKIKIIKEDVRHILETLGLDLTDDSLQGTPNRVAKMFVNEIFGGLNPDKKPSASTFDNKYKYGEMLVEKNITVYSTCEHHLLPIVGKAHVAYISNGTVVGLSKMNRIVDYFAKRPQVQERLTIQVVKELQNVLNTDDVACVIDAKHLCVNSRGIRDTESSTVTAEFGGKFKEAGTRREFLDYIKLDTAF

SEQ ID NO: 5554 - protein, 232 aa, Bizionia argentinensis
  REGION 1..232: note = tr|G2ECG3|G2ECG3_9FLAO GTP cyclohydrolase 1; OS = Bizionia argentinensis JUB59 OX=1046627 GN=folE PE=3; SV = 1
MKTETIPFEKQNNNSLVDFSTEAIGDDHLYTGLETPMKPDAFKLSDTEKKARISLLFEEIMDVMGLDLTDDSLKGTPNRVAKMYIDEIFSGLNPANKPKIALFENKYRYNQMVLEKNITFYSNCEHHFVPIIGKAHLAYISSRKVIGLSKLNRIVQYFAKRPQVQERLTNQIAIELKTILETEDIAVIIDAKHLCVSSRGVKDDTSATVTAYYGGAFNTPHKIAELQNYLNN

SEQ ID NO: 5555 - protein, 225 aa, Bizionia argentinensis
  REGION 1..225: note = tr|G2ED62|G2ED62_9FLAO GTP cyclohydrolase 1; OS = Bizionia argentinensis JUB59 OX=1046627 GN=folE PE=3; SV = 1
MKINDNTADFDALGDDHVGTSADTPLRSDAFVLNSEEKIEIIKNDVRHIMETLGLDLTDDSLKGTPNRVAKMFVNEIFSGLNPAIKPSASTFDNKYKYGEMLVEKNITVYSTCEHHLLPIVGKAHVAYISNGTVVGLSKMNRIVDYFAKRPQVQERLTIQVVKELQRVLNTEDVACVVDAKHLCVNSRGIRDTESSTITAEFGGKFKDIETRREFLDYIKLDTKF

SEQ ID NO: 5556 - protein, 232 aa, Bizionia echini
  REGION 1..232: note = tr|A0A1I5AH62|A0A1I5AH62_9FLAO GTP cyclohydrolase 1; OS = Bizionia echini OX=649333 GN=folE PE=3 SV=1
MKIESTVSKNQQNNSLNGFSTEMIGDDHLFTGLETPLKKDAFKLSDSEKKQRISVLFEEIMDVMGLDLTDDSLKGTPDRVAKMYIEEIFSGLNPKNKPKIALFENKYRYNQMVLEKNITFYSNCEHHFVPIIGKAHVAYISSGKVIGLSKLNRIVQYFAKRPQVQERLTNQIANELKTILETEDIAVIIDAKHLCVSSRGIKDDTSATVTAYYGGVFNTPEKIIELQNYLNH

SEQ ID NO: 5557 - protein, 225 aa, Bizionia echini
  REGION 1..225: note = tr|A0A1I5CP87|A0A1I5CP87_9FLAO GTP cyclohydrolase 1; OS = Bizionia echini OX=649333 GN=folE PE=3 SV=1
MKINDNTADFDAIGDDHVGTSADTPLRNDAFVLNSEEKIDIIKDDVRHIMETLGLDLSDDSLKGTPNRVAKMFVNEIFGGLNPNKKPSASTFENKYKYGEMLVEKNITVYSTCEHHLLPIVGKAHVAYISNGSVVGLSKMNRIVDYFAKRPQVQERLTIQVVQELQKVLNTDDVACVIDAKHLCVNSRGIRDTESSTVTAEFGGKFKEAGTRREFLDYIKLDTAF

SEQ ID NO: 5558 - protein, 232 aa, Bizionia myxarmorum
  REGION 1..232: note = tr|A0A5D0QZV7|A0A5D0QZV7_9FLAO GTP cyclohydrolase 1; OS = Bizionia myxarmorum OX=291186 GN=folE PE=3 SV=1
MKAEVLTTENQNTNVLYGFPTETIGDDHLYTGLETPMKADAFKLSDSEKKQRIALLFEEIMDVMGLDLTDDSLKGTPDRVAKMYIDEIFSGLNPANKPKIALFENKYRYNQMVLEKNITFYSNCEHHFVPIIGKAHLAYISSGKVIGLSKLNRIVQYYAKRPQVQERLTNQIANELKMTLETEDIAVIIDAKHLCVSSRGIKDDTSETVTAYYGGAFNTPEKIAELQNYLKH

SEQ ID NO: 5559 - protein, 225 aa, Bizionia myxarmorum
  REGION 1..225: note = tr|A0A5D0RET1|A0A5D0RET1_9FLAO GTP cyclohydrolase 1; OS = Bizionia myxarmorum OX=291186 GN=folE PE=3 SV=1
MKINDNTADFDAIGDDHVGTSADTPLRKDAFVLNSEEKIAIIKEDVRHIMETLGLDLTDDSLKGTPNRVAKMFVNEIFSGLNPAKKPSASTFDNKYKYGEMLVEKNITVYSTCEHHLLPIVGKAHVAYISNGTVVGLSKMNRIVDYFAKRPQVQERLTIQVVKELQRVLNTEDVACVMDAKHLCVNSRGIRDTESSTVTAEFGGKFKDPGTRREFLDYIKLETQF

SEQ ID NO: 5560 - protein, 198 aa, Bizionia paragorgiae
  REGION 1..198: note = tr|A0A1H4A842|A0A1H4A842_9FLAO GTP cyclohydrolase 1; OS = Bizionia paragorgiae OX=283786 GN=folE PE=3 SV=1
MSNKNFEEYNIKVTDAMQLRYKSIIEDLGENTKRDGLLKTPERAAKAMQFLTQGYEQDAAEILKSAMFKESYNEMVIVKDIELYSLCEHHILPFFGKAHIAYIPNGQIVGLSKIPRIVDVFSRRLQVQERLTEQILNCINETLKPEGVAVVIEASHMCMMMRGVQKQNSTTTTSGFRGAFKNIETRTEFLKLISENLS

SEQ ID NO: 5561 - protein, 225 aa, Bizionia paragorgiae
  REGION 1..225: note = tr|A0A1H3ZPA8|A0A1H3ZPA8_9FLAO GTP cyclohydrolase 1; OS = Bizionia paragorgiae OX=283786 GN=folE PE=3 SV=1
MEIDNTTKNHDSIGENHVGTSADTPMKADAFKLTSAEKIEIIKDDVRHIMETLGLDLTDDSLSGTPNRVAKMFVNEIFGGLDPQKKPSASTFDNKYKYGEMLVEKNITVYSTCEHHLLPIVGRAHIAYISNGTVVGLSKMNRIVDYFAKRPQVQERLTIQVVKELQKVLNTEDVACVIDAKHLCVNSRGIRDIESSTVTSEFGGQFKNKDIKREFLDYIKLDTTF

SEQ ID NO: 5562 - protein, 225 aa, Bizionia saleffrena
  REGION 1..225: note = tr|A0A5D0QYD8|A0A5D0QYD8_9FLAO GTP cyclohydrolase 1; OS = Bizionia saleffrena OX=291189 GN=folE PE=3 SV=1
MEIDNTTKNHESIGENHIGTSAVTPMKADAFKLTSTEKIDIIKDDVRHILETLGLDLSDDSLSGTPNRVAKMFVNEIFGGLDPQNKPSASTFDNKYKYGEMLVEKNITVYSTCEHHLLPIVGRAHIAYISNGTVVGLSKMNRIVDYFAKRPQVQERLTLQVVQELQKVLNTEDVACVMDAKHLCVNSRGIRDIDSSTVTAEFGGQFKNKDTKREFLDYIKLDTTF

SEQ ID NO: 5563 - protein, 198 aa, Bizionia saleffrena
  REGION 1..198: note = tr|A0A5D0R7E6|A0A5D0R7E6_9FLAO GTP cyclohydrolase 1; OS = Bizionia saleffrena OX=291189 GN=folE PE=3 SV=1
MPYKKFEEYNMQVTDDVKDRYKAIIEDLGENTEREGLLKTPERAAKALQFLTQGYEQDAAEILKSAMFKESYNEMVIVKDIELYSLCEHHILPFFGKAHIAYIPNGHIVGLSKIPRIVDVFSRRLQVQERLTEQILNCINDTLKPEGVAVVIEASHMCMMMRGVQKQNSTTTTSGFRGAFKNIETRTEFLKLISEKLS

SEQ ID NO: 5564 - protein, 204 aa, unidentified
  source 1..204: note = Blastocatellia bacterium
  REGION 1..204: note = tr|A0A317I0I6|A0A317I0I6_9BACT GTP cyclohydrolase 1; OS = Blastocatellia bacterium OX=2052146 GN=folE PE=3 SV=1
MATKFSEQKNKEETVPPVDLDLIAQGVRMILEGIGEDPERSGLQETPQRVAEMFAELTSGMREDPNEHVVPLPGDKHDEMVIVKDISIASMCEHHLAPFVGKCHIAYIPKGGRILGISKLARLAETFSRRLQLQERLTTDIANTLFEGLKPLGVMVVIEAEHTCMTLRGVRKADAKTVTSAVLGGFRTDPRTRAEAMSLIKGRD

SEQ ID NO: 5565 - protein, 208 aa, unidentified
  source 1..208: note = Blastocatellia bacterium
  REGION 1..208: note = tr|A0A3B9LW45|A0A3B9LW45_9BACT GTP cyclohydrolase 1; OS = Blastocatellia bacterium OX=2052146 GN=folE PE=3 SV=1
MATKFSKDDQNHTSLENDLPPVDLELIAQGVRLILEGLGENPDRSGLQETPRRVAEMYAELTSGMREDPRQHVIPLPGDKHDEMVIVKDIQFASMCEHHLAPFVGKCHIAYIPKEGRILGISKLARLAETFSRRLQLQERLTTDIANTLYEGLKPIGVMVVIEAAHTCMTLRGVRKADAKTITSAVLGGFRTDPRTRAEAMALITGKE

SEQ ID NO: 5566 - protein, 214 aa, Blastochloris sp.
  REGION 1..214: note = tr|A0A348G0P6|A0A348G0P6_9RHIZ GTP cyclohydrolase 1; OS = Blastochloris sp. GI OX=2233851 GN=folE PE=3 SV=1
MDASVAPLFPQAKDTPTQPTPPVARPSRAEAEAAVRTLIAWTGDDPTREGLIDTPARVVKAYEELYRGYGEDAEAFLERTFSETGGYDDMVLVRDIPFHSHCEHHMVPFFGKAHIAYVPVDRVVGLSKIARIVDAFARRLQTQEHLTAQIIGTIDEVLKPRGVAVLIEAEHMCMTMRGVQKAGASTLTTQFTGVFRDDPAEQARFMTLLRQGRG

SEQ ID NO: 5567 - protein, 211 aa, Blastochloris viridis
  REGION 1..211: note = tr|A0A0H5BQ95|A0A0H5BQ95_BLAVI GTP cyclohydrolase 1; OS = Blastochloris viridis OX=1079 GN=folE_1 PE=3 SV=1
MDASVAPLFRHVEEPTAAAVARPSREDAEAAVRTLIAWAGDDPGREGLIDTPKRVVRAYEELFGGYREDAAAFLERTFSETGGYDDMVLVRDISFHSHCEHHMVPFFGRAHVAYVPIDRVVGLSKIARIVDAFARRLQTQEHLTAQIVSTLDEVLKPRGVAVLIEAEHMCMTMRGVQKAGASTMTTQFTGVFRDDPAEQARFMTLLRQGRG

SEQ ID NO: 5568 - protein, 207 aa, Blastococcus aggregatus
  REGION 1..207: note = tr|A0A285VA01|A0A285VA01_9ACTN GTP cyclohydrolase 1; OS = Blastococcus aggregatus OX=38502 GN=folE PE=3 SV=1
MTAPMPEVAEVRSHRFRVVRGRAGLDLDGAEQAVTGLLRALGKDPAEPHLADTPRRVAAAFAEMLTPPSFDLTTFPNDEGYDELVMATAIPVQSLCEHHLLPFTGTAAIGYLPGDRILGLSKLARVLDLFARDLQVQERLTQQVADWLQENLAPRGVGVVLRAEHLCMSLRGVRARGARTTTSALHGVLREDARSRQEFFALAGTGE

SEQ ID NO: 5569 - protein, 191 aa, Blastococcus aggregatus
  REGION 1..191: note = tr|A0A285V1H4|A0A285V1H4_9ACTN GTP cyclohydrolase 1; OS = Blastococcus aggregatus OX=38502 GN=folE PE=3 SV=1
MTHRIDSARAEAAVRELLIAIGEDPDRPGLQDTPARVARAYAETFGGLWQDPYDILATTFDENHDELVLVKDIPMYSTCEHHLVPFHGVAHVGYIPGTDGRVTGLSKIARLVEVYARRPQVQERMTRQIADALDDVLKPQGVIVVIEAEHLCMAMRGIRKPGTTTVTSAVRGIFRDSAATRSEAMSLVLGR

SEQ ID NO: 5570 - protein, 205 aa, unidentified
  source 1..205: note = Blastococcus colisei
  REGION 1..205: note = tr|A0A543P134|A0A543P134_9ACTN GTP cyclohydrolase 1; OS = Blastococcus colisei OX=1564162 GN=folE PE=3 SV=1
MSEVPAEREDQLLTAPRGVDQERAAAAVRELLLAVGEDPDRPGLQDTPQRVARAYAETFAGLWQDPYDVLATTFDEDHDELVLVKDIPMYSTCEHHLVPFHGVAHIGYVPGEDGRVTGLSKLARLVEVYARRPQVQERMTSQIADALSDVLKPRGVLVIIEAEHLCMAMRGIRKPGSTTVTSAVRGIFRDNPATRSEAMSLVLHR

SEQ ID NO: 5571 - protein, 205 aa, unidentified
  source 1..205: note = Blastococcus endophyticus
  REGION 1..205: note = tr|A0A1H8UZZ2|A0A1H8UZZ2_9ACTN GTP cyclohydrolase 1; OS = Blastococcus endophyticus OX=673521 GN=folE PE=3 SV=1
MSEIPEEAEDEVRPVYGQIDHARAEAAVRELLIAVGEDPDRPGLQNTPGRVARAYAETFAGLWQDPYEVLATVFDEDHDEMVLVKDIPMYSTCEHHLVPFHGVAHVGYIPGEDGRVTGLSKLARLVDMYARRPQVQERMTRQIADALHEVLKPRGVIVIVEAEHLCMGMRGIRKPGSSTVTSAVRGMFRDSAATRSEAMSLVLGR

SEQ ID NO: 5572 - protein, 201 aa, unidentified
  source 1..201: note = Blastococcus endophyticus
  REGION 1..201: note = tr|A0A1H8W8E5|A0A1H8W8E5_9ACTN GTP cyclohydrolase 1; OS = Blastococcus endophyticus OX=673521 GN=folE PE=3 SV=1
MTSIDVPASRQRPSFDAARAEAAVRELLVAVGEDPDRPGLRDTPARVARAYAETFGGLVQDPAEVLSTTFEEDHDELVLVKDIPMYSTCEHHLVPFHGVAHIAYIPSEDGRVTGLSKLARLVDVYARRPQVQERMTRQVADALHDVLKPRGVLVVVQAEHLCMGMRGIRKPGAVTTTSAVRGLFRDSAATRAEAMSLVLGR

SEQ ID NO: 5573 - protein, 205 aa, Blastococcus saxobsidens
  REGION 1..205: note = tr|A0A4Q7YBP1|A0A4Q7YBP1_9ACTN GTP cyclohydrolase 1; OS = Blastococcus saxobsidens OX=138336 GN=folE PE=3 SV=1
MSEIPAEPEDLLLTPAPGVDQERAAAAVRELLVAVGEDPDRPGLQDTPARVARAYAETFAGLWQDPYEILATTFDEDHNELVLVKDIPMYSTCEHHLVPFHGVAHVGYIPGSDGRVTGLSKLARLVEVYARRPQVQERMTSQIADALADVLKPRGALVVIQAEHLCMAMRGIRKPGSTTVTSAVRGIFREDARTRSEAMSLILGR

SEQ ID NO: 5574 - protein, 205 aa, Blastococcus saxobsidens
  REGION 1..205: note = tr|H6RPW4|H6RPW4_BLASD GTP cyclohydrolase 1; OS = Blastococcus saxobsidens (strain DD2) OX=1146883; GN = folE PE=3 SV=1
MSEVPAEPADQLLEPVRGVDQQRAAAAVRELLLAIGEDPDRPGLRDTPDRVARAYAETFAGLAQDPYDILATTFDEDHDELVLVKDIPMYSTCEHHLVPFHGVAHVAYIPGDDGRVTGLSKLARLVEVYARRPQVQERMTRQIADALNDALKPRGALVVVQAEHLCMAMRGVRKPGSSTVTSAVRGIFRENAATRSEAMSLVLGR

SEQ ID NO: 5575 - protein, 205 aa, Blastococcus sp.
  REGION 1..205: note = tr|A0A4U3CJN2|A0A4U3CJN2_9ACTN GTP cyclohydrolase 1; OS = Blastococcus sp. CCUG 61487 OX=1840703 GN=folE PE=3 SV=1
MSIVPGEPEDRVEPALDRIDSARAEAAVRELLLAIGEDPDRPGLQDTPARVARAYAETFAGLWQDPYDVLATTFEENHDELVLVKDIPMYSTCEHHLVPFHGQAHVGYIPAEDGRVTGLSKIARLVEVYARRPQVQERMTRQIADALDEVLKPRGVLVVVEAEHLCMAMRGIRKPGSTTVTSAVRGIIRDNAATRSEAMSLVLGR

SEQ ID NO: 5576 - protein, 205 aa, Blastococcus sp.
  REGION 1..205: note = tr|A0A4Y9NA66|A0A4Y9NA66_9ACTN GTP cyclohydrolase 1; OS = Blastococcus sp. AZ43 OX=2559606 GN=folE PE=3 SV=1
MSEIPAEPEDQLLDRPRGVDEERAAAAVRELLLAIGEDPDRPGLQDTPGRVARAYAETFAGLWQDPYDVLATVFDEDHDEMVLVKDIPMYSTCEHHLVPFHGQAHVGYIPGSDGRVTGLSKLARLVEVYARRPQVQERMTRQIADALYEVLKPQGVIVVIEAEHLCMAMRGIRKPGSTTVTSAVRGIFRDNPATRSEAMSLVLGR

SEQ ID NO: 5577 - protein, 204 aa, unidentified
  source 1..204: note = Blastomonas fulva
  REGION 1..204: note = tr|A0A222X1N3|A0A222X1N3_9SPHN GTP cyclohydrolase 1; OS = Blastomonas fulva OX=1550728 GN=folE PE=3 SV=1
MLYHDADDDHDVAGKGKIPVPVDVQEAIVTLLRWTGDDPDREGLRDTPLRVARAWKEYCSGYDDDPSVHLSRTFEEVGGYDELVLLKDIPFQSHCEHHMAPIIGKASIAYMPRDRVVGISKLARVLHGFSRRLQVQERLTAEVAACIWEHLQPHGVAVVIEASHSCMTARGVRTPGVSMITSRLLGCFLDDHRSREEVMSLMGY

SEQ ID NO: 5578 - protein, 204 aa, Blastomonas natatoria
  REGION 1..204: note = tr|A0A2V3V510|A0A2V3V510_9SPHN GTP cyclohydrolase 1; OS = Blastomonas natatoria OX=34015 GN=folE PE=3 SV=1
MLYHDADYDGDLSENGKIPVPQDVQQAIVTLLRWTGDNPEREGLRDTPLRVARAWKEYCSGYDDDPSVHLSRTFEEVGGYDELVLLKDIPFQSHCEHHMAPIIGKASIAYMPRDRVVGISKLARVLHGYARRLQVQERLTAEVAACIWEHLQPHGVAVVIEASHSCMTARGVRTPGVGMITSRLLGCFLEDHRSREEVMSLMGY

SEQ ID NO: 5579 - protein, 207 aa, Blastomonas sp.
  REGION 1..207: note = tr|W9BXL2|W9BXL2_9SPHN GTP cyclohydrolase 1; OS = Blastomonas sp. CACIA14H2 OX=1419876 GN=folE PE=3 SV=1
MSSDSKTARQRSDPVGPDGKLLVPEHVEEAIRTLIRWAGDDPAREGLRDTPRRVARAWKEYCQGYAEAPEAHLSRMFEEVGGYNELVLLKDIPFHSHCEHHMAPIIGKAAIAYLPRNNVVGISKLARVSHGFARRLQIQERLTAEVAQCIWDNLNPVGVAVVVEASHACMTARGVGTPGVTMVTSRMMGIFLDDDRSRKEVLSLMGY

SEQ ID NO: 5580 - protein, 223 aa, Blastomonas sp.
  REGION 1..223: note = tr|W9C3L9|W9C3L9_9SPHN GTP cyclohydrolase 1; OS = Blastomonas sp. CACIA14H2 OX=1419876 GN=folE PE=3 SV=1
MPSAAPYLTRQFVIKGECQMLYHDADDDGEMSEKGKIPVPQDVQQAIVTLLRWTGDDPEREGLRDTPLRVARAWKEYCSGYGDDPSVHLSRTFEEVGGYDELVLLKDIPFQSHCEHHMAPIIGKASIAYMPKDRVVGISKLARVLHGYARRLQVQERLTAEVAACIWEHLQPHGVAVVIEASHSCMTARGVRTPGVGMITSRLLGCFLDDHRSRKEVMGLMGY

SEQ ID NO: 5581 - protein, 304 aa, unidentified
  source 1..304: note = Blastopirellula cremea
  REGION 1..304: note = tr|A0A368KPP2|A0A368KPP2_9PLAN GTP cyclohydrolase FolE2 OS=Blastopirellula cremea OX=1031537 GN=folE2 PE=3; SV = 1
MLPDVANDTAPQFQSAIDRVGMSGIEVAILVRGEDDVLMRTPARVDAYVSLDDPAIKGIHMSRLYLSLQNELHTEFSRKQIERILGRFLETHQGMSASAYLCFSFEHMIQRASLLSDNLAWRSYPIQVEALRKGDEVKYRVHVRLTYSSACPCSAALSRQLLQQQFEEQFYGHNWLSASTVLSWLGANSTLIAVPHSQRSHADITVDLDETRSDLPIEEIIQRTEGVLNTAVQAAVKRADEQEFARLNGENLMFCEDAARRMKSAIDQMEGVTDYRIQASHFESLHPHDAVAIVVKGVPGGLKP

SEQ ID NO: 5582 - protein, 304 aa, Blastopirellula marina
  REGION 1..304: note = tr|A3ZTI5|A3ZTI5_9PLAN GTP cyclohydrolase FolE2; OS = Blastopirellula marina DSM 3645 OX=314230 GN=folE2 PE=3; SV = 1
MLPDVAADAAPIVQGKLNRVGMSGIEVAIRLRDANGDVIRTPARVDAYVSLDDPEVKGIHMSRLYLCLQDSLDDEFGRAQIETILQRFLETHSDISATSYLRFSYELMVRRESLLSDHSAWRSYPVKIEAWSSGGKVTYRVHVRLTYSSACPCSAALARQLLQQQFEEQFFGHHWLSTASVLNWLGSNETLMAVPHSQRSHADITIELDGQRDDLPIDELITCTEGALNTAVQAAVKRTDEQEFARLNGENLMFCEDAARRLKNAVDSLEGIHDYRIQASHFESLHPHDAVAIVTKGVPGGLTA

SEQ ID NO: 5583 - protein, 304 aa, Blastopirellula marina
  REGION 1..304: note = tr|A0A2S8GMT2|A0A2S8GMT2_9PLAN GTP cyclohydrolase FolE2 OS=Blastopirellula marina OX=124 GN=folE2 PE=3 SV=1
MLPDVANDTAPQFQSSIDRVGMSGIEVAILVRAEDDVLMRTPAKVDAYVSLDDPAIKGIHMSRLYLSLQNELHTEFSRKQIERILGRFLETHQEMSGSAYLQFSFEHMLQRASLLSDNTAWRSYPVQVEALQRGNEIKYRLHVRLTYSSACPCSAALSRQLLQQQFEEQFYGHNWLSASTVLNWLGSNNTLIAVPHSQRSHADITVDLDETRTNLPIDEIIQRTEGVLNTAVQAAVKRADEQEFARLNGENLMFCEDAARRMKSAIEPMEGVTDFRIQASHFESLHPHDAVAIVVKGVPGGLKP

SEQ ID NO: 5584 - protein, 214 aa, Blastopirellula sp.
  REGION 1..214: note = tr|A0A2E0ARF9|A0A2E0ARF9_9PLAN GTP cyclohydrolase 1; OS = Blastopirellula sp. OX=2024826 GN=folE PE=3 SV=1
MSTEHERETGSLMGEREADDLPDSSSAVDLPRIERAVREILAAVGEDPDREGLLETPARVSRMYAELFGGLHSDPRQHLKKFFTEKYDEVVLVRDISFCSMCEHHLLPFTGKAHIGYLPDGKVIGLSKLARVVEVVSRRPQVQERMTDDVADMLMDELGARGVAVIIEASHSCMTIRGIRKPGSLCVTSAMKGIFRKNEKTRQEIMQLIYGDRR

SEQ ID NO: 5585 - protein, 275 aa, Blastopirellula sp.
  REGION 1..275: note = tr|A0A2E0B1J3|A0A2E0B1J3_9PLAN GTP cyclohydrolase FolE2 OS=Blastopirellula sp. OX=2024826 GN=folE2 PE=3 SV=1
MIEDFQKKTALPDIQSTRDERNIAIDKVGVTAVSFPIQFASSSESLVTPAQHTIANFDLFVSLPKDERGTHMSRFLQVLHGWDRPLSYDALRELSERIRGELQAEAAHLKVRFPYFVERAAPVSGEPGKLQLQVAIEVETGRQCDLVLNVKGPATSLCPCSKQISDRGAHNQRCELNVSLRLQPGTSMFVEELFSLMEQAASTQVFPTLKRPDEKWVTEAAYDNPKFVEDIVRDLAVVLNSDERVVWYRCSSENFESIHQHNAFAEVELDKRMND

SEQ ID NO: 5586 - protein, 229 aa, Blattabacterium cuenoti
  REGION 1..229: note = tr|M4ZS83|M4ZS83_9FLAO GTP cyclohydrolase 1; OS = Blattabacterium cuenoti BPAA OX=1229512 GN=folE PE=3; SV = 1
MMEEKHNKIKKKKLNQKYNSILNHSINSDLTSQNNVYFMSDEEKIEKIKKHFFQIMEILGLDMNDDSLRKTPKRVAKMFIQEIFSGLNPKNTPNFSIFENKYRYNQMLIEKNITVYSTCEHHFLPIIGKAHVGYISNGKVVGLSKINRIVNFYAKRPQVQERLTIQIVQSLKKMLETQDVACIIEAKHLCVNSRGIKDTDSSTVTTELIGSFKNNSEIRKEFLHHIGIS

SEQ ID NO: 5587 - protein, 191 aa, Blattabacterium cuenoti
  REGION 1..191: note = tr|A0A224AK50|A0A224AK50_9FLAO GTP cyclohydrolase 1; OS = Blattabacterium cuenoti STAT OX=1457030 GN=folE PE=3; SV = 1
MSEEKKIEKIEKHFFHIMEILGLDMNDDSLRKTPKRVAKMFIREIFSGLDPKNTPNFSIFENKYKYNQMLIEKNITVYSTCEHHFLPIIGKAHVGYISNGKVAGLSKINRIVNFYAKRPQVQERLTIQIVQSLKKMLETKDVACIIEAKHLCVNSRGIRDTDSSTITTELIGAFKKDSEIRKEFLHHIGIS

SEQ ID NO: 5588 - protein, 225 aa, unidentified
  source 1..225: note = Blattabacterium punctulatus
  REGION 1..225: note = tr|A0A2U9QAE2|A0A2U9QAE2_9FLAO GTP cyclohydrolase 1; OS = Blattabacterium punctulatus OX=164514 GN=folE PE=3 SV=1
MMEEKHKKFFKKKIKETISSLEDHETPLRNDAFFISDEEKISKIEKYFFHIMEILGLNMNDDSLRSTPKRVAKMFIKEIFSGLNPKTFPKVSTFENKYRYNQMLIEKNITIYSICEHHFLPIVGKAHVGYISNGKVIGLSKINRIVNYYSKRPQVQERLTIQIVKSLQKILDTKNVACIIEAKHLCVNSRGIQDINTKTITTKLLGIFKKNSEIRKEFFHYIGIS

SEQ ID NO: 5589 - protein, 225 aa, unidentified
  source 1..225: note = Blattabacterium punctulatus
  REGION 1..225: note = tr|A0A2U9QBV5|A0A2U9QBV5_9FLAO GTP cyclohydrolase 1; OS = Blattabacterium punctulatus OX=164514 GN=folE PE=3 SV=1
MMEEKHKKFFKKKIKETISSLEDHETPLRNDAFFISDEEKISKIEKYFFHIMEILGLNMNDDSLRSTPKRVAKMFITEIFSGLNPKTFPKVSTFENKYRYNQMLIEKNITIYSICEHHFLPIVGKAHVGYISNGKVIGLSKINRIVNYYSKRPQVQERLTIQIVKSLQKILDTKNVACIIEAKHLCVNSRGIQDINTKTITTKLLGIFKKDSEIRKEFFHYIGIP

SEQ ID NO: 5590 - protein, 226 aa, Blattabacterium sp.
  REGION 1..226: note = tr|U3Q5Q3|U3Q5Q3_9FLAO GTP cyclohydrolase 1; OS = Blattabacterium sp. (Nauphoeta cinerea) OX=1316444; GN = folE PE=3 SV=1
MMEEKHKKNLRKEKLNCIFNHSINTDRFLQNNVCFDSDENKIERIEKHFFQIMKILGLDMNDDSLRKTPKRVAKMFIQEIFSGLNSKNIPNFSIFENKYKYNQMLIEKNITVYSTCEHHFLPIVGKAHVGYISNGKVVGLSKINRIVNFYAKRPQVQERLTMQIVQSLQKMLETQDVACVIEAKHLCVNSRGIKDIDSSTVTTELIGAFKKNWEIRNEFLHYIGIS

SEQ ID NO: 5591 - protein, 216 aa, Blattabacterium sp.
  REGION 1..216: note = tr|G7SPY5|G7SPY5_9FLAO GTP cyclohydrolase 1; OS = Blattabacterium sp. (Mastotermes darwiniensis) str. MADAR OX=1074889 GN=folE PE=3 SV=1
MGEKKDTIFHLEENHENPLRNDAFLMSDEEKINQIEKHFFHIMEILGLDMNNDSLRSTPRRVAKMFIQEIFSGINPKTYPKVSTFENKYQYNQMLIEKNITIYSTCEHHFLPIVGKAHVGYISNGKVIGLSKINRIVNYYAKRPQVQERLTIQIVKSLQKILETKNVACVIEAKHLCVNSRGIRDIDTRTITAELVGNFKNNSEIRREFFHYIGIS

SEQ ID NO: 5592 - protein, 184 aa, Blautia coccoides
  REGION 1..184: note = tr|A0A4R2K9A1|A0A4R2K9A1_9FIRM GTP cyclohydrolase 1; OS = Blautia coccoides OX=1532 GN=folE PE=3 SV=1
MNQDKIKEGVRLILEGIGEDVDREGLLETPDRIARMYEELAGGYTDDAGVHLKKRFHVDNNDMVMEKDIHFYSFCEHHMLPFYGNAAIAYIPNGEVVGLSKIARTVEVFAKRFQLQERLTAQIADAFMEELKPKGVMVLVQAEHMCMTMRGIKKPGTKTVSVVTRGVFDDNESLQNSFYRMLDC

SEQ ID NO: 5593 - protein, 185 aa, Blautia hansenii
  REGION 1..185: note = tr|C9L619|C9L619_BLAHA GTP cyclohydrolase 1; OS = Blautia hansenii DSM 20583 OX=537007 GN=folE PE=3 SV=1
MDKKKIEEGVRLILEGIGEDINREGLLETPDRIARMYEELAAGYTDNASEHLKKRFHVDNNDMVMEKDIPFYSFCEHHMLPFYGKAAVAYIPNGEVVGLSKIARTLEVFAKRFQLQERLTAQIADVFMEELKPYGVMVLIEAEHMCMTMRGIKKPGAKTVTVVTRGVFNEDEKLQNQFYRMLESR

SEQ ID NO: 5594 - protein, 216 aa, Blautia hydrogenotrophica
  REGION 1..216: note = tr|C0CQ83|C0CQ83_BLAHS GTP cyclohydrolase 1; OS = Blautia hydrogenotrophica (strain DSM 10507 / JCM 14656 / S5a33) OX=476272 GN=folE PE=3 SV=1
MLTDFITIEQSPKNYLSSEFQETKEEKEVVFLVDKQKVEQAVRLYLEGIGEDVNREGLLDTPSRIARMCEEIYGGLDQDPGVYLEKQFTVDSNEMVIEKDITFYSTCEHHLLPFFGKAHIAYIPNEKVTGLSKLARAVEVYARRPQIQEKMTVQIADALEKYLNPKGVMVMLEAEHTCMTMRGIKKPGTKTVTSVTRGEFKGNYELQKMFLQMVKD

SEQ ID NO: 5595 - protein, 185 aa, Blautia hydrogenotrophica
  REGION 1..185: note = tr|A0A173UMZ3|A0A173UMZ3_9FIRM GTP cyclohydrolase 1; OS = Blautia hydrogenotrophica OX=53443 GN=folE PE=3 SV=1
MVDKQKVEQAVRLYLEGIGEDVNREGLLDTPSRIARMCEEIYGGLDQDPGVYLEKQFTVDSNEMVIEKDITFYSTCEHHLLPFFGKAHIAYIPNEKVTGLSKLARAVEVYARRPQIQEKMTVQIADALEKYLNPKGVMVMLEAEHTCMTMRGIKKPGTKTVTSVTRGEFKGNYELQKMFLQMVKD

SEQ ID NO: 5596 - protein, 260 aa, Blautia luti
  REGION 1..260: note = tr|A0A564W7W4|A0A564W7W4_9FIRM GTP cyclohydrolase 1 type 2 OS=Blautia luti OX=89014 GN=RSSSTS7063_01110 PE=4; SV = 1
MKAYELIEWLNAHHPQKFAEDWDNVGLLVGDDQKEISHVFLALDLTEPVLDEAVAAGADMILTHHPMIFSGIKKINNHTFTGRKILRLIKEDIPYFAMHTNYDVIGMADLSAEHLKLQDTRVLTVTDESGEQPEGFGRVGKLPHVMTLGEFGKYVKECNHLPDVRVYGDLDRKIETVAICTGSGKSMIGDVMAAGADVYVTGDIDYHTAIDTMADGLAIVDAGHYGTEYIFAEAMEKELNEVFSALKTTCASVKNPYTVL

SEQ ID NO: 5597 - protein, 185 aa, Blautia luti
  REGION 1..185: note = tr|A0A564VX11|A0A564VX11_9FIRM GTP cyclohydrolase 1; OS = Blautia luti OX=89014 GN=folE PE=3 SV=1
MVDKAKVEEAIKLLLEGIGEDVNREGLQGTPERIARMCEEIYGGLDNEADEHLQKQFHVENNEMVLEKDITFYSMCEHHLMPFYGKAHIAYIPNGKVTGLSKLARTVDVYARRPQIQERLTVQIADALERVLTPKGIMVMLEAEHTCMTMRGIKKPGSKTVTTVTRGEFKENMELQKQFLAMVKD

SEQ ID NO: 5598 - protein, 185 aa, unidentified
  source 1..185: note = Blautia obeum
  REGION 1..185: note = tr|A0A367FXQ9|A0A367FXQ9_9FIRM GTP cyclohydrolase 1; OS = Blautia obeum OX=40520 GN=folE PE=3 SV=1
MVDKAKVEEAIKLLLEGIGEDVNREGLQGTPERIARMCEEIYGGLDNEADEHLQKQFHVENNEMVLEKDITFYSMCEHHLMPFYGKAHIAYIPNGKVTGLSKLARTVDVYARRPQIQERLTVQIADALERVLAPKGIMVMLEAEHTCMTMRGIKKPGSKTVTTVTRGEFKENMELQKQFLAMVKD

SEQ ID NO: 5599 - protein, 185 aa, unidentified
  source 1..185: note = Blautia obeum
  REGION 1..185: note = tr|A5ZR69|A5ZR69_9FIRM GTP cyclohydrolase 1; OS = Blautia obeum ATCC 29174 OX=411459 GN=folE PE=3 SV=1
MVDKQKVEQAIRLLLEGIGEDTEREGLKDTPDRIARMCMEIYGGLDEEADHHLAKQFEVENNEMVLEKDITFYSMCEHHLMPFYGKAHVAYIPNGKVTGLSKLARTVDVYARRPQIQERLTVQIADALERTLNPKGIMVMLEAEHTCMTMRGIKKPGSKTITTVTRGDFKTDRELQKQFLSMVKD

SEQ ID NO: 5600 - protein, 184 aa, Blautia producta
  REGION 1..184: note = tr|A0A4P6M032|A0A4P6M032_9FIRM GTP cyclohydrolase 1; OS = Blautia producta OX=33035 GN=folE PE=3 SV=1
MNQDKIKEGVRLILEGIGEDIDREGLLETPDRIARMYEELAAGYTDDAGVHLKKRFHVDNNDMVMEKDIHFYSFCEHHMLPFYGNAAIAYIPNGEVVGLSKIARTVEVFAKRFQLQERLTAQIADAFMEELKPKGVMVLVQAEHMCMTMRGIKKPGTKTVSVVTRGVFDDNESLQNSFYRMLDC

SEQ ID NO: 5601 - protein, 184 aa, Blautia producta
  REGION 1..184: note = tr|A0A2S4GT44|A0A2S4GT44_9FIRM GTP cyclohydrolase 1; OS = Blautia producta OX=33035 GN=folE PE=3 SV=1
MNQDKIKEGVRLILEGIGEDINREGLLETPDRIARMYEELAAGYTDDAAVHLKKRFHVDNNDMVMEKDIHFYSFCEHHMLPFYGNAAIAYIPNGEVVGLSKIARTVEVFAKRFQLQERLTAQIADAFMEELKPKGVMVLVQAEHMCMTMRGIKKPGTRTVSVVTRGIFDDNESLQNSFYRMLEC

SEQ ID NO: 5602 - protein, 185 aa, Blautia sp.
  REGION 1..185: note = tr|A0A373VVV0|A0A373VVV0_9FIRM GTP cyclohydrolase 1; OS = Blautia sp. AF19-10LB OX=2292961 GN=folE PE=3 SV=1
MVDKAKVEQAIRLLLEGIGENPDREGLKDTPDRIARMCTEIYGGLDEEADQHLLKQFQVENNEMVLEKDITFYSMCEHHLMPFYGKAHIAYIPNGKVTGLSKLARTVDVYARRPQIQERLTVQIADALDRVLEPKGVMVMLEAEHTCMTMRGIKKPGSKTMTVITRGEFKNNIELQKQFLAMVKD

SEQ ID NO: 5603 - protein, 183 aa, Blautia sp.
  REGION 1..183: note = tr|A0A1Y4F7J2|A0A1Y4F7J2_9FIRM GTP cyclohydrolase 1; OS = Blautia sp. An249 OX=1965603 GN=folE PE=3 SV=1
MDKEKIMEGVRLLLEGIGEDVNREGLLETPERIARMCEEIYGGLNEDGDQHLKKQFTVDNSEMVLEKDITFYSTCEHHLLPFYGKAHVAYIPSNKVAGLSKLARTVEVYARRPQIQEKLTTQIADALERNLNPKGVMVVIEAEHTCMTMRGIKKPGSKTVTMATRGCFQEDYHMQKMFMDMIK

SEQ ID NO: 5604 - protein, 185 aa, Blautia wexlerae
  REGION 1..185: note = tr|A0A174TJB8|A0A174TJB8_9FIRM GTP cyclohydrolase 1; OS = Blautia wexlerae OX=418240 GN=folE PE=3 SV=1
MVDKLKIEQAVRLLLEGIGEDITREGLIDTPDRIARMCEEIYGGLGHEADQHLLKQFPVENNEIVLEKDITFYSMCEHHLMPFYGKAHLAYIPNGKVTGLSKLARTVEVYSRRPQIQERLTVQIADALERTLDPKGIMVMLEAEHTCMTMRGIKKPGSKTITTVTRGAFTEDKELQKMFLSMVKG

SEQ ID NO: 5605 - protein, 185 aa, Blautia wexlerae
  REGION 1..185: note = tr|A0A564WVY2|A0A564WVY2_9FIRM GTP cyclohydrolase 1; OS = Blautia wexlerae OX=418240 GN=folE PE=3 SV=1
MVDKVKIEQAVRLLLEGIGEDITREGLIDTPDRIARMCEEIYGGLGHEADQHLLKQFPVENNEIVLEKDITFYSMCEHHLMPFYGKAHLAYIPNGKVTGLSKLARTVEVYSRRPQIQERLTVQIADALERTLDPKGIMVMLEAEHTCMTMRGIKKPGSKTITTVTRGAFTEDKELQKMFLSMVKG

SEQ ID NO: 5606 - protein, 214 aa, unidentified
  source 1..214: note = Blochmannia endosymbiont
  REGION 1..214: note = tr|A0A0E3Y8H1|A0A0E3Y8H1_9ENTR GTP cyclohydrolase 1; OS = Blochmannia endosymbiont of Polyrhachis (Hedomyrma) turneri OX=1505596 GN=folE PE=3 SV=1
MIFLTEQALLVRDTLLLQGLETPFLVQSGLKNRLNDQVREARIAENMLAILHLLNIDSQHDSIIDTPKRIARMYLKDFFYGLNYANFPKITMFKNTMNMDEVITVRNINVISMCEHHFIIFSGIATVAYIPNKHIIGLSKINRLVDFFSRRPQVQERLTKQIFLALQVLLDTKNVAISIDAVHFCVKARGVGDNSSTITFASGGILKKTGNNIY

SEQ ID NO: 5607 - protein, 217 aa, unidentified
  source 1..217: note = Blochmannia endosymbiont
  REGION 1..217: note = tr|A0A0E3Y7R0|A0A0E3Y7R0_9ENTR GTP cyclohydrolase 1; OS = Blochmannia endosymbiont of Camponotus (Colobopsis) obliquus OX=1505597 GN=folE PE=3 SV=1
MLGWTKEASLVYDNLLMRGLEVPLSNKKRNNESCKNHIAIHMMKIMTLLNLDMDEDSIMDTPNRIAKMYVEEIFSGLDYLNFPKITILKNKMKVDEMIAIRNISLTSTCEHHFVIFDGKATVAYIPKNSVIGLSKISRIVRFFSQRPQVQERLTQQIFFALQVLLDTNDVAISIDAVHFCIKARGVRDNNTVTTTTSLGGSFKSSENIRREFLYNVI

SEQ ID NO: 5608 - protein, 221 aa, unidentified
  source 1..221: note = Blochmannia floridanus
  REGION 1..221: note = sp|Q7VRX3|GCH1_BLOFL GTP cyclohydrolase 1; OS = Blochmannia floridanus OX=203907 GN=folE PE=3 SV=1
MSTLTQEALLVRNALLLQGLENPIIDLNIDDKIRMNCIESHMISIMHLLKLNLNHDSLLNTPKRVAKMYVEEIFSGLDYLNFPKITIIANTMQISEMITVRNINITSVCEHHFIIFNGKATVSYIPRKSVIGLSKINKIVEFFSKRPQLQERLTQQIFLALQTLLNTNNVAIFINAVHYCVKARGIHDMTSTTNTTALGGLFKSNKSIRKEFLHTITYCNS

SEQ ID NO: 5609 - protein, 221 aa, unidentified
  source 1..221: note = Blochmannia pennsylvanicus
  REGION 1..221: note = sp|Q492J7|GCH1_BLOPB GTP cyclohydrolase 1; OS = Blochmannia pennsylvanicus (strain BPEN) OX=291272; GN = folE PE=3 SV=1
MSILTQEALLVRDALSVRGLENPLIELNINHKIRKRRIENHMRAIVHLLNLDLEHDSLLNTPKRIAKMYIEEIFSGLDYSNFPKIAIIQNTMQINEMITVRGINITSTCEHHFIVFNGKVTISYIPEKNVIGLSKINRIVQFFSKRPQLQERLTKQIFLALQTLLNTDNVAIFIDAVHYCVKARGIHDVSSTTTTTALGGLFESNTNTREEFLHAIMYCNH

SEQ ID NO: 5610 - protein, 221 aa, unidentified
  source 1..221: note = Blochmannia vafer
  REGION 1..221: note = tr|E8Q735|E8Q735_BLOVB GTP cyclohydrolase 1; OS = Blochmannia vafer (strain BVAF) OX=859654 GN=folE PE=3; SV = 1
MSTLTQEALLVRDALLIQGLENPVIELDIDNRIRMNQIEDHMAAIMYLLKLNLNNDSLFHTPKRIAKMYVEEIFSGLDYSNFPKISVIKNTMKINEMITVRNINITSICEHHFIIFNGKATVSYIPENSVIGLSKINKIVQFFSKRPQLQERLTQQIFLALQTLLNTNNVAIFIDAVHYCVKARGIHDITSTTNTTALGGLFKSNENIRREFIHTITYTNS

SEQ ID NO: 5611 - protein, 268 aa, unidentified
  source 1..268: note = Unknown
  REGION 1..268: note = tr|A0A1U9VEU6|A0A1U9VEU6_9RALS GTP cyclohydrolase FolE2 OS=blood disease bacterium A2-HR MARDI OX=1944648; GN = folE2 PE=3 SV=1
MNDMNPAFVMPDVQSSHDTRQIPIQRVGVRGVRYPMSLQTPSGVQSTVGTFNLDVHLPADKKGTHMSRFVALLEEEREPLNLAQFQLLLEKMLEKLEADAGRIEVSFPYFISKTAPVSGVQSLMDYEVTMIGEVRDGHTIVRVKALVPVTSLCPCSKKISQYGAHNQRSHITIDAELAADTPVEALIRMAEEEASCELWGLLKRPDEKFVTERAYENPKFVEDLVRDIAMRLNEDDRIVAYTLEAENFESIHNHSAYALVERDKRRAS

SEQ ID NO: 5612 - protein, 268 aa, unidentified; identical to SEQ ID NO: 5611
  source 1..268: note = Unknown
  REGION 1..268: note = tr|G2ZKE1|G2ZKE1_9RALS GTP cyclohydrolase FolE2; OS = blood disease bacterium R229 OX=741978 GN=folE2 PE=3; SV = 1

SEQ ID NO: 5613 - protein, 202 aa, Bogoriella caseilytica
  REGION 1..202: note = tr|A0A3N2BB21|A0A3N2BB21_9MICO GTP cyclohydrolase 1; OS = Bogoriella caseilytica OX=56055 GN=folE PE=3 SV=1
MSGTPGTVDAGAPQPGRYDAEGVRRAVRDLLTAIGEDPDRQGLSGTPDRVARSYAEMFAGMAEDPADHLEAVFDLGHEEMILARDIPLYSMCEHHLLPFHGVAHVGYLPDATGRVTGLSKLARLVEGYARRPQVQERLTTQVADALVDRLGARGVIVIIEAEHLCMSMRGVRKPGAATVTSAVRGQLRNAATRAEAMSLLKG

SEQ ID NO: 5614 - protein, 184 aa, unidentified
  source 1..184: note = Bombella intestini
  REGION 1..184: note = tr|A0A1S8GNF0|A0A1S8GNF0_9PROT GTP cyclohydrolase 1; OS = Bombella intestini OX=1539051 GN=folE PE=3 SV=1
MSRIASGVRELLLAIGEDPSREGLRDTPERVAKMYLEIFSGLYEDPRDHLKKQFSADQHGGMVLVKDIRFQSTCEHHLLPVMGRAHVAYLPEGGRLTGLSKLARVVEGYARRPQLQERLTDQIVQAMVEVLAPKAVLVVVEAEHMCMSLRGVRSPGATTVTTGSYGLWAEDAQARQEIMALMRD

SEQ ID NO: 5615 - protein, 265 aa, unidentified
  source 1..265: note = Bordetella ansorpii
  REGION 1..265: note = tr|A0A157QBN4|A0A157QBN4_9BORD GTP cyclohydrolase FolE2 OS=Bordetella ansorpii OX=288768 GN=folE2 PE=3 SV=1
MNSPIDPAVVMPDVQSSADTRHITIQRVGIRGVRHPMLVHAGDGSAQPTVGSWTLTVALPPEEKGTHMSRFVALLEKHRTIPMTPASFADMAREMLPLLQAERGDISVTFPYFINKSAPVSGVQSLLDYEVQWIARAVGQQVEFELVVQVPVTSLCPCSKAISEYGAHNQRSHVTVSAVLGGEVAMDQVIRLVEDEASCELWGLLKRPDEKYVTERAYDNPKFVEDLVRDVAARLQTYPGIARFRVEAENFESIHNHSAYAVVEG

SEQ ID NO: 5616 - protein, 265 aa, unidentified
  source 1..265: note = Bordetella ansorpii
  REGION 1..265: note = tr|A0A157SWA6|A0A157SWA6_9BORD GTP cyclohydrolase FolE2 OS=Bordetella ansorpii OX=288768 GN=folE2 PE=3 SV=1
MNSPIDPAVVMPDVQSSADTRHITIQRVGIRGVRHPMLVQAGDGSAQPTVGTWTLTVALPPEEKGTHMSRFVALLEKHRVIPMTPASFADMAREMLPLLQAERGDISTTFPYFINKSAPVSGVQSLLDYEVQWIARAVGQQVEFELVVQVPVTSLCPCSKAISEYGAHNQRSHVTVSAIVDGEIAMDQIIRLVEDEASCELWGLLKRPDEKYVTERAYDNPKFVEDLVRDVAARLQAHPGIARFRVEAENFESIHNHSAYAVVEG

SEQ ID NO: 5617 - protein, 265 aa, Bordetella avium
  REGION 1..265: note = sp|Q2KZ16|GCH4_BORA1 GTP cyclohydrolase FolE2; OS = Bordetella avium (strain 197N) OX=360910 GN=folE2 PE=3; SV = 1
MNSPIDPAIVMPDVQSSADTRHIQIQRVGIRGVRHPMLVVAGDGSAQATVANWTLTVALPAEEKGTHMSRFVALLEKYRATPMTPALFSQMAREMLPLLHAERGDLTAAFPYFINKSAPVSGVQSLLDYEVIWTARAAGDEVEFELRVQVPVTSLCPCSKAISEYGAHNQRSHVTVSAVMEGDVAMDAIIRLVEDEGSCELWGLLKRPDEKYVTERAYDNPKFVEDLVRDVAARLKAHPSVARFCVEAENFESIHNHSAYAVVEG

SEQ ID NO: 5618 - protein, 243 aa, Bordetella avium
  REGION 1..243: note = tr|Q2L1Q0|Q2L1Q0_BORA1 GTP cyclohydrolase; OS = Bordetella avium (strain 197N) OX=360910 GN=folE PE=4; SV = 1
MGALIDSQPGITAETREGTPLSQVIRQRLRKAGVSFRANDNIAAHLREGEADGLQQEVALHIENALRALVIDVDNDHNTHETAKRVAKMFVKEVFSGRYEPPPPITEFPNVGHLNELTLIGPLRVRSACSHHLCPIMGHAWIGILPNANSNLPGLSKYARLLNWVMARPQIQEEAVKQIADLLEEKIGPDGIAVVMEADHYCMHWRGTKDDGARMVSSVMRGRFLEDPALRREFLSLMPKRPG

SEQ ID NO: 5619 - protein, 271 aa, unidentified
  source 1..271: note = Bordetella bronchialis
  REGION 1..271: note = tr|A0A193FYR5|A0A193FYR5_9BORD GTP cyclohydrolase FolE2 OS=Bordetella bronchialis OX=463025 GN=folE2 PE=3; SV = 1
MNSPIDSALVMPDIQSSADTRHIPIQRVGIRGVRHPMLVQAADGSAMATVANWTLTVALPAEEKGTHMSRFVALLEKYRSTPMTPAAFRAMAREMLPLLHAQRGDITAAFPYFINKSAPVSGVQSLMDYEIQWVARAAGNQVEFELTVQVPLTSLCPCSKAISEYGAHNQRSHVTVTALIGDEVGVDELIRLIEDEGSCEVWGLLKRPDEKFVTERAYDNPKFVEDLVRDVAARLSVRAGVARYRVEAENFESIHNHSAYAVVEGEGPARL

SEQ ID NO: 5620 - protein, 181 aa, unidentified
  source 1..181: note = Bordetella bronchialis
  REGION 1..181: note = tr|A0A193FPD8|A0A193FPD8_9BORD GTP cyclohydrolase 1; OS = Bordetella bronchialis OX=463025 GN=folE PE=3 SV=1
MSLEEHYTAILQQLGEDPNREGLRDTPLRAAKAMKYLCRGYDQNLHEIVNGALFSSDTKEIVLVKNIELYSLCEHHILPFIGKAHVAYLPNGKVLGLSKVARIVDMFARRLQIQENLSRQIAEAVQQVTGAAGVAVVIEAQHMCMMMRGVEKQNSSMVTSVMLGEFHENAATRAEFMNLIR

SEQ ID NO: 5621 - protein, 265 aa, Bordetella bronchiseptica
  REGION 1..265: note = sp|Q7WL36|GCH4_BORBR GTP cyclohydrolase FolE2; OS = Bordetella bronchiseptica (strain ATCC BAA-588 / NCTC 13252 / RB50) OX=257310 GN=folE2 PE=3 SV=1
MNSPIDPAIVMPDVQSSTDTRHIPIQRVGIRGVRHPMLVLAGDGAAQPTVANWTLTVALPAEEKGTHMSRFVALLEKYRATPMTPALFAAMAREMLPLLHAERGDITASFPYFINKSAPVSGVQSLLDYEMQWIARAVGEQVEFELVAQVPVTSLCPCSKAISEYGAHNQRSHVTVSAIVDGDFRMDELIRLVEDEASCELWGLLKRPDEKYVTERAYDNPKFVEDLVRDVAARLKAHPGIGRFRVEAENFESIHNHSAYAVVEG

SEQ ID NO: 5622 - protein, 265 aa, Bordetella bronchiseptica
  REGION 1..265: note = tr|A0A3T0P1K2|A0A3T0P1K2_BORBO GTP cyclohydrolase FolE2 OS=Bordetella bronchiseptica OX=518 GN=folE2 PE=3; SV = 1
MNSPIDPAIVMPDVQSSTDTRHIPIQRVGIRGVRHPMLVLAGDGAAQPTVANWTLTVALPAEEKGTHMSRFVALLEKYRATPMTPALFAAMAREMLPLLHAERGDITASFPYFINKSAPVSGVQSLLDYEVQWIARAVGEQVEFELVAQVPVTSLCPCSKAISEYGAHNQRSHVTVSAIVDGDFRMDELIRLVEDEASCELWGLLKRPDEKYVTERAYDNPKFVEDLVRDVAARLTAHPGIGRFRVEAENFESIHNHSAYAVVEG

SEQ ID NO: 5623 - protein, 181 aa, unidentified
  source 1..181: note = Bordetella flabilis
  REGION 1..181: note = tr|A0A193GGG2|A0A193GGG2_9BORD GTP cyclohydrolase 1; OS = Bordetella flabilis OX=463014 GN=folE PE=3 SV=1
MSLEKHYTAILEQLGEDPTREGLRDTPQRAARAMRYLCRGYEQNLDEIVNGALFSSDTREIVLVKNIELYSLCEHHILPFIGKAHVGYLPNGKVLGLSKVARIVDMYARRLQIQENLCRQIAEAVQHVTGAAGVAVIIEAQHMCMMMRGVEKQNSSMVTSVMLGEFHENAATRAEFMNLVR

SEQ ID NO: 5624 - protein, 272 aa, unidentified
  source 1..272: note = Bordetella flabilis
  REGION 1..272: note = tr|A0A193GCN4|A0A193GCN4_9BORD GTP cyclohydrolase FolE2 OS=Bordetella flabilis OX=463014 GN=folE2 PE=3 SV=1
MNSPIDPALIMPDIQSSADTRHIPIQRVGIRGVRHPMLVQAADGSAMATVANWTLTVALPAEEKGTHMSRFVALLEKYRSTPMTPVSFRAMAREMLPLLHAERGDITAAFPLFINKSAPVSGVQSLMDYEVQWIARAAGDQVEFELVVQVPLTSLCPCSKAISEYGAHNQRSHVTVSALIGDAVGVEEIIRLIEDEGSCEVWGLLKRPDEKFVTERAYDNPKFVEDLVRDVAARLTVRTGVGRYRVEAENFESIHNHSAYAVVEGEGPGLAA

SEQ ID NO: 5625 - protein, 265 aa, unidentified
  source 1..265: note = Bordetella genomosp.
  REGION 1..265: note = tr|A0A261SA25|A0A261SA25_9BORD GTP cyclohydrolase FolE2 OS=Bordetella genomosp. 10 OX=1416804 GN=folE2 PE=3; SV = 1
MNSPIDRAIVMPDVQSSADTRHIPIQRVGIRGVRHPMLVQAGDGSAMATVANWTLTVALPAEEKGTHMSRFVALLEKYRSVPMTPALFRAMAREMLPLLHAEKGDITAAFPYFINKSAPVSGVQSLLDYEVQWIARAAGDEVEFELVVQVPVTSLCPCSKAISEYGAHNQRSHVTVSAILGDDVGMDDVIRAVEEEGSCELWGLLKRPDEKFVTERAYDNPKFVEDLVRDVAARMAARQGIRRYRVEAENFESIHNHSAYAVVEG

SEQ ID NO: 5626 - protein, 265 aa, unidentified
  source 1..265: note = Bordetella genomosp.
  REGION 1..265: note = tr|A0A261S6P3|A0A261S6P3_9BORD GTP cyclohydrolase FolE2 OS=Bordetella genomosp. 1 OX=1395607 GN=folE2 PE=3; SV = 1
MNSPIDSAIVMPDIQSSADLRHIPIQRVGIRGVRHPMLIETADGSAQPTVGTWTLTVALPPEEKGTHMSRFIALLEKHRTTPMTPALFADMARDMLPLLQAERGDISATFPYFINKSAPVSGVQSLLDYEVKWIARAEGERVEFELVVLVPVTSLCPCSKAISQYGAHNQRSHVTVSAVLSAEVSMDAVIRLVEDEGSCELWGLLKRPDEKYVTERAYDNPKFVEDLVRDVAARLKALPGIARFTVEAENFESIHNHSAYAVVEG

SEQ ID NO: 5627 - protein, 258 aa, Bordetella hinzii
  REGION 1..258: note = tr|A0A0H4W6Q1|A0A0H4W6Q1_9BORD Putative GTP cyclohydrolase 1 type 2 OS=Bordetella hinzii OX=103855; GN = ACR54_04505 PE=4 SV=1
MKKVDIRALTAWLDATLQAARFKDYAPNGLQVEGKADVAHIITGVTASEALLRAAVERGADAVLVHHGWFWRNEDPRVLGPRRRRLALALAHDLNLIGYHLPLDAHPTLGNNAQLARVLGLEPARDAEDAPLTCGRDGLIWLGTAPGVATLGDLAAQIGERLGRQPLWVGEPDAPVGRVAWCTGGAQGMMAEAVDAGATVYLTGEASEPNTHLARETGVGFISAGHHATERYGVQALGAAVAAQFGIKVEFVDIDNPV

SEQ ID NO: 5628 - protein, 265 aa, Bordetella hinzii
  REGION 1..265: note = tr|A0A0H4WFA7|A0A0H4WFA7_9BORD GTP cyclohydrolase FolE2 OS=Bordetella hinzii OX=103855 GN=folE2 PE=3 SV=1
MNSPIDPAIVMPDVQSSADTRHIPIQRVGIRGVRHPMLVVAGDGSSQPTVANWTLTVALPAEEKGTHMSRFVALLEQYRSTPMTPALFAQMARDMLPLLHAERGDLTASFPYFINKSAPVSGVQSLLDYEVTWTARAAGDQVEFELRVLVPVTSLCPCSKAISEYGAHNQRSHVTVSAILEGEVAMDAIIRLVEDEGSCELWGLLKRPDEKYVTERAYDNPKFVEDLVRDVAARLKAHPSVARFCVEAENFESIHNHSAYAVVEG

SEQ ID NO: 5629 - protein, 265 aa, Bordetella holmesii
  REGION 1..265: note = tr|A0A158M0R4|A0A158M0R4_9BORD GTP cyclohydrolase FolE2 OS=Bordetella holmesii CDC-H585-BH OX=1331206; GN = folE PE=3 SV=1
MNSPIDPAIVMPDVQSSADTRHIPIQRVGIRGVRHPMLVVAGDGDAQPTVANWTLTVALPAEEKGTHMSRFVALLEQYRATPMTPALFSQMARDMLPLLHADRGDLTASFPYFINKSAPVSGVRSLLDYEVTWTARAAGDQVEFELRVLVPVTSLCPCSKAISEYGAHNQRSHVTVSAILGSEVAMDAIIRLVEDEGSCELWGLLKRPDEKYVTERAYDNPKFVEDLVRDVAARLKAHPAVTRFCVEAENFESIHNHSAYAVVEG

SEQ ID NO: 5630 - protein, 265 aa, Bordetella parapertussis; identical to SEQ ID NO: 5621
  REGION 1..265: note = sp|Q7W7P9|GCH4_BORPA GTP cyclohydrolase FolE2; OS = Bordetella parapertussis (strain 12822 / ATCC BAA-587 / NCTC 13253) OX=257311 GN=folE2 PE=3 SV=1

SEQ ID NO: 5631 - protein, 265 aa, Bordetella parapertussis
  REGION 1..265: note = tr|K0MGF7|K0MGF7_BORPB GTP cyclohydrolase FolE2; OS = Bordetella parapertussis (strain Bpp5) OX=1208660; GN = folE2 PE=3 SV=1
MNSPIDPAIVMPDVQSSTDTRHIPIQRVGIRGVRHPMLVLAGDGAAQPTVANWTLTVALPAEEKGTHMSRFVALLEKYRATPMTPALFAAMAREMLPLLHAERGDITASFPYFINKSAPVSGVQSLLDYEMQWIARAVGEQVEFELVAQVPVTSLCPCSKAISEYGAHNQRSHVTVSAIVDGDFRMDELIRLVEDEASCELWALLKRPDEKYVTERAYDNPKFVEDLVRDVAARLKAHPGIGRFRVEAENFESIHNHSAYAVVEG

SEQ ID NO: 5632 - protein, 265 aa, Bordetella pertussis; identical to SEQ ID NO: 5621
  REGION 1..265: note = sp|Q7VV88|GCH4_BORPE GTP cyclohydrolase FolE2; OS = Bordetella pertussis (strain Tohama I / ATCC BAA-589 / NCTC 13251) OX=257313 GN=folE2 PE=3 SV=1

SEQ ID NO: 5633 - protein, 256 aa, Bordetella pertussis
  REGION 1..256: note = tr|A0A171JWR8|A0A171JWR8_BORPT GTP cyclohydrolase FolE2 OS=Bordetella pertussis 2356847 OX=1331248 GN=folE2; PE = 3 SV=1
MMPDVQSSTDTRHIPIQRVGIRGVRHPMLVLAGDGAAQPTVANWTLTVALPAEEKGTHMSRFVALLEKYRATPMTPALFAAMAREMLPLLHAERGDITASFPYFINKSAPVSGVQSLLDYEMQWIARAVGEQVEFELVAQVPVTSLCPCSKAISEYGAHNQRSHVTVSAIVDGDFRMDELIRLVEDEASCELWGLLKRPDEKYVTERAYDNPKFVEDLVRDVAARLKAHPGIGRFRVEAENFESIHNHSAYAVVEG

SEQ ID NO: 5634 - protein, 265 aa, Bordetella petrii
  REGION 1..265: note = sp|A9ITA7|GCH4_BORPD GTP cyclohydrolase FolE2; OS = Bordetella petrii (strain ATCC BAA-461 / DSM 12804 / CCUG 43448) OX=340100 GN=folE2 PE=3 SV=1
MNSPIDPALVMPDVQSSADTRHIPIQRVGIRGVRHPMLVAGADGAPQPTVANWTLTVALPAEEKGTHMSRFVALLEKYRSVPMTPALFAAMARDMLPLLHAERGDITAAFPYFINKSAPVSGVQSLLDYEVQWIARAAGDQVEFELVVQVPVTSLCPCSKAISEYGAHNQRSHVTVSVVLNGDLAMDRIIRLVEDEGSCELWGLLKRPDEKFVTERAYDNPKFVEDLVRDVAARLAAHPGVARYRVEAENFESIHNHSAYAVVEG

SEQ ID NO: 5635 - protein, 265 aa, unidentified
  source 1..265: note = Bordetella pseudohinzii
  REGION 1..265: note = tr|A0A0J6BZN8|A0A0J6BZN8_9BORD GTP cyclohydrolase FolE2 OS=Bordetella pseudohinzii OX=1331258 GN=folE2 PE=3; SV = 1
MNSPIDPAIVMPDVQSSADTRHIPIQRVGIRGVRHPMLVVAGDGSAQPTVANWTLTVALPAEEKGTHMSRFVALLEQYRSTPMTPALFAQMARDMLPLLHAERGDLTASFPYFINKSAPVSGVQSLLDYEVTWTARAAGDQVEFELRVLVPVTSLCPCSKAISEYGAHNQRSHVTVSAILEGEVAMDAIIRLVEDEGSCELWGLLKRPDEKYVTERAYDNPKFVEDLVRDVAARLKAHPSVARFCVEAENFESIHNHSAYAVVEG

SEQ ID NO: 5636 - protein, 265 aa, Bordetella sp.
  REGION 1..265: note = tr|A0A0S1XW29|A0A0S1XW29_9BORD GTP cyclohydrolase FolE2 OS=Bordetella sp. N OX=1746199 GN=folE2 PE=3 SV=1
MNSPIDPALVMPDVQSSADTRHIPIQRVGIRGVRHPMLVQAGDGSAMATVANWTLTVALPAEEKGTHMSRFVALLEKYRSTPMTPALFRAMAREMLPLLHAEKGDITAAFPYFINKSAPVSGVQSLLDYEVQWIARADGTDVEFELVVQVPVTSLCPCSKAISEYGAHNQRSHVTVTAILGDEVGMEDVIRAVEEEGSCELWGLLKRPDEKYVTERAYDNPKFVEDLVRDVAARMAARQGIKRYRVEAENFESIHNHSAYAVVEG

SEQ ID NO: 5637 - protein, 271 aa, Bordetella sp.
  REGION 1..271: note = tr|A0A3T0NDC4|A0A3T0NDC4_9BORD GTP cyclohydrolase FolE2 OS=Bordetella sp. J329 OX=1977852 GN=folE2 PE=3 SV=1
MTSIVESAVVIPDVQSFADVRQIPIQRVGISGVRHPMVVADGSGAAHPTVAEWTLTVALPAEEKGTHMSRFVALLEKYRATPLTPALFSAMAGEMLPLLHAQSGDITASFPYFINKTAPVSGVRSLLDYAVVWTARANGDAVEFELTVTVPVTSLCPCSKSISKYGAHNQRSHVTVRTIVTDEAAFNLDDFISQIEKQGSCELWGLLKRPDEKYVTEHAYENPKFVEDIVRDVAATLNAYAGIAGYRVTVENFESIHNHSAYAVVEGHGKG

SEQ ID NO: 5638 - protein, 265 aa, Bordetella trematum
  REGION 1..265: note = tr|A0A157QVU0|A0A157QVU0_9BORD GTP cyclohydrolase FolE2 OS=Bordetella trematum OX=123899 GN=folE2 PE=3 SV=1
MNSPIDPAIVMPDVQSSLDTRHIPIQRVGIRGVRHPMLVQAGDGSVQPTVANWTLTVALSAEEKGTHMSRFVALLEKYRSIPMTPALFAEMAREMLPLLQAERGDLTATFPYFVNKSAPVSGVQSLLDYETTWVARAAGDQVEFELRVLVPVTSLCPCSKAISEYGAHNQRSHVTVSAILQDEISLDAIIRLVEDEASCELWGLLKRPDEKFVTERAYDNPKFVEDLVRDVAARLKAAPQIARFCVEAENFESIHNHSAYAVVEG

SEQ ID NO: 5639 - protein, 213 aa, unidentified
  source 1..213: note = Bosea lathyri
  REGION 1..213: note = tr|A0A1H5Y2Q9|A0A1H5Y2Q9_9BRAD GTP cyclohydrolase 1; OS = Bosea lathyri OX=1036778 GN=folE PE=3 SV=1
MIPVVKSLSVERALSPSADKFLVKKPTQEQAEEAVRTLILWAGDDPSREGLTETPQRVAKAYKEFYKGYDEDPEVILDRVFEEVDGYRDMVLVRDIPFYSHCEHHMVPFVGKAHIGYYPSEGVVGLSKLARIVDVYARRLQTQESMTAQIAQVIEAALKPRGVAVLIEAEHMCMSMRGVQKQGSSTMTTQYTGLFKDPAEQVRFFTMVKSPGL

SEQ ID NO: 5640 - protein, 213 aa, unidentified
  source 1..213: note = Bosea lupini
  REGION 1..213: note = tr|A0A1H7HZY3|A0A1H7HZY3_9BRAD GTP cyclohydrolase 1; OS = Bosea lupini OX=1036779 GN=folE PE=3 SV=1
MDAVVKSLSADQALRPAADTFLVRKPTREEAEEAVRTLILWAGDDPSREGLLETPGRVAKAYRELYKGYDEDPEEILERVFEEVDGYRDMVLVRDIPFYSHCEHHMVPFVGKVHIGYYPNGGVVGLSKLARVVEVYARRLQTQETMTAQIAQAIERTLKPGGVAVLVEAEHMCMSMRGVQKQGSSTMTTQYTGRFRDPAEQVRFFTMVKSPGL

SEQ ID NO: 5641 - protein, 213 aa, Bosea sp.
  REGION 1..213: note = tr|A0A0N1BAB7|A0A0N1BAB7_9BRAD GTP cyclohydrolase 1; OS = Bosea sp. AAP35 OX=1523417 GN=folE PE=3 SV=1
MNPVVKSLSVERTLGPSADKFLIKQPTQEAAEEAVRTLILWAGDDPSREGLLETPRRVAKAYREFYKGYDEDPDVILDRVFEEVEGYQDMVLVRDIPFYSHCEHHMVPFVGRAHIGYYPAKGVVGLSKLARIVDVYARRLQTQETMTAQIAKVIERALKPRGVAVLIEAEHMCMSMRGVQKQGASTMTTQYTGIFREPAEQVRFFTMVKSPGL

SEQ ID NO: 5642 - protein, 214 aa, Bosea sp.
  REGION 1..214: note = tr|A0A1Q3NV34|A0A1Q3NV34_9BRAD GTP cyclohydrolase 1; OS = Bosea sp. 67-29 OX=1895723 GN=folE PE=3 SV=1
MVPVVKSLSVERPVGPSADKFPVRKPTQEEAEAAVRTLLLWAGDDPSREGLAETPRRVAKAYKEFYKGYAEDPHHILDRVFEEVEDYRDMVLVRDIPFYSHCEHHMVPFVGKAHIGYYPSKGVVGLSKLARIVDVFARRLQTQETMTAQIADVIEAALEPRGVAILVEAEHMCMSMRGVQKQGSSTMTTQYRGLFRDDPAEQLRFFTMVKSPGL

SEQ ID NO: 5643 - protein, 214 aa, Bosea thiooxidans
  REGION 1..214: note = tr|A0A0Q3M4Q1|A0A0Q3M4Q1_9BRAD GTP cyclohydrolase 1; OS = Bosea thiooxidans OX=53254 GN=folE PE=3 SV=1
MIPVVKSLSVEGAVGPSADKFLVRKPTQEEAEAAVRTLILWAGDDPSREGLSDTPRRVAKAYREFYKGYAEDPHHILDRVFEEVEGYQDMVLVRDIPFYSHCEHHMVPFVGKAHIGYYPSKGVVGLSKLARIVDVYARRLQTQESMTSQIADVIEEALEPRGIAILIEAEHMCMSMRGVQKQGSSTMTTQYRGVFRDDPAEQVRFFTMVKSAAL

SEQ ID NO: 5644 - protein, 220 aa, unidentified
  source 1..220: note = Bosea vaviloviae
  REGION 1..220: note = tr|A0A0N1N1C6|A0A0N1N1C6_9BRAD GTP cyclohydrolase 1; OS = Bosea vaviloviae OX=1526658 GN=folE PE=3 SV=1
MNPVVKSMNPVVQPLSVEQALGPSADKFLIKQPTQEQAEEAVRTLILWAGDDPSREGLVETPRRVAKAYKEFYKGYQEDADEILDRVFEEVEGYRDMVLVRDIPFSSHCEHHMVPFVGKAHIGYYPSEGVVGLSKLARIVDVYARRLQTQETMTAQITQTLERVLKPRGVAVLIEAEHMCMSMRGVQKQGSSTMTTQYTGLFREPAEQVRFFTMVKSAGL

SEQ ID NO: 5645 - protein, 213 aa, unidentified
  source 1..213: note = Bosea vaviloviae
  REGION 1..213: note = tr|A0A1D7U6K0|A0A1D7U6K0_9BRAD GTP cyclohydrolase 1; OS = Bosea vaviloviae OX=1526658 GN=folE PE=3 SV=1
MNPVVKSLSVERVLSPSADKFLIKKPTQEQAEEAVRTLILWAGDDPSREGLTDTPRRVTKAYREFYKGYHEDAHEVLERVFEEVEGYKDMVLVRDIPFYSHCEHHMVPFVGKAHIGYYPSKGVVGLSKLARIVDLYARRLQTQETMTAQIAQVIDKVLKPRGVAVLIEAEHMCMSMRGVQKQGSSTMTTQYTGIFKDPAEQVRFFTMVKSPGL

SEQ ID NO: 5646 - protein, 214 aa, Bosea vestrisii
  REGION 1..214: note = tr|A0A543N824|A0A543N824_9BRAD GTP cyclohydrolase 1; OS = Bosea vestrisii OX=151416 GN=folE PE=3 SV=1
MIPVVKSLSVERAVTPSADKFLVGKPTQEEAEAAVRTLILWAGDDPSREGLAETPQRVVKAYKELYKGYGEDPHAILDRVFEEVDGYQDMVLVRDIPFYSHCEHHMVPFVGKAHIGYYPSQGVVGLSKLARIVDLYARRLQTQEAMTAQIADVIEEALKPRGIAVLIEAEHMCMSMRGVQKQGSSTMTTQYRGLFRDDPAEQVRFFTMVKSAGL

SEQ ID NO: 5647 - protein, 366 aa, unidentified
  source 1..366: note = Boseongicola aestuarii
  REGION 1..366: note = tr|A0A238J3V3|A0A238J3V3_9RHOB GTP cyclohydrolase FolE2 OS=Boseongicola aestuarii OX=1470561 GN=folE2 PE=3; SV = 1
MNVHSTDFDREPTRDEAKEALALLRKWAREADTAEIDTLDPAIARLMPSAPEDYPFFTREYAEDFNVDTAYKASLPDLQNGPESLIKGAHRAIQHVGISNFRLPVQFRSTTGAPRTLETSVTGTVSLDADKKGINMSRIMRSFYTHAEEEFSFEVIEAALDDYKTDLESFDARIQMRLSYPMKIESLRSGLSGWQYYDLALEVVDKAGVRTRVLHLDYVYSSTCPCSLELSEHARRTRGQLATPHSQRSVARLSVVIDPSADTLWFEDIVGLCRIAVPTETQVMVKREDEQAFAELNAANPIFVEDAARLFAEQLQSDARIGDFRVVASHQESLHSHDAVSILTEGETFEATSLDPRFFETLFHTG

SEQ ID NO: 5648 - protein, 364 aa, unidentified
  source 1..364: note = Boseongicola sp.
  REGION 1..364: note = tr|A0A4P7J989|A0A4P7J989_9RHOB GTP cyclohydrolase FolE2 OS=Boseongicola sp. CCM32 OX=2552942 GN=folE2 PE=3; SV = 1
MNVHVSQTSEAPSRDDAAEALKMLKAWAETATASEISALHPAASRLLAEQAPKELARDYPDDFTVDAAYKASLPDLQNGPASLIKGANRQIQHVGISNFRLPIRYHTRDNGDLTLETSVTGTVSLEAEKKGINMSRIMRSFYAHADRTFSFEVIEAALDDYKTDLESFDARIQMRLSFPMKVTSLRSGLSGYQYYDIALELVEQGGVRKKIVHLDYVYSSTCPCSLELSEHARNTRGQLATPHSQRSVARLSVEVNCAADCLWFEDLIDMARAAVPTETQVMVKREDEQAFAELNAVNPIFVEDAARLFAEQLQADGRINDFRVVASHQESLHSHDAVSVLTEGKTFAADSLDPKLFATLFHVG

SEQ ID NO: 5649 - protein, 368 aa, unidentified
  source 1..368: note = Boseongicola sp.
  REGION 1..368: note = tr|A0A5D0RMW5|A0A5D0RMW5_9RHOB GTP cyclohydrolase FolE2 OS=Boseongicola sp. HY14 OX=2603819 GN=folE2 PE=3; SV = 1
MTHVSPNLTAVHPDEDEARRALDTLRAWASSADPVEVARLDPAIARLLPAHEVANYPDLSRSYPADFVPDDAYKATMPDLQNGPASLIQGARQLIQHVGISNFRLPIRYHTRDNGDLTLETSVTGTVSLEAEKKGINMSRIMRSFYAHAEKVFSFEVIEAALDDYKTDLDSLDARIEMSFSFPMKVQSLRSGLEGYQYYNIALELVEQGGTRRKFIHLDYVYSSTCPCSLELSEHARQVRGQLATPHSQRSVARISVEVMCDRSCLWFEDLIDLCRDAVPTETQVMVKREDEQAFAELNAANPIFVEDAARLFCERLKDDARVGDFRVVASHQESLHSHDAVSILTEGETFRSQSLDPRLFSTLIHAG

SEQ ID NO: 5650 - protein, 184 aa, Bowmanella sp.
  REGION 1..184: note = tr|A0A4Q9XKH8|A0A4Q9XKH8_9ALTE GTP cyclohydrolase 1; OS = Bowmanella sp. JS7-9 OX=1605368 GN=folE PE=3 SV=1
MSEALTQHYKHIIGLLGEDINREGLQDTPKRAAKAMEFLTGGYHVELNKIINGAVFESDTDEMVIVQDIEFYSLCEHHVLPFIGRCHIAYIPNGKVLGLSKFARIVDMFARRLQIQENLTKQVASTVQEVTGAKGVGVIMEAKHMCMMMRGVQKQNSSMVTSVMLGTMRDSQAARNEFLRLIGK

SEQ ID NO: 5651 - protein, 308 aa, Bowmanella sp.
  REGION 1..308: note = tr|A0A4Q9XLQ8|A0A4Q9XLQ8_9ALTE GTP cyclohydrolase FolE2 OS=Bowmanella sp. JS7-9 OX=1605368 GN=folE2 PE=3 SV=1
MSLIMPDVANQSAALTASTLDRVGMSNIEIPLMLATDESNGRPVSARVSAFVNLIKPEAKGIHMSRLYLLLDELSNHSELTLATLQQLLNDFVSSHEDLSDSAQLIVAFDYHMRRKSLISGKQGWKAYPIVLNGVLSKGKMQVEMQIDVPYSSTCPCSAALARQLIQQSFEQSFSQQEQVNFDQVHAWLGTTQGIVATPHSQRSIADVKVKLDDSVTELPVQALVDVIENALKTPVQAAVKREDEQEFARLNGQNLMFCEDAARKLKNALAAQASYADFYVRVNHLESLHAHDAVAIAVKGIEGGYQA

SEQ ID NO: 5652 - protein, 188 aa, Brachybacterium alimentarium
  REGION 1..188: note = tr|A0A2A3YK20|A0A2A3YK20_9MICO GTP cyclohydrolase 1; OS = Brachybacterium alimentarium OX=47845 GN=folE PE=3 SV=1
MAVDHARVEAAVREILAGIGEDPDRDGLLDTPARVARMYSEVFEGLGQDAHEPLSTTFDIDHQELVLVRDIRFHSMCEHHLLPFMGTAHVGYIPDGGTVTGLSKLARLVNVYARRPQVQERLTFQIADALMSELGAAGAIVVIEAEHMCMSMRGVRAEGARTVTSAVRGMLRESSSTRAEAMSLINRA

SEQ ID NO: 5653 - protein, 205 aa, unidentified
  source 1..205: note = Brachybacterium endophyticum
  REGION 1..205: note = tr|A0A2U2RM35|A0A2U2RM35_9MICO GTP cyclohydrolase 1; OS = Brachybacterium endophyticum OX=2182385 GN=folE PE=3; SV = 1
MTDEATSNGPSTTGDASPLIDGPRVEAAVREILAAIGEDPDRDGLVQTPGRVARMYEEVFEGLGMDAHEPLAVTFGDIEHQELVLVRDIRFHSMCEHHLLPFFGTAHVGYIPGALGVTGLSKIARLVHVYARRPQVQERITSQIADALMEELQAAGAIVVLEAEHMCMSMRGVRAEGAQTVTSAVRGILRKGTTRSEAMSLIMRG

SEQ ID NO: 5654 - protein, 188 aa, Brachybacterium faecium
  REGION 1..188: note = tr|C7MC17|C7MC17_BRAFD GTP cyclohydrolase 1; OS = Brachybacterium faecium (strain ATCC 43885 / DSM 4810 / NCIB 9860) OX=446465 GN=folE PE=3 SV=1
MAVDKPRIEAAVREILAAIGEDPDRDGLLDTPSRVARMYDEVFEGLAQDAREPLSTTFDIEHQELVLVRDIAFYSMCEHHLLPFHGTAHIGYIPGGGVVTGLSKLARLVNIYARRPQVQERLTFQIADALMEELGAGGAIVVIEAEHMCMSMRGVRAAGARTVTSAVRGMLRDSPSTRGEAMALIHRA

SEQ ID NO: 5655 - protein, 187 aa, Brachybacterium faecium
  REGION 1..187: note = tr|A0A2W5CE66|A0A2W5CE66_9MICO GTP cyclohydrolase 1; OS = Brachybacterium faecium OX=43669 GN=folE PE=3 SV=1
MAIDQERIAGAVREILAALGEDPDRDGLKDTPARVARMYAEVFEGLEQDASQPLSTTFDIDHQELVLVRDIRFHSMCEHHLLPFFGVAHVGYIPGAGTVTGLSKLARLVHVYARRPQVQERITSQIADALMDQLGAAGAIVVIEAEHMCMSMRGVRAEGARTVTSAVRGILRDSATRAEAMTLISRG

SEQ ID NO: 5656 - protein, 188 aa, unidentified
  source 1..188: note = Brachybacterium ginsengisoli
  REGION 1..188: note = tr|A0A291GY46|A0A291GY46_9MICO GTP cyclohydrolase 1; OS = Brachybacterium ginsengisoli OX=1331682 GN=folE PE=3; SV = 1
MAMDTPRIEAAVREILAGIGEDPDRDGLRDTPARVARMYAEVFQGLEQDAHEPLSTTFDIDHQELVLVRDIAFYSMCEHHLLPFHGSAHIGYIPGGGGVTGLSKLARLVEIYAHRPQVQERLTVQIADALMDELDAGGAIVVIEAEHMCMSMRGVRAAGARTVTSAVRGMLRENASTRGEAMALIHGS

SEQ ID NO: 5657 - protein, 187 aa, Brachybacterium muris
  REGION 1..187: note = tr|A0A022KUD1|A0A022KUD1_9MICO GTP cyclohydrolase 1; OS = Brachybacterium muris UCD-AY4 OX=1249481 GN=folE PE=3; SV = 1
MVIDQGRIAVAVREILAALGEDPDRDGLRDTPARVARMYAEVFEGLEQDPTQPLSTTFDIDHQELVLVRDIRFHSMCEHHLLPFFGVAHVGYIPGAGSVTGLSKLARLVHVYARRPQVQERITSQIADALMDQLGAAGAIVVIEAEHMCMSMRGVRAEGARTVTSAVRGILRDSATRAEAMTLISRG

SEQ ID NO: 5658 - protein, 186 aa, Brachybacterium nesterenkovii
  REGION 1..186: note = tr|A0A1X6X0S2|A0A1X6X0S2_9MICO GTP cyclohydrolase 1; OS = Brachybacterium nesterenkovii OX=47847 GN=folE PE=3 SV=1
MVDQARIEAAVREILVAIGEDPERDGLVKTPGRVARMYAEVFAGIGADAHEPLATHFEIDHDELVLVRDIRFHSMCEHHLLPFFGVAHVGYIPSGGTVTGLSKLARVVDLLARRPQVQERLTTEIADALMAELHAGGAIVVVEAEHMCMSMRGARAQGARTVTSAVRGQLREGATRAEAMSLILRG

SEQ ID NO: 5659 - protein, 214 aa, Brachybacterium paraconglomeratum
  REGION 1..214: note = tr|A0A426SNM8|A0A426SNM8_9MICO GTP cyclohydrolase 1; OS = Brachybacterium paraconglomeratum OX=173362 GN=folE; PE = 3 SV=1
MPPAAPASPVPARATATATTTRRSAEMAVDRPRVEAAVRELLAGIGEDPGRDGLLDTPARVARMYAEVFEGLDQDAHEPLSTTFDIEHQELVLVRDIAFHSMCEHHLLPFHGMAHVGYIPGGGAVTGLSKLARLVHVYARRPQVQERLTFQIADALMDELGAAGAIVVIEAEHMCMSMRGVRAAGARTITSAVRGMLRDNPSTRGEAMALINGR

SEQ ID NO: 5660 - protein, 187 aa, Brachybacterium phenoliresistens
  REGION 1..187: note = tr|Z9JS78|Z9JS78_9MICO GTP cyclohydrolase 1; OS = Brachybacterium phenoliresistens OX=396014 GN=folE PE=3; SV = 1
MSVDHERIRAAVREILAAVGEDPDRDGLKETPARVARMYEEVFAGLDQDPSQPLSTTFDIEHQELVLVRDISFHSMCEHHLLPFMGVVHVGYIPGAGGVTGLSKLARLVHVYARRPQVQERITSQIADALMGELDAAGAIVVVDAEHMCMSMRGVRAQGARTVTSAVRGMLRESATRAEAMSLIVRG

SEQ ID NO: 5661 - protein, 188 aa, Brachybacterium saurashtrense
  REGION 1..188: note = tr|A0A345YLL3|A0A345YLL3_9MICO GTP cyclohydrolase 1; OS = Brachybacterium saurashtrense OX=556288 GN=folE PE=3; SV = 1
MAVDQPRIEAAVREILAAIGEDPERDGLLETPGRVARMYGEVFEGLDQDAREPLATTFDIEHQELVLVRDIAFYSMCEHHLLPFHGTAHVGYIPGGGTVTGLSKLARLVNVYARRPQVQERLTFQIADALMDELNAAGAIVVIEAEHMCMSMRGVRAAGARTVTSAVRGMLRDSASTRGEAMALIHRR

SEQ ID NO: 5662 - protein, 188 aa, Brachybacterium sp.
  REGION 1..188: note = tr|A0A0M8KP10|A0A0M8KP10_9MICO GTP cyclohydrolase 1; OS = Brachybacterium sp. SW0106-09 OX=1704590 GN=folE PE=3; SV = 1
MAVDRPRVEAAVRELLAGIGEDPGRDGLLDTPARVARMYAEVFEGLDQDAHEPLSTTFDIEHQELVLVRDIAFHSMCEHHLLPFHGMAHVGYIPGGGAVTGLSKLARLVHVYARRPQVQERLTFQIADALMDELGAAGAIVVIEAEHMCMSMRGVRAAGARTITSAVRGMLRDNPSTRGEAMALINGR

SEQ ID NO: 5663 - protein, 187 aa, Brachybacterium sp.
  REGION 1..187: note = tr|A0A4P8TKP8|A0A4P8TKP8_9MICO GTP cyclohydrolase 1; OS = Brachybacterium sp. SGAir0954 OX=2571029 GN=folE PE=3; SV = 1
MPVDLDRVAAGVREILAGIGEDPDRDGLRDTPARVARMYAEVFEGLDKDAHEPLSTTFEIDHQELVLVRDIRFHSLCEHHLLPFHGVAHVGYIPGNGRVTGLSKLARLVHVYARRPQVQERITTQIAEALMEELGAAGAIVVLEAEHQCMSMRGVRAEGARTVTSAVRGQLRDGATRAEAMSLIQRG

SEQ ID NO: 5664 - protein, 278 aa, unidentified
  source 1..278: note = Bradymonadales bacterium
  REGION 1..278: note = tr|A0A5B8XSG8|A0A5B8XSG8_9DELT GTP cyclohydrolase FolE2 OS=Bradymonadales bacterium V1718 OX=2600177; GN = folE2 PE=3 SV=1
MRHLLPSLPLESPMEDVQNRSDNREIPIDRVGVTNLRYPIIVWDKANESQSTVATLSLSVHLPHHFKGTHMSRFLEVLNEHRGEFTIKTLPTVIHELKTRLDSEAAHIEARFPYFIEKQAPVTKKTSLLDIEGYFHGASDASGDDFILGVSVPVTSLCPCSKEISDYGAHNQRSTITIEIRMTSAASEHFVWMEDLIEIAEASASAPLYALLKRPDERFVTMQAYDNPAFVEDIARNVAKRLQDDERIGWFRVKCVNQESIHNHDAFSEILWTRPTES

SEQ ID NO: 5665 - protein, 217 aa, unidentified
  source 1..217: note = Bradymonadales bacterium
  REGION 1..217: note = tr|A0A5B8XM32|A0A5B8XM32_9DELT GTP cyclohydrolase 1; OS = Bradymonadales bacterium V1718 OX=2600177; GN = FRD01_02840 PE=3 SV=1
MHPTYSTWPCGDSAGVRALRHSPTLQTGLFGLGQDLTTPERHFQDFLEALGLSAEKDPELAETPRRVSELLADLTASAKLDPPQLSTFPAQNHETVIVEHIEFRSMCVHHMLPFFGTIDIAYIPDARLAGFGGFLRAVEYVSRKPQVQERLVQELADILQDALSPKGLLIRCQARQMCVEMRRDTIAKFTSFASTGELSGGPERESVLNQLAQRSST

SEQ ID NO: 5666 - protein, 222 aa, unidentified; identical to SEQ ID NO: 4158
  source 1..222: note = Bradyrhizobiaceae bacterium
  REGION 1..222: note = tr|F7QQ68|F7QQ68_9BRAD GTP cyclohydrolase 1; OS = Bradyrhizobiaceae bacterium SG-6C OX=709797 GN=folE; PE = 3 SV=1

SEQ ID NO: 5667 - protein, 217 aa, unidentified
  source 1..217: note = Bradyrhizobiaceae bacterium
  REGION 1..217: note = tr|A0A363TGA3|A0A363TGA3_9BRAD GTP cyclohydrolase 1; OS = Bradyrhizobiaceae bacterium OX=2072420 GN=folE PE=3 SV=1
MDAIVKSFPKPAPELSEHVRAAPVSSVPRPSREEAEAAVRTLIAFAGDDPTREGLTDTPRRVASAYEELFRGYRECPAEALARQFSEIGSYDDHVLVREIPFHSHCEHHMVPFVGKAHVAYLPVDRVVGLSKLARVIDIYARRLQTQEHLTAQVATAINEILRPRGVAVMMEAEHLCMSMRGVQKAGVSTVTTQFLGAYRDDPNEQARFLALVRPAR

SEQ ID NO: 5668 - protein, 230 aa, unidentified
  source 1..230: note = Bradyrhizobium arachidis
  REGION 1..230: note = tr|A0A1I7I3W4|A0A1I7I3W4_9BRAD GTP cyclohydrolase 1; OS = Bradyrhizobium arachidis OX=858423 GN=folE PE=3 SV=1
MDATIKSIRPNKPADRQPESRPAELDPAEFLAVAVRADQPRPARAEAEAAVKTLLAYIGENTEREGLLDTPRRVVEAFDELYQGYHQCPAEVLDRTFGETAGYDDFVLVRDIEFTSQCEHHMMPFYGKAHIAYTPVERVVGLSKLARLTDIFARRLQTQEHLTAQIAAAIDEILKPRGVAVLIEAEHTCMSVRGVAKHGASTFTSRFTGMFRDNPAEQARFLSLVRGLQR

SEQ ID NO: 5669 - protein, 208 aa, unidentified
  source 1..208: note = Bradyrhizobium arachidis
  REGION 1..208: note = tr|A0A1I7LHE0|A0A1I7LHE0_9BRAD GTP cyclohydrolase 1; OS = Bradyrhizobium arachidis OX=858423 GN=folE PE=3 SV=1
MKLQARKLERVAVAQAPSDRPDRAEVEQAIRTMIRWAGDDPARDGLRETPDRVARAFEEYFSGYAQDPTEILQKTFEEIEGYDEMIVLRGVRFESHCEHHMAPIVGRAWVAYIPQGRVVGISKLARVVDVYAKRLQIQEKMTAQIANTINDVLRPEGVGVIIKATHHCMTTRGAHKPGTDLVTSRMLGVFRDNALTRQELLGLANSDD

SEQ ID NO: 5670 - protein, 225 aa, Bradyrhizobium betae
  REGION 1..225: note = tr|A0A4Q1VJP5|A0A4Q1VJP5_9BRAD GTP cyclohydrolase 1; OS = Bradyrhizobium betae OX=244734 GN=folE PE=3 SV=1
MDATIKPIRPSKQPESRPAELDPAEFLAAAVRADQPRPARAEAEAAVKTLLAYIGENTGREGLLDTPRRVVEAFDELYQGYHQCPAEVLDRTFGETAGYDDFVLVRDIEFTSQCEHHMMPFYGKAHIAYTPVERVVGLSKLARLTDIFARRLQTQEHMTAQIAAAIDEIMKPRGVAVLIEAEHTCMSVRGVAKHGASTFTSRFTGMFRDNPAEQARFLSLVRGTR

SEQ ID NO: 5671 - protein, 246 aa, Bradyrhizobium canariense; identical to SEQ ID NO: 4157
  REGION 1..246: note = tr|A0A1H1N724|A0A1H1N724_9BRAD GTP cyclohydrolase 1; OS = Bradyrhizobium canariense OX=255045 GN=folE PE=3 SV=1

SEQ ID NO: 5672 - protein, 230 aa, Bradyrhizobium canariense
  REGION 1..230: note = tr|A0A1X3FFC3|A0A1X3FFC3_9BRAD GTP cyclohydrolase 1; OS = Bradyrhizobium canariense OX=255045 GN=folE PE=3 SV=1
MDATIKSIRPNKPSDRQPDSRPAELDPSEFLAAAVRADQPRPARAEAEQAVKTLLAYIGENTNREGLLDTPRRVVEAFDELYQGYHQCPAEVLDRTFGETAGYDDFVLVRDIEFTSQCEHHMMPFYGKAHIAYTPVERVVGLSKLARLTDIFARRLQTQEHMTAQIAAAIDESLKPRGVAVLIEAEHTCMSVRGVAKHGASTFTSRFTGMFRDNPAEQARFLSLVRGLQR

SEQ ID NO: 5673 - protein, 230 aa, unidentified
  source 1..230: note = Bradyrhizobium centrolobii
  REGION 1..230: note = tr|A0A176YK00|A0A176YK00_9BRAD GTP cyclohydrolase 1; OS = Bradyrhizobium centrolobii OX=1505087 GN=folE PE=3 SV=1
MDALIKSIRPNKPSDKQPESRPAELDPAEFLAAAVRADQPRPARAEAEQAVKTLLAYIGENTAREGLLDTPRRVVEAFDELYQGYHQCPAEVLDRTFGETAGYDDFVLVRDIEFTSQCEHHMMPFYGKAHIAYTPVERVVGLSKLARLTDIFARRLQTQEHLTAQIAAAIDEILKPRGVAVLVEAEHTCMSVRGVAKHGATTFTSRFTGMFRDNPAEQGRFLSLVRGTQR

SEQ ID NO: 5674 - protein, 230 aa, unidentified
  source 1..230: note = Bradyrhizobium daqingense
  REGION 1..230: note = tr|A0A562KGB5|A0A562KGB5_9BRAD GTP cyclohydrolase 1; OS = Bradyrhizobium daqingense OX=993502 GN=folE PE=3 SV=1
MDAAIKSIRPNKPSERQPESRPAELDPAEFLAAAVRADQPRPARAEAEAAVKTLLAYIGENTEREGLLDTPRRVVEAFDELYQGYHQCPAEVLDRTFGETAGYDDFVLVRDIEFTSQCEHHMMPFYGKAHIAYTPVERVVGLSKLARLTDIFARRLQTQEHLTAQIAAAIDEILKPRGVAVLIEAEHTCMSVRGVAKHGASTFTSRFTGMFRDNPAEQARFLSLVRGLQR

SEQ ID NO: 5675 - protein, 208 aa, unidentified
  source 1..208: note = Bradyrhizobium daqingense
  REGION 1..208: note = tr|A0A562LUE3|A0A562LUE3_9BRAD GTP cyclohydrolase 1; OS = Bradyrhizobium daqingense OX=993502 GN=folE PE=3 SV=1
MKSQPRRLERVAVAQAPSDRPNRAEVEQAIRTMIRWAGDDPARDGLRETPDRVARAFEEYFSGYAQDPTEILQKTFEEIEGYDEMIVLRGVRFESHCEHHMAPIVGRAWVAYIPQGRVVGISKLARLVDIYAKRLQIQEKMTAQIANTINDVLNPEGVGVIIKATHHCMTTRGAHKPGTDLVTSRMLGVFRDNALTRQELLGLANSDD

SEQ ID NO: 5676 - protein, 229 aa, unidentified
  source 1..229: note = Bradyrhizobium diazoefficiens
  REGION 1..229: note = sp|Q89IW2|GCH1_BRADU GTP cyclohydrolase 1; OS = Bradyrhizobium diazoefficiens (strain JCM 10833 / IAM 13628 / NBRC 14792 / USDA 110) OX=224911 GN=folE PE=3 SV=1
MDATIKSIRPSKPSDRQPESRPAELDPAEFLAAAVRADQPRPARAQAEAAVKTLLAYIGENTEREGLLDTPRRVVEAFDELYQGYHQCPAEVLDRTFGETAGYDDFVLVRDIEFTSQCEHHMMPFYGKAHIAYTPVERVVGLSKLARLTDIFARRLQTQEHLTAQIAAAIDEVLKPRGVAVLIEAEHTCMSVRGVAKHGASTFTSRFTGMFRDNPAEQARFLSLVRGTR

SEQ ID NO: 5677 - protein, 229 aa, unidentified; identical to SEQ ID NO: 5676
  source 1..229: note = Bradyrhizobium diazoefficiens
  REGION 1..229: note = tr|A0A0E4FUL2|A0A0E4FUL2_9BRAD GTP cyclohydrolase 1; OS = Bradyrhizobium diazoefficiens OX=1355477 GN=folE PE=3; SV = 1

SEQ ID NO: 5678 - protein, 205 aa, Bradyrhizobium elkanii
  REGION 1..205: note = tr|A0A1E3EI90|A0A1E3EI90_BRAEL GTP cyclohydrolase 1; OS = Bradyrhizobium elkanii OX=29448 GN=folE PE=3 SV=1
MNPIVHTLDRARAAQTESDKPTRAEVEAAVRTIIRWTGDDPERDGLLETPARVTRSFEEFFAGYDQRPAEILEKTFEEIEGYDEMIALRGIRFESHCEHHMAPIIGQAWVAYIPNGRVVGISKLARVVDIYARRLQIQEKMTAQVANTINDVLKPQGVGVIIKASHHCMTTRGVHKPDTDLVTSRMLGCFRDNALTRQEFLGIAV

SEQ ID NO: 5679 - protein, 205 aa, Bradyrhizobium elkanii
  REGION 1..205: note = tr|A0A4Q4KAD6|A0A4Q4KAD6_BRAEL GTP cyclohydrolase 1; OS = Bradyrhizobium elkanii OX=29448 GN=folE PE=3 SV=1
MNPIVHTLDRARAAQTESDKPTRAEVEAAVRTIIRWTGDDPERDGLLETPARVTRSFEEFFAGYDQRPAEILEKTFEEIEGYDEMIALRGIRFESHCEHHMAPIIGQAWVAYIPNGRVVGISKLARVVDIYARRLQIQEKMTAQIANTINEVLKPQGVGVIIKASHHCMTTRGVHKPDTDLVTSRMLGCFRDNALTRQEFLGIAV

SEQ ID NO: 5680 - protein, 226 aa, unidentified
  source 1..226: note = Bradyrhizobium erythrophlei
  REGION 1..226: note = tr|A0A1H4S6R7|A0A1H4S6R7_9BRAD GTP cyclohydrolase 1; OS = Bradyrhizobium erythrophlei OX=1437360 GN=folE PE=3 SV=1
MDALIKSIRPNKPADAKAGELDPSEFMAAAVRADQPRPSRAEAEDAVKTLLAYIGENTGREGLLDTPRRVVEAYDELYQGYHQCPAEVLNRTFGETAGYDDFVLVRDIEFTSQCEHHMMPFYGRAHIAYTPVERVVGLSKLARLTDIFARRLQTQEHLTAQVAAAIDEVLKPRGVAVLIEAEHTCMSVRGVAKHGASTFTSRFTGMFRDNPAEQQRFLSLVRGPSR

SEQ ID NO: 5681 - protein, 231 aa, unidentified
  source 1..231: note = Bradyrhizobium erythrophlei
  REGION 1..231: note = tr|A0A1N6JSF5|A0A1N6JSF5_9BRAD GTP cyclohydrolase 1; OS = Bradyrhizobium erythrophlei OX=1437360 GN=folE PE=3 SV=1
MDALIKSIRPNKSTDTKAPETRPAELDPAEFLAAAVRADQPRPSRAEAEQAVQTLLGYIGENPAREGLLDTPRRVVEAFDELYQGYHQCPAEVLDRTFGETAGYDDFVLIRDIEFTSQCEHHMMPFYGRAHIAYTPVERVVGLSKLARLTDIFARRLQTQEHLTAQIAAAIDEVLKPRGVAVVIEAEHTCMSVRGVAKHGAMTFTSRFTGMFRDNPAEQARFLSMVRGPNR

SEQ ID NO: 5682 - protein, 230 aa, unidentified
  source 1..230: note = Bradyrhizobium genosp.
  REGION 1..230: note = tr|A0A4Q7FNQ8|A0A4Q7FNQ8_9BRAD GTP cyclohydrolase 1; OS = Bradyrhizobium genosp. SA-3 OX=508868 GN=folE PE=3 SV=1
MDATIKSIRPNKPSDRQPESRPAELDPAEFLSVAVRADQPRPARAEAEAAVKTLLAYIGENTEREGLLDTPRRVVEAFDELYQGYHQCPAEVLDRTFGETAGYDDFVLVRDIEFTSQCEHHMMPFYGKAHIAYTPVERVVGLSKLARLTDIFARRLQTQEHLTAQIAAAIDEILKPRGVAVLIEAEHTCMSVRGVAKHGASTFTSRFTGMFRDNPAEQARFLSLVRGTTR

SEQ ID NO: 5683 - protein, 208 aa, unidentified
  source 1..208: note = Bradyrhizobium genosp.
  REGION 1..208: note = tr|A0A4Q7FPD2|A0A4Q7FPD2_9BRAD GTP cyclohydrolase 1; OS = Bradyrhizobium genosp. SA-3 OX=508868 GN=folE PE=3 SV=1
MKSQVRKLERVAVAQRPTERPARAEVEQAVRTMIRWAGDDPARDGLRDTPDRVARAFEEYFSGYALDPTEILQKTFEEIEGYDEMIVLRGVRFESHCEHHIAPIVGRAWVAYIPQGRVVGISKLARVVDIYAKRLQIQEKMTAQIANTINDVLEPQGVGVIIKATHHCMTTRGAYKPGTDLVTSRMLGVFRDNALTRQELLGLANSDT

SEQ ID NO: 5684 - protein, 208 aa, unidentified
  source 1..208: note = Bradyrhizobium guangdongense
  REGION 1..208: note = tr|A0A410VAZ6|A0A410VAZ6_9BRAD GTP cyclohydrolase 1; OS = Bradyrhizobium guangdongense OX=1325090 GN=folE PE=3; SV = 1
MKSQARRLERVAVAQAPSERPDRAEVEQAIRTMIRWAGDDPARDGLRDTPDRVARAFEEYFSGYAQDPTEILQKTFEEIEGYDEMIVLRGVRFESHCEHHMAPIVGRAWVAYIPQGRVVGISKLARVVDVYAKRLQIQEKMTAQIANTINDVLKPEGVGVIIKATHHCMTTRGAHKPGTDLVTSRMLGVFRDNALTRQELLGLANSDD

SEQ ID NO: 5685 - protein, 230 aa, unidentified
  source 1..230: note = Bradyrhizobium guangdongense
  REGION 1..230: note = tr|A0A410V5P3|A0A410V5P3_9BRAD GTP cyclohydrolase 1; OS = Bradyrhizobium guangdongense OX=1325090 GN=folE PE=3; SV = 1
MDATIKSIRPNKPSDRQPDSRPAELDPAEFLAAAVRADQPRPARAEAEAAVKTLLAYIGENPQREGLIDTPRRVVEAFDELYQGYHQCPAEVLDRTFGETAGYDDFVLVRDIEFTSQCEHHMMPFYGKAHIAYTPVERVVGLSKLARLTDIFARRLQTQEHLTAQIAAAIDEILKPRGVAVLIEAEHTCMSVRGVAKHGASTFTSRFTGMFRDNPAEQARFLSLVRGLQR

SEQ ID NO: 5686 - protein, 230 aa, unidentified
  source 1..230: note = Bradyrhizobium guangzhouense
  REGION 1..230: note = tr|A0A4Q0R4J3|A0A4Q0R4J3_9BRAD GTP cyclohydrolase 1; OS = Bradyrhizobium guangzhouense OX=1325095 GN=folE PE=3; SV = 1
MDAAIKSIRPSKPSDRQPESRPAELDPAEFLAAAVRADQPRPARAEAEAAVKTLLAYIGENTEREGLLDTPRRVVEAFDELYQGYHQCPAEVLDRTFGETAGYDDFVLVRDIEFTSQCEHHMMPFYGKAHIAYTPVERVVGLSKLARLTDIFARRLQTQEHLTAQIAAAIDEILKPRGVAVLIEAEHTCMSVRGVAKHGASTFTSRYTGMFRDNPAEQARFLSMVRGMTR

SEQ ID NO: 5687 - protein, 190 aa, unidentified
  source 1..190: note = Bradyrhizobium guangzhouense
  REGION 1..190: note = tr|A0A4Q0RFG5|A0A4Q0RFG5_9BRAD GTP cyclohydrolase 1; OS = Bradyrhizobium guangzhouense OX=1325095 GN=folE PE=3; SV = 1
MSREDAEEAFRVILRWIGEDPEREGLVDTPRRVVEAYRTYFRGYFEDPTEHLRTTFAETGGYDDMVLLRNIPFRSHCEHHMAPIVGRAWVGYVPAQRVVGISKLARVVDGYSRRLQIQERFTTEIANAIQSELEPKGVAVFVKAEHHCISGRGVQKHGVDLSTSKMIGCFKDDPILRQEFLAMVSADLKP

SEQ ID NO: 5688 - protein, 226 aa, unidentified
  source 1..226: note = Bradyrhizobium huanghuaihaiense
  REGION 1..226: note = tr|A0A562RX89|A0A562RX89_9BRAD GTP cyclohydrolase 1; OS = Bradyrhizobium huanghuaihaiense OX=990078 GN=folE PE=3; SV = 1
MDATIKPIRPNKQLESRPAELDPAEFLAAAVRADQPRPARAEAEQAVKTLLAYIGENPHREGLLDTPRRVVEAFDELYQGYHQCPAEVLDRTFGETAGYDDFVLVRDIEFTSQCEHHMMPFYGKAHIAYTPVERVVGLSKLARLTDIFARRLQTQEHLTAQIAAAIDEILKPRGVAVLIEAEHTCMSVRGVAKHGASTFTSRYTGMFRDNPAEQARFLSMVRGLQR

SEQ ID NO: 5689 - protein, 242 aa, unidentified
  source 1..242: note = Bradyrhizobium icense
  REGION 1..242: note = tr|A0A1B1UFL8|A0A1B1UFL8_9BRAD GTP cyclohydrolase 1; OS = Bradyrhizobium icense OX=1274631 GN=folE PE=3 SV=1
MDALIKSLRPGKPSPSDLKPSEVKSPDVAPETRPAELDPAEFLAAAVRADLPRPSRAEAEHAVHTLLSYIGENPDREGLLDTPRRVVEAFDELYQGYHQCPAEVLDRTFGETAGYDDFVLVRDIEFTSQCEHHMMPFYGKAHIAYTPVERVVGLSKLARLTDIFARRLQTQEHLTAQIAAAIDEVLKPRGVAVLIEAEHTCMSVRGVAKHGAMTFTSRFTGMFRDNPAEQQRFLSLVRGPNR

SEQ ID NO: 5690 - protein, 230 aa, Bradyrhizobium japonicum
  REGION 1..230: note = tr|A0A4Y3YJM5|A0A4Y3YJM5_BRAJP GTP cyclohydrolase 1; OS = Bradyrhizobium japonicum OX=375 GN=folE PE=3 SV=1
MDAAIKSIRPGKPSDRQPESRLAELDPAEFLAAAVRADQPRPARAEAEAAVKTLLAYIGENTAREGLLDTPRRVVEAFDELYQGYHQCPAEVLDRTFGETAGYDDFVLVRDIEFTSQCEHHMMPFYGKAHIAYTPVERVVGLSKLARLTDIFARRLQTQEHMTAQIAAAIDEILKPRGVAVLIEAEHTCMSVRGVAKHGASTFTSRFTGMFRDNPAEQARFLSLVRGTPR

SEQ ID NO: 5691 - protein, 230 aa, Bradyrhizobium japonicum
  REGION 1..230: note = tr|A0A0A3XR21|A0A0A3XR21_BRAJP GTP cyclohydrolase 1; OS = Bradyrhizobium japonicum OX=375 GN=folE PE=3 SV=1
MDAAIKSIRPGKPSDRQPESRPAELDPAEFLAAAVRADQPRPARAEAEAAVKTLLAYIGENTAREGLLDTPRRVVEAFDELYQGYHQCPAEVLDRTFGETAGYDDFVLVRDIEFTSQCEHHMMPFYGKAHIAYTPVERVVGLSKLARLTDIFARRLQTQEHMTAQIAAAIDEILKPRGVAVLIEAEHTCMSVRGVAKHGASTFTSRFTGMFRDNPAEQARFLSLVRGTPR

SEQ ID NO: 5692 - protein, 205 aa, Bradyrhizobium jicamae
  REGION 1..205: note = tr|A0A0R3LTM9|A0A0R3LTM9_9BRAD GTP cyclohydrolase 1; OS = Bradyrhizobium jicamae OX=280332 GN=folE PE=3 SV=1
MNPNVQALDRARASLSDIQKPGRAEVEAAVRTIIRWTGEDPDRDGLRETPARVTRAFEEFFSGYGQDPVEILRKTFEEIEGYDEMIVLRGIRFESHCEHHMAPIVGQAWVAYIPNGRVVGISKLARVVNVYARRLQIQEKMTAQIANTINDVLEPQGVGVIIKASHHCMTTRGVHKPDSDLVTSRMLGCFRDNALTRQEFLGMAT

SEQ ID NO: 5693 - protein, 240 aa, Bradyrhizobium jicamae
  REGION 1..240: note = tr|A0A0R3LFW5|A0A0R3LFW5_9BRAD GTP cyclohydrolase 1; OS = Bradyrhizobium jicamae OX=280332 GN=folE PE=3 SV=1
MDALIKSIRPGKPSDAKPSEVKSPDMAPETRPAELDPAEFLAAAVRADLPRPSRAEAEHAVQTLLSYIGENPGREGLLDTPRRVVEAFDELYQGYHQCPAEVLDRTFGETAGYDDFVLVRDIEFTSQCEHHMMPFYGRAHIAYTPVERVVGLSKLARLTDIFARRLQTQEHLTAQIAAAIDEVLKPRGVAVLIEAEHTCMSVRGVAKHGAMTFTSRFTGMFRDNPAEQQRFLSLVRGPNR

SEQ ID NO: 5694 - protein, 243 aa, Bradyrhizobium lablabi
  REGION 1..243: note = tr|A0A1M7CV27|A0A1M7CV27_9BRAD GTP cyclohydrolase 1; OS = Bradyrhizobium lablabi OX=722472 GN=folE PE=3 SV=1
MDALIKSIRPGKASDLKTSDKPSDAKDQRIPESRPAELDPSEFLAAAVRADQPRPSRAEAEHAVETLLSYIGENPGREGLLDTPRRVVEAFDELYQGYHQCPAEVLNRTFGETAGYDDFVLIRDIEFTSQCEHHMMPFYGKAHIAYTPVERVVGLSKLARLTDIFARRLQTQEHLTAQIAAAIDEILKPRGVAVMIEAEHTCMSVRGVAKHGAMTFTSRFTGMFRDNPAEQARFLSMVRGPNR

SEQ ID NO: 5695 - protein, 205 aa, Bradyrhizobium lablabi
  REGION 1..205: note = tr|A0A0R3MZL8|A0A0R3MZL8_9BRAD GTP cyclohydrolase 1; OS = Bradyrhizobium lablabi OX=722472 GN=folE PE=3 SV=1
MNPNVQALNRARASLSDIQRPGRAEVEAAVRTIIRWTGEDPDRDGLRETPARVTRAFEEFFSGYGQDPVEILRKTFEEIEGYDEMIVLRGIRFESHCEHHMAPIVGQAWVAYIPNGRVVGISKLARVVDVYARRLQIQEKMTAQIANTINDVLEPQGVGVIIKASHHCMTTRGVHKPDSDLVTSRMLGCFRDNALTRQEFLGMAT

SEQ ID NO: 5696 - protein, 229 aa, Bradyrhizobium liaoningense
  REGION 1..229: note = tr|A0A151FMU3|A0A151FMU3_9BRAD GTP cyclohydrolase 1; OS = Bradyrhizobium liaoningense OX=43992 GN=folE PE=3 SV=1
MDAAIKSIRPNKPADRQPESRPAELDPAEFLAAAVRADQPRPARAEAEAAVKTLLAYIGENTEREGLLDTPRRVVEAFDELYQGYHQCPAEVLDRTFGETAGYDDFVLVRDIEFTSQCEHHMMPFYGKAHIAYTPVERVVGLSKLARLTDIFARRLQTQEHLTAQIAAAIDEILKPRGVAVLIEAEHTCMSVRGVAKHGASTFTSRFTGMFRDNPAEQARFLSLVRGTR

SEQ ID NO: 5697 - protein, 208 aa, unidentified
  source 1..208: note = Bradyrhizobium lupini
  REGION 1..208: note = tr|K5CPY0|K5CPY0_RHILU GTP cyclohydrolase 1; OS = Bradyrhizobium lupini HPC(L) OX=1229491 GN=folE PE=3; SV = 1
MDAIVKNFPGAGAKPDVAEARPNQAEAEEAVRVLLRWAGENPAREGLLDTPKRVAKAYRELFAGYELNVQDVLGTTFEEVGGYDDVVLVRDIPFFSHCEHHMVPIVGKAHVAYLPAGRVLGLSKIARVVEIFGRRLQTQENMTAQIARSIEETLKPRGVAVMIDAEHMCMSMRGVNKQGSTTLTTSFTGTFKNDPAEQVRFMTMVRNR

SEQ ID NO: 5698 - protein, 226 aa, unidentified
  source 1..226: note = Bradyrhizobium macuxiense
  REGION 1..226: note = tr|A0A120FKY4|A0A120FKY4_9BRAD GTP cyclohydrolase 1; OS = Bradyrhizobium macuxiense OX=1755647 GN=folE PE=3 SV=1
MDALIKSIRPNKPTDAKTTELDPSEFMAAAVRADQLRPSRAEAEQAVKTLLSYIGEDTGREGLLDTPRRVVEAYDELYQGYHQCPAEVLNRTFGETAGYDDFVLVRDIEFTSQCEHHMMPFYGKAHIAYTPVERVVGLSKLARLTDIFARRLQTQEHLTAQVAAAIDEILKPRGVAVLIEAEHTCMSVRGVAKHGASTFTSRFTGMFRDNPAEQQRFLSLVRGPTR

SEQ ID NO: 5699 - protein, 226 aa, unidentified
  source 1..226: note = Bradyrhizobium macuxiense
  REGION 1..226: note = tr|A0A560L7W1|A0A560L7W1_9BRAD GTP cyclohydrolase 1; OS = Bradyrhizobium macuxiense OX=1755647 GN=folE PE=3 SV=1
MDALIKPIRPNKPADAKPGELDPSEFMAAAVRADQPRPSRAEAEDAVKTLLAYIGENTHREGLLDTPRRVVEAYDELYQGYHQCPAEVLNRTFGETAGYDDFVLVRDIEFTSQCEHHMMPFYGKAHIAYTPVERVVGLSKLARLTDIFARRLQTQEHLTAQVAAAIDEVLKPRGVAVLIEAEHTCMSVRGVAKHGASTFTSRFTGMFRDNPAEQQRFLSLVRGPNR

SEQ ID NO: 5700 - protein, 230 aa, unidentified
  source 1..230: note = Bradyrhizobium manausense
  REGION 1..230: note = tr|A0A0R3E0F3|A0A0R3E0F3_9BRAD GTP cyclohydrolase 1; OS = Bradyrhizobium manausense OX=989370 GN=folE PE=3 SV=1
MDATIKSIRPNKPSDRQPESRPAELDPAEFLAAAVRADQPRPARAEAEAAVKTLLAYIGENTGREGLLDTPRRVVEAFDELYQGYHQCPAEVLDRTFGETAGYDDFVLVRDIEFTSQCEHHMMPFYGKAHIAYTPVERVVGLSKLARLTDIFARRLQTQEHLTAQIAAAIDEILKPRGVAVLIEAEHTCMSVRGVAKHGASTFTSRYTGMFRDNPAEQARFLSMVRGMTR

SEQ ID NO: 5701 - protein, 208 aa, unidentified
  source 1..208: note = Bradyrhizobium nanningense
  REGION 1..208: note = tr|A0A4Q0SE47|A0A4Q0SE47_9BRAD GTP cyclohydrolase 1; OS = Bradyrhizobium nanningense OX=1325118 GN=folE PE=3 SV=1
MKSQVRKLERVAVAQAPVERPDRAEVEQAIRTMIRWAGDDPARDGLRETPDRIARAFEEYFSGYAQDPTEILQKTFEEIEGYDEMIVLRGVRFESHCEHHMAPIVGRAWVAYIPQGRVVGISKLARVVDIYAKRLQIQEKMTAQIANTINDVLKPEGVGVIIKATHHCMTTRGAHKPGTDLVTSRMLGVFRDNALTRQELLGLANSDD

SEQ ID NO: 5702 - protein, 229 aa, unidentified
  source 1..229: note = Bradyrhizobium nanningense
  REGION 1..229: note = tr|A0A4Q0S2T2|A0A4Q0S2T2_9BRAD GTP cyclohydrolase 1; OS = Bradyrhizobium nanningense OX=1325118 GN=folE PE=3 SV=1
MDATIKSIRPGKPSDRQLESRPAELDPAEFLAAAVRADQPRPARAEAEAAVKTLLAYIGENTGREGLLDTPRRVVEAFDELYQGYHQCPAEVLDRTFGETAGYDDFVLVRDIEFTSQCEHHMMPFYGKAHIAYTPVERVVGLSKLARLTDIFARRLQTQEHLTAQIAAAIDEVLKPRGVAVLIEAEHTCMSVRGVAKHGASTFTSRFTGMFRDNPAEQARFLSLVRGTR

SEQ ID NO: 5703 - protein, 208 aa, unidentified
  source 1..208: note = Bradyrhizobium neotropicale
  REGION 1..208: note = tr|A0A176YU35|A0A176YU35_9BRAD GTP cyclohydrolase 1; OS = Bradyrhizobium neotropicale OX=1497615 GN=folE PE=3 SV=1
MGSQARRLERVAVAQMPSERPSRAEVEQAVQTMIRWAGDDPARDGLRETPDRVARAFEEYYSGYALDPTDILQKTFEEIEGYDEMIVLRGVRFESHCEHHMAPIVGRAWVAYIPQGRVVGISKLARVVDIYAKRLQIQEKMTAQIANTINDVLKPEGVGVIIKATHHCMTTRGAHKPGTDLVTSRMLGVFRDNALTRQELLGLANSDA

SEQ ID NO: 5704 - protein, 230 aa, unidentified
  source 1..230: note = Bradyrhizobium neotropicale
  REGION 1..230: note = tr|A0A176ZJX6|A0A176ZJX6_9BRAD GTP cyclohydrolase 1; OS = Bradyrhizobium neotropicale OX=1497615 GN=folE PE=3 SV=1
MDALIKSIRPNKPADKQPESRPAELDPSEFLAVAVRADQPRPARAEAEQAVKTLLAYIGENTQREGLLDTPRRVVEAFDELYQGYHQCPAEVLDRTFGETAGYDDFVLVRDIEFTSQCEHHMMPFYGKAHIAYTPVERVVGLSKLARLTDIFARRLQTQEHLTAQIAAAIDEILKPRGVAVLVEAEHTCMSVRGVAKHGAMTFTSRFTGMFRDNPAEQARFLSLVRGTQR

SEQ ID NO: 5705 - protein, 235 aa, unidentified
  source 1..235: note = Bradyrhizobium oligotrophicum
  REGION 1..235: note = tr|M4ZA98|M4ZA98_9BRAD GTP cyclohydrolase 1; OS = Bradyrhizobium oligotrophicum S58 OX=1245469 GN=folE; PE = 3 SV=1
MDTLIKTLRANKPESKPLDAKLTDARAAELDPAEFLAAAVRPDRARPSRAEAEAAVYTLLNYIGEDPTREGLVDTPRRVVEAYDELYQGYHQCPAEVLDRTFGETAGYDDFVLIRDIEFTSQCEHHMMPFYGRAHIAYTPVERVVGLSKLARLTDIFARRLQTQEHLTAQIAAAIDEVLKPRGVAVMIEAEHTCMSVRGVAKHGAITFTSRFTGMFRDNPAEQGRFLSMVRSPQR

SEQ ID NO: 5706 - protein, 206 aa, unidentified
  source 1..206: note = Bradyrhizobium oligotrophicum
  REGION 1..206: note = tr|M4ZB84|M4ZB84_9BRAD GTP cyclohydrolase 1; OS = Bradyrhizobium oligotrophicum S58 OX=1245469 GN=folE; PE = 3 SV=1
MRETAKTLPFACDPVRVTQDDVEDAIRTILTWIGEDPSREGLSETPARVARAYKSYFAGYAQNPEDYLRKTFEETAGYDEMVLLRNIPFQSHCEHHMAPIIGRAWVGYVPRSRVVGISKLARVVEAYASRLQIQERMTAEIANIIDEVLQPQGVAVVIKAAHHCISSRGVKKHGVDLTTSRMLGCFRTDPMSRQEFLAMVNADLKD

SEQ ID NO: 5707 - protein, 230 aa, unidentified
  source 1..230: note = Bradyrhizobium ottawaense
  REGION 1..230: note = tr|A0A2U8PC42|A0A2U8PC42_9BRAD GTP cyclohydrolase 1; OS = Bradyrhizobium ottawaense OX=931866 GN=folE PE=3 SV=1
MDATIKSIRPNMPSDRQPESRPAELDPAEFLAAAVRADQPRPARAEAEQAVKTLLAYIGENTEREGLLDTPRRVVEAFDELYQGYHQCPAEVLDRTFGETAGYDDFVLVRDIEFTSQCEHHMMPFYGRAHIAYTPVERVVGLSKLARLTDIFARRLQTQEHLTAQIAAAIDEVLKPRGVAVLIEAEHTCMSVRGVAKHGASTFTSRFTGMFRDNPAEQARFLSLVRGLQR

SEQ ID NO: 5708 - protein, 208 aa, unidentified
  source 1..208: note = Bradyrhizobium ottawaense
  REGION 1..208: note = tr|A0A2U8PJ80|A0A2U8PJ80_9BRAD GTP cyclohydrolase 1; OS = Bradyrhizobium ottawaense OX=931866 GN=folE PE=3 SV=1
MKSQVRKLERVAVAQAPVERPDRPEVEQAIRTMIRWAGDDPARDGLRDTPDRVARAFEEYFSGYAQDPTEILQKTFEEIEGYDEMIVLRGVRFESHCEHHIAPIVGRAWVAYIPQGRVVGISKLARVVDIYAKRLQIQEKMTAQIANTINDVLKPEGVGVIIKATHHCMTTRGAHKPGTDLVTSRMLGVFRDNALTRQELLGLANSND

SEQ ID NO: 5709 - protein, 226 aa, Bradyrhizobium pachyrhizi
  REGION 1..226: note = tr|A0A0R3BSS4|A0A0R3BSS4_9BRAD GTP cyclohydrolase 1; OS = Bradyrhizobium pachyrhizi OX=280333 GN=folE PE=3 SV=1
MDALIKSIRPNKPADAKPGELDPSEFMTAAVRADQPRPSRAEAEDAVKTLLAYIGENTGREGLLDTPRRVVEAYDELYQGYHQCPAEVLNRTFGETAGYDDFVLVRDIEFTSQCEHHMMPFYGKAHIAYTPVERVVGLSKLARLTDIFARRLQTQEHLTAQVAAAIDEVLKPRGVAVLIEAEHTCMSVRGVAKHGASTFTSRFTGMFRDNPAEQQRFLSLVRGPNR

SEQ ID NO: 5710 - protein, 205 aa, Bradyrhizobium pachyrhizi
  REGION 1..205: note = tr|A0A0R3D8S6|A0A0R3D8S6_9BRAD GTP cyclohydrolase 1; OS = Bradyrhizobium pachyrhizi OX=280333 GN=folE PE=3 SV=1
MNPIVHALDRARAAQTESDKPTRAEVEAAVRTIIRWTGDDPERDGLLETPARVTRSFEEFFAGYDQRPAEILEKTFEEIEGYDEMIALRGIRFESHCEHHMAPIIGQAWVAYIPNGRVVGISKLARVVDIYARRLQIQEKMTAQIANTINDVLKPQGVGVIIKASHHCMTTRGVHKPDTDLVTSRMLGCFRDNALTRQEFLGIAV

SEQ ID NO: 5711 - protein, 240 aa, unidentified
  source 1..240: note = Bradyrhizobium retamae
  REGION 1..240: note = tr|A0A0R3N0V1|A0A0R3N0V1_9BRAD GTP cyclohydrolase 1; OS = Bradyrhizobium retamae OX=1300035 GN=folE PE=3 SV=1
MDALIKSLRPSKPSDLKPSEVKSPDVAPETRPAELDPAEFLAAAVRADLPRPSRAEAEHAVHTLLSYIGENPDREGLLDTPRRVVEAFDELYQGYHQCPAEVLDRTFGETAGYDDFVLVRDIEFTSQCEHHMMPFYGKAHIAYTPVERVVGLSKLARLTDIFARRLQTQEHLTAQIAAAIDEVLKPRGVAVLIEAEHTCMSVRGVAKHGAMTFTSRFTGMFRDNPAEQARFLSLVRGSNR

SEQ ID NO: 5712 - protein, 230 aa, unidentified
  source 1..230: note = Bradyrhizobium rifense
  REGION 1..230: note = tr|A0A5D3JZV3|A0A5D3JZV3_9BRAD GTP cyclohydrolase 1; OS = Bradyrhizobium rifense OX=515499 GN=folE PE=3 SV=1
MDAAIKSIRPSKPSDKQLESRPAELDPAEFLAAAVRADQPRPARAEAEAAVKTLLAYIGENTGREGLLDTPRRVVEAFDELYQGYHQCPAEVLDRTFGETAGYDDFVLVRDIEFTSQCEHHMMPFYGRAHIAYTPVERVVGLSKLARLTDIFARRLQTQEHLTAQIAAAIDEILKPRGVAVLIEAEHTCMSVRGVAKHGASTFTSRYTGMFRDNPAEQARFLSMVRGMTR

SEQ ID NO: 5713 - protein, 226 aa, unidentified
  source 1..226: note = Bradyrhizobium sacchari
  REGION 1..226: note = tr|A0A560K681|A0A560K681_9BRAD GTP cyclohydrolase 1; OS = Bradyrhizobium sacchari OX=1399419 GN=folE PE=3 SV=1
MDATIKPIRPNKQLESRPAELDPAEFLAAAVRADQPRPARAEAEQAVKTLLAYIGENTEREGLLDTPRRVVEAFDELYQGYHQCPAEVLDRTFGETAGYDDFVLVRDIEFTSQCEHHMMPFYGKAHIAYTPVERVVGLSKLARLTDIFARRLQTQEHLTAQIAAAIDEVLKPRGVAVLIEAEHTCMSVRGVAKHGASTFTSRFTGMFRDNPAEQARFLSLVRGLQR

SEQ ID NO: 5714 - protein, 208 aa, unidentified
  source 1..208: note = Bradyrhizobium shewense
  REGION 1..208: note = tr|A0A1C3UCJ7|A0A1C3UCJ7_9BRAD GTP cyclohydrolase 1; OS = Bradyrhizobium shewense OX=1761772 GN=folE PE=3 SV=1
MTSQVRKLERVAVAQAPVERPDRAEVEQAIRTMIRWAGDDPARDGLRETPDRVARAFEEYFSGYAQDPTEILQKTFEEIEGYDEMIVLRGVRFESHCEHHIAPIVGRAWVAYIPQGRVVGISKLARVVDIYAKRLQIQEKMTAQIANTINDVLKPEGVGVIIKATHHCMTTRGAHKPGTDLVTSRMLGVFRDNALTRQELLGLANSDD

SEQ ID NO: 5715 - protein, 230 aa, unidentified
  source 1..230: note = Bradyrhizobium shewense
  REGION 1..230: note = tr|A0A1C3WGE1|A0A1C3WGE1_9BRAD GTP cyclohydrolase 1; OS = Bradyrhizobium shewense OX=1761772 GN=folE PE=3 SV=1
MDATIKSIRPNKPSDRQPESRPAELDPAEFLAAAVRADQPRPARAEAEQAVKTLLAYIGENTEREGLLDTPRRVVEAFDELYQGYHQCPAEVLDRTFGETAGYDDFVLVRDIEFTSQCEHHMMPFYGRAHIAYTPVERVVGLSKLARLTDIFARRLQTQEHLTAQIAAAIDEVLKPRGVAVLIEAEHTCMSVRGVAKHGASTFTSRFTGMFRDNPAEQARFLSLVRGLQR

SEQ ID NO: 5716 - protein, 206 aa, Bradyrhizobium sp.
  REGION 1..206: note = tr|H0TA04|H0TA04_9BRAD GTP cyclohydrolase 1; OS = Bradyrhizobium sp. STM 3809 OX=551936 GN=folE PE=3 SV=1
MRNTAKKLPFVCDPVTVTQDDVEDAIRTILTWIGEDPTREGLSETPARVARAYKSYFAGYDQNPEDYLRKTFEETAGYDEMVLLRNIPFQSHCEHHMAPIIGRAWVGYVPRSRVVGISKLARVVEAYAARLQIQERMTAEIANIINDVLQPQGVAVVIKAAHHCISSRGVKKHGVDLTTSRMLGCFRTDPMSRQEFLAMVNSDLKD

SEQ ID NO: 5717 - protein, 240 aa, Bradyrhizobium sp.
  REGION 1..240: note = tr|A0A1B9YKU2|A0A1B9YKU2_9BRAD GTP cyclohydrolase 1; OS = Bradyrhizobium sp. LMTR 3 OX=189873 GN=folE PE=3 SV=1
MDALIKSLRPGKPSDLKPSEVKSPDVAPEARPAELDPAEFLAAAVRADLPRPSRAEAEHAVHTLLSYIGENPDREGLLDTPRRVVEAFDELYQGYHQCPAEVLDRTFGETAGYDDFVLVRDIEFTSQCEHHMMPFYGKAHIAYTPVERVVGLSKLARLTDIFARRLQTQEHLTAQIAAAIDEVLKPRGVAVLIEAEHTCMSVRGVAKHGAMTFTSRFTGMFRDNPAEQQRFLSLVRGSNR

SEQ ID NO: 5718 - protein, 226 aa, unidentified
  source 1..226: note = Bradyrhizobium stylosanthis
  REGION 1..226: note = tr|A0A560DWM2|A0A560DWM2_9BRAD GTP cyclohydrolase 1; OS = Bradyrhizobium stylosanthis OX=1803665 GN=folE PE=3 SV=1
MDATIKPIRPTKQPEARPAELDPAEFLAAAVRADQPRPARAEAEAAVKTLLAYIGENTNREGLLDTPRRVVEAFDELYQGYHQCPAEVLDRTFGETAGYDDFVLVRDIEFTSQCEHHMMPFYGKAHIAYTPVERVVGLSKLARLTDIFARRLQTQEHLTAQIAAAIDEILKPRGVAVLIEAEHTCMSVRGVAKHGASTFTSRYTGMFRDNPAEQARFLSMVRGLQR

SEQ ID NO: 5719 - protein, 240 aa, unidentified
  source 1..240: note = Bradyrhizobium valentinum
  REGION 1..240: note = tr|A0A0R3LWT6|A0A0R3LWT6_9BRAD GTP cyclohydrolase 1; OS = Bradyrhizobium valentinum OX=1518501 GN=folE PE=3 SV=1
MDALIKSIRPGKPSEVKPSEVKSPDMAPETRPAELDPAEFLAAAVRADLPRPSRAEAEQAVHTLLSYIGENPGREGLLDTPRRVVEAFDELYQGYHQCPAEVLDRTFGETAGYDDFVLVRDIEFTSQCEHHMMPFYGRAHIAYTPVERVVGLSKLARLTDIFARRLQTQEHLTAQIAAAIDEVLKPRGVAVLIEAEHTCMSVRGVAKHGAMTFTSRFTGMFRDNPAEQQRFLSLVRGPNR

SEQ ID NO: 5720 - protein, 230 aa, unidentified
  source 1..230: note = Bradyrhizobium vignae
  REGION 1..230: note = tr|A0A4Q0QK41|A0A4Q0QK41_9BRAD GTP cyclohydrolase 1; OS = Bradyrhizobium vignae OX=1549949 GN=folE PE=3 SV=1
MDAAIKSIRPNKPSDRQPESRPAELDPAEFLEAAVRADQPRPARAEAEAAVKTLLAYIGENPQREGLLDTPRRVVEAFDELYQGYHQCPAEVLDRTFGETAGYDDFVLVRDIEFTSQCEHHMMPFYGKAHIAYTPVERVVGLSKLARLTDIFARRLQTQEHLTAQIAAAIDEILKPRGVAVLIEAEHTCMSVRGVAKHGASTFTSRFTGMFRDNPAEQARFLSLVRGTTR

SEQ ID NO: 5721 - protein, 208 aa, unidentified
  source 1..208: note = Bradyrhizobium vignae
  REGION 1..208: note = tr|A0A4Q0R1T1|A0A4Q0R1T1_9BRAD GTP cyclohydrolase 1; OS = Bradyrhizobium vignae OX=1549949 GN=folE PE=3 SV=1
MKSQARKLERVAVAQAPSDRPERYEVEQAVRTMIRWAGDDPERDGLRDTPDRVARAFEEYFTGYAQDPTEILQKTFEEIEGYDEMIVLRGVRFESHCEHHIAPIVGRAWVAYIPQGRVVGISKLARVVDIYAKRLQIQEKMTAQIANTINDVLKPQGVGVIIKATHHCMTTRGAHKPGTDLVTSRMLGVFRDNALTRQELLGLANSDD

SEQ ID NO: 5722 - protein, 230 aa, Bradyrhizobium yuanmingense
  REGION 1..230: note = tr|A0A1C3WZ44|A0A1C3WZ44_9BRAD GTP cyclohydrolase 1; OS = Bradyrhizobium yuanmingense OX=108015 GN=folE PE=3 SV=1
MDAAIKSIRPGKPSDRQPENRPAELDPAEFLAAAVRADQPRPARAEAEAAVKTLLAYIGENTEREGLLDTPRRVVEAFDELYQGYHQCPAEVLDRTFGETAGYDDFVLVRDIEFTSQCEHHMMPFYGKAHIAYTPVERVVGLSKLARLTDIFARRLQTQEHLTAQIAAAIDEVLKPRGVAVLIEAEHTCMSVRGVAKHGASTFTSRFTGMFRDNPAEQARFLSLVRGTTR

SEQ ID NO: 5723 - protein, 230 aa, Bradyrhizobium yuanmingense
  REGION 1..230: note = tr|A0A0R3BZN2|A0A0R3BZN2_9BRAD GTP cyclohydrolase 1; OS = Bradyrhizobium yuanmingense OX=108015 GN=folE PE=3 SV=1
MDAAIKSIRPGKPSDRQPESRPAELDPAEFLAAAVRADQPRPARAEAEAAVKTLLAYIGENTEREGLLDTPRRVVEAFDELYQGYHQCPAEVLDRTFGETAGYDDFVLVRDIEFTSQCEHHMMPFYGKAHIAYTPVERVVGLSKLARLTDIFARRLQTQEHLTAQIAAAIDEVLKPRGVAVLIEAEHTCMSVRGVAKHGASTFTSRFTGMFRDNPAEQARFLSLVRGTTR

SEQ ID NO: 5724 - protein, 208 aa, unidentified
  source 1..208: note = Bradyrhizobium zhanjiangense
  REGION 1..208: note = tr|A0A4Q0QY64|A0A4Q0QY64_9BRAD GTP cyclohydrolase 1; OS = Bradyrhizobium zhanjiangense OX=1325107 GN=folE PE=3; SV = 1
MKSQVRKLERVAVAQRPTERPDRAEVEQAVRTMIRWAGDDPARDGLRDTPDRVARAFEEYFSGYALDPTEILQKTFEEIEGYDEMIVLRGVRFESHCEHHIAPIVGRAWVAYIPQGRVVGISKLARVVDIYAKRLQIQEKMTAQIANTINDVLEPQGVGVIIKATHHCMTTRGAYKPGTDLVTSRMLGVFRDNALTRQELLGLANSDT

SEQ ID NO: 5725 - protein, 230 aa, unidentified
  source 1..230: note = Bradyrhizobium zhanjiangense
  REGION 1..230: note = tr|A0A4Q0QH62|A0A4Q0QH62_9BRAD GTP cyclohydrolase 1; OS = Bradyrhizobium zhanjiangense OX=1325107 GN=folE PE=3; SV = 1
MDATIKSIRPNKPSDRQPESRPAELDPAEFLAVAVRADQPRPARAEAEAAVKTLLAYIGENTEREGLLDTPRRVVEAFDELYQGYHQCPAEVLDRTFGETAGYDDFVLVRDIEFTSQCEHHMMPFYGKAHIAYTPVERVVGLSKLARLTDIFARRLQTQEHLTAQIAAAIDEILKPRGVAVLIEAEHTCMSVRGVAKHGASTFTSRFTGMFRDNPAEQARFLSLVRGTTR

SEQ ID NO: 5726 - protein, 194 aa, Branchiibius hedensis
  REGION 1..194: note = tr|A0A2Y8ZLZ9|A0A2Y8ZLZ9_9MICO GTP cyclohydrolase 1; OS = Branchiibius hedensis OX=672460 GN=folE PE=3 SV=1
MSIPPKVDLDRAAAAVRELLLALGEDPDREGLRDTPGRVARAYAEQFAGMWQEPQDVLNRTFDVSHDELVIVRDIELYSTCEHHLVPFHGVAHVGYIPAKSGRVTGLSKIARLVDVYAKRPQVQERLTSQIADALVEHLSAQGVLVVLECEHLCMSMRGVKKPGALTITSAVRGQLRSAATRAEAMSLIAAPRR

SEQ ID NO: 5727 - protein, 194 aa, Branchiibius sp.
  REGION 1..194: note = tr|A0A151C2T6|A0A151C2T6_9MICO GTP cyclohydrolase 1; OS = Branchiibius sp. NY16-3462-2 OX=1807500 GN=folE PE=3; SV = 1
MSIPPKVDLDRAAAAVRELLVALGEDPDREGLRDTPGRVARAYAEQFAGMWQEPQDVLNRTFDVSHDELIIVRDIELYSTCEHHLVPFHGVAHVGYIPAKSGRVTGLSKIARLVDVYAKRPQVQERLTSQIADALVEHLGAQGVLVVLECEHLCMSMRGVKKPGALTMTSAVRGQLRSAATRAEAMSLIATPRR

SEQ ID NO: 5728 - protein, 220 aa, Brenneria alni
  REGION 1..220: note = tr|A0A421DSE8|A0A421DSE8_9GAMM GTP cyclohydrolase 1; OS = Brenneria alni OX=71656 GN=folE PE=3 SV=1
MSSLSKEAVLVHEALMARGLETPLRGELLDRETRKQRIAEHMTEVMNLLSLDLEDDSLAETPHRIAKMYVDEIFSGLDYANFPKITIIENKMKVDEMVTVRDITLTSTCEHHFVTIDGKATVAYIPKDGVIGLSKINRIVQFFSQRPQVQERLTQQILTALQTLLGTSNVAVSIDAVHYCVKARGIRDATSATTTTSLGGLFKSSQNTRQEFLRAVRHHS

SEQ ID NO: 5729 - protein, 220 aa, unidentified
  source 1..220: note = Brenneria goodwinii
  REGION 1..220: note = tr|A0A0G4K2G2|A0A0G4K2G2_9GAMM GTP cyclohydrolase 1; OS = Brenneria goodwinii OX=1109412 GN=folE PE=3 SV=1
MSSLSKEAVMVHEALMARGLETPLRGELLDRETRKQRITEHMTEIMNLLSLDLEDDSLAETPHRIAKMYVDEIFSGLDYANFPKITIIENKMKVDEMVTVRDITLTSTCEHHFVTIDGKATVAYIPKDGVIGLSKINRIVQFFSQRPQVQERLTQQILIALQTLLGTNNVAVSIDAVHYCVKARGIRDATSATTTTSLGGLFKSSQNTRQEFLRAVRHHN

SEQ ID NO: 5730 - protein, 220 aa, Brenneria nigrifluens
  REGION 1..220: note = tr|A0A2U1UUQ2|A0A2U1UUQ2_9GAMM GTP cyclohydrolase 1; OS = Brenneria nigrifluens DSM 30175 = ATCC 13028 OX=1121120; GN = folE PE=3 SV=1
MSSLSKEAVLVHEALMARGLETPLRGELLDRETRKQRIAEHMTEVMNLLSLDLQDDSLAETPHRIAKMYVDEIFSGLDYANFPKITIIENKMKVDEMVTVRDITLTSTCEHHFVTIDGKATVAYIPKEGVIGLSKINRIVQFFSQRPQVQERLTQQILIALQTLLGTSNVAVCIDAVHYCVKARGIRDATSATTTTSLGGLFKSSQNTRQEFLRAVRHHG

SEQ ID NO: 5731 - protein, 220 aa, unidentified
  source 1..220: note = Brenneria roseae
  REGION 1..220: note = tr|A0A2U1TLT1|A0A2U1TLT1_9GAMM GTP cyclohydrolase 1; OS = Brenneria roseae subsp. americana OX=1508507 GN=folE; PE = 3 SV=1
MSSLSKEAVLVHEALMARGLETPLRGQLLDRETRKQRITEHMTEIMNLLSLDLEDDSLAETPHRIAKMYVDEIFSGLDYANFPKITIIENKMKVDEMVTVRDITLTSTCEHHFVMIDGKATVAYIPKDGVIGLSKINRIVQFFSQRPQVQERLTQQILIALQTLLGTSNVAVSIDAVHYCVKARGIRDATSATTTTSLGGLFKSSQNTRQEFLRAVRHHN

SEQ ID NO: 5732 - protein, 220 aa, Brenneria rubrifaciens
  REGION 1..220: note = tr|A0A4P8QZV6|A0A4P8QZV6_9GAMM GTP cyclohydrolase 1; OS = Brenneria rubrifaciens OX=55213 GN=folE PE=3 SV=1
MSSLSKEAVLVHEALMARGLETPLRGQLLDRETRKQRITEHMTEIMNLLSLDLEDDSLAETPHRIAKMYVDEIFSGLDYANFPKITIIENKMKVDEMVTVRDITLTSTCEHHFVMIDGKATVAYIPKDGVIGLSKINRIVQFFSQRPQVQERLTQQILIALQTLLGTSNVAVSIDAVHYCVKARGVRDATSATTTTSLGGLFKSSQNTRQEFLRAVRHHS

SEQ ID NO: 5733 - protein, 220 aa, Brenneria salicis
  REGION 1..220: note = tr|A0A366HX93|A0A366HX93_9GAMM GTP cyclohydrolase 1; OS = Brenneria salicis ATCC 15712 = DSM 30166 OX=714314; GN = folE PE=3 SV=1
MSSLSKEAVLVHEALMARGLETPLRGQLLDRETRKQRFTEHMTEIMNLLSLDLDDDSLAETPNRIAKMYVDEIFSGLDYANFPKITIIENKMKVDEMVTVRDITLTSTCEHHFVMIDGKATVAYIPKDGVIGLSKINRIVQFFSQRPQVQERLTQQILIALQTLLGTSNVAVSIDAVHYCVKARGIRDATSATTTTSLGGLFKSSQNTRQEFLRAVRHTD

SEQ ID NO: 5734 - protein, 220 aa, Brenneria sp.; identical to SEQ ID NO: 5730
  REGION 1..220: note = tr|A0A2U1U6S7|A0A2U1U6S7_9GAMM GTP cyclohydrolase 1; OS = Brenneria sp. CFCC 11842 OX=2173106 GN=folE PE=3 SV=1

SEQ ID NO: 5735 - protein, 221 aa, Brenneria sp.
  REGION 1..221: note = tr|A0A5J5G324|A0A5J5G324_9GAMM GTP cyclohydrolase I FolE OS=Brenneria sp. L3-3HA OX=2590031 GN=folE PE=4 SV=1
MSSSLSKEATLVHQALLARGLETPLRGQMLDSETRKRRITEHMTGIMNLLSLDLSDDSLAETPQRIAKMYVDEIFSGLDYANFPKITIIENKMKVDEMVTVRDITLTSTCEHHFVTIDGKATVAYIPKDGVIGLSKINRIVQFFSQRPQVQERLTQQILIALQTLLGTSNVAVSIDAVHYCVKARGIRDATSATTTTSLGGLFKSSQNTRQEFLRAVRHHN

SEQ ID NO: 5736 - protein, 211 aa, Breoghania corrubedonensis
  REGION 1..211: note = tr|A0A2T5VD23|A0A2T5VD23_9RHIZ GTP cyclohydrolase 1; OS = Breoghania corrubedonensis OX=665038 GN=folE PE=3 SV=1
MDAVVKAANNKDKDMAAQRPDMDARPTRAQAEDAVRTLLAYIGEDVTREGLIETPQRVIRAYDEFFKGYDEAATDYLGTIFDEVNGYDDIVLLRDIPFYSHCEHHMVPFIGHAHIAYYPKGGVVGLSKLARVIDVYARRLQTQENLSAEIATAIETALQPRGLAVMIEAEHQCMSLRGVQKAGVTTVTTRFTGVFRDNPAEQARFMTLLRR

SEQ ID NO: 5737 - protein, 208 aa, Breoghania sp.
  REGION 1..208: note = tr|A0A346R3N9|A0A346R3N9_9RHIZ GTP cyclohydrolase 1; OS = Breoghania sp. L-A4 OX=2304600 GN=folE PE=3 SV=1
MDAILNSPAKTGPTSDKQPAPKPSREEAEAAVRTLLAWIGEDPDREGLIDTPKRVVKAYGEFFRGYQDDSANHLGTIFEEVGGYDDIVLVRNIPFYSHCEHHMVPFIGVAHVAYYPNEGVIGLSKIARVVEVFARRLQTQENLTMEIVTALDTALAPRGIAVMIEAEHQCMSLRGVQKSGVSTLTTQFTGVFRDDPNEQTRFMTMIRG

SEQ ID NO: 5738 - protein, 212 aa, unidentified
  source 1..212: note = Brevefilum fermentans
  REGION 1..212: note = tr|A0A1Y6K385|A0A1Y6K385_9CHLR GTP cyclohydrolase 1; OS = Brevefilum fermentans OX=1986204 GN=folE PE=3 SV=1
MSINCNDPLVLSADLFCDEPMDIDTIEAAVKNILSAIGEDVEREGLERTPHRVANSYNELLAGYRMDPRELINDAIFDVAYDQMVIVRDIEFYSMCEHHMLPFMGRAHVAYIPSDKVIGLSKIPRIVDLFSRRLQVQERMTTQIAEYLDVVLKPKGVAVVVEGLHMCMMLRGVKKHDARMTTSAMLGAFRKDISTRMEFLDNISRGAEKLHF

SEQ ID NO: 5739 - protein, 187 aa, Brevibacillus agri
  REGION 1..187: note = tr|A0A3M8AQM0|A0A3M8AQM0_9BACL GTP cyclohydrolase 1; OS = Brevibacillus agri OX=51101 GN=folE PE=3 SV=1
MNVDLDKIQQAVRMILEAVGDNPDREGLLDTPKRVAKMYAEVFEGMHINEEQYFETVFSEDHEEMVLVKDIPFYSMCEHHLVPFFGKAHVAYVPRGGRVVGLSKLARAVDTVAKRPQLQERITTTIADSIVRKLDPHGVIVVVEAEHMCMTMRGVKKPGSKTVTSAVRGMFEKDAAARAEVFSLIRS

SEQ ID NO: 5740 - protein, 186 aa, Brevibacillus borstelensis
  REGION 1..186: note = tr|M8DJ63|M8DJ63_9BACL GTP cyclohydrolase 1; OS = Brevibacillus borstelensis AK1 OX=1300222 GN=folE PE=3; SV = 1
MNVDLEKIQTAVRMILEAIGENPDREGLLDTPKRVAKMYAEAFEGLGIDEEKYFETVFSEDHEEMVLVKDIPFYSMCEHHLVPFFGKAHVAYIPRGGRVVGLSKLARAVETVARRPQLQERITAHVADAIVRKLDPHGVVVVVEAEHMCMTMRGVKKPGSKTVTSAVRGIFANDPAARAEVFSLIK

SEQ ID NO: 5741 - protein, 187 aa, Brevibacillus brevis
  REGION 1..187: note = sp|C0ZCC7|GCH1_BREBN GTP cyclohydrolase 1; OS = Brevibacillus brevis (strain 47 / JCM 6285 / NBRC 100599) OX=358681 GN=folE PE=3 SV=1
MMNVDLDKIQQAVRMILEAVGDDPDREGVLDTPKRVAKMYAEVFEGMHIDEEQYFETVFSEDHEEMVLVKDIPFYSMCEHHLVPFFGKAHVAYVPRGGRVVGLSKLARAVDTVAKRPQLQERITATVADSIMRKLDPHGVVVVVEAEHMCMTMRGVKKPGSKTITSAVRGMFEKDAAARAEVISLMR

SEQ ID NO: 5742 - protein, 187 aa, Brevibacillus brevis
  REGION 1..187: note = tr|A0A517IGT3|A0A517IGT3_BREBE GTP cyclohydrolase 1; OS = Brevibacillus brevis OX=1393 GN=folE PE=3 SV=1
MNVDLDKIQQAVRMILEAVGDDPNREGVLDTPKRVAKMYAEVFEGMHIDEDQYFETVFSEDHEEMVLVKDIPFYSMCEHHLVPFFGKAHVAYVPRGGRVVGLSKLARAVDTVAKRPQLQERITSTVADAIMRKLDPHGVVVVVEAEHMCMTMRGVKKPGSKTITSAVRGMFEKDAAARAEVFSLIRS

SEQ ID NO: 5743 - protein, 187 aa, Brevibacillus choshinensis
  REGION 1..187: note = tr|A0A0Q3WQL2|A0A0Q3WQL2_BRECH GTP cyclohydrolase 1; OS = Brevibacillus choshinensis OX=54911 GN=folE PE=3 SV=1
MNVDLDKIQQAVRMILEAVGENPDREGLLDTPKRVAKMYAEVFEGMHINEQDYFETVFSEDHEEMVLVKDIPFYSMCEHHLVPFFGKAHVAYVPRGGRVVGLSKLARAVDTVARRPQLQERITSTVADAIVKKLDPHGVVVVVEAEHMCMTMRGVRKPGSKTVTSAVRGMFEKDAAARAEVFSLIRP

SEQ ID NO: 5744 - protein, 187 aa, Brevibacillus fluminis
  REGION 1..187: note = tr|A0A3M8D358|A0A3M8D358_9BACL GTP cyclohydrolase 1; OS = Brevibacillus fluminis OX=511487 GN=folE PE=3 SV=1
MSVDHEKIKQAVRMILEAVGEDPDREGLLDTPKRVAKMYAEAFEGLRVDEEQYFETIFSENHEELVLVKDIPFYSMCEHHLVPFFGKAHVAYIPKGGRVVGLSKLARAVETVSRRPQLQERITSTVADAIMKKLQPHGVLVVVEAEHMCMTMRGVKKPGAKTVTSAARGTFETDTAQRAEVLSLIKD

SEQ ID NO: 5745 - protein, 186 aa, Brevibacillus formosus
  REGION 1..186: note = tr|A0A4Y4HTG1|A0A4Y4HTG1_9BACL GTP cyclohydrolase 1; OS = Brevibacillus formosus OX=54913 GN=folE PE=3 SV=1
MNVDLDKIQQAVRMILEAVGDDPDREGVLDTPKRVAKMYAEVFEGMHIDEEQYFETVFSEDHEEMVLVKDIPFYSMCEHHLVPFFGKAHVAYVPRGGRVVGLSKLARAVDTVAKRPQLQERITATVADAIMRKLDPHGVVVVVEAEHMCMTMRGVKKPGSKTITSAVRGMFEKDAAARAEVISLMR

SEQ ID NO: 5746 - protein, 186 aa, Brevibacillus formosus
  REGION 1..186: note = tr|A0A220MER6|A0A220MER6_9BACL GTP cyclohydrolase 1; OS = Brevibacillus formosus OX=54913 GN=folE PE=3 SV=1
MNVDLDKIQQAVRMILEAVGDNPDREGVLDTPKRVAKMYAEVFEGMHIDEEQYFETVFSEDHEEMVLVKDIPFYSMCEHHLVPFFGKAHVAYVPRGGRVVGLSKLARAVDTVAKRPQLQERITATVADAIMRKLDPHGVVVVVEAEHMCMTMRGVKKPGSKTITSAVRGMFEKDAAARAEVISLMR

SEQ ID NO: 5747 - protein, 187 aa, unidentified
  source 1..187: note = Brevibacillus gelatini
  REGION 1..187: note = tr|A0A3M8B735|A0A3M8B735_9BACL GTP cyclohydrolase 1; OS = Brevibacillus gelatini OX=1655277 GN=folE PE=3 SV=1
MNVDLDKIQQAVRMILEAVGDDPDREGLLDTPKRVAKMYAEVFEGMHINEEQYFETVFSEDHEEMVLVKDIPFYSMCEHHLVPFFGKAHVAYIPRGGRVVGLSKLARAVDTVAKRPQLQERITTTIADSIVRKLDPHGVIVVLEAEHMCMTMRGVKKPGSKTVTSAVRGIFEKDPAARAEVFSLIRS

SEQ ID NO: 5748 - protein, 194 aa, unidentified
  source 1..194: note = Brevibacillus gelatini
  REGION 1..194: note = tr|A0A3M8AIQ0|A0A3M8AIQ0_9BACL GTP cyclohydrolase 1; OS = Brevibacillus gelatini OX=1655277 GN=folE PE=3 SV=1
MQPLVTSNRIQNDVIEESIRNILKEIGENPEREGLLDTPKRVAKMYREVFSGVGVNPETALTTTFEEQYNGMITVKDITYYTFCEHHIIPFYGKAHIGYIPDGRIVGLSKFARLVELVSQRPQVQERMTTQIADAIWNVLNPKGVIVTVEGTHLCMCARGIKKPGTATVTTVKKGLFAENPALCEEFDRSLARQ

SEQ ID NO: 5749 - protein, 187 aa, Brevibacillus invocatus
  REGION 1..187: note = tr|A0A3M8CIE1|A0A3M8CIE1_9BACL GTP cyclohydrolase 1; OS = Brevibacillus invocatus OX=173959 GN=folE PE=3 SV=1
MNVDLEKIQQAVRMILEAVGDNPDREGLLDTPKRVAKMYAEVFEGMHINEEVYFETVFSEDHEEMVLVKDIPFYSMCEHHLVPFFGKAHVAYIPRGGRVVGLSKLARAVDTVAKRPQLQERITATVADAMMRKLDPHGVVVVVEAEHMCMTMRGIKKPGSKTITSAVRGIFEKDAAARAEVFSLIRV

SEQ ID NO: 5750 - protein, 187 aa, Brevibacillus laterosporus
  REGION 1..187: note = tr|A0A075R404|A0A075R404_BRELA GTP cyclohydrolase 1; OS = Brevibacillus laterosporus LMG 15441 OX=1042163 GN=folE; PE = 3 SV=1
MNVDHEKIKQAVRMILEAVGEDPDREGLLDTPKRVAKMYAEAFEGMNVDEETYFETIFSEDHEEIVLVKDIPFYSMCEHHLVPFFGKAHVAYIPKGGRVVGLSKLARAVETVARRPQLQERITSTVANAIMKKLEPHGVMVMVEAEHMCMTMRGVKKPGSSTVTTAVRGVFEKDANARAEVLQYIKA

SEQ ID NO: 5751 - protein, 187 aa, Brevibacillus laterosporus; identical to SEQ ID NO: 5750
  REGION 1..187: note = tr|H0UA05|H0UA05_BRELA GTP cyclohydrolase 1; OS = Brevibacillus laterosporus GI-9 OX=1118154 GN=folE PE=3; SV = 1

SEQ ID NO: 5752 - protein, 187 aa, unidentified
  source 1..187: note = Brevibacillus nitrificans
  REGION 1..187: note = tr|A0A3M8DLR9|A0A3M8DLR9_9BACL GTP cyclohydrolase 1; OS = Brevibacillus nitrificans OX=651560 GN=folE PE=3 SV=1
MNVDLDKIQQAVRMILEAVGDNPDREGLLDTPKRVAKMYAEVFEGMHINEEDYFETVFSEDHEEMVLVKDIPFYSMCEHHLVPFFGKAHVAYIPKGGRVVGLSKLARAVDTVARRPQLQERITSTVADAIVSKLDPHGVVVVVEAEHMCMTMRGVKKPGSKTVTSAVRGLFKEDAAARAEVFSLIRP

SEQ ID NO: 5753 - protein, 187 aa, Brevibacillus panacihumi
  REGION 1..187: note = tr|V6MC05|V6MC05_9BACL GTP cyclohydrolase 1; OS = Brevibacillus panacihumi W25 OX=1408254 GN=folE PE=3; SV = 1
MNVDMEKIQQAVRMILEAVGDNPDREGLLDTPKRVAKMYAEVLEGMHINEEVYFETVFSEEHEEMVMVKDIPFYSMCEHHLVPFFGKAHVAYIPRGGRVVGLSKLARAVDVVAKRPQLQERITSTVADSMMRKLDPHGVVVVIEAEHMCMTMRGIKKPGSKTITSAVRGIFEKDAAARAEVFSLIRV

SEQ ID NO: 5754 - protein, 187 aa, Brevibacillus panacihumi
  REGION 1..187: note = tr|A0A3M8DCH1|A0A3M8DCH1_9BACL GTP cyclohydrolase 1; OS = Brevibacillus panacihumi OX=497735 GN=folE PE=3 SV=1
MNVDMEKIQQAVRMILEAVGDNPDREGLLDTPKRVAKMYAEVFEGMHINEEVYFETVFSEEHEEMVMVKDIPFYSMCEHHLVPFFGKAHVAYIPRGGRVVGLSKLARAVDVVAKRPQLQERITSTVADSMMRKLDPHGVVVVIEAEHMCMTMRGIKKPGSKTITSAVRGIFEKDAAARAEVFSLMRV

SEQ ID NO: 5755 - protein, 187 aa, Brevibacillus parabrevis
  REGION 1..187: note = tr|A0A4Y3PE45|A0A4Y3PE45_BREPA GTP cyclohydrolase 1; OS = Brevibacillus parabrevis OX=54914 GN=folE PE=3 SV=1
MNVDLDKIQQAVRMILEAVGENPDREGLLDTPKRVAKMYAEVFEGMHINEEQYFETVFSEDHEEMVLVKDIPFYSMCEHHLVPFFGKAHVAYVPRGGRVVGLSKLARAVEAVAKRPQLQERITTTIAESIVRKLDPHGVIVVVEAEHMCMTMRGVKKPGSKTITSAVRGMFEKDAAARAEVFSLIRS

SEQ ID NO: 5756 - protein, 187 aa, Brevibacillus reuszeri
  REGION 1..187: note = tr|A0A0K9YQY6|A0A0K9YQY6_9BACL GTP cyclohydrolase 1; OS = Brevibacillus reuszeri OX=54915 GN=folE PE=3 SV=1
MNVDLDKIKQAVRMILEAVGEDPDREGLLDTPKRVAKMYAEVFEGMHIDEQKYFETVFSEDHEEMVLVKDIPFYSMCEHHLVPFFGKAHVAYIPKGGRVVGLSKLARAVDTVARRPQLQERITTTVADAIVSKLDPHGVVVVVEAEHMCMTMRGVKKPGSKTITSAVRGVFEKDAAARAEVFSLIRS

SEQ ID NO: 5757 - protein, 188 aa, Brevibacillus sp.
  REGION 1..188: note = tr|A0A553KTS8|A0A553KTS8_9BACL GTP cyclohydrolase 1; OS = Brevibacillus sp. LEMMJ03 OX=2595056 GN=folE PE=3 SV=1
MKEVDLEKIQQAVRMIIEAIGDDPDRDGLLDTPKRVAKMYAEVFEGMRINEEEYFETVFSEDHEEMVLVKDIPFYSMCEHHFVPFFGKAHVAYIPRGGRVVGLSKLARAVEAVARRPQLQERITSTVADAIVRKLDPHGVVVVVEAEHMCMTMRGVKKPGSKTVTSAVRGIFANDAAARAEVFSLIRT

SEQ ID NO: 5758 - protein, 187 aa, Brevibacillus sp.; identical to SEQ ID NO: 5752
  REGION 1..187: note = tr|A0A1I3YWB0|A0A1I3YWB0_9BACL GTP cyclohydrolase 1; OS = Brevibacillus sp. OK042 OX=1884381 GN=folE PE=3 SV=1

SEQ ID NO: 5759 - protein, 207 aa, Brevibacterium antiquum
  REGION 1..207: note = tr|A0A2H1IPR7|A0A2H1IPR7_9MICO GTP cyclohydrolase 1; OS = Brevibacterium antiquum OX=234835 GN=folE PE=3 SV=1
MSELEEVTEVLGEAPAGTGNKVDQPRIAAAVREILIAVGEDPDREGLLETPARVARAYEEVFAGLHRDAADVMSVTFDISHEEMVLVRDIDLYSMCEHHLVPFHGVAHIGYIPSKNGKVTGLSKLARLVEIYARRPQVQERLTTQIADALVEHLEPQGAIVVVEAEHLCMTMRGVRKPGASTITSAVRGQLRETASRAEAMSLIIRR

SEQ ID NO: 5760 - protein, 207 aa, Brevibacterium antiquum
  REGION 1..207: note = tr|A0A2H1IZZ2|A0A2H1IZZ2_9MICO GTP cyclohydrolase 1; OS = Brevibacterium antiquum CNRZ 918 OX=1255637 GN=folE; PE = 3 SV=1
MSELEEVTEVLGEAPAGTGNKVDQPRIAAAVREILIAVGEDPDREGLLETPARVARAYEEVFAGLHRDAADVLGVTFDISHEEMVLVRDIDLYSMCEHHLAPFHGVAHIGYIPSKNGKVTGLSKLARLVEIYARRPQVQERLTTQIADALVEHLEPQGAIVVVEAEHLCMTMRGVRKPGASTITSAVRGQLRETASRAEAMSLIIRR

SEQ ID NO: 5761 - protein, 198 aa, Brevibacterium aurantiacum
  REGION 1..198: note = tr|A0A3Q8T1C2|A0A3Q8T1C2_9MICO GTP cyclohydrolase 1; OS = Brevibacterium aurantiacum OX=273384 GN=folE PE=3 SV=1
MLGEAPAGTGNKVDQARIAAAVREILIAVGEDPDREGLVETPDRVARAYEEVFAGLHRDPAEVLGVTFDISHEEMVLVRDIDLYSTCEHHLVPFHGVAHIGYIPSKNGKVTGLSKLARLVEIYARRPQVQERLTTQIADALVEHLEPQGAIVVVEAEHLCMTMRGVRKPGASTITSAVRGQLRETASRAEAMSLILRR

SEQ ID NO: 5762 - protein, 207 aa, Brevibacterium aurantiacum
  REGION 1..207: note = tr|A0A1D7W161|A0A1D7W161_9MICO GTP cyclohydrolase 1; OS = Brevibacterium aurantiacum OX=273384 GN=folE PE=3 SV=1
MSELEGVPEILGEAPAGTGNKVDQARIAAAVREILIAVGEDPDREGLVETPDRVARAYEEVFAGLHRDPAEVLGVTFDISHEEMVLVRDIDLYSTCEHHLVPFHGVAHIGYIPSKNGKVTGLSKLARLVEIYARRPQVQERLTTQIADALVEHLEPQGAIVVVEAEHLCMTMRGVRKPGASTITSAVRGQLRETASRAEAMSLILRR

SEQ ID NO: 5763 - protein, 204 aa, Brevibacterium casei
  REGION 1..204: note = tr|A0A163AV07|A0A163AV07_9MICO GTP cyclohydrolase 1; OS = Brevibacterium casei OX=33889 GN=folE PE=3 SV=1
MTDYVFSDLGETAEERPTIDHDRIAAAVREILFAVGENPDREGLQETPARVARAYEEIFAGLHRDPAEILSVTFDISHEEMVLVRDIDLYSMCEHHLVPFHGVAHVGYIPAKNGKVTGLSKLARLVEVYARRPQVQERLTSQIADALMKHLEPQGAIVVVEAEHLCMTMRGVRKPGASTITSAVRGQLREPASRAEAMSLILRG

SEQ ID NO: 5764 - protein, 204 aa, Brevibacterium casei; identical to SEQ ID NO: 5763
  REGION 1..204: note = tr|A0A2H1IV67|A0A2H1IV67_9MICO GTP cyclohydrolase 1; OS = Brevibacterium casei CIP 102111 OX=1255625 GN=folE PE=3; SV = 1

SEQ ID NO: 5765 - protein, 205 aa, Brevibacterium celere
  REGION 1..205: note = tr|A0A366IF78|A0A366IF78_9MICO GTP cyclohydrolase 1; OS = Brevibacterium celere OX=225845 GN=folE PE=3 SV=1
MPELDDLSAALDSAGLPGAAVDQERIAAAVREILIAVGEDPDRDGLVETPARVARAYAEIFAGLHRDPSEVLGVTFDIAHEEMVLVRDIDLYSTCEHHLVPFHGVAHIGYIPNKQGRVTGLSKLARLVEIFARRPQVQERLTAQIADALVEHLEPQGVIVVVEAEHLCMTMRGVRKPGASTITSAVRGQLREPASRAEAMSLILR

SEQ ID NO: 5766 - protein, 201 aa, unidentified
  source 1..201: note = [Brevibacterium] flavum
  REGION 1..201: note = tr|A0A0F6SRS5|A0A0F6SRS5_9CORY GTP cyclohydrolase 1; OS = [Brevibacterium] flavum OX=92706 GN=folE PE=3 SV=1
MKETTVDNHAAVREFDEERATAAIRELLIAVGEDPDREGLLETPARVARAYKETFAGLHEDPTTVLEKTFSEGHEELVLVREIPIYSMCEHHLVPFFGVAHIGYIPGKSGKVTGLSKLARLADMFAKRPQVQERLTSQIADALVEKLDAQAVAVVIEAEHLCMAMRGIRKPGAVTTTSAVRGGFKNNAASRAEVFSLIRGH

SEQ ID NO: 5767 - protein, 188 aa, unidentified
  source 1..188: note = [Brevibacterium] frigoritolerans
  REGION 1..188: note = tr|A0A4R6AGR8|A0A4R6AGR8_9BACI GTP cyclohydrolase 1; OS = [Brevibacterium] frigoritolerans OX=450367 GN=folE PE=3; SV = 1
MGQINTQQIEEAVRLILEAIGENPNREGLLDTPKRVAKMYAEVFSGLNEDPKEHFKTVFGEDHEELVLVKDIPFHSMCEHHLVPFFGKAHIAYIPKGGKVTGLSKLARAVEAVCRRPQLQERITSTIADSIVDSLEPHGVMVVVEAEHMCMTMRGVKKPGSKTVTSAVRGVFVKDPAARAEVLSFIKE

SEQ ID NO: 5768 - protein, 188 aa, unidentified
  source 1..188: note = [Brevibacterium] frigoritolerans
  REGION 1..188: note = tr|A0A3Q9SKE1|A0A3Q9SKE1_9BACI GTP cyclohydrolase 1; OS = [Brevibacterium] frigoritolerans OX=450367 GN=folE PE=3; SV = 1
MANVDHAKLEEAVKMLLEAVGEDPTREGLLDTPARVARMYEEIFSGLNQDPKEYFDTVFGEDHEELVLVKDIPFYSVCEHHLVPFYGKAHVAYIPKNGKVTGLSKLARAVEAVSKRPQLQERITSTVADSIMEKLEPHGVMVVVEAEHMCMTMRGVKKPGSKTVTSAVRGTFAKDHRTRAEVLAFIKD

SEQ ID NO: 5769 - protein, 207 aa, Brevibacterium iodinum
  REGION 1..207: note = tr|A0A2H1J2R3|A0A2H1J2R3_9MICO GTP cyclohydrolase 1; OS = Brevibacterium iodinum ATCC 49514 OX=1255616 GN=folE; PE = 3 SV=1
MADIEEVSAGLGPAPAGQDNKVDQERIAAAVREILIAVGEDPDREGLVETPGRVARAYEEIFAGLHRDPAEVLGVTFDISHEELVLVRDIDLYSTCEHHLVPFHGVAHIGYIPSKNGKITGLSKLARLVEIYARRPQVQERLTSQIADALVDHLEPQGVIVVVEAEHLCMTMRGVRKPGASTITSAVRGQLRESASRAEAMSLILGR

SEQ ID NO: 5770 - protein, 188 aa, unidentified
  source 1..188: note = Brevibacterium jeotgali
  REGION 1..188: note = tr|A0A2H1L2E6|A0A2H1L2E6_9MICO GTP cyclohydrolase 1; OS = Brevibacterium jeotgali OX=1262550 GN=folE PE=3 SV=1
MTVDHARIEAAVREILLAVGEDPDRDGLTETPARVARAYEEAFEGLSQDAADVLGVQFDIGFDEMVLVRDIALYSTCEHHLVPFHGAAHIGYIPGAEGRVTGLSKLARLVDVFARRPQVQERLTTQIADALVAHLQPRGAIVVVEAEHLCMSMRGVKKPGSSTITSAVRGQLRNAASRSEAMSLILRR

SEQ ID NO: 5771 - protein, 207 aa, Brevibacterium linens
  REGION 1..207: note = tr|A0A3Q9P4J7|A0A3Q9P4J7_BRELN GTP cyclohydrolase 1; OS = Brevibacterium linens OX=1703 GN=folE PE=3 SV=1
MADIEEVSAGLGPAPSGQENKVDRERIAAAVREILIAVGEDPDREGLLETPGRVARAYEEIFAGLHRDPAEVLGVTFDISHEELVLVRDIDLYSTCEHHLVPFHGVAHIGYIPSRNGKVTGLSKLARLVEIYARRPQVQERLTSQIADALVDHLEPQGVIVVIEAEHLCMTMRGVRKPGASTITSAVRGQLRESASRAEAMSLILGR

SEQ ID NO: 5772 - protein, 207 aa, Brevibacterium linens
  REGION 1..207: note = tr|A0A142NLM7|A0A142NLM7_BRELN GTP cyclohydrolase 1; OS = Brevibacterium linens OX=1703 GN=folE PE=3 SV=1
MADIEEVSAGLGPAPSGQENKVDQARIAAAVREILIAVGEDPDREGLLETPDRVARAYEEIFAGLHRDPAEVLGVTFDISHEELVLVRDIDLYSTCEHHLVPFHGVAHIGYIPSKNGKVTGLSKLARLVEIYARRPQVQERLTSQIADALVEHLDPQGVIVVVEAEHLCMTMRGVRKPGASTITSAVRGQLRESASRAEAMSLILGR

SEQ ID NO: 5773 - protein, 234 aa, Brevibacterium luteolum
  REGION 1..234: note = tr|A0A2N6PIX8|A0A2N6PIX8_9MICO GTP cyclohydrolase 1; OS = Brevibacterium luteolum OX=199591 GN=folE PE=3 SV=1
MKASRAPRDSRDRPSRRSPRTRVSRASPRIRVNPASRRRAPGRTGAEMVDQPRIEAAVREILLAVGEDPDRDGLRDTPARVARSYEEVFSGLHKDAADVLRVVFDVGYDEMVLVRDIEMYSTCEHHLVPFHGSAHIGYIPGPEGKVTGLSKLARLVEIYARRPQIQERLTSQIADAIVEHLEPRGAIVVIEAEHLCMSMRGVQKPGATTISSAVRGQLRDAASRAEAMSLILGR

SEQ ID NO: 5774 - protein, 188 aa, Brevibacterium mcbrellneri
  REGION 1..188: note = tr|D4YMQ7|D4YMQ7_9MICO GTP cyclohydrolase 1; OS = Brevibacterium mcbrellneri ATCC 49030 OX=585530 GN=folE; PE = 3 SV=1
MVDQPRIEAAVREILYAIGEDPNRDGLQETPGRVARAYAELFAGIGQDPAEVLSTTFEIGHDEMVLVRNIEMFSTCEHHLLPFHGVAHVGYIPNTSGRVTGLSKLARLVELYARRPQVQERLTGQIADALMEHLEPRGAIVVIEAEHLCMSMRGVDKAGASTITSAVRGSLRKPTSRAEAMSLIRGTT

SEQ ID NO: 5775 - protein, 188 aa, Brevibacterium paucivorans
  REGION 1..188: note = tr|A0A2N6VMQ1|A0A2N6VMQ1_9MICO GTP cyclohydrolase 1; OS = Brevibacterium paucivorans OX=170994 GN=folE PE=3 SV=1
MVDQPRIEAAVREILHAIGEDPGRDGLQETPGRVARAYAELFAGIGQDPAEVLSTTFEIGHDEMVLVRNIEMFSTCEHHLLPFHGIAHVGYIPNTSGRVTGLSKLARLVELYARRPQVQERLTGQIADALMEHLEPRGAIVVIEAEHLCMSMRGVDKAGASTITSAVRGSLRKPTSRAEAMSLIRGTT

SEQ ID NO: 5776 - protein, 282 aa, Brevibacterium ravenspurgense
  REGION 1..282: note = tr|A0A150H8U3|A0A150H8U3_9MICO Putative GTP cyclohydrolase 1 type 2 OS=Brevibacterium ravenspurgense; OX = 479117 GN=Bravens_01306 PE=4 SV=1
MRDVMNVCEQLWPNNLAEDWDSVGLAVGDPEAPVTHVHCALDPSDEVIAEAVELGADFLFTHHPLLLRGVTSVAADTLKGGAVHTLIRSGIAQFNAHTNADSALGGVSDVLAEILQLREVEPLVQNPDAEAGVGLGRVGTVEPTTVEDIAVRLAQGVDLSVRGIAIGGDPGAEVTRVAVLGGAGDSMFGEARKAGAQLYITSDLRHHPASEALDTGSRGGPLEHLIDISHYSAESAWIPRAAVQLDEALRAGGHSVEVTVSGVCSDPWTAVVLPDSEEWQWN

SEQ ID NO: 5777 - protein, 187 aa, Brevibacterium ravenspurgense
  REGION 1..187: note = tr|A0A150H905|A0A150H905_9MICO GTP cyclohydrolase 1; OS = Brevibacterium ravenspurgense OX=479117 GN=folE PE=3; SV = 1
MADLPKIEAAVRSILEAIGEDPDRDGLKDTPKRVAKSYADLCRGLGQTADDLLEVSFDIGYDEMVLVKDIEMFSMCEHHLLPFHGKAHVGYIPGPEGRVTGLSKLARLVEVYARRPQVQERLTTQIADALVDNLNARGVIVVVEAEHLCMSMRGVQKPGAKTLTSAVRGQLRDPASRAEAISLIQGG

SEQ ID NO: 5778 - protein, 207 aa, Brevibacterium sandarakinum
  REGION 1..207: note = tr|A0A1H1MR05|A0A1H1MR05_9MICO GTP cyclohydrolase 1; OS = Brevibacterium sandarakinum OX=629680 GN=folE PE=3 SV=1
MSELEEVTEVLGEAPAGTGNKVDQPRIAAAVREILIAVGEDPDREGLLETPARVARAYEEVFAGLHRDPADVLGMTFDISHEEMVLVRDIDLYSMCEHHLVPFHGVAHIGYIPSKNGKVTGLSKLARLVEIYARRPQVQERLTTQIADALVDHLEPQGVIVVVEAEHLCMTMRGVRKPGASTITSAVRGQLRETASRAEAMSLILRR

SEQ ID NO: 5779 - protein, 207 aa, unidentified
  source 1..207: note = Brevibacterium siliguriense
  REGION 1..207: note = tr|A0A1H1X4I1|A0A1H1X4I1_9MICO GTP cyclohydrolase 1; OS = Brevibacterium siliguriense OX=1136497 GN=folE PE=3 SV=1
MADIEEVSAGLGPAPSGHENKVDQARIAAAVREILIAVGEDPDREGLLETPDRVARAYEEIFAGLHRDPAEVLGVTFDISHEELVLVRDIDLYSTCEHHLVPFHGVAHIGYIPSKNGKITGLSKLARLVEIYARRPQVQERLTAQIADALVDHLDPQGVIVVVEAEHLCMTMRGVRKPGASTITSAVRGQLRESASRAEAMSLILGR

SEQ ID NO: 5780 - protein, 188 aa, Brevibacterium sp.
  REGION 1..188: note = tr|A0A2H1HN03|A0A2H1HN03_9MICO GTP cyclohydrolase 1; OS = Brevibacterium sp. Mu109 OX=1255669 GN=folE PE=3 SV=1
MTVDHARIEAAVREILLAVGEDPDRDGLVNTPARVARAYEESFAGLSQDAADILGVQFDIGFDEMVLVRDIALYSTCEHHLVPFHGAAHIGYIPGPEGRVTGLSKLARLVEVFARRPQVQERLTTQIADALVTHLQPRGAIVVVEAEHLCMSMRGVKKPGSSTITSAVRGQLRNAASRSEAMSLILRR

SEQ ID NO: 5781 - protein, 207 aa, Brevibacterium sp.
  REGION 1..207: note = tr|A0A4Z0K4K0|A0A4Z0K4K0_9MICO GTP cyclohydrolase 1; OS = Brevibacterium sp. S22 OX=2483794 GN=folE PE=3 SV=1
MADIEEVSAGLGPAPAGQENKVDQERIAAAVREILIAVGEDPDREGLVETPGRVARAYEEIFAGLHRDPAEVLGVTFDLSHEELVLVREIDLYSTCEHHLVPFHGVAHIGYIPSRNGKVTGLSKLARLVEIYARRPQVQERLTSQIADALVDHLDPQGVIVVVEAEHLCMTMRGVRKPGASTITSAVRGQLRDSASRAEAMSLILGR

SEQ ID NO: 5782 - protein, 188 aa, unidentified
  source 1..188: note = Brevibacterium yomogidense
  REGION 1..188: note = tr|A0A1X6XHJ1|A0A1X6XHJ1_9MICO GTP cyclohydrolase 1; OS = Brevibacterium yomogidense OX=946573 GN=folE PE=3 SV=1
MTVDHARIEAAVREILLAVGEDPDRDGLVDTPARVARAYEESFAGLSQDAADILGVQFDIGFDEMVLVRDIALYSTCEHHLVPFHGAAHIGYIPGPEGRVTGLSKLARLVEVFARRPQVQERLTTQIADALVTHLQPRGAIVVVEAEHLCMSMRGVKKPGSSTITSAVRGQLRNAASRSEAMSLILRR

SEQ ID NO: 5783 - protein, 270 aa, unidentified
  source 1..270: note = Brevifollis gellanilyticus
  REGION 1..270: note = tr|A0A512MC23|A0A512MC23_9BACT GTP cyclohydrolase FolE2 OS=Brevifollis gellanilyticus OX=748831 GN=folE2; PE = 3 SV=1
MPALKDTQNERDDRRLPIDRVGVKDVRFPLRIRDRDQATQHTVATVNMAVDLPHHYKGTHMSRFLEVLHAHGRELTVSSIAAMPQELMTRLHAQKAHVEMRFPYFRAKRAPVTKAEGLLDYGVVFEVNAEGEAIDYVVTVEVPVATLCPCSKAISERGAHNQRGLVTLSVRFRQPIWIEDLIELVESSASCELYSVLKRPDEKAVTERAYDNPVFVEDLVRNVAMKAGAHKLIKWFRVEAVNYESIHNHNAWAVIERRVTRGTEGQQEGV

SEQ ID NO: 5784 - protein, 375 aa, unidentified
  source 1..375: note = Brevirhabdus pacifica
  REGION 1..375: note = tr|A0A1U7DH95|A0A1U7DH95_9RHOB GTP cyclohydrolase FolE2 OS=Brevirhabdus pacifica OX=1267768 GN=folE2 PE=3; SV = 1
MNVHTPKVALAPDREEAERALETLRNWAASAAPEEVAQLDPRVSRLLPSDSLSNYPPLSRHYPDAFQADADYRRTLPDLQNGPASLIRGAQRQIQHVGISDFRLPIRYHTREGHERGEGPGSDLHLETSVTGTVSLEAGKKGINMSRLMRTFYRRAEETFSFEVIEAALDDYKADLESLDARIQMRFSFPMKVDSLRSGLQGYQYYDIALELNESNGVRKKMLHLDYVYSSTCPCSLELSEHARQFRGQLATPHSQRSIARVSVELLPHMPCLWFEDLIEMCREAVPTETQVMVKREDEQAFAELNAANPIFVEDAARLFCERLRSDPRIGDFRIIASHQESLHSHDAVSVLVEGATFETESLDPRLFHTLGRHG

SEQ ID NO: 5785 - protein, 204 aa, unidentified
  source 1..204: note = Brevundimonas abyssalis
  REGION 1..204: note = tr|U2YSA9|U2YSA9_9CAUL GTP cyclohydrolase 1; OS = Brevundimonas abyssalis TAR-001 OX=1391729 GN=folE PE=3; SV = 1
MDLQAKPVLVSNDGDIKRPSREQAMDAVRTLIAWAGDNPEREGLIDTPKRVVDAYGDWFQAMTPTPRRSLSRTFEDVQGYDDMVLLRDIEVESHCEHHMAPFLGKAYVAYVPAEKVVGISKLARVVEIFSKRLQTQETLTQLIAQAIEDNLLPAGTAVLIDAEHQCMTTRGVHHRHVSTITTRFTGVFKSDPTLQDRFLKLARG

SEQ ID NO: 5786 - protein, 205 aa, unidentified
  source 1..205: note = Brevundimonas abyssalis
  REGION 1..205: note = tr|U2YRN3|U2YRN3_9CAUL GTP cyclohydrolase 1; OS = Brevundimonas abyssalis TAR-001 OX=1391729 GN=folE PE=3; SV = 1
MDPHRHDPLWTPHDRRQHPRLPDRRRSRRAHPDPLGRRRSRPRRLIDTPARVARSYRELFAGYEVDPREYLERTFQEVGGYDELVILKDIRFVSFCEHHMLPVVGKAHVAYLPTDRVVGISKLARVVRGFARRLQIQEKMTADIARTIHEVLRPEGVGVIIEAEHSCMTMRGVDVPGASLITSHLIGVVRDDPRTREEFMRLARG

SEQ ID NO: 5787 - protein, 196 aa, Brevundimonas diminuta
  REGION 1..196: note = tr|A0A246KB74|A0A246KB74_BREDI GTP cyclohydrolase 1; OS = Brevundimonas diminuta OX=293 GN=folE PE=3 SV=1
MSDQTPSSPAVSQEEAEAAVRTLIRWAGDNPAREGLIETPKRVAKSYRELFQGYEVEPRDYLEKTFEEVGGYDELVVLKDIRFVSFCEHHMLPVVGKAHVAYLPTDRVVGISKLARVVRGYARRLQIQEKMTSEIANAIQDVLRPHGVGVVIEAEHSCMTMRGVDVPGASLSTSCLLGAVREDPRTREEFLRLVRG

SEQ ID NO: 5788 - protein, 204 aa, Brevundimonas diminuta
  REGION 1..204: note = tr|A0A246KJ13|A0A246KJ13_BREDI GTP cyclohydrolase 1; OS = Brevundimonas diminuta OX=293 GN=folE_2 PE=3 SV=1
MSSTPAKPVLVANEAPQRPSREQALEAVRTLIAWAGDNPDRPGLLDTPKRVVDAYGEWFDGYDADAGKELSRTFEDVTGYDDMVILRDIEVESHCEHHLAPFLGKAYVAYLPGEKVVGISKLARVVEIFARRLQNQETLTNDIIDAIESHLQPRGVAVLVDAAHQCMTTRGVHHRHVSTITTRFTGAFKNDPALAERFLKLARG

SEQ ID NO: 5789 - protein, 194 aa, Brevundimonas intermedia
  REGION 1..194: note = tr|A0A4Y9RS25|A0A4Y9RS25_9CAUL GTP cyclohydrolase 1; OS = Brevundimonas intermedia OX=74315 GN=folE PE=3 SV=1
MTDARTTKVSQADAEAAVRTLIEWAGDNPDREGLLETPARVARSYRELFEGYEVDPLSYLEKTFEETGGYDQLVVLKDIRFVSFCEHHMLPVVGKAHVAYLPTDRVVGISKLARVVRGFARRLQIQEKMTSEIAEAIQTVLKPHGVGVVIEAEHSCMTLRGVNAPGASLSTSHLIGVVRDDPRTREEFLRLVRG

SEQ ID NO: 5790 - protein, 205 aa, Brevundimonas intermedia
  REGION 1..205: note = tr|A0A4Y9RUS7|A0A4Y9RUS7_9CAUL GTP cyclohydrolase 1; OS = Brevundimonas intermedia OX=74315 GN=folE PE=3 SV=1
MSVIPAKPVLVSSDETVVRPSREQALEAVRTLIAWAGDNPNRPGLIDTPKRVVDAYGEWFDGYDADAGKELSRTFEDVTGYDDMVILRDIEVESHCEHHMAPFLGKAYVAYLPGEKVVGISKLARVVEIYARRLQNQETLTNDIIDAIESHLQPRGVAVLVDAEHQCMTTRGVHHRHVSTITTRFTGAFKDDPALADRFLKLAKT

SEQ ID NO: 5791 - protein, 195 aa, Brevundimonas naejangsanensis
  REGION 1..195: note = tr|A0A494RJF6|A0A494RJF6_9CAUL GTP cyclohydrolase 1; OS = Brevundimonas naejangsanensis OX=588932 GN=folE PE=3; SV = 1
MTDHAHKPSVSQEEAEAAVRTLIRWAGDNPDREGLIETPKRVAKSYRELFQGYEVEPRDYLEKTFEEVGGYDELVVLKDIRFVSFCEHHMLPVVGKAHVAYLPTDRVVGISKLARVVRGYARRLQIQEKMTSEIANAIHEVLRPHGVGVVIEAEHSCMTMRGVDVPGASLTTSCLLGAVREDPRTREEFLRLVRG

SEQ ID NO: 5792 - protein, 195 aa, Brevundimonas naejangsanensis
  REGION 1..195: note = tr|A0A172Y6T6|A0A172Y6T6_9CAUL GTP cyclohydrolase 1; OS = Brevundimonas naejangsanensis OX=588932 GN=folE PE=3; SV = 1
MTDHAPTPPVSQEEAEAAVRTLIRWAGDNPAREGLIETPKRVAKSYRELFQGYEVEPRDYLEKTFEEVGGYDELIVLKDIRFVSFCEHHMLPVVGKAHVGYLPTDRVVGISKLARVVRGYARRLQIQEKMTSEIAQAIQEVLRPVGVGVVIEAEHSCMTMRGVDVPGASLSTSCLLGAVREDPRTREEFLRLVRG

SEQ ID NO: 5793 - protein, 194 aa, Brevundimonas nasdae
  REGION 1..194: note = tr|A0A0B4CM59|A0A0B4CM59_9CAUL GTP cyclohydrolase 1; OS = Brevundimonas nasdae OX=172043 GN=folE PE=3 SV=1
MTDAPASKVSQADAEAAVRTLIEWAGDNPDREGLLETPARVAKSYRELFQGYEVDPLSYLEKTFEETGGYDQLVVLKDIRFVSFCEHHMLPVVGKAHVAYLPTDRVVGISKLARVVRGFARRLQIQEKMTSEIAEAIQTVLRPHGVGVVIEAEHSCMTLRGVNAPGASLSTSHLIGVVRDDPRTREEFMRLVLS

SEQ ID NO: 5794 - protein, 204 aa, Brevundimonas nasdae
  REGION 1..204: note = tr|A0A0B4CR17|A0A0B4CR17_9CAUL GTP cyclohydrolase 1; OS = Brevundimonas nasdae OX=172043 GN=folE PE=3 SV=1
MSVTPAKPVLVSDAAVQRPSREQALEAVRTLIAWAGDNPNRPGLIDTPKRVVDAYGEWFDGYDADAGKELSRTFEDVTGYDDMVILRDIEVESHCEHHLAPFLGKAYVAYLPGEKVVGISKLARVVEIYARRLQNQETLTNDIIDAIESHLQPRGVAVLVDAEHQCMTTRGVHHRHVSTITTRFTGAFKDDPALADRFLKLAKA

SEQ ID NO: 5795 - protein, 201 aa, Brevundimonas sp.
  REGION 1..201: note = tr|A0A0Q7RWL0|A0A0Q7RWL0_9CAUL GTP cyclohydrolase 1; OS = Brevundimonas sp. Root1423 OX=1736462 GN=folE PE=3 SV=1
MSPTSRTRRSWAFPSWRAWWKSSRAVSVRRMRPDNPDRPGLIDTPRRVVDAYGEWFDGYDADVEKELSRTFEDVQGYDDMVLLRDIEVESHCEHHMAPFIGKAYVAYIPNEKVVGISKLARVVEIFSRRLQTQEVLTNQIAAAIESHLEPAGVAILIDAEHQCMTTRGVHHRHVSTITTRFTGVFKSDAALKDRFLKLAKG

SEQ ID NO: 5796 - protein, 188 aa, Brevundimonas sp.
  REGION 1..188: note = tr|A0A0Q7SFQ4|A0A0Q7SFQ4_9CAUL GTP cyclohydrolase 1; OS = Brevundimonas sp. Root1423 OX=1736462 GN=folE PE=3 SV=1
MPDEDEVRAAVRTLIRWTGDDPDREGLVDTPDRVARSYREMFAGYDVDPREYLERTFEEVGGYDELIVLRDIRFVSVCEHHMLPVIGRAHVAYLPTDRVVGISKLARVVRGYARRLQIQEKMTSEIAKAIQEVLQPQGVGVVIEAEHSCMTLRGVNAPGTSLITSHLTGVLRDDARTREEFLRLVRGG

SEQ ID NO: 5797 - protein, 204 aa, Brevundimonas subvibrioides
  REGION 1..204: note = tr|A0A258FVI5|A0A258FVI5_9CAUL GTP cyclohydrolase 1; OS = Brevundimonas subvibrioides OX=74313 GN=folE PE=3 SV=1
MDAHAARPTLVGNDHMTRPSREEALAAVRTLIAWSGDNPDREGLLDTPKRVVDAYGEWFEGYAADPAKELSRTFEDVQGYDDMVLLRDIEVESHCEHHMAPFLGKAYVAYLPTEKVVGISKIARVVEIFSKRLQTQETLTQEIAAALESNLNPAGVAVLIDAEHQCMTTRGVHHRHVSTITTRFTGAFKSDPALVERFLKLAKG

SEQ ID NO: 5798 - protein, 204 aa, Brevundimonas subvibrioides
  REGION 1..204: note = tr|D9QH31|D9QH31_BRESC GTP cyclohydrolase 1; OS = Brevundimonas subvibrioides (strain ATCC 15264 / DSM 4735 / LMG 14903 / NBRC 16000 / CB 81) OX=633149 GN=folE; PE = 3 SV= 1
MDANASRPTLVGNDHLTRPTREEALAAVRTLIAWSGDNPDREGLLDTPKRVVDAYGEWFEGYTADPAKELSRTFEDVQGYDDMVLLRDIEVESHCEHHMAPFLGKAYVAYLPTEKVVGISKIARVVEIFSKRLQTQETLTQEIAGALEDHLSPAGVAVLIDAEHQCMTTRGVHHRHVSTITTRFTGQFKTDPALIERFLKLAKG

SEQ ID NO: 5799 - protein, 200 aa, Brevundimonas vancanneytii
  REGION 1..200: note = tr|A0A4P1KDN4|A0A4P1KDN4_9CAUL GTP cyclohydrolase 1; OS = Brevundimonas vancanneytii OX=1325724 GN=folE_2 PE=3; SV = 1
MQPVMSDQTPSSPAVSQEEAEAAVRTLIRWAGDNPAREGLIETPKRVAKSYRELFQGYEVEPRDYLEKTFEEVGGYDELVVLKDIRFISFCEHHMLPVVGKAHVAYLPTDRVVGISKLARVVRGYARRLQIQEKMTSEIANAIQDVLRPHGVGVVIEAEHSCMTMRGVDVPGASLSTSCLLGAVREDPRTREEFLRLVRG

SEQ ID NO: 5800 - protein, 204 aa, Brevundimonas vancanneytii
  REGION 1..204: note = tr|A0A4P1JZZ8|A0A4P1JZZ8_9CAUL GTP cyclohydrolase 1; OS = Brevundimonas vancanneytii OX=1325724 GN=folE_1 PE=3; SV = 1
MSSTPAKPVLVANEAPQRPSREQALEAVRTLIAWAGDNPDRPGLLDTPKRVVDAYGEWFDGYDADAGKELSRTFEDVTGYDDMVILRDIEVESHCEHHLAPFLGKAYVAYLPGEKVVGISKLARVVEIFARRLQNQETLTNDIIDAIESHLQPKGVAVLVDAAHQCMTTRGVHHRHVSTITTRFTGAFKNDPALAERFLKLARG

SEQ ID NO: 5801 - protein, 204 aa, Brevundimonas vesicularis
  REGION 1..204: note = tr|A0A2X1B670|A0A2X1B670_BREVE GTP cyclohydrolase 1; OS = Brevundimonas vesicularis OX=41276 GN=folE_1 PE=3 SV=1
MSVTPAKPVLVSDAAVQRPSREQALEAVRTLIAWAGDNPNRPGLIDTPKRVVDAYGEWFDGYDADAGKELSRTFEDVTGYDDMVILRDIEVESHCEHHLAPFLGKAYVAYLPGEKVVGISKLARVVEIYARRLQNQETLTNDIIEAIESHLQPRGVAVLVDAEHQCMTTRGVHHRHVSTITTRFTGAFKDDPALADRFLKLAKA

SEQ ID NO: 5802 - protein, 204 aa, Brevundimonas vesicularis
  REGION 1..204: note = tr|A0A1Z3UBS3|A0A1Z3UBS3_BREVE GTP cyclohydrolase 1; OS = Brevundimonas vesicularis OX=41276 GN=folE PE=3 SV=1
MSVTPAKPVLVSDDSVQRPSREQALEAVRTLIAWAGDNPDRPGLIDTPKRVVDAYGEWFDGYDADAGKELSRTFEDVTGYDDMVILRDIEVESHCEHHLAPFLGKAYVAYLPGEKVVGISKLARVVEIYARRLQNQETLTNDIIEAIESHLQPRGVAVLVDAEHQCMTTRGVHHRHVSTITTRFTGAFKDDPALADRFLKLAKA

SEQ ID NO: 5803 - protein, 205 aa, unidentified
  source 1..205: note = Brevundimonas viscosa
  REGION 1..205: note = tr|A0A1I6TDJ1|A0A1I6TDJ1_9CAUL GTP cyclohydrolase 1; OS = Brevundimonas viscosa OX=871741 GN=folE PE=3 SV=1
MSVTPVKPVLVGDNDEIKRPSREQALDAVRTLLAWAGDDPDREGLKDTPKRVVDAYAEWFDGYDADAAKELSRTFEDVQGYDDMVLLRDIEVESHCEHHMAPFLGKAYVAYIPDEKVVGISKLARVVEIYARRLQTQEVLTNQIAEAIESNLQPRGVAILIDAEHQCMTTRGVHHRHVSTITTRFTGVFKSDAALKDRFLKLARG

SEQ ID NO: 5804 - protein, 191 aa, unidentified
  source 1..191: note = Brevundimonas viscosa
  REGION 1..191: note = tr|A0A1I6QFM0|A0A1I6QFM0_9CAUL GTP cyclohydrolase 1; OS = Brevundimonas viscosa OX=871741 GN=folE PE=3 SV=1
MTDAPVSQAEAEAAVRTLIRWAGDDPDREGVLDTPGRVARSYRELFAGYASDPREYLERTFEEVGGYDELVVLKDIRFVSFCEHHMLPVVGRAHVGYLPTDRVVGISKLARVVHGFARRLQIQEKMTSEIATAIHEVLRPQGVGVVIEAEHSCMTLRGVNTAGASLSTSCLMGVIRDDPRTREEFLRLVRG

SEQ ID NO: 5805 - protein, 175 aa, Brochothrix campestris
  REGION 1..175: note = tr|W7D867|W7D867_9LIST GTP cyclohydrolase 1; OS = Brochothrix campestris FSL F6-1037 OX=1265861 GN=folE; PE = 3 SV=1
MKSILEAVGEDPTREGLIDTPMRVARMYEEIFSGLHTDAKQHLTTVFDEPYSEMVLVKDIPFYSVCEHHLVPFFGTVSIAYLPQNGKVVGLSKLARIVEEISKRPQVQERITVTVAEMIMTELKAAGVYVFVEAEHMCMTMRGVKKPGAVTITTAARGHYADNDAARLELLNMIK

SEQ ID NO: 5806 - protein, 262 aa, Brochothrix thermosphacta
  REGION 1..262: note = tr|A0A2X0Q454|A0A2X0Q454_BROTH Putative GTP cyclohydrolase 1 type 2 OS=Brochothrix thermosphacta; OX = 2756 GN=BTBSAS_230030 PE=4 SV=1
MVTVGDIVKSMERIAPPELKLGKDPIGLHIGDEMQVVTKVMVTLDVLETVVDEAIAKGVNMIIAHHPLLYVPIKNIDTSTSRGRLIAKLLKHDIAVFAAHTNLDVAEGGVNDMLAQSLELQSITYLEKTTERYQVDYGIGRIGELAEVTTVSALSEQVKKLWDLPGVRFIGPADREIKTVAILGGDGNNYIRTAALSKADVLITGDIYYHLGHDAMELDFPVIDAGHTIEKIMINGLITLLQEQHSISFIASQVDTNPFNYR

SEQ ID NO: 5807 - protein, 186 aa, Brochothrix thermosphacta
  REGION 1..186: note = tr|A0A1D2KB87|A0A1D2KB87_BROTH GTP cyclohydrolase 1; OS = Brochothrix thermosphacta OX=2756 GN=folE PE=3 SV=1
MTVNKEKIALAVKDILEAVGEDPNRSGLLDTPMRVARMYEEIFSGLEKDPKKHLETVFEEEYSEMVLVKDIGFHSVCEHHLVPFYGKVSIAYLPADGNVVGLSKLARIVEDISKRPQVQERITKTIADLIETELKAVGVFVYVEAEHMCMAMRGVKKPGAVTITTAARGLYANDADARIEILTMIK

SEQ ID NO: 5808 - protein, 191 aa, unidentified
  source 1..191: note = Brockia lithotrophica
  REGION 1..191: note = tr|A0A2T5G8J4|A0A2T5G8J4_9THEO GTP cyclohydrolase 1; OS = Brockia lithotrophica OX=933949 GN=folE PE=3 SV=1
MAIDHEKVKHAVRLIFEAIGEDPEREGLADTPRRIAEMFEEIFSGVGKDPRGELNTFFTERHEELVALRDIPFYSMCEHHLLPFFGRGHIGYLPADGRVVGVSKLARVLEVVARRPQIQERMGEEIADAIVDVLAPRGVIVVLEAEHLCMIMRGVKKPGSQMVTITARGVFREDPALREEALRLLLGNHRR

SEQ ID NO: 5809 - protein, 213 aa, unidentified
  source 1..213: note = Brucella abortus
  REGION 1..213: note = sp|Q2YQ03|GCH1_BRUA2 GTP cyclohydrolase 1; OS = Brucella abortus (strain 2308) OX=359391 GN=folE PE=3; SV = 1
MDARILQDNDDTSLPVNQASVTRIHKKPGKAEAEAAVRTLLLWAGEDPDREGLLETPKRVAKAYQELFGGYSESPEEVLGTTFEEVAGYDDMVLVKDISFFSHCEHHMVPIIGKAHVAYLPEGRVVGLSKIARVVDIFARRLQTQESITAQIADSIQRILKPRGVAVMIEAEHMCMAMRSIRKQGSSTITTTFTGDFKEKADQQVRFMTLIRT

SEQ ID NO: 5810 - protein, 213 aa, unidentified; identical to SEQ ID NO: 5809
  source 1..213: note = Brucella abortus
  REGION 1..213: note = tr|A0A0M1WDJ9|A0A0M1WDJ9_BRUAO GTP cyclohydrolase 1; OS = Brucella abortus NCTC 8038 OX=575591 GN=folE PE=3 SV=1

SEQ ID NO: 5811 - protein, 213 aa, unidentified
  source 1..213: note = Brucella canis
  REGION 1..213: note = sp|A9M586|GCH1_BRUC2 GTP cyclohydrolase 1; OS = Brucella canis (strain ATCC 23365 / NCTC 10854); OX = 483179 GN=folE PE=3 SV=1
MDARILQDNDDTSLPVNQASVTRIHKKPGKAEAEAAVRTLLLWAGEDPDREGLLETPKRVAKAYQELFGGYSESPEEVLGTTFEEVAGYDDMVLVKDISFFSHCEHHMVPIIGKAHVAYLPEGRVVGLSKIARVVDIFARRLQTQESITAQIADSMQRILKPRGVAVMIEAEHMCMAMRSIRKQGSSTITTTFTGDFKEKADQQVRFMTLIRT

SEQ ID NO: 5812 - protein, 248 aa, Brucella ceti
  REGION 1..248: note = tr|C0G6G4|C0G6G4_9RHIZ GTP cyclohydrolase 1; OS = Brucella ceti str. Cudo OX=595497 GN=folE PE=3 SV=1
MACCCRINTSPARKAHRCIVRLTRFLLEGNYWRILMDARILQDNDDTSLPVNQASVTRIHKKPGKAEAEAAVRTLLLWAGEDPDREGLLETPKRVAKAYQELFGGYSESPEEVLGTTFEEVAGYDDMVLVKDISFFSHCEHHMVPIIGKAHVAYLPEGRVVGLSKIARVVDIFARRLQTQESITAQIADSIQRILKPRGVAVMIEAEHMCMAMRSIRKRGSSTITTTFTGDFKEKADQQVRFMTLIRT

SEQ ID NO: 5813 - protein, 213 aa, Brucella melitensis; identical to SEQ ID NO: 5809
  REGION 1..213: note = sp|Q8YH94|GCH1_BRUME GTP cyclohydrolase 1; OS = Brucella melitensis biotype 1 (strain 16M / ATCC 23456 / NCTC 10094) OX=224914 GN=folE PE=3 SV=1

SEQ ID NO: 5814 - protein, 213 aa, Brucella melitensis; identical to SEQ ID NO: 5809
  REGION 1..213: note = tr|A0A4P6KM57|A0A4P6KM57_BRUML GTP cyclohydrolase 1; OS = Brucella melitensis OX=29459 GN=folE PE=3 SV=1

SEQ ID NO: 5815 - protein, 213 aa, Brucella microti
  REGION 1..213: note = tr|C7LC26|C7LC26_BRUMC GTP cyclohydrolase 1; OS = Brucella microti (strain CCM 4915) OX=568815 GN=folE; PE = 3 SV=1
MDARILQDNDDTSLPVNQASVTRIHKKPGKAEAEAAVRTLLLWAGEDPDREGLLETPKRVAKAYQELFGGYSESPEEVLGTTFEEVAGYDDMVLVKDISFFSHCEHHMVPIIGKAHVAYLPEGRVVGLSKIARVVDIFARRLQTQESITAQIADSIQRILKPRGVAVMIEAEHMCMAMRGIRKQGSSTITTTFTGDFKEKADQQVRFMTLIRT

SEQ ID NO: 5816 - protein, 213 aa, unidentified
  source 1..213: note = Brucella neotomae
  REGION 1..213: note = tr|A0A381B7U4|A0A381B7U4_BRUNE GTP cyclohydrolase 1; OS = Brucella neotomae OX=29460 GN=folE PE=3 SV=1
MDARILQDNDDTSLPVNQASVTRIHKKPGKAEAEAAVRTLLLWVGEDPDREGLLETPKRVTKAYQELFGGYSESPEEVLGTTFEEVAGYDDMVLVKDISFFSHCEHHMVPIIGKAHVAYLPEGRVVGLSKIARVVDIFARRLQTQESITAQIADSIQRILKPRGVAVMIEAEHMCMAMRSIRKQGSSTITTTFTGDFKEKADQQVRFMTLIRT

SEQ ID NO: 5817 - protein, 213 aa, unidentified
  source 1..213: note = Brucella ovis
  REGION 1..213: note = sp|A5VQL0|GCH1_BRUO2 GTP cyclohydrolase 1; OS = Brucella ovis (strain ATCC 25840 / 63/290 / NCTC 10512); OX = 444178 GN=folE PE=3 SV=1
MDARIFQDNDDTSLPVNQASVTRIHKKPGKAEAEAAVRTLLLWVGEDPDREGLLETPKRVAKAYQELFGGYSGSPEEVLGTTFEEVAGYDDMVLVKDISFFSHCEHHMVPIIGKAHVAYLPEGRVVGLSKIARVVDIFARRLQTQESITAQIADSIQRILKPRGVAVMIEAEHMCMAMRSIRKQGSSTITTTFTGDFKEKADQQVRFMTLIRT

SEQ ID NO: 5818 - protein, 213 aa, unidentified; identical to SEQ ID NO: 5817
  source 1..213: note = Brucella ovis
  REGION 1..213: note = tr|N8LXW4|N8LXW4_BRUOV GTP cyclohydrolase 1; OS = Brucella ovis IntaBari-2002-82-58 OX=1293916 GN=folE; PE = 3 SV=1

SEQ ID NO: 5819 - protein, 213 aa, Brucella pinnipedialis
  REGION 1..213: note = tr|A0A0E1X291|A0A0E1X291_9RHIZ GTP cyclohydrolase 1; OS = Brucella pinnipedialis M292/94/1 OX=520462 GN=folE PE=3; SV = 1
MDARILQDNDDTSLPVNQASVTRIHKKPGKAEAEAAVRTLLLWAGEDPDREGLLETPKRVAKAYQELFGGYSESPEEVLGTTFEEVAGYDDMVLVKDISFFSHCEHHMVPIIGKAHVAYLPEGRVVGLSKIARVVDIFARRLQTQESITAQIADSIQRILKPRGVAVMIEAEHMCMAMRSIRKRGSSTITTTFTGDFKEKADQQVRFMTLIRT

SEQ ID NO: 5820 - protein, 213 aa, Brucella sp.
  REGION 1..213: note = tr|D6LP89|D6LP89_9RHIZ GTP cyclohydrolase 1; OS = Brucella sp. NVSL 07-0026 OX=520448 GN=folE PE=3 SV=1
MDARILQDNDDTSLPVNQASVTRIHKKPGKAEAEAAVRTLLLWAGEDPDREGLLETPKRVAKAYQELFGGYSGSPEEVLGTTFEEVAGYDDMVLVKDISFFSHCEHHMVPIIGKAHVAYLPEGRVVGLSKIARVVDIFARRLQTQESITAQIADSIQRILKPRGVAVMIEAEHMCMAMRSIRKQGSSTITTTFTGDFKEKADQQVRFMTLIRT

SEQ ID NO: 5821 - protein, 213 aa, Brucella sp.; identical to SEQ ID NO: 5815
  REGION 1..213: note = tr|A0A1P8S6C3|A0A1P8S6C3_9RHIZ GTP cyclohydrolase 1; OS = Brucella sp. 09RB8910 OX=1844051 GN=folE PE=3 SV=1

SEQ ID NO: 5822 - protein, 213 aa, unidentified; identical to SEQ ID NO: 5811
  source 1..213: note = Brucella suis
  REGION 1..213: note = sp|Q8G0L4|GCH1_BRUSU GTP cyclohydrolase 1; OS = Brucella suis biovar 1 (strain 1330) OX=204722 GN=folE; PE = 3 SV=1

SEQ ID NO: 5823 - protein, 213 aa, unidentified; identical to SEQ ID NO: 5811
  source 1..213: note = Brucella suis
  REGION 1..213: note = tr|A0A4Z0F269|A0A4Z0F269_BRUSS GTP cyclohydrolase 1; OS = Brucella suis OX=29461 GN=folE PE=3 SV=1

SEQ ID NO: 5824 - protein, 215 aa, unidentified
  source 1..215: note = Brucellaceae bacterium
  REGION 1..215: note = tr|A0A3P1UQM5|A0A3P1UQM5_9RHIZ GTP cyclohydrolase 1; OS = Brucellaceae bacterium VT-16-1752 OX=2487907 GN=folE; PE = 3 SV=1
MDARILKEDDESGLPSKKQANVTPLHGTPTQADAEAAVRTLLLWAGDNPDREGLLETPKRVAKAYKELFSGYAESPEEVLGTVFEEVAGYNDMVLVKDISFFSHCEHHMVPIIGKAHVAYLPDHKVVGLSKIARVVDIFAHRLQTQESITAQIADSIQTILKPRGVAVMIEAEHMCMAMRGIRKQGSTTITTTFTGEMKTKVDEQVRFMTLSRSK

SEQ ID NO: 5825 - protein, 197 aa, unidentified
  source 1..197: note = Brumimicrobium aurantiacum
  REGION 1..197: note = tr|A0A3E1EV32|A0A3E1EV32_9FLAO GTP cyclohydrolase 1; OS = Brumimicrobium aurantiacum OX=1737063 GN=folE PE=3 SV=1
MENKFEYNQEITDKLTDVYKEVIKDLGEDPNREGLLKTPERVAKSVQFLTQGYQQDPDAILRSALFQEDYSEMVIVKDIEVYSQCEHHMLPFFGKAHIAYIPDGKIVGLSKLPRIVDAYARRLQVQERLTLEIRDCIQRTLEPKGVAVVLECSHMCMQMRGVEKQNSSTTTSAFKGLFLNNDSTRKEFINLIQARLH

SEQ ID NO: 5826 - protein, 197 aa, Brumimicrobium glaciale
  REGION 1..197: note = tr|A0A4V1WFE8|A0A4V1WFE8_9FLAO GTP cyclohydrolase 1; OS = Brumimicrobium glaciale OX=200475 GN=folE PE=3 SV=1
MESKFEYDQEVTDRLTEVYKGVLADLGEDPNREGLLKTPERVAKSVQFLTQGYKQDPDEILRSALFHEDYSEMVIVKDIEVYSQCEHHMLPFFGKAHIAYIPNGKIVGLSKLPRIVDAYARRLQVQERLTLEIRDCIQRTLDPKGVAVVLECSHMCMQMRGVEKQNSSTTTSAFKGLFMSNDSTRKEFINLIQARLH

SEQ ID NO: 5827 - protein, 197 aa, unidentified
  source 1..197: note = Brumimicrobium salinarum
  REGION 1..197: note = tr|A0A2I0R1V2|A0A2I0R1V2_9FLAO GTP cyclohydrolase 1; OS = Brumimicrobium salinarum OX=2058658 GN=folE PE=3 SV=1
MENKFDYDENITLKLTEVYKEVLKDLGEDPQREGLLKTPERVAKSVQFLTQGYKQDPDEILKSALFDEDYSEMVIVKDIEVYSQCEHHMLPFFGKAHIAYIPDGKIVGLSKLPRIVDAYARRLQVQERLTLEIRDCIQRTLNPKGVAVVLECSHMCMQMRGVEKQNSSTTTSAFKGLFMQNDSTRKEFINLIQANLH

SEQ ID NO: 5828 - protein, 197 aa, Brumimicrobium sp.
  REGION 1..197: note = tr|A0A2U2XFE2|A0A2U2XFE2_9FLAO GTP cyclohydrolase 1; OS = Brumimicrobium sp. C305 OX=2100725 GN=folE PE=3 SV=1
MESKFEYNQEVTDKLTEVYKSVLADLGEDPSREGLLKTPERVAKSVQFLTQGYKQNPDEILRSALFQEDYSEMVIVKDIEVYSQCEHHMLPFFGKAHIAYIPDGKIVGLSKLPRIVDAYARRLQVQERLTLEIRDCIQRTLEPKGVAVVLECSHMCMQMRGVEKQNSSTTTSAFKGLFMSNDSTRKEFINLIQAKLH

SEQ ID NO: 5829 - protein, 191 aa, unidentified
  source 1..191: note = Bryobacterales bacterium
  REGION 1..191: note = tr|A0A3D1AS76|A0A3D1AS76_9BACT GTP cyclohydrolase 1; OS = Bryobacterales bacterium OX=2026791 GN=folE PE=3 SV=1
MIAQRDIQNSLEPLVAQMIARLGEDPAREGLLRTPARVDQALRFLTSGYQTRIEDIVNEALFAVTYDEMVIVRDIEFFSLCEHHMLPFFGKAHIAYIPRDRVIGLSKLPRIVDMFARRLQIQERLTQQIAECIQDVLDPVGVGVICEAQHFCMMMRGVEKQHSGTVTSAMLGDFRERKETRDEFLALTRSR

SEQ ID NO: 5830 - protein, 209 aa, unidentified
  source 1..209: note = Bryobacterales bacterium
  REGION 1..209: note = tr|A0A2E5FMG6|A0A2E5FMG6_9BACT GTP cyclohydrolase 1; OS = Bryobacterales bacterium OX=2026791 GN=folE PE=3 SV=1
MASHPSSHDPHSESPTDSSNNTKLSGLVQEMLGELGENPDRDGLRRTPQRVARAFRELTRGYEMDAATVLNNALFEVSYDEMVIVRDIEVFSLCEHHLLPFFGKVHVAYLPREKVIGLSKIPRLVDMFARRLQIQERLTNQIAATIQETINPVGVGVVIEARHLCMVMRGVEKQHSSAVTSAMLGAFRENSQTREEFLSLLSPRSTQGL

SEQ ID NO: 5831 - protein, 222 aa, Bryocella elongata
  REGION 1..222: note = tr|A0A1H5TY65|A0A1H5TY65_9BACT GTP cyclohydrolase 1; OS = Bryocella elongata OX=863522 GN=folE PE=3 SV=1
MTIKIHDTNFSGTNGHSPMETELSAAKAHPALAKPLGEASTQEIYAELLSRLGEDPTRDGLLRTPERVEKSMAFLTRGYTQSIEEVLHEALFDVDYDEMVVVKDIEFYSLCEHHMLPFFGRAHVAYLPQGKVVGLSKIPRIVDVFARRLQVQERMTQQIAEAIEDAVHPQGVGVVLEGQHLCMMMRGVEKQSSWTTTSAMRGVFKTQVQTRSEFLSLVRPVR

SEQ ID NO: 5832 - protein, 218 aa, Buchnera aphidicola
  REGION 1..218: note = sp|Q8KA05|GCH1_BUCAP GTP cyclohydrolase 1; OS = Buchnera aphidicola subsp. Schizaphis graminum (strain Sg) OX=198804 GN=folE PE=3 SV=1
MIKITKEANIARNVLLLKGLENPILKEYNDIKEKERELLIAEYLYKIMSLLNLDLKNESLKDTPIRISKMYVNEIFSGLDYKNFPKIMLMDNKIKFHEMIIVRDILLISTCEHHFITINGQATIAYIPENKIIGLSKINRIAQFFAKRPQIQERLTKQILLVLQVLLQTKNVAIIIHMDHFCVKARGVCDTSSSTVTSCLDGLFKSDKNIREEFFFKK

SEQ ID NO: 5833 - protein, 220 aa, Buchnera aphidicola
  REGION 1..220: note = tr|A0A5J6ZD59|A0A5J6ZD59_9GAMM GTP cyclohydrolase I FolE OS=Buchnera aphidicola (Aphis gossypii) OX=98785; GN = folE PE=4 SV=1
MIKISQEAQLAHNALLSKGLENPILKEYNGIEEKERELLIAKYIYKIMYILNLDTKNDSLKNTPDRISKMYNKEIFLGLDYKNFPKITFIENVIKSSDIIIVRDITLMSTCEHHFITIYGKADIAYIPRKKIIGLSKINRIAQFYSKRPQIQERLTKQIRVVLQTLLGTKDIAIVLNMNHFCVKTRGICDVNSTVITSSLKGLFKTSKSIRDQFLFKNNL

SEQ ID NO: 5834 - protein, 124 aa, Budvicia aquatica
  REGION 1..124: note = tr|A0A484ZMP0|A0A484ZMP0_9GAMM GTP cyclohydrolase 1; OS = Budvicia aquatica OX=82979 GN=folE_2 PE=3 SV=1
MQLLNLDLSDDSLAETPTRIAKMYVDEIFSGLDYANFPKITLIQNKMKVDEMGYGQRYHTDQHPVNITFVTIDGKATVAYIPKDSVIGLSKINRIVQFFSQRPQVQERLTQQILLGFANPIGHH

SEQ ID NO: 5835 - protein, 223 aa, Budvicia aquatica
  REGION 1..223: note = tr|A0A2C6DNS8|A0A2C6DNS8_9GAMM GTP cyclohydrolase 1; OS = Budvicia aquatica OX=82979 GN=folE PE=3 SV=1
MSSLSKEAILVHAALEAKGLETPLRGAVLDSDIRKQRIQAHMTEIMQLLNLDLSDDSLAETPTRIAKMYVDEIFSGLDYANFPKITLIQNKMKVDEMVTVRDITLTSTCEHHFVTIDGKATVAYIPKDSVIGLSKINRIVQFFSQRPQVQERLTQQILLALQTLLGTTNVAVSIDAIHYCVKSRGVCDATSSTSTTSLGGLFKSNPSTRQEFLASVRHTSHHP

SEQ ID NO: 5836 - protein, 269 aa, Burkholderia ambifaria
  REGION 1..269: note = sp|Q0BAL7|GCH4_BURCM GTP cyclohydrolase FolE2; OS = Burkholderia ambifaria (strain ATCC BAA-244 / AMMD); OX = 339670 GN=folE2 PE=3 SV=1
MNQMNPAFVMPDVQSTVDTRQIPIQRVGVKAVRHPLTVRTESGDVQPTVGVWNLDVHLPADQKGTHMSRFVALLEDSREPLTVERFRAMLASMLVRLEAEAGRIEVTFPYFVNKTAPVSGVQSLLDYEVTLAGESRNGETRLFLKVLVPVTSLCPCSKKISQYGAHNQRSHVTIDAELAADLPVEALIRIAEEEASCELWGLLKRPDEKFVTERAYENPKFVEDLVRDVAQRLDADERVVAYVLEAENFESIHNHSAYALIERDKRHAA

SEQ ID NO: 5837 - protein, 209 aa, Burkholderia ambifaria
  REGION 1..209: note = tr|B1SYJ0|B1SYJ0_9BURK GTP cyclohydrolase 1; OS = Burkholderia ambifaria MEX-5 OX=396597 GN=folE PE=3 SV=1
MGKKTARPEPAASRPSRKEAEEAVRVLLRWAGDDPAREGLLDTPARVVRAYEEFFAGYALEPREILARTFSEVDGYDEMIVLKDIRFESYCEHHMVPIIGRAHVAYLPNHRVVGISKLARLVDAFAKRLQIQEKMTVQIADTLFDVLQPKGVGVILEAAHQCISTRGIHKPGVEMVTSRMLGTFRTDPSTRREFLSIVANPSSVNLTNT

SEQ ID NO: 5838 - protein, 211 aa, Burkholderia anthina
  REGION 1..211: note = tr|A0A3N9L3E3|A0A3N9L3E3_9BURK GTP cyclohydrolase 1; OS = Burkholderia anthina OX=179879 GN=folE PE=3 SV=1
MGKGKKSAQPEAVASRPSREEAEDAVRVLLRWAGDDPAREGLLDTPARVVRAYEQFFAGYALEPRDILARTFSEVDGYDEMIVLKDIRFESYCEHHMVPIIGRAHVAYLPNHRVVGISKLARLVDAFAKRLQIQEKMTVQIADTLFDVLQPKGVGVILEAAHQCISTRGVHKPGVEMVTSRMLGTFRTDPSTRREFLSIVANPSSVNLTNT

SEQ ID NO: 5839 - protein, 269 aa, Burkholderia anthina
  REGION 1..269: note = tr|A0A104L9D7|A0A104L9D7_9BURK GTP cyclohydrolase FolE2 OS=Burkholderia anthina OX=179879 GN=folE2 PE=3 SV=1
MNQMNPAFVMPDVQSTVDTRQIPIQRVGVKAVRHPLTVCTESGDVQPTVGVWNLDVRLPADQKGTHMSRFVALLEENRAPLTVERFRAMLASMLEKLEAEAGRIEVTFPYFVNKTAPVSGVQSLLDYEVTLAGESRNGDTRLFLKVLVPVTSLCPCSKKISQYGAHNQRSHVTIDAELAADLPVEALIRIAEEEASCELWGLLKRPDEKFVTERAYENPKFVEDLVRDIAQRLDADERVAAYVLEAENFESIHNHSAYALIERDKRLAA

SEQ ID NO: 5840 - protein, 211 aa, unidentified
  source 1..211: note = Burkholderia catarinensis
  REGION 1..211: note = tr|A0A1J9NLU0|A0A1J9NLU0_9BURK GTP cyclohydrolase 1; OS = Burkholderia catarinensis OX=1108140 GN=folE PE=3 SV=1
MGKGKKSAQPEPAASRPSRDEAEDAVRVLLRWAGDDPAREGLRDTPARVVRAYEQFFAGYALEPRDILARTFSEVDGYDEMIVLKDIRFESYCEHHMVPIIGRAHVAYLPNHRVVGISKLARLVDAFAKRLQIQEKMTVQIADTLFDVLQPKGVGVILEAAHQCISTRGVHKPGVEMVTSRMLGTFRTDPSTRREFLSIVANPSSVNLTNT

SEQ ID NO: 5841 - protein, 269 aa, unidentified
  source 1..269: note = Burkholderia catarinensis
  REGION 1..269: note = tr|A0A1J9NR06|A0A1J9NR06_9BURK GTP cyclohydrolase FolE2 OS=Burkholderia catarinensis OX=1108140 GN=folE2; PE = 3 SV=1
MNQMNPAFVMPDVQSTVDTRQIPIQRVGVKAVRHPLTVRTESGDVQPTVGVWNLDVRLPADQKGTHMSRFVALLEENRAPLTVERFRAMLASMLEKLEAEAGRIEVTFPYFVNKTAPVSGVQSLLDYEVTLAGESRNGDTRLFLKVLVPVTSLCPCSKKISQYGAHNQRSHVTIDAELAADLPVEALIRIAEEEASCELWGLLKRPDEKFVTERAYENPKFVEDLVRDVAQRLDADGRVVAYVLEAENFESIHNHSAYALIERDKRQAA

SEQ ID NO: 5842 - protein, 316 aa, Burkholderia cenocepacia
  REGION 1..316: note = sp|B1K5N3|GCH42_BURCC GTP cyclohydrolase FolE2 2; OS = Burkholderia cenocepacia (strain MC0-3) OX=406425; GN = folE2-2 PE=3 SV=2
MEKALHRISSMNAALPDISLTDAAPGRRPLEWVGMQGIDLPVVVAEPGCRRDVHARADVQVDLPAPQVKGIHMSRLYGLLDGLADGEALSPAGLQRMLRAMVDSHRDCATRSARVRLRFDLLARRTALVTEGLAGWKAYPVRLDATLSGDAFALRAQVTVVYSSTCPCSAALSRHWIEQAFLTAFGHEARVEPTAVAAWLKRHATAATPHSQRSEAVVSVALPADGTTLGLLDLIDRVEQALGTPVQTAVKRADEQAFAVLNGGNLMFVEDAARRVQAALEDRHASPRVRVRHLESLHPHDAVAWAAPLREGADAC

SEQ ID NO: 5843 - protein, 306 aa, Burkholderia cenocepacia
  REGION 1..306: note = tr|A0A1V6KQ73|A0A1V6KQ73_9BURK GTP cyclohydrolase FolE2 OS=Burkholderia cenocepacia OX=95486 GN=folE2 PE=3; SV = 1
MNAALPDISLTDAAPGHRPLEWVGMQGIDLPVVVAEPGCRRDVHARADVQVDLPAPQVKGIHMSRLYWLLDWLADGEALSPAGLQRVLRAMVDSHRDCDTRSARVRLHFDLLARRTALVTDGLSGWKAYPVRVDATLAGDAFALRAQVTVVYSSTCPCSAALSRHWIEQAFLTAFGREDRVDPAAVAAWLKQHATAATPHSQRSEAVVSVALPADGATLGLIGLIDRVEQALGTPVQTAVKRADEQAFAVLNGGNLMFVEDAARRVQAALEGHHAGPRVRVRHLESLHPHDAVAWAAPLREGADAC

SEQ ID NO: 5844 - protein, 316 aa, Burkholderia cepacia
  REGION 1..316: note = tr|A0A0U4BQH6|A0A0U4BQH6_BURCE GTP cyclohydrolase FolE2 OS=Burkholderia cepacia JBK9 OX=1395570 GN=folE2; PE = 3 SV=1
MEKARHRNPSMNAVLPDVSLTDAAPGRRPLEWVGMQGIDLPVTVAEPGCRRDVHARADVQVDLPAPDVKGIHMSRLYWLLDWLADGEALSPAGLRRVLRAMVDSHRDCDTRSARVRLRFDLLARRTALVTEGLAGWKAYPVQVDATLAGDAFELRAQVTVAYSSTCPCSAALSRHWIEQAFLTAFDREARVAPAAVAAWLKQHATLATPHSQRSEAVVSVALPADGAALGLIDLIDRIEHALGTPVQTAVKRADEQAFAVLNGGNLMFVEDAARRVQAALESRHAHPRVHVRHLESLHPHDAVAWAAPVREGADAC

SEQ ID NO: 5845 - protein, 269 aa, Burkholderia cepacia
  REGION 1..269: note = tr|A0A104D3Z2|A0A104D3Z2_BURCE GTP cyclohydrolase FolE2 OS=Burkholderia cepacia OX=292 GN=folE2 PE=3 SV=1
MNQMNPAFVMPDVQSTVDTRQIPIQRVGVKAVRHPLTVCTEAGDVQPTVGVWNLDVRLPADQKGTHMSRFVALLEENRAPLTVERFRAMLASMLEKLEAEAGRIEVTFPYFVNKTAPVSGVQSLLDYEVTLAGESRNGDTRLFLKVLVPVTSLCPCSKKISQYGAHNQRSHVTIDAELAADLPVEALIRIAEEEASCELWGLLKRPDEKFVTERAYENPKFVEDLVRDVAQRLDADERVVAYVLEAENFESIHNHSAYALIERDKRQAA

SEQ ID NO: 5846 - protein, 306 aa, Burkholderia contaminans
  REGION 1..306: note = tr|A0A3N8QJ86|A0A3N8QJ86_9BURK GTP cyclohydrolase FolE2 OS=Burkholderia contaminans OX=488447 GN=folE2 PE=3; SV = 1
MNAPLPDISLTDAAPGGRPLEWVGMQGIDLPVAVAEPGCRRDVHARADVQVDLPAPHVKGIHMSRLYRLLDGLDDGAALSPAGVQRVLHAMVDSHRDCDTRSARLRLRFDLLARRAALVTDGLAGWKAYPVRIDATLTGSRFALRAQVTVVYSSTCPCSAALSRHWVEQAFLAAFGRDDRVEPTAVAAWLKRHATAATPHSQRSEAVVTVALPADGATLGLIDLIDRIEHALGTPVQTAVKRADEQAFAVLNGGNLMFVEDAARRVQAALDGHHATPRVHVRHLESLHPHDAVAWAAPLREGADAC

SEQ ID NO: 5847 - protein, 269 aa, Burkholderia contaminans
  REGION 1..269: note = tr|A0A0G3YNT6|A0A0G3YNT6_9BURK GTP cyclohydrolase FolE2 OS=Burkholderia contaminans OX=488447 GN=folE2 PE=3; SV = 1
MNQMNPAFVMPDVQSTVDTRQIPIQRVGVKAVRHPLTVCTESGDVQPTVGVWNLDVRLPADQKGTHMSRFVALLEENRAPLTVERFRAMLASMLEKLEAEAGRIEVTFPYFVNKTAPVSGVQSLLDYEVTLAGESRNGDTRLFLKVLVPVTSLCPCSKKISQYGAHNQRSHVTIDAELAADLPVEALIRIAEEEASCELWGLLKRPDEKFVTERAYENPKFVEDLVRDVAQRLDADERVVAYVLEAENFESIHNHSAYALIERDKRQAA

SEQ ID NO: 5848 - protein, 223 aa, unidentified
  source 1..223: note = Burkholderia dabaoshanensis
  REGION 1..223: note = tr|A0A2N7VFQ0|A0A2N7VFQ0_9BURK GTP cyclohydrolase 1; OS = Burkholderia dabaoshanensis OX=564714 GN=folE PE=3 SV=1
MKEASREKKASRAGTRKHAEASSAAPARPSRDEAEQAVRVLLRWAGDDPAREGLLDTPARVVRAYEEFFKGYALDPREILARTFSEVEGYDEMVVLKDIRFESYCEHHMVPIIGRAHVAYLPNHRVVGISKLARLVDAFAKRLQIQEKMTVQIADTLNDILQPKGVGVILEAAHQCITTRGVHKAGVQMVTSRMLGSFRDDPSTRREFLAIVGNADGMSVPNV

SEQ ID NO: 5849 - protein, 272 aa, unidentified
  source 1..272: note = Burkholderia dabaoshanensis
  REGION 1..272: note = tr|A0A2N7VKF2|A0A2N7VKF2_9BURK GTP cyclohydrolase FolE2 OS=Burkholderia dabaoshanensis OX=564714 GN=folE2; PE = 3 SV=1
MNQMNPAFVMPDVQSTVDTRQIAIQRVGVKGVRHPLTVRTASGDVQPTVGTWNLDVHLPADQKGTHMSRFVALLEGNKAPLEAATFRKMLDEMLSKLEATGGRIEVTFPYFVPKTAPVSGVTSLLDYEVTLAGQARDGEVRTFLRVLVPVTSLCPCSKEISQYGAHNQRSHVTIDVELVADLPVEELIRMAEEEASCELWGLLKRPDEKFVTERAYENPKFVEDLVRDVAQRLNADERIVSYTLEAENFESIHNHSAYAVIEHDKRDAAVAA

SEQ ID NO: 5850 - protein, 269 aa, Burkholderia diffusa
  REGION 1..269: note = tr|A0A1B4BY56|A0A1B4BY56_9BURK GTP cyclohydrolase FolE2 OS=Burkholderia diffusa OX=488732 GN=folE2 PE=3 SV=1
MNQMNPAFVMPDVQSTVDTRQIPIQRVGVKAVRHPLTVCTESGDVQPTVGVWNLDVRLPADQKGTHMSRFVALLEENRAPLTVERFRAMLASMLEKLEAEAGRIEVTFPYFVNKTAPVSGVQSLLDYEVTLAGESRNGEARLFLKVLVPVTSLCPCSKKISQYGAHNQRSHVTIDAELAADLPVEALIRIAEEEASCELWGLLKRPDEKFVTERAYENPKFVEDLVRDVAQRLDADERVIAYVLEAENFESIHNHSAYALIERDKRHAA

SEQ ID NO: 5851 - protein, 209 aa, Burkholderia diffusa
  REGION 1..209: note = tr|A0A1B4C2K2|A0A1B4C2K2_9BURK GTP cyclohydrolase 1; OS = Burkholderia diffusa OX=488732 GN=folE PE=3 SV=1
MGKKSARPEPAASRPSREEAEDAVRVLLRWAGDDPAREGLLDTPARVVRAYEQFFAGYALEPRDILARTFSEVDGYDEMIVLKDIRFESYCEHHMVPIIGRAHVAYLPNHRVVGISKLARLVDAFAKRLQIQEKMTVQIADTLFDVLQPKGVGVILEAAHQCISTRGVHKPGVEMVTSRMLGTFRTDPSTRREFLSIVANPSSVNLTNT

SEQ ID NO: 5852 - protein, 209 aa, Burkholderia dolosa
  REGION 1..209: note = tr|A0A0D5IRP9|A0A0D5IRP9_9BURK GTP cyclohydrolase 1; OS = Burkholderia dolosa AU0158 OX=350701 GN=folE PE=3 SV=1
MGKKSARSKPAAARPSREEAEDAVRVLLRWAGDDPTREGLIDTPARVVRAYEQFFAGYAVEPRDILARTFSEVDGYDEMIVLKDIRFESYCEHHMVPIIGRAHVAYLPNKRVVGISKLARLVDAFAKRLQIQEKMTVQIADTLFDVLQPKGVGVILEAAHQCISTRGVHKPGVEMVTSRMLGTFRTDPSTRREFLSIVANPSSVNLTNT

SEQ ID NO: 5853 - protein, 269 aa, Burkholderia dolosa
  REGION 1..269: note = tr|A2WDP5|A2WDP5_9BURK GTP cyclohydrolase FolE2; OS = Burkholderia dolosa AU0158 OX=350701 GN=folE2 PE=3 SV=1
MNQMNPAFVMPDVQSTVDTRQIPIQRVGVKAVRHPLTVCTESGDVQPTVGVWNLDVRLPADQKGTHMSRFVALLEENRAPLTVERFRAMLASMLAKLEAEAGRIEVTFPYFVNKTAPVSGVQSLLDYEVTLAGESRNGDTRVFLKVLVPVTSLCPCSKKISQYGAHNQRSHVTIDAELAADLPVEALIRIAEEEASCELWGLLKRPDEKFVTERAYENPKFVEDLVRDVAQRLDADERIVAYVLEAENFESIHNHSAYALIERDKRQAG

SEQ ID NO: 5854 - protein, 268 aa, Burkholderia gladioli
  REGION 1..268: note = tr|F2LNT4|F2LNT4_BURGS GTP cyclohydrolase FolE2; OS = Burkholderia gladioli (strain BSR3) OX=999541 GN=folE2; PE = 3 SV=1
MNQMNPGFAMPDVQSTVDTRQIPIQRVGVKAVRHPLTVRTASGEIQPSVGTWNLDVHLPAEQKGTHMSRFVALLEDNREPLGPEALRGLLASMLDKLEAVAGRIEVTFPYFVSKTAPVSGVKSLLDYEVTLAGEVRNGATRLFLKVLVPVTSLCPCSKKISQYGAHNQRSHVTIDAELDGEVAVEELIRIAEEEASCELWGLLKRPDEKFVTERAYENPKFVEDLVRDVAQRLNADERIVAYVLEAENFESIHNHSAYALIERDKRIG

SEQ ID NO: 5855 - protein, 268 aa, Burkholderia gladioli; identical to SEQ ID NO: 5854
  REGION 1..268: note = tr|A0A2S4NJ51|A0A2S4NJ51_BURGA GTP cyclohydrolase FolE2 OS=Burkholderia gladioli OX=28095 GN=folE2 PE=3 SV=1

SEQ ID NO: 5856 - protein, 268 aa, Burkholderia glumae
  REGION 1..268: note = tr|A0A2J9HMN8|A0A2J9HMN8_BURGL GTP cyclohydrolase FolE2 OS=Burkholderia glumae OX=337 GN=folE2 PE=3 SV=1
MNQMNPGFAMPDVQSTVDTRQIPIQRVGVKAVRHPLSVRGGTGEIQPSVGTWNLDVQLPADQKGTHMSRFVALLEENDQPLTAEVFRGLLASMLVRLEAQAGRIEVSFPYFVRKTAPVSGVKSLLDYQVTLAGDLRDGVTRLFLKVLVPVTSLCPCSKQISQYGAHNQRSHVTIDAELNADVPAEDLIRIAEEEASCELWGLLKRPDEKFVTERAYENPKFVEDLVRDVAQRLDADDRIAAYVLEAENFESIHNHSAYALIERDKRIA

SEQ ID NO: 5857 - protein, 268 aa, Burkholderia glumae; identical to SEQ ID NO: 5856
  REGION 1..268: note = tr|C5AJ55|C5AJ55_BURGB GTP cyclohydrolase FolE2; OS = Burkholderia glumae (strain BGR1) OX=626418 GN=folE2; PE = 3 SV=1

SEQ ID NO: 5858 - protein, 216 aa, unidentified
  source 1..216: note = Burkholderia insecticola
  REGION 1..216: note = tr|R4X2P8|R4X2P8_9BURK GTP cyclohydrolase 1; OS = Burkholderia insecticola OX=758793 GN=folE PE=3 SV=1
MSAPRKNHLSGSDIPADQADRPSREEAEAAVRVLLRWAGDDPNREGLLDTPARVVRAYEEFFAGYEQNPHDILARTFSEVQGYDEMIVLKDIRFESYCEHHMVPIIGRAHVAYLPNKRVVGISKLARLVDAFAKRLQIQEKMTAQIADTLNEVLQPIGVGVILEAAHQCMSTRGVHKAGVAMVTSRMLGSFRDDPSTRREFLSIVGNSNAFSVANT

SEQ ID NO: 5859 - protein, 267 aa, unidentified
  source 1..267: note = Burkholderia insecticola
  REGION 1..267: note = tr|R4WMM5|R4WMM5_9BURK GTP cyclohydrolase FolE2; OS = Burkholderia insecticola OX=758793 GN=folE2 PE=3 SV=1
MNQMNPAFVMPDVQSTPDTRQIAISRVGVKGVRHPLSVRTASGVQPSIGVWNLDVHLPAEQKGTHMSRFVALLEENREPLDQAALRTLLAAMLTKLEAHSGRIEVSLPYFVMKTAPVSGVQSLLDYEVTFIAEKRDGQTRMSMKVLVPVTSLCPCSKQISQYGAHNQRSHVTITAELAGEVAVEELIRIAEEEASCELWGLLKRPDEKFVTERAYENPKFVEDLVRDVATRLNADARIVAYVLEAENFESIHNHSAYAVIESTRRDA

SEQ ID NO: 5860 - protein, 316 aa, Burkholderia lata
  REGION 1..316: note = sp|Q39AS8|GCH41_BURL3 GTP cyclohydrolase FolE2 1; OS = Burkholderia lata (strain ATCC 17760 / DSM 23089 / LMG 22485 / NCIMB 9086 / R18194 / 383) OX=482957 GN=folE2-1 PE =3 SV=1
MEKALHRISSMNAPLPDISLTDAAPGGRPLEWVGMQGIDLPVAVAEPGCRRDVHARADVQVDLPAPHVKGIHMSRLYRLLDGLGDGTALSPAGLQHVLHAMVDSHRDCDTRSARLRLRFDLLARRAALVTDGLAGWKAYPVRIDATLSGARFELRAQVTVVYSSTCPCSAALSRHWVEQAFLAAFGHDDRVEPAAVAAWLKRHATAATPHSQRSEAVVSVALPADGATLGLIDLIDRIEHALGTPVQTAVKRADEQAFAVLNGGNLMFVEDAARRVQAALDGHHANPRVHVRHLESLHPHDAVAWAAPVREGADAC

SEQ ID NO: 5861 - protein, 269 aa, Burkholderia lata
  REGION 1..269: note = tr|A0A3G3HIU7|A0A3G3HIU7_BURL3 GTP cyclohydrolase FolE2 OS=Burkholderia lata (strain ATCC 17760 / DSM 23089 / LMG 22485 / NCIMB 9086 / R18194 / 383) OX=482957 GN=fol E2 PE=3 SV=1
MNQMNPAFVMPDVQSTVDTRQIPIQRVGVKAVRHPLTVCTESGDVQPTVGVWNLDVRLPADQKGTHMSRFVALLEENRAPLTVERFRAMLASMLEKLEAEAGRIEVTFPYFVNKTAPVSGVQSLLDYEVTLAGESRNGDTRLFLKVLVPVTSLCPCSKKISQYGAHNQRSHVTIDAELAADLPVEALIRIAEEEASCELWGLLKRPDEKFVTERAYENPKFVEDLVRDVAQRLDADERVMAYVLEAENFESIHNHSAYALIERDKRQAA

SEQ ID NO: 5862 - protein, 269 aa, Burkholderia latens
  REGION 1..269: note = tr|A0A1B4P3P6|A0A1B4P3P6_9BURK GTP cyclohydrolase FolE2 OS=Burkholderia latens OX=488446 GN=folE2 PE=3 SV=1
MNQMNPAFVMPDVQSTVDTRQIPIQRVGVKAVRHPLTVCTESGDVQPSVGVWNLDVRLPADQKGTHMSRFVALLEENRAPLTVARFRAMLASMLEKLEAEAGRIEVTFPYFVSKTAPVSGVQSLLDYEVTLAGESRNGETRVFLKVLVPVTSLCPCSKKISQYGAHNQRSHVTIDAELAADLPVEALIRIAEEEASCELWGLLKRPDEKFVTERAYENPKFVEDLVRDVAQRLDADERVVAYVLEAENFESIHNHSAYALIERDKRHAA

SEQ ID NO: 5863 - protein, 209 aa, Burkholderia latens
  REGION 1..209: note = tr|A0A1B4NYL5|A0A1B4NYL5_9BURK GTP cyclohydrolase 1; OS = Burkholderia latens OX=488446 GN=folE PE=3 SV=1
MGKKNARPEPAASRPSREEAEDAVRVLLRWAGDDPNREGLLDTPARVVRAYEEFFAGYALEPRDILARTFSEVDGYDEMIVLKDIRFESYCEHHMVPIIGRAHVAYLPNHRVVGISKLARLVDAFAKRLQIQEKMTVQIADTLFDVLQPKGVGVILEAAHQCISTRGVHKPGVEMVTSRMLGTFRTDPSTRREFLSIVANPSSVNLTNT

SEQ ID NO: 5864 - protein, 266 aa, Burkholderia mallei
  REGION 1..266: note = sp|Q62DU0|GCH4_BURMA GTP cyclohydrolase FolE2; OS = Burkholderia mallei (strain ATCC 23344) OX=243160; GN = folE2 PE=3 SV=1
MNPEFAMPDVQSTVDTRQMPIQRVGVRAVRHPLTVRTAEGETQATVGTWNLDVHLPADQKGTHMSRFVALLEERGGPLTADAFRTMLATMLEKLEARAGRIEVSFPYFVNKTAPVSGVRSLLDYEVTLTGDVRDGLTRVFAKVLVPVTSLCPCSKKISQYGAHNQRSHVTIDAELAADVPVEDLIRIAEEEASCELWGLLKRPDEKFVTERAYENPKFVEDLVRDVARRLDADERIVAYVLEAENFESIHNHSAYALIERDKRRGA

SEQ ID NO: 5865 - protein, 210 aa, Burkholderia mallei
  REGION 1..210: note = tr|A5PM35|A5PM35_BURML GTP cyclohydrolase 1; OS = Burkholderia mallei OX=13373 GN=folE PE=3 SV=1
MIDTQYNGACDVHHHSPAEIRRIRQFDPAAFEMAVGSLLMACGIEIDAAHTSRTAQRVRELWQKRLLDGYDVDPAEALGVGFDDRKEDMVIIRSIAVHGVCPHHLLPFRGVAHVAYLPGGRLHGFGRIARMIDAISHRFTYQEWITNEIATALVTHGKARGAACLIEAEQLCLLMGENRRGDERVITQCYVGEFDHNAQARNEFLRAINR

SEQ ID NO: 5866 - protein, 269 aa, Burkholderia metallica
  REGION 1..269: note = tr|A0A1B4I773|A0A1B4I773_9BURK GTP cyclohydrolase FolE2 OS=Burkholderia metallica OX=488729 GN=folE2 PE=3; SV = 1
MNQMNPAFVMPDVQSTVDTRQIPIQRVGVKAVRHPLTVRTEGGGVQPTVGVWNLDVRLPADQKGTHMSRFVALLEENRAPLTVERFRAMLASMLEKLEAEAGRIEVTFPYFVNKTAPVSGVQSLLDYEVTLAGESRNGDTRLFLKVLVPVTSLCPCSKKISQYGAHNQRSHVTIDAELAADLPVEALIRIAEEEASCELWGLLKRPDEKFVTERAYENPKFVEDLVRDVAQRLDADERVMAYVLEAENFESIHNHSAYALIERDKRQAA

SEQ ID NO: 5867 - protein, 306 aa, Burkholderia metallica
  REGION 1..306: note = tr|A0A1B4I7I1|A0A1B4I7I1_9BURK GTP cyclohydrolase FolE2 OS=Burkholderia metallica OX=488729 GN=folE2 PE=3; SV = 1
MNAALPDISLTDVAPGRRPLDWVGMQGIDLPVAVAEPGCRRDVHARADVQVDLPAPDAKGIHMSRLYRLLDGLGDGTALSPAGLRRVLHAMVDSHRDCDTRSARLRLRFDLLARRAALVTDGLAGWKAYPVRIDATLTGVGFELRAQVTAVYSSTCPCSAALSRHWVEQAFLAAFGRDERVEPAAVAAWLKRHATAATPHSQRSEAVVSVALPADGATLGLIDLIDRIEYALGTPVQTAVKRADEQAFAVLNGENLMFVEDAARRVQAALDGRHADPRVHVRHLESLHPHDAVAWAAPVREGADAC

SEQ ID NO: 5868 - protein, 269 aa, Burkholderia multivorans
  REGION 1..269: note = sp|A9ANA1|GCH4_BURM1 GTP cyclohydrolase FolE2; OS = Burkholderia multivorans (strain ATCC 17616 / 249); OX = 395019 GN=folE2 PE=3 SV=1
MNQMNPAFVMPDVQSTVDTRQIPIQRVGVKAVRHPLTVLTESGDVQPTVGVWNLDVRLPAEQKGTHMSRFVALLEENRAPLTIERFRAMIASMLEKLEAEAGRIEVTFPYFVNKTAPVSGVQSLLDYEVTLAGESRNGDTRLFLKVLVPVTSLCPCSKKISQYGAHNQRSHVTIDAELAADVPVEALIRIAEEEASCELWGLLKRPDEKFVTERAYENPKFVEDLVRDVAARLDADARIVAYVLEAENFESIHNHSAYALIERDKRHAA

SEQ ID NO: 5869 - protein, 209 aa, Burkholderia multivorans
  REGION 1..209: note = tr|A0A2S9MZT6|A0A2S9MZT6_9BURK GTP cyclohydrolase 1; OS = Burkholderia multivorans OX=87883 GN=folE PE=3 SV=1
MGKKTARSEPAASRPSREEAEDAVRVLLRWAGDDPTREGLIDTPARVVRAYEQFFAGYSIEPRDILARTFSEVDGYDEMIVLKDIRFESYCEHHMVPIIGRAHVAYLPNHRVVGISKLARLVDAFAKRLQIQEKMTVQIADTLFDVLQPKGVGVILEAAHQCISTRGVHKPGVEMVTSRMLGTFRTDPSTRREFLSIVANPSSVNLTNT

SEQ ID NO: 5870 - protein, 216 aa, unidentified
  source 1..216: note = Burkholderia novacaledonica
  REGION 1..216: note = tr|A0A2U3HYA3|A0A2U3HYA3_9BURK GTP cyclohydrolase 1; OS = Burkholderia novacaledonica OX=1544861 GN=folE PE=3 SV=1
MSAPRKNHLSGSDIPADKADRPSREEAEAAVRVLLRWAGDDPRREGLLDTPGRVVRAYEEFFAGYTQNPHDILARTFSEVQGYDEMIVLKDIRFESYCEHHMVPIIGRAHVAYLPNERVVGISKLARLVDAFAKRLQIQEKMTAQIADTLNEVLQPLGVGVILEAAHQCMSTRGVHKAGVSMVTSRMLGSFRDDPSTRREFLSIVSNQNAFSVSNT

SEQ ID NO: 5871 - protein, 268 aa, unidentified
  source 1..268: note = Burkholderia novacaledonica
  REGION 1..268: note = tr|A0A2U3I3R2|A0A2U3I3R2_9BURK GTP cyclohydrolase FolE2 OS=Burkholderia novacaledonica OX=1544861 GN=folE2; PE = 3 SV=1
MNQMNPAFVMPDVQSTSDTRQIAIQRVGVKGVRHPLSVVTQSGVKPSVGVWNLDVHLPADQKGTHMSRFVALLEENRHPLDQHALRGLLAVMLSKLEAHSGRIEVTLPYFVMKTAPVSGVQSLLDYEVTFIAERRDGDTRMSMKVLVPVTSLCPCSKKISQYGAHNQRSHVTITAEVADEIAVEELIRIAEEEASCELWGLLKRPDEKFVTERAYDNPKFVEDLVRDIATRLNADERIVAYVLEAENFESIHNHSAYAVIERDKRRDA

SEQ ID NO: 5872 - protein, 243 aa, Burkholderia oklahomensis
  REGION 1..243: note = tr|A0A381IJA4|A0A381IJA4_9BURK GTP cyclohydrolase 1; OS = Burkholderia oklahomensis OX=342113 GN=folE PE=3 SV=1
MAKGKTASKTAAPTARKAASKATNKTASKQTTRAAAPSPAPAPVPASRPSRDEAEAAVRVLLRWAGDDPEREGLVDTPARVVRAYEEFFSGYALEPRDILARTFSEVDGYDEMIVLKDIRFESYCEHHMVPIIGRAHVAYLPHHRVVGISKLARLVDAFAKRLQIQEKMTVQIADTLFDVLQPKGVGVILEAAHQCISTRGIHKPGVEMVTSRMLGTFRTDPATRREFLSIVANPSSVNLTNT

SEQ ID NO: 5873 - protein, 293 aa, Burkholderia oklahomensis
  REGION 1..293: note = tr|A0A381IJH0|A0A381IJH0_9BURK GTP cyclohydrolase FolE2 OS=Burkholderia oklahomensis OX=342113 GN=folE2 PE=3; SV = 1
MLHFRQVMRHMAMSCRVTLYGSNKMNLMNPEFVMPDVQSTIDTRQMPIQRVGVRAVRHPLTVRTAEGETQATVGTWNLDVHLPADQKGTHMSRFVALLEESDGPLTIDAFRAMLATMLEKLEAQAGRIEVSFPYFVNKTAPVSGVRSLLDYEVTLTGDVRGGAARVFAKVLVPVTSLCPCSKKISQYGAHNQRSHVTIDAELAADVPVEDLIRIAEEEASCELWGLLKRPDEKFVTERAYENPKFVEDLVRDVARRLDADARIVAYVLEAENFESIHNHSAYALIERDKRRAE

SEQ ID NO: 5874 - protein, 244 aa, Burkholderia plantarii
  REGION 1..244: note = tr|A0A0B6S5W1|A0A0B6S5W1_9BURK GTP cyclohydrolase I; OS = Burkholderia plantarii OX=41899 GN=folE2 PE=4 SV=1
MGNLIDAPELTRAATDEGAPLSRIIRRRLESAGARFHANDNIAAYLRDGELETLQAEVAQGLESVLRSLVIDVDNDHNTRETAARVARMFVREVFAGRYEAAPAVTEFPNVERLDELLIVGPLRVRSACSHHLCPIMGRIWIGVLPSAASSLIGLSKYGRLVNWVMTRPQIQEEAVKQIADLLEARIAPDGLAVVLEAEHFCMHWRGTKDDQARMTNSVMRGKFLADASLRREFLSLLPEKSRG

SEQ ID NO: 5875 - protein, 268 aa, Burkholderia plantarii
  REGION 1..268: note = tr|A0A0B6SAA0|A0A0B6SAA0_9BURK GTP cyclohydrolase FolE2 OS=Burkholderia plantarii OX=41899 GN=folE2 PE=3 SV=1
MNQMNPGFAMPDVQSTVDTRQIPIQRVGVKAVRHPLTVRGAAGEIQPSVGTWNLDVHLPADQKGTHMSRFVALLEENDQPLTAGVFRGLLASMLVRLEARAGRIEVSFPYFVRKTAPVSGVKSLLDYQVTLAGDVRDGVTRLFLKVLVPVTSLCPCSKKISQYGAHNQRSHVTIDAELNADVPAEDLIRIAEEEASCELWGLLKRPDEKFVTERAYENPKFVEDLVRDVAQRLDADERIAAYVLEAENFESIHNHSAYALIERDKRIA

SEQ ID NO: 5876 - protein, 269 aa, Burkholderia pseudomallei
  REGION 1..269: note = sp|A3NMF5|GCH4_BURP6 GTP cyclohydrolase FolE2; OS = Burkholderia pseudomallei (strain 668) OX=320373; GN = folE2 PE=3 SV=1
MNLMNPEFAMPDVQSTVDTRQMPIQRVGVRAVRHPLTVRTAEGETQATVGTWNLDVHLPADQKGTHMSRFVALLEERGGPLTADAFRTMLATMLEKLEARAGRIEVSFPYFVNKTAPVSGVRSLLDYEVTLTGDVRDGLTRVFAKVLVPVTSLCPCSKKISQYGAHNQRSHVTIDAELAADVPVEDLIRIAEEEASCELWGLLKRPDEKFVTERAYENPKFVEDLVRDVARRLDADERIVAYVLEAENFESIHNHSAYALIERDKRRGA

SEQ ID NO: 5877 - protein, 293 aa, Burkholderia pseudomallei
  REGION 1..293: note = tr|A8ENW0|A8ENW0_BURPE GTP cyclohydrolase FolE2; OS = Burkholderia pseudomallei 406e OX=360118 GN=folE2 PE=3; SV = 1
MLHFRQAMRHRAMSRRMTLQGSNKMNLMNPEFAMPDVQSTVDTRQMPIQRVGVRAVRHPLTVRTAEGETQATVGTWNLDVHLPADQKGTHMSRFVALLEERGGPLTADAFRTMLATMLEKLEARAGRIEVSFPYFVNKTAPVSGVRSLLDYEVTLTGDVRDGLTRVFAKVLVPVTSLCPCSKKISQYGAHNQRSHVTIDAELAADVPVEDLIRIAEEEASCELWGLLKRPDEKFVTERAYENPKFVEDLVRDVARRLDADERIVAYVLEAENFESIHNHSAYALIERDKRRGA

SEQ ID NO: 5878 - protein, 270 aa, unidentified
  source 1..270: note = Burkholderia pseudomultivorans
  REGION 1..270: note = tr|A0A132E9T7|A0A132E9T7_9BURK GTP cyclohydrolase FolE2 OS=Burkholderia pseudomultivorans OX=1207504; GN = folE2 PE=3 SV=1
MNQMNPAFVMPDVQSTVDTRQITIQRVGVKAVRHPLTVHTESGDVQPTVGLWNLDVRLPADQKGTHMSRFVALLEEHRAAPLTVERFRAMLASMLEKLEADAGRIEVTFPYFVNKTAPVSGVQSLLDYEVTLAGERRNGETRLFLKVLVPVTSLCPCSKKISQYGAHNQRSHVTIDAELAADLPVEALIRIAEEEASCELWGLLKRPDEKFVTERAYENPKFVEDLVRDVATRLDADERIVAYVLEAENFESIHNHSAYALIERDKRHAA

SEQ ID NO: 5879 - protein, 305 aa, unidentified
  source 1..305: note = Burkholderia pseudomultivorans
  REGION 1..305: note = tr|A0A132EQ69|A0A132EQ69_9BURK GTP cyclohydrolase FolE2 OS=Burkholderia pseudomultivorans OX=1207504; GN = folE2 PE=3 SV=1
MTAALPDISIADVAPAGGPLEWVGMQGIDLPVVVAEQGCARNVHARADVQVDLPAAHVKGIHMSRLYRLLDALGDGDALSPAGLRQALQAMIDSHRDCDTRSARLRLHFDLLARRPALVTDGLAGWKSYPVRLDAMLAGDVFTLRAQVTIVYSSTCPCSAALSRHWIEQAFVAAFGAEDRVEPAAVAAWLRRHATDATPHSQRSEAVVEVGIADDRATLGLLALIDRVEHALGTPVQTAVKRADEQAFAVLNGRNLMFVEDAARRVQAALDRVHADSRVRVRHLESLHPHDAVAWAASRSAGIAA

SEQ ID NO: 5880 - protein, 210 aa, unidentified
  source 1..210: note = Burkholderia puraquae
  REGION 1..210: note = tr|A0A1X1PMG6|A0A1X1PMG6_9BURK GTP cyclohydrolase 1; OS = Burkholderia puraquae OX=1904757 GN=folE PE=3 SV=1
MGKKKSARPEPAASRPSREEAEDAVRVLLRWAGDDPAREGLIDTPARVVRAYEQFFAGYEVEPRDILARTFSEVDGYDEMIVLKDIRFESYCEHHMVPIIGRAHVAYLPNHRVVGISKLARLVDAFAKRLQIQEKMTVQIADTLFDVLQPKGVGVILEAAHQCISTRGVHKPGVEMVTSRMLGTFRTDPSTRREFLSIVANPSSVNLTNT

SEQ ID NO: 5881 - protein, 308 aa, unidentified
  source 1..308: note = Burkholderia puraquae
  REGION 1..308: note = tr|A0A1X1P6Y5|A0A1X1P6Y5_9BURK GTP cyclohydrolase FolE2 OS=Burkholderia puraquae OX=1904757 GN=folE2 PE=3; SV = 1
MNAPLPDISLTDAAPGGCPLEWVGMQGIDLPVAVAEPGCRRDVHARADVQVDLPAPHVKGIHMSRLYRLLDGFGDGAALSPAGLQRVLHAMVDSHCDCDTRSARLRLRFDLLARRAALVTDGLAGWKAYPVRIDATLAGSGFELRAQVTVVYSSTCPCSAALSRHWVEQAFLAAFGRDDRVEPAAVAAWLRRHATAATPHSQRSEAVVSVGLPADGATLGLIDLIDRIEHALGTPVQTAVKRADEQAFAVLNGGNLMFVEDAARRVRAALDGHGHHANPRVHVRHLESLHPHDAVAWAAPVREGVDAC

SEQ ID NO: 5882 - protein, 269 aa, Burkholderia pyrrocinia; identical to SEQ ID NO: 5847
  REGION 1..269: note = tr|A0A2Z5N3N2|A0A2Z5N3N2_BURPY GTP cyclohydrolase FolE2 OS=Burkholderia pyrrocinia OX=60550 GN=folE2 PE=3; SV = 1

SEQ ID NO: 5883 - protein, 209 aa, Burkholderia pyrrocinia
  REGION 1..209: note = tr|A0A087NUB2|A0A087NUB2_BURPY GTP cyclohydrolase 1; OS = Burkholderia pyrrocinia OX=60550 GN=folE PE=3 SV=1
MGKKSARPEQAASRPSREEAEAAVRVLLRWAGDDPAREGLVDTPARVVRAYEQFFAGYAVEPRDILARTFSEVDGYDEMIVLKDIRFESYCEHHMVPIIGRAHVAYLPNHRVVGISKLARLVDAFAKRLQIQEKMTVQIADTLFDVLQPKGVGVILEAAHQCISTRGVHKPGVEMVTSRMLGSFRTDPSTRREFLSIVANPSSVNLTNT

SEQ ID NO: 5884 - protein, 269 aa, unidentified
  source 1..269: note = Burkholderia reimsis
  REGION 1..269: note = tr|A0A365QIF5|A0A365QIF5_9BURK GTP cyclohydrolase FolE2 OS=Burkholderia reimsis OX=2234132 GN=folE2 PE=3 SV=1
MNQMNPAFVMPDVQSTVDTRQIPIQRVGVKAVRHPLTVCTEGGDVQPTVGVWNLDVRLPADQKGTHMSRFVALLEENRAPLTVERFRAMLASMLEKLEAEAGRIEVTFPYFVNKTAPVSGVQSLLDYEVTLAGESRNGDTRLFLKVLVPVTSLCPCSKKISQYGAHNQRSHVTIDAELAADLPVEALIRIAEEEASCELWGLLKRPDEKFVTERAYENPKFVEDLVRDVAQRLDADERVVAYVLEAENFESIHNHSAYALIERDKRQAA

SEQ ID NO: 5885 - protein, 306 aa, unidentified
  source 1..306: note = Burkholderia reimsis
  REGION 1..306: note = tr|A0A365QWT6|A0A365QWT6_9BURK GTP cyclohydrolase FolE2 OS=Burkholderia reimsis OX=2234132 GN=folE2 PE=3 SV=1
MNAPLPDISLTDAAPGRRPLEWVGMQGIDLPVAVAEPGCRRDVHARADVQVDLPVPHVKGIHMSRLYRLLDGLGDGDALSPAGLRPVLQAMVDSHRDCDTRRARLRLRFDLLARRAALVTDGLAGWKAYPVRIDATLTDVGFEVRAQVTVAYSSTCPCSAALSRHWVEQAFLAAFGRDDRVEPAAVAAWLKRHATAATPHSQRSEAVVSAGLPADGATLGLIDLIDRVEHALGTPVQTAVKRADEQAFAVLNGGNLMFVEDAARRVQDALDGRHAHPRVHVRHLESLHPHDAVAWAAPVREGADAC

SEQ ID NO: 5886 - protein, 211 aa, Burkholderia seminalis
  REGION 1..211: note = tr|A0A103KH31|A0A103KH31_9BURK GTP cyclohydrolase 1; OS = Burkholderia seminalis OX=488731 GN=folE PE=3 SV=1
MGKGKKTVRPEPAVTRPSREEAEDAVRVLLRWAGDDPAREGLIDTPARVVRAYEQFFAGYALEPRDILARTFSEVDGYDEMIVLKDIRFESYCEHHMVPIIGRAHVAYLPNHRVVGISKLARLVDAFAKRLQIQEKMTVQIADTLFDVLQPKGVGVILEAAHQCISTRGVHKPGVEMVTSRMLGTFRTDPSTRREFLSIVANPSSVNLTNT

SEQ ID NO: 5887 - protein, 316 aa, Burkholderia seminalis
  REGION 1..316: note = tr|A0A118FR61|A0A118FR61_9BURK GTP cyclohydrolase FolE2 OS=Burkholderia seminalis OX=488731 GN=folE2 PE=3; SV = 1
MDKARHRNPSMNAALPDVSLTDAAPGRRPLEWVGMQGIDLPVAVAEPGCRRDVHARADVQVDLPAPHVKGIHMSRLYGLLDRLADGEALSPAGLGRVLRAMVDSHRDCDTRSARVRLRFDLLARRPALVTEGLAGWKAYPVRIDATLAGEAFELRAQVTVAYSSTCPCSAALSRHWVEQAFLAAFGREDRVAPAAVAAWLKRHASAATPHSQRSEAVVGVALPAAGATLGLIDLIDRVEHALGTPVQTAVKRADEQAFAVLNGGNLMFVEDAARRVQAALDGRHANPCVQVRHLESLHPHDAVAWAAPMAEGAGAC

SEQ ID NO: 5888 - protein, 269 aa, unidentified
  source 1..269: note = Burkholderia singularis
  REGION 1..269: note = tr|A0A238H2R3|A0A238H2R3_9BURK GTP cyclohydrolase FolE2 OS=Burkholderia singularis OX=1503053 GN=folE2 PE=3; SV = 1
MNQMNPEFAMPDVQSTVDTRQLPIQRVGVRAVRHPLTVRTATGDTQASVGMWNLDVHLPADQKGTHMSRFVALLEANDAPLTADSFRAMLATMLEKLEAQAGRIEVSFPYFVNKTAPVSGVRSLLDYEVTLTGDMRGGVTRLFAKVLVPVTSLCPCSKQISQYGAHNQRSHVTIDAELAADVPVEELIRIAEEEASCELWGLLKRPDEKFVTERAYENPKFVEDLVRDIAKRLDADERIVAYVLEAENFESIHNHSAYALIERDKRLLA

SEQ ID NO: 5889 - protein, 269 aa, unidentified
  source 1..269: note = Burkholderia singularis
  REGION 1..269: note = tr|A0A103E5I4|A0A103E5I4_9BURK GTP cyclohydrolase FolE2 OS=Burkholderia singularis OX=1503053 GN=folE2 PE=3; SV = 1
MNQMNPEFAMPDVQSTVDTRQLPIQRVGVRAVRHPLTVRTATGDTQASVGMWNLDVHLPADQKGTHMSRFVALLEANDAPLTADSFRAMLATMLEKLEAQAGRIEVSFPYFVNKTAPVSGVRSLLDYEVTLTGDVRGGVTRLFAKVLVPVTSLCPCSKQISQYGAHNQRSHVTIDAELAADVPVEELIRIAEEEASCELWGLLKRPDEKFVTERAYENPKFVEDLVRDIAKRLDADERIVAYVLEAENFESIHNHSAYALIERDKRLPA

SEQ ID NO: 5890 - protein, 268 aa, Burkholderia sp.
  REGION 1..268: note = tr|A0A1N6LRS6|A0A1N6LRS6_9BURK GTP cyclohydrolase FolE2 OS=Burkholderia sp. GAS332 OX=1882750 GN=folE2 PE=3; SV = 1
MNQMNPAFVMPDVQSTPDTRQIPIQRVGVKAVRHPLTVRTQGGEVQPSVGTWNLDVHLPADQKGTHMSRFVALLEENKAPLEAATFRRMLAAMLEKLEAEAGRIEVSFPYFVNKTAPVSGVQSLLDYEVTLTGETRNGATRLFLKVLVPVTSLCPCSKKISQYGAHNQRSHVTINAELAGDVAVEELVRIAEEEASCELWGLLKRPDEKFVTERAYENPKFVEDLVRDVAQRLNADERIVAYVLEAENFESIHNHSAYAVIERDKRAA

SEQ ID NO: 5891 - protein, 209 aa, Burkholderia sp.; identical to SEQ ID NO: 5851
  REGION 1..209: note = tr|A0A3P0S935|A0A3P0S935_9BURK GTP cyclohydrolase 1; OS = Burkholderia sp. Bp9004 OX=2184559 GN=folE PE=3 SV=1

SEQ ID NO: 5892 - protein, 306 aa, Burkholderia stabilis
  REGION 1..306: note = tr|A0A498RUX0|A0A498RUX0_9BURK GTP cyclohydrolase FolE2 OS=Burkholderia stabilis OX=95485 GN=folE2_2 PE=3; SV = 1
MTAALPDISLTDAVPGHRPLEWVGMQGIDLPVVVAEPGCRRHVHARADVHVDLPAPQVKGIHMSRLYRLLDGLGDGDALSPAGLRRMLRAMIDSHRDCESRSARLRLHFDLLARRPALVTDGLAGWKSYPVRIDATLAGDAFALRAQVTVAYSSTCPCSAALSRHWVEQAFLGAFGGEERVSPAAVAAWLQQHATAATPHSQRSEAVVSVGLAPEDAALRLLDLIDRIEHALGTPVQTAVKRADEQAFAVLNGGNLMFVEDAARRVQAALDGRYANPGVHVRHLESLHPHDAVAWAAPVREGADAC

SEQ ID NO: 5893 - protein, 211 aa, Burkholderia stabilis
  REGION 1..211: note = tr|A0A1D7ZNB9|A0A1D7ZNB9_9BURK GTP cyclohydrolase 1; OS = Burkholderia stabilis OX=95485 GN=folE PE=3 SV=1
MGKKKTVRPEPAAASRPSREEAEDAVRVLLRWAGDDPAREGLIDTPARVVRAYEQFFAGYALEPRDILARTFSEVDGYDEMIVLKDIRFESYCEHHMVPIIGRAHVAYLPNHRVVGISKLARLVDAFAKRLQIQEKMTVQIADTLFDVLQPKGVGVILEAAHQCISTRGVHKPGVEMVTSRMLGTFRTDPSTRREFLSIVANPSSVNLTNT

SEQ ID NO: 5894 - protein, 209 aa, unidentified
  source 1..209: note = Burkholderia stagnalis
  REGION 1..209: note = tr|A0A125KKF9|A0A125KKF9_9BURK GTP cyclohydrolase 1; OS = Burkholderia stagnalis OX=1503054 GN=folE PE=3 SV=1
MGKKSSRPEPAASRPSRSEAEEAVRVLLRWAGDDPAREGLVDTPARVVRAYEEFFAGYAIEPRDILARTFSEVDGYDEMIVLKDIRFESYCEHHMVPIIGRAHVAYLPNHRVVGISKLARLVDAFAKRLQIQEKMTVQIADTLFDVLQPKGVGVILEAAHQCISTRGIHKPGVEMVTSRMLGTFRTDPSTRREFLSIVANPSSVNLTNT

SEQ ID NO: 5895 - protein, 269 aa, unidentified
  source 1..269: note = Burkholderia stagnalis
  REGION 1..269: note = tr|A0A119C8R7|A0A119C8R7_9BURK GTP cyclohydrolase FolE2 OS=Burkholderia stagnalis OX=1503054 GN=folE2 PE=3; SV = 1
MNQMNPAFVMPDVQSTVDTRQIPIQRVGVKAVRHPLTVRTESGDVQPTVGVWNLDVHLPADQKGTHMSRFVALLEEHRAPLTTERFRAMLAAMLEKLEAEAGRIEVTFPYFVNKTAPVSGVQSLLDYEVTLAGDTRGGATRLFMKVLVPVTSLCPCSKKISQYGAHNQRSHVTIDAELAADVPVEALIRMAEEEASCELWGLLKRPDEKFVTERAYENPKFVEDLVRDVAQRLDRDERIVAYVLEAENFESIHNHSAYALIERDKRHAA

SEQ ID NO: 5896 - protein, 316 aa, unidentified
  source 1..316: note = Burkholderia territorii
  REGION 1..316: note = tr|A0A108F426|A0A108F426_9BURK GTP cyclohydrolase FolE2 OS=Burkholderia territorii OX=1503055 GN=folE2 PE=3; SV = 1
METALHRIPDMNAALPDISLTDAAPGHRPLEWVGMQNVDLPVVVAEPGCRRDVHARADVQVDLPAPRVKGIHMSRLYGLLDRLADGEALSPAGLQRMLRAMIDSHHDCATRSARVRLRFDLLARRAALVTEGLAGWKAYPVQIDATLAGDAFALRAQTTIVYSSTCPCSAALSRHWVEQAFLTAFGREDRVEPAAVAAWVKRHATAATPHSQRSEAVVDVALPADGATLGLIDLVDRVERALGTPVQTAVKRADEQAFAVLNGENLMFVEDAARRVQAALEDRHASPRVRVRHLESLHPHDAVAWAAPVREGGDAC

SEQ ID NO: 5897 - protein, 209 aa, unidentified
  source 1..209: note = Burkholderia territorii
  REGION 1..209: note = tr|A0A124KQA6|A0A124KQA6_9BURK GTP cyclohydrolase 1; OS = Burkholderia territorii OX=1503055 GN=folE PE=3 SV=1
MGKKSARPEPAASRPSREEAEEAVRVLLRWAGDDPAREGLLDTPARVVRAYEEFFAGYALEPRDILARTFSEVDGYDEMIVLKDIRFESYCEHHMVPIIGRAHVAYLPNHRVVGISKLARLVDAFAKRLQIQEKMTVQIADTLFDVLQPKGVGVILEAAHQCISTRGVHKPGVEMVTSRMLGTFRTDPSTRREFLSIVANPSSVNLTNT

SEQ ID NO: 5898 - protein, 269 aa, Burkholderia thailandensis
  REGION 1..269: note = sp|Q2T7N4|GCH4_BURTA GTP cyclohydrolase FolE2; OS = Burkholderia thailandensis (strain ATCC 700388 / DSM 13276 / CIP 106301 / E264) OX=271848 GN=folE2 PE=3 SV=2
MNLMNPEFVMPDVQSTVDTRQMPIQRVGVRAVRHPLTVRTAEGETQATVGTWNLDVHLPADQKGTHMSRFVALLEESGGPLTADAFRAMLATMLEKLEAQAGRIEVSFPYFVNKTAPVSGVRSLLDYEVTLTGDVRDGLTRVFAKVLVPVTSLCPCSKKISQYGAHNQRSHVTIDAELAADVPVEDLIRIAEEEASCELWGLLKRPDEKFVTERAYENPKFVEDLVRDVARRLDADERIVAYVLEAENFESIHNHSAYALIERDKRRRA

SEQ ID NO: 5899 - protein, 242 aa, Burkholderia thailandensis
  REGION 1..242: note = tr|A0A2N8R3G5|A0A2N8R3G5_BURTH GTP cyclohydrolase 1; OS = Burkholderia thailandensis OX=57975 GN=folE PE=3 SV=1
MAKGNTASKAAAPAAHPAASRTSNEAGKAASKPAARAAARTSAPVNRPSRDEAEAAVRVLLRWAGDDPEREGLVDTPARVVRAYEEFFSGYTLEPRDILARTFSEVDGYDEMIVLKDIRFESYCEHHMVPIIGRAHVAYLPNHRVVGISKLARLVDAFAKRLQIQEKMTVQIADTLFDVLQPKGVGVILEAAHQCISTRGIHKPGVEMVTSRMLGTFRTDPATRREFLSIVANPSSVNLTNT

SEQ ID NO: 5900 - protein, 269 aa, Burkholderia ubonensis
  REGION 1..269: note = tr|A0A118HL37|A0A118HL37_9BURK GTP cyclohydrolase FolE2 OS=Burkholderia ubonensis OX=101571 GN=folE2 PE=3; SV = 1
MNQMNPAFVMPDVQSTVDTRQIPIQRVGVKAVRHPLTVRTESGDIQPSVGLWNLDVHLPADQKGTHMSRFVALLEEHRAPLTTGLFRTMLASMLEKLEAEAGRIEVTFPYFVNKTAPVSGVQSLLDYEVTLAGESRGGVTRLFLKVLVPVTSLCPCSKKISQYGAHNQRSHVTIDAELAADVPVEALIRMAEEEASCELWGLLKRPDEKFVTERAYENPKFVEDLVRDVAQRLDADERIVAYVLEAENFESIHNHSAYALIERDKRLAA

SEQ ID NO: 5901 - protein, 209 aa, Burkholderia ubonensis
  REGION 1..209: note = tr|A0A108E7C7|A0A108E7C7_9BURK GTP cyclohydrolase 1; OS = Burkholderia ubonensis OX=101571 GN=folE PE=3 SV=1
MGKKSSRPEPAASRPSRSEAEEAVRVLLRWAGDDPAREGLVDTPARVVRAYEEFFSGYAIEPRDILARTFSEVDGYDEMIVLKDIRFESYCEHHMVPIIGRAHVAYLPNHRVVGISKLARLVDAFAKRLQIQEKMTVQIADTLFDVLQPKGVGVILEAAHQCISTRGIHKPGVEMVTSRMLGTFRTDPSTRREFLSIVANPSSVNLTNT

SEQ ID NO: 5902 - protein, 269 aa, Burkholderia vietnamiensis
  REGION 1..269: note = sp|A4JLT5|GCH4_BURVG GTP cyclohydrolase FolE2; OS = Burkholderia vietnamiensis (strain G4 / LMG 22486); OX = 269482 GN=folE2 PE=3 SV=1
MNQMNPAFVMPDVQSTVDTRQIPIQRVGVKAVRHPLTVCTESGDVQPSVGVWNLDVRLPADQKGTHMSRFVALLEENRAPLTVERFRAMLASMLEKLEAQAGRIEVTFPYFVNKTAPVSGVQSLLDYEVTLAGESRDGHTRVFLKVLVPVTSLCPCSKKISQYGAHNQRSHVTIDAELAGDLPVEALIRIAEEEASCELWGLLKRPDEKFVTERAYENPKFVEDLVRDVAQRLDADERVIAYVLEAENFESIHNHSAYALIERDKRLAA

SEQ ID NO: 5903 - protein, 269 aa, Burkholderia vietnamiensis; identical to SEQ ID NO: 5902
  REGION 1..269: note = tr|A0A132D6Q3|A0A132D6Q3_BURVI GTP cyclohydrolase FolE2 OS=Burkholderia vietnamiensis OX=60552 GN=folE2 PE=3; SV = 1

SEQ ID NO: 5904 - protein, 268 aa, unidentified
  source 1..268: note = Burkholderiaceae bacterium
  REGION 1..268: note = tr|A0A0F0DBC2|A0A0F0DBC2_9BURK GTP cyclohydrolase FolE2 OS=Burkholderiaceae bacterium 26 OX=1619951 GN=folE2; PE = 3 SV=1
MNDMNPAFAMPDVQSSHDTRQIPIQRVGVRGVRYPMSLQTPSGVQNTVGTYNLDVHLPADQKGTHMSRFVALLEEEREPLNLAQFQLLLEKMLEKLEADAGRIEVHFPYFVSKTAPVSGVQSLMDYEVTMIGEVRDGHTTVRVKALVPVTSLCPCSKKISQYGAHNQRSHITIDAELAADTPVESLIRMAEEEASCELWGLLKRPDEKFVTERAYENPKFVEDLVRDIAMRLNQDDRIVAYTLEAENFESIHNHSAYALIERDKRTDK

SEQ ID NO: 5905 - protein, 267 aa, unidentified
  source 1..267: note = Burkholderiaceae bacterium
  REGION 1..267: note = tr|A0A522L2Q3|A0A522L2Q3_9BURK GTP cyclohydrolase FolE2 OS=Burkholderiaceae bacterium OX=2030806 GN=folE2; PE = 3 SV=1
MNSLIDSVVVMPDVQSSVDTRHMPIQRVGVRGVRHPMLVAAAGQPQSTIAMWELTVALSEQEKGTHMSRFVALLEQYRATPMTPALFCAMARDMLSLLHSDRGDISASFPYFINKAAPVSGVTSLMDYEVTWTARAQQDGVAEFELGLVVPVTSLCPCSKAISEYGAHNQRSHVSVNVVFDSSAGIDLDALIGMVEKQASCELWGLLKRPDEKYVTEHAYENPKFVEDLVRDVAVRVKAMAGVQRFHIEAENFESIHNHSAYAVVEG

SEQ ID NO: 5906 - protein, 193 aa, unidentified
  source 1..193: note = Burkholderiales bacterium
  REGION 1..193: note = tr|A0A1Q3YQF4|A0A1Q3YQF4_9BURK GTP cyclohydrolase 1; OS = Burkholderiales bacterium 70-64 OX=1895733 GN=folE PE=3; SV = 1
MDDPPDADRPFDASDWRRLLRSLHEDPDRPGLHETPMRVARAWAHWTSGYAQDPAEILKVFQDGAEEYNELIVVRGIPVYSHCEHHLAPFFGTATVGYVPNGRIVGLSKLTRLVDCYAKRLQVQERLTQQVAHALMTHLEPTAVGVVVRCRHLCMESRGIRAIGEETVTSAMLGELLTNLGMRTELLALERTR

SEQ ID NO: 5907 - protein, 181 aa, unidentified
  source 1..181: note = Burkholderiales bacterium
  REGION 1..181: note = tr|A0A1Q3XHK1|A0A1Q3XHK1_9BURK GTP cyclohydrolase 1; OS = Burkholderiales bacterium 67-32 OX=1895729 GN=folE PE=3; SV = 1
MSLEQNYTSILEQLGEDPGREGLRDTPKRAAKAMKYLCQGYTQNLDEIVNGALFSSDTNEMVLVKNIELYSLCEHHLLPFIGKAHVAYLPNGKVLGLSKVARIVDMYARRLQIQENLCLQIAEAVQKVTDALGVAVVIEAQHMCMMMRGVEKQNSSMVSSVMLGAFRENPSTRAEFLELIR

SEQ ID NO: 5908 - protein, 221 aa, Buttiauxella agrestis
  REGION 1..221: note = tr|A0A085G995|A0A085G995_9ENTR GTP cyclohydrolase 1; OS = Buttiauxella agrestis ATCC 33320 OX=1006004 GN=folE; PE = 3 SV=1
MSSLSPEAALVHEALVARGLETPLRPPVRELDNETRKREIAEHMTEIMQLLNLDLSDDSLMETPHRIAKMYVDEIFSGLDYANFPKITVIENKMKVDEMVTVRNITLTSTCEHHFVTIDGKATVSYLPKDTVIGLSKINRIVQFFAQRPQVQERLTQQILIALQTLLGTNNVAVSIDAVHYCVKARGVQDATSATTTTSLGGLFKSSQNTRQEFLRAVRHN

SEQ ID NO: 5909 - protein, 221 aa, Buttiauxella agrestis; identical to SEQ ID NO: 5908
  REGION 1..221: note = tr|A0A381C558|A0A381C558_9ENTR GTP cyclohydrolase 1; OS = Buttiauxella agrestis OX=82977 GN=folE PE=3 SV=1

SEQ ID NO: 5910 - protein, 221 aa, Buttiauxella brennerae
  REGION 1..221: note = tr|A0A1B7IN48|A0A1B7IN48_9ENTR GTP cyclohydrolase 1; OS = Buttiauxella brennerae ATCC 51605 OX=1354251 GN=folE; PE = 3 SV=1
MSSLSPEAALVHEALVARGLETPLRPQLRELDNETRKREIAGHMTEIMQLLNLDLSDDSLMETPHRIAKMYVDEIFSGLDYANFPKITVIENKMKVDEMVTVRNITLTSTCEHHFVTIDGKATVSYLPKDTVIGLSKINRIVQFFAQRPQVQERLTQQILIALQTLLGTNNVAVSIDAVHYCVKARGVQDATSATTTTSLGGLFKSSQNTRQEFLRAVRHN

SEQ ID NO: 5911 - protein, 221 aa, Buttiauxella gaviniae; identical to SEQ ID NO: 5910
  REGION 1..221: note = tr|A0A1B7I4V8|A0A1B7I4V8_9ENTR GTP cyclohydrolase 1; OS = Buttiauxella gaviniae ATCC 51604 OX=1354253 GN=folE; PE = 3 SV=1

SEQ ID NO: 5912 - protein, 221 aa, Buttiauxella izardii
  REGION 1..221: note = tr|A0A3A5JMJ8|A0A3A5JMJ8_9ENTR GTP cyclohydrolase 1; OS = Buttiauxella izardii OX=82991 GN=folE PE=3 SV=1
MTSLSPEATLVHEALVARGLETPLRPPVRELDNETRKRQIAEHMTEIMQLLNLDLSDDSLMETPHRIAKMYVDEIFSGLDYANFPKITVIENKMKVDEMVTVRNITLTSTCEHHFVTIDGKATVSYLPKDTVIGLSKINRIVQFFAQRPQVQERLTQQILIALQTLLGTNNVAVSIDAVHYCVKARGVQDATSATTTTSLGGLFKSSQNTRQEFLRAVRHS

SEQ ID NO: 5913 - protein, 221 aa, Buttiauxella noackiae
  REGION 1..221: note = tr|A0A1B7HPU7|A0A1B7HPU7_9ENTR GTP cyclohydrolase 1; OS = Buttiauxella noackiae ATCC 51607 OX=1354255 GN=folE; PE = 3 SV=1
MSSLRPEAALVHEALVARGLETPLRPQLRELDNETRKREIAGHMTEIMQLLNLDLSDDSLMETPHRIAKMYVDEIFSGLDYANFPKITVIENKMKVDEMVTVRNITLTSTCEHHFVTIDGKATVSYLPKDTVIGLSKINRIVQFFAQRPQVQERLTQQILIALQTLLGTNNVAVSIDAVHYCVKARGVQDATSATTTTSLGGLFKSSQNTRQEFLRAVRHN

SEQ ID NO: 5914 - protein, 221 aa, Buttiauxella sp.; identical to SEQ ID NO: 5910
  REGION 1..221: note = tr|A0A4R8F3T1|A0A4R8F3T1_9ENTR GTP cyclohydrolase 1; OS = Buttiauxella sp. BIGb0552 OX=2485120 GN=folE PE=3 SV=1

SEQ ID NO: 5915 - protein, 221 aa, Buttiauxella sp.
  REGION 1..221: note = tr|A0A4P5QB62|A0A4P5QB62_9ENTR GTP cyclohydrolase 1; OS = Buttiauxella sp. A111 OX=2563088 GN=folE PE=3 SV=1
MPSLSPEAALVHEALVARGLETPLRPQLRELDNETRKRQIAEHMTEIMQLLNLDLSDDSLMETPHRIAKMYVDEIFSGLDYANFPKITVIENKMKVDEMVTVRNITLTSTCEHHFVTIDGKATVSYLPKDTVIGLSKINRIVQFFAQRPQVQERLTQQILIALQTLLGTNNVAVSIDAVHYCVKARGVQDATSATTTTSLGGLFKSSQNTRQEFLRAVRHN

SEQ ID NO: 5916 - protein, 221 aa, Buttiauxella warmboldiae
  REGION 1..221: note = tr|A0A3N5DSQ1|A0A3N5DSQ1_9ENTR GTP cyclohydrolase 1; OS = Buttiauxella warmboldiae OX=82993 GN=folE PE=3 SV=1
MSSLSPEAALVHEALVARGLETPLRPPLRELDNETRKRQIAEHMTEIMQLLNLDLSDDSLMETPHRIAKMYVDEIFSGLDYANFPKITVIENKMKVDEMVTVRNITLTSTCEHHFVTIDGKATVSYLPKDTVIGLSKINRIVQFFAQRPQVQERLTQQILIALQTLLGTNNVAVSIDAVHYCVKARGVQDATSATTTTSLGGLFKSSQNTRQEFLRAVRHN

SEQ ID NO: 5917 - protein, 186 aa, unidentified
  source 1..186: note = Butyribacterium methylotrophicum
  REGION 1..186: note = tr|A0A1E7S4T0|A0A1E7S4T0_BUTME GTP cyclohydrolase 1; OS = Butyribacterium methylotrophicum OX=1487 GN=folE PE=3; SV = 1
MNKEKIMEAVTMLIEAIGEDPQREGLVDTPDRIARMYEEIFAGIGQTAEEHLSKSFTIESNDLVIERDIPFYSMCEHHFLPFYGKAHIAYVPNGKVAGLSKLVRTVDVYARKPQLQEKLTSEIGSAIMEYLDAQGVMVIIEAEHLCMNMRGVKRPGTKTVTAMSDGILKTDASLKNDVYNLLGIRA

SEQ ID NO: 5918 - protein, 192 aa, unidentified
  source 1..192: note = Butyricicoccus porcorum
  REGION 1..192: note = tr|A0A252F705|A0A252F705_9CLOT GTP cyclohydrolase 1; OS = Butyricicoccus porcorum OX=1945634 GN=folE PE=3 SV=1
MAIDTNAIKEYIRGILIALGDDPDREGLKDTPDRVARMYSEVFEGMNYTNEEIAQMFDKTFEDEMDFASDSKDLVIVRDIQLFSYCEHHIALMYDMTATVAYMPNGKVIGLSKIARIADMVSKRLQLQERIGSDIAQIMQIVTGSEDVAVLIEGSHSCMTARGIRQANARTTTTTLRGRFRTDSDLQMRLYR

SEQ ID NO: 5919 - protein, 208 aa, unidentified
  source 1..208: note = Butyricimonas faecalis
  REGION 1..208: note = tr|A0A3Q9ITB6|A0A3Q9ITB6_9BACT GTP cyclohydrolase 1; OS = Butyricimonas faecalis OX=2093856 GN=folE PE=3 SV=1
MKYTELDDNEEFYRKVEYYNKARIEKLSYHYKEILTLLGEDPEREGLVKTPYRVAKAMQFMTKGYTENPEEILRSALFKEDYRQMVIVKDIEIYSLCEHHMLPFIGHAHVAYIPNGYITGLSKIARVVEAFSRRLQVQERLTNDIKNCIQNTLNPLGVAVVIEAQHMCMMMRGVQKQNSVTTTSDFSGAFEKLATREEFIRLISNKFH

SEQ ID NO: 5920 - protein, 208 aa, Butyricimonas sp.
  REGION 1..208: note = tr|A0A1Y3VT59|A0A1Y3VT59_9BACT GTP cyclohydrolase 1; OS = Butyricimonas sp. An62 OX=1965649 GN=folE PE=3 SV=1
MKYTELDDNEEFYRKVEYYNKARTEKLSYHYKEILKLLGEDPEREGLVKTPYRVAKAMQFMTRGYTENPEEILRSALFKEDYRQMVIVKDIEIYSLCEHHMLPFIGHAHVAYIPNGYITGLSKIARVVEAFSRRLQVQERLTNDIKNCIQNTLNPLGVAVVIEAQHMCMMMRGVQKQNSVTTTSDFSGAFEKLATREEFIRLISNKFH

SEQ ID NO: 5921 - protein, 208 aa, Butyricimonas sp.
  REGION 1..208: note = tr|A0A3D2DQM6|A0A3D2DQM6_9BACT GTP cyclohydrolase 1; OS = Butyricimonas sp. OX=1969738 GN=folE PE=3 SV=1
MKYTELDDNEEFYRKVEYYNKARTEKLSYHYKEILKLLGEDPEREGLVKTPYRVAKAMQFMTRGYTESPEEILRSALFKEDYRQMVIVKDIEIYSLCEHHMLPFIGHAHVAYIPNGYITGLSKIARVVEAFSRRLQVQERLTNDIKNCIQNTLNPLGVAVVIEAQHMCMMMRGVQKQNSVTTTSDFSGAFEKLATREEFIRLISNKFH

SEQ ID NO: 5922 - protein, 208 aa, Butyricimonas synergistica; identical to SEQ ID NO: 5920
  REGION 1..208: note = tr|A0A1U7LB44|A0A1U7LB44_9BACT GTP cyclohydrolase 1; OS = Butyricimonas synergistica OX=544644 GN=folE PE=3 SV=1

SEQ ID NO: 5923 - protein, 208 aa, Butyricimonas virosa; identical to SEQ ID NO: 5921
  REGION 1..208: note = tr|A0A415QCG0|A0A415QCG0_9BACT GTP cyclohydrolase 1; OS = Butyricimonas virosa OX=544645 GN=folE PE=3 SV=1

SEQ ID NO: 5924 - protein, 208 aa, Butyricimonas virosa
  REGION 1..208: note = tr|A0A412WWP7|A0A412WWP7_9BACT GTP cyclohydrolase 1; OS = Butyricimonas virosa OX=544645 GN=folE PE=3 SV=1
MKYTELADNEEFYHKVEYYNKARTEKLSYHYKEILKLLGEDPEREGLVKTPYRVAKAMQFMTRGYTESPEEILRSALFKEDYRQMVIVKDIEIYSLCEHHMLPFIGHAHVAYIPNGYITGLSKIARVVEAFSRRLQVQERLTNDIKNCIQNTLNPLGVAVVIEAQHMCMMMRGVQKQNSVTTTSDFSGAFEKLATREEFIRLISNKFH

SEQ ID NO: 5925 - protein, 200 aa, Butyrivibrio crossotus
  REGION 1..200: note = tr|R5M029|R5M029_9FIRM GTP cyclohydrolase 1; OS = Butyrivibrio crossotus CAG:259 OX=1263062 GN=folE PE=3; SV = 1
MAIDREAIKKHIRGILIALGDDPDREGLKDTPERVAKMYEEVFEGMNYSNKEIAEMFNKTFEQGLDTITDSKDMVLVKDIDIFSYCEHHLALMYDVKVSVGYIPNGKVIGLSKIARIADMVGKRLQLQEKIGSDIAEIMETVTESEDIAVYIEGCHSCMTARGIKKNNSKTVTTTFRGEFSKDKLLQMKFLMGINNRPAD

SEQ ID NO: 5926 - protein, 200 aa, Butyrivibrio crossotus
  REGION 1..200: note = tr|D4RWH4|D4RWH4_9FIRM GTP cyclohydrolase 1; OS = Butyrivibrio crossotus DSM 2876 OX=511680 GN=folE PE=3; SV = 1
MAIDREAIKKHIRGILIALGDDPDREGLKDTPERVAKMYEEVFEGMNYSNKEIAEMFNKTFEQGLDTITDSKDMVLVKDIDIFSYCEHHLALMYDVKVSVAYIPNGKVIGLSKIARIADMVGKRLQLQEKIGSDIAEIMETVTESEDIAVYIEGCHSCMTARGIKKNNSKTVTTTFRGEFSKDKLLQMKFLMGINNRPAD

SEQ ID NO: 5927 - protein, 184 aa, Butyrivibrio fibrisolvens
  REGION 1..184: note = tr|A0A1H9TN14|A0A1H9TN14_BUTFI GTP cyclohydrolase 1; OS = Butyrivibrio fibrisolvens OX=831 GN=folE PE=3 SV=1
MDDNKIKEGVRLILEGIGEDINREGLLETPDRIARMYHELAAGYTEDAATHLAKRFHVDTSDIVVEKDIPLYSFCEHHMLPFYGTAAVAYIPDGEVVGLSKIARTVDVFAKRFQVQERLTSQIADAFETELHPKGVMVLVEAEHMCMTMRGIRKPGSKTVTVVTRGAFATDKNLQDTFYRMIGR

SEQ ID NO: 5928 - protein, 184 aa, Butyrivibrio fibrisolvens
  REGION 1..184: note = tr|A0A1M5Z348|A0A1M5Z348_BUTFI GTP cyclohydrolase 1; OS = Butyrivibrio fibrisolvens DSM 3071 OX=1121131 GN=folE; PE = 3 SV=1
MDDNKIKEGVRLILEGIGEDINREGLLETPDRIARMYHELAAGYSEDPAEHLAKRFHVETSDMVVEKDIPLYSFCEHHMLPFYGTATVAYIPDGEVVGLSKIARTVDCFAKRFQVQERLTAQIADAFVKELHPKGVMVLVEAEHMCMTMRGIRKPGTKTVTVVTRGDFENNKDLQDTFYRMIGR

SEQ ID NO: 5929 - protein, 184 aa, Butyrivibrio hungatei
  REGION 1..184: note = tr|A0A1G5E8N2|A0A1G5E8N2_9FIRM GTP cyclohydrolase 1; OS = Butyrivibrio hungatei OX=185008 GN=folE PE=3 SV=1
MINKEKIEKAIKLLLEGIGEDATRPGLIETPERVARMYEEILSGYDDSAERHLEKTFPVTESEMILEKDIQFYSLCEHHLLPFFGKAHIAYIPVDEVVGISKLARTVEVFARRLQIQERMTGQIADAIAKNLKTKGVMVLVEAEHMCVSMRGIKKGGSKTVTIATRGCFENDQNLRETFFKLIS

SEQ ID NO: 5930 - protein, 200 aa, Butyrivibrio sp.
  REGION 1..200: note = tr|A0A3C0J7B1|A0A3C0J7B1_9FIRM GTP cyclohydrolase 1; OS = Butyrivibrio sp. OX=28121 GN=folE PE=3 SV=1
MAIDREAIKEHIRGILIALGDDPDREGLKDTPERVAKMYEEVFEGMNYSNKEIAEMFNKTFEQGLDTVTDSKDMVLVKDIDIFSYCEHHLALMYDVKVSVAYIPNGKVIGLSKIARIADMVGKRLQLQEKIGSDIAEIMETVTESEDIAVYIEGCHSCMTARGIKKNNSKTVTTTFRGEFSKDKLLQMKFLMGINNRPAD

SEQ ID NO: 5931 - protein, 184 aa, Butyrivibrio sp.
  REGION 1..184: note = tr|A0A1I7JS02|A0A1I7JS02_9FIRM GTP cyclohydrolase 1; OS = Butyrivibrio sp. M55 OX=1855323 GN=folE PE=3 SV=1
MINKEKIEQAVKLLLEGMGEDATRPGLVETPERVARMYEEILSGYGDCAERHLSKTFPVAESGMILEKDIQFYSLCEHHLLPFFGKVHIAYVPVDEVVGISKLARTVEVFARRLQIQEQMTGQIADAIEKNLKTKGVMVLVEAEHMCVSMRGIKKSGSKTVTIASRGCFENDQNLRETFFKLIS

SEQ ID NO: 5932 - protein, 207 aa, unidentified
  source 1..207: note = Bythopirellula goksoyri
  REGION 1..207: note = tr|A0A5B9Q6J3|A0A5B9Q6J3_9PLAN GTP cyclohydrolase 1; OS = Bythopirellula goksoyri OX=1400387 GN=folE_1 PE=3 SV=1
MSSSASNCTSEDEKPCEATPVDLPRIERAVREILTAVGEDPDREGLRETPARVARMYAELFSGLHTDPKIHLQKFFTEKYDEMVLVKDIAFNSMCEHHMLPFIGKAHIGYVPNGKVVGLSKLARVVEEVSHRPQVQERMTEQIADLLIQELEVKGVAVVIEASHSCMSIRGIRKPESMCVTSAMKGLFRTNLSSRSEVMTLIYGDRR

SEQ ID NO: 5933 - protein, 263 aa, unidentified
  source 1..263: note = Bythopirellula goksoyri
  REGION 1..263: note = tr|A0A5B9QCG8|A0A5B9QCG8_9PLAN GTP cyclohydrolase 1 type 2 OS=Bythopirellula goksoyri OX=1400387 GN=Pr1d_25910; PE = 4 SV=1
MSTVGKVIEYLEQIAPLSLAEDWDNVGLLVGDRVWSVDRLMTCLTITPAVVAEAIEARANLIVTHHPLPFHSLKSITADSTAGRLLLNLIAARIAVYSAHSAFDSARAGINQHLAIGLGLQEIVPLFPRDVDDADIGAGRCGILGEEVSLLDMAERLKNFLGLEKLQVVGENEQVVTRIAIACGSGGSFLDRAIELDCDCLITGETNFHTCLEAEARGVALILPGHFASERFGLISLADYLSDLVPEVTVWASKSEQDPLRSI

SEQ ID NO: 5934 - protein, 267 aa, unidentified
  source 1..267: note = Caballeronia arationis
  REGION 1..267: note = tr|A0A158B3B5|A0A158B3B5_9BURK GTP cyclohydrolase FolE2 OS=Caballeronia arationis OX=1777142 GN=folE2 PE=3; SV = 1
MNQMNPAFVMPDVQSTPDIRQIPIQRVGVKGVRYPLTVRTQSGDVQPSVGVWNLDVHLPAEQKGTHMSRFVALLDEHRAPLDQAAFRAMLDSMLAKLEAQAGRIEVTFPYFVMKTAPVSGVESLMDYEVTLAGELRDGATRLSLKVLVPVTSLCPCSKKISQYGAHNQRSHVTITAELAGDLPVEDLIRIAEEEASCELWGLLKRPDEKFVTERAYENPKFVEDLVRDVATRLNADERVVAYTLEAENFESIHNHSAYAVIERDKRV

SEQ ID NO: 5935 - protein, 216 aa, unidentified
  source 1..216: note = Caballeronia arationis
  REGION 1..216: note = tr|A0A158B4C3|A0A158B4C3_9BURK GTP cyclohydrolase 1; OS = Caballeronia arationis OX=1777142 GN=folE PE=3 SV=1
MSAPRRSNTSASDTPAASVDRPSREEAEAAVRVLLRWAGDDPRREGLRDTPARVIRAYEEFFRGYEQDPREILARTFSEVQGYDEMIVLKDIRFESYCEHHMVPIIGRAHVAYLPSKRVVGISKLARLVDAFAKRLQIQEKMTAQIADTLDEVLQPLGVGVILEAAHQCMSTRGVHKAGASMVTSRMLGAFRDDPSTRREFLAIVGNQNAYSVSNT

SEQ ID NO: 5936 - protein, 216 aa, unidentified
  source 1..216: note = Caballeronia arvi
  REGION 1..216: note = tr|A0A158KKX8|A0A158KKX8_9BURK GTP cyclohydrolase 1; OS = Caballeronia arvi OX=1777135 GN=folE PE=3 SV=1
MSAPRKNHLSGSDMPAEPADRPTREEAEAAVRVLLRWAGDDPRREGLLDTPGRVVRAYEEFFAGYTQSPHDILARTFSEVQGYDEMIVLKDIRFESYCEHHMVPIIGRAHVAYLPNKRVVGISKLARLVDAFAKRLQIQEKMTAQIADTLDEVLQPLGVGVILEAAHQCMSTRGVHKAGVSMVTSRMLGSFRDDPSTRREFLSIVGNQSAFSVSNT

SEQ ID NO: 5937 - protein, 268 aa, unidentified
  source 1..268: note = Caballeronia arvi
  REGION 1..268: note = tr|A0A158F9H1|A0A158F9H1_9BURK GTP cyclohydrolase FolE2 OS=Caballeronia arvi OX=1777135 GN=folE2 PE=3 SV=1
MNQMNPAFVMPDVQSTPDTRQIAIQRVGVKGVRHPLSVVTQSGVKPSVGVWNLDVHLPADQKGTHMSRFVALLEENRHPLDQHALRGLLAVMLSKLEAHSGRIEVTLPYFVMKTAPISGVQSLLDYEVTFIAQRRDGETSMSMKVLVPVTSLCPCSKQISQYGAHNQRSHVTITAEVADDIAVEELIRIAEEEASCELWGLLKRPDEKFVTERAYENPKFVEDLVRDVATRLNADQRIVAYVLEAENFESIHNHSAYAVIERDKRRDA

SEQ ID NO: 5938 - protein, 216 aa, unidentified
  source 1..216: note = Caballeronia calidae
  REGION 1..216: note = tr|A0A158DT32|A0A158DT32_9BURK GTP cyclohydrolase 1; OS = Caballeronia calidae OX=1777139 GN=folE PE=3 SV=1
MSAPRKNHFSGSDMPADQADRPTREEAEAAVRVLLRWAGDDPRREGLRDTPGRVVRAYEEFFAGYAQNPHDILARTFSEVQGYDEMIVLKDIRFESYCEHHMVPIIGRAHVAYLPNKRVVGISKLARLVDAFAKRLQIQEKMTAQIADTLNEVLQPLGVGVILEAAHQCMSTRGVHKAGVAMVTSRMLGSFRDDPSTRREFLAIVGDQSAFSVSNT

SEQ ID NO: 5939 - protein, 268 aa, unidentified
  source 1..268: note = Caballeronia calidae
  REGION 1..268: note = tr|A0A158AAT9|A0A158AAT9_9BURK GTP cyclohydrolase FolE2 OS=Caballeronia calidae OX=1777139 GN=folE2 PE=3 SV=1
MNQMNPAFVMPDVQSTPDVRQIAIQRVGVKGVRHPLSVRTANGVQPSVGVWNLDVHLPADQKGTHMSRFVALLEENGEPLDQAALRTLLAAMLTKLEAHSGRIEVSLPYFVMKTAPVSGVQSLLDYEATFIAERRDDETRLSMKVLVPVTSLCPCSKKISQYGAHNQRSHVTITAELAGDVAVEDLIRIAEEEASCELWGLLKRPDEKFVTERAYENPKFVEDLVRDVATRLNADERIVAYVLEAENFESIHNHSAFAVIERDKRRDA

SEQ ID NO: 5940 - protein, 216 aa, unidentified; identical to SEQ ID NO: 5936
  source 1..216: note = Caballeronia catudaia
  REGION 1..216: note = tr|A0A158B8T8|A0A158B8T8_9BURK GTP cyclohydrolase 1; OS = Caballeronia catudaia OX=1777136 GN=folE PE=3 SV=1

SEQ ID NO: 5941 - protein, 268 aa, unidentified
  source 1..268: note = Caballeronia catudaia
  REGION 1..268: note = tr|A0A158CLS2|A0A158CLS2_9BURK GTP cyclohydrolase FolE2 OS=Caballeronia catudaia OX=1777136 GN=folE2 PE=3; SV = 1
MNQMNPAFVMPDVQSTPDTRQIAIQRVGVKGVRHPLSVVTQSGVKPSVGVWNLDVHLPAEQKGTHMSRFVALLEENRHPLDQHALRGLLAVMLSKLEAHSGRIEVTLPYFVMKTAPVSGVQSLLDYEVTFIAQRRDGDTRMSMKVLVPVTSLCPCSKQISQYGAHNQRSHVTITAEVADDIAVEELIRIAEEEASCELWGLLKRPDEKFVTERAYENPKFVEDLVRDVATRLNADQRIVAYVLEAENFESIHNHSAYAVIERDKRRDA

SEQ ID NO: 5942 - protein, 216 aa, unidentified
  source 1..216: note = Caballeronia choica
  REGION 1..216: note = tr|A0A158IJT6|A0A158IJT6_9BURK GTP cyclohydrolase 1; OS = Caballeronia choica OX=326476 GN=folE PE=3 SV=1
MSASGKSPLSGSDTPADSANRPSREEAEAAVRVLLRWAGDDPRREGLRDTPARVIRAYEEFFRGYEQDPREILARTFSEVQGYDEMIVLKDIRFESYCEHHMVPIIGRAHVAYLPSKRVVGISKLARLVDAFAKRLQIQEKMTAQIADTLNEVLQPLGVGVILEAAHQCMSTRGVHKAGASMVTSRMLGAFRDDPSTRREFLAIVGNQNAYSVSNT

SEQ ID NO: 5943 - protein, 267 aa, unidentified
  source 1..267: note = Caballeronia choica
  REGION 1..267: note = tr|A0A158IMQ2|A0A158IMQ2_9BURK GTP cyclohydrolase FolE2 OS=Caballeronia choica OX=326476 GN=folE2 PE=3 SV=1
MNQMNPAFVMPDVQSTPDTRQIPIQRVGVKAVRYPLTVRTASGDLQPSIGMWNLDVHLPAEQKGTHMSRFVALLDEHRAPLDQAAFRVMLESMLAKLEAHSGRIEVSFPYFVMKTAPVSGVQSLLDYEVTLTGEMREGETRMSLKVLVPVTSLCPCSKKISEYGAHNQRSHVTISAELAADMPIEDLIRIAEEEASCELWGLLKRPDEKFVTERAYKNPKFVEDLVRDVATRLNADERVVAYVLEAENFESIHNHSAYAVIERDKRV

SEQ ID NO: 5944 - protein, 216 aa, unidentified
  source 1..216: note = Caballeronia cordobensis
  REGION 1..216: note = tr|A0A158H8W0|A0A158H8W0_9BURK GTP cyclohydrolase 1; OS = Caballeronia cordobensis OX=1353886 GN=folE PE=3 SV=1
MSAPRKNHLSGSDMPAEQADRPTREEAEAAVRVLLRWAGDDPRREGLLDTPARVVRAYEEFFAGYTQSPHDILARTFSEVQGYDEMIVLKDIRFESYCEHHMVPIIGRAHVAYLPNKRVVGISKLARLVDAFAKRLQIQEKMTAQIADTLDEVLQPLGVGVILEAAHQCMSTRGVHKAGVSMVTSRMLGSFRDDPSTRREFLSIVGNQTAFSVSNT

SEQ ID NO: 5945 - protein, 268 aa, unidentified
  source 1..268: note = Caballeronia cordobensis
  REGION 1..268: note = tr|A0A158IEU1|A0A158IEU1_9BURK GTP cyclohydrolase FolE2 OS=Caballeronia cordobensis OX=1353886 GN=folE2 PE=3; SV = 1
MNQMNPAFVMPDVQSTPDTRQIAIQRVGVKGVRHPLSVVTQSGVKPSVGVWNLDVHLPADQKGTHMSRFVALLEENRHPLDQHALRGLLAVMLSKLEAHSGRIEVTLPYFVMKTAPVSGVQSLLDYEVTFIAERRDGETRMSMQVLVPVTSLCPCSKKISQYGAHNQRSHVTIRAEVSDEIAVEDLIRIAEEEASCELWGLLKRPDEKFVTERAYENPKFVEDLVRDVATRLNADERIVAYVLEAENFESIHNHSAYAVIERDKRRDA

SEQ ID NO: 5946 - protein, 216 aa, unidentified
  source 1..216: note = Caballeronia fortuita
  REGION 1..216: note = tr|A0A158D3Q2|A0A158D3Q2_9BURK GTP cyclohydrolase 1; OS = Caballeronia fortuita OX=1777138 GN=folE PE=3 SV=1
MSAPRKNHLTGSDMPAEQADRPTREEAEAAVRVLLRWAGDDPAREGLLDTPGRVVRAYEEFFAGYTQNPHDILARTFSEVQGYDEMIVLKDIRFESYCEHHMVPIIGRAHVAYLPNKRVVGISKLARLVDAFAKRLQIQEKMTAQIADTLDEVLQPLGVGVILEAAHQCMSTRGVHKAGVSMVTSRMLGSFRDDPSTRREFLAIVGNQNAFSVSNT

SEQ ID NO: 5947 - protein, 268 aa, unidentified
  source 1..268: note = Caballeronia fortuita
  REGION 1..268: note = tr|A0A158DPA8|A0A158DPA8_9BURK GTP cyclohydrolase FolE2 OS=Caballeronia fortuita OX=1777138 GN=folE2 PE=3; SV = 1
MNQMNPAFVMPDVQSTPDTRQIAIQRVGVKGVRYPLTVLTEDGLKPTVGVWNLDVHLPAEQKGTHMSRFVALLEENRLPVDQHALRGMLSLMLAKLEAHSGRMEVTLPYFVMKTAPVSGVKSLLDYEVTFVAERRDGETRMSLKVLVPVTSLCPCSKKISQYGAHNQRSHVTIAAELAEEMPVEELIRIAEEEASCELWGLLKRPDEKFVTERAYENPKFVEDLVRDVATRLNADARIVAYTLEAENFESIHNHSAYAVIERDKRRDA

SEQ ID NO: 5948 - protein, 267 aa, unidentified
  source 1..267: note = Caballeronia glathei
  REGION 1..267: note = tr|A0A069PMV3|A0A069PMV3_9BURK GTP cyclohydrolase FolE2 OS=Caballeronia glathei OX=60547 GN=folE2 PE=3 SV=1
MNQMNPAFVMPDVQSSPDTRQIPIQRVGVKAVRHPLTVRTRSGEAQPSVGVWNLDVHLPADQKGTHMSRFVALLDEHREPLELASLRAMLVSMLEKLEAHAGRIEVSFPYFVMKTAPVSGVQSLMDYEVTLAGELRDGETRVTLKVLVPVTSLCPCSKKISQYGAHNQRSHVTIAAELAADMPVEDLIAIVEEEASCELWGLLKRPDEKFVTERAYENPKFVEDLVRDVATRLNGDARIAAYVLEAENFESIHNHSAYAVIERDKRV

SEQ ID NO: 5949 - protein, 217 aa, unidentified
  source 1..217: note = Caballeronia glathei
  REGION 1..217: note = tr|A0A069PHP1|A0A069PHP1_9BURK GTP cyclohydrolase 1; OS = Caballeronia glathei OX=60547 GN=folE PE=3 SV=1
MSASGKSSTSSGSDIPADPVDRPSREEAEAAVRVLLRWAGDDPRREGLRDTPARVIRSYEEFFAGYAQDPREILARTFTEVQGYDEMIVLKDIRFESYCEHHMVPIIGRAHVAYLPSKRVVGISKLARLVDAFAKRLQIQEKMTAQIADTLDEVLQPLGVGVILEAAHQCMSTRGVHKAGVSMVTSRMLGAFRDDPSTRREFLAIVGNQNAFSVSNT

SEQ ID NO: 5950 - protein, 268 aa, unidentified
  source 1..268: note = Caballeronia glebae
  REGION 1..268: note = tr|A0A157Z0D2|A0A157Z0D2_9BURK GTP cyclohydrolase FolE2 OS=Caballeronia glebae OX=1777143 GN=folE2 PE=3 SV=1
MNQMNPAFVMPDVQSTPDTRQIAIQRVGVKGVRYPLTVLTEHGLKPTVGVWNLDVHLPAEQKGTHMSRFVALLEENRLPVDQHALRGLLALMLAKLEAHSGCIEVTMPYFVMKTAPVSGVKSLLDYEVTFIAERRDGDTRMSIKVLVPVTSLCPCSKQISQYGAHNQRSHVTIAAELADEIAVEDLIRIAEEEASCELWGLLKRPDEKFVTERAYENPKFVEDLVRDVATRLNADERIVAYTLEAENFESIHNHSAYAVIERDKRCDA

SEQ ID NO: 5951 - protein, 216 aa, unidentified
  source 1..216: note = Caballeronia glebae
  REGION 1..216: note = tr|A0A157ZKN1|A0A157ZKN1_9BURK GTP cyclohydrolase 1; OS = Caballeronia glebae OX=1777143 GN=folE PE=3 SV=1
MSAPRQNHLSGSDMPADTADRPSREEAEAAVRVLLRWAGDDPRREGLLDTPGRVVRAYEEFFAGYTQNPHDILARTFSEVQGYDEMIVLKDIRFESYCEHHMVPIIGRAHVAYLPNKRVVGISKLARLVDAFAKRLQIQEKMTAQIADTLNEVLQPLGVGVILEAAHQCMSTRGVHKAGVSMVTSRMLGSFRDDPSTRREFLSIVGNQNAFSVSNT

SEQ ID NO: 5952 - protein, 216 aa, unidentified
  source 1..216: note = Caballeronia grimmiae
  REGION 1..216: note = tr|A0A069NIR2|A0A069NIR2_9BURK GTP cyclohydrolase 1; OS = Caballeronia grimmiae OX=1071679 GN=folE PE=3 SV=1
MSSPRKNHLTGSDMPADSADRPSREEAEAAVRVLLRWAGDDPRREGLLDTPARVVRSYEEFFAGYAENPHDILARTFSEVQGYDEMIVLKDIRFESYCEHHMVPIIGRAHVAYLPNKRVVGISKLARLVDAFAKRLQIQEKMTAQIADTLDEVLQPLGVGVILEAAHQCMSTRGVHKAGVAMVTSRMLGSFRDDPSTRREFLAIVGQSSAFSVTNT

SEQ ID NO: 5953 - protein, 265 aa, unidentified
  source 1..265: note = Caballeronia grimmiae
  REGION 1..265: note = tr|A0A069P1L6|A0A069P1L6_9BURK GTP cyclohydrolase FolE2 OS=Caballeronia grimmiae OX=1071679 GN=folE2 PE=3; SV = 1
MNQMNPAFVMPDVQSTPDTRQIDIARVGVKGVRHPLSVRTASGVQPSVGVWNLDVHLPADQKGTHMSRFVALLEEHREPLDQAALQTMLAAMLVKLEAHSGRIEVSLPYFVMKTAPISGVQSLLDYEVTFVAEKRNGDMRLSLKVLVPVTSLCPCSKKISQYGAHNQRSHVTITAELAGDVAVEELVRVAEEEASCELWGLLKRPDEKFVTERAYENPKFVEDLVRDIAVRLNADDRIVAYVLEAENFESIHNHSAYAVIERVKR

SEQ ID NO: 5954 - protein, 216 aa, unidentified
  source 1..216: note = Caballeronia humi
  REGION 1..216: note = tr|A0A158H5S0|A0A158H5S0_9BURK GTP cyclohydrolase 1; OS = Caballeronia humi OX=326474 GN=folE PE=3 SV=1
MSVSGKTTPSASDMPAGSADRPSREEAEAAVRVLLRWAGDDPRREGLRDTPARVIRAYEEFFRGYEQDPREILQRTFSEVQGYDEMIVLKDIRFESYCEHHMVPIIGRAHVAYLPSKRVVGISKLARLVDAFAKRLQIQEKMTAQIADTLDEVLQPLGVGVILEAAHQCMSTRGVHKAGASMVTSRMLGAFRDDPSTRREFLAIVGNQNAYSVSNT

SEQ ID NO: 5955 - protein, 267 aa, unidentified
  source 1..267: note = Caballeronia humi
  REGION 1..267: note = tr|A0A158H635|A0A158H635_9BURK GTP cyclohydrolase FolE2 OS=Caballeronia humi OX=326474 GN=folE2 PE=3 SV=1
MNQMNPAFVMPDVQSTPDTRQIPIQRVGVKGVRYPLTVRAQSGELQPSVGVWNLDVHLPAEQKGTHMSRFVALLDEHRAPLDQTAFRAMLASMLAKLEVQAGRIEVSFPYFVMKTAPVSGVESLMDYEVTLTGELRDGETRMSLKVLVPVTSLCPCSKKISQYGAHNQRSHVTISAELASDMPVEDLIRIAEEEASCELWGMLKRPDEKFVTERAYENPKFVEDLVRDVATRLNEDARIVAYVLEAENFESIHNHSAYAVIERDRRG

SEQ ID NO: 5956 - protein, 268 aa, unidentified
  source 1..268: note = Caballeronia hypogeia
  REGION 1..268: note = tr|A0A158DDJ3|A0A158DDJ3_9BURK GTP cyclohydrolase FolE2 OS=Caballeronia hypogeia OX=1777140 GN=folE2 PE=3; SV = 1
MNQMNPAFVMPDVQSTPDTRQIAIQRVGVKGVRYPLTVLTEDGLKPSVGVWNLDVHLPAEQKGTHMSRFVALLEENRSPLDQHALRGMLALMLAKLEAHSGRIEVTLPYFVMKTAPVSGVKSLLDYEASFIAERRDGDTTMSIKVLVPVTSLCPCSKKISEYGAHNQRSHVTITAELADEVAVEELIRMAEEEASCELWGLLKRPDEKFVTERAYENPKFVEDLVRDIATRLNADKRIVAYVLEAENFESIHNHSAYAVIERDKRRDA

SEQ ID NO: 5957 - protein, 216 aa, unidentified
  source 1..216: note = Caballeronia hypogeia
  REGION 1..216: note = tr|A0A158C9H3|A0A158C9H3_9BURK GTP cyclohydrolase 1; OS = Caballeronia hypogeia OX=1777140 GN=folE PE=3 SV=1
MSAPRKNNLSGSDMPADQADRPTREEAEAAVRVLLRWAGDDPGREGLLDTPARVVRAYEEFFAGYTQNPHDILARTFSEVQGYDEMIVLKDIRFESYCEHHMVPIIGRAHVAYLPNQRVVGISKLARLVDAFAKRLQIQEKMTAQIADTLNEVLQPIGVGVILEAAHQCMSTRGVHKAGVSMVTSRMLGSFRDDPSTRREFLSIVGNSTAFSVSNT

SEQ ID NO: 5958 - protein, 268 aa, unidentified
  source 1..268: note = Caballeronia jiangsuensis
  REGION 1..268: note = tr|A0A038GX72|A0A038GX72_9BURK GTP cyclohydrolase FolE2 OS=Caballeronia jiangsuensis OX=1458357 GN=folE2; PE = 3 SV=1
MNQMNPAFVMPDVQSTPDTRQIAIQRVGVKGVRHPLSVRTANGVQPSVGVWNLDVHLPADQKGTHMSRFVALLEENREPLDQAALRSLLASMLTKLEAHSGRIEVTLPYFVMKTAPVSGVQSLLDYEATFIAEKRDGETHLSMKVLVPVTSLCPCSKKISQYGAHNQRSHVTIAAQLAGEVAVEELIRIAEEEASCELWGLLKRPDEKFVTERAYENPKFVEDLVRDVATRLNADERIVAYVLEAENFESIHNHSAYAVIERDKRRDA

SEQ ID NO: 5959 - protein, 216 aa, unidentified
  source 1..216: note = Caballeronia jiangsuensis
  REGION 1..216: note = tr|A0A038GPY4|A0A038GPY4_9BURK GTP cyclohydrolase 1; OS = Caballeronia jiangsuensis OX=1458357 GN=folE PE=3 SV=1
MSAPRKNHLSGSDMPADTADRPTREEAEAAVRVLLRWAGDDPKREGLLDTPGRVVRAYEEFFAGYTQNPHEILARTFSEVQGYDEMIVLKDIRFESYCEHHMVPIIGRAHVAYLPNKRVVGISKLARLVDAFAKRLQIQEKMTAQIADTLNEVLQPLGVGVILEAAHQCMSTRGVHKAGVSMVTSRMLGSFRDDPSTRREFLSIVSDQNAFSVSNT

SEQ ID NO: 5960 - protein, 268 aa, unidentified
  source 1..268: note = Caballeronia megalochromosomata
  REGION 1..268: note = tr|A0A149QH24|A0A149QH24_9BURK GTP cyclohydrolase FolE2 OS=Caballeronia megalochromosomata OX=1399969; GN = folE2 PE=3 SV=1
MNQMNPAFVMPDVQSTPDTRQIAIQRVGVKGVRHPLTVVTEDGVKPTVGVWNLDVHLPAEQKGTHMSRFVALLEENRHPLDQHALRGLLALMLAKLEAHAGRIEVTLPYFVMKTAPVSGVKSLLDYEVTFIAERRDGDTRMSIKVLVPVTSLCPCSKKISQYGAHNQRSHVTIMAELTEEIPVEDLIRIAEEEASCELWGLLKRPDEKFVTERAYENPKFVEDLVRDVATRLNADPRIVAYVLEAENFESIHNHSAYAVIERDKRRDA

SEQ ID NO: 5961 - protein, 216 aa, unidentified
  source 1..216: note = Caballeronia megalochromosomata
  REGION 1..216: note = tr|A0A149QZU8|A0A149QZU8_9BURK GTP cyclohydrolase 1; OS = Caballeronia megalochromosomata OX=1399969 GN=folE PE=3; SV = 1
MSAPRKNHLSGSDMPADQADRPTREEAEAAVRVLLRWAGDDPKREGLLDTPGRVVRAYEEFFAGYTQNPHEILARTFSEVQGYDEMIVLKDIRFESYCEHHMVPIIGRAHVAYLPNKRVVGISKLARLVDAFAKRLQIQEKMTAQIADTLNEVLQPLGVGVILEAAHQCMSTRGVHKAGVSMVTSRMLGSFRDDPSTRREFLSIVSDQNAFSVSNT

SEQ ID NO: 5962 - protein, 268 aa, unidentified
  source 1..268: note = Caballeronia mineralivorans
  REGION 1..268: note = tr|A0A0J1CXT3|A0A0J1CXT3_9BURK GTP cyclohydrolase FolE2 OS=Caballeronia mineralivorans PML1(12) OX=908627; GN = folE2 PE=3 SV=1
MNQMNPAFAMPDVQSSLDVRQIPIQRVGVKAVRYPLTIRTSSGELQPGVGLWNLDVHLPADQKGTHMSRFVALLDEHRAPLDQAAFRTMLVAMLAKLEAHSGRIEVSFPYFVMKTAPVSGVQSLMDYEVTLTGEMRGGETRISLRVLVPVTSLCPCSKQISQYGAHNQRSHVTIAAEFKGDVAIEDLIRIAEEEASCELWGLLKRPDEKFVTERAYENPKFVEDLVRDVATRLNADERIVSYVLEAENFESIHNHSAYAVIEHDKRVS

SEQ ID NO: 5963 - protein, 218 aa, unidentified
  source 1..218: note = Caballeronia mineralivorans
  REGION 1..218: note = tr|A0A0J1CZL3|A0A0J1CZL3_9BURK GTP cyclohydrolase 1; OS = Caballeronia mineralivorans PML1(12) OX=908627 GN=folE; PE = 3 SV=1
MSATRNSPNASSDIQDHADHGDRPSREEAEAAVRVLIRWAGDDPAREGLVDTPSRVIRSYEEFFAGYTQNPHDILARTFSEVQGYDEMIVLKDIRFESYCEHHMVPIIGRAHVAYLPRERVVGISKLARLVDAFAKRLQIQEKMTAQIADTLEEVLQPLGVGVILEATHQCMSTRGVHKAGASMVTSRMLGTFRDDPSTRREFLSIVGHSSGFSVSNS

SEQ ID NO: 5964 - protein, 216 aa, unidentified
  source 1..216: note = Caballeronia pedi
  REGION 1..216: note = tr|A0A158B1D3|A0A158B1D3_9BURK GTP cyclohydrolase 1; OS = Caballeronia pedi OX=1777141 GN=folE PE=3 SV=1
MSAPRKNQLSGSDMPAEQADRPTREEAEAAVRVLLRWAGDDPSREGLLDTPGRVVRAYEEFFAGYDQNPHEILARTFSEVQGYDEMIVLKDIRFESYCEHHMVPIIGRAHVAYLPNKRVVGISKLARLVDAFAKRLQIQEKMTAQIADTLNEVLQPIGVGVILEAAHQCMSTRGVHKAGVAMVTSRMLGSFRDDPSTRREFLSIVGNASAFSVSNT

SEQ ID NO: 5965 - protein, 268 aa, unidentified
  source 1..268: note = Caballeronia pedi
  REGION 1..268: note = tr|A0A158C1G9|A0A158C1G9_9BURK GTP cyclohydrolase FolE2 OS=Caballeronia pedi OX=1777141 GN=folE2 PE=3 SV=1
MNQMNPAFVMPDVQSTPDTRQIAIQRVGVKGVRYPLTVLTEDGLKPTVGVWNLDVHLPAEQKGTHMSRFVALLEENRLPLDQHALRGLLALMLAKLEAHSGRIEVTLPYFVMKTAPVSGVKSLLDYEVTFIAERRDGDTRMSIKVLVPVTSLCPCSKQISQYGAHNQRSHVTIAAELIEDIAVEDLIRIAEEEASCELWGLLKRPDEKFVTERAYENPKFVEDLVRDIATRLNADARIVAYVLEAENFESIHNHSAYAVIERDKRRAV

SEQ ID NO: 5966 - protein, 216 aa, unidentified
  source 1..216: note = Caballeronia peredens
  REGION 1..216: note = tr|A0A158J968|A0A158J968_9BURK GTP cyclohydrolase 1; OS = Caballeronia peredens OX=1777132 GN=folE PE=3 SV=1
MSAPRKNHLSGSDIPADEADRPTREEAEAAVRVLLRWAGDDPGREGLLDTPARVVRAYEEFFAGYTQNPHDILARTFSEVQGYDEMIVLKDIRFESYCEHHMVPIIGRAHVAYLPNKRVVGISKLARLVDAFAKRLQIQEKMTAQIADTLNEVLQPIGVGVILEAAHQCMSTRGVHKAGVAMVTSRMLGSFRDDPSTRREFLAIVGNSNAFSVSNT

SEQ ID NO: 5967 - protein, 268 aa, unidentified
  source 1..268: note = Caballeronia peredens
  REGION 1..268: note = tr|A0A158JNZ5|A0A158JNZ5_9BURK GTP cyclohydrolase FolE2 OS=Caballeronia peredens OX=1777132 GN=folE2 PE=3; SV = 1
MNQMNPAFVMPDVQSTPDTRQIAISRVGVKGVRHPLSVRTTNGVQPSIGVWNLDVHLPAEQKGTHMSRFVALLEENREPLDQAALRALLAAMLTKLEAHSGRIEVSLPYFVMKTAPVSGVQSLLDYEVTFIAEKRDGQTRMSMKVLVPVTSLCPCSKQISQYGAHNQRSHVTITAELAGEVAVEELIRIAEEEASCELWGLLKRPDEKFVTERAYENPKFVEDLVRDVATRLNADERIVAYVLEAENFESIHNHSAYAVIESTRRRDA

SEQ ID NO: 5968 - protein, 216 aa, unidentified
  source 1..216: note = Caballeronia ptereochthonis
  REGION 1..216: note = tr|A0A158E481|A0A158E481_9BURK GTP cyclohydrolase 1; OS = Caballeronia ptereochthonis OX=1777144 GN=folE PE=3 SV=1
MSAPRKNHLSGSDMPADKADRPTREEAEAAVRVLLRWAGDDPRREGLLDTPARVVRAYEEFFAGYAQNPHDILARTFSEVQGYDEMIVLKDIRFESYCEHHMVPIIGRAHVAYLPNKRVVGISKLARLVDAFAKRLQIQEKMTAQIADTLNEVLQPIGVGVILEAAHQCMSTRGVHKAGVSMVTSRMLGSFRDDPSTRREFLSIVGNQSAFSVSNT

SEQ ID NO: 5969 - protein, 268 aa, unidentified
  source 1..268: note = Caballeronia ptereochthonis
  REGION 1..268: note = tr|A0A158ARX0|A0A158ARX0_9BURK GTP cyclohydrolase FolE2 OS=Caballeronia ptereochthonis OX=1777144 GN=folE2; PE = 3 SV=1
MNQMNPAFVMPDVQSTPDMRQIAISRVGVKGVRHPLSVRTQDGVQPSVGVWNLDVHLPAEQKGTHMSRFVALLEEHREPLDQAALRTLLAAMLTKLEAHSGRIEVTLPYFVMKTAPVSGVQSLLDYEATFIAEKRDGQTRLSMKVLVPVTSLCPCSKKISQYGAHNQRSHVTITAELAGEVALEELIRIAEEEASCELWGLLKRPDEKLVTERAYENPKFVEDLVRDVAMRLNADERIVAYVLEAENFESIHNHSAYAVIERDKRRDA

SEQ ID NO: 5970 - protein, 219 aa, unidentified
  source 1..219: note = Caballeronia sordidicola
  REGION 1..219: note = tr|A0A242MMY5|A0A242MMY5_9BURK GTP cyclohydrolase 1; OS = Caballeronia sordidicola OX=196367 GN=folE PE=3 SV=1
MSATRNNPDASPDIHADHAGGADRPSREEAEAAVRVLIKWAGDDPSREGLLDTPARVIRSYEEFFAGYAQNPRDILARTFSEVQGYDEMIVLKDIRFESYCEHHMVPIIGRAHVAYLPRERVVGISKLARLVDAFAKRLQIQEKMTAQIADTLEEVLQPLGVGVILEASHQCMSTRGVHKAGASMVTSRMLGTFRDDPSTRREFLAIVGHSSGFSVSNS

SEQ ID NO: 5971 - protein, 219 aa, unidentified
  source 1..219: note = Caballeronia sordidicola
  REGION 1..219: note = tr|A0A158FNS9|A0A158FNS9_9BURK GTP cyclohydrolase 1; OS = Caballeronia sordidicola OX=196367 GN=folE PE=3 SV=1
MSATRNKPDASPDIHADELSHADRPSREEAEAAVRVLIRWAGDNPSREGLVDTPARVIRSYEEFFAGYAQNPKDILARTFSEVQGYDEMIVLKDIRFESYCEHHMVPIIGRAHVAYLPRERVVGISKLARLVDAFAKRLQIQEKMTAQIADTLEEVLQPLGVGVILEATHQCMSTRGVHKAGASMVTSRMLGTFRDDPSTRREFLSIVGHSSGFSVSNT

SEQ ID NO: 5972 - protein, 267 aa, unidentified
  source 1..267: note = Caballeronia telluris
  REGION 1..267: note = tr|A0A158K148|A0A158K148_9BURK GTP cyclohydrolase FolE2 OS=Caballeronia telluris OX=326475 GN=folE2 PE=3 SV=1
MNQMNPAFVMPDVQSTPDTRQIPIQRVGVKGVRYPLTVRTQSGDAQPGVGVWNLDVHLPAEQKGTHMSRFVALLDEHRAPLDQAAFRAMLQSMLAKLEAHAGRIEVTFPYFVMKTAPVSGVESLMDYEVTLTGELRDGTTRLSLKVLVPVTSLCPCSKKISQYGAHNQRSHVTIAAELAGELPVEDLIRIAEEEASCELWGLLKRPDEKFVTERAYENPKFVEDLVRDVATRLNADERVLAYTLEAENFESIHNHSAYAVIERGKRV

SEQ ID NO: 5973 - protein, 216 aa, unidentified
  source 1..216: note = Caballeronia telluris
  REGION 1..216: note = tr|A0A158JCF3|A0A158JCF3_9BURK GTP cyclohydrolase 1; OS = Caballeronia telluris OX=326475 GN=folE PE=3 SV=1
MSAPRQSNTSASDMPAGSVDRPSREEAEAAVRVLLRWAGDDPRREGLRDTPARVIRAYEEFFRGYEQDPREILARTFSEVQGYDEMIVLKDIRFESYCEHHMVPIIGRAHVAYLPSKRVVGISKLARLVDAFAKRLQIQEKMTAQIADTLDEVLQPLGVGVILEAAHQCMSTRGVHKAGASMVTSRMLGSFRDDPSTRREFLAIVGNQNAYSVSNT

SEQ ID NO: 5974 - protein, 216 aa, unidentified
  source 1..216: note = Caballeronia temeraria
  REGION 1..216: note = tr|A0A158AVV7|A0A158AVV7_9BURK GTP cyclohydrolase 1; OS = Caballeronia temeraria OX=1777137 GN=folE PE=3 SV=1
MSAPRKNHLSGSDMPADTADRPTREEAEAAVRVLLRWAGDDPSREGLLDTPGRVVRAYEEFFAGYTQNPHDILARTFSEVQGYDEMIVLKDIRFESYCEHHMVPIIGRAHVAYLPNNRVVGISKLARLVDAFAKRLQIQEKMTAQIADTLNEVLQPIGVGVILEAAHQCMSTRGVHKAGVSMVTSRMLGSFRDDPSTRREFLAIVGNQNAFSVSNT

SEQ ID NO: 5975 - protein, 268 aa, unidentified
  source 1..268: note = Caballeronia temeraria
  REGION 1..268: note = tr|A0A158AC67|A0A158AC67_9BURK GTP cyclohydrolase FolE2 OS=Caballeronia temeraria OX=1777137 GN=folE2 PE=3; SV = 1
MNQMNPAFVMPDVQSTPDTRQIAIQRVGVKGVRYPLTVLTEDGLKPTVGTWNLDVHLPAEQKGTHMSRFVALLEENRLPVDQHALRGMLALMLAKLEAHAGRIEVTLPYFVMKTAPVSGVKSLLDYEVTFIVERRDGDTRMSIKVLVPVTSLCPCSKQISQYGAHNQRSHVTIAAEVAEEVPVEDLIRIAEEEASCELWGLLKRPDEKFVTERAYENPKFVEDLVRDIATRLNADARIVAYTLEAENFESIHNHSAYAVIERDKRRDA

SEQ ID NO: 5976 - protein, 267 aa, unidentified
  source 1..267: note = Caballeronia terrestris
  REGION 1..267: note = tr|A0A158J754|A0A158J754_9BURK GTP cyclohydrolase FolE2 OS=Caballeronia terrestris OX=1226301 GN=folE2 PE=3; SV = 1
MNQMNPAFVMPDVQSTPDTRQIPIQRVGVKGVRYPLTVRTQSGELQPSIGVWNLDVHLPAEQKGTHMSRFVALLDEHRAPLDQAAFGTMLASMLAKLEAQAGRIEVSFPYFVMKTAPVSGVESLMDYEVTLTGELRDGETRMSLKVLVPVTSLCPCSKKISQYGAHNQRSHVTISAELASDMPVEDLIRVAEEEASCELWGMLKRPDEKFVTERAYENPKFVEDLVRDVATRLNEDARIVAYVLEAENFESIHNHSAYAVIERDKRG

SEQ ID NO: 5977 - protein, 216 aa, unidentified
  source 1..216: note = Caballeronia terrestris
  REGION 1..216: note = tr|A0A158J7A7|A0A158J7A7_9BURK GTP cyclohydrolase 1; OS = Caballeronia terrestris OX=1226301 GN=folE PE=3 SV=1
MSVSGKTTPSASDMPAGSADRPSREEAEAAVRILLRWAGDDPRREGLRDTPARVIRAYEEFFRGYEQDPREILQRTFSEVQGYDEMIVLKDIRFESYCEHHMVPIIGRAHVAYLPSKRVVGISKLARLVDAFAKRLQIQEKMTAQIADTLDEVLQPLGVGVILEAAHQCMSTRGVHKAGASMVTSRMLGAFRDDPSTRREFLAIVGNQNAYSVSNT

SEQ ID NO: 5978 - protein, 268 aa, unidentified
  source 1..268: note = Caballeronia turbans
  REGION 1..268: note = tr|A0A158GJQ9|A0A158GJQ9_9BURK GTP cyclohydrolase FolE2 OS=Caballeronia turbans OX=1777134 GN=folE2 PE=3 SV=1
MNQMNPAFVMPDVQSTPDTRQIAIQRVGVKGVRHPLSVRTANGVQPSVGVWNLDVHLPADQKGTHMSRFVALLEEHREPLDQAALRTLLASMLAKLEAHSGRIEVTLPYFVMKTAPVSGVQSLLDYEATFIAEKRDGQTHMSMKVLVPVTSLCPCSKKISQYGAHNQRSHVTILAQLAGEVAVEELIRIAEEEASCELWGLLKRPDEKFVTERAYENPKFVEDLVRDVATRLNADERIVAYVLEAENFESIHNHSAYAVIERDKRRDA

SEQ ID NO: 5979 - protein, 216 aa, unidentified
  source 1..216: note = Caballeronia turbans
  REGION 1..216: note = tr|A0A158GEP0|A0A158GEP0_9BURK GTP cyclohydrolase 1; OS = Caballeronia turbans OX=1777134 GN=folE PE=3 SV=1
MSAPRKNHLSGSDMPADPADRPTREEAEAAVRVLLRWAGDDPRREGLLDTPGRVVRAYEEFFAGYTQNPHDILARTFSEVQGYDEMIVLKDIRFESYCEHHMVPIIGRAHVAYLPNKRVVGISKLARLVDAFAKRLQIQEKMTAQIADTLNEVLQPLGVGVILEAAHQCMSTRGVHKAGVSMVTSRMLGSFRDDPSTRREFLSIVSDQSAFSVSNT

SEQ ID NO: 5980 - protein, 268 aa, unidentified
  source 1..268: note = Caballeronia udeis
  REGION 1..268: note = tr|A0A3M0UHD4|A0A3M0UHD4_9BURK GTP cyclohydrolase FolE2 OS=Caballeronia udeis OX=1232866 GN=folE2 PE=3 SV=1
MNQMNPAFAMPDVQSSLDVRQIPIQRVGVKAVRYPLTIRTSSGELQPGVGLWNLDVHLPADQKGTHMSRFVALLDEHRAPLDQAAFRTMLVAMLAKLEAHSGRIEVSFPYFVMKTAPVSGVQSLMDYEVTLTGEMRGGETRISLKVLVPVTSLCPCSKQISQYGAHNQRSHVTIAAEFKGDVAIEDLIRIAEEEASCELWGLLKRPDEKFVTERAYENPKFVEDLVRDVATRLNADERIVSYVLEAENFESIHNHSAYAVIEHDKRVS

SEQ ID NO: 5981 - protein, 215 aa, unidentified
  source 1..215: note = Caballeronia udeis
  REGION 1..215: note = tr|A0A158FFV6|A0A158FFV6_9BURK GTP cyclohydrolase 1; OS = Caballeronia udeis OX=1232866 GN=folE PE=3 SV=1
MSATRNSPNASSDIHDQADRPSREEAEAAVRVLIRWAGDNPAREGLIDTPSRVIRSYEEFFAGYAQNPHDILARTFSEVQGYDEMIVLKDIRFESYCEHHMVPIIGRAHVAYLPRERVVGISKLARLVDAFAKRLQIQEKMTAQIADTLEEVLQPLGVGVILEATHQCMSTRGVHKAGASMVTSRMLGTFRDDPSTRREFLSIVGHSSAFSVSNS

SEQ ID NO: 5982 - protein, 223 aa, Caenispirillum bisanense
  REGION 1..223: note = tr|A0A286GW20|A0A286GW20_9PROT GTP cyclohydrolase 1; OS = Caenispirillum bisanense OX=414052 GN=folE PE=3 SV=1
MSDTKAVKTPAPLRDYRDAAGSAKAALAAEGRPSREEAEAAVRTLLRWAGDNPSREGLVDTPARVVRAYEEFFAGYEEDAEDILRRTFEETDGYDEMVLLRDIRIESHCEHHMVPIIGKAHVAYLPDKRVVGISKLARVIEIYAKRLQIQEKLTAQVANAINDVLQPKGVAVVIEAAHQCMTTRGIRKPGVTMVTSRMLGAFRDNPTTRREFMALIAGERGGF

SEQ ID NO: 5983 - protein, 231 aa, unidentified
  source 1..231: note = Caenispirillum salinarum
  REGION 1..231: note = tr|K9H3D2|K9H3D2_9PROT GTP cyclohydrolase 1; OS = Caenispirillum salinarum AK4 OX=1238182 GN=folE PE=3; SV = 1
MTEAKPVKTPSALRDFREGATATAPRATDSAPVSAAEAGRPSREEAEAAIRTLLRWAGDDPTREGLVDTPARVARAYEEFFAGYGEDPEDILRRTFEETDGYDEMVLLRDIRIESHCEHHMVPILGKAHVAYLPDRRVVGISKLARVVEIYAKRLQIQEKLTAQIANAINDVLQPKGVAVVMEAAHQCMTTRGIRKPGVTMVTSRMLGAFRDNPTTRREFMALISGDRGHF

SEQ ID NO: 5984 - protein, 209 aa, Caldalkalibacillus thermarum
  REGION 1..209: note = tr|F5L718|F5L718_CALTT GTP cyclohydrolase 1; OS = Caldalkalibacillus thermarum (strain TA2.A1) OX=986075; GN = folE PE=3 SV=1
MSKADAKSDTETFAHIDSPAQPQEVDKAKIEQAVRMILEAIGENPDREGLVDTPKRVARMYEEVFSGMRTDPGHYFDVIFGEDHEELVLVKDIPFFSMCEHHLVPFFGKAHVAYIPKGGRVTGLSKLARAVEAIARRPQLQERITSTVADTMVEKLDPHGVVVVVEAEHMCMTMRGVKKPGAKTVTSAVRGCFEHDAAARAEVFSLIKG

SEQ ID NO: 5985 - protein, 188 aa, Caldanaerobacter subterraneus
  REGION 1..188: note = sp|Q8R7N2|GCH1_CALS4 GTP cyclohydrolase 1; OS = Caldanaerobacter subterraneus subsp. tengcongensis (strain DSM 15242 / JCM 11007 / NBRC 100824 / MB4); OX = 273068 GN=folEPE=3 SV=1
MIDKEKIKKAVREILEAIGEDPDREGLLETPDRVARMYEEIFSGLHTDVKDVIKIFQEDEHQEIILVKDIPLYSMCEHHLLPFIGVAHVAYLPRKGRILGLSKVARIVDVLSKRPQLQERLTSEIADTIMEAVNPLGVAVVIEAEHLCMTMRGVKKPGSKTVTSALRGIFRTDQKARAEVMALINSKR

SEQ ID NO: 5986 - protein, 198 aa, Caldanaerobacter subterraneus
  REGION 1..198: note = tr|A0A0F5PKM5|A0A0F5PKM5_9THEO GTP cyclohydrolase 1; OS = Caldanaerobacter subterraneus subsp. pacificus DSM 12653 OX=391606 GN=folE PE=3 SV=1
MHNKKEGVSKMIDKEKIKKAVREILEAIGEDPDREGLLETPDRVARMYEEIFSGLHTDVKDVIKIFQEDEHQEIILVKDIPLYSMCEHHLLPFIGVAHVAYLPRKGRILGLSKVARIVDVLSKRPQLQERLTSEIADTIMEAVNPLGVAVVIEAEHLCMTMRGVKKPDSKTVTSALRGIFRTDQKARAEVMALINSKR

SEQ ID NO: 5987 - protein, 183 aa, Caldanaerobius fijiensis
  REGION 1..183: note = tr|A0A1M5A9A2|A0A1M5A9A2_9THEO GTP cyclohydrolase 1; OS = Caldanaerobius fijiensis DSM 17918 OX=1121256 GN=folE; PE = 3 SV=1
MNEERIKNAIRVILEEIGEDPDREGLRDTPDRVYRMYKEIFSGIGSDPQDVLTAVFHEQHKELVIVKDIRFYSVCEHHMVPFFGKAHVGYLPDGKIIGLSKIARLVDIVSKRLQLQERMTQMIADAMNQRLEPKGVIVMLEAEHLCMSMRGIKRPGSTTVTIATRGIFDTDENMRKRFFELIK

SEQ ID NO: 5988 - protein, 268 aa, Caldanaerovirga acetigignens
  REGION 1..268: note = tr|A0A1M7LUZ9|A0A1M7LUZ9_9FIRM GTP cyclohydrolase FolE2 OS=Caldanaerovirga acetigignens OX=447595 GN=folE2; PE = 3 SV=1
MGSSTGVKTLKDVQSERDERRVPLKKVGVKNIEWPLKVLDKARGHQYTVAKISLSVDLRHDVRGTHMSRFVEVLNDLEMLSPAALLEILSEIKEKLQAEKSYLLMCFPYFIWKKSPISGLSSPMKIQAFIEAESDIKSTITMGVKVPVHTLCPCSKEISESGAHNQRAVVEIYVRSKKMIWFEDLSEIAEKSASCPIYTLLKRPDEKFVTEMAYRNAKFVEDVTRDAALELERDERIEWYKVQVTSFESIHNHDAFACVEKGWIQDDN

SEQ ID NO: 5989 - protein, 186 aa, unidentified
  source 1..186: note = Calderihabitans maritimus
  REGION 1..186: note = tr|A0A1Z5HY41|A0A1Z5HY41_9THEO GTP cyclohydrolase 1; OS = Calderihabitans maritimus OX=1246530 GN=folE PE=3 SV=1
MDLGKIEKGVRLILEGLGEDTSREGLRDTPARVARMYKEIFCGLEEDPEAHLQVYFTEEHEEMVLVKDIPLYSMCEHHLLPFYGKAHVAYIPRKGRITGLSKLARVVEGFAKRPQLQERLTSQIADAIMRALKPHGVLVVVEAEHMCMTMRGVKKPGSQTLTSAVRGLFKTSEATRAEAFALIKGN

SEQ ID NO: 5990 - protein, 188 aa, unidentified
  source 1..188: note = Caldibacillus debilis
  REGION 1..188: note = tr|A0A150M7C7|A0A150M7C7_9BACI GTP cyclohydrolase 1; OS = Caldibacillus debilis OX=301148 GN=folE PE=3 SV=1
MKDIKINQIEHAVRLILEAVGEDVEREGLLDTPRRVAKMYGELFSGLHEDPGKYFETIFHENHDGLVLVKDISFYSMCEHHLLPFFGRAHVAYIPEGGRVVGLSKLARAVETVARRPQLQERMTRIVADTIMEKLNPLGVAVVVEAEHMCMTMRGIKKPGSITVTTAVRGIFAEDKEAKNEVLARILK

SEQ ID NO: 5991 - protein, 188 aa, unidentified
  source 1..188: note = Caldibacillus debilis
  REGION 1..188: note = tr|A0A420VEN5|A0A420VEN5_9BACI GTP cyclohydrolase 1; OS = Caldibacillus debilis GB1 OX=1339248 GN=folE PE=3 SV=1
MKDIKINQIEHAVRLILEAVGEDVEREGLLDTPRRVAKMYGELFSGLHEDPGKYFETIFHENHDGLVLVKDISFYSMCEHHLLPFFGRAHVAYIPEGGRVVGLSKLARAVETIARRPQLQERMTRIVADTIMEKLNPLGVAVVVEAEHMCMTMRGIKKPGSITVTTAVRGIFAEDKEAKNEVLARILK

SEQ ID NO: 5992 - protein, 256 aa, Caldicellulosiruptor bescii
  REGION 1..256: note = sp|B9MNP4|GCH4_CALBD GTP cyclohydrolase FolE2; OS = Caldicellulosiruptor bescii (strain ATCC BAA-1888 / DSM 6725 / Z-1320) OX=521460 GN=folE2 PE=3 SV=1
MIDVQSQKDQRGISIQKVGIKDLNWPIVVMDRENKTQTTIAKIIAAAELKGDIRGTHMSRFIEAIDELKVVGPKEIEKLLDRIKEKLNSEKAYIRFDFPYFINKRTPVTATLSPLKVDCYFEAEKDQKFDLKVGVIVPVHTLCPCSKEISEYGAHNQRAYVTIEVRMKKFMWIEELVEIAEASASCPLYSILKRPDEKWVTERAYQNPRFVEDLLREVVLKMKEDGRIKWYKVFVESIESIHNHNAFAYIEGEITK

SEQ ID NO: 5993 - protein, 256 aa, unidentified
  source 1..256: note = Caldicellulosiruptor changbaiensis
  REGION 1..256: note = tr|A0A3T0D2G5|A0A3T0D2G5_9FIRM GTP cyclohydrolase FolE2 OS=Caldicellulosiruptor changbaiensis OX=1222016; GN = folE2 PE=3 SV=1
MIDVQSQKDLRGISIQKVGIKDLNWPIVVMDRANKTQTTIAKITAAAELKGDMRGTHMSRFIEAIDELNVVGPKEIERLLDRIKEKLDSQKAYVRFDFPYFINKRTPVTETLAPLKVDCYFEAEKGEKFDLKVGVIVPVHTLCPCSKEISEYGAHNQRAYVTIEVRMRRFMWIEELVEIAESSASCPLYSILKRPDEKWVTERAYQNPRFVEDLLREVVVKINSDKRIKWYKVFVESIESIHNHNAFAYIEGEIAK

SEQ ID NO: 5994 - protein, 256 aa, Caldicellulosiruptor hydrothermalis
  REGION 1..256: note = tr|E4Q882|E4Q882_CALH1 GTP cyclohydrolase FolE2; OS = Caldicellulosiruptor hydrothermalis (strain DSM 18901 / VKM B-2411 / 108) OX=632292 GN=folE2 PE=3 SV=1
MIDVQSQKDQRGISIQKVGIKDLNWPIVVMDRENKTQTTIAKITAAAELKGDIRGTHMSRFIEAIDELKVVGPKEIEKLLDRIKEKLLSDRAYIRFDFPYFINKRTPVTGTLSPLKVDCYFEAEKDQKFDLKVGVVVPVHTLCPCSKEISEYGAHNQRAYVTIEVRMKKFMWIEELVEIAEASASCPLYSILKRPDEKWVTERAYQNPRFVEDLLREVVLKIKEDGRIKWYKVFVESIESIHNHNAFAYIEGEITK

SEQ ID NO: 5995 - protein, 256 aa, Caldicellulosiruptor kristjanssonii
  REGION 1..256: note = tr|E4S6C4|E4S6C4_CALKI GTP cyclohydrolase FolE2; OS = Caldicellulosiruptor kristjanssonii (strain ATCC 700853 / DSM 12137 / I77R1B) OX=632335 GN=folE2 PE=3 SV=1
MIDVQSQKDLRGISIQKVGIKDLNWPIVVMDRENKTQTTIAKITAAAELKGDIRGTHMSRFIEAIDELKVVGPKEIEKLLDRIKEKLNSEKAYIRFDFPYFINKRTPVTGTLSPLKVDCYFEAEKDQKFDLKVGVIVPVHTLCPCSKEISEYGAHNQRAYVTIEVRMKKFMWIEELVEIAEASASCPLYSILKRPDEKWVTERAYQNPRFVEDLLREVVLKIKEDGRIKWYKVFVESIESIHNHNAFAYIEGEITK

SEQ ID NO: 5996 - protein, 256 aa, Caldicellulosiruptor kronotskyensis
  REGION 1..256: note = tr|E4SH08|E4SH08_CALK2 GTP cyclohydrolase FolE2; OS = Caldicellulosiruptor kronotskyensis (strain DSM 18902 / VKM B-2412 / 2002) OX=632348 GN=folE2 PE=3 SV=1
MIDVQSQKDLRGISIQKVGIKDLNWPIVVMDRENKTQTTIAKIIAAAELKGDIRGTHMSRFIEAIDELKVVGPKEIEKLLDRIKEKLNSEKAYIRFDFPYFINKRTPVTATLSPLKVDCYFEAEKDQKFDLKVGVIVPVHTLCPCSKEISEYGAHNQRAYVTIEVRMKKFMWIEELVEIAEASASCPLYSILKRPDEKWVTERAYQNPRFVEDLLREVVLKIKEDNRIKWYKVFVESIESIHNHNAFAYIEGEITK

SEQ ID NO: 5997 - protein, 256 aa, Caldicellulosiruptor lactoaceticus
  REGION 1..256: note = tr|G2PWG6|G2PWG6_9FIRM GTP cyclohydrolase FolE2; OS = Caldicellulosiruptor lactoaceticus 6A OX=632516; GN = folE2 PE=3 SV=1
MIDVQSQKDLRGISIQKVGIKDLNWPIVVMDRENKTQTTIAKITAAAELKGDIRGTHMSRFIEAIDELKVVGPKEIEKLLDRIKEKLNSEKAYIRFDFPYFINKRTPVTGTLSPLKVDCYFEAEKDQKFDLKTGVIVPVHTLCPCSKEISEYGAHNQRAYVTIEVRMKKFMWIEELVEIAEASASCPLYSILKRPDEKWVTERAYQNPRFVEDLLREVVLKIKEDGRIKWYKVFVESIESIHNHNAFAYIEGEITK

SEQ ID NO: 5998 - protein, 256 aa, unidentified
  source 1..256: note = Caldicellulosiruptor obsidiansis
  REGION 1..256: note = tr|D9TI96|D9TI96_CALOO GTP cyclohydrolase FolE2; OS = Caldicellulosiruptor obsidiansis (strain ATCC BAA-2073 / strain OB47) OX=608506 GN=folE2 PE=3 SV=1
MIDVQSQKDLRGISIQKVGIKDLNWPIVVMDRENKTQTTIAKITAAAELKGDIRGTHMSRFIEAIDELKVVGPKEIEKLLDRIKEKLNSEKAYIRFDFPYFINKRTPVTGTLSPLKVDCYFEAERDNKFDLKVGVVVPVHTLCPCSKEISEYGAHNQRAYVTIEVKMRKFMWIEELVEIAESSASCPLYSILKRPDEKWVTERAYQNPRFVEDLLREVVLKIREDGRIKWYKVFVESIESIHNHNAFAYIEGEITK

SEQ ID NO: 5999 - protein, 256 aa, Caldicellulosiruptor owensensis
  REGION 1..256: note = tr|E4Q339|E4Q339_CALOW GTP cyclohydrolase FolE2; OS = Caldicellulosiruptor owensensis (strain ATCC 700167 / DSM 13100 / OL) OX=632518 GN=folE2 PE=3 SV=1
MIDVQSQKDQRGISIQKVGIKDLNWPIVVMDRENKTQITIAKITAAAELKGDIRGTHMSRFIEAIDELKVVGPKEIERLLDRIKEKLNSEKAYIRFDFPYFINKRTPVTGTLSPLKVDCFFEAEKDSKFDLKVGVVVPVHTLCPCSKEISEYGAHNQRAYVTIEVKMRKFMWIEELVEIAESSASCPLYSILKRPDEKWVTERAYQNPRFVEDLLREVVLKIKEDGRIKWYKVFVESIESIHNHNAFAYIEGEITK

SEQ ID NO: 6000 - protein, 256 aa, Caldicellulosiruptor saccharolyticus
  REGION 1..256: note = sp|A4XG24|GCH4_CALS8 GTP cyclohydrolase FolE2; OS = Caldicellulosiruptor saccharolyticus (strain ATCC 43494 / DSM 8903 / Tp8T 6331) OX=351627 GN=folE2 PE=3 SV=1
MIDVQSQKDLRGIAIQKVGIKDLNWPIVVMDRANKTQTTIAKITAAAELKGDMRGTHMSRFIEAIDELNVVGPKEIERLLDRIKEKLDSQKAYVRFDFPYFINKRTPVTETLAPLKVDCYFEAEKGEKFDLKVGVIVPVHTLCPCSKEISEYGAHNQRAYVTIEVKMRRFMWIEELVEIAESSASCPLYSILKRPDEKWVTERAYQNPRFVEDLLREVVVKISGDKRIKWYKVFVESIESIHNHNAFAYIEGENTK

SEQ ID NO: 6001 - protein, 359 aa, Caldilinea aerophila
  REGION 1..359: note = tr|I0I6H9|I0I6H9_CALAS GTP cyclohydrolase FolE2; OS = Caldilinea aerophila (strain DSM 14535 / JCM 11387 / NBRC 104270 / STL-6-O1) OX=926550 GN=folE2 PE=3 SV=1
MNIKHTNGFNSNGLNSNGLNGNGHHTVVYNPNGTHGTAAPALTPSAQQTLSPRRYYDADFVVTEAYRASLPDLQNGPASLIQGSAVAIQQVGIHNFRLPLRYASRDGQPMTLETSVTGTVSLEAHKKGINMSRVMRTFYEYKDELFDLDLLDAILQDYRRSLGSLEAYLILRFNYPILNESLRSGLFGYQYYQVALEARMDRYGAVRKLIHFDFVYSSTCPCSYELSQHAILERGIAAVPHSQRSVARVSVELNDFLWIEDLRDLCLDALKTETQVMVKREDEQAFAELNAAYLKFVEDAVRLLHEKLDPDPRIKDFKIVASHQESLHSHDAVSVLVKGIPGGFTPEVDPSVFATLIHR

SEQ ID NO: 6002 - protein, 217 aa, unidentified
  source 1..217: note = Caldilineae bacterium
  REGION 1..217: note = tr|A0A3M1EXN1|A0A3M1EXN1_9CHLR GTP cyclohydrolase 1; OS = Caldilineae bacterium OX=2420332 GN=folE PE=3 SV=1
MTQIKQTAPLPPLTLSPVANGNGTETHTGKTAIEEAVRTILHHIGENPDRDGLRRTPERIARMYDELTAGYHVDPVELVNDALFDVNYNEMVLVKNIDFYSLCEHHMLPFFGQAHVAYIPNGKVIGLSKIPRIVEMFARRLQVQERMTTQIAELLEEVLQPRGVAVVVEGVHMCSAMRGVKKANARMVTSTVTGAFQSNPKTRAEFMEHLSRRGWDD

SEQ ID NO: 6003 - protein, 241 aa, unidentified
  source 1..241: note = Caldilineae bacterium
  REGION 1..241: note = tr|A0A3M1FYN2|A0A3M1FYN2_9CHLR GTP cyclohydrolase 1; OS = Caldilineae bacterium OX=2420332 GN=folE PE=3 SV=1
MTSLTPPNQNGHNGHHGPADHYANGTNGNGAHGHGRPALVTEPFSLAENPYATPPAESYDPAFEALIRQMLQRLGEDPEREGLQRTPLRVAKAMDFLTEGYNQSLHEVVNGALFEDDVDEMVIVRDIEFYSLCEHHMLPFFGKAHIGYIPNGRIIGLSKLARIVDVFARRLQVQERLTGQVADALMEILQPRGVAVVTEASHFCMMMRGVQKQNSFTIASAMRGVFKEDPRTRQEFMGLVK

SEQ ID NO: 6004 - protein, 269 aa, unidentified
  source 1..269: note = Caldimicrobium thiodismutans
  REGION 1..269: note = tr|A0A2N7PJ61|A0A2N7PJ61_9BACT GTP cyclohydrolase FolE2 OS=Caldimicrobium thiodismutans OX=1653476 GN=folE2; PE = 3 SV=1
MKLPDVQSLEPSYQLPIEKVGIKNLRYPIKVLDRAKGFQATVGEFNLYVDLPSHFKGTHMSRFIEILNEFREEIHVKNINEILRKLKKRLNAKSAHLEVYFPYFIEKKAPVTGIPSLMEYQAFIIASLSQRRKDLIIGVKVPVMTLCPCSKSISEYGAHNQRGLVTVAVRSRKFIWLEELIEMAEESASSPIYPLLKRPDEKYVTEKAYENPKFVEDVVRGVAYKLLQRKEIYWFNVEAENMESIHGHNAYACITYPFKDYSSESSISK

SEQ ID NO: 6005 - protein, 269 aa, unidentified
  source 1..269: note = Caldimicrobium thiodismutans
  REGION 1..269: note = tr|A0A0U4W2D8|A0A0U4W2D8_9BACT GTP cyclohydrolase FolE2 OS=Caldimicrobium thiodismutans OX=1653476 GN=folE2; PE = 3 SV=1
MKLPDIQSSPPEEQIPIDKVGIKNLRYPIRVLDRAKGLQATVGEFNLYVDLPSHFKGTHMSRFIEVLNEFKDEIHVRNIEEILRKLKKRLNAKSAHLEVYFPYFLEKKSPVTEISSLMEYQAFMLASLTARKIDLVLGVKVPVMTLCPCSKSVSEYGAHNQRGIITVAVRSKKFIWLEELIEMAESSASSPVYPLLKRPDEKYVTERAYENPKFVEDVVRGLAFKLLENKEIFWFTVEAENMESIHGHNAYACIRYPFENYSSESSISK

SEQ ID NO: 6006 - protein, 257 aa, unidentified
  source 1..257: note = Caldiserica bacterium
  REGION 1..257: note = tr|A0A2H9MDC5|A0A2H9MDC5_9BACT GTP cyclohydrolase FolE2 OS=Caldiserica bacterium CG02_land_8_20_14_3_00_36_38 OX=1973932 GN=folE2 PE=3 SV=1
MRDVQNDLDLRNIALNKVGVSGIVYPIRVMDKNNGFQHTVSKINMFVDLPQEFRGTHMSRFVEVLNKHRTNMSLATLENILDDIKIALKAKTAHIEVRFPYFMIKKAPISRIESFMNYECAFIASKGKNFDFVLEVNTPVHSLCPCSKEISNFGAHNQRANIKAQVRMKKLVWIEEIVNISESSASAPLYSLLKREDEKYVTEHAFQNPKFVEDMVRGVSILLDKDERITYYAIEAISFESIHNHNAYGFYSRDKRV

SEQ ID NO: 6007 - protein, 257 aa, unidentified; identical to SEQ ID NO: 6006
  source 1..257: note = Caldiserica bacterium
  REGION 1..257: note = tr|A0A2H9N4S0|A0A2H9N4S0_9BACT GTP cyclohydrolase FolE2 OS=Caldiserica bacterium CG_4_8_14_3_um_filter_35_18; OX = 1973931 GN=folE2 PE=3 SV=1

SEQ ID NO: 6008 - protein, 260 aa, Caldisericum exile
  REGION 1..260: note = tr|I0GJK5|I0GJK5_CALEA GTP cyclohydrolase FolE2; OS = Caldisericum exile (strain DSM 21853 / NBRC 104410 / AZM16c01) OX=511051 GN=folE2 PE=3 SV=1
MKDVQSEKDKRNIFIEKVGVSSIKYPIRIMDKQNGFQNTVALVDIYVDLPSEYRGTHMSRFVEILNKHRNNMSLSNLEKILDDTKQQLRAKVAHIVLRFPYFILKKAPITKEESFMDYECAFIASKNEKFDFVLEVNVPVHLLCPCSKEISDFGAHNQRANIRVKVKMDRLVWIEEIVEMVENSASAPLYALLKRPDEKYITEKAYMNPKFVEDIVRDVSILFDKDERITYYEIEAISYESIHNHSAYAYLHRDKNSYNK

SEQ ID NO: 6009 - protein, 257 aa, Caldisericum sp.; identical to SEQ ID NO: 6006
  REGION 1..257: note = tr|A0A1J5BNZ5|A0A1J5BNZ5_9BACT GTP cyclohydrolase FolE2 OS=Caldisericum sp. CG2_30_36_11 OX=1805053 GN=folE2; PE = 3 SV=1

SEQ ID NO: 6010 - protein, 261 aa, Calditerrivibrio nitroreducens
  REGION 1..261: note = tr|A0A2J6WGY3|A0A2J6WGY3_9BACT GTP cyclohydrolase FolE2 OS=Calditerrivibrio nitroreducens OX=477976 GN=folE2; PE = 3 SV=1
MVLADIQSQYDHRNLDIDRVGIKDILYPIVVKDKKNGKQSTVARINMYVKLPHNFKGTHMSRFVEVLNNHRTNIALESFKGILDDLQTVLNSEEAYIEITFPYFIEKTAPVSKLPSLMDYECTFVGISSKDKKDFTVSVKVPVISLCPCSKEISDYGAHNQRSYVTIKVRYKGMIWIEDLIEIAESSASAPIFSLLKREDEKYITEFSYDNPVFVEDIVRNAANKLLLDERVTWFEVSSENYESIHNHSAYAVIARDKRGG

SEQ ID NO: 6011 - protein, 261 aa, Calditerrivibrio nitroreducens
  REGION 1..261: note = tr|E4TEJ2|E4TEJ2_CALNY GTP cyclohydrolase FolE2; OS = Calditerrivibrio nitroreducens (strain DSM 19672 / NBRC 101217 / Yu37-1) OX=768670 GN=folE2 PE=3 SV=1
MALADIQSQYDHRNLDIDRVGIKDILYPIVVKDKKNGKQSTVARINMYVRLPHNFKGTHMSRFVEVLNNHRTNIALESFKGILDDLKTVLNSEEAHIEITFPYFIEKIAPVSNLPSLMDYECTFVGISSKDKKDFIVSVKVPVVSLCPCSKEISDYGAHNQRSYVTIKVRYKGMIWIEDLIEVAESSASAPIFSLLKREDEKYITEHSYDNPVFVEDIVRNAANKLLLDDRVTWFEVSSENYESIHNHSAYAVITRDKRGG

SEQ ID NO: 6012 - protein, 190 aa, Caldithrix abyssi
  REGION 1..190: note = tr|H1XX36|H1XX36_9BACT GTP cyclohydrolase 1; OS = Caldithrix abyssi DSM 13497 OX=880073 GN=folE PE=3 SV=1
MKSMEEAVRQILLGIGEDPERQGLKNTPFRVAKMFREVTKGYQADPQKIINNAIFDVDYDEMVVVANIEYYSLCEHHLLPFFGVVHVGYIPRGKVVGLSKIPRIVDMFARRLQIQEKMTLEIAHLLNDALDPDGVGVVVEGQHMCMMMRGVQKDKAKMITSAMLGSFKDDEKTRAEFLSLIRSPRVEAPY

SEQ ID NO: 6013 - protein, 124 aa, Caldithrix sp.
  REGION 1..124: note = tr|A0A1F4N9Z3|A0A1F4N9Z3_9BACT GTP cyclohydrolase 1; OS = Caldithrix sp. RBG_13_44_9 OX=1797576 GN=A2Y94_15850; PE = 3 SV=1
MADDLIVIRDIPFYSLCEHHLLPFFGKVHLAYIPRQNKVSGFSAITRLVDIFSRRLQIQERLTRQIANALMQFLDPRGVLVIVDAQQLCVSMRGTKKDSVRTVTRATRGEISPDCLPLLGFKTS

SEQ ID NO: 6014 - protein, 184 aa, Caldithrix sp.
  REGION 1..184: note = tr|A0A523HR23|A0A523HR23_9BACT GTP cyclohydrolase 1; OS = Caldithrix sp. OX=1962856 GN=folE PE=3 SV=1
MQAIIKRLLIEIGEDPEREGLLNTPARVAKSYEFLTRGYQQDPCKIITDALFTERCDEMIVVKDIEVYSLCEHHLLPFYGKCHVAYMPNGKVVGLSKIPRVVDVYARRLQVQERLTNQIADLLLDCLNPEGVAVVIEARHLCMMMRGVEKQNTVVSTSALRGVFRDNLSTRAEFMQLIKPQRNV

SEQ ID NO: 6015 - protein, 260 aa, unidentified
  source 1..260: note = Calditrichaeota bacterium
  REGION 1..260: note = tr|A0A3M1NQ14|A0A3M1NQ14_9BACT GTP cyclohydrolase FolE2 OS=Calditrichaeota bacterium OX=2212469 GN=folE2; PE = 3 SV=1
MVDVQNRPDERGIPINKVGVKQLKYPIVVLDRAHEKQQTVAEVSLSVSLPHHFKGTHMSRFVEVLNEHHDEMTMWTLPTILHKLKERLDAESAHVEFTFPYFIEKRAPVSKAIGLMDYQTTFIGETYSDRDIFILKVNVPVTSLCPCSKEISDYGAHNQRGEVTIEVQCKENEMIWIEEVVEIAESSASAPVYALLKRPDERFVTMQAYDNPAFVEDIVRNVALQLKADERVVWFRVHAENFESIHNHNAFAMVEWRREN

SEQ ID NO: 6016 - protein, 191 aa, unidentified
  source 1..191: note = Calditrichaeota bacterium
  REGION 1..191: note = tr|A0A3M2FMD5|A0A3M2FMD5_9BACT GTP cyclohydrolase 1; OS = Calditrichaeota bacterium OX=2212469 GN=folE PE=3 SV=1
MKESKTEQAVRQILTDIGEDPDRQGLQKTPHRVAKMYREVTVGYHQNVEKLVNGAIYDVDYDEMVVVTNIEFYSMCEHHLLPFYGIAHVGYLPRGKVIGLSKIPRIVDMYARRLQVQENMTRQIADALHEILAPQGVGVVVEGRHMCMMMRGVQKDQAKMITSTLVGSFKEDEKTRDEFLKLIRSSRANPF

SEQ ID NO: 6017 - protein, 237 aa, unidentified
  source 1..237: note = Calditrichales bacterium
  REGION 1..237: note = tr|A0A524L9L1|A0A524L9L1_9BACT GTP cyclohydrolase I (Fragment) OS=Calditrichales bacterium OX=2528038; GN = E4H13_13165 PE=3 SV=1
IKNLRYPITVLDRRDGYQHTVASINMYVDLPHKYKGTHMSRFVELLHLFRPEVSLKRISVVLEKMKQHLNAASAVIEVTFPYFIEKKAPISGSPGILDYTCRIVGSSDPEGKVDLVSEVIVPISSVCPCSKEISESGAHNQRGEVRLSTRFKKFIWMEDMIELVESCASCEVYSVLKRVDEKCVTERGFSNPKFVEDIVRDIAKKLKEDSNITWFSVSAENFESIHNHSAYAHITSE

SEQ ID NO: 6018 - protein, 209 aa, Calidifontibacter indicus
  REGION 1..209: note = tr|A0A3D9UKJ2|A0A3D9UKJ2_9MICO GTP cyclohydrolase 1; OS = Calidifontibacter indicus OX=419650 GN=folE PE=3 SV=1
MDVSTPPGTDDIERGDGLLTVDRERAAAAVRELLLALGEDPDREGLVDTPMRVAKAFEETFAGLRQDPAEILSRTFSIDHDELIIVKDIEVYSTCEHHLVPFHGVAHVGYIPAKDGRVTGLSKIARLVDVYARRPQVQERLTTQVADALVQHLGAQGVLVVVECEHLCMSMRGVRKPGATTITSAVRGQLRDPATRAEAMSLMKAPTSR

SEQ ID NO: 6019 - protein, 256 aa, Caloramator australicus
  REGION 1..256: note = tr|I7LJE2|I7LJE2_9CLOT GTP cyclohydrolase FolE2; OS = Caloramator australicus RC3 OX=857293 GN=folE2 PE=3 SV=1
MKDVQSEKDFRNVPLKKVGINSLKWPIVVKEKHGGVQHTIADMSLSVDLPSDVRGTHMSRFVELVHELQEITPKEIERALDRLKEKLHAKTAHIKIDFDYFIKKSSPVSGIISPNDIKCSFDAEKGEDFKFIMEVSVPVVTLCPCSKEISEFGAHNQRATVNIKIYTKKLIWIEDLVAIAEESASCPVFSLLKRKDEKYVTERAYLNPRFVEDVVREVALRLDENKDILWYRVYVESMESIHNHNAFACTEKGEIL

SEQ ID NO: 6020 - protein, 256 aa, Caloramator fervidus
  REGION 1..256: note = tr|A0A1H5W4I6|A0A1H5W4I6_9CLOT GTP cyclohydrolase FolE2 OS=Caloramator fervidus OX=29344 GN=folE2 PE=3 SV=1
MKDVQSEKDFRNVPLKKVGISKLKWPIIVKEKEGGIQHTIADMTLSVDLPADIRGTHMSRFVELVHELKEITPKEIERALDRLKEKLSAKTAHIKIDFDYFIKKPSPVTGIVSPNDVKCSFDAEKSDTYRFFMEVSVPVVTLCPCSKEISEFGAHNQRAVVNIKIYTKKLIWIEDIVAIAEESASCPVFSLLKRKDEKYVTERAYLNPRFVEDVVREVALRLDSNKDILWYRVYVESIESIHNHNAFACTEKGEII

SEQ ID NO: 6021 - protein, 256 aa, Caloramator mitchellensis
  REGION 1..256: note = tr|A0A0R3K2U6|A0A0R3K2U6_9CLOT GTP cyclohydrolase FolE2 OS=Caloramator mitchellensis OX=908809 GN=folE2 PE=3; SV = 1
MKDVQSEKDYRNVPLKKVGINSLRWPIIIKEKDGGIQNTIADMALSVDLPADVKGTHMSRFVELVNDLKEISPKEIDKALDALKEKLHAKTAHIRIDFDYFIKKPSPVTGIISPYDVKCSFDAEKGEDFKFIMEVAVPVSTLCPCSKEISDFGAHNQRARVSIKIVSKKLIWIEDVVKIAEDSASSPVFSLLKRKDEKYVTEMAYLNPRFVEDVVREAAIRLDEIKDITYYRVYAESMESIHNHNAFACAEKGEII

SEQ ID NO: 6022 - protein, 256 aa, Caloramator proteoclasticus
  REGION 1..256: note = tr|A0A1M5AFT1|A0A1M5AFT1_9CLOT GTP cyclohydrolase FolE2 OS=Caloramator proteoclasticus DSM 10124 OX=1121262; GN = folE2 PE=3 SV=1
MKDVQNERDFRNIPLKHVGINNLKWPVVVRDKKNGTQNTIAKVSLSVDLPHFQRGTHMSRFVEVIKELKSVSPKDIEAMLTDLKEKLEAQVAHCRMEFDYFISKPSPVTQIESPYDVQCAFEATKNHNFDFILEVKVPVTTLCPCSKEISEFGAHNQRATVDIKIKTDKMIWIEDIVKVAEESASTPVFSLLKRKDEKWVTEMAYLNPRFVEDVAREVALRLEKNEDIKWYSVCVESIESIHNHNAFAYTEKGMME

SEQ ID NO: 6023 - protein, 256 aa, unidentified
  source 1..256: note = Caloramator quimbayensis
  REGION 1..256: note = tr|A0A1T4YEU6|A0A1T4YEU6_9CLOT GTP cyclohydrolase FolE2 OS=Caloramator quimbayensis OX=1147123 GN=folE2 PE=3; SV = 1
MKDVQSEKDFRNVSLKKVGINGLKWPIVVKEKSGGVQNTISQMALSVDLPADIRGTHMSRFVELVNDLKEITPKEIEKALDNLKEKLGAKTAHLKIDFDYFIKKPSPVTGIVSPYDVKCSFDAEKGEDFIFIMEVFVPVSTLCPCSKEISEFGAHNQRAVVNISIYSKKLIWIEDLVKVAEESASSPVFSLLKRKDEKFVTERAYLNPRFVEDVVRETAIRLDDMKEILWYRVHVESMESIHNHNAFACTEKGEIV

SEQ ID NO: 6024 - protein, 256 aa, Caloramator sp.
  REGION 1..256: note = tr|A0A5B7THX4|A0A5B7THX4_9CLOT GTP cyclohydrolase FolE2 OS=Caloramator sp. E03 OX=2576307 GN=folE2 PE=3 SV=1
MKDVQSEKDFRNVSLKKVGINGLKWPIVVKEKSGGVQNTISQMALSVDLPADIRGTHMSRFVELVNDLKEITPKEIEKALDKLKEKLGAKTAHLKIDFDYFIKKPSPVTGIVSPYDVKCSFDAEKGEDFRFIMEVIVPVSTLCPCSKEISEFGAHNQRATVNISIYSKKLIWIEDLVKVAEDSASSPVFSLLKRKDEKFVTERAYLNPRFVEDVVREAAIRLDDMKEILWYRVYVESMESIHNHNAFACTEKGVIL

SEQ ID NO: 6025 - protein, 187 aa, Caloranaerobacter azorensis
  REGION 1..187: note = tr|A0A096BFV6|A0A096BFV6_9CLOT GTP cyclohydrolase 1; OS = Caloranaerobacter azorensis H53214 OX=1156417 GN=folE; PE = 3 SV=1
MDKEKIKRAVRDILEAIGEDPDREGLKGTPDRIARMYEEIFSGLKEDPKEHLQIYFQDEKYEELVLVKDIPFYSMCEHHLVPFFGKAHVAYIPKGGKLTGLSKLARVVETVAKRPQLQERITKTIADTLMEVLEPYGVVVVVEAEHMCMTMRGVKKPGSKTVTSAVRGIFETRPESRAEVMSLINQK

SEQ ID NO: 6026 - protein, 187 aa, Caloranaerobacter azorensis
  REGION 1..187: note = tr|A0A1M5W7J6|A0A1M5W7J6_9CLOT GTP cyclohydrolase 1; OS = Caloranaerobacter azorensis DSM 13643 OX=1121264; GN = folE PE=3 SV=1
MDKEKIKRAVRDILEAIGEDPDREGLKGTPDRIARMYEEIFSGLKEDPKEHLQIYFQDEKYEELVLVKDIPFYSMCEHHLVPFFGKAHVAYIPKGGKLTGLSKLARVVETVAKRPQLQERITKTIADTLMEVLEPYGVVVVVEAEHMCMTMRGIKKPGSKTVTSAVRGIFETRPESRAEVMSLINQK

SEQ ID NO: 6027 - protein, 187 aa, Caloranaerobacter sp.
  REGION 1..187: note = tr|A0A0P8UYT4|A0A0P8UYT4_9CLOT GTP cyclohydrolase 1; OS = Caloranaerobacter sp. TR13 OX=1302151 GN=folE PE=3 SV=1
MDKEKIKRAIRDILEAIGEDPDREGLRGTPDRIARMYEEIFSGLNEDPKKHLEIYFQDEKYEELVLVKDIPFYSMCEHHLVPFFGKAHVAYIPKDGKLTGLSKLARVVETVAKRPQLQERITKTIADTLMEVLEPYGVVVVVEAEHMCMTMRGVKKPGSKTVTSAVRGIFETRPESRAEVMSLINHK

SEQ ID NO: 6028 - protein, 235 aa, unidentified
  source 1..235: note = Calothrix brevissima
  REGION 1..235: note = tr|A0A1Z4JZZ3|A0A1Z4JZZ3_9CYAN GTP cyclohydrolase 1; OS = Calothrix brevissima NIES-22 OX=1973478 GN=folE PE=3; SV = 1
MTIASSNGSNRSQSPLIPDLADAITLRPDRNTHDGHEPELHHPKDEDMERMTAAVHQILLGVGEDPEREGLLKTPKRVAEAMRFLTSGYNQSLEQLVNGAIFDEGHSEMVLVRDINFFSLCEHHMLPFMGRAHVAYIPNQKVVGLSKLARIVEMYSRRLQVQERLTRQIAEAVQTILNPHGVAVVMEATHMCMVMRGVQKPGSWTVTSAMLGVFQEEQKTREEFLNLIRHQAAFF

SEQ ID NO: 6029 - protein, 232 aa, unidentified
  source 1..232: note = Calothrix desertica
  REGION 1..232: note = tr|A0A433VPB1|A0A433VPB1_9CYAN GTP cyclohydrolase 1; OS = Calothrix desertica PCC 7102 OX=232991 GN=folE PE=3 SV=1
MTIARSNGSQSPLIPDLTDIISTRPDRNTHNGKTPDLHPPTPEHMEQMQDAVRNILIGVGEDPEREGLLKTPKRVAEAMRFLTSGYSQSLEDLVNNAIFDEGHNEMVLVRDIDFFSLCEHHMLPFMGRAHVAYIPNQKVVGLSKLARIVEMYSRRLQVQERLTRQIAEAVQTILEPQGVAVVMEGAHMCMAMRGVQKPGSWTVTSAMLGVFQDEQKTREEFFNLIRHQPSFF

SEQ ID NO: 6030 - protein, 102 aa, unidentified
  source 1..102: note = Calothrix desertica
  REGION 1..102: note = tr|A0A3S1AH55|A0A3S1AH55_9CYAN GTP cyclohydrolase 1; OS = Calothrix desertica PCC 7102 OX=232991; GN = DSM106972_073700 PE=3 SV=1
MAYIPNGKVIGLSKIARICEMYARRLQVQERLTLQIADALQGLLKPQGVAVVVEATHMCMVMRSVQKPGSWTVTSAMRGVFSEDARTREEFMNLVRHNSNFR

SEQ ID NO: 6031 - protein, 217 aa, unidentified
  source 1..217: note = Calothrix elsteri
  REGION 1..217: note = tr|A0A2A2TLI7|A0A2A2TLI7_9CYAN GTP cyclohydrolase 1; OS = Calothrix elsteri CCALA 953 OX=987040 GN=folE PE=3 SV=1
MTLSYRPESDSAEKMIASIKTEAKQKVTEAEMMQAVRTLLIGLGENPDREGLKDTPKRVMKALQFLTKGYHQSLDELLNGAVFTEDANEMVLIRDIDIFSSCEHHILPIIGRAHVAYIPNGKVIGLSKIARICEMYAQRLQVQERLTLQIADALQGLLKPQGVAVVIEATHMCMVMRGIQKPGSWTVTSAMRGVFSEDVRTREEFMNLIRHSPGFHS

SEQ ID NO: 6032 - protein, 232 aa, unidentified
  source 1..232: note = Calothrix elsteri
  REGION 1..232: note = tr|A0A2A2TEE7|A0A2A2TEE7_9CYAN GTP cyclohydrolase 1; OS = Calothrix elsteri CCALA 953 OX=987040 GN=folE PE=3 SV=1
MTTARSNGSQSPLIPDLSDIINTRPDRNTHNGGQPELHPPTEEDMEQMQDAVRNIILGVGEDPEREGLLKTPKRVAESMRFLTSGYSQSLEDLVNNAIFDEGHNEMVLVRDINFFSLCEHHMLPFMGRAHVAYIPNQKVVGLSKLARIVEMYSRRLQVQERLTRQVAEAIQTVLEPQGVAVVMEGSHMCMAMRGVQKPGSWTVTSAMVGVFQEDQKTREEFFSLIRHQAAFF

SEQ ID NO: 6033 - protein, 235 aa, Calothrix parasitica
  REGION 1..235: note = tr|A0A1Z4LQ08|A0A1Z4LQ08_9CYAN GTP cyclohydrolase 1; OS = Calothrix parasitica NIES-267 OX=1973488 GN=folE PE=3; SV = 1
MTIASSNGSNYSQSPLIPNLEDAVNPRPDRNTKDGSQPNLYPPSEEQMEQMKDAVRTMLVGVGEDPEREGLLKTPKRVAEAMRFLTSGYSQSLDELVNGAIFDEGHNEMVLVRDINFFSLCEHHMLPFMGKAHVAYIPNQKVVGLSKLARIVEMYSRRLQVQERLNRQIAEAVQEILEPQGVAVVMEATHMCMAMRGVQKPGSWTVTSAMLGVFEQEQKTREEFFNLIRHQPAFF

SEQ ID NO: 6034 - protein, 217 aa, Calothrix parasitica
  REGION 1..217: note = tr|A0A1Z4LQW0|A0A1Z4LQW0_9CYAN GTP cyclohydrolase 1; OS = Calothrix parasitica NIES-267 OX=1973488 GN=folE PE=3; SV = 1
MTLSIRPELPSSERTLSSLSKQNQSSNVTEAEMMEAVRTLLIGLGEDPNREGLKDTPKRVVKALQFLTKGYHESLDELLNGAVFTEDANEMVLVRDIDIFSSCEHHILPVIGRAHVAYIPNGKVIGLSKVARICEMYARRLQVQERLTVQIADALQGLLKPQGVAVVLEASHMCMVMRGVQKPGSWTVTSAMRGVFAEDAKTREEFMNLIRHKPNFS

SEQ ID NO: 6035 - protein, 217 aa, Calothrix sp.
  REGION 1..217: note = tr|A0A1Q4RA44|A0A1Q4RA44_9CYAN GTP cyclohydrolase 1; OS = Calothrix sp. HK-06 OX=1137096 GN=folE PE=3 SV=1
MFTEKQENNLNLIENNNVVATEEFEDLSDCKELNEPIIEAVKTLLLNLGEEPEREGLLRTPKRVAEAMRFLTSGYNQSLEALVNCAVFDEGHNEMVLVRDINVFSLCEHHMLPFMGKAHIAYMPNQKVVGLSKLARIVEMYSRRLQVQERLTTQIAEAVHTILEPQGVAVVIEATHMCMVMRGVQKPGSWTVTSAMLGVFQEEKNRREFLNFTSHNK

SEQ ID NO: 6036 - protein, 216 aa, Calothrix sp.
  REGION 1..216: note = tr|A0A1Z4RFD7|A0A1Z4RFD7_9CYAN GTP cyclohydrolase 1; OS = Calothrix sp. NIES-4101 OX=2005461 GN=folE PE=3 SV=1
MTLSISPELTSAEQVLSSLATQAKPKVTDAEMMQAVRTLLIGLGEDPDREGLKDTPKRVMKALQFLTKGYHESLDELLNGAVFTEDANEMVLVRDIDIFSSCEHHILPIIGRAHVAYIPNGKVIGLSKVARICEMYARRLQVQERLTFQIADALQRLLKPQGVAVVIEATHMCMVMRGVQKPGSWTVTSAMRGVFADDARTREEFMNLIRHKPSFS

SEQ ID NO: 6037 - protein, 216 aa, Camelimonas lactis
  REGION 1..216: note = tr|A0A4R2GL66|A0A4R2GL66_9RHIZ GTP cyclohydrolase 1; OS = Camelimonas lactis OX=659006 GN=folE PE=3 SV=1
MDSVVKSLSARLAPANADKQVTVPDFERPTREEAEAAVRTLIAWAGDNPDREGLVDTPRRVVKAYEELYGGYRQDPEAQLDRVFAEVGGYDDMVLLRDIQFFSHCEHHMVPFTGRVHIAYYPNGGVVGLSKLARVVDIFANRLQTQETMTAQILDTIDARLRPRGAAVMVEAAHMCMSMRGIQKQGSMTITSRFSGVFREDPAEQARFMTLVRAGA

SEQ ID NO: 6038 - protein, 192 aa, Caminibacter mediatlanticus
  REGION 1..192: note = tr|A0A4P9DTM4|A0A4P9DTM4_9PROT GTP cyclohydrolase 1; OS = Caminibacter mediatlanticus TB-2 OX=391592 GN=folE PE=3; SV = 1
MSIDLEKLETAAKMILEAIGENPNRDGLIKTPKRVAKSFEEIYSGYFKDPKEVLNDALFDSTNNEMVVVRDIEFYSMCEHHILPFFGRVHVAYIPDKKVVGLSKIPRMVEVFARRLQIQEQLTEQIADAIMEVVKPKGVGVVIHARHMCMEMRGVKTKHSYTSSSALRGIFLEEKTREEFFNIINAKIDNHF

SEQ ID NO: 6039 - protein, 188 aa, Caminicella sporogenes
  REGION 1..188: note = tr|A0A1M6P1J8|A0A1M6P1J8_9CLOT GTP cyclohydrolase 1; OS = Caminicella sporogenes DSM 14501 OX=1121266 GN=folE; PE = 3 SV=1
MDKERIERAVREILEAIGENPEREGLKDTPKRIARMYEEIFSGLNEDPGKHLEIYFQEEKHEELVLVKDIPFYSMCEHHLVPFFGKAHVGYLPKNGKLTGLSKLARVVETVARRPQLQERLTATIADILVDKLEPYGVIVVVEAEHMCMTMRGVKKPGSKTVTSAVRGLFNKDAKARAEAMALINFGR

SEQ ID NO: 6040 - protein, 190 aa, Campylobacter avium
  REGION 1..190: note = tr|A0A222MUI5|A0A222MUI5_9PROT GTP cyclohydrolase 1; OS = Campylobacter avium LMG 24591 OX=522484 GN=folE PE=3; SV = 1
MQEKFENHIKDILTLIGEDPQRDGLLKTPSRVFKSFEFLTSGYKQDPKEILSKALFDSTNNEMILVRDIEFYSLCEHHLLPFFGRAHIAYIPDKKVLGLSKFARLVELYARRLQIQEQLTEQIAEALISFVGAKGVGVVLEARHMCMEMRGVQKANATTLTSALRGSFLANEKTRKEFFSLINSSKQVKF

SEQ ID NO: 6041 - protein, 192 aa, unidentified
  source 1..192: note = Campylobacter blaseri
  REGION 1..192: note = tr|A0A2P8R0X3|A0A2P8R0X3_9PROT GTP cyclohydrolase 1; OS = Campylobacter blaseri OX=2042961 GN=folE PE=3 SV=1
MSNQENFENAVKTMLKIVGENIDRDGLKKTPTRVFKAFEFLTSGYKEDPKTVLNDALFDSTNNEMVLIKDIEFYSLCEHHLLPIIGRAHVAYIPNGKVVGLSKIPRMVNIFARRLQIQEQMTEQIAQAIQDVIKPQGVGVVLEARHMCMEMRGVEKINSKTTTSALRGGFISDHRTREEFFSLINSPKYSRF

SEQ ID NO: 6042 - protein, 190 aa, Campylobacter coli
  REGION 1..190: note = tr|W8L133|W8L133_CAMCO GTP cyclohydrolase 1; OS = Campylobacter coli RM4661 OX=1183379 GN=folE PE=3 SV=1
MQKKFEDCVKTILEIIGENPNREGLIKTPNRVFKAYEFLTSGYTQNVKEILNDALFESSNNEMVLVRDIEFYSLCEHHLLPFFGRAHVAYIPNKKVVGLSKIPRLVEVFARRLQIQEQLTEQIAQALMENVDAKGVGVVIEARHMCVEMRGVQKANSTTTTSALRGIFLKNEKTREEFFSLINSAKQVRF

SEQ ID NO: 6043 - protein, 200 aa, Campylobacter coli
  REGION 1..200: note = tr|A0A400M320|A0A400M320_CAMCO GTP cyclohydrolase 1; OS = Campylobacter coli OX=195 GN=folE PE=3 SV=1
MSQEKNTENNLQEKFKNCVKTMLEIMGENPTREGLVKTPNRVFKAYEFLTSGYKKNVKEILNNALFESSNNEMVLVRDIEFYSLCEHHLLPFFGRVHVAYIPDQKVVGLSKIPRLVEVYARRLQIQEQLTEQIAEALMENVGAKGVGVVIEARHMCVEMRGVQKANSTTTTSALRGLFLKNEKTREEFFSLINSPKQVRF

SEQ ID NO: 6044 - protein, 190 aa, Campylobacter concisus
  REGION 1..190: note = sp|A7ZB36|GCH1_CAMC1 GTP cyclohydrolase 1; OS = Campylobacter concisus (strain 13826) OX=360104 GN=folE; PE = 3 SV=1
MQESFENSVKNMLTIIGEDPNREGLIKTPERVYKAFKFLTSGYEQDPKEVLGDALFTSSNNEMVLMRNIEFYSLCEHHLLPIIGRVHVAYIPNGKVVGLSKIPRMVNIYARRLQIQEQMTEQIAKALEDVIAPKGVGVVVEARHMCVEMRGVEKINSTTTTSALRGCFIKNADTRREFFSLINSPRETHF

SEQ ID NO: 6045 - protein, 190 aa, Campylobacter concisus
  REGION 1..190: note = tr|A0A1L9R3I3|A0A1L9R3I3_9PROT GTP cyclohydrolase 1; OS = Campylobacter concisus OX=199 GN=folE PE=3 SV=1
MQESFENSVKNMLTIIGEDPNREGLIKTPERVYKAFKFLTSGYDQDPKEVLGDALFTSSNNEMVLMRNIEFYSLCEHHLLPIIGRVHVAYIPNGKVVGLSKIPRMVNIYARRLQIQEQMTEQIAKALEDVIAPKGVGVVVEARHMCVEMRGVEKINSTTTTSALRGCFIKNADTRREFFSLINSPRETHF

SEQ ID NO: 6046 - protein, 190 aa, Campylobacter cuniculorum
  REGION 1..190: note = tr|A0A1W6BUJ1|A0A1W6BUJ1_9PROT GTP cyclohydrolase 1; OS = Campylobacter cuniculorum DSM 23162 = LMG 24588; OX = 1121267 GN=folE PE=3 SV=1
MQKKFENCVKTILELIGENPQREGLLKTPTRIFKTYEFLTSGYKQDIDEILNGALFESSNNEMILVRDIEFYSLCEHHLLPFFGRVHVAYIPNSKVVGLSKIPRLVEVFARRLQIQEQLTEQIADALMQNVGAKGVGVVIEARHMCIEMRGIQKANSTTSTSALRGLFLKNEKTREEFFTLINSPKQVRF

SEQ ID NO: 6047 - protein, 190 aa, Campylobacter curvus
  REGION 1..190: note = sp|A7GW42|GCH1_CAMC5 GTP cyclohydrolase 1; OS = Campylobacter curvus (strain 525.92) OX=360105 GN=folE; PE = 3 SV=1
MQESFENSVKNILKIIGEDPNREGLLKTPSRVYKAFKFLTSGYEEDPKEVLNDALFTSSNNEMVLMRNIEFYSLCEHHLLPIIGRVHVAYIPNGKVVGLSKIPRMVNIYARRLQIQEQMTEQIAQALAEVIEPKGVGVVVEARHMCVEMRGVQKINSTTTTSALRGCFIKNADTRREFFSLINSPQETHF

SEQ ID NO: 6048 - protein, 195 aa, Campylobacter fetus
  REGION 1..195: note = tr|A0A0E1GNS1|A0A0E1GNS1_CAMFE GTP cyclohydrolase 1; OS = Campylobacter fetus subsp. fetus 04/554 OX=1240980; GN = folE PE=3 SV=1
MFDQNRKIEFEKCVKTMLEILGENPDREGLLNTPKRVAKAYEFITSGYWQDPKDVLNDAMFDSSNNEMVLLKDIEFYSICEHHLLPIIGRAHVAYIPDGKVVGLSKIPRMVNIYARRLQIQEQMTEQIAQALQDAISPKGVGVVVEARHMCIEMRGVEKINSTTTTSALRGIFIKNAETRKEFFDLINSPKSVKF

SEQ ID NO: 6049 - protein, 195 aa, Campylobacter fetus
  REGION 1..195: note = tr|A0A433YGE7|A0A433YGE7_CAMFE GTP cyclohydrolase 1; OS = Campylobacter fetus OX=196 GN=folE PE=3 SV=1
MFDQNRKIEFEKCVKTMLEILGENPDREGLLNTPKRVAKAYEFITSGYWQDPKDVLNDAMFDSSNNEMVLIKDIEFYSICEHHLLPIIGRAHVAYIPDGKVVGLSKIPRMVNIYARRLQIQEQMTEQIAQALQDAISPKGVGVVVEARHMCIEMRGVEKINSTTTTSALRGIFIKNAETRKEFFDLINSPKSVKF

SEQ ID NO: 6050 - protein, 195 aa, unidentified
  source 1..195: note = Campylobacter geochelonis
  REGION 1..195: note = tr|A0A128EAY3|A0A128EAY3_9PROT GTP cyclohydrolase 1; OS = Campylobacter geochelonis OX=1780362 GN=folE PE=3 SV=1
MDKDLKQENFEKSVKNMLELLGEDPNREGLLKTPNRVFKAYEFMTSGYSQDPKIVLNDALFESSNNEMVLIKDIEFYSLCEHHLLPIIGRAHVAYIPNGKVVGLSKIPRMVNIFARRLQIQEQMTEQIAQAIQEVIKPKGVGVVLQARHMCVEMRGVEKINSTTTTSALRGSFISDSRTRKEFFSLINSPRDSRF

SEQ ID NO: 6051 - protein, 194 aa, Campylobacter gracilis
  REGION 1..194: note = tr|C8PIC2|C8PIC2_9PROT GTP cyclohydrolase 1; OS = Campylobacter gracilis RM3268 OX=553220 GN=folE PE=3; SV = 1
MDEKSRAKFESCVSQMLEILGEDPKRDGLAKTPGRVAKAYEFLTSGYELDPKEILNDALFESSNNEMVLIKDIEFYSLCEHHLLPIIGRAHVAYIPNKKVVGLSKIPRMVNIFARRLQIQEQLTEQIASAIQEVIHPLGVGVVLQARHMCMEMRGVQKINSTTTTSALRGLFISRNDTRKEFFDLINSPKTFGF

SEQ ID NO: 6052 - protein, 190 aa, Campylobacter helveticus
  REGION 1..190: note = tr|A0A1V0REC1|A0A1V0REC1_9PROT GTP cyclohydrolase 1; OS = Campylobacter helveticus OX=28898 GN=folE PE=3 SV=1
MQEKFEKCVENMLEIIGENPKREGLLKTPTRVFKSYEFLTSGYKQDVKEILNDALFDSSNNEMVLVRDIEFYSLCEHHLLPFFGRAHIAYIPDKKVVGLSKIPRLVEVFARRLQIQEQLTEQIAEALMQNVGAKGVGVVLEARHLCVEMRGVQKANSTTSTSALRGLFLKNEKTREEFFSLINSPKQVRF

SEQ ID NO: 6053 - protein, 190 aa, unidentified
  source 1..190: note = Campylobacter hepaticus
  REGION 1..190: note = tr|A0A424Z0Y2|A0A424Z0Y2_9PROT GTP cyclohydrolase 1; OS = Campylobacter hepaticus OX=1813019 GN=folE PE=3 SV=1
MQEQFENCIKTMLEIIGENPTREGLIKTPNRVFKAYEFLTSGYKQNAKEILNDALFESSNKEMVLVRDIEFYSLCEHHLLPFFGHVHVAYIPDEKVVGLSKIPRIVEMYAKRLQLQEQLSEQIAQCLMENLNAKGVGVVIQARHMCVQMRGVQKINSTTFTSSLRGVFLEDEKIRKEFFELINLSKQVNL

SEQ ID NO: 6054 - protein, 194 aa, Campylobacter hominis
  REGION 1..194: note = tr|A7HZH2|A7HZH2_CAMHC GTP cyclohydrolase 1; OS = Campylobacter hominis (strain ATCC BAA-381 / LMG 19568 / NCTC 13146 / CH001A) OX=360107 GN=folE PE=3 SV=1
MDEQSKIEIEKHMQEILRLIGENPERDGLVKTPERVAKSLEFLTSGYRMEPKNVLNDALFSSTNNEMVLMKNIEFYSLCEHHLLPIIGRVHVAYIPNKKVVGLSKIPRMVNIFARRLQIQEQMTEQIANAIQEVVHPLGVGVVVEARHMCVEMRGVEKINSITTTSALRGSFITRADTRKEFFDLINSPKNFAF

SEQ ID NO: 6055 - protein, 195 aa, Campylobacter hyointestinalis
  REGION 1..195: note = tr|A0A172ST84|A0A172ST84_CAMHY GTP cyclohydrolase 1; OS = Campylobacter hyointestinalis subsp. hyointestinalis LMG 9260 OX=1031746 GN=folE PE=3 SV=1
MFDQNRRAEFEKCIRTMLEIMGENPDREGLLDTPKRVAKAYEFITSGYSLNPKDVLNDALFDSSNNEMVLIKDIEFYSLCEHHLLPIIGRAHVAYIPNGKVVGLSKIPRMVNIYARRLQIQEQMTEQIAVALQEAINPKGVGVVVEARHMCVEMRGVQKINSITTTSALRGIFIKSAETRKEFFDLINSPKSVKF

SEQ ID NO: 6056 - protein, 195 aa, Campylobacter hyointestinalis
  REGION 1..195: note = tr|A0A330FBF7|A0A330FBF7_CAMHY GTP cyclohydrolase 1; OS = Campylobacter hyointestinalis subsp. lawsonii OX=91353; GN = folE PE=3 SV=1
MFDQNRRAEFEKCIRTMLEIIGENPDREGLLDTPKRVAKAYEFITSGYSLNPKDVLNDALFDSSNNEMVLIKDIEFYSLCEHHLLPIIGRAHVAYIPNGKVVGLSKIPRMVNIYARRLQIQEQMTEQIAIALQEAINPKGVGVVVEARHMCVEMRGVQKINSITTTSALRGIFIKSAETRKEFFDLINSPKSVKF

SEQ ID NO: 6057 - protein, 195 aa, unidentified
  source 1..195: note = Campylobacter iguaniorum
  REGION 1..195: note = tr|A0A076FBU0|A0A076FBU0_9PROT GTP cyclohydrolase 1; OS = Campylobacter iguaniorum OX=1244531 GN=folE PE=3 SV=1
MFDESRRSEFENCVKTMLEIMGEDPKRGGLLDTPKRVAKAYEFITSGYSMDPKDVLNDALFQSSNNEMVLIKDIEFYSVCEHHLLPIIGRVHVAYIPDGQVVGLSKIPRMVNIYARRLQIQEQMTEQIAQAIAETIKPKGVGVVVEARHMCVEMRGVEKINSITTTSALRGSFIKSAETRKEFFDLINSPRSVKF

SEQ ID NO: 6058 - protein, 190 aa, Campylobacter insulaenigrae
  REGION 1..190: note = tr|A0A0A8H2L3|A0A0A8H2L3_9PROT GTP cyclohydrolase 1; OS = Campylobacter insulaenigrae NCTC 12927 OX=1031564; GN = folE PE=3 SV=1
MQEKFENSVKNILELIGENPSREGLLKTPTRVFKAFEFLTSGYKQDPKKILNDALFESSNNEMVLIRDIEFYSLCEHHLLPFFGRIHVAYIPDKKVVGLSKIPRLVEVFARRLQIQEQLTEQIAESLMKYVGAKGVGVVIEARHMCVEMRGIQKANSTTSTSALRGIFLKNEKTRKEFFTLINSAKQVRF

SEQ ID NO: 6059 - protein, 190 aa, Campylobacter jejuni
  REGION 1..190: note = sp|P51594|GCH1_CAMJE GTP cyclohydrolase 1; OS = Campylobacter jejuni subsp. jejuni serotype O:2 (strain ATCC 700819 / NCTC 11168) OX=192222 GN=folE PE=3 SV=2
MQKKFEDCVKTMLEIIGENPNREGLIKTPNRVFKAYEFLTSGYTQNVKEILNDALFESSNNEMVLVRDIEFYSLCEHHLLPFFGRAHVAYIPNKKVVGLSKIPRLVEVFARRLQIQEQLTEQIAQALMENVDAKGVGVVIEARHMCVEMRGVQKANSTTTTSALRGIFLKNEKTREEFFSLINSAKQVRF

SEQ ID NO: 6060 - protein, 190 aa, Campylobacter jejuni
  REGION 1..190: note = tr|A0A381D0F0|A0A381D0F0_CAMJU GTP cyclohydrolase 1; OS = Campylobacter jejuni subsp. doylei OX=32021 GN=folE; PE = 3 SV=1
MQKKFEDCVKTMLEIIGENPNREGLIKTPNRVFKAYEFLTSGYTQNVKEILNDALFESSNNEMVLVRDIEFYSLCEHHLLPFFGRAHVAYIPNKKVVGLSKIPRLVEVFARRLQIQEQLTEQIAQALMENADAKGVGVIIEARHMCVEMRGVQKANSTTTTSALRGIFLKNEKIREEFFSLINSAKQVRF

SEQ ID NO: 6061 - protein, 195 aa, Campylobacter lanienae
  REGION 1..195: note = tr|A0A381D7H5|A0A381D7H5_9PROT GTP cyclohydrolase 1; OS = Campylobacter lanienae OX=75658 GN=folE PE=3 SV=1
MFDKNRMTEFQDCVKKMLEIMGEDPNRDGLLNTPKRVAKAYEFITQGYSQSPLDILGDAMFESSNNEMVLIKDIEFYSICEHHLLPIIGRAHVAYIPDGKVVGLSKIPRMVNIYARRLQIQEQMTEQIAQALQEAINPKGVGVVLEARHMCMEMRGVEKINSVTTTSALRGSFIKNPETRKEFFDLINSPKSVKF

SEQ ID NO: 6062 - protein, 195 aa, Campylobacter lanienae
  REGION 1..195: note = tr|A0A562Y241|A0A562Y241_9PROT GTP cyclohydrolase 1; OS = Campylobacter lanienae OX=75658 GN=folE PE=3 SV=1
MFDKSKMAEFENCVKKMLEIIGENPNRDGLINTPKRVAKAYEFITQGYNQSPIEILGDAMFESSNNEMVLIKDIEFYSICEHHLLPIIGRAHVAYIPDGKVVGLSKIPRMVNIYARRLQIQEQMTEQIAQALQEAINPKGVGVVVEARHMCMEMRGVEKINSVTTTSALRGSFIKNPETRKEFFDLINSPKSVKF

SEQ ID NO: 6063 - protein, 190 aa, Campylobacter lari
  REGION 1..190: note = sp|B9KDZ8|GCH1_CAMLR GTP cyclohydrolase 1; OS = Campylobacter lari (strain RM2100 / D67 / ATCC BAA-1060) OX=306263 GN=folE PE=3 SV=1
MQEKFEQSVKNMLEIIGENPQREGLLKTPTRVFKAFEFLNSGYKQDPKQILNDALFESSNNEMVLVRDIEFYSLCEHHLLPFFGRVHVAYIPDKKVVGLSKIPRLVEVFARRLQIQEQLTEQIAEALMEHVGAKGVGVVIEARHMCVEMRGVQKANSTTSTSALRGSFLKSEKTRKEFFTLINSAKQVRF

SEQ ID NO: 6064 - protein, 190 aa, Campylobacter lari
  REGION 1..190: note = tr|A0A0A8HXH0|A0A0A8HXH0_CAMLA GTP cyclohydrolase 1; OS = Campylobacter lari NCTC 11845 OX=1388749 GN=folE PE=3; SV = 1
MQEKFEQSVKNMLEIIGENPQREGLLKTPTRVFKAFEFLSSGYKQDPKQILNDALFESSNNEMVLVRDIEFYSLCEHHLLPFFGRVHVAYIPDKKVVGLSKIPRLVEVFARRLQIQEQLTEQIAEALMEHVGAKGVGVVIEARHMCVEMRGVQKANSTTSTSALRGSFLKSEKTRKEFFTLINSAKQVRF

SEQ ID NO: 6065 - protein, 190 aa, unidentified
  source 1..190: note = Campylobacter ornithocola
  REGION 1..190: note = tr|A0A1C2FWS3|A0A1C2FWS3_9PROT GTP cyclohydrolase 1; OS = Campylobacter ornithocola OX=1848766 GN=folE PE=3 SV=1
MQKKFEQSIKNMLEIIGEDPQREGLLKTPARVFKAFEFLNSGYKQDPKQILNDALFESSNNEMVLVRDIEFYSLCEHHLLPFFGRVHVAYIPDKKVVGLSKIPRLVEVFARRLQIQEQLTEQIAEALMEYVGAKGVGVVIEARHMCVEMRGVQKANSTTSTSALRGSFLKSEKTRKEFFTLINSAKQVRF

SEQ ID NO: 6066 - protein, 190 aa, Campylobacter peloridis
  REGION 1..190: note = tr|A0A0A8GXL9|A0A0A8GXL9_9PROT GTP cyclohydrolase 1; OS = Campylobacter peloridis LMG 23910 OX=1388753 GN=folE; PE = 3 SV=1
MQKKFEQSVINILEIIGENPTRDGLIKTPARVFKAFEFLSSGYKQDPKKILNDALFDSSNNEMVLVRDIEFYSLCEHHLLPFFGRVHVAYIPDKKVVGLSKIPRLVEVFARRLQIQEQLTEQIAESLMEHVGAKGVGVVIEARHMCVEMRGVQKANSTTSTSALRGSFLKSEKTRKEFFSLINSSKQVRF

SEQ ID NO: 6067 - protein, 190 aa, Campylobacter peloridis
  REGION 1..190: note = tr|A0A5C7DMX7|A0A5C7DMX7_9PROT GTP cyclohydrolase 1; OS = Campylobacter peloridis OX=488546 GN=folE PE=3 SV=1
MQKKFEQSIINILEIIGENPNRDGLLKTPTRVFKAFEFLSNGYKQDPKKILNDALFDSSNNEMVLVRDIEFYSLCEHHLLPFFGRVHVAYIPDKKVVGLSKIPRLVEVFARRLQIQEQLTEQIAESLMEHVGAKGVGVVIEARHMCVEMRGVQKANSTTSTSALRGSFLKSEKTRKEFFSLINSSKQVRF

SEQ ID NO: 6068 - protein, 190 aa, unidentified
  source 1..190: note = Campylobacter pinnipediorum
  REGION 1..190: note = tr|A0A1S6TM09|A0A1S6TM09_9PROT GTP cyclohydrolase 1; OS = Campylobacter pinnipediorum subsp. pinnipediorum; OX = 1660067 GN=folE PE=3 SV=1
MQESFENSVRNMLTIIGEDINREGLIKTPERVFKSFKDLTSGYKEDPKEVLNNALFQSSNNEMVLIKDIEFYSLCEHHLLPIIGRVHVAYIPNGKVVGLSKIPRMVNIYAKRLQIQEQMTEQIAQAIADVIEPKGVGVVVQARHMCMEMRGVQKINSTTTTSALRGAFIKNAETRKEFFSLINSPKEFSF

SEQ ID NO: 6069 - protein, 190 aa, unidentified
  source 1..190: note = Campylobacter pinnipediorum
  REGION 1..190: note = tr|A0A1S6U5F2|A0A1S6U5F2_9PROT GTP cyclohydrolase 1; OS = Campylobacter pinnipediorum subsp. caledonicus; OX = 1874362 GN=folE PE=3 SV=1
MQESFENSVRNMLTIIGEDINREGLIKTPERVFKSFRDLTSGYKEDPKEVLNNALFQSSNNEMVLIKDIEFYSLCEHHLLPIIGRVHVAYIPNGKVVGLSKIPRMVNIYAKRLQIQEQMTEQIAQAIADVIEPKGVGVVVQARHMCMEMRGVQKINSTTTTSALRGAFIKNAETRKEFFSLINSPKEFSF

SEQ ID NO: 6070 - protein, 200 aa, Campylobacter rectus
  REGION 1..200: note = tr|B9D2K4|B9D2K4_CAMRE GTP cyclohydrolase 1; OS = Campylobacter rectus RM3267 OX=553218 GN=folE PE=3 SV=1
MQKNLKNEDLKKEKFESCVEQMLSLVGEDPRREGLAKTPERVFKAFEFLTSGYWQDPKVVLNDALFDSSNNEMVLVRDIEFYSLCEHHLLPFFGRVHVAYIPNHKVVGLSKIPRMVNIFARRLQIQEQLTEQIAEAVQDVIKPKGVGVVIEARHMCVEMRGVGKINSTTTTSALRGCFLKSSETRREFFSLINSHKELRF

SEQ ID NO: 6071 - protein, 200 aa, Campylobacter rectus; identical to SEQ ID NO: 6070
  REGION 1..200: note = tr|A0A3P1X7E5|A0A3P1X7E5_CAMRE GTP cyclohydrolase 1; OS = Campylobacter rectus OX=203 GN=folE PE=3 SV=1

SEQ ID NO: 6072 - protein, 200 aa, Campylobacter showae
  REGION 1..200: note = tr|M3JDZ0|M3JDZ0_9PROT GTP cyclohydrolase 1; OS = Campylobacter showae CC57C OX=1073353 GN=folE PE=3 SV=1
MQENLKNENLKKEKFESCVEQMLNLVGEDPNREGLIKTPERVFKAYEFLTSGYSQDPKVVLNDALFDSSNNEMVLVRDIEFYSLCEHHLLPFFGRVHVAYIPNHKVVGLSKIPRMVNIFARRLQIQEQLTEQIAEAVQDVIKPKGVGVVIEARHMCVEMRGVGKINSTTTTSALRGCFLKSSETRREFFSLINSHKEVRF

SEQ ID NO: 6073 - protein, 200 aa, Campylobacter showae
  REGION 1..200: note = tr|C6RHY8|C6RHY8_9PROT GTP cyclohydrolase 1; OS = Campylobacter showae RM3277 OX=553219 GN=folE PE=3 SV=1
MQENLKNEILKKEKFESCVEQMLNLVGEDPHREGLAKTPERVFKAYEFLTSGYWQDPKVVLNDALFDSSNNEMVLVRDIEFYSLCEHHLLPFFGRVHVAYIPNHKVVGLSKIPRMVNIFARRLQIQEQLTEQIAEAVQEVIKPKGVGVVIEARHMCVEMRGVGKINSTTTTSALRGCFLKSSETRREFFSLINSHKEVRF

SEQ ID NO: 6074 - protein, 195 aa, Campylobacter sp.
  REGION 1..195: note = tr|A0A1X9SV30|A0A1X9SV30_9PROT GTP cyclohydrolase 1; OS = Campylobacter sp. RM6137 OX=1660073 GN=folE PE=3 SV=1
MFDKSKMAEFEDCVKKMLQIIGEDPNRDGLINTPKRVAKAYEFITQGYNQSPLEILGDAMFESSNNEMVLIKDIEFYSICEHHLLPIIGRVHVAYIPNGKVVGLSKIPRMVNIYARRLQIQEQMTEQIAQALQEAINPKGVGVVVEARHMCMEMRGVEKINSVTTTSALRGSFIKNPETRKEFFDLINSPKSVKF

SEQ ID NO: 6075 - protein, 190 aa, Campylobacter sp.
  REGION 1..190: note = tr|A0A4U7BDK8|A0A4U7BDK8_9PROT GTP cyclohydrolase 1; OS = Campylobacter sp. MIT 12-5580 OX=2040651 GN=folE PE=3; SV = 1
MQEEFEKSVTNILNLIGENPQREGLLKTPARVAKSFEFLTQGYKQDPKQILNDALFASSNNEMVLVRDIEFYSLCEHHLLPFFGRVHVAYIPDKKVVGLSKIPRLVEVFARRLQIQEQLTEQIAEALMENVGAKGVGVVIEARHLCVEMRGVQKANSTTSTSALRGCFLKNDNTRREFFSLINSSKQVRF

SEQ ID NO: 6076 - protein, 194 aa, Campylobacter sputorum
  REGION 1..194: note = tr|A0A381DKH6|A0A381DKH6_9PROT GTP cyclohydrolase 1; OS = Campylobacter sputorum biovar sputorum OX=32024 GN=folE; PE = 3 SV=1
MDLSRKDEFMQAFRTMLEIMGEDVNREGLLKTPERVFKAYEFMTSGYDKDPAEVLNDALFNTSNSEMVLIRDIEFYSLCEHHILPIIGKAHVAYIPNKKVVGLSKIPRMVNIFARRLQIQEQMTEQIANAIQSVIKPFGVGVVLQARHMCIEMRGVEKINSTTTTSALRGSFITNPDTRKEFFSLINSPREPRF

SEQ ID NO: 6077 - protein, 190 aa, Campylobacter subantarcticus
  REGION 1..190: note = tr|A0A0A8HF38|A0A0A8HF38_9PROT GTP cyclohydrolase 1; OS = Campylobacter subantarcticus LMG 24374 OX=1388751; GN = folE PE=3 SV=1
MQEKFEQSVKNMLEIIGENPQREGLLKTPTRVFKAFEFFSSGYKQDPKQILNDALFESSNNEMVLVRDIEFYSLCEHHLLPFFGRVHVAYIPNKKVIGLSKIPRLVEVFARRLQIQEQLTEQIAEALMEHVGAKGVGVVIEARHMCVEMRGVQKANSTTSTSALRGSFLKSEKTRKEFFTLINSAKQVRF

SEQ ID NO: 6078 - protein, 190 aa, Campylobacter upsaliensis
  REGION 1..190: note = tr|A0A381EGE0|A0A381EGE0_CAMUP GTP cyclohydrolase 1; OS = Campylobacter upsaliensis OX=28080 GN=folE PE=3 SV=1
MQEKFENCVKNILELIGENPQREGLLKTPTRVFKSYEFLTNGYKKDVKEILNNALFDSSNNEMVLVRDIEFYSLCEHHLLPFFGRAHIAYIPDKKVVGLSKIPRLVEVFARRLQIQEQLTEQIAEALMQNVGAKGVGVVLEARHMCVEMRGVQKANSTTSTSALRGLFLKNEKTRREFFSLINSSKQVRF

SEQ ID NO: 6079 - protein, 190 aa, Campylobacter upsaliensis
  REGION 1..190: note = tr|A0A3X8R6M3|A0A3X8R6M3_CAMUP GTP cyclohydrolase 1; OS = Campylobacter upsaliensis OX=28080 GN=folE PE=3 SV=1
MQEKFENCVKNMLELIGENPQREGLLKTPTRVFKSYEFLTNGYKKDVKEILNDALFDSSNNEMVLVRDIEFYSLCEHHLLPFFGRAHIAYIPDKKVVGLSKIPRLVEIFARRLQIQEQLTEQIAEALMQNVGAKGVGVVLEARHMCVEMRGVQKANSTTSTSALRGLFLKNEKTRREFFSLINSSKQVRF

SEQ ID NO: 6080 - protein, 196 aa, Campylobacter ureolyticus
  REGION 1..196: note = tr|A0A0K1HHT4|A0A0K1HHT4_9PROT GTP cyclohydrolase 1; OS = Campylobacter ureolyticus RIGS 9880 OX=1032069 GN=folE; PE = 3 SV=1
MDNSKKKSIEFEKSVKNMLEILGEDPNREGLIKTPHRVFKAYEFMTSGYKQDPKVVLNDALFESSNNEMVLIKDIEFYSLCEHHLLPIIGRAHVAYIPNGKVVGLSKIPRMVNIFARRLQIQEQLTEQIAGALQEVINPRGVGVVLEARHMCIEMRGVEKINSTTTTSALRGSFISDPRTRKEFFSLINSSREARF

SEQ ID NO: 6081 - protein, 196 aa, Campylobacter ureolyticus
  REGION 1..196: note = tr|S3XW85|S3XW85_9PROT GTP cyclohydrolase 1; OS = Campylobacter ureolyticus ACS-301-V-Sch3b OX=883165; GN = folE PE=3 SV=1
MDNNKKNSIEFEKSVKNMLEILGEDPNREGLIKTPQRVFKAYEFMTSGYKEDPKVVLNDALFESSNNEMVLIKDIEFYSLCEHHLLPIIGRAHVAYIPNGKVVGLSKIPRMVNIFARRLQIQEQLTEQIAGALQEVINPRGVGVVLEARHMCIEMRGVEKINSTTTTSALRGSFISDPRTRKEFFSLINSSREARF

SEQ ID NO: 6082 - protein, 190 aa, Campylobacter volucris
  REGION 1..190: note = tr|A0A5C8KWQ1|A0A5C8KWQ1_9PROT GTP cyclohydrolase 1; OS = Campylobacter volucris OX=1031542 GN=folE PE=3 SV=1
MQEKFENSVKNMLEIIGENPQREGLLKTPTRVFKAFEFLTSGYKQDPKKILNDALFESSNNEMVLVRDIEFYSLCEHHLLPFFGRVHVAYIPDKKVVGLSKIPRLVEVFARRLQIQEQLTEQIAESLMEHVGAKGVGVVIEARHMCVEMRGVQKANSTTSTSALRGSFLKSEKTRREFFSLINSSKQVRF

SEQ ID NO: 6083 - protein, 190 aa, Campylobacter volucris
  REGION 1..190: note = tr|A0A5C7E3A1|A0A5C7E3A1_9PROT GTP cyclohydrolase 1; OS = Campylobacter volucris OX=1031542 GN=folE PE=3 SV=1
MQEKFENSVKNMLEIIGENPQREGLLKTPTRVFKAFDFLTSGYKQDPKKILNDALFESSNNEMVLVRDIEFYSLCEHHLLPFFGRVHVAYIPDKKVVGLSKIPRLVEVFARRLQIQEQLTEQIAESLMKHVGAKGVGVVIEARHMCVEMRGVQKANSTTSTSALRGSFLKSEKTRREFFSLINSSKQVRF

SEQ ID NO: 6084 - protein, 194 aa, unidentified
  source 1..194: note = Campylobacteraceae bacterium
  REGION 1..194: note = tr|A0A1Y1R8R5|A0A1Y1R8R5_9PROT GTP cyclohydrolase 1; OS = Campylobacteraceae bacterium 4484_4 OX=1970775 GN=folE; PE = 3 SV=1
MSSEKAKKFEEAVTTILELIGEDPKREGLVKTPHRVYKAFEHICEGYRMDPKKVLNDAMFESSNDEMVLVRDIEFYSMCEHHILPIIGRVHVAYIPNGKVVGLSKIPRMVNIFARRLQIQEQMTEQIADAILETVQPKGVAVVVEARHMCMEMRGVEKINSTTVSSALRGLFKTDAKTREEFMSMINAPLRPRY

SEQ ID NO: 6085 - protein, 191 aa, unidentified
  source 1..191: note = Campylobacteraceae bacterium
  REGION 1..191: note = tr|A0A1Y1RCM4|A0A1Y1RCM4_9PROT GTP cyclohydrolase 1; OS = Campylobacteraceae bacterium 4484_4 OX=1970775 GN=folE; PE = 3 SV=1
MQEKVKFEESVRNMLEIIGEDPNREGLLKTPERVYKAFQFMTKGYSQNPREVLNEALFTSSNDEMVLIRDIEFYSMCEHHLLPIIGRAHVAYIPDGKVVGLSKIPRMVEVFARRLQIQEQMTEQIADAIVDVIDPKGVGVVIQARHMCMEMRGVEKVNSITTTSALRGMFRETRTRAEFLDFVNTPPSIRY

SEQ ID NO: 6086 - protein, 194 aa, unidentified
  source 1..194: note = Campylobacterales bacterium
  REGION 1..194: note = tr|A0A258X3V5|A0A258X3V5_9PROT GTP cyclohydrolase 1; OS = Campylobacterales bacterium 16-40-21 OX=1970501 GN=folE; PE = 3 SV=1
MASRQQEDFEEAVRTMIGHVGEDVTREGLLKTPERVFKAYEFMFGGYQEDPQAILNSAMFATSNDEMVLIKDIEFYSTCEHHLLPIIGRAHIAYIPDGKVVGLSKIPRVVDVFARRMQIQEQLTEQIADALMRSINPKGVAVVIQARHMCMEMRGVEKISSTTTSSALRGLFKRDEKTRMEFFSLINSHSGNRY

SEQ ID NO: 6087 - protein, 186 aa, unidentified
  source 1..186: note = Scalindua sp.
  REGION 1..186: note = tr|A0A286TUP5|A0A286TUP5_9BACT GTP cyclohydrolase 1; OS = Candiadtus Scalindua japonica OX=1284222 GN=folE PE=3; SV = 1
MDKKKIIKATKLFLEGIGEDPERGGLKDTPKRVAEMCEEIFAGIGADSSKVIKVLKSEDHDEIVLMKDISFFSVCEHHLLPFIGKAHVAYIPNGPRVTGLSKLARVVEIESKQLQVQERLTTAIAESIMKALRPKGAMVVIEAEHLCMAMRGVKKAGSKAQTSVVRGIFRKNPATRAEAMALITGR

SEQ ID NO: 6088 - protein, 177 aa, unidentified
  source 1..177: note = Zixibacteria bacterium
  REGION 1..177: note = tr|A0A1F4YPG1|A0A1F4YPG1_9BACT GTP cyclohydrolase 1; OS = candidate division Zixibacteria bacterium RBG_16_53_22; OX = 1802787 GN=folE PE=3 SV=1
MPIRLLQFIGEDPGRGGLAETPGRFLRAWSDWTIGYGQDPKDVLKVFEDGAERCDQLVLVKDIPVYSHCEHHLAPFFGVAHVGYIPNGKIVGLSKISRLVDIFAKRLQVQERLTNQIADTLTEYLDPLGVGVVIECRHMCMESRGIQRQGSTTITSAMRGALLDEPSARAEFLAIMK

SEQ ID NO: 6089 - protein, 200 aa, unidentified
  source 1..200: note = Unknown
  REGION 1..200: note = tr|A0A0S8JC56|A0A0S8JC56_9BACT GTP cyclohydrolase 1; OS = candidate division BRC1 bacterium SM23_51 OX=1703761; GN = folE PE=3 SV=1
MRKKRTEDTENLGIETLVREILTRIGEDPARQGLAETPERISRALAFLTRGYRQRLEEVVKNAVFKQKCDEMVIVKDINFYSLCEHHLLPFFGHAHIAYLPDGRLIGLSKIPRIVDMFARRLQLQERMTVQIAESIQKILRPKGVGVVIEAEHMCITMRGVEKQHSRAVTSAMLGSFRDKTRTRAEFLALIGMSMGARPS

SEQ ID NO: 6090 - protein, 259 aa, unidentified
  source 1..259: note = Abyssubacteria bacterium
  REGION 1..259: note = tr|A0A3A4NZW5|A0A3A4NZW5_9BACT GTP cyclohydrolase FolE2 OS=Candidatus Abyssubacteria bacterium SURF_5; OX = 2093360 GN=folE2 PE=3 SV=1
MKDVQNEPANHHVEVDKVGVKNVKYPIVVRDKAKREQHTIADINMYVNLPHRFRGTHMSRFIEVLNKHRGRMSMQNMDDLLHEVEKALDADSAYLEMSFPYFVEKAAPISGARSLTEYQCKFIAFHKESLDFVLEVNVPVTNLCPCSKEISEHSAHNQRSLVTVQLKFKEFVWIEDVVALVEDSASCELYSLLKREDEKYVTEKAYSRPMFAEDVVREIAQKLDSDPNITWFTVASENYESIHNHNAYAFIEKKAPKLA

SEQ ID NO: 6091 - protein, 257 aa, unidentified
  source 1..257: note = Abyssubacteria bacterium
  REGION 1..257: note = tr|A0A419EQK0|A0A419EQK0_9BACT GTP cyclohydrolase FolE2 OS=Candidatus Abyssubacteria bacterium SURF_17; OX = 2093361 GN=folE2 PE=3 SV=1
MRDVQSEPANHEVEVDKVGVKDVKYPIVVRDKAKKEQHTIADINIYVNLPHQFRGTHMSRFIEVLNKHRGRMSVRTMEELLREVERALDAHSAHLEMSFPYFIEKAAPVSGAKSLMEYKCRFIVSHRDQLDFILEVNVPVTNLCPCSKEISEQSAHNQRSIVTVQLTFKEFVWIEDVIALVEQSASCELYSLLKREDEKYVTERAYSRAMFAEDVVREIAQKLESDANITWFTVASENFESIHNHNAYAFVEKKLRK

SEQ ID NO: 6092 - protein, 279 aa, unidentified
  source 1..279: note = Accumulibacter aalborgensis
  REGION 1..279: note = tr|A0A1A8XK06|A0A1A8XK06_9PROT GTP cyclohydrolase FolE2 OS=Candidatus Accumulibacter aalborgensis OX=1860102; GN = folE2 PE=3 SV=1
MNAPETPRSPAMMADVQGSADTRQLAINKVGIKAIRHPVKVLDKSGGVQHTIAMFNMYVSLPHNFKGTHMSRFVEILNSHEREISVENFPAMLREMVHRLEAETGHIEMSFPYFINKAAPVSGVQSLMDYDVTLIGEIAHGCMESTIKVAVPVTSLCPCSKEISERGAHNQRSQVTVTVSINEHLWIEELVQFVEDEASCELYGLLKRPDEKYVTERAYDNPKFVEDMVRDVAARLNGERRIDAYVVESENFESIHNHSAYALIENDKRLPLAPDCPTP

SEQ ID NO: 6093 - protein, 248 aa, unidentified
  source 1..248: note = Accumulibacter aalborgensis
  REGION 1..248: note = tr|A0A1A8XX99|A0A1A8XX99_9PROT Putative GTP cyclohydrolase 1 type 2 OS=Candidatus Accumulibacter aalborgensis OX=1860102 GN=ACCAA_720051 PE=4 SV=1
MKREELIGYLDNLLEAGRLRDYCPNGLQVEGRTDVQRLVAGVTACQALLDAAVERGADAILVHHGWFWRGEDGRVTGLRKARLQTLLKQDINLIAYHLPLDNHPEFGNNAQLAGKLGWLADGRFGEQDLGWLGRLESPTTLSDVAGKVAGELQRVPLTIGDRERVVSRVAWCSGAAQGLFEQAITLGVDLYLSGEISEQTVHLARESGVAYIAAGHHASERYGVQALAEHLALRFGIDCQFVDIDNPI

SEQ ID NO: 6094 - protein, 185 aa, unidentified
  source 1..185: note = Acetothermia bacterium
  REGION 1..185: note = tr|A0A3D3X1B3|A0A3D3X1B3_9BACT GTP cyclohydrolase 1; OS = Candidatus Acetothermia bacterium OX=2053493 GN=folE; PE = 3 SV=1
MDHKQVEEGMRQILQGIGPGYLSAEVIKNTPRRVAKMFAEFFSKIDRDPAEVLEVLFQEDYNEMVVVKDIPFFSICEHHFLPFIGEADIVYIPKGNRIVGVSKLARALDIAAARPQLQERLTSELADALMERLDPYGALVRLQATHLCMTLRGVKKPGVKMVTSAIRGIFRSNRASREEALSLIA

SEQ ID NO: 6095 - protein, 190 aa, unidentified
  source 1..190: note = Acetothermia bacterium
  REGION 1..190: note = tr|A0A3B9QPJ3|A0A3B9QPJ3_9BACT GTP cyclohydrolase 1; OS = Candidatus Acetothermia bacterium OX=2053493 GN=folE; PE = 3 SV=1
MDLGKIEAGVRLILEGLGQGKLSQEIWANTPRRVAEALAELCFGLEKNPEDELEVTFLEPYDEMVVLRDVPFHSLCEHHLLPFIGRASLVYLPKGGRVVGVSKLARVLEVAAARPQLQERLTSQVADALMEKLRPHGVLVQVQAEHLCMTIRGVKKPGSTLVTSAIRGLFRTDPAARAEALALISRPAAP

SEQ ID NO: 6096 - protein, 290 aa, unidentified
  source 1..290: note = Acididesulfobacter guangdongensis
  REGION 1..290: note = tr|A0A519BFE2|A0A519BFE2_9DELT GTP cyclohydrolase FolE2 OS=Candidatus Acididesulfobacter guangdongensis; OX = 2597225 GN=folE2 PE=3 SV=1
MLTDVQNSKDKRGIPIDKVGIKNLHYPISVLDKKKSFQHTVADINMYVDLPHYFKGTHMSRFLEVLNEYRGEISIVSFPDILRKIKKVLNAGSASVEIEFPYFIEKTAPVSGKKSLMEYICSYKGTIKNKKAECNNNNNNNSNNDNSNDNNTTNDNNNNEDESIIIIGIKVPINTLCPCSKEISKYGAHNQRGVVSVSLKFSKLIWFEDIINDVESCASAPIYSLLKRADERFLTEHAYENPMFVEDIVRCVADILKKNKNIEWFRVEAENFESIHNHNAYAMTESRYED

SEQ ID NO: 6097 - protein, 279 aa, unidentified
  source 1..279: note = Acidulodesulfobacterium ferriphilum
  REGION 1..279: note = tr|A0A519BA88|A0A519BA88_9DELT GTP cyclohydrolase FolE2 OS=Candidatus Acidulodesulfobacterium ferriphilum; OX = 2597223 GN=folE2 PE=3 SV=1
MIDVQNSKDKRGIAIDKVGIKNLSYPIAVLDKKKSLQHTIANINMYVDLPHYFKGTHMSRFLEVLNEHMGEISIVSFPDILRKIKKVLNAGSASVEMEFPYFIEKTAPVSRKKSLMEYVCYYNGTIKNKARNDKSEKVSDFKSDTFSAGIEENEESVIKIGVKVPINTLCPCSKEISKYGAHNQRGVVSVSVEFSKLIWFEDIIEDVESCASSPIYSLLKRSDERYLTEHAYENPRFVEDVVRCVAGILKENKDIKWYKVEAENFESIHNHNAYAMIEG

SEQ ID NO: 6098 - protein, 186 aa, unidentified
  source 1..186: note = Actinomarina minuta
  REGION 1..186: note = tr|S5DJ83|S5DJ83_9ACTN GTP cyclohydrolase 1; OS = Candidatus Actinomarina minuta OX=1389454 PE=3 SV=1
MGKLQTNLSNAEEALFTLLKDITDKSDDEISKLTFKFLDQIQKKLSKKNDIELNFEILDKTIYSQPIYINGISYISLCEHHMLPFHGSVNIAVFPKKNILGISKFSDIVSHLSNDLTLQEKLTEKIASFIHETLNAEGVFVKISGKHLCSDLLNSKNSSEEVITTFSTGVYELDFSLRNEAILNFS

SEQ ID NO: 6099 - protein, 189 aa, unidentified
  source 1..189: note = Actinomarinales bacterium
  REGION 1..189: note = tr|A0A520W3B8|A0A520W3B8_9ACTN GTP cyclohydrolase 1; OS = Candidatus Actinomarinales bacterium OX=2510331; GN = EVA28_00440 PE=3 SV=1
MTKREKNIIDTEEFKDQINNLIEKIDDKGITNLDQTVNRFVDFLYKKTTNEKSIDEIFTVLDLEEHSEPLFINKINFLSICEHHLVPFFGTVDIAVIPNKQIAGLSKYGNLVEYFSNAFQIQERFTKEIGEKIHEVLSPKGVFIRVEAQHICSQVDSGMNNVSKFITTHSTGIYSMDGSLRDEAIKQFG

SEQ ID NO: 6100 - protein, 186 aa, unidentified
  source 1..186: note = Actinomarinales bacterium
  REGION 1..186: note = tr|A0A520W211|A0A520W211_9ACTN GTP cyclohydrolase 1; OS = Candidatus Actinomarinales bacterium OX=2510331; GN = EVA27_00255 PE=3 SV=1
MSKVQTNLIQAQESLFFLLKEITDKSDEEIKNLSIKFLDQVQKKLSNKSDETLIFESLKEVRHSQPIYINGISYISLCEHHMMPFHGLASIAVFPKKKILGISKFSDLVGHFSNDLTLQEKLTEKIASFIHNTLDADGVFVKISAKHLCSDLLNSQNSSEEVITTYSTGVYELDFSLRNEALLNFS

SEQ ID NO: 6101 - protein, 266 aa, unidentified
  source 1..266: note = Aegiribacteria bacterium
  REGION 1..266: note = tr|A0A1V4MYW2|A0A1V4MYW2_9BACT GTP cyclohydrolase FolE2 OS=Candidatus Aegiribacteria bacterium MLS_C; OX = 1775674 GN=folE2 PE=3 SV=1
MVDVQNRRDGRMITLDEAGIRDLLYPVTILDRERDRQRTVARISMSVELPHHFKGTHMSRFMEVLGRHDRDFDGRTIPAILEELKRVLDARSARMTMEFPYFMEKRAPVTGAAARMDYRCRFQGASGPGGEDFVLTVSVPVSSLCPCSREISSYGAHNQRGSITMEVRSIAGGDGLPSMVWIEELVSVAESSASSPVYGLLKRPDEKFVTESSYDNPVFVEDMARNASVQLMSDPRIIWFRVTAESLESIHNHTAYAVYEWSRKDG

SEQ ID NO: 6102 - protein, 189 aa, unidentified
  source 1..189: note = Aegiribacteria bacterium
  REGION 1..189: note = tr|A0A1V4MSX0|A0A1V4MSX0_9BACT GTP cyclohydrolase 1; OS = Candidatus Aegiribacteria bacterium MLS_C OX=1775674; GN = folE PE=3 SV=1
MDLKKIEMGVRLILEGVGEDPEREGLRDTPVRVAGSMAELCRGLDSGAMKTLTTMSCKGQNEMIIVKDISFSSLCEHHLLPYIGRCDVVYLPANDRIAGLSSIVETVETMAARPTIQERLTTEIAERLMGELSAKGVMVVMEAEHMCLAMRGVKKRDSRIVTSAMRGYLKRLETRTEALSLIGRAIRVT

SEQ ID NO: 6103 - protein, 188 aa, unidentified
  source 1..188: note = Aerophobetes bacterium
  REGION 1..188: note = tr|A0A497E5F8|A0A497E5F8_9BACT GTP cyclohydrolase 1; OS = Candidatus Aerophobetes bacterium OX=2030807 GN=folE; PE = 3 SV=1
MDKDKIKMAVRLFLEGIGENPNRPGIKETPDRVARMCEDIFGGIEKDPREELTILRGEKHDEIILLRDIPLYSVCEHHLLPFLGKAHIAYIPRGGRVTGLSKLARVVDILSRRLQVQERLTTQIADVINEALQPRGVMVMIEAEHLCMSIRGIKKPGVRTVTSVVRGIFRENSATRAEAISFIKKKEP

SEQ ID NO: 6104 - protein, 199 aa, unidentified
  source 1..199: note = Aerophobetes bacterium
  REGION 1..199: note = tr|A0A523UTT1|A0A523UTT1_9BACT GTP cyclohydrolase 1; OS = Candidatus Aerophobetes bacterium OX=2030807 GN=folE; PE = 3 SV=1
MLRKNSQTQGNMDKEKIKKAVRLFLEGIGENPDREAIKETPGRVAKMCEDVLGGIGKDPREILSILKAEKHDEIILLRDIPLYSFCEHHLLPFLGKAHIAYIPKDGRVTGLSKLARVISILSQRLQVQERLTTQIADVVNDALRPRGVMVIIEAEHLCMSIRGVKKPGTTTITSVVRGIFRENAATRAEAMSLIGGLKK

SEQ ID NO: 6105 - protein, 177 aa, unidentified
  source 1..177: note = Amesbacteria bacterium
  REGION 1..177: note = tr|A0A0G1WWJ6|A0A0G1WWJ6_9BACT GTP cyclohydrolase 1; OS = Candidatus Amesbacteria bacterium GW2011_GWC1_48_10; OX = 1618365 GN=folE PE=3 SV=1
MGEDTQREGLRETPDRVLKMYHELLGGYTQEEKKLYKTFASNGYNEIITVANIDFYSLCEHHLIPFFGKVHIGYVPNGKILGLSKFARVVEMYAHRLQTQENLTKQIADSLEKYLCPRGVIVCIEAEHLCVSMRGIKKKGVMTKTATRRGLMKDNPSALDQFYRDINALNIDSIKTI

SEQ ID NO: 6106 - protein, 199 aa, unidentified
  source 1..199: note = Amesbacteria bacterium
  REGION 1..199: note = tr|A0A1F5A1Q6|A0A1F5A1Q6_9BACT GTP cyclohydrolase 1; OS = Candidatus Amesbacteria bacterium RIFOXYD1_FULL_47_9; OX = 1797267 GN=folE PE=3 SV=1
MKRSHTGLNDNPQSLIQKLLLHLGEDTQREGLRETPDRVLKMYHELLGGYTQEEKKLYKTFASNGYNEIITVANIDFYSLCEHHLIPFFGKVHIGYVPNGKILGLSKFARVVEMYAHRLQTQENLTKQIADSLEKYLCPRGVIVCIEAEHLCVSMRGIKKKGVMTKTATRRGLMKDNPSALDQFYRDINALNIDSIKTI

SEQ ID NO: 6107 - protein, 193 aa, unidentified
  source 1..193: note = Aminicenantes bacterium
  REGION 1..193: note = tr|A0A1F5B7D0|A0A1F5B7D0_9BACT GTP cyclohydrolase 1; OS = Candidatus Aminicenantes bacterium RBG_19FT_COMBO_59_29; OX = 1797276 GN=folE PE=3 SV=1
MDAKKIEKSIRLLLEGVDEDPDRAGLKATPRRVASMFLEILGGTSEDPVKHLRTIHEEKHDEMVIIKNIPLYSMCEHHLLPFAGVAHVAYIPKAGRIVGLSKIARVVDIFSRRLQVQERLTKQVADILDEHLKPLGVMVVIEAEHMCMSMRGAKKPKCVTVTSAVRGSFRTNSATRAEAMMLIRGGATSVKDV

SEQ ID NO: 6108 - protein, 188 aa, unidentified
  source 1..188: note = Aminicenantes bacterium
  REGION 1..188: note = tr|A0A1F5BC46|A0A1F5BC46_9BACT GTP cyclohydrolase 1; OS = Candidatus Aminicenantes bacterium RBG_13_63_10; OX = 1797270 GN=folE PE=3 SV=1
MAKGVALILEGMGEDINRPGIKATPQRVARMFAEILGGAHEDPSAHLRVLQHEKHDEMVLIKSIPLYSMCEHHLLPFAGVAHVAYIPKGGRIVGLSKIARVVDILARRLQVQERLTKQVADLIMDRLKPLGVMVVIEAEHLCMSMRGAKKPKSVTVTSAVRGVFRTNSITRAEAINLIRGGPGSVRDF

SEQ ID NO: 6109 - protein, 199 aa, unidentified
  source 1..199: note = Aquarickettsia rohweri
  REGION 1..199: note = tr|A0A3R9Y8R8|A0A3R9Y8R8_9RICK GTP cyclohydrolase 1; OS = Candidatus Aquarickettsia rohweri OX=2602574 GN=folE; PE = 3 SV=1
MQSKLLNNNNIRVKVSDDEAKKAVKTLLEWIGENPDREGLSDTPQRVIDSYKEYFSGYLEDPANILKKTFTETSGYQYMVLLKDINFYSHCEHHIAPIKGVAHIAYYPNTKVVGISKLARIVEIYSKRLQIQERLTSEIANTINYTLKPKGVAVIIEASHSCINNRGINQKLAKMKTHALIGCFRNDPEISRRFFQLIS

SEQ ID NO: 6110 - protein, 183 aa, unidentified
  source 1..183: note = Aquiluna sp.
  REGION 1..183: note = tr|A0A1G4V8B3|A0A1G4V8B3_9MICO GTP cyclohydrolase 1; OS = Candidatus Aquiluna sp. UB-MaderosW2red OX=1855377; GN = folE PE=3 SV=1
MQSDRIRAAVRELLIAIGEDPDREALRSTPEKVAQSYEAFFKGIGKDPLSAFGELFETEKNETVILKDIELVSICEHHLLPFTGVAHVAYLPNGKLAGLGRLANVVEILAARPQLQEHLTNQITQAISDGLNAQGVIVVVEARHQCVASRGARQPAVNTITMSSLGVFADPVYRAEVMGLINK

SEQ ID NO: 6111 - protein, 185 aa, unidentified
  source 1..185: note = Aquiluna sp.
  REGION 1..185: note = tr|I0QZU4|I0QZU4_9MICO GTP cyclohydrolase 1; OS = Candidatus Aquiluna sp. IMCC13023 OX=1081644 GN=folE; PE = 3 SV=1
MQTDRIKAAVVELLEAIGEDPNRPALKNTPTKVAEAYTSFFRGIGVNPQSVIGDMFEAVNAEAVILKDIELVSICEHHLLPFTGVAHIAYLPNKKLAGLGRLASVIEVLAARPQLQENLTAEVADALEEALDAKGVLVVIEARHQCVASRGARQPDVNTVTLASRGLYTEPSYRAEVLGLINKKS

SEQ ID NO: 6112 - protein, 247 aa, unidentified
  source 1..247: note = Arsenophonus lipoptenae
  REGION 1..247: note = tr|A0A0X9VMF5|A0A0X9VMF5_9GAMM Putative GTP cyclohydrolase 1 type 2 OS=Candidatus Arsenophonus lipoptenae OX=634113 GN=ybgI PE=4 SV=1
MNNIKLEKIINQYLKIDNYQDYSPNGLQVEGRSEICKIVTGVTASQALLNEGIKLSADAIIVHHGYFWKNEPQVILNMKRNRLKTLLCNNMNLYSYHLPLDCHPIIGNNIQLGNLMEVEIESYITPFLPIGKFTKSITADNLISRLSNRLNRQPLYCGDNGPIKIHKIAWSTGSSQDLIQKAAEAGADAFVTGEVSEQTIHIAREMKIHFYAAGHHATEKFGVKLLGEWLNKNYGFQVIFIDINNPV

SEQ ID NO: 6113 - protein, 222 aa, unidentified
  source 1..222: note = Arsenophonus lipoptenae
  REGION 1..222: note = tr|A0A109QE31|A0A109QE31_9GAMM GTP cyclohydrolase 1; OS = Candidatus Arsenophonus lipoptenae OX=634113 GN=folE; PE = 3 SV=1
MSSINQEVILVRKALEDHGLETPFLSKCINSNTCKQQIEEHIGAMMRLLNLDLSNDSLAKTPKRVAKMYVNEIFSGLDYNNFPKITLIKNNMAFDEMVTVRNITLTSVCEHHFVTIDGKATVSYIPKDKVIGLSKINRIVHFFSQRPQVQERLTQQILIALQTLLGAANVAVSIDAVHYCVKARGISDVNSSTMTTSLGGLFKSSKNTRQEFLRNISRLSNI

SEQ ID NO: 6114 - protein, 170 aa, unidentified
  source 1..170: note = Arthromitus sp.
  REGION 1..170: note = tr|A0A1B7LL87|A0A1B7LL87_9CLOT GTP cyclohydrolase 1; OS = Candidatus Arthromitus sp. SFB-turkey OX=1840217; GN = A6P36_01335 PE=3 SV=1
MDKNINLENAVKTILKEIGEDLNREGLIDTPKRVSKSLREILNGYNENIEEIMSKKFKLHNHSKDIVKINSIEFFSLCEHHLLPFFGHVNIEYIPKEEILGLSKFGRLVNAFSKRLQVQEKLTKQIGETIVKYLNCDYVKVHIKASHMCMTMRGISKTSSYTETEFVYKK

SEQ ID NO: 6115 - protein, 236 aa, unidentified
  source 1..236: note = Atelocyanobacterium thalassa
  REGION 1..236: note = tr|A0A086CGD9|A0A086CGD9_9CHRO GTP cyclohydrolase 1; OS = Candidatus Atelocyanobacterium thalassa isolate SIO64986 OX=1527444 GN=folE PE=3 SV=1
MTRDSSNRFNSSKSNSSNNLNSDLVDQINTQNNHNKQKSTDPNNLDVNIKKIEDAVYSILEALGEDPNREGLLKTPYRVATSMEFLTAGYNQSLAELVNGAIFDEGHNEMVLIRDINFFSLCEHHMLPFMGRAHVAYIPNNKVIGLSKLARIVEMYSRRLQVQERLTRQIADAIQEVLEPRGVAVVMEASHMCMVMRGVQKPGSWTVTSTMVGKFNEEQKTREEFLNLVRHQPKPF

SEQ ID NO: 6116 - protein, 188 aa, unidentified
  source 1..188: note = Atribacteria bacterium
  REGION 1..188: note = tr|A0A1F5BY97|A0A1F5BY97_9BACT GTP cyclohydrolase 1; OS = Candidatus Atribacteria bacterium RBG_16_35_8; OX = 1797290 GN=folE PE=3 SV=1
MDRKMIEEGVKLIIKGIGEDINREGLKGTPERVAEMYEEIFSGIGKDPSEELGPVFDENHDEIILVKDIPFYSVCEHHMVPFTGKAHIAYVPNKAGRIIGLSKLVRVLDITAKRLQVQERLTSIVADTIMKKIKPRGVLVIVEAEHLCMSMRGVRKPGTLTVTSAVRGLFRENPASRAEVMALIKQNK

SEQ ID NO: 6117 - protein, 185 aa, unidentified
  source 1..185: note = Atribacteria bacterium
  REGION 1..185: note = tr|A0A524MJG7|A0A524MJG7_9BACT GTP cyclohydrolase 1; OS = Candidatus Atribacteria bacterium OX=2053509 GN=folE; PE = 3 SV=1
MDQARIEAAITELLAGIGTKHLNEEVLANTPRRIAAMYAEFFADIDKDPSEVLEVVYQEKYEEMIVMRDITFFSICEHHFLPFVGTADIVYIPKAGRIVGASKLARVVDIAAGRPQLQERLTQQVADALVGKLDPTGVLVRIQATHLCMTLRGVKKSGSRMVTSAIRGSFYRDQASRSEALSLIT

SEQ ID NO: 6118 - protein, 185 aa, unidentified
  source 1..185: note = Aureabacteria bacterium
  REGION 1..185: note = tr|A0A3A4R954|A0A3A4R954_9BACT GTP cyclohydrolase 1; OS = Candidatus Aureabacteria bacterium SURF_26 OX=2093366; GN = folE PE=3 SV=1
MESAIRKIIEHIGEDPNREGLVRTPHRVAEAYKYLTKGYSVDIDSLINGAVFSEKYDEMVIVRDIDFYSLCEHHMLPFYGKCHIAYLPNGKVMGLSKLPRIVETFSRRLQIQERLTNEIAECLMKHLNPLGVAVVMEATHLCMVIRGVEKQNAFATTSSMLGAFRSDRSTRMEFLNLIQLPRLNR

SEQ ID NO: 6119 - protein, 214 aa, unidentified
  source 1..214: note = Azambacteria bacterium
  REGION 1..214: note = tr|A0A350QJZ0|A0A350QJZ0_9BACT GTP cyclohydrolase 1; OS = Candidatus Azambacteria bacterium OX=2053511 GN=folE; PE = 3 SV=1
MLSEEAVLVRSALEAHGLETPMLDNGLSRDEKYRKISQLMTEVVSTLGLDLTDDSLSETPHRIAKMYVDEVFGGLNYKNFPKIALIENKMQVREMVKVKDISFTSTCEHHFVTIDGSATVAYIPQGRIIGLSKINRIVRFFAQRPQVQERLTQQILLALQTLLQTKDVAVTMDAVHYCVKSRGVMDMNSKTQTTALGGIFKDDGRTRAEFLARY

SEQ ID NO: 6120 - protein, 214 aa, unidentified
  source 1..214: note = [Bacteroides] periocalifornicus
  REGION 1..214: note = tr|A0A0Q4B5G3|A0A0Q4B5G3_9BACT GTP cyclohydrolase 1; OS = Candidatus [Bacteroides] periocalifornicus OX=1702214; GN = folE PE=3 SV=1
MDIERLNDGGSSAPGPGYNKLEQWDAQRTQQLMQHYEAILGLLGEDPSRSGLLKTPERVAKSIQFLTHGYKLDPTSILMGARFAEDYSQMVIVKDIELYSLCEHHMLPFYGKAHVAYIPNGYITGLSKIARVVDAYARRLQVQERLTDQILECIQNALNPKGVAVVIEAAHMCMQMRGVQKQNSVTTTSAFTGAFMTQSKTREEFIQLIKGHLV

SEQ ID NO: 6121 - protein, 221 aa, unidentified
  source 1..221: note = Baumannia cicadellinicola
  REGION 1..221: note = tr|A0A0K2BL66|A0A0K2BL66_9GAMM GTP cyclohydrolase 1; OS = Candidatus Baumannia cicadellinicola OX=186490 GN=folE; PE = 3 SV=1
MVMLTKEASMVRKALQEHGLEPLLRGNNILDIEVRKRNIAEHFKKIMMLLNLDLMDDSLAKTPYRIANMYIHEIFSGLDYANFPKITVISNKMKADEMVTVREINLTSTCEHHFLIIDGKATVSYIPNNFVIGLSKINRIVWFFAQRPQVQERLTQQILLALQTILGTNNVAVSIYAVHYCVKARGICDTTSIATTTSLGGLFKSSNNTRNEFFSIIKNNN

SEQ ID NO: 6122 - protein, 220 aa, unidentified
  source 1..220: note = Baumannia cicadellinicola
  REGION 1..220: note = tr|A0A2N4XX18|A0A2N4XX18_9GAMM GTP cyclohydrolase 1; OS = Candidatus Baumannia cicadellinicola OX=186490 GN=folE; PE = 3 SV=1
MVTLTKEASMVRQALLAHGLEPLLRGNMLDREIRKQRIAKYIKKIMTLLNLNIADDSLVKTPYRIANMYMEEIFSGLDYANFPKITVISNKMKVDEMVTVRDITLTSTCEHHFLMFDGKATVSYIPKRSVIGLSKINRIVRFFAQRPQVQERLTQQILLALQTILGTNHVAVSIYAVHYCVKARGIGDSTSATTTTSLGGLFKSSQNTRQEFLRTITHYR

SEQ ID NO: 6123 - protein, 190 aa, unidentified
  source 1..190: note = Beckwithbacteria bacterium
  REGION 1..190: note = tr|A0A1J5BAP8|A0A1J5BAP8_9BACT GTP cyclohydrolase 1; OS = Candidatus Beckwithbacteria bacterium CG2_30_44_31; OX = 1805035 GN=folE PE=3 SV=1
MKNNKLGASVKELVKKLIISVRENPKRDGLKQTPERVARAYKELLSGYSQNPENTLKLFNSNGFHELVTVGNIDFYSLCEHHMLPFFGKVHIGYVPNRKILGLSKFARIVEIYSRRLQNQENLTKQIFDFISEKLSPKGLIVLIEAKHLCVSMRGIKNNGFITKTVVKKGLLKTRQDLYKQFYQNIEIKS

SEQ ID NO: 6124 - protein, 184 aa, unidentified
  source 1..184: note = Berkelbacteria bacterium
  REGION 1..184: note = tr|A0A554JAR2|A0A554JAR2_9BACT GTP cyclohydrolase 1; OS = Candidatus Berkelbacteria bacterium Gr01-1014_85; OX = 2017150 GN=folE PE=3 SV=1
MNQFNEQKITEGIKLLIEGLGEDLTRPGLIDTPERVARAWKEWCRGYTPFNLPLTTFPSDYVGMIVRKDIPFQSFCEHHLAIYQGTIDLAYVPDGKVLGLSKIIRFCQHYSARLSIQEDLTDDILNRFNQAVQPKGVAIKMSACHSCEGSRGVKVPDVPTVTFATSGVFQERPELVGQFHSLIR

SEQ ID NO: 6125 - protein, 283 aa, unidentified
  source 1..283: note = Berkiella aquae
  REGION 1..283: note = tr|A0A0Q9YMP5|A0A0Q9YMP5_9COXI GTP cyclohydrolase FolE2 OS=Candidatus Berkiella aquae OX=295108 GN=folE2; PE = 3 SV=1
MQIHDLIADIQNSPDSRNLAVDRVGIRDLCHPIVFTDNHEGKTISQHSIAHFDMLVNLPKNVKGTHMSRFVEILNEKECLLSIANMPSQLTEMVTRLNADDGYLQVKFPYFVTKYAPISKAASLMNYNVSLQGILEKGKMDVFATVVVPVTSLCPCSKEISDYGAHNQRSHVTVTVRATPELSLREIIQLVESKASCELFGILKRADEKAVTERAYDNPRFVEDTVRDIAASLEKISTIKGYKISSENFESIHNHSAYAEIDRLNMTAPVSQESSEAILCCDA

SEQ ID NO: 6126 - protein, 278 aa, unidentified
  source 1..278: note = Berkiella cookevillensis
  REGION 1..278: note = tr|A0A0Q9YLG8|A0A0Q9YLG8_9COXI GTP cyclohydrolase FolE2 OS=Candidatus Berkiella cookevillensis OX=437022; GN = folE2 PE=3 SV=1
MLRFLKLNNTFEDIQNWPDNRNISVDRVGIRGIKHPVRFEDWVEQGNIASQHLTATIDMMVNLPKDVKGTHMSRFVEILNAQEVVLSIANMPYWLDAMATKLEAQHCFFKANFDYFLTKTAPISKVKSLMDYQVTLNGVLYEGVPQTIVTVVIPVTSLCPCSKKLSKYGAHNQRSHITLTLEARPNLSLQKIIQLVESNASCELYGIVKRNDEKYITEKAYENPKFVEDMVRDVAHALSKEDTLLGYKVASENFESIHNHSAYAEIDCLTLPAMIRAL

SEQ ID NO: 6127 - protein, 221 aa, unidentified
  source 1..221: note = Blochmannia chromaiodes
  REGION 1..221: note = tr|L0MX20|L0MX20_9ENTR GTP cyclohydrolase 1; OS = Candidatus Blochmannia chromaiodes str. 640 OX=1240471; GN = folE PE=3 SV=1
MSILTQEALLVRDALSVRGLENPLIELNINHKVRKRRIEDHMRAIVHLLSLDLEHDSLLNTPKRIAKMYIEEIFSGLDYSNFPKIAIIQNTMQINEMITVRGINITSTCEHHFIVFNGKVTISYIPEKNVIGLSKINRIVQFFSKRPQLQERLTKQIFLALQTLLNTDNVAIFIDAVHYCVKARGIHDVSSTTTTTALGGLFESNTNTREEFLHAIMYCNH

SEQ ID NO: 6128 - protein, 187 aa, unidentified
  source 1..187: note = Brocadia sinica
  REGION 1..187: note = tr|A0A136LV56|A0A136LV56_9BACT GTP cyclohydrolase 1; OS = Candidatus Brocadia sinica OX=795830 GN=folE PE=3 SV=1
MVDKKKIIESIRLFIEGIGDDPNREGLLETPERVADMCEEIFAGIGQDSHKEIKVLKSEKYDEIVLLKDIPFYSICEHHLLPFSGVAHVAYIPQGNRVTGISKLARVVEIEANRLQVQERLTTDIAESIMKALRPKGVLAIIEAEHLCMTMRGIKKPGARVKTSVVRGIFRDNPATRAEALALIKGH

SEQ ID NO: 6129 - protein, 200 aa, unidentified
  source 1..200: note = Brocadia sapporoensis
  REGION 1..200: note = tr|A0A1V6M3J8|A0A1V6M3J8_9BACT GTP cyclohydrolase 1; OS = Candidatus Brocadia sapporoensis OX=392547 GN=folE PE=3; SV = 1
MTSYAAQQHETSKQKAQRAIATAVRTILVNVGEDPTREGLRKTPERVARAYNELLGGYAVNPASLINGALFESAYDDMVVVKDIEFYSLCEHHMLPFFGKAHVAYIPDGKIIGLSKIPRIVEMYARRLQVQEKMTREIADFIQTLLSPRGVAVIVMGQHMCATMRGVNQTNSKMLTQAMYGAFQERIAHEQLNDRLQQAE

SEQ ID NO: 6130 - protein, 187 aa, unidentified
  source 1..187: note = Brocadiaceae bacterium
  REGION 1..187: note = tr|A0A5C6F1Y2|A0A5C6F1Y2_9BACT GTP cyclohydrolase 1; OS = Candidatus Brocadiaceae bacterium B188 OX=2528032; GN = folE_2 PE=3 SV=1
MVDKKKIAEAIRLFLEGIGDDPNREGLIETPERVADMCEEIFAGIGRDSHTEIKVLKSEKYDEIVLIKDIPFYSMCEHHLLPFSGVAHVAYIPQGNRVTGISKLARVVEIEAKRPQVQERLTTDIAESIMKALHPKGVLVVIEAEHLCMTMRGIKKPGARVKTSVVRGIFRENPATRAEALMLIKGH

SEQ ID NO: 6131 - protein, 405 aa, unidentified
  source 1..405: note = Brocadiaceae bacterium
  REGION 1..405: note = tr|A0A5C6EZA9|A0A5C6EZA9_9BACT GTP cyclohydrolase 1; OS = Candidatus Brocadiaceae bacterium B188 OX=2528032; GN = folE_1 PE=3 SV=1
MNDAYIFIGSNIERETNYPLAVERLCRLGTVLAVSPVYDTPALGNAPNTPRFFNGAARLLTELTPHALRNALRAIESELGRVRTADKNAPRTIDLDLVLYDQEIIGDNELKIPDLKIFECGFMARALADVNPDYIIPPDGPTLAELADRLCTSRDNMYTVPGISSQVRQFVQNALQTQATAPQLPACVTHAYDNDRSQTIIPDHTITNYAAQQHETSEQKSQRAIATAVRTILVNVGEDPTREGLRKTPERVARAYNELLGGYAVNPASLINGALFESAYDDMVVVKDIEFYSLCEHHMLPFFGKAHVAYIPDGKIIGLSKIPRIVEMYARRLQVQEKMTREIADFIQTLLSPRGVAVIVMGQHMCATMRGVNQTSSKMLTQAMYGAFQERIAHEQLNDRLQQAE

SEQ ID NO: 6132 - protein, 267 aa, unidentified
  source 1..267: note = Burkholderia pumila
  REGION 1..267: note = tr|A0A0J7JQK9|A0A0J7JQK9_9BURK GTP cyclohydrolase FolE2 OS=Candidatus Burkholderia pumila OX=1090375; GN = folE2 PE=3 SV=1
MNQMNPAFLMLDVQNTPDTRQIAIQRVGVKGVRHPLTVNTASGVQPSVGVWNLDVHLPAEQKGTHMSRFIALLEENREALDQAALRALLASMLTKLEAHSGRIEVTLPYFVMKTAPVSGVQSLLDYEVTFIVEKRDGDTRTSMKVLVPVTSLCPCSKKISQYGAHNQRSHVTIAAELAGEVAVEELVRIAEEDASCELWGLLKRPDEKFVTERAYENPKFVEDLVRDVATRLNADARIVAYVLEAENFESIHNHSAYAVIERDKRIA

SEQ ID NO: 6133 - protein, 215 aa, unidentified
  source 1..215: note = Burkholderia verschuerenii
  REGION 1..215: note = tr|A0A0L0MC66|A0A0L0MC66_9BURK GTP cyclohydrolase 1; OS = Candidatus Burkholderia verschuerenii OX=242163 GN=folE; PE = 3 SV=1
MSAPRKNTPSASDMPASADRPSREEAEAAVRVLLRWAGDDPRREGLIDTPARVVRSYEEFFQGYEQNPHEILSRTFSEVQGYDEMIVLKDIRFESYCEHHMVPIIGRAHVAYLPNKRVVGISKLARLVDAFAKRLQIQEKMTAQIADTLNEVLQPIGVGVILEAAHQCMSTRGVHKAGVSMVTSRMLGSFRDDPSTRREFLSIVGNSNAFSVSNT

SEQ ID NO: 6134 - protein, 190 aa, unidentified
  source 1..190: note = Carbobacillus altaicus
  REGION 1..190: note = tr|A0A2R6Y1R0|A0A2R6Y1R0_9BACL GTP cyclohydrolase 1; OS = Candidatus Carbobacillus altaicus OX=2163959 GN=folE; PE = 3 SV=1
MSVDHEKIEHAVRLILEAVGENPEREGLRETPARVARMYEEIFAGIGEDPAQHFSAIFSEDHEEIVIVKDIPFYSMCEHHLVPFFGKAHVGYIPRDGRVVGLSKLARAVETVAKRPQLQERMTAQIADAIMERLEAHGAIVVIEAEHLCMVMRGVKKPGSKTVTSAVRGFFVENAMARSEALSLIQGKLS

SEQ ID NO: 6135 - protein, 239 aa, unidentified
  source 1..239: note = Chloroploca asiatica
  REGION 1..239: note = tr|A0A2H3L8Z2|A0A2H3L8Z2_9CHLR GTP cyclohydrolase 1; OS = Candidatus Chloroploca asiatica OX=1506545 GN=folE PE=3; SV = 1
MGMHNGNGHNGNGHNGNGQHHQSVAELDGHDYDLLIVPGRGKLEGVTYTSDPQIEGAVREILDGIGEQPDREGLLKTPSRVAKMYAELTAGYHIDPAALINDAIFTVGYDEMVVVKNIDFYSLCEHHMLPFMGQVHVAYIPNGKVVGLSKIPRIVEMFARRLQVQERMTVQIADFINEHLEPQGVAVVAEGVHMCSVMRGVKKANASMVTSAMRGVFRDDSKTRGEFMAHVGRSRSFEA

SEQ ID NO: 6136 - protein, 221 aa, unidentified
  source 1..221: note = Chryseobacterium massiliae
  REGION 1..221: note = tr|A0A3D9BHZ2|A0A3D9BHZ2_9FLAO GTP cyclohydrolase 1; OS = Candidatus Chryseobacterium massiliae OX=204089 GN=folE; PE = 3 SV=1
MVDFTDNDDDIFTGKEHTPIREDAFDKSPEEKIEKITELFGEIMETLGLDMTDDSLKDSPKRVAKMYVNEIFGGLLPENKPGISTFSNKYKYRQMLVEKDITVYSFCEHHFLPIIGRAHVAYISNGEVIGLSKINRIVDYYAKRPQVQERLTMQIVNALKEALGTKDVACIIDAKHLCVNCRGIKDTASSTITAELSGIFRTNPITRQEFLHYVGSHAKLD

SEQ ID NO: 6137 - protein, 203 aa, unidentified
  source 1..203: note = Chrysopegis kryptomonas
  REGION 1..203: note = tr|A0A0P1MRV9|A0A0P1MRV9_9BACT GTP cyclohydrolase 1; OS = Candidatus Chrysopegis kryptomonas OX=1633643 GN=folE; PE = 3 SV=1
MAGENKNNEELVQVQPNLEKMANLIKELLIELGEDPEREGLKKTPMRVAKAYQYLTKGYREDIDKVLNGAVFNEKYNEMVVVKNIDFFSLCEHHLLPFYGKVHIAYIPNGKIVGLSKIPRIVEVFSRRLQVQERLTQQIADTLNEYLNPKGVAVVIEARHLCMIMRGVEKQNSVATTSAMHGIFVEDAKTRDEFMHLISEDLT

SEQ ID NO: 6138 - protein, 256 aa, unidentified
  source 1..256: note = Cloacimonas sp.
  REGION 1..256: note = tr|A0A1V4R727|A0A1V4R727_9BACT GTP cyclohydrolase FolE2 OS=Candidatus Cloacimonas sp. 4484_140 OX=1956163; GN = folE2 PE=3 SV=1
MKLNDIQNQKDTRKIPINKVGVKGLQYPIVLQDRTNGTQNSVADINMYVELPHDFRGTHMSRFVEILHHYHRDIIIDNLEELLAEMKKKLDADVAYLEMEFPYFIKKAAPVTKEESLSSYQCGFKTSLRDEFVLEMFAKVPVLSLCPCSKEISEFGAHNQRAYITVGIVYRDFVWLEELIEIIENAASSEVYSLLKRPDEKYVTEKSYDNPKFVEDIARDIAIVLKNDERIAKFSIEAESIESIHNHNAYAMIKSS

SEQ ID NO: 6139 - protein, 260 aa, unidentified
  source 1..260: note = Cloacimonas sp.
  REGION 1..260: note = tr|A0A3D5VBD4|A0A3D5VBD4_9BACT GTP cyclohydrolase FolE2 OS=Candidatus Cloacimonas sp. OX=2053534 GN=folE2; PE = 3 SV=1
MKGKKDIQSQNDNRNVNINKVGVKKVRYPIIVEDRENKQQNTVADLDIYVELSHLQRGTHMSRFLEVLNRFHKETIIGNLEDFMLEIKRELIADAAYARISFPYFINKQAPVSKISSYLGYDCFFEAYYKQDYDLKIGVQVPVTSLCPCSKEISDYGAHNQRSLVTLKVAYDGFVWLEELIEVVEGAASSQIYSLLKRVDEKYVTEQAYNNPRFVEDIVREITVKLKKDKRIKYFKVESENFESIHNHSAYACVEWSRDE

SEQ ID NO: 6140 - protein, 186 aa, unidentified
  source 1..186: note = Cloacimonetes bacterium
  REGION 1..186: note = tr|A0A2G6BMJ0|A0A2G6BMJ0_9BACT GTP cyclohydrolase 1; OS = Candidatus Cloacimonetes bacterium OX=2030808 GN=folE; PE = 3 SV=1
MDNLEKLTKNYEDLIVNIGEDKNREGLLKTPKRAAKAFQYITRGYNQDLDEVINGAIFSTTNDDMVVVKDIELYSLCEHHLLPFYGKCHVAYIPKGKVIGLSKVARVIDVFARRLQIQENLTREIAEAILKYTGAEGVAVVIEASHLCMMMRGVEKQNSHMKSSCMLGSFRNDTATRLEFLNLIKS

SEQ ID NO: 6141 - protein, 184 aa, unidentified
  source 1..184: note = Cloacimonetes bacterium
  REGION 1..184: note = tr|A0A523XG91|A0A523XG91_9BACT GTP cyclohydrolase 1; OS = Candidatus Cloacimonetes bacterium OX=2030808 GN=folE; PE = 3 SV=1
MNKKRIEELTREFLGEIGLDPKSEELKKTPERVASLFEEIFSGIKKEPKKGINVYKTDVKNEIVLLKNIPFFSFCEHHILPFFGKVHIAYIPKNGIITGFSSFVSIVKIISRRLQLQERLTDEIADTVADILKPEGVIVVIEARHLCIEMKGEKPSSTEVMTFSVRGTMEEPSLKERVISLIKA

SEQ ID NO: 6142 - protein, 265 aa, unidentified
  source 1..265: note = Coatesbacteria bacterium
  REGION 1..265: note = tr|A0A1F5FHX0|A0A1F5FHX0_9BACT GTP cyclohydrolase FolE2 OS=Candidatus Coatesbacteria bacterium RBG_13_66_14; OX = 1817816 GN=folE2 PE=3 SV=1
MHPHLPDVANDEPPFDIPLDKVGVKHILYPITVLDRHDRWQSTVARVNMYVDLPKNFRGTHMSRFIAILNRFRGRISFETIRQIVKATRAEFQALEAHLELRFPYFIEKRAPVSGEPSLMEYRAGFHAFARGDDFDIQLEVSVPVMSLCPCSKEISARGAHNQRSVVRMRIKTGNRLVWIEELVAIAEAAGSAPLYSLLKREDEKAVTEAAYDNPRFVEDIVRTVANALEADPRITGYRVECENFESIHNHSAYAAISKRLAEGL

SEQ ID NO: 6143 - protein, 285 aa, unidentified
  source 1..285: note = Competibacter denitrificans
  REGION 1..285: note = tr|W6MD02|W6MD02_9GAMM GTP cyclohydrolase FolE2; OS = Candidatus Competibacter denitrificans Run_A_D11; OX = 1400863 GN=folE PE=3 SV=1
MKPSTMNSAALCSVVHIPDVQNSADTRQLAINKVGIKEIRHPVKVRDRNGGEQHTIATFNMYVNLPHNFKGTHMSRFVEILNIPGREISVDSFQDMLSEMTGRLEAEAGHIEMTFTYFISKAAPVSGVESLMDYEVTFIGEIRDGKPAMNLKVVVPVTSLCPCSKKISKYGAHNQRSHVTLTVRTRGFIWIEDLIDLAENEASCQLYGLLKRPDEKYVTEHAYENPKFVEDMVRDVAAKLNEDERVAAYSVESENFESIHNHSAYALIEHDKEAQNPAATAPVRI

SEQ ID NO: 6144 - protein, 286 aa, unidentified
  source 1..286: note = Competibacteraceae bacterium
  REGION 1..286: note = tr|A0A433I9E7|A0A433I9E7_9GAMM GTP cyclohydrolase FolE2 OS=Candidatus Competibacteraceae bacterium; OX = 2053538 GN=folE2 PE=3 SV=1
MNSAAMPTVIHIPDVQNSADTRRLAINKVGIKDIRHPVKVRDRSGGEQHTIAMFNMYVNLPHNFKGTHMSRFVEILNVPGREISVSSFKDMLMEMTDRLEAEAGHIEMTFTYFVNKAAPVSGVESLMDYEVTFIGEIRAGRPTMNLKVVVPVTSLCPCSKKISRYGAHNQRSHVTVNVRTRGFIGIEDIIDLVEKEASCELYGLLKRPDEKYVTERAYENPKFVEDMVRDIAAKLNQDDRVAAYAVESENFESIHNHSAYAMIEHDKEAEEAGVDEAVVQVQDEDI

SEQ ID NO: 6145 - protein, 280 aa, unidentified
  source 1..280: note = Competibacteraceae bacterium
  REGION 1..280: note = tr|A0A3S0U2U3|A0A3S0U2U3_9GAMM GTP cyclohydrolase FolE2 OS=Candidatus Competibacteraceae bacterium; OX = 2053538 GN=folE2 PE=3 SV=1
MNAAVMPVLIPIPDVQNSADTRRLAINKVGIKDIRHPVKVRDRSGGEQHTIATFNMYVNLPHNFKGTHMSRFVEILNVPGREISVDSFQDMLLEMTDRLEAEAGHIEMTFAYFVNKAAPVSGVQSLMDYEVTFTGEIRAGQPTMILKVVVPVTSLCPCSKKISRYGAHNQRSHVTISVRNRGFIGIEDLIDLAEKEASCELYGLLKRPDEKYVTERAYENPKFVEDMVRDIAAQLNQDDRVAAYAVESENFESIHNHSAYAMIEYDKEAKEPAAVQPESV

SEQ ID NO: 6146 - protein, 185 aa, unidentified
  source 1..185: note = Coxiella mudrowiae
  REGION 1..185: note = tr|A0A0H4UXT7|A0A0H4UXT7_9COXI GTP cyclohydrolase 1; OS = Candidatus Coxiella mudrowiae OX=2054173 GN=folE PE=3; SV = 1
MTNTTTEKHVEAILTNLGEDIRREGLRETPHRFQKALESLTSGYQDKLHEIVNNAIFESDMDEIVIVKNIELYSLCEHHLLPFIGKCHVAYLPNGKIIGLSKIARIVDMYAKRLQVQENLTKQIAESIAKVTDAKGVGVIIEAKHLCMMMRGVEKQNSDMTTSMMLGTFRKDERTRAEFLSLIRN

SEQ ID NO: 6147 - protein, 189 aa, unidentified
  source 1..189: note = Cryosericum odellii
  REGION 1..189: note = tr|A0A398DKD1|A0A398DKD1_9BACT GTP cyclohydrolase 1; OS = Candidatus Cryosericum odellii OX=2290917 GN=folE PE=3; SV = 1
MDKERVQAAVRELLLAIGEDPDREGLLETPQRVANMYAEVFSGIEQDPKQFLKLFHEPQQHEELVIVRDIPLYSVCEHHLLPFIGKAHIAYIPKGSQIIGLSKFARIIDCFAKRPQVQERLTAQVADFLYENLRPYGVAVVIEAEHLCMTMRGARAAGAKTQTSALRGTMRTDAKSRAEVMMLLNGGMH

SEQ ID NO: 6148 - protein, 299 aa, unidentified
  source 1..299: note = Cyclonatronum proteinivorum
  REGION 1..299: note = tr|A0A345UM48|A0A345UM48_9BACT GTP cyclohydrolase I; OS = Candidatus Cyclonatronum proteinivorum OX=1457365; GN = CYPRO_2304 PE=4 SV=1
MITSNLKRIYDPTFVVTDEYKKTLPDLQNGPASLIEGANVPIQQVGISNFKLPLKFPTRDGDILTLEVSVDGYVGLDAGKKGINMSRIMRSFYKFKDEVFHPEVLEYVLQMYKKDLEARESFIKLSFNYPMLKDSLRSDLAGYQYYAVSLEASMDAKDNITHFMHLDFVYSSACPCSYELAEHARETREVASIPHSQRSEAYLTVQLRDAVSIEEMVELCRDALQTETQVMVKREDEQAFAELNGAYQKFVEDAARLMFDKLDPHPSISDFVVRCVHMESLHSHDAVSRICKGIPCGLR

SEQ ID NO: 6149 - protein, 267 aa, unidentified
  source 1..267: note = Dactylopiibacterium carminicum
  REGION 1..267: note = tr|A0A272EPK0|A0A272EPK0_9RHOO GTP cyclohydrolase FolE2 OS=Candidatus Dactylopiibacterium carminicum; OX = 857335 GN=folE2 PE=3 SV=1
MNSSVSIPDVQGFEDRRHLAINKVGIKSIRHPVKVLDRGEGGVQHTVATFDMYVGLPHHFKGTHMSRFVQILNTQEREISVESFEPMLREMVKRLEAETGYLEMRFPYFIKKKAPVSGVESLMDYDVTFIGEISAGGEYKLRTRVVVPVTSLCPCSKKISEYGAHNQRSHITITAETNASTWIEEIVEIAESQASCELWGLLKRPDEKYVTERAYDNPKFVEDLVRDVAGRLNEEARIVAYVVESENFESIHNHSAYALIERDKRLG

SEQ ID NO: 6150 - protein, 184 aa, unidentified
  source 1..184: note = Dadabacteria bacterium
  REGION 1..184: note = tr|A0A1F5IVK4|A0A1F5IVK4_9BACT GTP cyclohydrolase 1; OS = Candidatus Dadabacteria bacterium RIFCSPHIGHO2_12_FULL_53_21 OX=1797756 GN=folE PE=3 SV=1
MSVETAVREILVEIGEDPEREGLRDTPDRMADMFKELTAGYRASPYTIINEALFNIKYDEMVVVKDIEFYSLCEHHMLPFFGSCSVGYIPNGKIVGLSKIPRIVEVFSRRLQVQERMTAEIADFLMEVLNPLGVAVVAEARHLCMAMRGIMKADASMLTSSMRGAFKKDERTRSEFLSFIGKHA

SEQ ID NO: 6151 - protein, 185 aa, unidentified
  source 1..185: note = Dadabacteria bacterium
  REGION 1..185: note = tr|A0A523HZ39|A0A523HZ39_9BACT GTP cyclohydrolase 1; OS = Candidatus Dadabacteria bacterium OX=2080303 GN=folE; PE = 3 SV=1
MSVKKAIKEILLYIGEDPKREGLRDTPARMEKMFQEVTSGYQVDPKEVINGAIFHIKYDEMVVVKDIEFYSLCEHHMLPFFGKCNIAYIPNGKVLGLSKLPRIVEVFSRRLQIQERMTVQIADFLEKELDPQGVAVVVEAYHLCVAMRGVKKSEANMLTSSMRGAFKKDERTRGEFLSFISRNLK

SEQ ID NO: 6152 - protein, 267 aa, unidentified
  source 1..267: note = Daviesbacteria bacterium
  REGION 1..267: note = tr|A0A1F5MHP3|A0A1F5MHP3_9BACT GTP cyclohydrolase FolE2 OS=Candidatus Daviesbacteria bacterium RIFCSPLOWO2_02_FULL_36_7 OX=1797792 GN=folE2 PE=3 SV=1
MIDIQNQNDTRQIPLEMVGIKDIAFPLLMPTKSGKSQNVTGLVSFFTDLSRNSRGTHMSRFVEVLYRNRHNHLTFQQLKHIASEAKKELKTENAYLEVSFTYLIKKRSPVSKKYSFVDYQCSVISKVNSVDHEQRLRAKIPVLLLCPCSKAISKFNAHSQRATVTVDVDFIREFWVEDLIKLVEKEGSCEIYPLLKRTDEKFVTEKSYENPKFVEDIVRDVALRLKKIVGIKSFIVECESYESIHNHDAYAKFTSDSITKGAESVNS

SEQ ID NO: 6153 - protein, 196 aa, unidentified
  source 1..196: note = Daviesbacteria bacterium
  REGION 1..196: note = tr|A0A0G0YNL8|A0A0G0YNL8_9BACT GTP cyclohydrolase 1; OS = Candidatus Daviesbacteria bacterium GW2011_GWB1_41_5; OX = 1618429 GN=folE PE=3 SV=1
MKNNARNFVKRKNLFTKFIPRLVESFGEDPQREGLNETPGRVLRMYEELLSGYSKNPSSVFKTFKNDGYKDLVTVANINFYSLCEHHLIPFFGKVHIGYVPNGRILGFSKFARLVDVYARRLQTQENLTKQIFDSIQSNLHPKACIVRIEAEHLCVNMRGIKKKDFITKTTVSDNGMRKNGYLTNQFYKDIESNKI

SEQ ID NO: 6154 - protein, 190 aa, unidentified
  source 1..190: note = Deianiraea vastatrix
  REGION 1..190: note = tr|A0A5B8XBZ1|A0A5B8XBZ1_9RICK GTP cyclohydrolase 1; OS = Candidatus Deianiraea vastatrix OX=2163644 GN=folE PE=3; SV = 1
MSISRSDAEKAVLTLLEYISKGKANDEVMKNTPSRVIDSFEELFGGYDIDFDSEFGKNFDNSFNYNNFVMIDNINFSSTCEHHLLPIVGVAHIAYIPDKKVIGLSKICRIVEAVSRRLQLQERMMVEILDIMTKYIKPKGSAIFIRANHGCMSLRGVKKHNCNTTTMLFSGQFETDIAKKQEFLSAIPVK

SEQ ID NO: 6155 - protein, 186 aa, unidentified; identical to SEQ ID NO: 6140
  source 1..186: note = Delongbacteria bacterium
  REGION 1..186: note = tr|A0A2G6P3A2|A0A2G6P3A2_9BACT GTP cyclohydrolase 1; OS = Candidatus Delongbacteria bacterium OX=2044594 GN=folE; PE = 3 SV=1

SEQ ID NO: 6156 - protein, 188 aa, unidentified
  source 1..188: note = Delongbacteria bacterium
  REGION 1..188: note = tr|A0A348NV90|A0A348NV90_9BACT GTP cyclohydrolase 1; OS = Candidatus Delongbacteria bacterium OX=2044594 GN=folE; PE = 3 SV=1
MEESKIKELSGLFKKVITDLGENADREGLLRTPERAAKAYSFLTRGYEENIDQVINGAVFSTDNDDMVIVKNIELYSLCEHHLLPFFGKCHVAYIPAGKVLGLSKVARIVDVYSRRLQIQENLVRQIAETVMKYTSAEGVGVVIEAQHLCMMMRGVEKQNSVMTTSCMLGSFREDSATRSEFLSLIGK

SEQ ID NO: 6157 - protein, 244 aa, unidentified
  source 1..244: note = Dependentiae bacterium
  REGION 1..244: note = tr|A0A1V5U9R2|A0A1V5U9R2_9BACT GTP cyclohydrolase 1 type 2 OS=Candidatus Dependentiae bacterium ADurb.Bin246; OX = 1852839 GN=BWY33_00740 PE=4 SV=1
MKIKDIYEFLNSISPFELQEKWDNSGLLVGNMSDSFESLYLSMDLDLDLVKNLKPNSLVITHHPLIFSGLKRVNYDTYSTKILKELIKKDIALISMHTNIDKTHLNRFVVEKILNFKIENQNEFIANVKIDMSFTDLLKHLSKKLNLKNIKFVKTKDYIKTLAICTGSAMSLIDEVQADCFITGDIKYHDAMEAKARGLSLIDIRHYESENHFNILLEELLEEYLKKNKLKAIITASKNPFEFF

SEQ ID NO: 6158 - protein, 190 aa, unidentified
  source 1..190: note = Dependentiae bacterium
  REGION 1..190: note = tr|A0A1V5U626|A0A1V5U626_9BACT GTP cyclohydrolase 1; OS = Candidatus Dependentiae bacterium ADurb.Bin246; OX = 1852839 GN=folE PE=3 SV=1
MNKELEFENSIKNILNYIDEDVTREGLLDTPKRVRKAYEFMFSGYKLDPKEIIQKALFTSTNDEMVVVKDIEFYSFCEHHMLPIIGKAHVAYIPNGKVVGLSKIPRVVDVFARRLQIQEQLTEQICDALNEHLKPKGVAVIVDARHMCMEMRGVQKICSTTITSSLRGLFKSDKKTKDEFLSIVSASFQK

SEQ ID NO: 6159 - protein, 183 aa, unidentified
  source 1..183: note = Desantisbacteria bacterium
  REGION 1..183: note = tr|A0A2M7S920|A0A2M7S920_9BACT GTP cyclohydrolase 1; OS = Candidatus Desantisbacteria bacterium CG_4_10_14_0_8_um_filter_48_22 OX=1974543 GN=folE PE=3 SV=1
MDKKKIEKAVRMILESIGEDPERPGISKTPERFARMCEEIFAGMREKAADVLKTLPSEKYRDMVLVRDIPFYSVCEHHLVPFFGKVHIAYVPSGRMTGLSKFARLVEAFSKRLQVQERITRQIADAFQKKLKPEGVFVMIEAVHLCMVMRGIKKERSSVVTVAARGVFKKSEKQAEVLNLIKK

SEQ ID NO: 6160 - protein, 256 aa, unidentified
  source 1..256: note = Desulfofervidus auxilii
  REGION 1..256: note = tr|A0A127AT91|A0A127AT91_9DELT GTP cyclohydrolase FolE2 OS=Candidatus Desulfofervidus auxilii OX=1621989; GN = folE2 PE=3 SV=1
MIDVQSLPDYRQIEVDKVGIKDIRYPITVLDRENGTQKTVAYINMYVGLPHRFKGTHMSRFVEILNEYQGELISFKSMKEILHKMKERLNAVSAHLEIEFPYFMEKKAPVSKTKGLMEYLCTFIGNLRDKIELELKVRVPICTLCPCSKEISEFGAHNQRGIVNLRLRFRKFIWLEDIIKLVEQAGSSEVYSLLKRVDEKYVTEKAYQNPKFVEDVVREIAKKLLSDDNITWFAVEAENFESIHNHSAYAYIERKK

SEQ ID NO: 6161 - protein, 176 aa, unidentified
  source 1..176: note = Desulforudis sp.
  REGION 1..176: note = tr|A0A3A6N6F1|A0A3A6N6F1_9FIRM GTP cyclohydrolase 1; OS = Candidatus Desulforudis sp. OX=2093368 GN=folE PE=3 SV=1
MMILEAVGEDPQREGLRDTPARVARMYREVFAGLLVNPESELEVLFTENHEELVLVRDIPLYSMCEHHLLPVFGVAHVAYIPQGGVITGLSKLARVVEGFARRPQLQERLTGQVADAIMKKLEPHGVLVVIELEHMCMTMRGVNKPGSKTITSAVRGIFEKNAKTRMEAFSLIRKS

SEQ ID NO: 6162 - protein, 186 aa, unidentified
  source 1..186: note = Desulforudis audaxviator
  REGION 1..186: note = tr|A0A3S8S5E2|A0A3S8S5E2_9FIRM GTP cyclohydrolase 1; OS = Candidatus Desulforudis audaxviator OX=471827 GN=folE; PE = 3 SV=1
MDLEKIEQAVTMIIESIGEDPNREGLRDTPRRVARMYAEVFSGLETDPEEVLEQFFTENHEELILVKDIPLFSVCEHHLLPVVGKAHVAYIPRRGLITGLSKLARVVDGYARRPQLQERLTAQIADAIMKRLEPHGVLVMIEAEHMCMTMRGVNKPGAQTVTSAVRGIFERNAKTRTEALALIKGR

SEQ ID NO: 6163 - protein, 282 aa, unidentified
  source 1..282: note = Desulfosporosinus infrequens
  REGION 1..282: note = tr|A0A2U3KTU4|A0A2U3KTU4_9FIRM Putative GTP cyclohydrolase 1 type 2 OS=Candidatus Desulfosporosinus infrequens OX=2043169 GN=SBF1_2700009 PE=4 SV=1
MAVTVGLVAQIIERLAPKSWAEDWDNVGLLVGSGSAPVERILITLDGTLAVVEEAKAFGAQLIVAHHPIIFRPLKNLRSDNAAAQVPLQLLQNSIGYYAAHTNLDQSIVSSSRALGEVLGLQEMKIFEESEDDLVPIHKRSEARGYGVSGYLSHPEKLGVLWKNFLDSLGQSGVYAQPYKLSGVRLAGSVEKEMRKVAIVNGSGGRFVAKALFKGADLLITGDVDHHAVLDALEGGMAVGDLGHFLSEAPMLQAMYRYLSAEKALQGVEIRVSAINQSPWLL

SEQ ID NO: 6164 - protein, 191 aa, unidentified
  source 1..191: note = Desulfosporosinus infrequens
  REGION 1..191: note = tr|A0A2U3LU12|A0A2U3LU12_9FIRM GTP cyclohydrolase 1; OS = Candidatus Desulfosporosinus infrequens OX=2043169; GN = folE PE=3 SV=1
MGMDLEKIEKAVYMILEAIGEDPTREGLRDTPKRVARMYAEVFCGLNQDPSQHLNVQFTEEEHEEMVIVKDIPVYSMCEHHLVPFYGKAHVAYIPRKGKITGLSKFARVVEGFAHRPQLQERLTSQIANAIMGELDPLGVVVVIEAEHMCMTMRGVKKAGSQTLTSAVRGVFKTNDSTRSEAFSMIQGQKR

SEQ ID NO: 6165 - protein, 269 aa, unidentified
  source 1..269: note = Desulfovibrio trichonymphae
  REGION 1..269: note = tr|A0A1J1DT14|A0A1J1DT14_9DELT GTP cyclohydrolase FolE2 OS=Candidatus Desulfovibrio trichonymphae OX=1725232; GN = folE PE=3 SV=1
MEDVQNYSPAVPLNIDRAGIRELKLPLLVRDRSDGTQRTVALVDLGVDLPSAFKGAHMSRFVEALNAWDDEINYQSVRRLLENIKNRLGAQRAYARFCFPYFIRKTAPASCSKSSVPYECRLTGELDENGQSFLLEMDVPVMTVCPCSRAISRDSAHSQRAIVRMNVRMAGFSWLEEFIEMAEESGSSAVYTLLKREDEKFVTEHAFAHPAFVEDVVRNVAQRLFAHEHVEWFSVEVESMESIHSHNAFARIERSVNRAAAGQQHGESP

SEQ ID NO: 6166 - protein, 212 aa, unidentified
  source 1..212: note = Dojkabacteria bacterium
  REGION 1..212: note = tr|A0A3M0Z1K3|A0A3M0Z1K3_9BACT GTP cyclohydrolase 1; OS = Candidatus Dojkabacteria bacterium OX=2099670 GN=folE; PE = 3 SV=1
MGVLHNTKCRPCKIKTQYMINNKSIRKEIITNFVSQLLSIFNEDISRDDLKETPQRVFRMYKELLSGYFQNPKDVFKTFKSNGYKDLISITNIRFYSLCEHHMIPFFGSVHIGYVPNGRVLGLSKFVRLIEILSHRLQTQENLTNQIADILEENLKPRGLAVIVEAEHLCISMRGVRKVNCITKTTILKGLLKKNSKLTDQFYREINNQKDK

SEQ ID NO: 6167 - protein, 247 aa, unidentified
  source 1..247: note = Doolittlea endobia
  REGION 1..247: note = tr|A0A143WUQ1|A0A143WUQ1_9ENTR Putative GTP cyclohydrolase 1 type 2 OS=Candidatus Doolittlea endobia; OX = 1778262 GN=ybgI PE=4 SV=1
MHNTELEYIINQKLNSNEIEDYVPNGLQVEGCQEVQRIVTGVTACQALLESALAHEANAVIVHHGYFWKNEAPVIRGMKRQRLKTLLTNDINLYAWHLSLDAHPELGNNAQFAVALEIRVTGAITPLLLQGELKTPLSGDALRLRLEQTLRRSVLHCGDNGPAQILRLAWCTGNGQKFIELAAQAGVDAFITGEASEHTIHVAREQGLHFYAAGHHATERGGIYALGSWLTQEYNLDVTFIEIPNPA

SEQ ID NO: 6168 - protein, 203 aa, unidentified
  source 1..203: note = Dormibacter sp.
  REGION 1..203: note = tr|A0A2W5ZW58|A0A2W5ZW58_9BACT GTP cyclohydrolase 1; OS = Candidatus Dormibacter sp. RRmetagenome_bin12; OX = 2599630 GN=folE PE=3 SV=1
MSSGRLDASALSAPGTEAAHLVERLLRLLGEDPSREGLRGTSQRVVTSLASLTAGYDQTVADVVHGAVFAEAYSEMVVVRNLEVYSLCEHHLLPFVGHAHIAYVPDGRIIGLSKLPRIVDLFARRLQIQERLTIEIAAALDDVLSPLGVAVVIEAAHFCMLMRRTQKPATKTLTSSMRGVFRSDPSTRAEFMAVIHPGHRDRR

SEQ ID NO: 6169 - protein, 208 aa, unidentified
  source 1..208: note = Dormibacter sp.
  REGION 1..208: note = tr|A0A2W5ZBK1|A0A2W5ZBK1_9BACT GTP cyclohydrolase 1; OS = Candidatus Dormibacter sp. RRmetagenome_bin12; OX = 2599630 GN=folE PE=3 SV=1
MDEPTPLPIRPSRDQPVAAVASVGADPIIPLIECLIREVGEDTAREGLLHTPDRVARSLRFLLSGYDLEVADVINGAVFEESYEEMVLVRDIEVYSLCEHHLLPFFGKAHVAYLPRGRIVGLSKLPRIVEMFARRLQVQERLTTQIAAALNEALDPYGVAVVIEASHLCMMMRGVEKQNSRTVTSALTGGFQTDPKCRNEFLDLLGRT

SEQ ID NO: 6170 - protein, 206 aa, unidentified
  source 1..206: note = Dormibacteraeota bacterium
  REGION 1..206: note = tr|A0A2W5Y4F1|A0A2W5Y4F1_9BACT GTP cyclohydrolase 1; OS = Candidatus Dormibacteraeota bacterium OX=2052315; GN = folE PE=3 SV=1
MERGLTSWQNGAVSAHHSQPHSSAEALQQLVRALIEQLGEDVGREGLRGTPERAADSLTYLTGGYGADLEDLLGDALFEQQYDEMVLVKNVQFYSLCEHHLLPFFGAAHVAYLPRGKVLGLSKVPRVVDVFARRLQLQERMTREIAEALLQLTEAKGVGVVIEARHLCMEMRGVEKVGGQTVTSCMLGVFRSDARTRGEFLNLISR

SEQ ID NO: 6171 - protein, 202 aa, unidentified
  source 1..202: note = Dormibacteraeota bacterium
  REGION 1..202: note = tr|A0A2W6BI98|A0A2W6BI98_9BACT GTP cyclohydrolase 1; OS = Candidatus Dormibacteraeota bacterium OX=2052315; GN = folE PE=3 SV=1
MGEQFGRGDALNVAPQIHDRLTGLVRQVLAELGEDPAREGLVDTPERVARSLRYLTEGYGVDATDAIGDALFEQEYDEMVLVRDVQFYSLCEHHLLPFFGVAHVAYQPAGRVVGLSKIPRVIDVFAHRLQLQERMTRQIAEGLERVTRPHGVAVVVEARHLCMEMRGVEKVGGQTVTSCMLGCFREDARTRAEFLDLIHRHN

SEQ ID NO: 6172 - protein, 185 aa, unidentified
  source 1..185: note = Edwardsbacteria bacterium
  REGION 1..185: note = tr|A0A1F5R4Q3|A0A1F5R4Q3_9BACT GTP cyclohydrolase 1; OS = Candidatus Edwardsbacteria bacterium GWF2_54_11; OX = 1817851 GN=folE PE=3 SV=1
MDGPAIEQAVHQLLLAVGEDPQREGLKETPCRVARMYQEILSGMADDPIDQLKVYTAKNEDEMILVKDITFHSLCEHHLLPFFGKVHIAYIPRRNKITGFSSLVKVVEAMAKRLQLQERLAADIADLLMKKLKPLGVLVVVEAEHLCLTMRGVKKPGSSVVTSAIRGGMKRESTRLEALSLIKGR

SEQ ID NO: 6173 - protein, 203 aa, unidentified
  source 1..203: note = Edwardsbacteria bacterium
  REGION 1..203: note = tr|A0A3B9E6Z9|A0A3B9E6Z9_9BACT GTP cyclohydrolase 1; OS = Candidatus Edwardsbacteria bacterium OX=2053551 GN=folE; PE = 3 SV=1
MKRKTTTPPRSRPKKAGGIDGPAIEQAVHQLLLAVGEDPQREGLKETPCRVARMYQEILSGMADDPIDQLKVYTAKNEDEMILVKDITFHSLCEHHLLPFFGKVHIAYIPRRNKITGFSSLVKVVEAMAKRLQLQERLAADIADLLMKKLKPLGVLVVVEAEHLCLTMRGVKKPGSSVVTSAIRGGMKRESTRLEALSLIKGR

SEQ ID NO: 6174 - protein, 194 aa, unidentified
  source 1..194: note = Eisenbacteria bacterium
  REGION 1..194: note = tr|A0A1F5RR30|A0A1F5RR30_9BACT GTP cyclohydrolase 1; OS = Candidatus Eisenbacteria bacterium RBG_16_71_46; OX = 1817856 GN=A2W00_10830 PE=3 SV=1
MGSQPPGSNRSAVEQAVAGLIRALGLDPATEPELAQTPARVAELYVEIFRGLAPDAMPEPATFAHPGGDDLVVVRDLPFHSLCVHHFVPFFGRALVAYLPGERIIGISGAARLLLHYARRPQLQERITRQVADHLERLLSPRGLAVVLQARHLCMEMRGVRSPGVVETRVVRGALADARWAEALRMSPGGGPGA

SEQ ID NO: 6175 - protein, 198 aa, unidentified
  source 1..198: note = Eisenbacteria bacterium
  REGION 1..198: note = tr|A0A538U1V7|A0A538U1V7_9BACT GTP cyclohydrolase 1; OS = Candidatus Eisenbacteria bacterium OX=2212470 GN=folE; PE = 3 SV=1
MAHEPPSFDRAGSERAIAALIRALGLDPATEPELAETPARVADLYAEIFSGLDPASAPALATFPTPPSTGEDLVLVRDLPFYSLCVHHFVPFFGRAHVAYLPGRRLLGISGMARVLQHHARRPQLQERLAAQVADHLERALEPRGVAVVLQARHLCMEMRGIRSPGTVETRTLRGALAEPHWASTLPDAGGLGDPHGA

SEQ ID NO: 6176 - protein, 268 aa, unidentified
  source 1..268: note = Electronema sp.
  REGION 1..268: note = tr|A0A521G2T8|A0A521G2T8_9DELT GTP cyclohydrolase FolE2 OS=Candidatus Electronema sp. GS OX=2005002 GN=folE2; PE = 3 SV=1
MTLPRMTTEILPDIQKMGDSRGIAINKVGIKNFRLPVYVQDRLNKGQHTIADCSMYVNLPCDFKGTHMSRFAEILHAEEFAVTLHSVKDTLLKMTQLLDARDAYLELAFCYFIKKNAPVSGIASMMDYKVTLMGELVDGKYAIFIKAVVPITSLCPCSKEISQYGAHNQRSYVTVTVELKKFVWIEEIIRIIEDSGSCEVYGILKRPDEKYVTEKAYDNPKFVEDIVRDIAVRLNQDDRIVAYVVKSENVESIHNHSAIAVITRDKRQ

SEQ ID NO: 6177 - protein, 142 aa, unidentified
  source 1..142: note = Electrothrix marina
  REGION 1..142: note = tr|A0A444JAT6|A0A444JAT6_9DELT GTP cyclohydrolase I; OS = Candidatus Electrothrix marina OX=1859130 GN=VU01_13653; PE = 4 SV=1
MKDQLDAEAAHLEVRFPYFLERAAEEGSGMDRYECRLHGSLQECDDLVMELNVPITLPESMGRWGYAQVSVRFNEFIWLEDLIGMVQQAIRAGSERTASVESLCGQLGDALKATSEVSWFRVEVENLAGGCSTFATVESTLS

SEQ ID NO: 6178 - protein, 255 aa, unidentified
  source 1..255: note = Electrothrix marina
  REGION 1..255: note = tr|A0A3S3R762|A0A3S3R762_9DELT GTP cyclohydrolase I; OS = Candidatus Electrothrix marina OX=1859130 GN=VT99_12452; PE = 4 SV=1
MKLHSVGIKHFTCPVSIREQKGGMQQTVAEINLQASLPHRFKQSCLETFTCILAKYQQDMHTKIFPKLLTEVQSNLQAKQAEMEMQFPYFIAKKAPVTGTESLMEYDCSFIGSIGSIDNQEHQLLLKVSVPLTTLCPCSKEISTQGAHNQRAEVILTVQPLGFIWLEELITLVESCGSCELYALLKRPDEKFVTEKAYANPMFVEDVVRKVAQKAKNHKMIGWFSVSVESFESIHKHSAYAYVDSTDLDREFTKE

SEQ ID NO: 6179 - protein, 320 aa, unidentified
  source 1..320: note = Endobugula sertula
  REGION 1..320: note = tr|A0A1D2QLT5|A0A1D2QLT5_9GAMM GTP cyclohydrolase FolE2 OS=Candidatus Endobugula sertula OX=62101 GN=folE2; PE = 3 SV=1
MNNVMTKNKKPDMPDIASTQQAQHNATLDWVGMSRIALPLTICDQDRGNYAAKTFIETYVDIFNPQVKGIHMSRLYLLLAEFTKDKVLSIDTLKTLLQEKLSSHEGISRQSCLHIEFDYLINQPALKSEYSGWKDYPILIKAQLNGDRLDIELGIKVPYSSTCPCSAALSRQLMQQEFLKDFADKSTIDKAMVEQWLRSEQGSVATPHSQRSYANVWVKLTDTASAFPMSQLINILEGALKTAVQTAVKREDEQEFARLNGANQMFCEDAARRVKSVLSQQEAYKDFWVRVEHIESLHAHDAVAVATKGVVGGYSPLLHR

SEQ ID NO: 6180 - protein, 214 aa, unidentified
  source 1..214: note = Endolissoclinum sp.
  REGION 1..214: note = tr|A0A1Z9XS71|A0A1Z9XS71_9PROT GTP cyclohydrolase 1; OS = Candidatus Endolissoclinum sp. TMED26 OX=1986636; GN = folE PE=3 SV=1
  VARIANT 64: note = Xaa can be any naturally occurring amino acid
MSPYDNTMLQNISILPASSNASTDLRPSRSEAEEAVRTLIRWAGDDPSREGLLDTPARVTRSYXELFVGYTQDPDEILSTTFAETENYDDMVLLKDIRFESTCEHHMLPVIGTAHVAYVPESRVVGISKLARVVHLFGKRLQIQEKMTSQIAQAIDHALAPKGVAVVVDAVHECMTNRGVHTHGSSLVTRSFMGVFEDDKNLRRDFMDAISGNR

SEQ ID NO: 6181 - protein, 217 aa, unidentified
  source 1..217: note = Endolissoclinum sp.
  REGION 1..217: note = tr|A0A1Z8V3Z4|A0A1Z8V3Z4_9PROT GTP cyclohydrolase 1; OS = Candidatus Endolissoclinum sp. TMED55 OX=1986641; GN = folE PE=3 SV=1
MDTAITTGHPQGSTANDLNKRRRPSKEEAEAAVRTLIEWAGDDPDREGLRGTPDRVARAYQEFFAGYDEDPVALLSTTFEETEDYDEMIVLRDIRLESHCEHHLVPIIGKAHIGYLPAERVVGISKLGRVIDVFAKRMQIQEKLTSQVAHTLYDVLKPHGVGIVIEAAHQCMTTRGVHKPGVKMVTSRMLGSFRDDITVRKQFLDMIKGPGSAPNNA

SEQ ID NO: 6182 - protein, 189 aa, unidentified
  source 1..189: note = Endomicrobium trichonymphae
  REGION 1..189: note = tr|A0A1E5IKS2|A0A1E5IKS2_9BACT GTP cyclohydrolase 1; OS = Candidatus Endomicrobium trichonymphae OX=1408204; GN = folE PE=3 SV=1
MFNFDEKKAQRAVKLLLESFGEDLNREGIRRTPERVAEFYREVLSGNEIGPLKFVPVHYTTEDHEEIVLVKDITFYSLCEHHLLPFFGRTHIAYIPKKDRIIGVSKLINLVEIFANRLQLQERLTKQLADTVMEFVKPHGVMVVVEAEHLCMTMRGVKKPGSKMVTSAMRGMFLKDVRTRSEAMSLLRG

SEQ ID NO: 6183 - protein, 190 aa, unidentified
  source 1..190: note = Endomicrobium trichonymphae
  REGION 1..190: note = tr|A0A1C9ZX13|A0A1C9ZX13_9BACT GTP cyclohydrolase 1; OS = Candidatus Endomicrobium trichonymphae OX=1408204; GN = folE PE=3 SV=1
MQIFNFDEKKAQRAVKLLLESFGEDLNREGIKRTPERVAEFYKEVLSGNKIDPLKFIPVHYATEDHEEIVLVKDITFYSLCEHHLLPFFGKMHIAYIPKKDRIIGVSKLIKLVEIFANRLQLQERLTKQLADIVMKFVKPHGVMVVVEAEHLCMTMRGVKKAGSKIITSAMRGIFLKDVRTRSEAMSLLR

SEQ ID NO: 6184 - protein, 219 aa, unidentified
  source 1..219: note = Enterovibrio luxaltus
  REGION 1..219: note = tr|A0A291BBM4|A0A291BBM4_9GAMM GTP cyclohydrolase 1; OS = Candidatus Enterovibrio luxaltus OX=1927128 GN=folE; PE = 3 SV=1
MTALSNFAIRVRDELLARGIETPMQSYSPLTKAEKKEKIEYYMRSILSVIELDLDDDSLAETPARIAKMYVDEVFSGLDYTNFPKITVIENKMGCDEMVRVKDITLTSTCEHHLVTIDGSCTVAYLPKDKIIGLSKINRIVQFFGQRPQIQERLTRQILVALQILLETENVAVHVNAVHYCVKARGVMDATSKTTTTALGGMFKKNVATRAEFLHGIDM

SEQ ID NO: 6185 - protein, 220 aa, unidentified
  source 1..220: note = Enterovibrio escacola
  REGION 1..220: note = tr|A0A2A5T100|A0A2A5T100_9GAMM GTP cyclohydrolase 1; OS = Candidatus Enterovibrio escacola OX=1927127 GN=folE; PE = 3 SV=1
MTALSNFAILVRAALIAKDIETPMYSNSTMTPAEKKEIIEYHMREILSVIDLDLNDDSLMETPVRIAKMYVDEVFSGLDYFNFPKITVIENKMGCDEMVRVKNITVTSTCEHHLVTIDGFCTVAYLPKEKIIGLSKINRIVRFFAQRPQIQERLTRQILVALQTLLETDNVAVHVNATHSCVKARGVMDATSATTTTALGGVFKKNAASRAEFFHGIGCL

SEQ ID NO: 6186 - protein, 204 aa, unidentified
  source 1..204: note = Entotheonella gemina
  REGION 1..204: note = tr|W4LXZ6|W4LXZ6_9BACT GTP cyclohydrolase 1; OS = Candidatus Entotheonella gemina OX=1429439 GN=folE PE=3; SV = 1
MPRVDAVETNGIKKPSEYMDQAKIAAGVRLILEGIGEDADREGLRDTADRVARMYAEVFKGLYQDPCDYLTAVFDEDHDEMVVVKDIPFYSMCEHHLLPFQGKAHVAYLPSGKVLGLSKIARVVEAFAQRPQVQERLTSQIADLLMTKLDALGVAVVMEATHSCMTMRGVKKPGSSMITSAMRGNFKTNQATRSEFMSLIHSNR

SEQ ID NO: 6187 - protein, 206 aa, unidentified
  source 1..206: note = Entotheonella factor
  REGION 1..206: note = tr|W4LGA4|W4LGA4_9BACT GTP cyclohydrolase 1; OS = Candidatus Entotheonella factor OX=1429438 GN=folE PE=3; SV = 1
MSRVEVVETNGISKPAGYMDQAKIAAGVRLILEGIGEDADREGLRGTADRVARMYAEVFKGLYQDPCDYLTAVFDEDHDEMVVVKDIPFYSMCEHHLLPFQGKAHVAYLPSGKVLGLSKIARVVEAFAQRPQVQERLTSQIADLLTTELDALGVAVVMEATHSCMTMRGVKKPGSSMITSAMRGDFKTNQATRSEFMSLIRSGSAI

SEQ ID NO: 6188 - protein, 221 aa, unidentified
  source 1..221: note = Erwinia haradaeae
  REGION 1..221: note = tr|A0A451DI65|A0A451DI65_9GAMM GTP cyclohydrolase 1; OS = Candidatus Erwinia haradaeae OX=1922217 GN=folE PE=3; SV = 1
MHAWSPEAKRIHKALLDCGLETAFQLPQKEINNNKRKQLIAQHIASIMQLLDLNLNDPSLSQTPQRIAKMYVDEIFSGLNYANFPQITLIDNIVKTDEIIIVRNINLTSICEHHFLMIDGKATVAYIPQNKVIGLSKINRIVQFFSHRPQVQERLIQQIFIALQILLHTTHVAVSIEATHYCVKGRGVRDVTSSTITTSLGGLFKSSDNTRKEFLQSIKHT

SEQ ID NO: 6189 - protein, 221 aa, unidentified
  source 1..221: note = Erwinia dacicola
  REGION 1..221: note = tr|A0A1E7Z3U8|A0A1E7Z3U8_9GAMM GTP cyclohydrolase 1; OS = Candidatus Erwinia dacicola OX=252393 GN=folE PE=3 SV=1
MATLSQEATLVHEALLARGLETPLRLPVRDMDDDTRKALIAGHMTEIMRLLNLDLEDDSLVETPQRIAKMYVNEVFSGLDYANFPKITMIENKMKVDEMVTVRDITLTSTCEHHFVIIDGQATVAYIPKDKVIGLSKINRIVQFFSSRPQVQERLTQQILLALQILLGTNNVAVSIDAFHYCVKARGIRDATSATTTTSLGGLFKSSQNTRQEFLRSVHHR

SEQ ID NO: 6190 - protein, 183 aa, unidentified
  source 1..183: note = Falkowbacteria bacterium
  REGION 1..183: note = tr|A0A1F5S462|A0A1F5S462_9BACT GTP cyclohydrolase 1; OS = Candidatus Falkowbacteria bacterium RIFOXYA2_FULL_38_12; OX = 1797993 GN=folE PE=3 SV=1
MQKIIKSLLVKIGENPNRDGLKETPDRVSQMYTEFFYGYDKGKKPKITVFDNEQSSNDQIIIDKGYFYSFCEHHMMPFFGEYYFAYVPDKKIIGLSKISRIVDYYASKLQVQERLTMEILDELENKLKPKGLAIIMSARHLCKEMRGVKKNKVEMTTHDFRGIFADNSKKKKELLDVISLTIK

SEQ ID NO: 6191 - protein, 189 aa, unidentified
  source 1..189: note = Fermentibacter daniensis
  REGION 1..189: note = tr|A0A163WTW2|A0A163WTW2_9BACT GTP cyclohydrolase 1; OS = Candidatus Fermentibacter daniensis OX=1729713 GN=folE; PE = 3 SV=1
MDLNKIEQGVRLILEGIDEDLDREGLVDTPCRTAKSIAELCRGMDPASARSISTFHAEGHDDLVIVKDISFASICEHHLLPYVGRCDVVYLPADSRIAGLSAIVETVETMAARLTTQERLTTEIADRLMQEIQAKGVMVVMEAEHMCLAIRGVRKRDSRIVTSAMRGYLRRLPTRTEALALIGRSTSVR

SEQ ID NO: 6192 - protein, 190 aa, unidentified
  source 1..190: note = Fermentibacteria bacterium
  REGION 1..190: note = tr|A0A496U752|A0A496U752_9BACT GTP cyclohydrolase 1; OS = Candidatus Fermentibacteria bacterium OX=2044591; GN = folE PE=3 SV=1
MMDLEKVEQGVKLILEGIGENPDRPGIKRTPRRVALSMAELCRGLDPESRRPIAVMSEDDQNEMIIVKDISFSSMCEHHLLPFLGRCDVVYLPADDRIAGLSAIVELVENLAARPTIQERLTTQIANTLMKELQAKGVMVVMEAEHMCLAMRGVKKRDSRIVTSAMRGHLRRPETRSEALALIGRSTTGR

SEQ ID NO: 6193 - protein, 265 aa, unidentified
  source 1..265: note = Fermentibacteria bacterium
  REGION 1..265: note = tr|A0A2G6LV66|A0A2G6LV66_9BACT GTP cyclohydrolase FolE2 OS=Candidatus Fermentibacteria bacterium OX=2044591; GN = folE2 PE=3 SV=1
MKDIQNSPDTRRIPLDEVGVTSLSYPVTILDRENREQSTVADISMYVDLPMHFKGTHMSRFIEVLTESGCSFTGSTMPLLLARLKAALEADSAAVKVEFPYFMERKAPVTGASALMSYRCSFLGVSGPDGDDFVLTVTVPVGTLCPCSREISDAGAHNQRGYLTMEVRTMKKEDGAFEMLWIEELVETAERSASVPLYTILKRADEKFVTEQAYENPVFVEDMVREAARELMADRRVRSFTVRAENHESIHTHNAYAVVRWSRPS

SEQ ID NO: 6194 - protein, 201 aa, unidentified
  source 1..201: note = Filomicrobium marinum
  REGION 1..201: note = tr|A0A0D6JFY0|A0A0D6JFY0_9RHIZ GTP cyclohydrolase 1; OS = Candidatus Filomicrobium marinum OX=1608628 GN=folE; PE = 3 SV=1
MKKNASDSQPLPAAERPDRREAEDAIRTILRWTGENPERDGLIETPSRVVRAFEEYFRGYAEDPEAILQKTFEEIEGYDEMIALRGIRFESHCEHHMAPIIGHAWVGYIPNGRVVGISKLARIVDVYAKRLQIQEKMTAQIANAIQTVLEPQGVGVVIKAEHHCMTTRGIHKPGTDLVTSRMLGVFRDDPKTRQEFLSMVD

SEQ ID NO: 6195 - protein, 204 aa, unidentified
  source 1..204: note = Filomicrobium marinum
  REGION 1..204: note = tr|A0A0D6JE86|A0A0D6JE86_9RHIZ GTP cyclohydrolase 1; OS = Candidatus Filomicrobium marinum OX=1608628 GN=folE; PE = 3 SV=1
MDALVHPFADCSRLPTSRETERAAAETAFRAIIRWAGDDPDRPGLIETPARLARAFEQYFAGYSQDPGQILQKTFKEIDGYDEMIVLRGIRFESHCEHHLAPIVGKAWVAYVPEGRVVGISKLARVVDAYARRLQIQERMTVQIANTISEVLQPRGVGVIIKATHHCMTTRGVHKPDSDLITSRMLGCFRDNSRLRQEFVALVD

SEQ ID NO: 6196 - protein, 186 aa, unidentified
  source 1..186: note = Firestonebacteria bacterium
  REGION 1..186: note = tr|A0A1F5UE48|A0A1F5UE48_9BACT GTP cyclohydrolase 1; OS = Candidatus Firestonebacteria bacterium GWA2_43_8; OX = 1817858 GN=folE PE=3 SV=1
MNKAKIEKAVRDILIAIGEDPEREGLQGTPERVARMYEEIFQGVKMDPTKELKVLFTEEHDEMVLLKDIPFYSMCEHHLLPFIGKAHVAYIPVNNKVLGLSKIARLVDTVSKRPQLQERLTSLIADTLTKTIKPKGVLVVVEAEHLCMTMRGIKKPGSKMVTSAVRGLFRKSQATRSEALALIRGS

SEQ ID NO: 6197 - protein, 186 aa, unidentified
  source 1..186: note = Firestonebacteria bacterium
  REGION 1..186: note = tr|A0A1F5UVF7|A0A1F5UVF7_9BACT GTP cyclohydrolase 1; OS = Candidatus Firestonebacteria bacterium RIFOXYC2_FULL_39_67 OX=1817861 GN=folE PE=3 SV=1
MNKTKIEKAVRDVLVAIGEDPNREGLKETPERVARMYEEIFKGVGMDPTKELKVLFTEEHDEMVLLKDIPFYSMCEHHLLPFIGKAHVAYIPVNNKVLGLSKIARLVDTVSKRPQLQERLTSQIADTLTKTIKPKGVLVVVEAEHLCMTMRGIKKPGSKMVTSAVRGLFRKSQATRSEALALIHGS

SEQ ID NO: 6198 - protein, 185 aa, unidentified
  source 1..185: note = Fischerbacteria bacterium
  REGION 1..185: note = tr|A0A1F5VJN2|A0A1F5VJN2_9BACT GTP cyclohydrolase 1; OS = Candidatus Fischerbacteria bacterium RBG_13_37_8; OX = 1817863 GN=folE PE=3 SV=1
MEDIIRQLLIKVGENPDREGLEETPRRVADAWSYFTKGYQEDARNIIQSAIFIEDYDEMVIVKDIDLFSICEHHLLPFIGKCHVAYIPDKKIIGLSKIVRVIEIFSRRLQIQERLTSQIAYAIWEELKPQGTAVVIEALHLCMMMRGVEKQNSKAITSTMLGTFRTNPETRMEFMSLIKSEKSFL

SEQ ID NO: 6199 - protein, 191 aa, unidentified
  source 1..191: note = Fokinia solitaria
  REGION 1..191: note = tr|A0A2U8BSE7|A0A2U8BSE7_9RICK GTP cyclohydrolase 1; OS = Candidatus Fokinia solitaria OX=1802984 GN=folE PE=3; SV = 1
MSKVKEHEIENSIRKILEYIGENPDREGLSETPKRVVKAFKEYFSGYNQNHHEILGKTFTETAGYSDMIALTNLRVQSHCEHHIAPITGQAIVAYIPKNAVVGISKISRLVSMYSHRLQLQERLTKQILDAIDEVLTPYGTAVYISASHSCLSKRGICDDEAMVQTFAFSGDFLNSQLDYKQRFIALTQRV

SEQ ID NO: 6200 - protein, 211 aa, unidentified
  source 1..211: note = Frackibacter sp.
  REGION 1..211: note = tr|A0A1H7X6F4|A0A1H7X6F4_9FIRM GTP cyclohydrolase 1; OS = Candidatus Frackibacter sp. WG12 OX=2017977 GN=folE; PE = 3 SV=1
MGKYIIKDIQYMKYYKKIIAEGELIMVDRDKIREAVEMILEAIGEDPKREGLQETPDRVARMYEEVFSGLHKDPSDDLQIFFTEEHEELVLVKDISFYSMCEHHLLPFYGKAHVGYIPKSGKVTGLSKLARVVDSFAKRPQLQERLTSQVADLIMDNIDARGVIVVIEAEHMCMTMRGIKKPGSFTTTSAVRGILHKDQAVRAEALKLIKD

SEQ ID NO: 6201 - protein, 249 aa, unidentified
  source 1..249: note = Frankia californiensis
  REGION 1..249: note = tr|A0A1C3NUU5|A0A1C3NUU5_9ACTN GTP cyclohydrolase 1; OS = Candidatus Frankia californiensis OX=1839754 GN=folE; PE = 3 SV=1
MGATELAERRRQGTPLTTDFGLAPTGGYTSLASAPVDAGGVPAEDVAPQRRGPDLGPRAVRPFDHERVARAVRELLIGIGEDPDREGLRKTPERVARAYEEAVEGLGRDPSEVLTTVFDEGHEEMVLVRDIDFTSLCEHHLVAFAGKAHVAYIPNESGQITGLSKLARLVDLYSRRPQVQERLTTQIADALEQALSPRGVMIVVEAEHLCMSMRGVRKPGARTVTSAVRGQFLSTATRNEGMSLILSHR

SEQ ID NO: 6202 - protein, 221 aa, unidentified
  source 1..221: note = Fukatsuia symbiotica
  REGION 1..221: note = tr|A0A2U8I3V1|A0A2U8I3V1_9GAMM GTP cyclohydrolase 1; OS = Candidatus Fukatsuia symbiotica OX=1878942 GN=folE PE=3; SV = 1
MSVLSEEAKLVYAALKAKGFETPLCGEMLDVKTRKTRIQQHITEIMKLLNLDLTNDSLAETPNRIAKMYVDEIFSGLDYTNFPKITVIKNKMKVDEMITVRNITMTSTCEHHFITINGKATVSYIPKEHIIGLSKINRIVQFFSQRPQVQERLTQQILLALQTLLETNHVAVSIDAIHYCVKARGICDATSTTTTTSLGGLFKSSQNTRQEFLRAATYHTN

SEQ ID NO: 6203 - protein, 267 aa, unidentified
  source 1..267: note = Gallionella acididurans
  REGION 1..267: note = tr|A0A139BRL9|A0A139BRL9_9PROT GTP cyclohydrolase FolE2 OS=Candidatus Gallionella acididurans OX=1796491; GN = folE2 PE=3 SV=1
MNTPVQNFIPDVQSSADTRHLAINRVGIKGIRHPVKVKDKSVGVQHTIATFNMYVHLPHNFKGTHMSRFVEILNHHEREISVESFESILSEMVSRLEAESGYIEMSFPYFVNKTAPVSGVQSLLDYDVTLIGETINGKPRVTMKVLVPVTSLCPCSKKISERGAHNQRSHVTLSLRTNEFVWIEDVIRIAEEQASCELYGLLKRPDEKFVTERAYDNPKFVEDMVRDVATVLDADKRIDAYVVESENFESIHNHSAYAMIERDKTGD

SEQ ID NO: 6204 - protein, 263 aa, unidentified
  source 1..263: note = Gastranaerophilales bacterium
  REGION 1..263: note = tr|A0A292RDC6|A0A292RDC6_9BACT GTP cyclohydrolase FolE2 OS=Candidatus Gastranaerophilales bacterium HUM_9; OX = 1916320 GN=folE2 PE=3 SV=1
MKDVQNSLDNRGVEIQKVGVKHVEIPLTIQRKNAENQEVCADATVTVSLPAHYKGTHMSRFVEVLNDWRTKNLLGVDIQGCVTDVVERLDAKSGYLKFDFKYFIEKESPVTKIKSPMYYDCTFEGILDNYQEEDEEYQFFLGVKVPVTTLCPCSKEISKFGAHNQRALVSVKVAYDEDAHIWLEDLISMIEKSASCELYSLLKREDEKYVTEYAYSNPKFVEDVLRDVVINLRNNPVVDRFEVECESIESIHNHSAWAYQQEG

SEQ ID NO: 6205 - protein, 258 aa, unidentified
  source 1..258: note = Gastranaerophilales bacterium
  REGION 1..258: note = tr|A0A292RA46|A0A292RA46_9BACT GTP cyclohydrolase FolE2 OS=Candidatus Gastranaerophilales bacterium HUM_7; OX = 1916228 GN=folE2 PE=3 SV=1
MKDVQNTQDTRNVDIQKVGIKNVELPLIIQRKNASDKVVYATARVCVSLPRNYKGTHMSRFVEVLNEWRTKNLLGVDIKGCLEKIIKKLHAQSGELEFNFKYFVDKKAPITKLAAPMCYDCSFEGTMDGDDYKFILGVKVPVTTLCPCSKEISDNGAHNQRAIISVKVSYDETEHVWLEDLIELIESCASCPVYSLLKRQDEKFVTEHAWENPRFVEDVLREVVVKLRKHPVIKSFEVDCEAFESIHNHSAWAYQKEG

SEQ ID NO: 6206 - protein, 266 aa, unidentified
  source 1..266: note = Gastranaerophilus sp.
  REGION 1..266: note = tr|A0A2L2XCA4|A0A2L2XCA4_9BACT GTP cyclohydrolase FolE2 OS=Candidatus Gastranaerophilus sp. (ex Termes propinquus) OX=2029980 GN=folE2 PE=3 SV=1
MKTLTDTQNQSDNRKINIQKVGVKDVEIPLIIARKNAENQTVYARAKMSVSLPHHFKGTHMSRFIEVLNDYHQKNLVGVDIHEMLKCMCSRLDAKSAYLKFDFKYFIEKQAPATGLSALMSYDCFFEGTLNEEKYKFNLGAKVPLTTLCPCSKEISEHGAHNQRALVKVKVSYSESEHIWLEDLITLTESSGSAEVYSLLKREDEKFVTEQAFNNPKFVEDVLRDIVIKLENHSAVDSFEVEIEAFESIHNHSAWAYQKREKGVGN

SEQ ID NO: 6207 - protein, 267 aa, unidentified
  source 1..267: note = Glassbacteria bacterium
  REGION 1..267: note = tr|A0A1F5YRL3|A0A1F5YRL3_9BACT GTP cyclohydrolase FolE2 OS=Candidatus Glassbacteria bacterium RIFCSPLOWO2_12_FULL_58_11 OX=1817867 GN=folE2 PE=3 SV=1
MTTQTALRDLQSETDHRNLEIQKAGVKGLSYPIVVQDRANGTQHTVARIQMSVSLPHHFRGTHMSRFIEILNRHRGNIASDNLREILAEAREKLDAEVAHMELEFPYFIEKSAPVSGAKALQEYICRFSGSLGVREKDTDFILEVNVPVTTLCPCSKEISDYGAHNQRSVLTIAVKFKSFVWIEDLVEIAENSASCALFPLLKRRDEKYVTERAYDNPRFVEDVVRECALLLEQMDEVTWYRVEAENFESIHNHNAYALIENRKNGK

SEQ ID NO: 6208 - protein, 204 aa, unidentified
  source 1..204: note = Glomeribacter gigasporarum
  REGION 1..204: note = tr|G2JAM7|G2JAM7_9BURK GTP cyclohydrolase 1; OS = Candidatus Glomeribacter gigasporarum BEG34 OX=1070319; GN = folE PE=3 SV=1
MNDQTIAGVEQRARPSQQEVEEAIRVLIRWTGDDPAREGLVDTPARVARAYREFFSGYQQDPVQILTRTFSEVDGYDEMIVLSGIRFESYCEHHLVPMIGTAHVGYLPEKRVVGISKLARLVDVYAKRLQIQEKMTVQIADTLNGVLQPKGVAVVLRASHQCMSTRGVHKAAAEMITSRMLGAFRDNPATRREFLALVGIQAAR

SEQ ID NO: 6209 - protein, 185 aa, unidentified
  source 1..185: note = Goldbacteria bacterium
  REGION 1..185: note = tr|A0A2N1W446|A0A2N1W446_9BACT GTP cyclohydrolase 1; OS = Candidatus Goldbacteria bacterium HGW-Goldbacteria-1; OX = 2013807 GN=folE PE=3 SV=1
MDKEKIKKAVTMILEAIGEDTNREGLKQTPERVADMYEEIFAGINQKPEEFIKIFQEDEHEELIILKDIPFYSVCEHHLMPFLGKAHIGYIPKKNRLLGLSKLARMVEMYAKRLQLQERLTSQVADTIMKAVDPLGVIVIVEAQHLCTTMRGVKKPGSVMVTSAIRGIFKDDESARKEALSLINK

SEQ ID NO: 6210 - protein, 196 aa, unidentified; identical to SEQ ID NO: 6153
  source 1..196: note = Gottesmanbacteria bacterium
  REGION 1..196: note = tr|A0A1F6AVK1|A0A1F6AVK1_9BACT GTP cyclohydrolase 1; OS = Candidatus Gottesmanbacteria bacterium RIFCSPLOWO2_01_FULL_46_21 OX=1798393 GN=folE PE=3 SV=1

SEQ ID NO: 6211 - protein, 190 aa, unidentified; identical to SEQ ID NO: 6123
  source 1..190: note = Gottesmanbacteria bacterium
  REGION 1..190: note = tr|A0A2H0NH84|A0A2H0NH84_9BACT GTP cyclohydrolase 1; OS = Candidatus Gottesmanbacteria bacterium CG11_big_fil_rev_8_21_14_0_20_37_11 OX=1974575 GN=folE; PE = 3 SV=1

SEQ ID NO: 6212 - protein, 220 aa, unidentified
  source 1..220: note = Hamiltonella defensa
  REGION 1..220: note = tr|A0A249DYM1|A0A249DYM1_9ENTR GTP cyclohydrolase 1; OS = Candidatus Hamiltonella defensa (Bemisia tabaci); OX = 672795 GN=folE PE=3 SV=1
MSSFSKEARQVHEALVKHGLENPFNMDPKNGLLDAATRRSHIEKHITRIMELLNLDLKDDSLSKTPSRIASMYVDEIFLGLDYAHFPEITLIQNKMQVDEMITVHDISLSSTCEHHFASIDGKATVAYIPKDYIIGLSKINRVVQFFSQRPQVQERLTQQIILALQTLLATENVAVSIDATHYCVKARGICDRSSVTRTTSLRGLFKSSQNTRQEFLHIC

SEQ ID NO: 6213 - protein, 220 aa, unidentified
  source 1..220: note = Hamiltonella defensa
  REGION 1..220: note = tr|A0A2D3TBH3|A0A2D3TBH3_9ENTR GTP cyclohydrolase 1; OS = Candidatus Hamiltonella defensa OX=138072 GN=folE PE=3; SV = 1
MSSFSKEARQVHEALVKHGLENPFNMDPENGLLDAATRRSHIEKHITQIMELLNLDLRDDSLSKTPSRIASMYVDEIFLGLDYAHFPEITLIQNKMQVDEMITVHDISLSSTCEHHFASIDGKATVAYIPKDYIIGLSKINRVVQFFSQRPQVQERLTQQIILALQTLLATENVAVSIDATHYCVKARGICDRSSVTRTTSLRGLFKSSQNTRQEFLHIC

SEQ ID NO: 6214 - protein, 247 aa, unidentified
  source 1..247: note = Hoaglandella endobia
  REGION 1..247: note = tr|A0A143WUD1|A0A143WUD1_9ENTR Putative GTP cyclohydrolase 1 type 2 OS=Candidatus Hoaglandella endobia; OX = 1778263 GN=ybgI PE=4 SV=1
MRNTELEYIINQKLNSSEIQDYVPNGLQVEGRHEVRRIITGVTACQAILDSALTHGADAIIVHHGYFWKNELAVIRGIKRQRLKTLLSHDINLYAWHLPLDAHPELGNNAQLASALAIQVTGVLEPLITQGELDIPLSADALQKRLEQKLGRSVIHCGDNAPAQIKRLAWCCGGGQRFIELAAEAGMDAFISGEISEQTSHAAREWGLHFYAAGHHATERGGIRALGEWLAKQYDLDVNFIDIPNPA

SEQ ID NO: 6215 - protein, 191 aa, unidentified
  source 1..191: note = Hodgkinia cicadicola
  REGION 1..191: note = tr|A0A2G9FR12|A0A2G9FR12_9RHIZ GTP cyclohydrolase 1; OS = Candidatus Hodgkinia cicadicola OX=573658 GN=folE PE=3; SV = 1
MSFINVYKMINKIIIKKIIEYVGDDSNRNGLRSTPIRVIRSLKEMYCGYKTQLPKVNKSFSYINSNIDLVYIKNVFISSNCEHHMLPFFGQVNLVYCPSTMVLGLSKFINILNFYSTRLQSQERLAQQVVTYIKNIIRPKAIMLKLSCKHVCMLARGVKSICSTNGIIINEGLSVISPMLMNKMLTVVKDE

SEQ ID NO: 6216 - protein, 180 aa, unidentified
  source 1..180: note = Hodgkinia cicadicola
  REGION 1..180: note = tr|A0A2G9FUM5|A0A2G9FUM5_9RHIZ GTP cyclohydrolase 1; OS = Candidatus Hodgkinia cicadicola OX=573658 GN=folE PE=3; SV = 1
MLNNIIIIKIIEYIGDNPKRNELHLTPIRVVKSMKEIYCGYKLNLTDMEKSFDYNNSNTDLIYIKNVFFGSNCEHHMLPFFGQANFVYCPSKKIIGLSKFINILNFYSARLQTQERLARQVVNYIKNILRPRAIILKLSCKHICMLMRNVKSICSTSGTVINEGLSTISPTLMLKMLFII

SEQ ID NO: 6217 - protein, 189 aa, unidentified
  source 1..189: note = Hydrogenedentes bacterium
  REGION 1..189: note = tr|A0A1V5YYB2|A0A1V5YYB2_9BACT GTP cyclohydrolase 1; OS = Candidatus Hydrogenedentes bacterium ADurb.Bin170; OX = 1852848 GN=folE PE=3 SV=1
MNTDRIAGLIRELLIEIGEDPDREGLLKTPDRYAKALKFLTKGYHEDMNTIINGAIFQAESNNMIIMRDIELYSLCEHHMLPFFGRAHVGYIAQEKVIGLSKIARIVDFYARRLQIQERLTAQIARAIMDNTRAEGVGVVLECKHLCTMMRGVEKQNSLMTTSSVLGSFHDDEITRQEFLQLIGRGGQI

SEQ ID NO: 6218 - protein, 210 aa, unidentified
  source 1..210: note = Hydrogenedentes bacterium
  REGION 1..210: note = tr|A0A3M2EZ69|A0A3M2EZ69_9BACT GTP cyclohydrolase 1; OS = Candidatus Hydrogenedentes bacterium OX=2030809 GN=folE; PE = 3 SV=1
MEREGKKEKSPCGKDCSERRRRIAKSIREILETLGFDIARSDLRDTPSRVAEMYWEIFRGEREENEPKLTVFPNDEGYRSMVMVRDIPFYSMCAHHLVPFFGVGHIGYIPAESIVGLSKLARVLEHFARRPQVQERLTEQVADFLQKKLNPRGVMVVLEARHLCMEMRGVEKPGALTMTTTTRGTFDVEEGVDYRKEFLRHLLRPGSVPR

SEQ ID NO: 6219 - protein, 260 aa, unidentified
  source 1..260: note = Hydrothermae bacterium
  REGION 1..260: note = tr|A0A496U321|A0A496U321_9BACT GTP cyclohydrolase FolE2 OS=Candidatus Hydrothermae bacterium OX=2250085; GN = folE2 PE=3 SV=1
MRDVQKEPPPRKIPIDKVGVEDVTYPIRVMDKENGFQNTVARIKMSVDLPHNFRGTHMSRFIEVLNKHLHNITLHNLENILEDIRKELDAETSHIEIEFPYFIKKKAPVSGMESFMNYRCKFIASKDDKFDFILEVNVPVHTLCPCSKEISERGAHNQRALVSVQVRMKKLVWIEEIVEMVEGSVSAPLYALLKREDERYITEHAYDNPRFVEDVVREVAVNLDRDDRIIWYFINVKSFESIHNHNAFACLKRDKIIGSQ

SEQ ID NO: 6220 - protein, 260 aa, unidentified
  source 1..260: note = Izimaplasma sp.
  REGION 1..260: note = tr|A0A088T1Y3|A0A088T1Y3_9BACT GTP cyclohydrolase 1 type 2 OS=Candidatus Izimaplasma sp. HR1 OX=1541959; GN = KQ51_01133 PE=4 SV=1
MIVSEFIKKFEQYFPSNLAYKWDNVGLQVGSDEENITNILLSLDLTNEIIDEAIEKNANFVVVHHPIIFTPLKQINTNTYLGNLLSKIIKNNINIYVAHTNFDLSNFGMNKVLADMLEIEDQKIIELETLDEGLGRYGNLNESMSLGKFIEKVKNVYNLDTVKLISNQKMNYMIGTVAICGGSGSSLLGNDILKYCDIYITGDVTYHHALDAINRGLTVLDVGHHVERHGILSIKSQLETFSQDYRVFLSNLDVNPYKIV

SEQ ID NO: 6221 - protein, 257 aa, unidentified
  source 1..257: note = Izimaplasma sp.
  REGION 1..257: note = tr|A0A094IFE5|A0A094IFE5_9BACT Putative GTP cyclohydrolase 1 type 2 OS=Candidatus Izimaplasma sp. HR2; OX = 1541960 GN=KQ78_01366 PE=4 SV=1
MNGIEIINIFEALYPKDLAYNWDNVGLQIGTLNKDIGKILLSLDLTLEVVNEAINNGTELIIVHHPLIFSALKSINTDTYKGKVIEKLIKSDITLYVAHTNFDVSSYGMNTILADMLNLKDQEVLEFTTEDEGLGKVGKVSPSLMKDYINTVKKTFKVDNARFIGDLNKTVNKVAITGGSGSSTIYSASKAGVDLLITGDISYHQAHDALAINLNVLDIGHNIEKFFVHELKSILVNKGVKANILVSKINTNPYKFV

SEQ ID NO: 6222 - protein, 187 aa, unidentified
  source 1..187: note = Jettenia caeni
  REGION 1..187: note = tr|I3ILL8|I3ILL8_9BACT GTP cyclohydrolase 1; OS = Candidatus Jettenia caeni OX=247490 GN=folE PE=3 SV=1
MVDKKKIIESIRLFIEGIGEDPAREGLRETPERVADMCEEIFAGIGIDSHAEIKVLKSEKYDEIVLLKDIPFYSICEHHLLPFSGVAHVAYIPQGNRVTGISKLARVVEIEAKRLQVQERLTTDIAESIMKALRPKGVLVIIEAGHLCMTMRGIKKPGTTVHTSVVRGIFRDNPATRAEAMALIKGH

SEQ ID NO: 6223 - protein, 187 aa, unidentified; identical to SEQ ID NO: 6222
  source 1..187: note = Jettenia ecosi
  REGION 1..187: note = tr|A0A533Q840|A0A533Q840_9BACT GTP cyclohydrolase 1; OS = Candidatus Jettenia ecosi OX=2494326 GN=folE PE=3 SV=1

SEQ ID NO: 6224 - protein, 198 aa, unidentified
  source 1..198: note = Jidaibacter acanthamoeba
  REGION 1..198: note = tr|A0A0C1QFH9|A0A0C1QFH9_9RICK GTP cyclohydrolase 1; OS = Candidatus Jidaibacter acanthamoeba OX=86105 GN=folE_2; PE = 3 SV=1
MVRFMSKILEKDQAINQKAINAIRSLIECIGDDPGRSELKKSPYKILEVLQSYFAGYAVNSDEILAETIEEVEGYDDIIMLKDINFTSYCEHHFLPFSGKCHIGYIPNKKIAGIGKFVEVLEAFAGRLQIQERLTVLIAEAIYKNLQPKGVGVVIEAKHNCLSFKHQSCNNAVMRTGKMLGAFHEDYNIRNEFLSALK

SEQ ID NO: 6225 - protein, 193 aa, unidentified
  source 1..193: note = Kaiserbacteria bacterium
  REGION 1..193: note = tr|A0A1F6CVM0|A0A1F6CVM0_9BACT GTP cyclohydrolase 1; OS = Candidatus Kaiserbacteria bacterium RIFCSPHIGHO2_01_FULL_53_29 OX=1798480 GN=folE PE=3 SV=1
MDLWRRQQAILPCMQDAIKKILEELGENPTRNGLKETPRRVEESLRFLTQGYHLSAEEVIADALFEEDHNEMIVVKDIEIYSLCEHHLLPFVGKAHVGYIPNGRIVGLSKIARVADVFARRLQLQERLTKEIADALQKSLRPLGVGVIIEAEHFCMMMRGVEKQNSKAMTSAMRGSFLDDEKTRQEFLRLAVA

SEQ ID NO: 6226 - protein, 193 aa, unidentified; identical to SEQ ID NO: 6225
  source 1..193: note = Kaiserbacteria bacterium
  REGION 1..193: note = tr|A0A1F6FZQ3|A0A1F6FZQ3_9BACT GTP cyclohydrolase 1; OS = Candidatus Kaiserbacteria bacterium RIFCSPLOWO2_12_FULL_53_8 OX=1798529 GN=folE PE=3 SV=1

SEQ ID NO: 6227 - protein, 285 aa, unidentified
  source 1..285: note = Kentron sp.
  REGION 1..285: note = tr|A0A451C0I2|A0A451C0I2_9GAMM GTP cyclohydrolase FolE2 OS=Candidatus Kentron sp. G OX=2126341 GN=folE2 PE=3; SV = 1
MTQCVRTDSVRINNANTGKEASESGKIADVQGSADLRRIPIQQVGIKGIRHPIQVRDRANTLQHTIATFNMYVNLPHNFKGTHMSRFVEILNNHEYEITVESFTRMLFEMTEILDAESGQIEMMFPYFVNKVAPISKVQSLMDYEVTLTGRLVDGQPYMYIKVIVPVTSLCPCSKEISDYGAHNQRSHVTLKVRTHTFVWIEELIDLVENQASSQVYGLLKRPDEKFVTERAFDHPKFVEDMVRDVAQLLNKDDRIDAYIVESENFESIHNHSAYALVEKDKLEE

SEQ ID NO: 6228 - protein, 280 aa, unidentified
  source 1..280: note = Kentron sp.
  REGION 1..280: note = tr|A0A451B705|A0A451B705_9GAMM GTP cyclohydrolase FolE2 OS=Candidatus Kentron sp. MB OX=2138164 GN=folE2; PE = 3 SV=1
MNRSAGINCANGNTGVQECGEIPDVQGSLDLRQIPIQKVGIKGIRHPVQVRDRANSVQHTIATFNMYVNLPHNFKGTHMSRFVEILNNHEYEITVESFLRMPFEMTRILNAKSGQIEMSFPYFVNKIAPVSKVKSLMDYGVTLTGKLHDEKSDLYIKVVVPITSLCPCSKEISDYGAHNQRSHVTIEVRTGTFVWIEELIDLIEGEASSQLYGLLKRRDEKFVTEHAFNNPKFVEDMVRDVARKLNQDDRIDSYVVESENFESIHNHSAYALVEKDKFAP

SEQ ID NO: 6229 - protein, 185 aa, unidentified
  source 1..185: note = Kerfeldbacteria bacterium
  REGION 1..185: note = tr|A0A359MY13|A0A359MY13_9BACT GTP cyclohydrolase 1; OS = Candidatus Kerfeldbacteria bacterium OX=2053565 GN=folE; PE = 3 SV=1
MDKKTISKNIAELIQHIDPQPQREGLADTPRRVADSFEKLFSGYGIDPNGLLTFFDSEHYDEMITCKEIDFYSTCEHHLLPFHGKAHIGYIPKAKIIGLSKLPRVVEVFARRLQNQERLTSQITDFLEQALQAKGIGVVLEATHLCMQARGVEKQNTIVTTSSFRGLFKSNSNTRSEFLSVCFNR

SEQ ID NO: 6230 - protein, 275 aa, unidentified
  source 1..275: note = Kinetoplastibacterium galatii
  REGION 1..275: note = tr|M1M1C6|M1M1C6_9PROT GTP cyclohydrolase FolE2; OS = Candidatus Kinetoplastibacterium galatii TCC219; OX = 1208921 GN=folE2 PE=3 SV=1
MKTIKSNLENISEIPDIQDLVDTRCIPINRVGVHNVRFPITILDKNNNIQHTIANWTMTVSLPANKKGTHMSRFLVLLEKFKGKLMNLSSFSEMNADMLYLLNSENGDISASFPFFLEKKAPVSNVASLMNYDVQINISTCNNKTELEIVITVPVTSLCPCSKAISEYGAHNQRSNITLSVTSNKILSLHIEDLINLVEKEASCELWSILKRPDEKYVTEYAYNNPKFVEDLVRDLAFRIDTVFPNISKYRIEAENFESIHNHSAYAVIEKTINN

SEQ ID NO: 6231 - protein, 272 aa, unidentified
  source 1..272: note = Kinetoplastibacterium desouzaii
  REGION 1..272: note = tr|M1LUE7|M1LUE7_9PROT GTP cyclohydrolase FolE2; OS = Candidatus Kinetoplastibacterium desouzaii TCC079E; OX = 1208919 GN=folE2 PE=3 SV=1
MTINTLNPDSTIPDIQSLSDKRHIPIKRVGIRNLCLPAIISDLDSKTQNTTANWTMTVSLSEKDKGTHMSRFITLLEQYRLKILTPELLHQMALEMLDLLQSNSGDISLSFPFFMEKTAPVSKVKSLMNYQVEFIVRVNKESKDEFELILQIPVTSLCPCSKAISTYGAHNQRSNITLSIIFKEISDISISKFIRFAEEESSCELWSLLKRPDEKYVTEYAYDHPKFVEDLIRDLASRIDKNLINISKYKIEAENFESIHNHSAYAVIEKSV

SEQ ID NO: 6232 - protein, 201 aa, unidentified
  source 1..201: note = Kryptonium thompsoni
  REGION 1..201: note = tr|A0A0N7MSR5|A0A0N7MSR5_9BACT GTP cyclohydrolase 1; OS = Candidatus Kryptonium thompsoni OX=1633631 GN=folE PE=3; SV = 1
MGENRKEQIVQNRLDIEKIADLIRELLIEIGEDPEREGLKRTPIRVAEAFEYFTKGYREEIEKVLNGAIFNEKYNEMVVVKNIDFFSLCEHHLLPFYGKVHIAYIPNGKIVGLSKIPRIVEVFSRRLQVQERLTQQIADTLNEYLNPKGVAVVIEARHLCMIMRGVEKQNSVATTSAMHGVFVEDAKTRDEFMHLISQDLT

SEQ ID NO: 6233 - protein, 211 aa, unidentified
  source 1..211: note = Lambdaproteobacteria bacterium
  REGION 1..211: note = tr|A0A1F6GQD6|A0A1F6GQD6_9PROT GTP cyclohydrolase 1; OS = Candidatus Lambdaproteobacteria bacterium RIFOXYD2_FULL_56_26 OX=1817773 GN=folE PE=3 SV=1
MWPIGRQSFPDGLLAEKENFMTQVSREQALEAVRTLIRYIGDDPNREGLLETPDRVVRSYAELFKGYKLEPSKILDKKFTTHSGEMVVLSNIELYSTCEHHMMPFIGKCHIAYLPNEKVVGLSKLARLMEVYSRRLQIQEEMTWQIAQALNQETGARGVAVLVEARHMCMSARGVNKQHSIMSTTAMLGDFKDNPTLKSEFMAQIEKSRLL

SEQ ID NO: 6234 - protein, 193 aa, unidentified
  source 1..193: note = Lambdaproteobacteria bacterium
  REGION 1..193: note = tr|A0A1F6GFT5|A0A1F6GFT5_9PROT GTP cyclohydrolase 1; OS = Candidatus Lambdaproteobacteria bacterium RIFOXYD2_FULL_50_16 OX=1817772 GN=folE PE=3 SV=1
MNPVSAEEAKEAIKTLIRFIGDDPEREGLLETPERVIRAYEEIFKGYKLDPAEILEKKFSTHSGELVVLSNIELYSTCEHHMMPFIGKCHIGYLPKDHVVGISKLARLMEIYSRRLQIQEEMTWQIAQALEHETQARGVAVLVEARHLCISSRGIGKQHSVMTTIATIGEFQENQNAKADFIHIIEQQRLSSL

SEQ ID NO: 6235 - protein, 187 aa, unidentified
  source 1..187: note = Latescibacteria bacterium
  REGION 1..187: note = tr|A0A496SC37|A0A496SC37_9BACT GTP cyclohydrolase 1; OS = Candidatus Latescibacteria bacterium OX=2053570 GN=folE; PE = 3 SV=1
MDLEKIEQGVRLILEGIGDDPDREGLVDTPRRVAQMYRELFCGLEADPIETLKVYITENRDEMILVKDIPFYSMCEHHLLPFFGKVHIAYIPDGNRVTGFSHLVRVVENFARRPQLQERMTTEIAETIMRVLKPKGVLVVVEAEQMCLTMRGVQKPGSKTLTSAMRGIMRQEATRLEAFSMIMGGRR

SEQ ID NO: 6236 - protein, 166 aa, unidentified
  source 1..166: note = Latescibacteria bacterium
  REGION 1..166: note = tr|A0A3D5FTX5|A0A3D5FTX5_9BACT GTP cyclohydrolase 1 (Fragment) OS=Candidatus Latescibacteria bacterium; OX = 2053570 GN=folE PE=3 SV=1
MQGRHRQERDVVEEHFSRLIESVGEDPTREGLRGTPARAARAFEYFTQGYEQDPADVVGEAIFTSEMDEMVIVRDIELYSLCEHHLLPFLGRCHIGYLPKGKVIGLSKVARVVDVFARRLQIQENLTAEIAQSLSDLIEPAGVGVVIEARHMCMMMRGVQKQNSEM

SEQ ID NO: 6237 - protein, 256 aa, unidentified
  source 1..256: note = Levybacteria bacterium
  REGION 1..256: note = tr|A0A2M8FCC4|A0A2M8FCC4_9BACT GTP cyclohydrolase FolE2 OS=Candidatus Levybacteria bacterium CG_4_9_14_0_2_um_filter_35_21 OX=1974627 GN=folE2 PE=3 SV=1
MKDIQSEFDTRGLPLDMVGITGISLPLLISGKKNSVQPVSAVISFYASLASDIKGHHMSRFVEILYENSGKRITLNRLKFITSQAKRRLDVENAYLEVSFNYFMKKKAPVTGKIGYLDYRCIVLTKVNSGDDEQVLTVEVPIMLLCPCSKAISKYNAHNQRAIAKVKVVLRKKLWIEDIITLIEKQGSCEVYPVLKRPDEKYVTEKSYENAKFVEDIVRDIANVFSQKKNIVSFSVECESQESIHNHNAFAKYISL

SEQ ID NO: 6238 - protein, 195 aa, unidentified
  source 1..195: note = Liberibacter solanacearum
  REGION 1..195: note = tr|A0A0F4VJA5|A0A0F4VJA5_9RHIZ GTP cyclohydrolase 1; OS = Candidatus Liberibacter solanacearum OX=556287 GN=folE; PE = 3 SV=1
MKSKNPTAEEAKEAIRVILRWIGDDPEREGLKDTPERVIKSYKELFSGYEQDFIVQDTSRFYFGEVSNYGDMVLIKDISFFSYCEHHILPIFGKIHLAYIPKKRVIGLSKLIRILEIYSRRLQIQERLTMQIANEIGNVADSKGVAVLIEGQHMCMSMRGIRREGLTTVTTSFTGEFNSNKENKDIFIRMINNKR

SEQ ID NO: 6239 - protein, 193 aa, unidentified
  source 1..193: note = Liberibacter africanus
  REGION 1..193: note = tr|A0A0G3I9H3|A0A0G3I9H3_LIBAF GTP cyclohydrolase 1; OS = Candidatus Liberibacter africanus PTSAPSY OX=1277257; GN = folE PE=3 SV=1
MKKNPTAEEAKEAIRTILRWIGDDPDREGLKDTPERVIRSYQELFAGYKQDPVIQDTSRFHFGEVSNYKGMVLIKDISFFSYCEHHILPIWGRIHLAYIPKNNVIGLSKLIRILEIYSRRLQIQERLTMQIAHAIDQSTDSKGAAVLIEGQHMCMSMRGIKRDGLTTVTTSFTGDFSKDQQKTDFFLTAINKR

SEQ ID NO: 6240 - protein, 272 aa, unidentified
  source 1..272: note = Lindowbacteria bacterium
  REGION 1..272: note = tr|A0A1F6LJ07|A0A1F6LJ07_9BACT GTP cyclohydrolase FolE2 OS=Candidatus Lindowbacteria bacterium RIFCSPLOWO2_12_FULL_62_27 OX=1817870 GN=folE2 PE=3 SV=1
MSDSSKIEDVQGQADQRGVMIEQVGISEVKLPMVVQDRERGRQQVTATIRISASLSPAERGTHMSRFVELLDRFKSRPLNPEILEVLLESVVDRLGAERSYLDVSFLYFRTKRSPLTAEPALMGYACRLGGDCEKNGEKKFRKIVEADVPILTLCPCSKAISEFGAHNQRTQVKAAVEMAETIWIEELIDLVESEGSSEVYPLLKRPDEKFVTEASYRNPKFVEDVVRDIALKFDADPRVASYRIECESLESIHSHNAYAIISSGPFPCYWR

SEQ ID NO: 6241 - protein, 205 aa, unidentified
  source 1..205: note = Lumbricidophila eiseniae
  REGION 1..205: note = tr|A0A2A6FQQ8|A0A2A6FQQ8_9MICO GTP cyclohydrolase 1; OS = Candidatus Lumbricidophila eiseniae OX=1969409 GN=folE; PE = 3 SV=1
MTAVDAQRIEQAVREILLAIGEDPTRPGLTDTPRRVAVAYADFFGGLATDPYSHLGDAVPVGMAEDGNPATSDTVIVRNIEFRSVCEHHLLPFVGTAHVAYVPGDRVVGLGRIPAVVDTLARRPQLQERLTEEIADALTTGLNPVGSLVVLEAQHRCVTTRGARQSQSSTVTLAARGSLRESGARAEIIALIRAPNGGRLGGVNL

SEQ ID NO: 6242 - protein, 276 aa, unidentified
  source 1..276: note = Macondimonas diazotrophica
  REGION 1..276: note = tr|A0A4Z0F7X5|A0A4Z0F7X5_9GAMM GTP cyclohydrolase FolE2 OS=Candidatus Macondimonas diazotrophica OX=2305248; GN = folE2 PE=3 SV=1
MKVPGQVASIITDIADVQGSADHRRIAIDRVGIRSIRHPLRVADRSGGVQHTVARLNMYVSLPHHQKGTHMSRFVAILGEHDDVLTVHSLNMLMQRMTSRLEADSGHLEIAFPYFVDKSAPVSGVRSLMDYEVTLTGVSTPAGGAQTLVRVVVPVTSLCPCSKEISDYGAHNQRSHVTVEVRCQGDVWIEDLVDLVETEASAQLYGLLKRPDEKFVTERAYDNPKFVEDMVRDVAVRLDADERVLAYTVESENFESIHNHSAYAVVERVKDIQDPA

SEQ ID NO: 6243 - protein, 185 aa, unidentified
  source 1..185: note = Magnetobacterium bavaricum
  REGION 1..185: note = tr|A0A0F3GX53|A0A0F3GX53_9BACT GTP cyclohydrolase 1; OS = Candidatus Magnetobacterium bavaricum OX=29290 GN=folE; PE = 3 SV=1
MDTEKIKRGVELILEGIGENPQRPGLQRTPHRVAAMYKEILSGMATPEEELLRPIEGENYDEMVILKDITFYSMCEHHMLPFFGTANIAYIPNGGKIVGIGELAKALDLMAKRLQVQERLTTQLADLIMDCLRPRGTMVVIEAEHLCLSMRGLKKQGAKVITSAVRGIFRTRKSTRDEILSLIRQ

SEQ ID NO: 6244 - protein, 180 aa, unidentified
  source 1..180: note = Magnetoglobus multicellularis
  REGION 1..180: note = tr|A0A1V1PDS2|A0A1V1PDS2_9DELT GTP cyclohydrolase 1; OS = Candidatus Magnetoglobus multicellularis str. Araruama; OX = 890399 GN=folE PE=3 SV=1
MNKQERLIAEILKYIGEDPNREGLLETPARVVKSWSELYSGYKQNPDNVFKCFEKIDADDNGIISLKKINFYSMCEHHMLPFTGEVDIGYIPNGKVVGISKLARVVDIFSKRLQVQERMTYQIAESIFKGVKPKGVIVVTRGQHFCTTARGIKKSHTIMTTTATKGVFNDMEKKLEFLQT

SEQ ID NO: 6245 - protein, 264 aa, unidentified
  source 1..264: note = Magnetoglobus multicellularis
  REGION 1..264: note = tr|A0A1V1PDW7|A0A1V1PDW7_9DELT GTP cyclohydrolase FolE2 OS=Candidatus Magnetoglobus multicellularis str. Araruama OX=890399 GN=folE2 PE=3 SV=1
MKDVQNEPDVRNMPINKVGIKDLRYPITVLDRQKSVQHTVATINMYVDLPHQYKGTHMSRFVEMLHVLEPEISVRRVSKILEAMMKYLQANSAHIEICFPYFIEKVAPVSSIRGLMDYDCRFIGSSYANNETDIVTEVRIPITSVCPCSKEISAYGAHNQRGEVTVAIRFNKFIWIEDLIEMVEKCASCDLYSVLKRVDEKYVTEYAYHNPKFVEDIVRDVALKLKNNADVKWFSVSAENFESIHHHSAYAQITSNGTPMFFGR

SEQ ID NO: 6246 - protein, 263 aa, unidentified
  source 1..263: note = Magnetomorum sp.
  REGION 1..263: note = tr|A0A0M9ECM9|A0A0M9ECM9_9DELT GTP cyclohydrolase FolE2 OS=Candidatus Magnetomorum sp. HK-1 OX=1509431; GN = folE2 PE=3 SV=1
MKDVQNELDNRNMPINKVGIKDLRYPLTVLDRQKSVQHTIATINMYVDLPHQYKGTHMSRFVEMLHVLQPEISVKRVEKILDKMMEYLQADSAHIEINFPYFIEKTAPVSDSKGFMDYDCRFLGSSYKKGETDIITEIHVPISSVCPCSKEISDYGAHNQRGEVSLSIRFNKFIWIEDLIELVEKCASCDVYSVLKRVDEKYVTEYAYQNPKFVEDIVRDVALELKKNNDIKWFSVSAENFESIHHHSAYAQITSDNTHFSRK

SEQ ID NO: 6247 - protein, 276 aa, unidentified
  source 1..276: note = Magnetoovum chiemensis
  REGION 1..276: note = tr|A0A0F2J472|A0A0F2J472_9BACT GTP cyclohydrolase FolE2 OS=Candidatus Magnetoovum chiemensis OX=1609970; GN = folE2 PE=3 SV=1
MNTRDKGLENAVATNPIDQAIPDVQSTIDTRHIAIQSVGIRSVKYPVLIELQGQKPMPSVAEFEMTVFLPADQKGTHMSRFIALLEEAQGTVLTVSGFRAMLVEMLQRLDAPSGRIKMELPYFLSKVAPISGVSSLMDYQLTLEGSATATGQDIYLTVVVPVTSLCPCSKKISEYGAHNQRSHVTARVQLKEDVDIAQFISAIEQQASCELYGLLKRPDEKYVTERAYDNPKFVEDLVRDVAIAMNKFSQVGQYTVEAENFESIHNHSAYARIDRA

SEQ ID NO: 6248 - protein, 188 aa, unidentified
  source 1..188: note = Magnetoovum chiemensis
  REGION 1..188: note = tr|A0A0F2J259|A0A0F2J259_9BACT GTP cyclohydrolase 1; OS = Candidatus Magnetoovum chiemensis OX=1609970 GN=folE; PE = 3 SV=1
MDKEKIQKGIRLVLEGLGENPDRAGLKNTPYRVASMYEEILSGLETSTEEILKPIEGENHDEMVILKDITFYSMCEHHLLPFFGIANIAYIPSEGKIVGIGELAKALDALAKRPQVQERLTTELADLIMNNLKPKGAMVIIEAEHLCLSMRGLRKQGSKTVTSAVRGLFRTKQSTRQEMLSLIKNRNI

SEQ ID NO: 6249 - protein, 190 aa, unidentified
  source 1..190: note = Margulisbacteria bacterium
  REGION 1..190: note = tr|A0A1F6QMN4|A0A1F6QMN4_9BACT GTP cyclohydrolase 1; OS = Candidatus Margulisbacteria bacterium GWE2_39_32; OX = 1817872 GN=folE PE=3 SV=1
MPRNNERIEMLVKELLTELGEDTNREGIVRTPNRLAKSLKFLTSGYSVDMKKLINNAIFTQEVDSMIIIKDIELYSLCEHHLLPFYGRCHIGYLPNGKVIGASKLARIVDTYSRRLQIQEHLTEQISNAIKDAIGAAGVGVMIEARHLCMMMRGVQKQNSMLVTSSLLGSFRDHPATRQEFLSLIGKTQQ

SEQ ID NO: 6250 - protein, 186 aa, unidentified
  source 1..186: note = Margulisbacteria bacterium
  REGION 1..186: note = tr|A0A2W4HZW8|A0A2W4HZW8_9BACT GTP cyclohydrolase 1; OS = Candidatus Margulisbacteria bacterium OX=2053573; GN = folE PE=3 SV=1
MNIDRHRIENAVKEILAAIGEDVNRPELLDTPARVACMYEEVFSCTRKDLHDTVSVILEPHGEQMIVVKDITFYSMCEHHLVPFFGKAHIVYIPKENRITGFSKLCTLVESAAKRPQLQERMTTQIADVLMNVLEPQGVMVVIEAEHLCMSMRGVKKPGTKTTTSAIRGLFYEDASARAEALTLIK

SEQ ID NO: 6251 - protein, 191 aa, unidentified
  source 1..191: note = Marinamargulisbacteria bacterium
  REGION 1..191: note = tr|A0A328QWC2|A0A328QWC2_9BACT GTP cyclohydrolase 1; OS = Candidatus Marinamargulisbacteria bacterium SCGC AG-343-K17 OX=2184341 GN=folE PE=3 SV=1
MTEKPSLEDALAAVEILIRYAGDNPNREGLKETPKRVVKSYEEFFSGYAKNPDEILAKTFEEVEGYDEMVIVKNIDLESHCEHHMVPILGVAHVAYIPNNRVVGISKLARIVDVYAKRLQTQETMTAQIADTISRVLEPKGVAVVIDAAHQCMSTRGVHKRHSSTVTSRMLGLFRSDPRTRSEFMDLIKSS

SEQ ID NO: 6252 - protein, 191 aa, unidentified
  source 1..191: note = Marinamargulisbacteria bacterium
  REGION 1..191: note = tr|A0A328RC99|A0A328RC99_9BACT GTP cyclohydrolase 1; OS = Candidatus Marinamargulisbacteria bacterium SCGC AG-414-C22 OX=2184344 GN=folE PE=3 SV=1
MCNQTKAIPEMVDLYHKILNLINEDVTREGLVKTPERAAQTFSYLTKGYTENLQDILNGAIFDSDNDGMILVKDIELYSLCEHHLVPFFGKCHIAYIPNGKIIGLSKVARVVDLYARRLQVQENLTKEIADAIQEATQALGVAVVIEARHLCMMMRGVQKQNSRMKTSSMLGSFRKNAATRAEFLSLINDN

SEQ ID NO: 6253 - protein, 189 aa, unidentified
  source 1..189: note = Marinimicrobia bacterium
  REGION 1..189: note = tr|A0A2E5UR88|A0A2E5UR88_9BACT GTP cyclohydrolase 1; OS = Candidatus Marinimicrobia bacterium OX=2026760 GN=folE; PE = 3 SV=1
MINEKIKKATKILLEEIGENPNREGLLNTPLRVAKAWDFLSSGYRQDIEKIINNAVFEETYDQMVTVQDIEFFSMCEHHLLPFFGVAHVAYIPDGKIIGLSKIPRIVDMFSRRLQVQERMTKEIATMLQNTLKPKGVAVIIEGQHMCMQMRGVQKKKSYMSTSSMVGIFREDNKTRKEFLDIIKMPKQF

SEQ ID NO: 6254 - protein, 189 aa, unidentified
  source 1..189: note = Marinimicrobia bacterium
  REGION 1..189: note = tr|A0A4Y8I9P6|A0A4Y8I9P6_9BACT GTP cyclohydrolase 1; OS = Candidatus Marinimicrobia bacterium MT.SAG.3 OX=2552982; GN = folE PE=3 SV=1
MAKSLKDFETVENLIKELLLKLGEDPDREGLLKTPSRVAKSLNYLTKGYNESVEEVVNGALFYEDLDEMVIIRDIDIFSMCEHHMLPFFGKCHVAYLPNKKIIGLSKIPRIVEIFARRLQVQERLTTQIADAINNSVNPHGVAVTIEATHLCTVMRGVEKQNTVAITSSMLGKFKTDSKSRSEFLSMIK

SEQ ID NO: 6255 - protein, 267 aa, unidentified
  source 1..267: note = Melainabacteria bacterium
  REGION 1..267: note = tr|A0A1F6RA01|A0A1F6RA01_9BACT GTP cyclohydrolase FolE2 OS=Candidatus Melainabacteria bacterium RIFOXYA2_FULL_32_9 OX=1801611 GN=folE2 PE=3 SV=1
MVRSKLKDVQNQKDHRGIDIQKVGVRNVEVPLNILRKNDKEQIVSAKATMSVSLPKDYKGTHMSRFIEILSEWGQRNLLGVDLKGCLVEITDKLDAESAELKFNFKYFIDKRAPVSELVCPMGYDCSFEGILKNKEDYTFILGVNVPVTTLCPCSKEISEYGAHNQRTFVKVRISYDVNSIVWIEDLVELIEKCGSSPVYPLLKREDEKFVTELAYNNPKFVEDVLRDVVSKIKNIKEIHWFEVDCEAHESIHNHSAWAYQEEFVAS

SEQ ID NO: 6256 - protein, 220 aa, unidentified
  source 1..220: note = Melainabacteria bacterium
  REGION 1..220: note = tr|A0A2W4I4B1|A0A2W4I4B1_9BACT GTP cyclohydrolase 1; OS = Candidatus Melainabacteria bacterium OX=2052166 GN=folE; PE = 3 SV=1
MEATVTVLPCTLRRKPEDSPATKFASAVPEGSLAREVDLAKIETAVEMILEAIGENPKRAGLIDTPQRVARLYQELCYSTGIDAASEISCKFQEETEGLVLVKDIEFTSLCEHHLVPFTGRAHVAYLPTNGVITGLSKLARVVELTARRLQVQERMTEEIADAVAKGIDAQAVCVWVEAEHMCMSIRGIKKPGAKTVTTAFRGLFKEDQAMRSEVLSYLK

SEQ ID NO: 6257 - protein, 184 aa, unidentified
  source 1..184: note = Methylomirabilis oxyfera
  REGION 1..184: note = tr|D5ML96|D5ML96_9BACT GTP cyclohydrolase 1; OS = Candidatus Methylomirabilis oxyfera OX=671143 GN=folE; PE = 3 SV=1
MIERLVRDLLKEIGEDPDREGLVKTPERVERMFAFLTSGYDKQVNNVLNEAVFQDNYDEIVLVKDIDFFSLCEHHLLPFFGKCHVGYLPDGRIVGLSKLVRLVEMYSRRLQVQERLTSQIANALLEALRPKGVAVVMEAQHLCMMMRGVEKQNSKAVTSSMHGVFRERIESRNEFMQLIRSHAT

SEQ ID NO: 6258 - protein, 184 aa, unidentified
  source 1..184: note = Methylomirabilis lanthanidiphila
  REGION 1..184: note = tr|A0A564ZNS7|A0A564ZNS7_9BACT GTP cyclohydrolase 1; OS = Candidatus Methylomirabilis lanthanidiphila OX=2211376; GN = folE PE=3 SV=1
MIDRLVRDLLKEIGEDPDREGLIKTPERVERMYGFLTSGYSKQVEQVLNEAVFQDNYDEIVLVKDIDFFSLCEHHLLPFFGKCHVGYLPDGRIVGLSKLVRLVEMYSRRLQVQERLTSEIANALLDALRPRGVAVVMEAYHLCMMMRGVEKQNCKAVTSSMHGIFRERIESRNEFMQLIRSHAT

SEQ ID NO: 6259 - protein, 263 aa, unidentified
  source 1..263: note = Methylopumilus rimovensis
  REGION 1..263: note = tr|A0A5B8DIR6|A0A5B8DIR6_9PROT GTP cyclohydrolase FolE2 OS=Candidatus Methylopumilus rimovensis OX=2588535; GN = folE2 PE=3 SV=1
MTTSKHTCPIEDVQNTPDLRSLDIDKVGIKSIRHPVLVKDKTGGAQHTVATFNMYVYLPHNFKGTHMSRFVEILNMNEREISVESFENILREMMERLEAKSCDVEMTFPYFINKTAPISGVKSLLDYDVSFIGKIIDGKFKNTIKVIVPVTSLCPCSKKISDYGAHNQRSHVTVTAEINKFIWIEELIELIEKQASCELYGLLKRPDEKFVTEKAYDNPKFVEDMVRDVAAQLKLEKRIDHFVVESENFESIHNHSAYALIEG

SEQ ID NO: 6260 - protein, 263 aa, unidentified
  source 1..263: note = Methylopumilus universalis
  REGION 1..263: note = tr|A0A5B8CYT0|A0A5B8CYT0_9PROT GTP cyclohydrolase FolE2 OS=Candidatus Methylopumilus universalis OX=2588536; GN = folE2 PE=3 SV=1
MTTSDHICPIEDVQNSPDLRSLDIDKVGIKSIKHPVLVKDKTGGAQHTIATFNMYVYLPHNFKGTHMSRFVEILNMNEREISVESFENILREMIKRLESKSCDVEMTFPYFINKTAPVSGVKSLLDYEVSFIGKIVDGKFKNTIKVVVPVTSLCPCSKKISDYGAHNQRSHVTVTAEINKFIWVEEIIELIEKQASSELYGLLKRPDEKYVTEKAYDNPKFVEDMVRDVAAQLKLEKRVDHFIVESENFESIHNHSAYALIEG

SEQ ID NO: 6261 - protein, 180 aa, unidentified
  source 1..180: note = Methyloumidiphilus alinensis
  REGION 1..180: note = tr|A0A2W4S520|A0A2W4S520_9GAMM GTP cyclohydrolase 1; OS = Candidatus Methyloumidiphilus alinensis OX=2202197; GN = folE PE=3 SV=1
MEKQFSQLIQAIGEDITREGLVDTPKRAAAAFRFLNNGYHKSLENVLNNAIFESDTEDMVIVKDIELYSLCEHHLLPFIGKCHVAYLPTGKVLGLSKIARIVDMYARRLQIQERLTKQIADAIQVAVNPRGVAVVIEAKHLCMMMRGVEKQNSVMTTSSMLGLFRENISTRSEFLNLIKR

SEQ ID NO: 6262 - protein, 265 aa, unidentified
  source 1..265: note = Methyloumidiphilus alinensis
  REGION 1..265: note = tr|A0A2W4TC18|A0A2W4TC18_9GAMM GTP cyclohydrolase FolE2 OS=Candidatus Methyloumidiphilus alinensis; OX = 2202197 GN=folE2 PE=3 SV=1
MSVHSANKTIEDVQNSEDTRRIDIDRVGIKSIRHPVLFRQRDGELQATVAMFDMTVNLSHEQKGTHMSRFVEILNEELGELDIRTFPQVISDMASRLEADHAYIETHFPLFIRKKAPVTSVPSLLDYEVTLTGEWIAGLSKLWLKVVVPVTSLCPCSKKISDYGAHNQRSHVTLTVQPRELLWVEDLIDLIERQASSQIYGLLKRADEKYVTERAYNNPKFVEDIVRDIANDLNQNKAILYYKLETENFESIHNHSAYAIIERFK

SEQ ID NO: 6263 - protein, 187 aa, unidentified
  source 1..187: note = Microgenomates bacterium
  REGION 1..187: note = tr|A0A3A4ZKQ7|A0A3A4ZKQ7_9BACT GTP cyclohydrolase 1; OS = Candidatus Microgenomates bacterium OX=2093373 GN=folE; PE = 3 SV=1
MPWEKQSPEDIATSLLKFIGEDPTRQGLEKTPDRFMKAWKQWTAGYEQQVEDVLTVFDDGAENYDEMVTLKDIPIYSHCEHHLAPFFGKAVVSYIPNGRILGLSKIVRIVNIFAQRLQVQERLTSQIADALSSHLQARGVAVHLECRHLCMESRGVQRSGAVTITSAMRGMFRTNPATRAEFLALLK

SEQ ID NO: 6264 - protein, 210 aa, unidentified
  source 1..210: note = Micropelagos thuwalensis
  REGION 1..210: note = tr|U2WRA3|U2WRA3_9PROT GTP cyclohydrolase 1; OS = Candidatus Micropelagos thuwalensis OX=1397666 GN=folE; PE = 3 SV=1
MDVRVNDSKNVNDVENERDVKVAKPSRETAEEAVRTLIAWAGDNPDREGLIDTPKRVVNAYQEFFAGYEEDPEEVLGRTFEDVEGYDDMVMLRDIDLESHCEHHMVAILGKVHIAYMPVERVVGISKLARVIEIYAKRLQTQETMTAQIVDCIQRVLEPAGVALLVDAKHQCMTTRGIKKPDVATITTRFTGVFANDPRMEARFLAMINN

SEQ ID NO: 6265 - protein, 257 aa, unidentified
  source 1..257: note = Micropelagos thuwalensis
  REGION 1..257: note = tr|U2WU24|U2WU24_9PROT GTP cyclohydrolase 1 protein; OS = Candidatus Micropelagos thuwalensis OX=1397666 GN=folE; PE = 4 SV=1
MKSFLPNFHAVIFGSGGGIGAAMASRLTELPSCTRLTLMGRNISKIEENVNAIGDTDIQMLQADICDEDSIASVAAQLGEHINDDAPVQLFVNASGILHDEENDLQPERSIRHLSNEAFQKVFAINSFGPALLIKHFLPFMPRDQRSVFASLSARVGSISDNKIGGWYAYRASKAAHNMLIKTASLEARMKYKQAVIVGLHPGTVATNLSAPFRGNVSPEKLFSPSQSADYLLDVMDNLTPAQSGAVFAWDGQEIPA

SEQ ID NO: 6266 - protein, 210 aa, unidentified
  source 1..210: note = Microthrix parvicella
  REGION 1..210: note = tr|A0A359A1D6|A0A359A1D6_9ACTN GTP cyclohydrolase 1; OS = Candidatus Microthrix parvicella OX=41950 GN=folE PE=3; SV = 1
MIDDHTTSPGPLEVPDPETAPGPTSVDLPRVEAAVRELLDAIGEDAERNGLLDTPARVARMYAEVCGGLHEDPRRHLRTTFDADHDEMIMVRDIAFHSLCEHHLVPFFGRAHVAYIPNEEGRITGLSKLARLTLGYARRPQVQERLTTQIAEGIEEVLAPRGVLVVVEAEHLCMAMRGVRSPGATTVTSAVRGLFRTDVAARAEAMGLIG

SEQ ID NO: 6267 - protein, 210 aa, unidentified; identical to SEQ ID NO: 6266
  source 1..210: note = Microthrix parvicella
  REGION 1..210: note = tr|R4YWJ3|R4YWJ3_9ACTN GTP cyclohydrolase 1; OS = Candidatus Microthrix parvicella RN1 OX=1229780; GN = folEA PE=3 SV=1

SEQ ID NO: 6268 - protein, 328 aa, unidentified
  source 1..328: note = Moanabacter tarae
  REGION 1..328: note = tr|A0A2Z4AFV6|A0A2Z4AFV6_9BACT GTP cyclohydrolase FolE2 OS=Candidatus Moanabacter tarae OX=2200854 GN=folE2; PE = 4 SV=1
MRMSEDKELISDLDRAGRPKSLDHQYDDGFTVSRPYRESLPDVQNRTGVEIHGDGVPIIEVGISNFHLPLKVLTAQNESIDLEAAVTGTVSLGSDRKGVNMSRIIRTFYEFKDRVFTLELLEEILLRYKETLESSRARLTVRFSYPIYQESLRSGLGGYLYYDVDYEGIIDDLDRFRKRMHLDFIYSSVCPNSAELAEHARNMRGKYALPHAQRSKARVSVEVRSGALVTIENIREKCLEALRTEVQSMVKREDEQAFAELNGSFPKFVEDAVRLLHEKFNVDKRIIDFQIACVHLESLHAHDAVAVINKGVSGGFSGSVEDFRRFVC

SEQ ID NO: 6269 - protein, 280 aa, unidentified
  source 1..280: note = Muproteobacteria bacterium
  REGION 1..280: note = tr|A0A1F6TIK4|A0A1F6TIK4_9PROT GTP cyclohydrolase FolE2 OS=Candidatus Muproteobacteria bacterium RBG_16_64_11 OX=1817758 GN=folE2 PE=3 SV=1
MPETANATSKSRGPRLDPIADVQNKPDTRHIAIDKVGIKDIRHPVLVKDRSQGVQHTIANFNMYVELPHNFKGTHMSRFVEILNAYDMEISVESFKDMLAEMRKRLEAEIGHIEMSFPYFIDKAAPVSGVKSLMDYQVRFSGQIDGDRTVMTIKVVVPVTSLCPCSKEISEYGAHNQRSHVTLAVRTNTFVWIEDLIDIVEKQASCELFGLLKRPDEKYVTERAYENPKFVEDMVRDVAAQLNADDRIDAYVVESENFESIHNHSAYAMIKLDKTAPVAR

SEQ ID NO: 6270 - protein, 278 aa, unidentified
  source 1..278: note = Muproteobacteria bacterium
  REGION 1..278: note = tr|A0A1F6TGS8|A0A1F6TGS8_9PROT GTP cyclohydrolase FolE2 OS=Candidatus Muproteobacteria bacterium RBG_16_65_31 OX=1817759 GN=folE2 PE=3 SV=1
MTPKGKAQSLPIADVQNSPDTRHLPIDKVGIKDIRHPVRVKDRSQGEQHTVANFNMYVELPHNFKGTHMSRFVEILNNYEPEISVESFKDMLAELSERLEAETGHIEMSFPYFINKAAPVTGVKSLMDYQVSFIGKISGGKYLMTIKVIVPVTSLCPCSREISRFGAHNQRSHVTLTVRTNTFVWVEDLIDIVEKQASSELYGLLKRPDEKFVTEKAYENPKFVEDMVRDVAAVLNADDRIEAYTVESENFESIHNHSAYAMIQRDKAGERAGQGSSE

SEQ ID NO: 6271 - protein, 206 aa, unidentified
  source 1..206: note = Nanopelagicus abundans
  REGION 1..206: note = tr|A0A249L2Q2|A0A249L2Q2_9ACTN GTP cyclohydrolase 1; OS = Candidatus Nanopelagicus abundans OX=1884916 GN=folE; PE = 3 SV=1
MSEVNSVSMGPNDGGAKQEFDQVRAEKAVTELLHALGEDPNRDGLKDTPKRVAKALAENFAGLWQKPKDVLSTTFDIGHKELVIVREIEVFSHCEHHLTPFHGVAHIGYIPGESGKITGISKLARLVDMYSRRPQVQERLTSQIADALVEILQPGGVIVIIDCEHLCMSMRGVRKSQARTTTSAVRGQLLNPATRAEAISLINQSR

SEQ ID NO: 6272 - protein, 206 aa, unidentified
  source 1..206: note = Nanopelagicus hibericus
  REGION 1..206: note = tr|A0A249K7P9|A0A249K7P9_9ACTN GTP cyclohydrolase 1; OS = Candidatus Nanopelagicus hibericus OX=1884915 GN=folE; PE = 3 SV=1
MSDINSVSMGPHDGGAKKEFDQARAEKAVTELLHALGEDPTRDGLKDTPKRVAKALAENFAGLWLKPEDVLTTIFDIGHKELVIVREIEVFSHCEHHLTPFHGVAHIGYIPGESGRITGISKLARIVDLYARRPQVQERLTSQIADALVEILQPGGVIVIIDCEHLCMSMRGVRKSQARTTTSAVRGQLLNPTTRAEAISLINQSR

SEQ ID NO: 6273 - protein, 259 aa, unidentified
  source 1..259: note = Nasuia deltocephalinicola
  REGION 1..259: note = tr|A0A0S2UP97|A0A0S2UP97_9PROT GTP cyclohydrolase I type 2 OS=Candidatus Nasuia deltocephalinicola OX=1160784; GN = ASU29_090 PE=4 SV=1
MYSDIFFIKYNILNIININKIFINRVGIKNYYQPFIFDDNSNKLQKILGLWNIGNSVQNYKRGVHMSRFLYILNKFLNKIISLKLIFKFYKFFNINNSNDFFLQLSFIYFIKKISPISLNSGLMNYKITLFLKKNNIFKNFLLKLIVPINTLCPCSKSISLYNAHNQRSYVSIFILLKKNLNIYKLLYYIEKQSSISLWSFLKRVDEKYFTEYSYNNPKFIEDLTRSIYNKFKKFKFFLKLENLESIHNHNVYSFCKNF

SEQ ID NO: 6274 - protein, 262 aa, unidentified
  source 1..262: note = Nasuia deltocephalinicola
  REGION 1..262: note = tr|A0A286QUU9|A0A286QUU9_9PROT GTP cyclohydrolase I type 2 OS=Candidatus Nasuia deltocephalinicola OX=1160784; GN = CA212_081 PE=4 SV=1
MIYKNIFLKKKELNNILNIYRKSINNVGVNNLYYPFIFDSGNKLQKTIGIWNISLYLKKFKRGAHMSRIFFFLEKYKNIPLNIKLFLKIYKILMYKLESNDINIQVTFIYFIKKISPISKNISLMNYKLSFFFKRINIQNIFFLKIIIPVINLCPCSKNISYYNAHNQRSKVYVYLNIYKNININKTINYIENESSSEIWSLLKRNDEKYITEFSYNNPKFVEDIIRNILLKIKNNNLKSFLIKVENYESIHNHNVYSLIKY

SEQ ID NO: 6275 - protein, 191 aa, unidentified
  source 1..191: note = Neoehrlichia lotoris
  REGION 1..191: note = tr|A0A0F3NLF3|A0A0F3NLF3_9RICK GTP cyclohydrolase 1; OS = Candidatus Neoehrlichia lotoris str. RAC413 OX=1359163; GN = folE PE=3 SV=1
MTNKPSDYDAEMAVKMLISWIGDDPNREGLLNTPKRVLNFYKKMFKGYKCNLENVSVTSKLLNSCYSDLIILKNIDFTSYCEHHIVPIKGKISIGYLPDKLICGIGKIIELLNIFTKRLQIQENLTMQIAEYLNKLLLPKGIAVLIEATHECIACCEEYDKNNLTLQTNYMLGIFQDDLNIRKEFFNRIKI

SEQ ID NO: 6276 - protein, 174 aa, unidentified
  source 1..174: note = Nephrothrix sp.
  REGION 1..174: note = tr|A0A2B8A7N3|A0A2B8A7N3_9BACT GTP cyclohydrolase 1 (Fragment) OS=Candidatus Nephrothrix sp. EaCA OX=2044729; GN = CRN43_00395 PE=3 SV=1
IMEVLGLDLTDDSLQGTPRRVAEMYVNEVFSGLNPKNLPNTRLFENKYKYDQMLVEKDITFYSYCEHHFVPFYGKAHVAYFSSGKVIGLSKINRLVQFYARRPQVQERLTVQIGKELEKLLETAHVAVVVDANHLCVASRGVGDTNSKTGTAYFSGKFEENEFKKEFLNYVNHV

SEQ ID NO: 6277 - protein, 212 aa, unidentified
  source 1..212: note = Nitrosoglobus terrae
  REGION 1..212: note = tr|A0A1Q2SME4|A0A1Q2SME4_9GAMM GTP cyclohydrolase 1; OS = Candidatus Nitrosoglobus terrae OX=1630141 GN=folE PE=3; SV = 1
MDKKLTKPLSKDPYMDSLEMESDEPYNEELEASIRKMLIQLGEDPSREGLRRTPQRVAKAMDFLTSGYTMTVEEAVKDALFEDECEEMVIVKDVEFYSLCEHHMLPFFGRAHVGYLPKNRIVGLSKIARVIDVFARRLQVQERLTTQIANGLMSVLNARGVGVVLEACHFCMVMRGVQKQNSQTVTSAMLGTFRQDPRTRAEFMDLIRRSPY

SEQ ID NO: 6278 - protein, 261 aa, unidentified
  source 1..261: note = Nitrosoglobus terrae
  REGION 1..261: note = tr|A0A1Q2SLS8|A0A1Q2SLS8_9GAMM GTP cyclohydrolase FolE2 OS=Candidatus Nitrosoglobus terrae OX=1630141; GN = folE2 PE=3 SV=1
MEDVQAKADKRKIAINKVGIKGIRHPVRISDRSGERQHTVANFNMYVGLPHHLKGTHMSRFIEILNQQEWEITIQSFKKMLQEMTYYLQADSGYIEMDFPYFIAKQAPVSKIKSLMDYQVTFIGEANQNKQQVVIKIIVPVTSLCPCSKKISDYGAHNQRSHITVTARVKGFIWIEDIIDLVEEEASCEIYSLLKRPDEKYVTEQAYDNPKFVEDMVRDIAARLNPDDRILAYRVESENFESIHNHSAYAIIEQDKQLHVN

SEQ ID NO: 6279 - protein, 215 aa, unidentified
  source 1..215: note = Nitrospira inopinata
  REGION 1..215: note = tr|A0A0S4KRI1|A0A0S4KRI1_9BACT GTP cyclohydrolase 1; OS = Candidatus Nitrospira inopinata OX=1715989 GN=folE PE=3; SV = 1
MARRGKGKTVAETSEDVSGNGRPADVDALRSLVTRMLTALGEKPGRNGLLKTPERVAKALAFMTQGYQRDIDHLLNGALFPIQYDEMVIVKDIDFFSMCEHHLLPFFGKVHVGYLPNKKVVGLSKIPRIVDTFARRLQVQERLTVQIAETLNTKLHAKGVGVVVEARHLCMMMRGVEKQNTVAVTSSMLGEFRSQPQTRLEFLKLIQKTSVGDAD

SEQ ID NO: 6280 - protein, 215 aa, unidentified
  source 1..215: note = Nitrospira nitrificans
  REGION 1..215: note = tr|A0A0S4LAC2|A0A0S4LAC2_9BACT GTP cyclohydrolase 1; OS = Candidatus Nitrospira nitrificans OX=1742973 GN=folE; PE = 3 SV=1
MRKQQKRDKRRERVEDTSGSGKPADLPVLQSLVTEMLLALGERPGRNGLLKTPERVAKALAFMTQGYQRDIDHLLNGALFPIEYDEMVIVKDIDFFSMCEHHLLPFFGRVHVGYLPNKKVVGLSKIPRIVDTFARRLQVQERLTVQIAETLSNKLNAHGVGVVVEARHLCMMMRGVEKQNTVAVTSSMLGAFRSQSQTRVEFLKLIRHGRVSDPD

SEQ ID NO: 6281 - protein, 268 aa, unidentified
  source 1..268: note = Nitrotoga sp.
  REGION 1..268: note = tr|A0A3E1DAQ9|A0A3E1DAQ9_9PROT GTP cyclohydrolase FolE2 OS=Candidatus Nitrotoga sp. MKT OX=2184311 GN=folE2; PE = 3 SV=1
MNSPQAILIPDVQNMADTRHLAINKVGIKSIRHPVQVKDKNVGVQHTIATFNMYVHLPHNFKGTHMSRFVEILNHHGREISVESFESILCEMVEKLEAQSGYIEMSFPYFINKTAPVSGVQSLLDYDVTFIGEINNGKYRFTMKVLVPVTSLCPCSKKISERGAHNQRSHVTITVRTNRSVWIEDVVRYAEEQASCELYGLLKRPDEKFVTERAYDNPKFVEDMVRDVAAALNRDERIEAYVVESENFESIHNHSAYALIEWDKNVSN

SEQ ID NO: 6282 - protein, 268 aa, unidentified
  source 1..268: note = Nitrotoga sp.
  REGION 1..268: note = tr|A0A3E1DHP6|A0A3E1DHP6_9PROT GTP cyclohydrolase FolE2 OS=Candidatus Nitrotoga sp. SPKER OX=2184312; GN = folE2 PE=3 SV=1
MNSPQATLIPDVQNMADTRHLAINKVGIKSIRHPVQVKDKNAGVQHTVATFNMYVHLPHNFKGTHMSRFVEILNHHGREISVESFESILREMVEKLEAKSGHIEMSFPYFINKTAPVSSVQSLLDYDVTFIGEINNGQYRFTMKVVVPVTSLCPCSKKISERGAHNQRSHVTITVRTSRSVWIEEVVRYAEEQASCELYGLLKRPDEKFVTERAYDNPKFVEDMVRDVAAALNRDERIEAYVVESENFESIHNHSAYALIEWDRNVNN

SEQ ID NO: 6283 - protein, 187 aa, unidentified
  source 1..187: note = Nomurabacteria bacterium
  REGION 1..187: note = tr|A0A0G1FHT2|A0A0G1FHT2_9BACT GTP cyclohydrolase 1; OS = Candidatus Nomurabacteria bacterium GW2011_GWF2_43_8; OX = 1618779 GN=folE PE=3 SV=1
MSRKNKEQIVRDMLMAIGENPNRQGLKNTPKRITRMWEEIFSGYDKKNKPSITVFPNKTDGVEYNQMIIDTGYFYSHCEHHGVPFFGKYYFAYIPNKKIMGLSKVSRTIDYFSSRLQIQERLVKDVVDEIEKVVQPKGVALVMKARHLCKEMRGVKKIDGEMTTSDVRGAFRKNALTRNEFMSLIGL

SEQ ID NO: 6284 - protein, 185 aa, unidentified
  source 1..185: note = Omnitrophica bacterium
  REGION 1..185: note = tr|A0A351I6G6|A0A351I6G6_9BACT GTP cyclohydrolase 1; OS = Candidatus Omnitrophica bacterium OX=2035772 GN=folE; PE = 3 SV=1
MDKSKIQKAVRMILEAVGENADRPDLKKTPERVAEMYAEIFSGISKDPARELEVLLTEKHDEMVLLKDIPLYSICEHHLLPFIGKAHIAYIPKNNKVTGLSKIVRVVEILSKRLQVQERLTTEIAEILMKKLKPMGVMVIIEAEHLCMSMRGVKKSGVLTVTSAVRGVFKENQKTRAETLALIKN

SEQ ID NO: 6285 - protein, 185 aa, unidentified
  source 1..185: note = Omnitrophica bacterium
  REGION 1..185: note = tr|A0A496RNE2|A0A496RNE2_9BACT GTP cyclohydrolase 1; OS = Candidatus Omnitrophica bacterium OX=2035772 GN=folE; PE = 3 SV=1
MDRKKIERAVKMIIEAVGANLNKKDLLTTPRRVAQMYEEILKGEKKSPEKELDAILEQKHDEIILLKDIPLYSLCEHHLLPFIGKVHIAYIPDRRITGLSKIVRVVETLSSRLQVQERLTTQIADVIMKKLKPKGVMVVIEAEHLCISMRGVKKPGVKVVTSVVRGIFRKNQKTRQESLNLIFSK

SEQ ID NO: 6286 - protein, 187 aa, unidentified
  source 1..187: note = Omnitrophus magneticus
  REGION 1..187: note = tr|A0A0F0CRL7|A0A0F0CRL7_9BACT GTP cyclohydrolase 1; OS = Candidatus Omnitrophus magneticus OX=1609969 GN=folE; PE = 3 SV=1
MDKEKIKKAVRDILIAIGEDPDRDGLLNTPNRVAEMYEEILSGINKNAEEEITVFFEAEHDEIILLKDIPLYSLCEHHLVPFLGKAHVAYIPEGNKITGLSKIVRVIDTLSRRLQVQERLTTEIANSLMKKLTPKGVLVVIEAEHLCMSMRGVKKPGVVTTTSAVRGIFRSSHKTRSEALALIQHRS

SEQ ID NO: 6287 - protein, 225 aa, unidentified
  source 1..225: note = Ornithobacterium hominis
  REGION 1..225: note = tr|A0A383TU78|A0A383TU78_9FLAO GTP cyclohydrolase 1; OS = Candidatus Ornithobacterium hominis OX=2497989 GN=folE; PE = 3 SV=1
MKEKELYQDMGDGHIPGNHETPLRADAFDLNDDEKIEKIEKHFYEIMNVLGMDMGDDSLKGTPHRVAKMYVKEIFGGLNPERCPKMSTFENKYKYNQMLVEKDITVYSTCEHHFLPIVGRAHVAYMSKGRVIGLSKINRIVNYYARRPQVQERLTMQVVHAMQEALGTDDVACVIDAKHLCVNSRGIKDIESSTVTAELGGAFRNNPTTRAEFLKYIGMGTRFNV

SEQ ID NO: 6288 - protein, 280 aa, unidentified
  source 1..280: note = Ozemobacter sibiricus
  REGION 1..280: note = tr|A0A367ZTM7|A0A367ZTM7_9BACT GTP cyclohydrolase FolE2 OS=Candidatus Ozemobacter sibiricus OX=2268124; GN = folE2 PE=3 SV=1
MDDIQNQRDDRNIPIDEVGVKRLSYPITVLDKHHGRQETVAEIEMTVGLPHEFRGTHMSRFLEVLEKHRGEMTLFTIGRILREIKRRLHAERAAMSVAFPYFIEKTAPVSGARSLLRYDCRFYGTLERVADFVLTVVVPVTTLCPCSKAISARSAHNQRSLVTVSARFTDFLWIEDLVELVEASASAEVFTLLKRPDEKWLTEQAYDRPRFAEDLVREVAQRLDALSQVSWYAVSTENLESIHAHSAFAFLKREKPRPERQAEEAESRTRRGRRAAAARS

SEQ ID NO: 6289 - protein, 269 aa, unidentified
  source 1..269: note = Pandoraea novymonadis
  REGION 1..269: note = tr|A0A2P6UXP3|A0A2P6UXP3_9BURK GTP cyclohydrolase FolE2 OS=Candidatus Pandoraea novymonadis OX=1808959; GN = folE2 PE=3 SV=1
MNQINPIFIMPDVQSGIDTRQIPIQRVGVRAVRHPLVLKTNSDQMQATVAIFNMDVHLPANQKGTHMSRFIALLEENKAPFDMMNFRVMLITMLERLEADAGHMEVSFPYFISKTAPISGVESLMDYQVTLTGQVLDGQTRVWLKVLVPVTSLCPCSKQISKYGAHNQRSHVTIHAELLSEISIEEIVTIAEEEASCELWGLLKRPDEKYVTERAYENPKFVEDLVRDVAKRLNKEPRIISYKLEAENFESIHNHSAYALIEHDKRLNA

SEQ ID NO: 6290 - protein, 221 aa, unidentified
  source 1..221: note = Pantoea carbekii
  REGION 1..221: note = tr|U3U9K4|U3U9K4_9GAMM GTP cyclohydrolase 1; OS = Candidatus Pantoea carbekii OX=1235990 GN=folE PE=3 SV=1
MRILSQEALIVHQALLKHGLETPFRTEEYKIDEQSRQNKIADHLSQIMKLLNLDLKDDSLMETPYRIAKMYTNEIFSGLDYINFPEITVIPNKMKVDEMVTVHDITLTSTCEHHFVIIDGKATVAYIPKDKVIGLSKINRIVHFFSQRPQVQERLTQQILIALQTLLNTNNVAVSIDAIHYCVKARGIKDSNSATTTTSLGGLFKASYNTRTEFLRVVHQI

SEQ ID NO: 6291 - protein, 134 aa, unidentified
  source 1..134: note = Paraburkholderia kirkii
  REGION 1..134: note = tr|U3UB52|U3UB52_9BURK WGS project CAFE00000000 data, contig bkir_c67 OS=Candidatus Paraburkholderia kirkii UZHbot1 OX=1055526 GN=BKIR_c67_4317 PE=4 SV=1
MTHAASAVTARGLALAGAAPANFLRHNPKSADSKAWFATEAPSANAAGPPRFHHLPPACLALAGATCHSHSSSLNRIVVHRVTPITTMAKPSHCVFGNSRPVALIPEKRNDETRILMKVLVPVTSLCPCSKQIP

SEQ ID NO: 6292 - protein, 227 aa, unidentified
  source 1..227: note = Paraburkholderia kirkii
  REGION 1..227: note = tr|A0A0L0LYH7|A0A0L0LYH7_9BURK GTP cyclohydrolase 1; OS = Candidatus Paraburkholderia kirkii OX=198822 GN=folE; PE = 3 SV=1
MHSTDRRQELSMSAPRKNHLSGSDMPADQADRPTREEAEAAVRVLLRWAGDDPGREGLLDTPARVVRAYEEFFSGYTQNPHDILARTFSEVQGYDEMIVLKDIRFESYCEHHMVPIIGRAHVAYLPNKRVVGISKLARLVDAFAKRLQIQEKMTAQIADTLDEVLQPIGVGVILEAAHQCMSTRGVHKAGVSMVTSRMLGSFRDDPSTRREFLSIVGNQSAFSVSNT

SEQ ID NO: 6293 - protein, 190 aa, unidentified
  source 1..190: note = Paracaedibacter acanthamoebae
  REGION 1..190: note = tr|A0A077B2I3|A0A077B2I3_9PROT GTP cyclohydrolase 1; OS = Candidatus Paracaedibacter acanthamoebae OX=91604; GN = folE PE=3 SV=1
MTKPTRLEAENAIRTLIRWAGDNPDREGLQQTPERVVRAFEEYFVGYTEDPADYLRRTFEEVNGYDEIVLLKNIRFESHCEHHMAPIIGHVHVAYLPNKRVVGISKLARVVDIFAKRLQIQEKLTADIAQAIDTTLNPFGVAVAIEASHQCMTCRGVHKTDVSMITTRMTGVFRDNHELRRDVLALIKGQ

SEQ ID NO: 6294 - protein, 181 aa, unidentified
  source 1..181: note = Parcubacteria bacterium
  REGION 1..181: note = tr|A0A3M0WUH6|A0A3M0WUH6_9BACT GTP cyclohydrolase 1; OS = Candidatus Parcubacteria bacterium OX=2053309 GN=folE; PE = 3 SV=1
MHEEQLKQAAKAIISIGAVNVNSEGLRRTPERFTKMIKDLCEKNAPKITTFPANGYKGIIVSQKIKFYSLCEHHILPFFGYATVGYIPDKRIIGISKLPRIVHYAAKGLNTQEGITVSVAEILTKELKPKGCAVYMVARHLCMEMRGVCEHEAVTSTVTLRGIFEKDNTLALQFIKGVNHG

SEQ ID NO: 6295 - protein, 271 aa, unidentified
  source 1..271: note = Parcubacteria bacterium
  REGION 1..271: note = tr|A0A3R7ABE7|A0A3R7ABE7_9BACT GTP cyclohydrolase FolE2 OS=Candidatus Parcubacteria bacterium OX=2053309; GN = folE2 PE=3 SV=1
MTTLHDIQNSPAEKQIPIDQVGVTDLRYPIIVLDRQQEKQQTVARLTVSVALPHHFKGTHMSRFIEVLNDHRGEITMRTLPVILDNMKTRLEAERARIELQFPYFLERSAPVSGEKGLMDYDCVFVGEANGNDCDFVMKVRVPVASLCPCSKSISDYGAHNQRGYFDIALRSNRKEDGEFNFIWIEELIEIAEKSASGPVYALLKRSDERHVTMHAYDNPVFVEDMVRNVAAILIEDKRVAWFRVQAENHESIHNHNAFALIERWNEIKGK

SEQ ID NO: 6296 - protein, 203 aa, unidentified
  source 1..203: note = Pelagibacter sp.
  REGION 1..203: note = tr|A0A2D6XSW0|A0A2D6XSW0_9PROT GTP cyclohydrolase 1; OS = Candidatus Pelagibacter sp. OX=2024849 GN=folE PE=3 SV=1
  VARIANT 6: note = Xaa can be any naturally occurring amino acid
  VARIANT 20: note = Xaa can be any naturally occurring amino acid
MKLVKXTEQKDNKKQEISDXKVEEAIKTIIEWIGENPEREGLRSTPKRVVKAYKEYFQGYDLDPAEYLTKTFNEVEGYDDMIIEKDISIRSHCEHHMAPIIGVAHVAYVPSKKVVGLSKLARVVEAFSKRLQTQERLTMQIAKTVMDVLQPRGVAVTIDAVHQCMTNRGIKKENTTTITNYFLGAFKDDLSFQNRYLRYINKD

SEQ ID NO: 6297 - protein, 203 aa, unidentified
  source 1..203: note = Pelagibacter sp.
  REGION 1..203: note = tr|A0A1Z8W2R7|A0A1Z8W2R7_9PROT GTP cyclohydrolase 1; OS = Candidatus Pelagibacter sp. TMED64 OX=1986830 GN=folE; PE = 3 SV=1
MKLVKNLKESKENLKKVSDFEAEQAIKTILEWIGENPSREGLTETPKRVIKAYKEYFKGYKQDPEEFLSKTFGDVEGYNDIVIVKNIKVESHCEHHMAPIVGLAHVAYIPNQKIVGLSKLARVVEVFSKRLQTQERLTMQIANSLMKTLEARGVAVSIDAAHHCMTMRGVKQHETTTITNYYTGLLKDDLSYQNRYLNLINTK

SEQ ID NO: 6298 - protein, 180 aa, unidentified
  source 1..180: note = Peregrinibacteria bacterium
  REGION 1..180: note = tr|A0A554IMB6|A0A554IMB6_9BACT GTP cyclohydrolase 1; OS = Candidatus Peregrinibacteria bacterium Greene0416_19; OX = 2017154 GN=folE PE=3 SV=1
MDHLFMDLLKAIGEDPSREGLKDTPRRSAESYKFLTQGYAQTLEDVVGDATFPADTDGMVIVKDIEMYSLCEHHLLPFYGKVHVGYIPDQIVIGLSKIPRIIDMFARRLQVQERMGQQICDALEEVLGPKGVGVVIEANHLCMMMRGVEKQHSLAVTSHVKGIFKTDPRTREEFMQLIQS

SEQ ID NO: 6299 - protein, 197 aa, unidentified
  source 1..197: note = Peregrinibacteria bacterium
  REGION 1..197: note = tr|A0A2H0S0V4|A0A2H0S0V4_9BACT GTP cyclohydrolase 1; OS = Candidatus Peregrinibacteria bacterium CG10_big_fil_rev_8_21_14_0_10_49_16 OX=1974788 GN=folE; PE = 3 SV=1
MEFPWESQEQTNKEHQDFVVRLLEELGEDASRPALLDTPARFLKAWREMTRGYTMDVKLKAMEIEESLFPTDTHGMIVVRDIEFHSLCEHHLLPFVGKVHVGYLPYKHTIGHSKIPRIVEMYASRLQVQERLGQQICDAIADVVQPKGIGVLIEGSHFCMLMRGVKKEHTTITTSHLKGVFAEDARTRQEFLQLVRN

SEQ ID NO: 6300 - protein, 201 aa, unidentified
  source 1..201: note = Peribacteria bacterium
  REGION 1..201: note = tr|A0A1F7BGZ1|A0A1F7BGZ1_9BACT GTP cyclohydrolase 1; OS = Candidatus Peribacteria bacterium RIFCSPHIGHO2_01_FULL_51_9 OX=1801915 GN=folE PE=3 SV=1
MEFPWESQEQTSKEHQDFVVRLLEELGENASREGLKDTPARFLKAWREMTSGYGAQLDLRSIKPDSALFSTDTQGMVIVKDIEFYSLCEHHLLPFVGKVHVGYLPAKHMIGLSKIPRIVDMYARRLQIQERLGQQICDTLDAFIKPRGVGVVIESTHFCMIMRGVKQQSTRIISSHVKGAFKEDARTRQEFLQLIGINAQS

SEQ ID NO: 6301 - protein, 180 aa, unidentified
  source 1..180: note = Peribacteria bacterium
  REGION 1..180: note = tr|A0A1F7BFM2|A0A1F7BFM2_9BACT GTP cyclohydrolase 1; OS = Candidatus Peribacteria bacterium RIFCSPHIGHO2_01_FULL_51_35 OX=1801914 GN=folE PE=3 SV=1
MEELYKKLLKAVGEDPTRAGLEKTPKRAWEAMQYFTSGYKQDPKKILNDALYPVDTEGMVIVKNIEFFSLCEHHLLPFFGKVHVGYIPRKHVIGLSKIPRIVDTFARRLQVQERMGQQICDALAKILKPKGIGIVIEANHLCMMMRGVEKQHSQAVTSHVEGLFKKDPKTRQEFLDLIKK

SEQ ID NO: 6302 - protein, 210 aa, unidentified
  source 1..210: note = Phaeomarinobacter ectocarpi
  REGION 1..210: note = tr|X5MK96|X5MK96_9RHIZ GTP cyclohydrolase 1; OS = Candidatus Phaeomarinobacter ectocarpi OX=1458461; GN = folE PE=3 SV=1
MDAMVDKMDATDMTETTETRPSRSEAEAAVRTLISWAGDNPDREGLIDTPSRVVRAYEEFFEGYDEDPSEVLGRTFEEVEGYNDIVMLRDISLESHCEHHMVPILGKAHIAYMPINSVVGISKLARVIEIYAKRLQTQETMTAQIAETIVSALKPAGVAVMIEAKHQCMTTRGIKKPDVATITTQFTGVFKDDPRMEERFFRLVRGDRSY

SEQ ID NO: 6303 - protein, 218 aa, unidentified
  source 1..218: note = Photodesmus blepharus
  REGION 1..218: note = tr|A0A084CM93|A0A084CM93_9GAMM GTP cyclohydrolase 1; OS = Candidatus Photodesmus blepharus OX=1179155 GN=folE; PE = 3 SV=1
MLNLSESAKLVKDALERRGLETPISSKNKIGRKEKKERIEYHIRKILSILELNIIDDSLEKTPYRVAKMYVDEIFSGLNYQNFPKITIIENKMNVNEMICVKDITLTSTCEHHFVTIDGKAALAYIPRNKLIGLSKINRIVRFFAQRPQIQERMTQQILVALQVLLGSDDVAVSIKASHYCVKSRGVTDSTSQTITRALGGIFKSNSSTRCEFLDAIH

SEQ ID NO: 6304 - protein, 227 aa, unidentified
  source 1..227: note = Photodesmus katoptron
  REGION 1..227: note = tr|S3EHE1|S3EHE1_9GAMM GTP cyclohydrolase 1; OS = Candidatus Photodesmus katoptron Akat1 OX=1236703; GN = folE PE=3 SV=1
MEKSKTLLDLSRAAKLVKNALESSGLETPMSLDQLNLNYKVKKEKIEYHIREVLGLLGLNLMDDSLKDTPFRVASMYMDEVFSGLYYQNFPKITLIENKMNITEMVFIKNISLTSTCEHHFITIDGKAAIGYVPKRKIIGLSKINRIVHFFSKRPQVQERMTEQILLALQTLLESSDVAVVIDAVHYCVKSRGIVDVTSETSTTALGGIFKKSKSARQEFFNKSSTK

SEQ ID NO: 6305 - protein, 197 aa, unidentified
  source 1..197: note = Phycorickettsia trachydisci
  REGION 1..197: note = tr|A0A2P1P7C0|A0A2P1P7C0_9RICK GTP cyclohydrolase 1; OS = Candidatus Phycorickettsia trachydisci OX=2115978; GN = folE PE=3 SV=1
MKTKISKLIKPLPSRDDALRAVSTLLEYIGVDLENEHFKDTPRRVVDSFEEIYGGYKLLASDILKSKVYKKNNYDQPILLKDIEFTSTCAHHMLPIVGTVSVSYIPGDAIVGISKIARIIDVFAKRLQIQEDMTTEIAEHIARGLKAKGVAVKISAEHYCMISRGVKRKGSKLDTYHFTGLFADNHSIQTNFIHANA

SEQ ID NO: 6306 - protein, 205 aa, unidentified
  source 1..205: note = Phycosocius bacilliformis
  REGION 1..205: note = tr|A0A2P2ECE4|A0A2P2ECE4_9PROT GTP cyclohydrolase 1; OS = Candidatus Phycosocius bacilliformis OX=1445552 GN=folE; PE = 3 SV=1
MDAITDPRLISEVNDTNRPTREEAMAAVRTLLRWAGDNPEREGLIDTPKRVVEAYREFFAGYEMDPAAELSRTFEDVQGYDDIVMLRDIDLESHCEHHMVPILGRAHIAYMPTNRVVGISKIARVVEIFGKRLQTQETMTAQIADCITEALRPAGVAVLLDAKHQCMTTRGVHHPNVATITTQFTGVFKTDRELKDRFLRLAGYN

SEQ ID NO: 6307 - protein, 195 aa, unidentified
  source 1..195: note = Planktophila sulfonica
  REGION 1..195: note = tr|A0A249KIK5|A0A249KIK5_9ACTN GTP cyclohydrolase 1; OS = Candidatus Planktophila sulfonica OX=1884904 GN=folE; PE = 3 SV=1
MGPSDGRASHPYDQERAEKAVRELLLALGEDPEREGLKETPARVARAFKENFEGLWQKPEDVLTTTFDIGHEELVIIRDIEVFSHCEHHLTPFHGVAHVGYIPSGKITGLSKVARLVDLFARRPQVQERLTTQIADALVEILKPMGVIVIIDCEHLCMSMRGVRKSQARTTTSAVRGVLRDATTRAEAISLITNR

SEQ ID NO: 6308 - protein, 193 aa, unidentified
  source 1..193: note = Planktophila vernalis
  REGION 1..193: note = tr|A0A249KRM3|A0A249KRM3_9ACTN GTP cyclohydrolase 1; OS = Candidatus Planktophila vernalis OX=1884907 GN=folE; PE = 3 SV=1
MTDGRASGPYDQARAEKAVRELLLALGEDPDREGLKETPARVARAMKENFEGLWQSPEDVLTTTFDIGHEELVIVRDIEVFSHCEHHLTPFHGVAHVGYIPSGKITGLSKIARLVDMYSRRPQVQERLTTQIADAMVEILNPLGVIVIIDCEHLCMSMRGVKKSNARTTTSAVRGVLQNTATRAEAISLITTR

SEQ ID NO: 6309 - protein, 188 aa, unidentified
  source 1..188: note = Poribacteria bacterium
  REGION 1..188: note = tr|A0A2D9QSM4|A0A2D9QSM4_9BACT GTP cyclohydrolase 1; OS = Candidatus Poribacteria bacterium OX=2026781 GN=folE; PE = 3 SV=1
  VARIANT 39: note = Xaa can be any naturally occurring amino acid
  VARIANT 98: note = Xaa can be any naturally occurring amino acid
  VARIANT 124: note = Xaa can be any naturally occurring amino acid
  VARIANT 167: note = Xaa can be any naturally occurring amino acid
  VARIANT 170: note = Xaa can be any naturally occurring amino acid
  VARIANT 184: note = Xaa can be any naturally occurring amino acid
MKQYDLDDDLFQGNSKLERLYHGVIEEIGEDPTRQGLFXTPYRSAKALQFLTQGYTQKVDEIVNGAIFDEEFDDMVIVKDIEFYSLCEHHILPFFGKXHVGYIPNKRIVGLSKIPRIIDMFARXLQVQERLTHQIAQAINEVLQPQGIAVVMEAQHMCMMIRGVEKXRSXTFTNVMLGTFRDRXLNSC

SEQ ID NO: 6310 - protein, 197 aa, unidentified
  source 1..197: note = Poribacteria bacterium
  REGION 1..197: note = tr|A0A495Z9A9|A0A495Z9A9_9BACT GTP cyclohydrolase 1; OS = Candidatus Poribacteria bacterium OX=2026781 GN=folE; PE = 3 SV=1
MKIYHADSIDNGTTAADPKLEYIYTQILENIGEDPTREGVLKTPQRAAKALQFLMQGYDQNVEDVVNDAIFNEEYDEMVIVKDIECYSLCEHHLLPFFGKCHVGYIPRKKIIGLSKIPRIVDMFARRLQVQERLTKQIAEALQDVLHPAGVAVVIEAQHLCMMVRGVQKQHSQTMTNVMLGEFRDKISTRTEFMRCI

SEQ ID NO: 6311 - protein, 208 aa, unidentified
  source 1..208: note = Promineofilum breve
  REGION 1..208: note = tr|A0A160T869|A0A160T869_9CHLR GTP cyclohydrolase 1; OS = Candidatus Promineofilum breve OX=1806508 GN=folE PE=3; SV = 1
MTGDWSGRMADGPVLSAGCKNVVADAVTAILHAVGEDPTREGLQNTPARVARAYDELLIGYSIDPIALLNNALFDVTYSEMVIVTDIDFYSLCEHHMLPFIGKAHVAYIPDKKVVGLSKIPRIVEVFARRLQIQERMTRQIAELIDELLNPLGVGVVIDGLHMCMAMRGVSKANARMRTSALLGSFADKPKTRSEFMDHIGPVTRTLL

SEQ ID NO: 6312 - protein, 271 aa, unidentified
  source 1..271: note = Propionivibrio aalborgensis
  REGION 1..271: note = tr|A0A1A8XR32|A0A1A8XR32_9RHOO GTP cyclohydrolase FolE2 OS=Candidatus Propionivibrio aalborgensis OX=1860101; GN = folE2 PE=3 SV=1
MNAPQAPIPNAMVDVQNLADTRQIAINRVGIKSIRHPVKVLDKSGGVQHTIAMFNMYVGLPHNFKGTHMSRFVEILNSHEREISVENFPTMLREMLEKLEAETGHIEMNFPYFINKAAPVSGVQSLMDYDVTLTGEICHGEIASTIKVVVPVTSLCPCSKKISERGAHNQRSHVTVTARINDHLWIEEIVQLVEAEASCELYGLLKRPDEKHVTERAYDNPKFVEDMVRDVAARLSAEPRIYSYVVESENFESIHNHSAYALIENRNPEPV

SEQ ID NO: 6313 - protein, 214 aa, unidentified
  source 1..214: note = Propionivibrio aalborgensis
  REGION 1..214: note = tr|A0A1A8XKC0|A0A1A8XKC0_9RHOO GTP cyclohydrolase 1; OS = Candidatus Propionivibrio aalborgensis OX=1860101; GN = folE PE=3 SV=1
MTDNSDHEHTPPLSCEIGIPRPNEFDPAAFEQAVSDLLKACGIAPDITHMGRTAQRVRELWQQRLLGGYDLDPASALGTGFDDHRRDMVIVRGIAVHGVCPHHLVPFRGLAHVAYLPGGRLHGFGRIARMVDAIGHRFTYQEWMTRDIAEALMRHGKARGAACVVEAEQLCLLLGEDRRGDERVITQCFTGEFETSSQYRNEFLRAVGSVRRSD

SEQ ID NO: 6314 - protein, 230 aa, unidentified
  source 1..230: note = Protochlamydia amoebophila
  REGION 1..230: note = tr|A0A0C1K1X0|A0A0C1K1X0_9BACT GTP cyclohydrolase 1; OS = Candidatus Protochlamydia amoebophila OX=362787 GN=folE; PE = 3 SV=1
MMSKKFMTKKEFPQKKIPPSITNFPSPIRRHQKRLSDQDKIKLIAEHFKAIMETLELDVEDESLARTPERVAKMYVNEIFSGLDEENFPEISFFKDEIHHEHKANMVFVKVGFTSFCEHHFVPMSGFAYVAYIPTNQLIGLSKIPRLVRYFAKRPQLQERLTAQIADSLALLLNTEHVAVSLTAIHSCVQARGIQDECSHTITNVLRGQFGADGNLRREFFEGINRRVFE

SEQ ID NO: 6315 - protein, 230 aa, unidentified
  source 1..230: note = Protochlamydia naegleriophila
  REGION 1..230: note = tr|A0A0U5JFZ4|A0A0U5JFZ4_9BACT GTP cyclohydrolase 1; OS = Candidatus Protochlamydia naegleriophila OX=389348; GN = folE PE=3 SV=1
MTKKTTQSKAPSKKKAPSPAVTNFPSPIRKPKKQLTNEEKIDLIADRFKDILETLGLDIEDDSLTRTPYRIAKMYVEEVFSGLDEKNFPSISFFKDELHHEHKANMVFVKVGFTSFCEHHFVPMTGFAYVAYVPESELIGLSKIPRIVRYFARRPQVQERLTAQIADSLALLLNTDNVAVSITARHSCVIARGIQDECSHTITNVLRGQFGINANLRREFFEGINRRDLD

SEQ ID NO: 6316 - protein, 247 aa, unidentified
  source 1..247: note = Providencia siddallii
  REGION 1..247: note = tr|A0A0M6W997|A0A0M6W997_9GAMM Putative GTP cyclohydrolase 1 type 2 OS=Candidatus Providencia siddallii OX=1715285 GN=ybgI PE=4 SV=1
MNNLELEKILNGLLKIHEFQDYTPNGLQVEGCFNISKIVTGVTACQVLLEIAVEKKADTIIVHHGYFWKNESSIINGIKKIRLRTLLINNINLYSYHLPLDVHYELGNNNQLSYIIGVKVYGQINQFISYGFFKEAITADMLNTRLETRLHRKILYCTGNNERKIQKVAWCTGNGQDFIYEAARFGVDAFITGGISEQSVHIAREMKIHFYSAGHHATERYGIKKLSEWLIDKYDLDVEFVDIDNIA

SEQ ID NO: 6317 - protein, 181 aa, unidentified
  source 1..181: note = Pseudomonas adelgestsugas
  REGION 1..181: note = tr|A0A481QM60|A0A481QM60_9PSED GTP cyclohydrolase 1; OS = Candidatus Pseudomonas adelgestsugas OX=1302376 GN=folE; PE = 3 SV=1
MFLEQNYTAILDQLGEDVSREGLLDTPKRAAKAMQYLCRGYEQTLEEVTNGALFSSDNSEIVLVKDIELYSLCEHHLLPFIGKAHVAYIPSGKVLGLSKVARIVDMYARRLQIQENLSRQIANAVMQVTGALGVAVVIEAKHMCMMMRGVEKQNSSMITSVMLGEFRENAATRSEFLSLIK

SEQ ID NO: 6318 - protein, 204 aa, unidentified
  source 1..204: note = Puniceispirillum sp.
  REGION 1..204: note = tr|A0A1Z8UC65|A0A1Z8UC65_9PROT GTP cyclohydrolase 1; OS = Candidatus Puniceispirillum sp. TMED52 OX=1986639; GN = folE PE=3 SV=1
MTPYDADKINLVAVDPTPSREEAEEAVRTLIKWAGDNPEREGLIETSARVVRSYEEYFSGYQEDPEHMLSRVFEEVEGYDDLVMLKDIRLVSHCEHHMVPIIGSATIAYLPDRRVVGISKLARVVDIFAKRLQTQETMTAQIAQTIQTVLEPKGVALLIDAAHQCMTTRGVQKQGVSMVTTRFTGAFELDQDLRNRFLIQAGQN

SEQ ID NO: 6319 - protein, 212 aa, unidentified
  source 1..212: note = Puniceispirillum sp.
  REGION 1..212: note = tr|A0A424RJW8|A0A424RJW8_9PROT GTP cyclohydrolase 1; OS = Candidatus Puniceispirillum sp. TMED213 OX=1986634; GN = folE PE=3 SV=1
  VARIANT 87: note = Xaa can be any naturally occurring amino acid
MTPYDSTTLERESSIESQSETAGHRPSREDAEKAVELLLRWAGDDPSREGLVDTPARVARAYEEFFSGYQEDPEDMLARTFEEVEGXDDMVMLRGIDLQSHCEHHMVPILGQAHIAYLPDRRVVGISKLARVLDSFGRRLQTQETMTAQVANAIQNALKPKGVAILVDAQHQCMTTRGVKKPSVSMVTTRFTGQFKDNTELRDRFYQHIKLG

SEQ ID NO: 6320 - protein, 181 aa, unidentified
  source 1..181: note = Raymondbacteria bacterium
  REGION 1..181: note = tr|A0A1F7FG43|A0A1F7FG43_9BACT GTP cyclohydrolase 1; OS = Candidatus Raymondbacteria bacterium RIFOXYD12_FULL_49_13 OX=1817890 GN=folE PE=3 SV=1
MEKIIRELLVKIGEDPDREGLLKTPARVKKTYEFLTKGYQEDPKAILSGAIFHEQCNHMIIVDDIEFYSMCEHHMLPFFGKCHIGYISKNKIYGVSKIVRVVECFSRRLQVQERMTQQVARILMDTIGAEGVGVVIEAQHLCMMMRGVEKQNSRMLTSAMLGSFHDDHPTRDEFLHLIKKR

SEQ ID NO: 6321 - protein, 234 aa, unidentified
  source 1..234: note = Regiella insecticola
  REGION 1..234: note = tr|G2GX21|G2GX21_9ENTR GTP cyclohydrolase 1; OS = Candidatus Regiella insecticola 5.15 OX=1005043 GN=folE; PE = 3 SV=1
MPLLSEKTSQIDKKAEKMNREAEKVRDALKEEGLETPLSGEVLDAKTRKKCIEENIKKIMGLLNLNLDDDSLAETPNRIAKMYVDEIFSGLDYANFPKITLIENKMKINEMITVRNITLTSTCEHHFVAIDGKATVSYIPKNCIIGLSKINRIVRFFAQRPQVQERLTQQIFLALKTLLNTENIAVSIDAVHFCVKARGICDATSATTTTSLGGLFKSNQSTRQEFLRAVNNND

SEQ ID NO: 6322 - protein, 234 aa, unidentified
  source 1..234: note = Regiella insecticola
  REGION 1..234: note = tr|E0WTM2|E0WTM2_9ENTR GTP cyclohydrolase 1; OS = Candidatus Regiella insecticola LSR1 OX=663321 GN=folE; PE = 3 SV=1
MPLLSEEMSQINKKAEKMNKEAEKVRDALKKEGLETPLSGEVLDAKTRKKCIEENMKEIMELLNLNLNDDSLAETPNRIAKMYVDEIFSGLDYANFPKITLIENKMKINEMITVRNITLTSTCEHHFVAIDGKATVSYIPENCIIGLSKINRIVRFFAQRPQVQERLTQQIFLALKTLLNTENIAVSIDAVHFCVKARGICDATSATTTTSLGGLFKSNQSTRQEFLRAVNNND

SEQ ID NO: 6323 - protein, 110 aa, unidentified
  source 1..110: note = Rhabdochlamydia sp.
  REGION 1..110: note = tr|A0A486XJ10|A0A486XJ10_9BACT GTP cyclohydrolase 1 type 2 OS=Candidatus Rhabdochlamydia sp. T3358 OX=2099795; GN = RHT_00455 PE=4 SV=1
MKVWAKLVIFAPESHADQIRTAAAKVGAGKIGKYSDCSFSVKGTARFLPKKGSEPWTGKENQLEEVIEERIEMLCEEIYIEQVLKEISRVHPYEEPAIDIYPVYQRGFFT

SEQ ID NO: 6324 - protein, 251 aa, unidentified
  source 1..251: note = Rhabdochlamydia sp.
  REGION 1..251: note = tr|A0A486XR45|A0A486XR45_9BACT GTP cyclohydrolase 1 type 2 OS=Candidatus Rhabdochlamydia sp. T3358 OX=2099795; GN = RHT_01308 PE=4 SV=1
MITLQDLLQYLNQLLQPELFSDVCPNGLQVEGKKTISRIAFAVSASLATIKQAIAIKADALVVHHGIFWDKTSCVLLGPKKQKFQLLLENEISLLAYHLPLDANQTVGNNWKAAHDLSLTNLKAFGLLGTNKIGVKAQIKPTLIEDFQIKLEAYYEHVAHAALGGKKQISSVAIVSGGAHWMIEQAIQEEMDCFITGSFDEPIWDLAHENGIHFLALGHFSTEKVGIQSLKQITTKHFDVPTHFINLFNPF

SEQ ID NO: 6325 - protein, 330 aa, unidentified
  source 1..330: note = Rhodobacter lobularis
  REGION 1..330: note = tr|A0A0J9E1F6|A0A0J9E1F6_9RHOB GTP cyclohydrolase FolE2 OS=Candidatus Rhodobacter lobularis OX=1675527; GN = folE2 PE=3 SV=1
MSTHSPLDQDCPDRDEAAPALSRSYPEDFEVDAAYKASLPDLQNGPESLIKGAHRAIQHVGISNFRLPIRYRTRDNGDLTLETSVTGTVSLEAEKKGINMSRIMRSFYRHAEQTFSFEVMECALDDYKSDLESFDARIQMRFSFPMKVPSLRSGLEGYQYYDITLELVEQAGVRKKILHLDYVYSSTCPCSLELSEHARRTRGQLATPHSQRSVARLSAVLTEGEDVMWFEDLIEMCRDAVPTETQVMVKREDEQAFAELNAANPIFVEDAARLYAEQLMRDRRVSDFRVVASHQESLHSHDAVSVLTEGPTFSAESLDPRLFASMFHIG

SEQ ID NO: 6326 - protein, 184 aa, unidentified
  source 1..184: note = Rhodoluna planktonica
  REGION 1..184: note = tr|A0A1D9DXM8|A0A1D9DXM8_9MICO GTP cyclohydrolase 1; OS = Candidatus Rhodoluna planktonica OX=535712 GN=folE PE=3; SV = 1
MVDQQRIKNAVVELLAAIGEDPNRQELLATPDKVAQSYAEFFKGVNVDETEALAEPFEAEHNEVVILKDIDFVSMCEHHLLPFTGTAHIAYLPDDKVVGLGRLPKLVELVASRPQLQENLTAQIADALERGLGTKGVVVVVQARHHCVVSRGARQPEANTITMAARGCYAEPASRAEVMALIAK

SEQ ID NO: 6327 - protein, 179 aa, unidentified
  source 1..179: note = Rickettsiella isopodorum
  REGION 1..179: note = tr|A0A1J8NK15|A0A1J8NK15_9COXI GTP cyclohydrolase 1; OS = Candidatus Rickettsiella isopodorum OX=1225476 GN=folE; PE = 3 SV=1
MEKHIKAILTALGEDTEREGLKNTPLRVSKSLRYLTSGSRESLDDILNGAVFRSTMEEMILVKDIELYSLCEHHLLPFIGACHIAYIPNGKIIGLSKISRIINFYARRLQIQENLTRQIADTLMKVLDAKGVAIIIEAKHLCMMMRGVEKQKASMKTSVMLGLFRQDLRTRSEFLSLIG

SEQ ID NO: 6328 - protein, 183 aa, unidentified
  source 1..183: note = Rickettsiella viridis
  REGION 1..183: note = tr|A0A2Z5UWG4|A0A2Z5UWG4_9COXI GTP cyclohydrolase 1; OS = Candidatus Rickettsiella viridis OX=676208 GN=folE PE=3; SV = 1
MQTHITEILKLLGEDPEREGLKKTPERVEKSLRYLTSGTQQSLETLMNGAFFSSSIAEMILVKDIELYSLCEHHLLPFMGHCHIAYIPNGKIIGLSKIPRIVDFYARRLQIQENLTCQIADSLMSLLNAKGVAIVIEAKHLCMMMRGVEKQTASLKTSVMLGVFRDDMKIRAEFLSLLNSTHH

SEQ ID NO: 6329 - protein, 208 aa, unidentified
  source 1..208: note = Riesia sp.
  REGION 1..208: note = tr|A0A1V0HQG0|A0A1V0HQG0_9ENTR GTP cyclohydrolase 1; OS = Candidatus Riesia sp. GBBU OX=1719125 GN=folE PE=3 SV=1
MSSINQESVLVHKALKIHGLENSFYSNKALTEDTEKKIAVNISNIMNLLKFDVSNCTLSETPKRVAKMYVEEIFSGLNYRNFPRISFIKNKMKVDEIISVKNISLITTCEHHLTVIDGNASIKYLPNDRIIGFSKIIEIVYFFSKRPQIQERLTKQILIALQTLLRTKDISVSISAIHYCTKLVGSKDITNNIVTNSYGGIFKRRQKS

SEQ ID NO: 6330 - protein, 189 aa, unidentified
  source 1..189: note = Riesia pediculischaeffi
  REGION 1..189: note = tr|A0A0C1V768|A0A0C1V768_9ENTR GTP cyclohydrolase 1; OS = Candidatus Riesia pediculischaeffi PTSU OX=1401651; GN = P689_119235 PE=3 SV=1
MSFLNEDVNLIRKKLQLCGLDIQSNSNFSISFKKLSKLYSELFFKSDYRDFPKFKLMENKIQFNEMIVIRDVQFISICEHHLLIIEGTSTVAYIPKKYIVGLSKISQIIHFFSKRPQLQEKMTKQISISLKNLLKTEDVAVFINAVHYCMKIRYAQDRSSDVITTELSGSFVSDDLLKDRFLRFCYSNR

SEQ ID NO: 6331 - protein, 190 aa, unidentified
  source 1..190: note = Riflebacteria bacterium
  REGION 1..190: note = tr|A0A1F7G085|A0A1F7G085_9BACT GTP cyclohydrolase 1; OS = Candidatus Riflebacteria bacterium RBG_13_59_9; OX = 1817875 GN=folE PE=3 SV=1
MDRKRIENAVREILIAIGEDPEREGLIRTPERVAQMYEDMLGGVQEDGYELIRSSIYHEKHEELVLLRDLDFFSICEHHLMPFMGKAHIAYIPKGRICGLSKILRAFSHLCRRPQVQERLTWQMADMLYETLKPHGAAVVLEARHLCLELQGVKKLGTIVTTSALRGIFHVHSASRGELFQLIQGRDGVL

SEQ ID NO: 6332 - protein, 190 aa, unidentified; identical to SEQ ID NO: 6123
  source 1..190: note = Roizmanbacteria bacterium
  REGION 1..190: note = tr|A0A2M8KMQ9|A0A2M8KMQ9_9BACT GTP cyclohydrolase 1; OS = Candidatus Roizmanbacteria bacterium CG10_big_fil_rev_8_21_14_0_10_36_26 OX=1974851 GN=folE; PE = 3 SV=1

SEQ ID NO: 6333 - protein, 179 aa, unidentified
  source 1..179: note = Roizmanbacteria bacterium
  REGION 1..179: note = tr|A0A1F7GTX3|A0A1F7GTX3_9BACT GTP cyclohydrolase 1; OS = Candidatus Roizmanbacteria bacterium RIFCSPHIGHO2_01_FULL_39_8 OX=1802033 GN=folE PE=3 SV=1
MKLTPTIKKLLIYFGEDIKRDGLKETPIRVERMYEELLSGYKKDPKSIFKKFESESYKGLITVTNIDFFSLCEHHLLPFFGKVSIGYIPNGHILGLSKFARLVDIYAKRLQVQEHLTTQIANSLMKHLNAQGVIVHITATHLCMSMRGVNKTNVVTKTTIVRGVLKEDQYLQNQFYMQI

SEQ ID NO: 6334 - protein, 187 aa, unidentified
  source 1..187: note = Rokubacteria bacterium
  REGION 1..187: note = tr|A0A1F7PAQ5|A0A1F7PAQ5_9BACT GTP cyclohydrolase 1; OS = Candidatus Rokubacteria bacterium RIFCSPLOWO2_12_FULL_71_22 OX=1802110 GN=folE PE=3 SV=1
MIEKLIEQLLKELGQDVSREGLAKTPERVAQALRYLTSGYDKDVKDVLNDAMFVEDYDEMVIVKDIDFFSMCEHHVLPFFGKAHVAYMPRKKIVGLSKIPRLVEMYSRRLQVQERLTTQIATTLDEALQPRGVAVVMEAIHMCMLMRGVEKQNSKAVTSAMLGAFRDRPETRAEFMELIKAGRGLQI

SEQ ID NO: 6335 - protein, 193 aa, unidentified
  source 1..193: note = Rokubacteria bacterium
  REGION 1..193: note = tr|A0A1Q7I358|A0A1Q7I358_9BACT GTP cyclohydrolase 1; OS = Candidatus Rokubacteria bacterium 13_1_40CM_4_67_11; OX = 1805361 GN=folE PE=3 SV=1
MSEEPGTVARLVGQLLAELGEDACREGLARTPERVEKSLRYLTSGYRMNVHDVLNDALFVEEYDEMVVVKDIDVFSLCEHHLLPFAGKCHVAYMPRKKIVGLSKIPRLVEMYARRLQVQERLTTQIATTLDEVLQPRGVAVVMEAFHLCMLMRGVEKQNSKAVTSAMLGAFRDRPETRAEFMALIKSSPGLSI

SEQ ID NO: 6336 - protein, 206 aa, unidentified
  source 1..206: note = Saccharicenans subterraneum
  REGION 1..206: note = tr|A0A3E2BML5|A0A3E2BML5_9BACT GTP cyclohydrolase 1; OS = Candidatus Saccharicenans subterraneum OX=2508984; GN = folE PE=3 SV=1
MAQKNRKRNQVKKMDLKKIEQGVRLVIEGIGEDPDRPGLKGTPGRVARMMEDILGGTQIDPQADLEVFQDERHDELVLIRNIPLYSFCEHHLLPFAGVAHVAYIPKEGRIIGLSKIARLVDTLARRLQVQERLTKQVADILNATLNPLGVMVVIEAEHLCMSMRGVKKPKAITVTSAVRGSFRNNPATRTEAMMLIKGGIPGGREV

SEQ ID NO: 6337 - protein, 185 aa, unidentified
  source 1..185: note = Saganbacteria bacterium
  REGION 1..185: note = tr|A0A2H0XVP6|A0A2H0XVP6_9BACT GTP cyclohydrolase 1; OS = Candidatus Saganbacteria bacterium CG08_land_8_20_14_0_20_45_16 OX=2014293 GN=folE PE=3 SV=1
MINQKKIEKAVKEILSAIGEDPNRPGLKDTPKRVARMYAELFAGLHKDPANELTVFHEADHEEMVMVKDIPFYSMCEHHLIPFAGKAHVVYIPTKGKVTGLSKLVRVVECFVRRPQVQERLTSQIADCLMQKLKPQGVMIIIEAEHMCMSMRGVKKPGAMTTTSAVRGIFQKNAKTRSEALSLLK

SEQ ID NO: 6338 - protein, 185 aa, unidentified
  source 1..185: note = Scalindua brodae
  REGION 1..185: note = tr|A0A0B0EJP7|A0A0B0EJP7_9BACT GTP cyclohydrolase 1; OS = Candidatus Scalindua brodae OX=237368 GN=gch PE=3 SV=1
MDKKKITMAVKLFLEGIGEDPERGGLKDTPKRVAEMCEEIFSGIGEDSAKVIKVLKSEDHDEIVLLKDISFFSVCEHHLLPFIGKAHVAYIPNGSKVTGLSKLARVVEIESKKPQVQERLTTSIAEAIMKALRPKGVMVVIEAEHLCMAMRGIKKPGSKAQTSVVRGIFRKNPATRAEAMSLIKD

SEQ ID NO: 6339 - protein, 186 aa, unidentified
  source 1..186: note = Scalindua sp.
  REGION 1..186: note = tr|A0A523CQQ0|A0A523CQQ0_9BACT GTP cyclohydrolase 1; OS = Candidatus Scalindua sp. AMX11 OX=2555784 GN=folE PE=3; SV = 1
MDKQKIMKATKLLLEGIGEDPSREGLLETPRRVAEMCEEIFSGIGADSGEQIKILQSEDHDEIVLLKDIPFFSVCEHHLLPFIGKAHVAYIPNGNRVTGLSKLARVVDTESKKLQMQERLTTAIANSIMNALQPKGAMAIVEAEHLCMTMRGIKKPGTITRTSVVRGIFRESLATRTEAMSLIMGR

SEQ ID NO: 6340 - protein, 178 aa, unidentified
  source 1..178: note = Schekmanbacteria bacterium
  REGION 1..178: note = tr|A0A1F7RPL9|A0A1F7RPL9_9BACT GTP cyclohydrolase 1; OS = Candidatus Schekmanbacteria bacterium RBG_16_38_10; OX = 1817879 GN=folE PE=3 SV=1
MEELIRKILAGIGENPNRQGLKKTPSRVQKTLKFLTKGYGEDPKKIFEGAIFREDYEEMILLKGIDIYSLCEHHLLPFFGKCHVAYIPKKKLIGLSKIAKLVEVYSRRLQVQERLTNQIAKTLEEELDPLGVAVVIEAQHLCMIMRGVEKQNSVAVTSSMLGGFRRPETRAEFMNLIK

SEQ ID NO: 6341 - protein, 186 aa, unidentified
  source 1..186: note = Schekmanbacteria bacterium
  REGION 1..186: note = tr|A0A1F7RL31|A0A1F7RL31_9BACT GTP cyclohydrolase 1; OS = Candidatus Schekmanbacteria bacterium RBG_13_48_7; OX = 1817878 GN=folE PE=3 SV=1
MSDPLEDCIFKILHELGEDTDREGLKRTPERVAKSLRFLTKGYDLDVKSVFENAVFEAENFDEMVLLKDIEMYSMCEHHLLPFFGKCHISYVPRKKIIGLSKIPRIVEVFARRLQVQERMTTQIAYAIKDALEPYGVGVIIEAYHLCMMMRGVEKQNCETLTSCMLGVYKSDPRTRAEFLSLIRKK

SEQ ID NO: 6342 - protein, 218 aa, unidentified
  source 1..218: note = Schmidhempelia bombi
  REGION 1..218: note = tr|A0A484GBW1|A0A484GBW1_9GAMM GTP cyclohydrolase 1; OS = Candidatus Schmidhempelia bombi str. Bimp OX=1387197; GN = folE PE=3 SV=1
MSILSNEAILVKQALIQKNLETPFKRVALTKDERKKQIQHHFTKIMQLMELDLSDDSLVETPHRMAKMYVDEIFLGLDYANFPKITLIENKMQFDEMVTVRDITLTSICEHHFVTIDGKATVSYIPKDYVIGLSKINRIVAFFSQRPQVQERLTQQILVALQTLLGTNNVAVSIDAAHYCVKARGIKDATSMTTTTALGGGFKTNASTRQEFLRSIRH

SEQ ID NO: 6343 - protein, 221 aa, unidentified
  source 1..221: note = Sodalis pierantonius
  REGION 1..221: note = tr|K7TFX6|K7TFX6_9GAMM GTP cyclohydrolase 1; OS = Candidatus Sodalis pierantonius str. SOPE OX=2342; GN = folE PE=3 SV=1
MVTLTKEASQVREALLARGLETPLRGEVLDNEVRKRLIAEHMTAIMTLLNLDLTDDSLAETPHRIAKMYVEEVCAGLDYANFPKITVIENKMKVDEMVTVRDITLTSTCEHHFVIIDGKATVSYIPKHCVIGLSKINRIVQFFVQRPQVQERLTQQILLALQTLLGTNNVAVSIDAVHYCVKARGIRDATSTTTTTSLGGLFKSSQNTRQEFLRAVTHHNG

SEQ ID NO: 6344 - protein, 201 aa, unidentified
  source 1..201: note = Streptomyces philanthi
  REGION 1..201: note = tr|A0A367F239|A0A367F239_9ACTN GTP cyclohydrolase 1; OS = Candidatus Streptomyces philanthi OX=371608 GN=folE; PE = 3 SV=1
MTDPVTLDGASPIGEFDEKRAENAVRELLIAVGEDPDREGLLETPARVARAYREMFAGLRQRPEDVLTTTFDLGHDELVLVKDIEVVSQCEHHLLPFHGVAHVGYIPAASGKITGLSKLARLVDVFARRPQVQERLTTQIADSLMRILEPRGVIVVIECEHMCMSVRGVRKPGAKTTTSAVRGQLRDATTRAEAMSLILAK

SEQ ID NO: 6345 - protein, 230 aa, unidentified
  source 1..230: note = Sulfobium mesophilum
  REGION 1..230: note = tr|A0A2U3QIB8|A0A2U3QIB8_9BACT GTP cyclohydrolase 1; OS = Candidatus Sulfobium mesophilum OX=2016548 GN=folE PE=3; SV = 1
MNFQKGNGIVVRRARVIFFFYLLGISGKIFTSDIYGSIKKNYKMNLKKIEKGVRLIIEGIGEDPERPGIRGTPQRVARMYQEIFSGLETPTEEILKHIEGESHDEMVLLKDIPFYSVCEHHLLPFIGKAHVAYVPGAGKIAGIGELAKAVEIFAKRPQVQERLTAQLADMIMMKLKPKGAMVVIDAEHLCLSMRGMKKPGSRTVTSAVRGIFRSKESTRQELLELIKQRD

SEQ ID NO: 6346 - protein, 265 aa, unidentified
  source 1..265: note = Sulfobium mesophilum
  REGION 1..265: note = tr|A0A2U3QGX7|A0A2U3QGX7_9BACT Putative GTP cyclohydrolase 1 type 2 OS=Candidatus Sulfobium mesophilum; OX = 2016548 GN=NBG4_30068 PE=4 SV=1
MCTDASGADRRQVKETALRTFVSFLDSELALSEFPKDESINGLQVEGHGSVRKIGLAVDACGYVFETAAERNIDFLFVHHGLIWSGIRAVRGVTKKRLKALLDSGISLYACHLPLDWHPKYGNNAELLRVLSIKKMGEFGEYHGKRIGYWGKTRAPLSTADFVNVVNKALGIKSSCVDFRKKVRNVGVVSGGGWSAIHDAEELGIDTFLTGEPSHSAYHLAKEIGVNLIFAGHYATETLGVKAVGRMLKKKFGLPVEFIDYPTGL

SEQ ID NO: 6347 - protein, 205 aa, unidentified
  source 1..205: note = Sulfopaludibacter sp.
  REGION 1..205: note = tr|A0A2N9MXM5|A0A2N9MXM5_9BACT GTP cyclohydrolase 1; OS = Candidatus Sulfopaludibacter sp. SbA3 OX=2043164; GN = folE PE=3 SV=1
MKSNKAIVKVMQAKLEQPDLAPLVREILAGLGENPERNGLARTPHRVDQALKFLTSGYRMDVQKVVNGALYDVKYDEMVVVKDIEFFSLCEHHMLPFFGKMHVAYLPKNRVIGLSKIPRIVDVFARRLQIQERLTQEVAQTIQQVIDPVGVGVICEARHFCMMMRGVEKQHSGAMTSAMLGAFRTRKETRDEFLALVNHRGSGGL

SEQ ID NO: 6348 - protein, 199 aa, unidentified
  source 1..199: note = Sulfopaludibacter sp.
  REGION 1..199: note = tr|A0A2U3K1S9|A0A2U3K1S9_9BACT GTP cyclohydrolase 1; OS = Candidatus Sulfopaludibacter sp. SbA4 OX=2043165; GN = folE PE=3 SV=1
MKPNKAVVKVITPKLEEGTIAPLIREVLEKLGEDPQREGLERTPERVDKALRFLTSGYRTDIRKLVNGALYEVKYDEMVVVRDIEFFSLCEHHLLPFFGKMHVAYLPKAKVIGLSKIPRIVDAFARRLQIQERLTQEVAQTIQEIIDPAGVGVICEARHFCMMMRGVEKQHSGAMTSAMLGAFRDCKETRDEFLALVNH

SEQ ID NO: 6349 - protein, 199 aa, unidentified
  source 1..199: note = Sulfotelmatobacter sp.
  REGION 1..199: note = tr|A0A2N9N8Q3|A0A2N9N8Q3_9BACT GTP cyclohydrolase 1; OS = Candidatus Sulfotelmatobacter sp. SbA7 OX=2043160; GN = folE PE=3 SV=1
MKSSVESPTITGASFEELVREMIVRLGEDPEREGLTRTPERVHRAYEHLMKGYKEDPEAMLKKALFTVTYDQMVIVKDVEMFSLCEHHMLPFFGKVHVAYIPNGKVIGLSKIPRLVDIFSRRLQIQERLTTQIAETIQKAIAPQGVGVVIEARHLCMMMRGVEKQHSAAVTSSMLGCFREEQETRTEFLSLIRNRANGV

SEQ ID NO: 6350 - protein, 199 aa, unidentified
  source 1..199: note = Sulfotelmatobacter kueseliae
  REGION 1..199: note = tr|A0A2U3KP25|A0A2U3KP25_9BACT GTP cyclohydrolase 1; OS = Candidatus Sulfotelmatobacter kueseliae OX=2042962; GN = folE PE=3 SV=1
MKPAIEPATLTSARFEDLVREMLVRLGEDPRREGLTATPERVRKALEFLTKGYQEDPEALLKGALFTVSYDEMVIVKDIEMFSLCEHHMLPFFGKVHVAYIPNGRVIGLSKIPRLIELFSRRLQIQERLTTQIAETIQKVIEPQGVGVVIEARHLCMMMRGVEKQHSAAVTSSMLGCFRQEEETRSEFLSLIRQRANGV

SEQ ID NO: 6351 - protein, 210 aa, unidentified
  source 1..210: note = Sulfotelmatomonas gaucii
  REGION 1..210: note = tr|A0A2N9L4U3|A0A2N9L4U3_9BACT GTP cyclohydrolase 1; OS = Candidatus Sulfotelmatomonas gaucii OX=2043161 GN=folE; PE = 3 SV=1
MGRPMVVNKAVKPAVVADEGLGAFSTQEMYREILSRLGEDPDRDGLLATPERVEKSMAFLTKGYDQDPAQILHGALFDVDYDEMVIVKDIEMFSLCEHHMLPFFGKVHVAYIPKRKVIGLSKIPRLVEVFARRLQVQERLTRQIADAIQEAIEPQGVGVVIEARHLCMMMRGIEKQHSSTVTSAMVGCFRQKETRTEFLALLRQPATNGV

SEQ ID NO: 6352 - protein, 195 aa, Sulfuricurvum sp.
  REGION 1..195: note = tr|K7SQK5|K7SQK5_9HELI GTP cyclohydrolase 1; OS = Candidatus Sulfuricurvum sp. RIFRC-1 OX=1249480 GN=folE; PE = 3 SV=1
MSKENEQQNFEEAVKTMIRYVGEDVNREGLEKTPSRVLKAYEFMFGGYKEDPQTILNSAMFASSNDEMVLVKDIEFYSTCEHHLLPIIGRAHVAYIPNGKVVGLSKIPRVVDVFARRMQIQEQLTEQIADALMEAVEPKGVAVVIQARHMCMEMRGVEKICSTTTSSALRGLFKKDEKTRMEFFSLINSSSGNRY

SEQ ID NO: 6353 - protein, 217 aa, unidentified
  source 1..217: note = Sumerlaea chitinovorans
  REGION 1..217: note = tr|A0A2Z4Y8R0|A0A2Z4Y8R0_9BACT GTP cyclohydrolase 1; OS = Candidatus Sumerlaea chitinovorans OX=2250252 GN=folE; PE = 3 SV=1
MAETHAHIRDIIEQADELALAEDVQPSHNPELEALVRRLLELIGEDPQREGLQRTPLRVARAWEALTAGYTMSLDRIVNNAIFHEKYDEIVSVKNIHFFSLCEHHLLPFFGIANVGYIPNGRVIGLSKIPRIVDMFARRLQLQERLTSQIAETIQQVLRPRGVAVVVEAYHLCMMMRGVEKQDSLTVTSCMLGDFKTNPQTRNEFLELCGRHSLKGR

SEQ ID NO: 6354 - protein, 204 aa, unidentified
  source 1..204: note = Sumerlaeota bacterium
  REGION 1..204: note = tr|A0A353GGL4|A0A353GGL4_9BACT GTP cyclohydrolase 1; OS = Candidatus Sumerlaeota bacterium OX=2107588 GN=folE; PE = 3 SV=1
MAFCDCSDDNNTGAENPALAQLEKIGRDLIVTVGENPEREGLLRTPQRFARSWEYLTSGYHVDISKLVNNAVFEEAYDEIIAVKNIEFFSMCEHHLLPFYGKCSVAYIPNGRVIGLSKIPRIVDAFSRRLQIQECLTRQIAAALNEHLSPIGVAVVMEARHMCMCMRGVEKQTSTCLTSELTGVFKRSAKSRSEVMTLFGMNLK

SEQ ID NO: 6355 - protein, 264 aa, unidentified
  source 1..264: note = Synechococcus spongiarum
  REGION 1..264: note = tr|A0A165B1N4|A0A165B1N4_9SYNE GTP cyclohydrolase I type 1 OS=Candidatus Synechococcus spongiarum OX=431041; GN = FLM9_1332 PE=4 SV=1
MTLDDLKPMPSLEADFDVAPHLPLSVTGTADRATRPATPSTTSARIRQRLQAARASFFANDNIAAYLEEGELENLQEEVVEQVRGLLKTLVIDVDNDHNTAETAERVAKMYLHEVFKGRYHPQPKVASFPNVRELDEIYTVGPITVRSACSHHLVPILGYCWIGIQPGERVIGLSKFSRIADWVFSRPHIQEEAVIILADEIEALCKPRGLGIVLKAQHYCMKWRGVKEPQASMVNSVVRGSFRSNASMKKEFFDLIRQQESLL

SEQ ID NO: 6356 - protein, 192 aa, unidentified
  source 1..192: note = Syntrophonatronum acetioxidans
  REGION 1..192: note = tr|A0A424YIV7|A0A424YIV7_9FIRM GTP cyclohydrolase 1; OS = Candidatus Syntrophonatronum acetioxidans OX=1795816; GN = folE PE=3 SV=1
MSQMIDQEKIEEAIKMILEAIGEDPTREGLVETPKRVGKMYAEMFEGLHEDPRGHLKKCFTEDEHDEMILVRDISIYSMCEHHLLPFYGKAHVAYIPAHGRITGLSKIARVVENIARRPQLQERLTSEVADVIMETLDPKGVVVVVEAEHLCMTIRGIKKPGSQTITSAVRGIFRRNQVSRSEAFSLIKGSR

SEQ ID NO: 6357 - protein, 258 aa, unidentified
  source 1..258: note = Syntrophosphaera thermopropionivorans
  REGION 1..258: note = tr|A0A4R5JR47|A0A4R5JR47_9BACT GTP cyclohydrolase FolE2 OS=Candidatus Syntrophosphaera thermopropionivorans; OX = 2593015 GN=folE2 PE=3 SV=1
MSIPDIQSQDDFRQIAIEKVGVKGLSYPIVVDDRENGTQDTVGNINLYVDLHPSKRGIHMSRFIEVLNRYHHDSITGNLESLLQDLKSIMKAEAAYIDISFPYFIKKMAPVSKIPSLMDYQCFFNASFNNYFQLWIGTTVPVTTLCPCSRAISINGAHNQRAQVTIKVRYTDFVWLEELIQIAEESASSPVYPLLKRRDEKFVTENAYSNPKFVEDIVREVTQKLEKDSRIVEFIIEVESMESIHNHNAYAMTHRVKQ

SEQ ID NO: 6358 - protein, 272 aa, unidentified
  source 1..272: note = Tectomicrobia bacterium
  REGION 1..272: note = tr|A0A1F7TP27|A0A1F7TP27_9BACT GTP cyclohydrolase FolE2 OS=Candidatus Tectomicrobia bacterium RIFCSPLOWO2_12_FULL_69_37 OX=1802343 GN=folE2 PE=3 SV=1
MSGTPAESADLADVQGGTDDRNVKIDKVGVKNIRYPIVVRDRAKKFQHTVGTVNMYVDLPHQFKGTHMSRFLEVLNEHNGLISVDRVPEILESIRQRLDAQTAHFEVTFPYFVTREAPVTGASGMMALECGFDASAGAVNDFVLSVKVNVATLCPCSKEISARGAHNQRGNVHIQVRFEGELWIEEIAEVAEESGSCALYPVLKREDEKFVTEKAFDNPRFVEDVVREASLRLRQDPRVRWFQIQVENFESIHDHNAYAFVEEWRVPPAPKG

SEQ ID NO: 6359 - protein, 272 aa, unidentified; identical to SEQ ID NO: 6358
  source 1..272: note = Tectomicrobia bacterium
  REGION 1..272: note = tr|A0A1F7T4P0|A0A1F7T4P0_9BACT GTP cyclohydrolase FolE2 OS=Candidatus Tectomicrobia bacterium RIFCSPLOWO2_02_FULL_70_19 OX=1802342 GN=folE2 PE=3 SV=1

SEQ ID NO: 6360 - protein, 264 aa, unidentified
  source 1..264: note = Tenderia electrophaga
  REGION 1..264: note = tr|A0A0S2T9S8|A0A0S2T9S8_9GAMM GTP cyclohydrolase FolE2 OS=Candidatus Tenderia electrophaga OX=1748243; GN = folE2 PE=3 SV=1
MAAIDDVQSSADTRRIPINKVGIKDIRHPVRVKDRSEGEQHTIANFNMYVNLPHNFKGTHMSRFVEILNNYERELSVESFEHMLQEMVTRLDAEAGHIEMSFSYFVDKPAPVSGVKSLMDYDVTLIGEIRDATPRVDIKVVVPVTSLCPCSKQISERGAHNQRSHVTVSVRTRDFVWIEDIIDLVEGQASCELYGLLKRPDEKYVTERAYDNPKFVEDMVRDVAASLNADDRIVAYTVESENFESIHNHSAYALIEQDKTATLL

SEQ ID NO: 6361 - protein, 209 aa, unidentified
  source 1..209: note = Terasakiella magnetica
  REGION 1..209: note = tr|A0A1C3RIH1|A0A1C3RIH1_9RHIZ GTP cyclohydrolase 1; OS = Candidatus Terasakiella magnetica OX=1867952 GN=folE; PE = 3 SV=1
MSTKPKLDLVGAKPSREEAEEAVRTLIRWTGDDHTREGLLGTPDRVVRSYEEFFAGYNQDPEEILKRTFEETDGYDEMVLLRDIRFESHCEHHMVPILGKAHIGYMPKNRVVGISKLARIIEVYAKRLQIQEKMTAQVANVIQDVLEPHGVAVVIEAQHQCMTTRGVYKPGVTMVTSRMLGAFRNNMATRKEFLAMIGNPASGQSVSPY

SEQ ID NO: 6362 - protein, 189 aa, unidentified
  source 1..189: note = Termititenax aidoneus
  REGION 1..189: note = tr|A0A388TC69|A0A388TC69_9BACT GTP cyclohydrolase 1; OS = Candidatus Termititenax aidoneus OX=2218524 GN=folE; PE = 3 SV=1
MLYCPPVENLYKAILAAIGEDASREGLRDTPRRAAQAMQYLTKGYQEDIDRLVNNALFEAESDDMVIVRDIELYSLCEHHLLPFIGKCHVGYIPTRKIIGLSKIPRIVDAYARRLQVQERLTKQIANTILKYTQADGVGVVIEAQHLCTMMRGVEKQNSVMTTSCMLGSFRRESATRAEFMALIRKSSR

SEQ ID NO: 6363 - protein, 182 aa, unidentified
  source 1..182: note = Termititenax persephonae
  REGION 1..182: note = tr|A0A388TEF3|A0A388TEF3_9BACT GTP cyclohydrolase 1; OS = Candidatus Termititenax persephonae OX=2218525 GN=folE; PE = 3 SV=1
MENLYQALLSAIGEDLGREGLRDTPRRAAQALQYLTKGYQADLDQLVNNALFTAESDDMVIVRDIELYSLCEHHLLPFIGKCHVGYIPSQKIIGLSKIPRIVDAYARRLQVQERLTKQIADTILKYTQADGVGVVIEAQHLCTMMRGVEKQNSVMTTSCMLGSFRRESATRAEFMSLIRKQA

SEQ ID NO: 6364 - protein, 218 aa, unidentified
  source 1..218: note = Thermochlorobacter aerophilum
  REGION 1..218: note = tr|A0A395LYH7|A0A395LYH7_9BACT GTP cyclohydrolase 1; OS = Candidatus Thermochlorobacter aerophilum OX=1868324; GN = folE PE=3 SV=1
MQGKSQNEKRMIASLQGDEEDFYPNAASDEAQVLARIAENVKENLRLLGENPEREGLLRTPERVAKALMYLTSGYRCNPREILLSAVFHEKYDEMVLVKDIEVFSMCEHHMLPFFGKAHVAYIPNGKIVGLSKIPRVVDVYARRLQVQERMTQEIRDIIEEVLEPKGVAVVIEAKHLCMIMRGVEKQNSITTTSAMSGEFLKNSATRSEFMRLIKSFN

SEQ ID NO: 6365 - protein, 219 aa, unidentified
  source 1..219: note = Thermochlorobacter aerophilum
  REGION 1..219: note = tr|A0A395LZL2|A0A395LZL2_9BACT GTP cyclohydrolase 1; OS = Candidatus Thermochlorobacter aerophilum OX=1868324; GN = folE PE=3 SV=1
MMQGKSQNEKRMIASLQGDEEDFYPNAASDEAQVLARIAENVKENLRLLGENPEREGLLRTPERVAKALMYLTSGYRCDPREILLSAVFHEKYDEMVLVKDIEVFSMCEHHMLPFFGKAHVAYIPNGKIVGLSKIPRVVDVYARRLQVQERMTQEIRDIIEEVLEPKGVAVVIEAKHLCMIMRGVEKQNSITTTSAMSGEFLKNSATRSEFMRLIKSFN

SEQ ID NO: 6366 - protein, 225 aa, unidentified
  source 1..225: note = Thermofonsia bacterium
  REGION 1..225: note = tr|A0A3M0WWM4|A0A3M0WWM4_9CHLR GTP cyclohydrolase 1; OS = Candidatus Thermofonsia bacterium OX=2364220 GN=folE; PE = 3 SV=1
MKNLQSTAINGNGRLHTNGNGHNGHILAPATLTPQKAVIEEAVRAILVNVGENPEREGLLKTPHRVAKMYDEVLSGYHQNLETLVNNALFDVDYQEMVVVKDIEYFSMCEHHMLPFFGRAHVAYIPRDKVIGLSKIPRIVEMFARRLQVQERMTNQIAEAIEEVLDPLGVAVVVQGSHMCSMMRGVKKEHPEMVTSTYRGLFREDKETKRELMEHLRRPSTKSIF

SEQ ID NO: 6367 - protein, 268 aa, unidentified
  source 1..268: note = Thermofonsia Clade
  REGION 1..268: note = tr|A0A2M8PWZ6|A0A2M8PWZ6_9CHLR GTP cyclohydrolase 1; OS = Candidatus Thermofonsia Clade 2 bacterium OX=2364211; GN = folE PE=3 SV=1
MHNSSQQHNGHQSYEEPSSKRDHHSALDTQEIPNISFESFTVGEPTGTVVSGHTLLASAENLLPVFPEEYEQTEILTGDKQQVARIERAIFDLLDAFNVNWDDPNYTDTPKRVAKAYVEYWAAGYARHAEDEITVFPNTHGSDDLVLVKDMKFYSTCSHHLAPFMGYAAIAYIPEQYLLGLSKLGRILDIYARRFQLQERIGAQTADKLMELIQPKGVMVMLYDVEHMCMSSRGVKLHEANTTTLATRGIFKTDAQLRQEVLSMICHR

SEQ ID NO: 6368 - protein, 199 aa, unidentified
  source 1..199: note = Thermokryptus mobilis
  REGION 1..199: note = tr|A0A0S4N4P1|A0A0S4N4P1_9BACT GTP cyclohydrolase 1; OS = Candidatus Thermokryptus mobilis OX=1643428 GN=folE; PE = 3 SV=1
MSVDKLEEAVKPDLEKIASLIHEFLIELGEDPNREGLKKTPMRVAKAFEYLTKGYREDIEKVLNGAVFNEKYNEMVIVKNIDFFSLCEHHLLPFYGKVHIAYIPNGKIVGLSKIPRIVEVFSRRLQVQERLTQQIADTLNEYLQPKGVAVVIEAKHLCMIMRGVEKQNSVATTSAMHGVFVKDAKTRDEFMHLISENLM

SEQ ID NO: 6369 - protein, 272 aa, unidentified
  source 1..272: note = Thiodiazotropha endoloripes
  REGION 1..272: note = tr|A0A1E2URG1|A0A1E2URG1_9GAMM GTP cyclohydrolase FolE2 OS=Candidatus Thiodiazotropha endoloripes OX=1818881; GN = folE2 PE=3 SV=1
MLDKTPVNGSQIADVQNSADTRQIAINKVGIKDISHPMRIRDRSEGEQHTIANFNMYVNLPHNFKGTHMSRFVEILNSHETEITVESFKDMLAEMTERLEAESGHIEMNFPFFINKTAPISGVKSLLDYDVTLIGEIHGGKPIIEIKVVVPVTSLCPCSKKISDRGAHNQRSHVTVQARTNGFIWIEEIIDMVEKQASCELYGLLKRPDEKFVTETAYDNPKFVEDMVRDIAVQFNREDRISAYVIESENFESIHNHSAYALIERDKTTDPD

SEQ ID NO: 6370 - protein, 224 aa, unidentified
  source 1..224: note = Thiodiazotropha endoloripes
  REGION 1..224: note = tr|A0A1E2UNN9|A0A1E2UNN9_9GAMM GTP cyclohydrolase 1; OS = Candidatus Thiodiazotropha endoloripes OX=1818881; GN = folE PE=3 SV=1
MLNKPLRLTKQPKISDEAALVRDALIEHGLETPMFDNGMSQDQKYDRIRDLMSEVMQTLGLDLSDDSLIETPHRIAKMYIHEIFSGLDYSHFPKITLIDNKMGSDEMISVEEIDLTSTCEHHFITIDGKVKVAYIPSASLIGLSKINRIVRFFAQRPQVQERLTRQILVALQTLLDTEDVAVSIEATHYCVKARGVMDSSSHTRTKALGGSFKQDPYLRAEFLA

SEQ ID NO: 6371 - protein, 212 aa, unidentified
  source 1..212: note = Thiodictyon syntrophicum
  REGION 1..212: note = tr|A0A2K8UCW6|A0A2K8UCW6_9GAMM GTP cyclohydrolase 1; OS = Candidatus Thiodictyon syntrophicum OX=1166950 GN=folE; PE = 3 SV=1
MSEKPKLSKVLAEARYAATFEAESEEEVYDRKKEALVRSMLQEIGEDPDREGLRRTPLRVAKAMDFLTSGYQLSAAEIIKKALFVEDVKEMVVIRDIEFYSMCEHHMLPFFGHAHVGYLPNGKVVGLSKVARVVDCFARRLQVQERLTNQVADALIEHLGAHGVAVVMEASHTCMMMRGVQKQRSTTVSSAMRGSFETNQLTRAEFMSFIRA

SEQ ID NO: 6372 - protein, 285 aa, unidentified
  source 1..285: note = Thiodictyon syntrophicum
  REGION 1..285: note = tr|A0A2K8UFW5|A0A2K8UFW5_9GAMM GTP cyclohydrolase FolE2 OS=Candidatus Thiodictyon syntrophicum OX=1166950; GN = folE2 PE=3 SV=1
MQQATESTCGATACVTPGIADVQGSADTRHIAIDKVGIKDIRHPVRVRDRGGLEQHTVANFNMYVYLPHNFKGTHMSRFVQILNSQERELSVDSFKEMLREMSRRLESAAGHIEMRFPFFVNKRAPVTGVESLLDYEVTFIGEIHDGDPTLDIKVVVPVTSLCPCSKEIAAYGAHNQRSHVTVQVRTRGFIWIEELIELVEREASSQLYGLLKRPDEKYVTEHAYDNPKFVEDMVRDVATRLNADERVAAYVVQSENFESIHNHSAYALIERDKDAEARIAEASL

SEQ ID NO: 6373 - protein, 271 aa, unidentified
  source 1..271: note = Thioglobus sp.
  REGION 1..271: note = tr|A0A520MN50|A0A520MN50_9GAMM GTP cyclohydrolase FolE2 OS=Candidatus Thioglobus sp. OX=2026721 GN=folE2; PE = 3 SV=1
MLETETESHNVNEIEDVQGSPDTRNITIDKVGVKDLRHPVRIQDRSGHDQHTVANFSMYVELPHNFKGTHMSRFVEILSRHEREISVQSFRSMLQETRDHLDAGTSHIEMAFPFFLEKAAPITGVKSLMDYQVTFVGEAIDDEVSTEVRVVVPVTSLCPCSKKISQYGAHNQRSHVTVSVKSKAFIWIEEIIDIVEQEASCELYGLLKRPDEKYVTERAYENPKFVEDMVRDVAGRLNSDDRILKYTVEAENFESIHNHSAYAQINFSRDL

SEQ ID NO: 6374 - protein, 263 aa, unidentified
  source 1..263: note = Thioglobus sp.
  REGION 1..263: note = tr|A0A432TZI2|A0A432TZI2_9GAMM GTP cyclohydrolase FolE2 OS=Candidatus Thioglobus sp. OX=2026721 GN=folE2; PE = 3 SV=1
MKSCDLPDTQNKKDIRQIVIDKVGIKDISHPITYVDREGNHMPTIGNFTMTVTLPEHVKGTHMSRFIEILNDGPCEFNSGNFDRIIEKVRDKLESETAHITLDFPFFRKKVAPSSGVESMMDYQVTLYGILDKGESEVMMKVLVPVTSLCPCSKSISKYGAHNQRSHITIKAKVTKGKTLYIEDLIDLAERKASCELYAILKREDEKVVTERAYDNPAFVEDLVRDIAVELNNDERINYYRLESENFESIHNHSAYALVENQK

SEQ ID NO: 6375 - protein, 266 aa, unidentified
  source 1..266: note = Thiomargarita nelsonii
  REGION 1..266: note = tr|A0A0A6PH84|A0A0A6PH84_9GAMM GTP cyclohydrolase FolE2 OS=Candidatus Thiomargarita nelsonii OX=1003181; GN = folE2 PE=3 SV=1
MNQPVTQMPDVQNSVDTRRLAIDKVGIKDIKYPVRVKDRSGREQHTIANFNMYVNLPHDFKGTHMSRFVEILNEHEYEITVESFKQMLVEMNKRLEAESGHIEMIFNYFVRKTAPISGVKSLLDYEVTFIGEITGETPSITVKVVVPATSLCPCSKKISDYGAHNQRSHVTITAKTNGFLWIEDLIDLVEKEASCELYGLLKRPDEKYVTEHAYNNPKFVEDIVRDIAAKLNQDDRIAGYIVESENFESIHNHSAYAMIENDKQLK

SEQ ID NO: 6376 - protein, 196 aa, unidentified
  source 1..196: note = Tokpelaia sp.
  REGION 1..196: note = tr|A0A368A045|A0A368A045_9RHIZ GTP cyclohydrolase 1; OS = Candidatus Tokpelaia sp. JSC188 OX=2079009 GN=folE PE=3; SV = 1
MLGIKRPTEEEVREAIRVLLLWIGENPEREGLLNTPARVARAYSEFFSGYNQSVEEILGTVFEDLSGYEEPVIIRDMPFFSHCEHHMLPIIGKAHVGYLPNGNLVGLSKIFRVVEVFARRMQTQEAMTAQIANALNTYLKPFGVAVFIEAEHLCMSMRGVGKQGAATITSAFHGIYKKDQRAQARFITAVVQGQRR

SEQ ID NO: 6377 - protein, 206 aa, unidentified
  source 1..206: note = Tokpelaia sp.
  REGION 1..206: note = tr|A0A367ZZT0|A0A367ZZT0_9RHIZ GTP cyclohydrolase 1; OS = Candidatus Tokpelaia sp. JSC085 OX=2079008 GN=folE PE=3; SV = 1
MIFSKSRNSEKSTVLRSKENPTKEEAKQAIRTLLLWAGENPEREGLLKTPERVIKAYGELFGGYSQSVEDILGTVFKDVSGYDEPVLIKDISFFSHCEHHMVPIIGKAHVAYQPDGQVIGLSKVSRTVEVFARRLQTQEAMTAQIADAFDRHLKPRGVAVLIEAEHLCMTMRGVQKQGSTTVTIALRGMYKSDKNAQASFMKMVEG

SEQ ID NO: 6378 - protein, 185 aa, unidentified
  source 1..185: note = Vecturithrix granuli
  REGION 1..185: note = tr|A0A081C5M9|A0A081C5M9_9BACT GTP cyclohydrolase 1; OS = Candidatus Vecturithrix granuli OX=1499967 GN=folE PE=3; SV = 1
MNEVRVQELIRQLLIEIGEDPEREGLQKTPERVAKSYAFLTKGYRTDPAEVINNAVFQSEANNMIIARDIEVYSLCEHHLLPFYGVCHIGYVAKKHVLGLSKLSRIVELYSRRLQIQERLTSQIARAIKDAIDAEGVGVVMECKHLCMMMRGVEKQHSTMTTSSVLGSFHHSQSTRLEFLNLIGK

SEQ ID NO: 6379 - protein, 228 aa, unidentified
  source 1..228: note = Viridilinea mediisalina
  REGION 1..228: note = tr|A0A2A6RGH2|A0A2A6RGH2_9CHLR GTP cyclohydrolase 1; OS = Candidatus Viridilinea mediisalina OX=2024553 GN=folE; PE = 3 SV=1
MPSFHTNGHHHTVADFDEHEYEPLIVRGRGKLEGVSYSSDPRTEHAVREILIGIGEQPEREGLLKTPARVAKMYAELTAGYHVDPDALINDAIFSVSYDEMVLVKNIDFSSLCEHHMLPFMGQVHVAYIPQGKVVGLSKIPRIVEMFARRLQVQERMTVQIADFINDRLEPMGVAVVAEGVHMCSVMRGVKKANASMVTSAMRGIFRDDPKTRAEFMAHVGRPRSFEG

SEQ ID NO: 6380 - protein, 228 aa, unidentified
  source 1..228: note = Viridilinea halotolerans
  REGION 1..228: note = tr|A0A426U4U8|A0A426U4U8_9CHLR GTP cyclohydrolase 1; OS = Candidatus Viridilinea halotolerans OX=2491704 GN=folE; PE = 3 SV=1
MHTNGNGHHHAVVSDFDTHDYEPLIVRGRGKLEGVSYGSDPRTEDAVREILIGIGEQPEREGLLKTPSRVAKMYAELTAGYHIDPDALINDAIFSVGYDEMVLVKNIDFSSLCEHHMLPFMGQVHVAYIPQGKVVGLSKIPRIVEMFARRLQVQERMTVQIADFINDRLDPLGVAVVAEGVHMCSVMRGVKKANASMVTSAMRGVFRDDPKTRAEFMAHVNRTRSFEG

SEQ ID NO: 6381 - protein, 248 aa, unidentified
  source 1..248: note = Westeberhardia cardiocondylae
  REGION 1..248: note = tr|A0A0H5BX58|A0A0H5BX58_9ENTR Putative GTP cyclohydrolase 1 type 2 OS=Candidatus Westeberhardia cardiocondylae OX=1594731 GN=ybgI PE=4 SV=1
MLNVDLEFLVNQKIDGNQHDDYAPNGLQVEGRRNIQNIVTGVTFCKKLIDIAVKCNADAIIVHHGCFWKNDSPVITGIKYKRLQALLTNNINLYAWHFPLDIHPELGNNAQLAKRLKIKKISLLGKFVMQGELSIPSHGIAFNKNIKEALHCYHVWHFFERAPSIIKKIAWCTGKGQNFIKLAIQNNLDAFISGEVSEETMHLAKEGRIHFYSVGHYATERVGIQALGKWLMKKYNLNVIFIDIPNPI

SEQ ID NO: 6382 - protein, 287 aa, unidentified
  source 1..287: note = Woesebacteria bacterium
  REGION 1..287: note = tr|A0A2H0BJD0|A0A2H0BJD0_9BACT GTP cyclohydrolase FolE2 OS=Candidatus Woesebacteria bacterium CG22_combo_CG10-13_8_21_14_all_39_10 OX=1975059 GN=folE2; PE = 3 SV=1
MLNYNQSFNIMIMGKYMGAHLKDLQSQNDNRGISLELVGITKLALPLLIPSKNGDPKQVNALVSFFTDLPHHSRGTHMSRFVEILYRNRLNHLTFKALKKIASEAKKKLKAENAYLEVSFTYLIEKQSPVSKKYSFVDYECKTIFKVNCGDYEQRLIVKVPVLLLCPCSKAISKCNAHNQRAMVTVDADLIDKFWIEDLIKLVEKEGSCEVYPLLKRPDEKYVTEKSYENPKFVEDVVRDIALKLKNLASIRSFIVECESYESIHNHNAYARFTSNGVLRGGENANS

SEQ ID NO: 6383 - protein, 194 aa, unidentified
  source 1..194: note = Woesebacteria bacterium
  REGION 1..194: note = tr|A0A0G0X7H8|A0A0G0X7H8_9BACT GTP cyclohydrolase 1; OS = Candidatus Woesebacteria bacterium GW2011_GWA1_41_13b; OX = 1618555 GN=folE PE=3 SV=1
MVNSRTGTYDSLEELARQVISLTGEDPNREGLKETPKRVAKTYKELLSGYEMDPSHEITMFDSNGFNELVSVTEIDFYSLCEHHMLPFFGKVHIGYVPDKKILGLSKFSRIVDIYSRRLQTQENLTKQIFDLLENKLSPKGLIVSIEARHLCVRMRGVKEKGSSTKTTIKNGILLKRRDFADQFFIDSHLKVIS

SEQ ID NO: 6384 - protein, 182 aa, unidentified
  source 1..182: note = Xenolissoclinum pacificiensis
  REGION 1..182: note = tr|W2V2R3|W2V2R3_9RICK GTP cyclohydrolase 1; OS = Candidatus Xenolissoclinum pacificiensis L6 OX=1401685; GN = P857_1143 PE=3 SV=1
MNFEDITKYIIEYIGDDPNRMDLKDTPERFKQYMDFVFSGYNMTNPIENSSLYRSTSDQMICIKKVSFISHCEHHVAPIIGEISLGYIPDLLIASLGSLLRTVQMFTRRLQIQERIVQQITDFIYEKTQSRGVISLIKAHHHCLICNASVLESDTEMCSLYYNGIFLEDENKRNDFLSTVKN

SEQ ID NO: 6385 - protein, 277 aa, unidentified
  source 1..277: note = Xiphinematobacter sp.
  REGION 1..277: note = tr|A0A0P0GB44|A0A0P0GB44_9BACT GTP cyclohydrolase FolE2 OS=Candidatus Xiphinematobacter sp. Idaho Grape; OX = 1704307 GN=folE2 PE=3 SV=1
MKSIDYSLIDTQSSLDHRKIAIKRVGIKNLRYPVQIRDKQRHTLQSTIATVLLTVDLPAHRRGTHMSRFIEALHSHSSILHVENIYDIPIQLQRKLQSFGAHMELEFPFFLEKKAPVTHSSGLIDYTVRLGVTLVGEERDFMLTVVVPITTLCPCSKAISIQGAHSQRGQVACSARFERPMWIEDLIRMVEKSASCELYSLLKRPDEKAVTEHAYTHPVFVEDLVRNIAILAEENSKIVWYRIEAENFESIHNHNAYALVEREATGSTKKCDPYCLR

SEQ ID NO: 6386 - protein, 251 aa, unidentified
  source 1..251: note = Xiphinematobacter sp.
  REGION 1..251: note = tr|A0A0P0FIN6|A0A0P0FIN6_9BACT Putative GTP cyclohydrolase 1 type 2 OS=Candidatus Xiphinematobacter sp. Idaho Grape OX=1704307 GN=ybgI PE=4 SV=1
MAFLRDIVPYLDHLLYIHRFGDAPGAYNGLQLENSGKIEKIAAAVDACEAVIDRAAQVGRTLLLVHHGLFWGENRRWIGATYRRFRSAISGDLAIYSAHLPLDVHPRHGNNVLLAQACGFTRCQPFLEVSGTYVGVRVEVKLSRVDVLNRVAEAVCGGVHLASGGPETCCHVGIVSGSAGSKIAQAAADGIDTLITGEGAHWTCIAAEESRVNLIYAGHYATETFGIRSVAKHLSEYLNLPWEFIDHPTGR

SEQ ID NO: 6387 - protein, 258 aa, unidentified
  source 1..258: note = Candidimonas bauzanensis
  REGION 1..258: note = tr|A0A1M5ZQE1|A0A1M5ZQE1_9BURK GTP cyclohydrolase FolE2 OS=Candidimonas bauzanensis OX=658167 GN=folE2 PE=3; SV = 1
MPDVQSSVDTRHIAIERVGVRGVRHPMLIAAADGAAPLPTVATWELTVALPAREKGTHMSRFVALLEEHRRIPMTPVLFCGMADAMLALLNAEKGDIAASFPYFMSKVAPVSGVTSLMDYEVKWIARAQSDAAEFELSVLVPVTSLCPCSKAISDYGAHNQRSHITVNAVFSNPASVDIDALIRAIEQQASCELWGLLKRGDEKFVTERAYENPKFVEDLVRDVAVQLKSLAGVRRFRVEAENFESIHNHSAYAVVEG

SEQ ID NO: 6388 - protein, 276 aa, Candidimonas nitroreducens
  REGION 1..276: note = tr|A0A225M9X5|A0A225M9X5_9BURK GTP cyclohydrolase FolE2 OS=Candidimonas nitroreducens OX=683354 GN=folE2; PE = 3 SV=1
MSAYAILPPIPDTPTAGLPDIQARPDVRGVALDAVGVKGLRHPLTLHGDHGQQPVVATLAMTVGLPAASKGTHMSRFIEVLEARPAIVGQAGMRTLVYAMLARLDASSGCIEMSFPYFVRKTAPVSGTSSLLDYDIAWRGEVDADGIYRFRMRVTVPVTSLCPCSKEISAYGAHNQRSLITIEAELREAMAIEDLIALAERNASCEVYGLLKRPDEKYVTERAYDNPKFVEDLVRDVALALQREPRVGAYRVEAENFESIHNHSAYARIARPAAAA

SEQ ID NO: 6389 - protein, 267 aa, Candidimonas nitroreducens
  REGION 1..267: note = tr|A0A225M4H2|A0A225M4H2_9BURK GTP cyclohydrolase FolE2 OS=Candidimonas nitroreducens OX=683354 GN=folE2; PE = 3 SV=1
MNSLTDPLVAMPDVQSSVDTRHIPIQRVGVRGVRHPMLVAGAGGQAMPTVAQWELTVALPAEEKGTHMSRFVALLEQYRSRPMTPALFCDMARDMLPLLHAVKGDITASFPYFIEKVAPVSGVASLMDYELTWTARAEGDAVAFELAVLVPVTSLCPCSKAIADYGAHNQRSHVTVRVAYGDPAQANVDDLIRRIEQQGSSELWGLLKRTDEKFVTERAYENPKFVEDLVRDVAAQVKTVAGVQRFHIEAENFESIHNHSAYAVVEG

SEQ ID NO: 6390 - protein, 277 aa, Candidimonas sp.
  REGION 1..277: note = tr|A0A522QLF1|A0A522QLF1_9BURK GTP cyclohydrolase FolE2 OS=Candidimonas sp. OX=1912597 GN=folE2 PE=3 SV=1
MYASQRHALLPDIQSRTDPRGLALDQVGIKGVRYPVTIDTPAGLQPTVATLTMTVSLPAAAKGTHMSRFIEVLAAHAGALDQAGFRTLVHDMLRRLNADAGSITMAFPYFIRKTAPISGEASLLDYDVVWHGEFRHDDTYHFHVHVTVPVTSLCPCSKEISDYGAHNQRSLIGIEAELARNMPLEDLVGIAERNASCEVYGLLKRPDEKYVTEHAYDNPKFVEDLVRDVALALEHEPRVAAWRVEAENFESIHNHSAFASVSSRNALGRPAVYAVKS

SEQ ID NO: 6391 - protein, 267 aa, Candidimonas sp.
  REGION 1..267: note = tr|A0A522KC10|A0A522KC10_9BURK GTP cyclohydrolase FolE2 OS=Candidimonas sp. OX=1912597 GN=folE2 PE=3 SV=1
MNSLIERVVAMPDVQSTVDTRHIAIQRVGIRGVRHPMLVAGPNGQAIPTVALWELTVALPPEEKGTHMSRFVALLEQYRAVPMTPALFCEMARSMLPLLHAQKGDIAASFPYFLNKFAPVSGVASLMDYELKWIARVGADALEFELSVLVPVTSLCPCSKAISEYGAHNQRSHVTVNVVFDAAASIDVEGLIRTVEAQASCELWGLLKRVDEKFVTERAYENPKFVEDLVRDVAAQVKQLAGVQRFRIEAENFESIHNHSAYAVVEG

SEQ ID NO: 6392 - protein, 224 aa, Capnocytophaga canimorsus
  REGION 1..224: note = tr|F9YRM7|F9YRM7_CAPCC GTP cyclohydrolase 1; OS = Capnocytophaga canimorsus (strain 5) OX=860228 GN=folE; PE = 3 SV=1
MKNEQISQEDFLGENHISTSAKTPLRDDAFELSEEEKIARIEKAMADIMHTLGLDLTDDSLKGTPRRVAKAYVKEIFGGLNPSRKPGSSTFANNYHYGEMLVEKNIVVYSTCEHHFLPIVGRAHVGYISNGKVIGLSKMNRIVEYFAKRPQVQERLTMQIVQEMQKVLGTEDVACVIDAKHLCVNSRGIKDIESSTVTAEFGGKFKDLAVRKEFLDYIKLETKY

SEQ ID NO: 6393 - protein, 224 aa, Capnocytophaga canimorsus; identical to SEQ ID NO: 6392
  REGION 1..224: note = tr|A0A0B7IGR8|A0A0B7IGR8_9FLAO GTP cyclohydrolase 1; OS = Capnocytophaga canimorsus OX=28188 GN=folE PE=3 SV=1

SEQ ID NO: 6394 - protein, 224 aa, unidentified
  source 1..224: note = Capnocytophaga canis
  REGION 1..224: note = tr|A0A0B7HY07|A0A0B7HY07_9FLAO GTP cyclohydrolase 1; OS = Capnocytophaga canis OX=1848903 GN=folE PE=3 SV=1
MIDKHNSEEDILGDNHVCTSAKTPLRNDAFDKSDSEKIDAIEKNVREIMHTLGLDLDDDSLRGTPKRVAKMFVKEIFGGLHPDRKPSASTFDNSYKYGEMLVEKNIVVYSTCEHHLLPIIGRAHVGYISNGRVIGLSKMNRIVEYYAKRPQVQERLTMQIVQEMQQALGTEDVACVIDAKHLCVNSRGIKDIESSTVTAEFGGKFKDPQIRKEFLEYIKLETRF

SEQ ID NO: 6395 - protein, 224 aa, Capnocytophaga cynodegmi
  REGION 1..224: note = tr|A0A250E8F1|A0A250E8F1_9FLAO GTP cyclohydrolase 1; OS = Capnocytophaga cynodegmi OX=28189 GN=folE PE=3 SV=1
MANKHISEEDALGDNHVCTSAKTPLRTDAFEKTDAEKISIIEENIRQIMHTLGLDLTDDSLRGTPKRVAKMFVKEIFGGLHPDRRPSASTFDNSYQYGEMLVEKNIVVYSTCEHHLLPIVGRAHVGYISNGKVIGLSKMNRIVEYYAKRPQVQERLTLQIVQEMQQALGTEDVACVIDAKHLCVNSRGIKDIESSTVTAEFGGKFKDPEVRKEFLEYIKLNTKY

SEQ ID NO: 6396 - protein, 224 aa, Capnocytophaga cynodegmi
  REGION 1..224: note = tr|A0A0B7HMY6|A0A0B7HMY6_9FLAO GTP cyclohydrolase 1; OS = Capnocytophaga cynodegmi OX=28189 GN=folE PE=3 SV=1
MANKHISEEDALGDNHVCTSAKTPLRTDAFEKTDAEKISIIEENIRQIMHTLGLDLTDDSLKGTPKRVAKMFVKEIFGGLHPDRRPSASTFDNSYQYGEMLVEKNIVVYSTCEHHLLPIVGRAHVGYISNGKVIGLSKMNRIVEYYAKRPQVQERLTLQIVQEMQQALGTEDVACVIDAKHLCVNSRGIKDIESSTVTAEFGGKFKDPEVRKEFLEYIKLNTKY

SEQ ID NO: 6397 - protein, 220 aa, Capnocytophaga gingivalis
  REGION 1..220: note = tr|C2M8R8|C2M8R8_CAPGI GTP cyclohydrolase 1; OS = Capnocytophaga gingivalis OX=553178 GN=folE PE=3 SV=1
MNHSDDFIGENHISTSAKTPLRADAFSLSDEEKIARIEKSMADIMETLGLDLTDDSLKGTPLRVAKAYVKELFGGLDPKRCPSSSTFENNYHYGEMLIEKNIVLYSTCEHHFLPIVGRAHVGYISNGRVLGLSKMNRIVDYFARRPQVQERLTMQIVQEMQRILGTEDVACVIDAKHLCVNSRGIRDIESSTVTAEYGGKFQDPIVRKEFLEYIKMETKY

SEQ ID NO: 6398 - protein, 220 aa, Capnocytophaga gingivalis
  REGION 1..220: note = tr|A0A250FQV6|A0A250FQV6_9FLAO GTP cyclohydrolase 1; OS = Capnocytophaga gingivalis OX=1017 GN=folE PE=3 SV=1
MNHSDDFIGENHISTSAKTPLRADAFSLSDEEKIARIEKSMADIMETLGLDLTDDSLKGTPLRVAKAYVKELFGGLDPKHCPSSSTFENNYHYGEMLIEKNIVLYSTCEHHFLPIVGRAHVGYISNGRVLGLSKMNRIVDYFARRPQVQERLTMQIVQEMQRILGTEDVACVIDAKHLCVNSRGIRDIESSTVTAEYGGKFQDPIVRKEFLEYIKMETKY

SEQ ID NO: 6399 - protein, 220 aa, Capnocytophaga granulosa
  REGION 1..220: note = tr|A0A381E117|A0A381E117_9FLAO GTP cyclohydrolase 1; OS = Capnocytophaga granulosa OX=45242 GN=folE PE=3 SV=1
MNPSDDFIGENHLSTSAKTPLRADAFSLSDEEKIARIQKSMADIMETLGLDLTDDSLKGTPLRVAKAYVKELFGGLDPKRCPSSSTFENNYHYGEMLIEKNIVLYSTCEHHFLPIVGRAHVGYISNGRVLGLSKMNRIVDYFARRPQVQERLTMQIVQEMQRILGTEDVACVIDAKHLCVNSRGIRDIESSTVTAEYGGKFQDPIVRKEFLEYIKMETKY

SEQ ID NO: 6400 - protein, 221 aa, Capnocytophaga haemolytica
  REGION 1..221: note = tr|A0A0X8JAS0|A0A0X8JAS0_9FLAO GTP cyclohydrolase 1; OS = Capnocytophaga haemolytica OX=45243 GN=folE PE=3 SV=1
MNREEDIIGENHIATSAVTPLRADAFDKSVDEKIAKIEEHVREILLTLGLDLTDDSLKGTPKRVAKAYVKELFGGLLPERKPSASTFNNSYHYGEMLVEKNIVVYSTCEHHLLPIVGRAHVAYISNGKVIGLSKMNRIVEYYAKRPQVQERLTLQIVQEMQNVLGTDDVACIIDAKHLCVNSRGIKDIESSTVTAEFGGKFKDPEVRKEFLEYIKLDTRFH

SEQ ID NO: 6401 - protein, 223 aa, Capnocytophaga leadbetteri
  REGION 1..223: note = tr|A0A250F782|A0A250F782_9FLAO GTP cyclohydrolase 1; OS = Capnocytophaga leadbetteri OX=327575 GN=folE PE=3 SV=1
MNKIQEEDIIGDNHVATSAVTPLRADAFEMSEAEKIADIETHMRAILHTLGMDLTDDSLKGTPKRVAKMFVKEIFGGLLPERKPSMSTFDNSYHYGEMLVEKNIVVYSTCEHHLLPIVGRAHVGYISNGKVLGLSKMNRIVEYYAKRPQVQERLTLQIVQEMQRALGTEDVACIIDAKHLCVNSRGIEDIDSSTVTAEFGGKFKDPEVRKEFLEYIKLETRFH

SEQ ID NO: 6402 - protein, 223 aa, Capnocytophaga ochracea
  REGION 1..223: note = tr|A0A2X2RQV6|A0A2X2RQV6_CAPOC GTP cyclohydrolase 1; OS = Capnocytophaga ochracea OX=1018 GN=folE PE=3 SV=1
MNKNQEEDILGDNHIATSAVTPLRADAFQMSETEKIAEIETHVRAILHTLGMDLTDDSLKGTPRRVAKMFVKEIFGGLLPERKPSMSTFENSYHYGEMLVEKNIVVYSTCEHHLLPIVGRAHVGYISNGKVLGLSKMNRIVEYYAKRPQVQERLTMQIVQEMQRALGTEDVACIIDAKHLCVNSRGIEDIDSSTVTAEFGGKFKDPEVRKEFLEYIKLDTRFH

SEQ ID NO: 6403 - protein, 223 aa, Capnocytophaga ochracea
  REGION 1..223: note = tr|C7M4J0|C7M4J0_CAPOD GTP cyclohydrolase 1; OS = Capnocytophaga ochracea (strain ATCC 27872 / DSM 7271 / JCM 12966 / NCTC 12371 / VPI 2845) OX=521097 GN=folE PE=3; SV = 1
MNKNQEEDILGDNHIATSAVTPLRADAFQMSETEKIAEIETHVRAILHTLGMDLTDDSLKGTPKRVAKMFVKEIFGGLLPERKPSMSTFENSYHYGEMLVEKNIVVYSTCEHHLLPIVGRAHVGYISNGKVLGLSKMNRIVEYYAKRPQVQERLTMQIVQEMQRALGTEDVACIIDAKHLCVNSRGIEDIDSSTVTAEFGGKFKDPEVRKEFLEYIKLDTRFH

SEQ ID NO: 6404 - protein, 223 aa, Capnocytophaga sp.
  REGION 1..223: note = tr|A0A0A6XYI0|A0A0A6XYI0_9FLAO GTP cyclohydrolase 1; OS = Capnocytophaga sp. oral taxon 329 str. F0087 OX=706436; GN = folE PE=3 SV=1
MNKIQEEDIIGNNHVATSAVTPLRADAFEMSEAEKIADIETHMRAILHTLGMDLTDDSLKGTPKRVAKMFVKEIFGGLLPERKPSMSTFDNSYHYGEMLVEKNIVVYSTCEHHLLPIVGRAHVGYISNGKVLGLSKMNRIVEYYAKRPQVQERLTLQIVQEMQRALGTEDVACIIDAKHLCVNSRGIEDIDSSTVTAEFGGKFKDPEVRKEFLEYIKLETRFH

SEQ ID NO: 6405 - protein, 223 aa, Capnocytophaga sp.; identical to SEQ ID NO: 6402
  REGION 1..223: note = tr|A0A2S0LEL5|A0A2S0LEL5_9FLAO GTP cyclohydrolase 1; OS = Capnocytophaga sp. oral taxon 864 OX=1316593 GN=folE; PE = 3 SV=1

SEQ ID NO: 6406 - protein, 223 aa, Capnocytophaga sputigena
  REGION 1..223: note = tr|A0A2A3N3B8|A0A2A3N3B8_CAPSP GTP cyclohydrolase 1; OS = Capnocytophaga sputigena OX=1019 GN=folE PE=3 SV=1
MNKNQKEDILGDNHIATSAVTPLRADAFQLNETEKIAEIETHVRAILHTLGMDLNDDSLKGTPKRVAKMFVKEIFGGLLPERKPSMSTFNNSYHYGEMLVEKNIVVYSTCEHHLLPIVGRAHVGYISNGKVLGLSKMNRIVEYYAKRPQVQERLTMQIVQEMQQALGTEDVACIIDAKHLCVNSRGIEDIDSSTVTAEFGGKFKDPEVRKEFLEYIKLETRFH

SEQ ID NO: 6407 - protein, 223 aa, Capnocytophaga sputigena
  REGION 1..223: note = tr|A0A3S4Y5B0|A0A3S4Y5B0_CAPSP GTP cyclohydrolase 1; OS = Capnocytophaga sputigena OX=1019 GN=folE PE=3 SV=1
MNKNQKEDILGDNHIATSAVTPLRADAFQLNETEKIAEIETHVRAILHTLGMDLNDDSLKGTPKRVAKMFVKEIFGGLLPERKPSMSTFNNSYHYGEMLVEKNIVVYSTCEHHLLPIVGRAHVGYISNGKVLGLSKMNRIVEYYAKRPQVQERLTMQIVQEMQQALGTEDVACIIDAKHLCVNSRGIEDIDSSTVTAEFGGKFKNPEVRKEFLEYIKLETRFH

SEQ ID NO: 6408 - protein, 224 aa, unidentified
  source 1..224: note = Capnocytophaga stomatis
  REGION 1..224: note = tr|A0A250FXV2|A0A250FXV2_9FLAO GTP cyclohydrolase 1; OS = Capnocytophaga stomatis OX=1848904 GN=folE PE=3 SV=1
MTDKHISEEDILGDNHVCTSAKTPLRADAFDKTDAEKISIIEENIRQIMHTLGLDLTDDSLRGTPKRVAKMFVKEIFGGLHPDRRPSASTFDNNYQYGEMLVEKNIVVYSTCEHHLLPIVGRAHVGYISNGKVIGLSKMNRIVEYYAKRPQVQERLTLQIVQEMQRALGTEDVACVIDAKHLCVNSRGIKDIESSTVTAEFGGKFKNPEVRKEFLEYIKLDTKY

SEQ ID NO: 6409 - protein, 264 aa, unidentified
  source 1..264: note = Caproiciproducens galactitolivorans
  REGION 1..264: note = tr|A0A4Z0XXB0|A0A4Z0XXB0_9FIRM Putative GTP cyclohydrolase 1 type 2 OS=Caproiciproducens galactitolivorans OX=642589 GN=CAGA_16300 PE=4 SV=1
MIFVGDIYDFIDGMAPFHTAMDFDNPGLLVGGRNMSVQSALLSLDITPAVVREAKEVQADLIISHHPVIFRPLKRIDTDTAPYLLAKYDIAAICAHTNLDMAAEGVNTCLAKRLGLKNIHMLKEYGNTGLPEGLVGETEREYSPRAFAEFVRDALGCDGLRYTDGGRAVSKVGLCSGGGADLVYDAAEYGCQAFVTGESKHNILLDAENMRVTMVDAGHFYTEDVVIEPLMEKLQKQFPQVRFAKSKRMHSPAKTIGCTRTGGI

SEQ ID NO: 6410 - protein, 222 aa, unidentified
  source 1..222: note = Capsulimonas corticalis
  REGION 1..222: note = tr|A0A402CP50|A0A402CP50_9BACT GTP cyclohydrolase 1; OS = Capsulimonas corticalis OX=2219043 GN=folE PE=3 SV=1
MSFLPTTDEENIEDLEIRPSRDQRPTGGGSKKNVSQEELEDKYRDILTFVGEDPDREGLLRTPHRVAEALKFLTSGYKQDVETLLNGAIFHEDYDDMVVVKDIEFYSMCEHHMLPFYGKVHVAYIPDGKIVGLSKIPRLVDMFSRRLQVQERLTTEIAEAIETALSPRGVAVVIEGAHMCMLMRGVQKQASTMVTSHVMGLFRDDRATRQEFMALVKGNSRA

SEQ ID NO: 6411 - protein, 186 aa, Carboxydocella sporoproducens
  REGION 1..186: note = tr|A0A1T4LPG8|A0A1T4LPG8_9FIRM GTP cyclohydrolase 1; OS = Carboxydocella sporoproducens DSM 16521 OX=1121270; GN = folE PE=3 SV=1
MDIRKIETAMRMILEAIGEDPEREGLRDTPKRVARMYEEIFHGLENDPREHLQVLFTEDHDEMVLVKDIPFYSMCEHHFLPFFGKAHVAYIPAKGKITGLSKLARVVEGYAKRPQLQERLTSQIADAIMECLQPRGVLVVVEAEHMCMTMRGVKKPGSYTTTSAVRGIFKTNNATRAEAFSLINSN

SEQ ID NO: 6412 - protein, 186 aa, Carboxydocella thermautotrophica; identical to SEQ ID NO: 6411
  REGION 1..186: note = tr|A0A2R4N0C8|A0A2R4N0C8_9FIRM GTP cyclohydrolase 1; OS = Carboxydocella thermautotrophica OX=178899 GN=folE PE=3; SV = 1

SEQ ID NO: 6413 - protein, 192 aa, Carboxydothermus hydrogenoformans
  REGION 1..192: note = sp|Q3ADI2|GCH1_CARHZ GTP cyclohydrolase 1; OS = Carboxydothermus hydrogenoformans (strain ATCC BAA-161 / DSM 6008 / Z-2901) OX=246194 GN=folE PE=3 SV=1
MVDKEKIEIAVRMILEAIGEDPDREGLKDTPKRVARMYEEVFAGLSQDPSEHLERYFTEEHEEMVLVKDIPLYSMCEHHLLPFYGKAHVAYIPRKGKVTGLSKLARVVEGFAKRPQLQERLTSQIADAIMEKLNPRGVLVVIEAEHMCMTMRGVKKPGSKTITSAVRGIFATSVATRAEAMALIGHQSPLRD

SEQ ID NO: 6414 - protein, 192 aa, Carboxydothermus islandicus; identical to SEQ ID NO: 6413
  REGION 1..192: note = tr|A0A1L8D4L7|A0A1L8D4L7_9THEO GTP cyclohydrolase 1; OS = Carboxydothermus islandicus OX=661089 GN=folE PE=3 SV=1

SEQ ID NO: 6415 - protein, 192 aa, unidentified
  source 1..192: note = Carboxydothermus pertinax
  REGION 1..192: note = tr|A0A1L8CUE5|A0A1L8CUE5_9THEO GTP cyclohydrolase 1; OS = Carboxydothermus pertinax OX=870242 GN=folE PE=3 SV=1
MVDKEKIEIAVRMILEAIGEDPEREGLKDTPKRVARMYEEVFAGLSQDPSEHLERYFAEEHEEMVLVKDIPLYSMCEHHLLPFYGKAHVAYIPRKGKVTGLSKLARVVEGFAKRPQLQERLTSQIADAIMERLNPRGVLVVIEAEHMCMTMRGVKKPGSKTITSAVRGIFATSVATRAEAMALIGHQSPLRD

SEQ ID NO: 6416 - protein, 207 aa, unidentified
  source 1..207: note = Carboxylicivirga sp.
  REGION 1..207: note = tr|A0A553GMX8|A0A553GMX8_9BACT GTP cyclohydrolase 1; OS = Carboxylicivirga sp. M1479 OX=2594476 GN=folE PE=3 SV=1
MEFTLNGKKGYSKVESYDDETTNDLSNHYKKILESLGEDTEREGLEKTPLRVAKAMQFLTQGYHMDPEEIIKSAMFREDYQQMVVVKDIELYSMCEHHMLPFFGKAHVAYIPRHHITGLSKLARVVEAFARRLQVQERLTTQIKECIQDTLNPLGVAVVIEAQHMCMQMRGVQKQHSVTTTSDFTGAFQKNLATREEFMKIISARLH

SEQ ID NO: 6417 - protein, 263 aa, Cardiobacterium hominis
  REGION 1..263: note = tr|C8N6T9|C8N6T9_CARH6 GTP cyclohydrolase FolE2; OS = Cardiobacterium hominis (strain ATCC 15826 / DSM 8339 / NCTC 10426 / 6573) OX=638300 GN=folE2 PE=3 SV=1
MNQTTIPDVQGKPDTRNIAITRVGIRDIRMPLHIATPHGPQPTVATAEMTVALPHHQKGTHMSRFIHLLNEAGAISLDGFAALHGEMLKRLNAAEGSILLTFPYFVKKQAPVSKTESLMDYEVTLIADGGHEDCIVSVEVTIAVTSLCPCSKEISQYGAHNQRSHIIINAEYDEKTPFALEDLIRIGEEEGSCEIWATLKRPDEKYVTERAYENPKFVEDIVRDVAARLNADPRIKAYRVSSENFESIHNHSAYAIIEHDKRD

SEQ ID NO: 6418 - protein, 268 aa, Cardiobacterium hominis
  REGION 1..268: note = tr|A0A1C3H2B0|A0A1C3H2B0_9GAMM GTP cyclohydrolase FolE2 OS=Cardiobacterium hominis OX=2718 GN=folE2 PE=3 SV=1
MKSKTMNQTTIPDVQGKPDTRNIAITRVGIRDIRMPLHIATPHGPQPTVATAEMTVALPHHQKGTHMSRFIHLLNEAGAISLDGFAALHGEMLKRLNAAEGSILLTFPYFVKKQAPVSKTESLMDYEVTLIADGGHEDCIVSVEVTIAVTSLCPCSKEISQYGAHNQRSHIIINAEYDEKTPFALEDLIRIGEEEGSCEIWATLKRPDEKYVTERAYENPKFVEDIVRDVAARLNADPRIKAYRVSSENFESIHNHSAYAIIEHDKRD

SEQ ID NO: 6419 - protein, 359 aa, Cardiobacterium valvarum
  REGION 1..359: note = tr|G9ZD60|G9ZD60_9GAMM GTP cyclohydrolase FolE2; OS = Cardiobacterium valvarum F0432 OX=797473 GN=folE2 PE=3; SV = 1
MMQVARYVAEDQGAARHHLAVQESVAGKKTVQGAALWRRPVEHRRHAEAVRVCGFKLHIFRGKTERHAYCGRGGGAVKRCGCRYNARLLSTIENTMTDTTIPDVQGKPDTRHIAITRVGIRDIRLPLRVINKDGSTQDTVATAEMTVALPHHQKGTHMSRFIHLLNETAVLDPATFAALHAEMLARLKAEEGSIELTFPFFIKKQAPVSKTESLLDYRVRLLADGNRAHCEVRVEVTVAVTSLCPCSKEISQYGAHNQRSHIIINAVYDPAAPFAIEELIRIGEEEGSCEIWATLKRPDEKYVTERAYENPKFVEDIVRDVAARLNDDARIQAYRVSSENFESIHNHSAYAQITCDKRV

SEQ ID NO: 6420 - protein, 264 aa, Cardiobacterium valvarum
  REGION 1..264: note = tr|A0A381DYE5|A0A381DYE5_9GAMM GTP cyclohydrolase FolE2 OS=Cardiobacterium valvarum OX=194702 GN=folE2 PE=3; SV = 1
MTDTTIPDVQGKPDTRHIAITRVGIRDIRLPLRVINKDGSTQDTVATAEMTVALPHHQKGTHMSRFIHLLNETAVLDPATFAALHTEMLARLKAEEGSIELTFPFFIKKQAPVSKTESLLDYRVRLLADGNRAHCEVRVEVTVAVTSLCPCSKEISQYGAHNQRSHIIINAVYDPATPFAIEELIRIGEEEGSCEIWATLKRPDEKYVTERAYENPKFVEDIVRDVAARLNDDARIQAYRVSSENFESIHNHSAYAQITCDKRV

SEQ ID NO: 6421 - protein, 187 aa, Carnobacterium sp.
  REGION 1..187: note = tr|A0A5C1L6Q4|A0A5C1L6Q4_9LACT GTP cyclohydrolase 1; OS = Carnobacterium sp. PL17GRE32 OX=2592355 GN=folE PE=3; SV = 1
MTIMDMERIEKAVREILLAVGEDPDREGLVETPERVAKMYAEIFDGLNRDPRIHTEKTFSESASEFVLVKDISFHSTCEHHLLPVIGQAHVAYIPKNGQVIGLSKLARIVEDFALRPQLQERLTNQVADVLAEELGAEGVFVVLEAEHMCMTLRGIKKPGAKTVTYATRGAYTDRGRRQEVLDMMNL

SEQ ID NO: 6422 - protein, 184 aa, Carnobacterium sp.
  REGION 1..184: note = tr|A0A5C1LNK0|A0A5C1LNK0_9LACT GTP cyclohydrolase 1; OS = Carnobacterium sp. PL26RED25 OX=2592352 GN=folE PE=3; SV = 1
MDMERIEKAVREILLAVGENPDREGLVETPERVAKMYAEVFDGLNRNPRIHTEKTFSESASEFVLVKDIPFHSTCEHHLLPVIGQAHVAYIPKDGQVIGLSKLARIVEDFALRPQLQERLTNQVADVLAEELGAEGVFVVLEAEHMCMTLRGIKKPGAKTVTYATRGAYTDRGRRQEVLDMMNL

SEQ ID NO: 6423 - protein, 189 aa, Caryophanon latum
  REGION 1..189: note = tr|A0A1C0YQP1|A0A1C0YQP1_9BACL GTP cyclohydrolase 1; OS = Caryophanon latum OX=33977 GN=folE PE=3 SV=1
MTNVDLNKIEQAVKMILEAVGEDVNREGLLDTPKRVSKMYAEMFSGLQMDPREYFSTVFHEDHEEFVLVKDIGFHSMCEHHLVPFYGKAHVAYIPQDGKVAGLSKLGRCVETVARRPQLQERITSTVADTIMEMLQPKGVYVVVEAEHMCMTMRGLKKPGAKTITSVARGVYETDDVKRQEIISFIQMS

SEQ ID NO: 6424 - protein, 189 aa, Caryophanon tenue
  REGION 1..189: note = tr|A0A1C0Y4Y0|A0A1C0Y4Y0_9BACL GTP cyclohydrolase 1; OS = Caryophanon tenue OX=33978 GN=folE PE=3 SV=1
MTNVDLKKIEQAVKMILEAVGEDVNREGLQDTPKRVSKMYAEMFSGLQQDPREYFSTVFHEDHEEFVLVKDISFHSMCEHHLVPFYGKAHIAYIPKDGKVAGLSKLGRCVETVARRPQLQERITSTVADTIMEMLEPKGVYVVIEAEHMCMTMRGLKKPGAKTVTSVARGVYEEDNVKRQEIISFIQMS

SEQ ID NO: 6425 - protein, 270 aa, Castellaniella defragrans
  REGION 1..270: note = tr|W8X4Q4|W8X4Q4_CASDE GTP cyclohydrolase FolE2; OS = Castellaniella defragrans 65Phen OX=1437824 GN=folE2; PE = 3 SV=1
MNTLLDPVAMSMPDVQSGPDTRRIAIERVGVRGVRHPLVVASGAGRPQATVADWEMTVALPADEKGTHMSRFIALLEAHRGEPMTPAALCALARSMLDLLHADAGDVAAGFPYFIEKPAPVSGVRSLMDYQVRWRVGVRRGEAPRFSLSVQVPVTSLCPCSKAISDYGAHNQRSHVCVDLEYDAVDAVDLDALIRGVESQASSELWGLLKRADEKFVTERAYENPKFVEDLVRDVAVMLQRLPGVASYQVTAENFESIHNHSAYAVVRSA

SEQ ID NO: 6426 - protein, 273 aa, Castellaniella defragrans
  REGION 1..273: note = tr|W8X379|W8X379_CASDE GTP cyclohydrolase FolE2; OS = Castellaniella defragrans 65Phen OX=1437824 GN=folE2; PE = 3 SV=1
MNTLLDPLAVSMPDVQSGPDMRGISIQRVGVRGVRYPLRLAADANPSRQVVADWEMTVALSAADKGTHMSRFIEVLESWRETPLSAEGFCRMARAVYERLGVESADVSARFPYFLEKAAPVSGLRSLMDYQVVWTARAARGAPARFSQHVRVPVTSLCPCSKAISDYGAHNQRSHVLVRLEYGSPVAADLDALIRGVETRASAELWGLLKREDEKFVTERAYENPKFVEDLVRDVAVLVRRLPGVASYEVEAENFESIHNHSAYAIVISANAQ

SEQ ID NO: 6427 - protein, 270 aa, Castellaniella sp.
  REGION 1..270: note = tr|A0A522TXC0|A0A522TXC0_9BURK GTP cyclohydrolase FolE2 OS=Castellaniella sp. OX=1955812 GN=folE2 PE=3 SV=1
MNTLLDSVAAVMPDVQSSPDTRRIAIQRVGVRGVRHPLLVAAGMGQPQATIAEWEMTVALPAESKGTHMSRFIALLESYRSVPMTPQRLCEMAQAMLDRLQADSGDLTVDFPYFIEKPAPVSEVRSLMDYQVGWRVRAQRGQAARFTLQVQVPVTSLCPCSKAISEYGAHNQRSHVTVRLDFEAVPSLDLELLVHRIEAQASSELWGLLKRADEKYVTEHAYENPKFVEDLVRDVAVMLQRQPGVAAYEVAAENFESIHNHSAYAMVRSA

SEQ ID NO: 6428 - protein, 209 aa, Castellaniella sp.
  REGION 1..209: note = tr|A0A522TGK6|A0A522TGK6_9BURK GTP cyclohydrolase 1; OS = Castellaniella sp. OX=1955812 GN=folE PE=3 SV=1
MLECDQAIFPPAAAVTARITEAPRPSRAEAEAAVCTLIRWAGDEPSREGLLATPARVVRAYEEWFSGYRLDPANLLSRTFDEVGGYDDLVMLRDIPLQSTCEHHMAAIRGVVHIAYLPNRRVVGISKLARLVEAFGRRLQIQERLTVEIADTLAHVLQPRGVAVIVQASHECLSSRGVRLHGVSMLTRRLLGEFAQEPQRREILVALSD

SEQ ID NO: 6429 - protein, 240 aa, unidentified
  source 1..240: note = Catalinimonas alkaloidigena
  REGION 1..240: note = tr|A0A1G9NB98|A0A1G9NB98_9BACT GTP cyclohydrolase 1; OS = Catalinimonas alkaloidigena OX=1075417 GN=folE PE=3 SV=1
MKPNETSSSTLSTERNGYSRNGQSPQELGDDHISTGDETPLREDAFDMDDETKMELIEKHFAQIMHILGLDLDDDSLRGTPRRVAKMYVQEIFSGLHPDNKPHATLFENQYRYNEMLVEKDITFYSNCEHHFVPIFGRAHVGYISNGKVIGLSKINRIVQYFAKRPQVQERLTVQIINELKRVLQTEDVAVVIDAKHMCVSSRGIQDDTSTTVTAKYSGKFQEEATKSEFLSHIYNTQPK

SEQ ID NO: 6430 - protein, 204 aa, Catellatospora citrea
  REGION 1..204: note = tr|A0A419XJK3|A0A419XJK3_9ACTN GTP cyclohydrolase 1; OS = Catellatospora citrea OX=53366 GN=folE PE=3 SV=1
MLPLIATETPPVTPASSLRPMIDQDAAERAAAALLTALGVPLDTPSTQRTPARMVKAYAELLTPREYVPTVFPNEAGYRELVLARQVPFVSLCAHHMLPFVGTAHLGYLPGERILGLSKLARLLSSAAARPQIQEVLTQQLGDWLESQLKPGGAAVVVTAEHMCMTLRGAGAMGSTVTTSTWRGSLADPAARAQFMAMAGEGAR

SEQ ID NO: 6431 - protein, 191 aa, Catellatospora citrea
  REGION 1..191: note = tr|A0A419XLS5|A0A419XLS5_9ACTN GTP cyclohydrolase 1; OS = Catellatospora citrea OX=53366 GN=folE PE=3 SV=1
MEETVDLARIEKAVREILLALGEDPDRDGLQKTPSRVARAYAELFAGLRANPADVLKTTFEADHDEFVLVRDISIFSLCEHHLLPFRGVAHVGYLPGEDGRITGLSKLARLVEVFARRPQVQERLTSQVADLLQEQLQARGVIVVLECEHMCMEMRGIRKAGARTVTSAVRGILKSDPKTRAEAMSLINSR

SEQ ID NO: 6432 - protein, 212 aa, Catenovulum agarivorans
  REGION 1..212: note = tr|W7R3C4|W7R3C4_9ALTE GTP cyclohydrolase 1; OS = Catenovulum agarivorans DS-2 OX=1328313 GN=folE PE=3; SV = 1
MASEAALKVKQALIARNLETPQVDTSLLPEEKKVKIAEHMSNVMQLLGLDLTDDSLSETPKRIAKMYVDEIFGGLNYDNFPKITDIENKMGVDEMITVDQISVSSTCEHHFITIDGYARVAYIPQDKVIGLSKINRIVRFFAQRPQVQERLTQQILIALQTLLETDDVAVSIKATHFCVKARGVMDANSLTQTTALGGLFKTNPSTRQEFLR

SEQ ID NO: 6433 - protein, 309 aa, Catenovulum agarivorans
  REGION 1..309: note = tr|W7QK21|W7QK21_9ALTE GTP cyclohydrolase FolE2; OS = Catenovulum agarivorans DS-2 OX=1328313 GN=folE2 PE=3; SV = 1
MPTSMPDIANQSAAQHEGELDWVGMSEIEVPIMIAAKDEHERAVSARVEAFVNLTQAKAKGIHMSRLYLLLDQLSTEGSLTKESLTQLLNDFIDSHEELSDKAFVKFTFDYHMRRRSLISGKQGWKAYPVTIIGYFAEGQITTEMQVDVPYSSTCPCSAALARQLIQQAFSEKFGEENALDAKEVRQWLGTTEGIVATPHSQRSIAEVKVKLADEVTGFPITDIVDTVEQALKTPVQAAVKREDEQEFARLNGQNLMFCEDAGRRLKHALNQIPGYLDFWIRVNHYESLHAHDAVSVSTKGIAGGYRAY

SEQ ID NO: 6434 - protein, 309 aa, unidentified
  source 1..309: note = Catenovulum maritimum
  REGION 1..309: note = tr|A0A0J8GWU8|A0A0J8GWU8_9ALTE GTP cyclohydrolase FolE2 OS=Catenovulum maritimum OX=1513271 GN=folE2 PE=3; SV = 1
MPTSMPDIANQSSAQTEGILDWVGMSEIEIPLMITAKGEPERPVSAKVEAFVNLMQATAKGIHMSRLYLLLDQLSTQGSLTKSSLLELLDNFISSHEELSDKAFVKFNFDYHMRRKSLISGKQGWKAYPIEIKGYFVEGEATIEMKVDVPYSSTCPCSAALARQLIQKSFNTKFAEQEFVSQQEVHKWLGTTEGIVATPHSQRSIAEIRVKLTTEVEEFPIGDLVDLIEQALQTPVQAAVKREDEQEFARLNGQNLMFCEDAGRRLKHALNLIPGYSDFWIRVNHYESLHAHDAVSVSTKGVENGYKAY

SEQ ID NO: 6435 - protein, 309 aa, Catenovulum sp.
  REGION 1..309: note = tr|A0A2S0VW62|A0A2S0VW62_9ALTE GTP cyclohydrolase FolE2 OS=Catenovulum sp. CCB-QB4 OX=2172099 GN=folE2 PE=3; SV = 1
MPTAMPDIANSATAQTEGTLDWVGMSEIEVPIMVAAKNEAERPVSARVEAFVNLNEAKAKGIHMSRLYLLLDKLSTEDTLNLQNLTTLLQHFIESHQELSDRAFIKFNFDYHMRRKSLISGKQGWKAYPVEIVGVYLDGHIETELKIDVPYSSTCPCSAALARQLIQQAFEDKYGHEDTVNKADVHEWLGTTEGIVATPHSQRSIAEVKVKLSKEVEDFPITDLVDAIESALSTPVQAAVKRADEQEFARLNGQNLMFCEDAGRRLTHALNLVPGYSDFWVRVNHYESLHAHDAVSINTKGVKDGYLPY

SEQ ID NO: 6436 - protein, 212 aa, Catenovulum sp.
  REGION 1..212: note = tr|A0A2S0VRQ9|A0A2S0VRQ9_9ALTE GTP cyclohydrolase 1; OS = Catenovulum sp. CCB-QB4 OX=2172099 GN=folE PE=3 SV=1
MITAEAKRVRDKLIEKGLETPLVATSLSSEEKYQKLKGLLTEVVATLGLDLTDDSLQETPHRIAKMYVHEIFSGLDYQNFPSISLIENKMAVDEMVKVSDINLTSTCEHHFVTIDGLAKVAYIPENKIIGLSKINRIVRFFSQRPQVQERLTQQVLVAIQTLTETENVAVSIDATHYCVKSRGVMDVNSTTSTTALGGIFKTNPQTRAEFLR

SEQ ID NO: 6437 - protein, 234 aa, Catenulispora acidiphila
  REGION 1..234: note = tr|C7PWZ1|C7PWZ1_CATAD GTP cyclohydrolase 1; OS = Catenulispora acidiphila (strain DSM 44928 / NRRL B-24433 / NBRC 102108 / JCM 14897) OX=479433 GN=folE PE=3; SV = 1
MSESTTENQRGGDAASRAASDPGGGIARVSLAGQPGQAAPDLGRAVSGYDAERAERAVRELLLAVGEDPDREGLKETPARVSRAYREIFAGLHQGPEDVLTTTFDLGHDEMVLVRDIEVYSTCEHHLVPFHGVAHVGYIPSVDGRITGLSKLARLVDVYAKRPQVQERLTTQIADALVRILEPRGVIVVVECEHLCMSMRGIRKPGAKTVTSAVRGQLLAPASRAEAMSLILGR

SEQ ID NO: 6438 - protein, 211 aa, Catenulispora acidiphila
  REGION 1..211: note = tr|C7PZ98|C7PZ98_CATAD GTP cyclohydrolase 1; OS = Catenulispora acidiphila (strain DSM 44928 / NRRL B-24433 / NBRC 102108 / JCM 14897) OX=479433 GN=folE PE=3; SV = 1
MTNDTWLVDHESPILRPAPLRVVKQADGVDLAAAERAAAQFLHALGVDTETESMHGTPRRMARAYADLFSPRAFDLTTFPNEEGYDELVLARSIPMRSVCEHHLLPFTGTAHVGYLPGKRILGLSKLARVVEHFACRPQVQERLTKQIADWLQAQLSPKGVGVVIEAEHTCMTLRGVQATGSTTVTSTLLGLLRHDPSSRSEFLALTGVSR

SEQ ID NO: 6439 - protein, 198 aa, Catenulispora sp.
  REGION 1..198: note = tr|A0A1Q7W0B4|A0A1Q7W0B4_9ACTN GTP cyclohydrolase 1; OS = Catenulispora sp. 13_1_20CM_3_70_7 OX=1805055 GN=folE; PE = 3 SV=1
MASPDLGRAVAAYDAERAERAVRELLIAVGENPDRDGLKETPARVARAYREMFAGLHQAPEEVLTTTFDLGHDEMVLVRDIELFSTCEHHLVPFHGVAHVGYIPSVDGRITGLSKLARLVDVYAKRPQVQERLTTQIADALVRILQPRGVIVVVECEHLCMSMRGIRKPGAKTVTSAVRGQLLAPASRAEAMSLILGR

SEQ ID NO: 6440 - protein, 184 aa, Catenulispora sp.
  REGION 1..184: note = tr|A0A1Q7VZV6|A0A1Q7VZV6_9ACTN GTP cyclohydrolase 1; OS = Catenulispora sp. 13_1_20CM_3_70_7 OX=1805055 GN=folE; PE = 3 SV=1
MEALIRHQLILLGEDPSREGLRETPERVKESLEFLTRGYRMTLEDVFGGATFTEAYKDMIVVKDIEMYSLCEHHLLPFYGRVHIGYIPRGRLVGLSKMPRLVELYSRRLQVQERMTRQIAECLQKYLEPVGVAVVIEADHLCMKMRGVEKQNSRVFTSCVLGIFQTDPKTRAEFMGLIKGVPNI

SEQ ID NO: 6441 - protein, 212 aa, unidentified
  source 1..212: note = Caulobacter flavus
  REGION 1..212: note = tr|A0A2N5CR19|A0A2N5CR19_9CAUL GTP cyclohydrolase 1; OS = Caulobacter flavus OX=1679497 GN=folE PE=3 SV=1
MDALTRERTLIGSDDNAGLDLEPAQRPTRDEAMAAVRTLLAWAGDNPDREGLLDTPQRVVDAYGEWFAGYQGDPAKELSRTFEDVQGYDDMVMLRGIDVQSHCEHHMAPFLGKAWIAYMPTGKVVGLSKLARLTEIFAKRLQTQETMTMQIADAIEDHLSAAGVAVLIDAEHQCMSTRGVHHHDVSTITTQFRGLFKTDKVLQQRFMDLVRK

SEQ ID NO: 6442 - protein, 215 aa, Caulobacter henricii
  REGION 1..215: note = tr|A0A0P0NW99|A0A0P0NW99_9CAUL GTP cyclohydrolase 1; OS = Caulobacter henricii OX=69395 GN=folE PE=3 SV=1
MDAITPEAALIERCSCAADDLQHGHPSRPSRDEAMAAVRTLLAWAGDNPEREGLLDTPQRVVDAYGEWFAGYEGDPAKELSRTFEDVQGYDDMVMLRGIDVQSHCEHHMAPFLGKAWVAYMPTGKVVGLSKLARLVEIYAKRLQTQETMTMQVADAIEDHLSAAGVAVLIDAEHQCMSTRGVRHHDVSTITTQFRGVFKTDKVLQQRFMDLVVRK

SEQ ID NO: 6443 - protein, 210 aa, Caulobacter mirabilis
  REGION 1..210: note = tr|A0A2D2B249|A0A2D2B249_9CAUL GTP cyclohydrolase 1; OS = Caulobacter mirabilis OX=69666 GN=folE PE=3 SV=1
MDSSARERTLVSVPGLDLEPVQRPSREEAMEAVRTLIAWAGDDPRREGVIDTPKRVVDAYEEWFEGYRADPSKELSRIFEDVQGYDDIVFLKNIEVESHCEHHMAPFLGKAFVAYMPTNRVVGISKLARVVEIFAKRLQTQETMTQQIADAISDSLKPAGVAVLIDAEHQCMTTRGVHHRDVSTITTQFRGVFKTDATLRQRFLDFVAKS

SEQ ID NO: 6444 - protein, 211 aa, unidentified
  source 1..211: note = Caulobacter radicis
  REGION 1..211: note = tr|A0A2T9K6J0|A0A2T9K6J0_9CAUL GTP cyclohydrolase 1; OS = Caulobacter radicis OX=2172650 GN=folE PE=3 SV=1
MDALTRERTLIGSDDAALDLEPAQRPTRDEAMAAVRTLLAWAGDNPDREGLLDTPQRVVDAYGEWFAGYHGDPAKELSRTFEDVQGYDDMVMLRGIDVQSHCEHHMAPFLGKAWVAYMPTGKVVGLSKLARLVEIYAKRLQTQETMTMQVADAIEDHLSAAGVAVLIDAEHQCMSTRGVHHHDVSTITTQFRGVFKTDKVLQQRFMDLVRK

SEQ ID NO: 6445 - protein, 211 aa, unidentified
  source 1..211: note = Caulobacter radicis
  REGION 1..211: note = tr|A0A2T9IZX1|A0A2T9IZX1_9CAUL GTP cyclohydrolase 1; OS = Caulobacter radicis OX=2172650 GN=folE PE=3 SV=1
MDALTRERTLIGSDDTGLDLEPAQRPTRDEAMAAVRTLLAWAGDNPDREGLLDTPQRVVDAYGEWFAGYHGDPAKELSRTFEDVQGYDDMVMLRGIDVQSHCEHHMAPFLGKAWVAYMPTGKVVGLSKLARLVEIFAKRLQTQETMTMQVADAIEDHLSAAGVAVLIDAEHQCMSTRGVHHHDVSTITTQFRGVFKTDKVLQQRFMDLVRK

SEQ ID NO: 6446 - protein, 195 aa, unidentified
  source 1..195: note = Caulobacter rhizosphaerae
  REGION 1..195: note = tr|A0A561N2J4|A0A561N2J4_9CAUL GTP cyclohydrolase 1; OS = Caulobacter rhizosphaerae OX=2010972 GN=folE PE=3 SV=1
MSKPGPTQADAEAAVRVLLEWAGDDPSREGLLDTPERVAKSYRELFSGYETDPRGYLERTFQEVAGYDQLVVLSNIRVVSFCEHHMLPVTGVAHVGYLPTNKVVGISKLARVVNGFARRLQIQEKLTAEIAQAIEDVLQPHGVGVVIEAEHSCMTLRGVNTPGSRLTTSSLRGVVRDDPRTRAEFLRLVRQGAAA

SEQ ID NO: 6447 - protein, 218 aa, unidentified
  source 1..218: note = Caulobacter rhizosphaerae
  REGION 1..218: note = tr|A0A561MJU7|A0A561MJU7_9CAUL GTP cyclohydrolase 1; OS = Caulobacter rhizosphaerae OX=2010972 GN=folE PE=3 SV=1
MDALTRERTLIGLDSETGLDLEPGLHPQSWRPTRDEAMAAVRTLLAWAGDNPDREGLLDTPQRVVDAYGEWFAGYHGDPAVELSRTFEDVQGYDDMVMLRGIDVQSHCEHHMAPFLGKAWVAYMPTGKVVGLSKLARLVEIFAKRLQTQETMTMQIADAIEDHLSAAGVAVLIDAEHQCMSTRGVRHHDVSTITTQFRGVFKTDKVLQQRFMDLAARK

SEQ ID NO: 6448 - protein, 211 aa, Caulobacter segnis
  REGION 1..211: note = tr|A0A2W5V6Q5|A0A2W5V6Q5_9CAUL GTP cyclohydrolase 1; OS = Caulobacter segnis OX=88688 GN=folE PE=3 SV=1
MDALARERTLIGSDDGLDLEAAERPSREEAMAAVRTLLAWAGDNPEREGLIDTPKRVVDAFEEWFAGYQGDPAKELSRTFEDVQGYDDMVMLRGIDVQSHCEHHMAPFLGKAWVAYMPTGKVVGLSKLARLVEIFAKRLQTQETMTMQIADAIEDHLSAAGVAVLIDAEHQCMSTRGVHHHDVSTITTQFRGVFKTDKVLQQRFMDLVTRK

SEQ ID NO: 6449 - protein, 211 aa, Caulobacter segnis
  REGION 1..211: note = tr|D5VHQ4|D5VHQ4_CAUST GTP cyclohydrolase 1; OS = Caulobacter segnis (strain ATCC 21756 / DSM 7131 / JCM 7823 / NBRC 15250 / LMG 17158 / TK0059) OX=509190 GN=folE; PE = 3SV=1
MDALARERTLIGSDAGLDLEPAERPSREEAMAAVRTLLAWAGDNPEREGLIDTPKRVVDAFEEWFAGYQGDPAKELSRTFEDVQGYDDMVMLRGIDVQSHCEHHMAPFLGKAWVAYMPTGKVVGLSKLARLVEIFAKRLQTQETMTMQIADAIEDHLSAAGVAVLIDAEHQCMSTRGVHHHDVSTITTQFRGVFKTDKVLQQRFMDLVVRK

SEQ ID NO: 6450 - protein, 212 aa, Caulobacter sp.
  REGION 1..212: note = tr|A0A3Q9IJT7|A0A3Q9IJT7_9CAUL GTP cyclohydrolase 1; OS = Caulobacter sp. FWC26 OX=69665 GN=folE PE=3 SV=1
MDALTRERTLIGSDDTTGLDLEPAQRPTKDEAMAAVRTLLAWAGDNPEREGLIDTPKRVVEAFDEWFAGYHGDPAKELSRTFEDVQGYDDMVMLRGIDVQSHCEHHMAPFLGKAWVAYMPTGKVVGLSKLARLVEIFAKRLQTQETMTMQIADSIEDHLSAAGVAVLIDAEHQCMSTRGVHHHDVSTITTQFRGVFKTDKVLQQRFMDLVKK

SEQ ID NO: 6451 - protein, 211 aa, Caulobacter sp.
  REGION 1..211: note = tr|A0A0Q6V0A9|A0A0Q6V0A9_9CAUL GTP cyclohydrolase 1; OS = Caulobacter sp. Root343 OX=1736520 GN=folE PE=3 SV=1
MDALTRERTLIGTDDTGLDLEPAQRPTKDEAMAAVRTLLAWAGDNPDREGLLDTPERVVEAYGEWFAGYHGDPAKELSRTFEDVQGYDDMVMLRGIDVQSHCEHHMAPFLGKAWVAYMPTGKVVGLSKLARLVEIFAKRLQTQETMTMQIADAIEDHLSAAGVAVLIDAEHQCMSTRGVRHHDVSTITTQFRGVFKTDKVLQQRFMDLVRK

SEQ ID NO: 6452 - protein, 212 aa, Caulobacter vibrioides
  REGION 1..212: note = sp|Q9AAY3|GCH1_CAUVC GTP cyclohydrolase 1; OS = Caulobacter vibrioides (strain ATCC 19089 / CB15); OX = 190650 GN=folE PE=3 SV=1
MDALTRERTLIGSDDTTGLDLEPVQRPSKDEAMAAVRTLLAWAGDNPEREGLIDTPKRVVEAFDEWFAGYHGDPAKELSRTFEDVQGYDDMVMLRGIDVQSHCEHHMAPFLGKAWIAYMPTGKVVGLSKLARLVEIFAKRLQTQETMTMQIADAIEDHLSAAGVAVLIDAEHQCMSTRGVHHHDVSTITTQFRGVFKTDKVLQQRFMDLVKK

SEQ ID NO: 6453 - protein, 212 aa, Caulobacter vibrioides; identical to SEQ ID NO: 6452
  REGION 1..212: note = tr|A0A290MQI7|A0A290MQI7_CAUVI GTP cyclohydrolase 1; OS = Caulobacter vibrioides OX=155892 GN=folE PE=3 SV=1

SEQ ID NO: 6454 - protein, 211 aa, unidentified
  source 1..211: note = Caulobacter zeae
  REGION 1..211: note = tr|A0A2N5DNT3|A0A2N5DNT3_9CAUL GTP cyclohydrolase 1; OS = Caulobacter zeae OX=2055137 GN=folE PE=3 SV=1
MDALTRERTLIGSDDTGLDLEPAQRPTRDEAMAAVRTLLAWAGDNPDREGLLDTPQRVVDAYGEWFAGYDGDPAKELSRTFEDVQGYDDMVMLRGIDVQSHCEHHMAPFLGKAWVAYMPTGKVVGLSKLARLVEIYAKRLQTQETMTMQVADAIEDHLSAAGVAVLIDAEHQCMSTRGVHHHDVSTITTQFRGVFKTDKVLQQRFMDLVRK

SEQ ID NO: 6455 - protein, 204 aa, unidentified
  source 1..204: note = Caulobacteraceae bacterium
  REGION 1..204: note = tr|A0A1B1AF85|A0A1B1AF85_9CAUL GTP cyclohydrolase 1; OS = Caulobacteraceae bacterium OTSz_A_272 OX=1759059; GN = folE PE=3 SV=1
MSEILKWRSPEEAEQKRPSREAAMEAVRTLIAWAGDDPEREGLKDTPKRVVDAYREWFKGYDECPADELNRVFEDVSGYDDMVMLKKIDVESHCEHHIAPFLGKAYVAYLPTDAVVGISKIARVVEIFAKRLQTQETMTSQIAQSIEETLKPRGVAVLIDAEHQCMSTRGVHHKDVTTVTTQFTGAFKDDAELRNRFLKLAGYG

SEQ ID NO: 6456 - protein, 192 aa, unidentified
  source 1..192: note = Caulobacteraceae bacterium
  REGION 1..192: note = tr|A0A4Q3S2P9|A0A4Q3S2P9_9CAUL GTP cyclohydrolase 1; OS = Caulobacteraceae bacterium OX=1978230 GN=folE PE=3 SV=1
MTDKPSRPSVEEAEAAVRTLIRWAGDDPDREGLLETPARVTRSYRELFHGYEEDPREYLKRTFEEVHGYDELVVLSNIPVVSFCEHHMLPFQGRAHVGYLPSNRVVGISKLARVVGGFARRLQIQEKLTAEIAGAIQDILQPRGVGVVIRSEHSCMTMRGVNTPGTWLTTSTLLGAVRDDSRTRHEFLELAR

SEQ ID NO: 6457 - protein, 208 aa, unidentified
  source 1..208: note = Caulobacterales bacterium
  REGION 1..208: note = tr|A0A258C6R8|A0A258C6R8_9PROT GTP cyclohydrolase 1; OS = Caulobacterales bacterium 32-67-6 OX=1970502 GN=folE; PE = 3 SV=1
MDAPTRDLNLNGPAGLEPLPRPTREEAMAAVRTLIAWAGDDPRREGVIDTPKRVVDAYADWFEGYGADPAKELSRTFEDVQGYDDIVMLREIEVESHCEHHMAPFLGKAYVAYMPTNRVVGISKLARVVEIYAKRLQTQETMTQQIADAITDSLRPAGVAVLIDAQHQCMTTRGVHHRHVSTITTQFTGVFKTDNSLRQRFLDFVNKR

SEQ ID NO: 6458 - protein, 175 aa, unidentified
  source 1..175: note = Caulobacterales bacterium
  REGION 1..175: note = tr|A0A1Q3JK37|A0A1Q3JK37_9PROT GTP cyclohydrolase 1; OS = Caulobacterales bacterium 68-7 OX=1895737 GN=folE PE=3; SV = 1
MIAWAGDNPRREGLLDTPGRVVEAYEEWFKGYTGDPAVELSRTFEDVQGYDDMVMLRGIEVESFCEHHMAPFIGKAHVAYMPTGRVVGLSKLARLVEIFSKRLQTQETLTQQVIDAMDDVLRPAGSAVMVEAVHQCMSTRGVKHRDVSTITTQFTGVFKTDKQLQQRFLDLTNRK

SEQ ID NO: 6459 - protein, 218 aa, unidentified
  source 1..218: note = Caviibacterium pharyngocola
  REGION 1..218: note = tr|A0A2M8RUZ9|A0A2M8RUZ9_9PAST GTP cyclohydrolase 1; OS = Caviibacterium pharyngocola OX=28159 GN=folE PE=3 SV=1
MNNISPEAEKVRRALAEKGIETPMIALQQSKDQRRAEIERHMREVMRLIGLDLTDDSLEETPVRLAKMFIDEIFSGLDYANFPKITNIENRMKVSEMVLVNDITLTSTCEHHFVTIDGTVSVAYYPKKWVIGLSKINRVVSFFAQRPQVQERLTEQILLAFQTILETEDVAVYVKATHFCVKCRGIKDTNSYTVTSAFGGVFLDDRETRKEFLTLINK

SEQ ID NO: 6460 - protein, 231 aa, unidentified
  source 1..231: note = Cecembia calidifontis
  REGION 1..231: note = tr|A0A4Q7P7L6|A0A4Q7P7L6_9BACT GTP cyclohydrolase 1; OS = Cecembia calidifontis OX=1187080 GN=folE PE=3 SV=1
MKQKETLLNTVGIDYSQNIEDMGDEHVATSHETPLREDAFAMDDDLKIELIEKHFREIMHIMGLDLTDDSLRGTPRRVAKMFIKEVFSGLDPKNKPAAKLFENKFKYNEMLVEKDITFYSHCEHHFVPIFGRAHVAYISNGHVIGLSKINRIVQYFAKRPQVQERLTMQIGNELKEVLGTEDVAVVLDAHHMCVSSRGIQDVNSSTVTSFYSGKFEKDEQTRAEFMKYISL

SEQ ID NO: 6461 - protein, 231 aa, unidentified
  source 1..231: note = Cecembia lonarensis
  REGION 1..231: note = tr|K1LXB4|K1LXB4_9BACT GTP cyclohydrolase 1; OS = Cecembia lonarensis LW9 OX=1225176 GN=folE PE=3 SV=1
MKQRETLSNTVDLEFTRSIEEIGDEHIGTSDQTPLREDAFEMDDDLKMELIEKHFREIMNVLGLDLSDDSLRGTPKRVAKMYIKEIFSGLDPRNKPVVKLFENKYKYKEMLVEKDITFFSNCEHHFVPIYGKAHVAYISNGNVIGLSKINRIVQYFAKRPQVQERLTMQIGNELKELLGTDDIAVIIDAHHMCVSSRGIQDVSSSTVTSFYGGKFETDEQTRAEFMKYLSL

SEQ ID NO: 6462 - protein, 231 aa, unidentified
  source 1..231: note = Cecembia rubra
  REGION 1..231: note = tr|A0A2P8E6N5|A0A2P8E6N5_9BACT GTP cyclohydrolase 1; OS = Cecembia rubra OX=1485585 GN=folE PE=3 SV=1
MKQKETLLNTVGIDYTQNIDDIGDEHVATSHATPLREDAFEMDDDLKIELIEKHFREIMHIMGLDLTDDSLRGTPKRVAKMFIKEVFSGLDPKNKPAAKLFENKFKYNEMLVEKDITFYSHCEHHFVPIFGRAHVAYISNGHVIGLSKINRIVQYFAKRPQVQERLTMQIGNELKEALGTEDVAVVLDAHHMCVSSRGIQDVNSSTVTSYYSGKFEKDEQTRTEFMKYISL

SEQ ID NO: 6463 - protein, 221 aa, Cedecea davisae
  REGION 1..221: note = tr|S3J731|S3J731_9ENTR GTP cyclohydrolase 1; OS = Cedecea davisae DSM 4568 OX=566551 GN=folE PE=3 SV=1
MSSLSKEAALVHEALVARGLETPLRPPLRELDNETRKSQIAAHMTEIMQLLNLDLSDDSLMETPHRIAKMYVDEIFSGLDYANFPKITVIENKMKVDEMVTVRDITLTSTCEHHFVTIDGKATVAYIPKETVIGLSKINRIVQFFAQRPQVQERLTQQILIALQTLLGTNNVAVSIDAVHYCVKARGVKDATSATTTTSLGGLFKSSQNTRQEFLRAVRHS

SEQ ID NO: 6464 - protein, 309 aa, Cedecea davisae
  REGION 1..309: note = tr|S3JCZ1|S3JCZ1_9ENTR GTP cyclohydrolase FolE2; OS = Cedecea davisae DSM 4568 OX=566551 GN=folE2 PE=3 SV=1
MTVTPALCPKTLPDIQSLKGEHSDATLSWVGMEQIDLPVEIAGRPLTAKVSAGINLLSSPEAEKGIHMSRLYLLLDALTQQEVTPASLRNLLGEFLVSHQRCSNMASITLSGDLLLSRKSLTSNRFGWKAYPVQVQAGRGSDFTVTVRVGIPYSSTCPASAALSRNLAQQQFQLDFGERSDRLSVAEVEAWLGERGMPGTPHSQRSWAWVSCRLKPDARILPFIDVIDCCETALATAVQTVVKRADEQAFALANGQNLMFCEDAARRLNQALLGSAFCSAFEVRVEHQESLHAHNAVARINWTGNHYAA

SEQ ID NO: 6465 - protein, 312 aa, Cedecea lapagei
  REGION 1..312: note = tr|A0A447V4C9|A0A447V4C9_9ENTR GTP cyclohydrolase FolE2 OS=Cedecea lapagei OX=158823 GN=folE2 PE=3 SV=1
MHTMTVIPTLCPKTLPDIQSLRSHEFDMALSWVGMEQIDLPVEIAGRPLTAKVNAGINLLSTPEAEKGIHMSRLYLLLDELTQGEITPAALRTLLGKFLVSHQRSSSRASVEIMGELLLSRRSLTSNHFGWKAYPIRVLAEREETFAVTLEVGIPYSSTCPASAALSRNLAQQQFQRDFGERSGGVTVEEMMAWLGEKGMPGTPHSQRSWAWVRCQLKQDVTTLPFLELIDRCEAALGTAVQTVVKRGDEQAFARANGQNLMFCEDAARRLNKAMLDAPFSAAFSLRVEHQESLHAHNAVARIHWTGNHHAA

SEQ ID NO: 6466 - protein, 221 aa, Cedecea lapagei
  REGION 1..221: note = tr|A0A3S4JAF3|A0A3S4JAF3_9ENTR GTP cyclohydrolase 1; OS = Cedecea lapagei OX=158823 GN=folE PE=3 SV=1
MSSLSKEASLVHEALLARGLETPLRPPLRELDNETRKSQIAAHMTEIMQLLNLDLSDDSLMETPHRIAKMYVDEIFSGLDYANFPKITVIENKMKVDEMVTVRDITLTSTCEHHFVTIDGKATVAYIPKDTVIGLSKINRIVQFFAQRPQVQERLTQQILIALQTLLGTNNVAVSIDAVHYCVKARGVKDATSATTTTSLGGLFKSSQNTRQEFLRAVRHN

SEQ ID NO: 6467 - protein, 309 aa, Cedecea neteri
  REGION 1..309: note = tr|A0A291E5M9|A0A291E5M9_9ENTR GTP cyclohydrolase FolE2 OS=Cedecea neteri OX=158822 GN=folE2 PE=3 SV=1
MTVTSMLCPKTLPDIQSLRSHEFDTALSWVGMEQIDLPVEIAGRPLTAKVSAGINLLSTPEAEKGIHMSRLYLLLDELTQGEVTPAALRNLLGKFLVSHQRSSNRASVEIAGELLLSRRSLTSNHFGWKAYPIRVQAERGETFTVTLRVGMPYSSTCPASAALSRNLAQQQFQRDFAGRSDNISVEEMMAWLGEKGMPGTPHSQRSWAWIGCQLKPDVATLPFEELIDRGEAALGTAVQTVVKRGDEQAFALANGQNLMFCEDAARRLNKAMLDAPFSAAFTLRVEHQESLHAHNAVAHIHWTGNHHVA

SEQ ID NO: 6468 - protein, 221 aa, Cedecea neteri
  REGION 1..221: note = tr|A0A291DVK5|A0A291DVK5_9ENTR GTP cyclohydrolase 1; OS = Cedecea neteri OX=158822 GN=folE PE=3 SV=1
MSSLSKEAALVHEALLARGLETPLRPPLRELDNETRKSQIAAHMTEIMQLLNLDLSDDSLMETPHRIAKMYVDEIFSGLDYANFPKITVIENKMKVDEMVTVRDITLTSTCEHHFVTIDGKATVAYIPKDTVIGLSKINRIVQFFAQRPQVQERLTQQILIALQTLLGTNNVAVSIDAVHYCVKARGVKDATSATTTTSLGGLFKSSQNTRQEFLRAVRHN

SEQ ID NO: 6469 - protein, 221 aa, Cedecea sp.
  REGION 1..221: note = tr|A0A1X7I5C7|A0A1X7I5C7_9ENTR GTP cyclohydrolase 1; OS = Cedecea sp. NFIX57 OX=1566286 GN=folE PE=3 SV=1
MSSLSKEASLVHEALVARGLETPLRPPLRELDNETRKSQIAAHMTEIMQLLNLDLSDDSLMETPHRIAKMYVDEIFSGLDYANFPKITVIENKMKVDEMVTVRDITLTSTCEHHFVTIDGKATVAYIPKDTVIGLSKINRIVQFFAQRPQVQERLTQQILIALQTLLGTNNVAVSIDAVHYCVKARGVKDATSATTTTSLGGLFKSSQNTRQEFLRAVRHN

SEQ ID NO: 6470 - protein, 312 aa, Cedecea sp.
  REGION 1..312: note = tr|A0A1X7M031|A0A1X7M031_9ENTR GTP cyclohydrolase FolE2 OS=Cedecea sp. NFIX57 OX=1566286 GN=folE2 PE=3 SV=1
MCDMTVTPMLCPKMLPDIQSLRSHEFDTTLSWVGMEQIDLPVEVAGRPLTAKVNAGINLLSSPEAEKGIHMSRIYLLLDELTQGEITPGVLRHLLGEFLVSHQRSSDRASVEIAGELLLSRKSLTSNHFGWKAYPIRILAERGEDFAVTIRVGIPYSSTCPASAALSRNLAQQQFQRDFGSRKDGVSVDEMLAWLGEKGMPGTPHSQRSWAWVSCQLKPDVATLPFLALIDRCEAALGTAVQTVVKRSDEQAFAQANGQNLMFCEDAARRLNKAMLDASFSAAFTLRVEHQESLHAHNAVARIHWTGNHHAA

SEQ ID NO: 6471 - protein, 372 aa, Celeribacter baekdonensis
  REGION 1..372: note = tr|A0A1G7I5Q1|A0A1G7I5Q1_9RHOB GTP cyclohydrolase FolE2 OS=Celeribacter baekdonensis OX=875171 GN=folE2 PE=3; SV = 1
MNMYPSDLETSSERAKAEAALAVLRDWATRATPTEVAELDPAISRLLPEADDFANYPALRRAYPEDFEASEAYRDTLPDLQNGPESLIKGAKRQIQHVGISNFRLPIRFHTRDSHDAGGDLTLETSVTGTVSLEAEKKGINMSRIMRSFYKHSERTFSFDVIQAALRDYKADLDSFDARIQMRFSFPVKRASLRSGLSGYQYYDIALELVETKGKMTEIMHLDYVYSSTCPCSLELSEHARRTRQQLATPHSQRSVARISVEVRDQPDTLWFEDLIDLCRAAVPTETQVMVKREDEQAFAELNAANPIFVEDAARLFAQNLENDHRIGDFRIIASHQESLHSHDAVSVLTEGDTFAAQSLDPKLFATLFHVG

SEQ ID NO: 6472 - protein, 372 aa, Celeribacter baekdonensis
  REGION 1..372: note = tr|K2K7J4|K2K7J4_9RHOB GTP cyclohydrolase FolE2; OS = Celeribacter baekdonensis B30 OX=1208323 GN=folE2 PE=3; SV = 1
MNMYPSDLETSSERAKAEAALAVLRDWATRATPTEVAELDPAISRLLPEADDFANYPALRRAYPEDFEASEAYRDTLPDLQNGPESLIKGAKRQIQHVGISNFRLPIRFHTRDSHDAGGDLTLETSVTGTVSLDAEKKGINMSRIMRSFYKHSERTFSFDVIQAALRDYKADLNSFDARIQMRFSFPVKRASLRSGLSGYQYYDIALELVETKGKITEIMHLDYVYSSTCPCSLELSEHARRTRHQLATPHSQRSVARISVEVRDQTDTLWFEDLIDLCRAAVPTETQVMVKREDEQAFAELNAANPIFVEDAARLFAQNLEHDHRIGDFRIIASHQESLHSHDAVSVLTEGDTFAAQSIDPKLFATLFHVG

SEQ ID NO: 6473 - protein, 367 aa, unidentified
  source 1..367: note = Celeribacter ethanolicus
  REGION 1..367: note = tr|A0A291GBB7|A0A291GBB7_9RHOB GTP cyclohydrolase FolE2 OS=Celeribacter ethanolicus OX=1758178 GN=folE2 PE=3; SV = 1
MNMQTSDLEKNDRAAAEAALAILRDWAKGASPTEVAELDPAIARLLPEADDFANYPALRRAYPEDFEVSEAYKEGLPDLQNGPESLIKGAKRQIQHVGISNFRLPIRFKTRDDGDLTLETSVTGTVSLEAEKKGINMSRIMRSFYKHAERSFSFDVIEAALRDYQSDLESFDARIQMRFSFPVKRRSLRSGLAGYQYYDIALELVEQGGKMKEIMHLDYVYSSTCPCSLELSEHARRTRHQLATPHSQRSVARISVEVKNRQDTLWFEDLIDLCRRAIPTETQVMVKREDEQAFAELNAANPIFVEDAARLFSEVLENDRRIGDFRVIASHQESLHSHDAVSVLTEGETFAAQSLDPKLFSTLFHIG

SEQ ID NO: 6474 - protein, 367 aa, unidentified
  source 1..367: note = Celeribacter halophilus
  REGION 1..367: note = tr|A0A1I3N132|A0A1I3N132_9RHOB GTP cyclohydrolase FolE2 OS=Celeribacter halophilus OX=576117 GN=folE2 PE=3; SV = 1
MNMQTSERDQNDRAAAEAALKALRDWAAKATPTEVAELDPAISRLLPEADDFANYPALRRAYPEDFEVSEGYKDSLPDLQNGPESLIKGAKRQIQHVGISNFRLPIRFKTRDNGDLTLETSVTGTVSLEAEKKGINMSRIMRSFYKHAERSFSFDVIAAALRDYQSDLDSFDARIQMRFSFPVKRPSLRSGLEGYQYYDIALELVEQGGKMTEIMHLDYVYSSTCPCSLELSEHARRTRHQLATPHSQRSVARISVEVKNQPDTLWFEDLIDLCRSVVPTETQVMVKREDEQAFAELNAANPIFVEDAARLFAEALESDGRIGDFRVIASHQESLHSHDAVSVLTEGETFAAHSLDPKLFSTLFHVG

SEQ ID NO: 6475 - protein, 367 aa, unidentified
  source 1..367: note = Celeribacter indicus
  REGION 1..367: note = tr|A0A0B5DYZ3|A0A0B5DYZ3_9RHOB GTP cyclohydrolase FolE2 OS=Celeribacter indicus OX=1208324 GN=folE2 PE=3 SV=1
MNIHTGDPEREERARAAAALETLRAWAAKATPTEVAELDPAISRLLPEASDFANYPALRRAYPEDFEVSEAYKEGLPDLQNGPESLIRGAKRQIQHVGISNFRLPIRFHTRDGGDLTLETSVTGTVSLEAEKKGINMSRIMRSFYRHAERTFSFDVIEAALRDYQADLESFDARIQMRFSFPVKRRSLRSGLEGYQYYDIALELVEQGGRMIEIIHLDYVYSSTCPCSLELSEHARRTRHQLATPHSQRSVARLSVVVKNQPDTLWFEDLIDLCRTAVPTETQVMVKREDEQAFAELNAANPIFVEDAARLFAEAMENDRRIGDFRVIASHQESLHSHDAVSVLTEGATFAAQSLDPKVFATLFHVG

SEQ ID NO: 6476 - protein, 368 aa, unidentified
  source 1..368: note = Celeribacter marinus
  REGION 1..368: note = tr|A0A0P0A6T5|A0A0P0A6T5_9RHOB GTP cyclohydrolase FolE2 OS=Celeribacter marinus OX=1397108 GN=folE2 PE=3 SV=1
MNIQTGAMDKQAKREAAKAALHALRAWAEDATPTEVAELDPAISRLLPHSDDFANYPALRRAYPEDFQVDEAYRDTLPDLQNGPESLIKGARQQIQHVGISNFRLPIRFHTRDNGDLTLETSVTGTVSLEAEKKGINMSRIMRSFYKHAEQTFSFDVIETALDAYIADLDSFDARIQMRFSFPVKMPSLRSGLEGFQYYDIALELVEKNGVRRKFMHLDYVYSSTCPCSLELSEHARRTRQQLATPHSQRSVARISVEVLPNQACLWFEDLIDLARSAVATETQVMVKREDEQAFAELNAANPIFVEDAARLFCEALQGEPRVGDFRVVASHQESLHSHDAVSVLTQGDTFDAQSLDPRLFASLIHVG

SEQ ID NO: 6477 - protein, 369 aa, Celeribacter neptunius
  REGION 1..369: note = tr|A0A1I3J2X8|A0A1I3J2X8_9RHOB GTP cyclohydrolase FolE2 OS=Celeribacter neptunius OX=588602 GN=folE2 PE=3; SV = 1
MNVPDNLKPSEKVSLRKASAALETLRDWAAQATPTEVAELDPAIARLLPEADDFANYPALRRAYPEDFEVSEGYKDSLPDLQNGPESLIKGAKRQIQHVGISNFRLPIRFKTRDDGDLSLETSVTGTVSLEAEKKGINMSRIMRSFYRHAERSFSFDVIEAALRDYQSDLESFDARIQMRFSFPVKRASLRSGLEGYQYYDIALELVEQGGKMKEIMHLDYVYSSTCPCSLELSEHARRTRHQLATPHSQRSVARISVEVKQRENTLWFEDLIDLCRKAVPTETQVMVKREDEQAFAELNAANPIFVEDAARLFAEALEGEPRVGDFRVVASHQESLHSHDAVSVLTEGETFAAQSLDPKLFSTLFHIG

SEQ ID NO: 6478 - protein, 371 aa, unidentified
  source 1..371: note = Celeribacter persicus
  REGION 1..371: note = tr|A0A2T5HM11|A0A2T5HM11_9RHOB GTP cyclohydrolase FolE2 OS=Celeribacter persicus OX=1651082 GN=folE2 PE=3; SV = 1
MNIQTSDLEKNDRAAAEAALATLRDWAKSATPTEVAELDPAIARLLPEADDFANYPALRRAYPEDFEVSEAYKQGLPDLQNGPESLIKGAKRQIQHVGISNFRLPIRFKTRDSLNGAGDLTLETSVTGTVSLEAEKKGINMSRIMRSFYKHAERSFSFEVIEAALRDYQSDLESFDARIQMRFSFPVKRRSLRSGLEGYQYYDIALELVEQGGKMTEIMHLDYVYSSTCPCSLELSEHARRTRHQLATPHSQRSVARVSVEVKNQPDTLWFEDLIDLCRTAIPTETQVMVKREDEQAFAELNAANPIFVEDAARLFSEVLENDRRIGDFRVIASHQESLHSHDAVSVLTEGETFAAQSLDPKLFSTLFHVG

SEQ ID NO: 6479 - protein, 305 aa, Celerinatantimonas diazotrophica
  REGION 1..305: note = tr|A0A4V2PR90|A0A4V2PR90_9GAMM GTP cyclohydrolase FolE2 OS=Celerinatantimonas diazotrophica OX=412034; GN = folE2 PE=3 SV=1
MLNINHPILPDVAATQRARQPYPIKWVGMEKIVLPIVVSGPSHEPLSVSSQANVFVSLDDPLAKGIHMSRLYLKLCEHLANRPLTLDCLKTLLIELIESQKGMSHSARVDLSFDLIIAKKALLSEQVGYATYPLKLSIVQIADEIKLSAELQIIYSSTCPCSASLSRQLYKETVEERFLSDKIDKQALLDWLVSEQGTVATPHSQRSFAYLQLEFVKGYFPDFSVLLEHIEQVIATPVQTAVKRADEQAFAKLNAEHLMFCEDAARKLKAALESFNFIIDYWFKIEHQESLHAHNAVAIDYKNHL

SEQ ID NO: 6480 - protein, 218 aa, Celerinatantimonas diazotrophica
  REGION 1..218: note = tr|A0A4R1JAC7|A0A4R1JAC7_9GAMM GTP cyclohydrolase 1; OS = Celerinatantimonas diazotrophica OX=412034 GN=folE PE=3; SV = 1
MSEFSNDALKVQTALVAAGIETPSIETTLQQSEKITHIENHFQEILKVLGMDLTDDSLTETPHRIAKMYVKEIFQGLDYRNFPKITLIDNKMDVDEMVTVKDIGMISTCEHHFAAIDGFAHVAYIPRTKVIGLSKINRVVRFFAQRPQVQERLTRQILVALQTILQTQDVAVRINAVHYCVKSRGVADHSSDTTTTALGGEFKSNLATRQEFLHQLKV

SEQ ID NO: 6481 - protein, 197 aa, Cellulomonas aerilata
  REGION 1..197: note = tr|A0A512DEJ9|A0A512DEJ9_9CELL GTP cyclohydrolase 1; OS = Cellulomonas aerilata OX=515326 GN=folE PE=3 SV=1
MVQAPGGARRPYDAARVEAAVRELLHAVGEDPDREGLRDTPARVARAYAETFVGLHLEPADVLTTTFDLGHEEMVLVKDIAVYSTCEHHLVPFHGVAHVGYIPGEDGRITGLSKLARLVDLYARRPQVQERLTSQVADALVDHLRPRGAIVVFECEHLCMSMRGVRKPGSRTVTSAVRGQMRDAATRAEAMSLILGR

SEQ ID NO: 6482 - protein, 207 aa, Cellulomonas biazotea
  REGION 1..207: note = tr|A0A402DRB9|A0A402DRB9_9CELL GTP cyclohydrolase 1; OS = Cellulomonas biazotea OX=1709 GN=folE_2 PE=3 SV=1
MSDGVPSQISPVTGVGRAVGEYDEARAERAVRELLLAVGEDPDREGLLETPARVARAYREIFAGLYQEPTDVLTTTFDIGHEEMVLVKDIEVYSTCEHHLVPFHGVAHVGYIPGADGRITGLSKLARLVDVYARRPQVQERLTSQVADALVEVLQPRGVLVVVECEHLCMSMRGVRKPGSRTVTSAVRGQMRDVATRAEAMSLVLGR

SEQ ID NO: 6483 - protein, 197 aa, Cellulomonas biazotea
  REGION 1..197: note = tr|A0A402DNM0|A0A402DNM0_9CELL GTP cyclohydrolase 1; OS = Cellulomonas biazotea OX=1709 GN=folE_1 PE=3 SV=1
MTLTTTDDLRLDAPPGADLDAAESAARAFLAALGVRCDSPGTERSPRRMAEAYAAMLAPRPFAMTTFPNDEGYDELVVVRSIPVQSLCEHHLLPFVGVAHVGYLPDGRILGLSKLARVVEMFARRPQVQERLTRQVADWLDAELAPRGVGVVVEAEHLCMALRGVRAVGAVTTTSALSGLVRDSPATRAEFLAAVHP

SEQ ID NO: 6484 - protein, 218 aa, Cellulomonas bogoriensis
  REGION 1..218: note = tr|A0A0A0BLE4|A0A0A0BLE4_9CELL GTP cyclohydrolase 1; OS = Cellulomonas bogoriensis 69B4 = DSM 16987 OX=1386082; GN = folE PE=3 SV=1
MRCRPATPSTPAGDVVTHTPDEGPGFEPVTVPYDAARAERAVRELLLAVGEDPDRDGLRDTPARVARAYGEIFAGLYTDPRDVLETTFDLGHEELVVVKDIPLYSTCEHHLVPFHGRAHVGYIPGAEGRVTGLSKIARLVDLYARRPQVQERLTTQVADAMVERLNPGGVLVVVECEHLCMSMRGVRKPGSRTVTSAVRGQLRDGATRAEAMSLVLGR

SEQ ID NO: 6485 - protein, 225 aa, unidentified
  source 1..225: note = Cellulomonas carbonis
  REGION 1..225: note = tr|A0A0A0BJS1|A0A0A0BJS1_9CELL GTP cyclohydrolase 1; OS = Cellulomonas carbonis T26 OX=947969 GN=folE PE=3 SV=1
MTHTADDAPGLDVAGDGHLVPADDVPQVGEDAAALPLPRYDAARAERAVRELLLAVGEDPDREGLQDTPARVARAYAETFAGLHQDPAAVLQTTFDLGHEEMVLVKDIEVYSTCEHHLVPFHGVAHVGYIPGDDGRITGLSKLARLVDVYARRPQVQERLTSQVADTLVEVLRPRGVIVVVECEHLCMSMRGVRKPGARTLTSAVRGQMRDVATRAEAMSLILGR

SEQ ID NO: 6486 - protein, 214 aa, Cellulomonas cellasea
  REGION 1..214: note = tr|A0A4Y3KZ67|A0A4Y3KZ67_9CELL GTP cyclohydrolase 1; OS = Cellulomonas cellasea OX=43670 GN=folE PE=3 SV=1
MTVDEHDDALRELLPAPVAAPERRLVPEYDAARAEAAIRELLLAVGEDPEREGLRDTPARVARAYREIFAGLRQEPEDVLTTTFDLGHEEMILVKDIEVYSTCEHHLVPFHGVAHVGYIPSSEGRITGLSKLARLVEVFARRPQVQERLTSQIADALVEHLDPKGVLVVIECEHLCMSMRGVRKPGSRTVTSAARGQMRDVATRAEAMSLVIGR

SEQ ID NO: 6487 - protein, 200 aa, Cellulomonas composti
  REGION 1..200: note = tr|A0A511JB86|A0A511JB86_9CELL GTP cyclohydrolase 1; OS = Cellulomonas composti OX=266130 GN=folE PE=3 SV=1
MITPITPPSGAVGEYDEARARAAVRELLIAVGEDPDREGLLETPARVARAYREIFAGLRQVPSDVLTTTFDLGHEEMVLVKDIEVYSTCEHHLVPFHGVAHVGYIPGEDGRITGLSKLARLVDVFARRPQVQERLTSQIADALVEHLEPRGAIVVVECEHLCMSMRGVRKPGSRTVTSAVRGQMRATATRAEAMSLILGR

SEQ ID NO: 6488 - protein, 211 aa, Cellulomonas fimi
  REGION 1..211: note = tr|F4GY32|F4GY32_CELFA GTP cyclohydrolase 1; OS = Cellulomonas fimi (strain ATCC 484 / DSM 20113 / JCM 1341 / NBRC 15513 / NCIMB 8980 / NCTC 7547) OX=590998; GN = folE PE= 3 SV=1
MSEAVTDGVPSRINPVTGGGRAVGEYDEQRAEAAVRELLLAVGEDPDREGLLETPARVARAYREIFAGLYQDPTDVLTTTFDLGHEEMVLVKDIEVYSTCEHHLVPFHGVAHVGYIPGEDGRITGLSKLARLVDVYARRPQVQERLTSQVADALVEVLQPRGVLVVVECEHLCMSMRGVRKPGSRTVTSAVRGQMRDVATRAEAMSLVLGR

SEQ ID NO: 6489 - protein, 216 aa, Cellulomonas flavigena
  REGION 1..216: note = tr|D5UIP1|D5UIP1_CELFN GTP cyclohydrolase 1; OS = Cellulomonas flavigena (strain ATCC 482 / DSM 20109 / NCIB 8073 / NRS 134) OX=446466 GN=folE PE=3 SV=1
MGDAPVGTPGTPPASTITRTQGHGGRAIAPFDEERAARAVRELLLAVGEDPDREGLQETPARVARAYREIFAGLTMDARDVLTTTFDLGHEEMVIVRDIEVYSTCEHHLVPFHGVAHVGYIPGADGRITGLSKLARLVDVYARRPQVQERLTSQVADALVEVLDPTGVLVVVECEHLCMSMRGVRKPGSRTVTSAVRGQMRDVATRAEAMSLLTAR

SEQ ID NO: 6490 - protein, 200 aa, Cellulomonas gelida
  REGION 1..200: note = tr|A0A4Y3KJF4|A0A4Y3KJF4_9CELL GTP cyclohydrolase 1; OS = Cellulomonas gelida OX=1712 GN=folE PE=3 SV=1
MVDPITEPTGPVGEYDQPRAEAAIRELLIAVGEDPDREGLQDTPARVARAYREIFAGLRMTPKDVLTTTFNLGHDEMVLVKDIEVYSTCEHHLVPFHGVAHVGYIPGADGRITGLSKLARLVDVFARRPQVQERLTTQIADALVAELEPRGVIVVIECEHLCMSMRGVRKPGSRTVTSAVRGQMRTAATRAEAMSLIQAH

SEQ ID NO: 6491 - protein, 200 aa, unidentified
  source 1..200: note = Cellulomonas gilvus
  REGION 1..200: note = tr|F8A4R2|F8A4R2_CELGA GTP cyclohydrolase 1; OS = Cellulomonas gilvus (strain ATCC 13127 / NRRL B-14078); OX = 593907 GN=folE PE=3 SV=1
MVDPISAPTGAVGEYDQARAEAAIRELLIAVGEDPEREGLQDTPARVARAYREVFAGLRMTPQDVLTTTFDLGHEEMVLVKDIEVYSTCEHHLVPFHGVAHVGYIPGVDGRITGLSKLARLVDVYARRPQVQERLTAQIADAMVATLQPRGVIVVVECEHLCMSMRGVRKPGSRTVTSAVRGQMRDVATRAEAMSLIHAR

SEQ ID NO: 6492 - protein, 204 aa, Cellulomonas hominis
  REGION 1..204: note = tr|A0A511FDG4|A0A511FDG4_9CELL GTP cyclohydrolase 1; OS = Cellulomonas hominis OX=156981 GN=folE PE=3 SV=1
MPGSDGRGAHRPPHEVPAYDAPRAEAAIRELLLAVGEDPDREGLRDTPARVARAYQEIFAGLRQDPVDVLSATFDIGHEEMVLVKDIEVYSTCEHHLVPFHGVAHIGYIPGATGRVTGLSKLARLVDVYARRPQVQERMTGEIADALVEVLEPRGVLVVVECEHLCMSMRGVRKPGSRTVTSAVRGQMRDPATRAEAMSLVIGR

SEQ ID NO: 6493 - protein, 237 aa, unidentified
  source 1..237: note = Cellulomonas marina
  REGION 1..237: note = tr|A0A1I0WPD7|A0A1I0WPD7_9CELL GTP cyclohydrolase 1; OS = Cellulomonas marina OX=988821 GN=folE PE=3 SV=1
MSTGTDMSTGTSTGTDVTTDADTHLDGLDVPGAGAAHALTPLVASGRATGEYDAARAEAAVRELLAAVGEDPDREGLRDTPARVARAYREIFAGLYMDPREALTTTFDIGHQEMVLVRDIEVYSTCEHHLVPFHGVAHVGYIPGQDGRVTGLSKLARLVDVYARRPQVQERLTAQVADALVDILDPSGVIVVVECEHLCMSMRGVRKPGSRTMTSAVRGQLRDPATRAEAMSLVVGR

SEQ ID NO: 6494 - protein, 200 aa, Cellulomonas persica
  REGION 1..200: note = tr|A0A510V080|A0A510V080_9CELL GTP cyclohydrolase 1; OS = Cellulomonas persica OX=76861 GN=folE PE=3 SV=1
MVDPISEPTGVIGEYDQERAEAAIREFLLAVGEDPEREGLLDTPARVARAYREIFAGLRMSPQDVLTTTFDLGHEEMVLVKDIEVYSTCEHHLVPFHGVAHVGYIPGEDGRITGLSKLARLVDVFARRPQVQERLTSQVADALVEQLTPRGVIVVVECEHLCMSMRGVRKPGSRTVTSAVRGQMRNAATRAEAMSLIQAR

SEQ ID NO: 6495 - protein, 204 aa, unidentified
  source 1..204: note = Cellulomonas rhizosphaerae
  REGION 1..204: note = tr|A0A413RNT8|A0A413RNT8_9CELL GTP cyclohydrolase 1; OS = Cellulomonas rhizosphaerae OX=2293719 GN=folE PE=3 SV=1
MVDPVHISSPTSGKAVGEYDQPRAEAAIRELLIAVGEDPEREGLLETPARVARAYREIFAGLYQEPADVLTTTFDLGHEEMVLVKDIEVYSTCEHHLVPFHGVAHVGYIPGADGRITGLSKLARLVDVYARRPQVQERLTSQVADAMVEILKPRGVLVVIECEHLCMSMRGVRKPGSRTVTSAVRGQMRDVATRAEAMSLVLGR

SEQ ID NO: 6496 - protein, 217 aa, unidentified
  source 1..217: note = Cellulomonas soli
  REGION 1..217: note = tr|A0A512PEY5|A0A512PEY5_9CELL GTP cyclohydrolase 1; OS = Cellulomonas soli OX=931535 GN=folE PE=3 SV=1
MATDPTDGLAGRATVASTISPVTWSGKAVGQYDEARAEAAVRELLLAVGEDPDREGLRDTPGRVARAYKEIFAGLYQEPEDVLTTTFDLGHEELVLVKDIEVYSTCEHHLVPFHGVAHVGYIPGADGRITGLSKFARLVDVYARRPQVQERLTSQIADAMVRVLQPRGVLVVVECEHLCMSMRGVRKPGSRTVTSAVRGQLRDVATRAEAMSLVLGR

SEQ ID NO: 6497 - protein, 198 aa, Cellulomonas sp.
  REGION 1..198: note = tr|A0A1M3EIP4|A0A1M3EIP4_9CELL GTP cyclohydrolase 1; OS = Cellulomonas sp. 73-145 OX=1895739 GN=folE PE=3 SV=1
MSWRPRVAHEAAPVDLDAAERAAGALLAALGLPVDSAGMAETPRRMATAYAEMLAARAFDFTTFPNTEGYDELVLVQDIPVRSVCEHHMLPFVGVAHVGYLPRDRILGLSKFARVVELFAHRPQTQERLTKQVAQLLQDRLAPRGVGVVVEAEHTCMTLRGVRAAGTRTVTSALLGALRENASSRAEFLSLTRTHLEV

SEQ ID NO: 6498 - protein, 196 aa, Cellulomonas sp.
  REGION 1..196: note = tr|A0A1I3XB11|A0A1I3XB11_9CELL GTP cyclohydrolase 1; OS = Cellulomonas sp. KH9 OX=1855324 GN=folE PE=3 SV=1
MSDVTPPVVPYDEERAARAVRELLLAVGEDPDREGLRETPARVARAYREIFAGLRLEARDVLTTTFDLGHEEMVLVRDIEVYSTCEHHLVPFHGVAHVGYIPGADGRITGLSKLARLVDVYARRPQVQERLTTQIADALVEGLDPKGVLVVVECEHLCMSMRGVRKPGARTVTSAVRGQMRDVATRAEAMSLVTGR

SEQ ID NO: 6499 - protein, 208 aa, Cellulomonas terrae
  REGION 1..208: note = tr|A0A511JP85|A0A511JP85_9CELL GTP cyclohydrolase 1; OS = Cellulomonas terrae OX=311234 GN=folE PE=3 SV=1
MSTQLQGDGIGPVSFTGTAVGEYDQDRVEAAVRELLLAVGEDPDREGLRETPARVARAYREIFAGLYQEPGDVLTTTFDIGHEEMVLVKDIEVYSTCEHHLVPFHGVAHVGYIPGTDGRITGLSKLARLVDVYARRPQVQERLTSQIADALVNELEPRGVLVVVECEHLCMSMRGVRKPGSRTVTSAVRGQMRDVATRAEAMSLVLGR

SEQ ID NO: 6500 - protein, 200 aa, Cellulomonas uda
  REGION 1..200: note = tr|A0A4Y3KGJ6|A0A4Y3KGJ6_CELUD GTP cyclohydrolase 1; OS = Cellulomonas uda OX=1714 GN=folE PE=3 SV=1
MVDPITAPDQAVGEYDQDRAEAAIRELLLAVGEDPEREGLRETPARVARAYREIFAGLRMAPQDVLTTTFDLGHEEMVLVKDIEVYSTCEHHLVPFHGIAHVGYIPGEDGRITGLSKLARLVDVFARRPQVQERLTSQVADALVEQLKPRGVIVVVECEHLCMSMRGVRKPGSRTVTSAVRGQMRDAATRAEAMSLIHAR

SEQ ID NO: 6501 - protein, 210 aa, Cellulomonas xylanilytica
  REGION 1..210: note = tr|A0A510V6V6|A0A510V6V6_9CELL GTP cyclohydrolase 1; OS = Cellulomonas xylanilytica OX=233583 GN=folE PE=3 SV=1
MSAQGDGTPSSIGPVTFTGAAVGEYDQDRVEAAIRELLVAVGEDPDREGLRETPARVARAYREIFAGLYQEPADVLTTTFDLGHEEMVLVKDIEVFSTCEHHLVPFHGVAHVGYIPAADGRITGLSKLARLVDVYARRPQVQERLTSQIADALVAELQPRGVIVVIECEHLCMSMRGVRKPGSRTVTSAVRGQMRDVATRAEAMSLVLGR

SEQ ID NO: 6502 - protein, 199 aa, Cellulophaga algicola
  REGION 1..199: note = tr|E6X7N2|E6X7N2_CELAD GTP cyclohydrolase 1; OS = Cellulophaga algicola (strain DSM 14237 / IC166 / ACAM 630) OX=688270 GN=folE PE=3 SV=1
MAPYKKFEEYNIEITDDVRSNYKTIIEGVGEDITREGLVKTPERAAKAMLYLTQGYQQDPVAILKGAMFKEDYDDMVIIKDIELYSLCEHHMLPFFGKAHIAYIPNGHIVGLSKIPRVVDVFSRRLQVQERLTHDILECLNDTLKPKGVAVVIEASHMCMMMRGVQKQNSVTTTSGFRGQFEKQETRNEFLKLISSKLS

SEQ ID NO: 6503 - protein, 226 aa, Cellulophaga algicola
  REGION 1..226: note = tr|E6XBK5|E6XBK5_CELAD GTP cyclohydrolase 1; OS = Cellulophaga algicola (strain DSM 14237 / IC166 / ACAM 630) OX=688270 GN=folE PE=3 SV=1
MKIDSTLEDQFEEIGDNHVSTSEDTPLLDNAFDLSDEEKIVKIKANVSEIMETLGLDLTDDSLKGTPNRVAKMFVNEIFSGLHPDKKPKSSTFDNKYKYGEMLVEKNITLYSTCEHHFLPIVGRAHVAYISNGTVVGLSKMNRIVDYFAKRPQVQERLNIQIVRELQKVLNTEDVACIIDAKHLCVNSRGIRDIESSTVTAEYGGKFKEEATRKEFLNFIQLETRF

SEQ ID NO: 6504 - protein, 226 aa, Cellulophaga baltica
  REGION 1..226: note = tr|A0A1G7E8L5|A0A1G7E8L5_9FLAO GTP cyclohydrolase 1; OS = Cellulophaga baltica OX=76594 GN=folE PE=3 SV=1
MKIDSTLEDQFDEIGDNHVSTSEDTPLLANAFELSDEEKIVKIKANVSEIMETLGLDLTDDSLKGTPNRVAKMFVNEIFAGLHPNRKPKSSTFDNKYKYGEMLVEKNITLYSTCEHHFLPIVGRAHVAYISNGTVVGLSKMNRIVDYFAKRPQVQERLNIQIVRELQKVLNTEDVACVIDAKHLCVNSRGIRDIESSTVTAEYGGKFKEEATRREFLNFIKLETRF

SEQ ID NO: 6505 - protein, 221 aa, Cellulophaga baltica
  REGION 1..221: note = tr|A0A1G7HT77|A0A1G7HT77_9FLAO GTP cyclohydrolase 1; OS = Cellulophaga baltica OX=76594 GN=folE PE=3 SV=1
MDKSQVEITGDNHFSASIRTPLRTDAFEKSDEEKIINIQHHFKMIMEEMGLDLTDDSLSGTPYRVAKMYVKELFYGLNPVNKPKLSTFENKYGYQKMLVEQNINIDSACEHHFLPIVGHAHVAYVPKDKVIGLSKINRLVDYYARRPQVQERLVLQILNDLQNILDTRDVIVSVTAKHLYVSSRGIKDQSSFTTTLEYGGCFSDSDTRNEFLKIIGQERLH

SEQ ID NO: 6506 - protein, 236 aa, Cellulophaga fucicola
  REGION 1..236: note = tr|A0A1K1MUG8|A0A1K1MUG8_9FLAO GTP cyclohydrolase 1; OS = Cellulophaga fucicola OX=76595 GN=folE PE=3 SV=1
MLKLLYIIMSLDTVDITNTKSNISVEDIGDDHLYSGLNTPIKKNAFALSDEQKKEKIEVLFGEIMDVMGLDLTDDSLQGTPKRVAKMYIDEIFSGLNPINKPKIALFENKYQYNQILVEKNITFYSNCEHHFVPIIGKAHVAYKSSGKVIGLSKLNRIVQYYAKRPQVQERLTNQIGVELQKILKTEDVAVIIDAKHLCVASRGIKDDASTTITSFYGGEFNSSAKITEIQNYLKH

SEQ ID NO: 6507 - protein, 226 aa, Cellulophaga fucicola
  REGION 1..226: note = tr|A0A1K1NTA1|A0A1K1NTA1_9FLAO GTP cyclohydrolase 1; OS = Cellulophaga fucicola OX=76595 GN=folE PE=3 SV=1
MKIGSTIEGFDEDMDNDHLSAAENTPLREDAFDLNDDQKIEKIQASVRDILTTLGMDLTDDSLNDTPKRVAKMFVKDIFGGLNPERKPKSSSFDNKYKYGEMLVEKNITLYSTCEHHLLPIVGIAHVAYISKGTVVGLSKMNRIVDYYAKRPQVQERLNIQIVRELQEVLGTEDVACVIDAKHLCVNSRGIRDIQSSTVTAEYGGKFKEHNTRKEFLDYIKLDTNF

SEQ ID NO: 6508 - protein, 226 aa, Cellulophaga lytica
  REGION 1..226: note = tr|F0RGD1|F0RGD1_CELLC GTP cyclohydrolase 1; OS = Cellulophaga lytica (strain ATCC 23178 / DSM 7489 / JCM 8516 / NBRC 14961 / NCIMB 1423 / VKM B-1433 / Cy l20); OX = 86790 0 GN=folE PE=3 SV=1
MKIESTIEGFDEEMDNDHLSAAEDTPLREDAFDLNDDQKIEKIQASVRDILTTLGMDLTDDSLNDTPKRVAKMFVKDIFGGLNPERKPKSSSFDNKYKYGEMLVEKNITLYSTCEHHLLPIVGIAHVAYISNGTVVGLSKMNRIVDYYAKRPQVQERLNIQIVRELQEVLGTEDVACVIDAKHLCVNSRGIRDIQSSTVTAEYGGKFKEQATRKEFLDYIKLDTNF

SEQ ID NO: 6509 - protein, 199 aa, Cellulophaga lytica
  REGION 1..199: note = tr|F0RCU0|F0RCU0_CELLC GTP cyclohydrolase 1; OS = Cellulophaga lytica (strain ATCC 23178 / DSM 7489 / JCM 8516 / NBRC 14961 / NCIMB 1423 / VKM B-1433 / Cy l20); OX = 86790 0 GN=folE PE=3 SV=1
MSFYKNFEEYNLEATESVKEKYAKIIEGVGEDVSREGLVKTPERAAKAMMFLTQGYEQDPVEILKAAMFKEDYDDMVIIKDIELYSLCEHHMLPFFGKAHVAYIPNGHIVGLSKIPRIVDVFARRLQVQERLTHDILECLNNTLKPQGVAVVIEASHMCMMMRGVQKQNSVTTTSGFRGQFEKQETRNEFLKLISSDLS

SEQ ID NO: 6510 - protein, 199 aa, Cellulophaga sp.; identical to SEQ ID NO: 6509
  REGION 1..199: note = tr|A0A559N909|A0A559N909_9FLAO GTP cyclohydrolase 1; OS = Cellulophaga sp. RHA_52 OX=1250036 GN=folE PE=3 SV=1

SEQ ID NO: 6511 - protein, 220 aa, Cellulophaga sp.
  REGION 1..220: note = tr|A0A559NBD8|A0A559NBD8_9FLAO GTP cyclohydrolase 1; OS = Cellulophaga sp. RHA_52 OX=1250036 GN=folE PE=3 SV=1
MDKNNIETVGDNHIATSVDTPLRKNAFLKSDDEKISAIQHHFKKIMEELGLDITDDSLSGTPYRVAKMYVKELFYGLDPKNKPKLSVFENKYAYNKMLVEQNITIDSSCEHHFLPITGFAHIAYVPKDKVIGLSKINRLVDYYAHRPQVQERLSLQILKDLQNTLETQDVIVMVTAKHLCVSSRGIKDKNSFTTTIEYSGCFTNEQTRNDFLKIIEKTTV

SEQ ID NO: 6512 - protein, 199 aa, Cellulophaga tyrosinoxydans
  REGION 1..199: note = tr|A0A1W1ZUD3|A0A1W1ZUD3_9FLAO GTP cyclohydrolase 1; OS = Cellulophaga tyrosinoxydans OX=504486 GN=folE PE=3 SV=1
MAPYKKFEEYNIEITDDVRQNYSTIIEGVGEDITREGLVKTPERAAKAMLYLTQGYQQDPVKILQGAMFKEDYDDMVIIKDIELYSLCEHHMLPFFGKAHIAYIPNGHIVGLSKIPRVVDVFARRLQVQERLTHDILECLNNTLKPKGVAVVIEASHMCMMMRGVQKQNSVTTTSGFRGQFEKQETRNEFLKLISSNLS

SEQ ID NO: 6513 - protein, 226 aa, Cellulophaga tyrosinoxydans
  REGION 1..226: note = tr|A0A1W2AP58|A0A1W2AP58_9FLAO GTP cyclohydrolase 1; OS = Cellulophaga tyrosinoxydans OX=504486 GN=folE PE=3 SV=1
MKIDSTLEERFEELGDNHISTSEDTPLRKDAFDLSDEEKILKIKDNVSQIMETLGLDLTDDSLKGTPNRVAKMFVNEIFSGLHPKRQPKSSTFENKYKYGEMLVEKNITLYSTCEHHFLPIVGKAHVAYISNGTVVGLSKMNRIVDYFAKRPQVQERLNIQIVRELQKVLNTQDVACVIDAKHLCVNSRGIRDIESSTVTAEYGGKFKEEATRREFLNFIKLDTKF

SEQ ID NO: 6514 - protein, 217 aa, unidentified
  source 1..217: note = Cellulosimicrobium aquatile
  REGION 1..217: note = tr|A0A1N6UZS0|A0A1N6UZS0_9MICO GTP cyclohydrolase 1; OS = Cellulosimicrobium aquatile OX=1612203 GN=folE PE=3 SV=1
MGTPTDASAGTGAITPARSAEGLRAPADVPPYDQDRAEAAVRELLLAVGEDPDREGLRETPARVARAYREIFAGLRQEAADVLTTTFDLGHEEMVLVKDIEVYSTCEHHLVPFHGVAHVGYIPNVDGRITGLSKLARLVEVYARRPQVQERLTSQVADALVEHLKPRGAIVVVECEHLCMSMRGVRKPGARTVTSAVRGQMRDGATRAEAMSLILGR

SEQ ID NO: 6515 - protein, 217 aa, Cellulosimicrobium cellulans
  REGION 1..217: note = tr|A0A1G7NMH5|A0A1G7NMH5_CELCE GTP cyclohydrolase 1; OS = Cellulosimicrobium cellulans OX=1710 GN=folE PE=3 SV=1
MGNPSGPSAGTGAITPARSAEGLRAPADVPPYDQDRAEAAVRELLLAVGEDPDREGLRETPARVARAYREIFAGLRQEAADVLTTTFDLGHEEMVLVKDIEVYSTCEHHLVPFHGVAHVGYIPNVDGRITGLSKLARLVEVYARRPQVQERLTSQVADALVEHLKPRGAIVVVECEHLCMSMRGVRKPGARTVTSAVRGQMRDGATRAEAMSLILGR

SEQ ID NO: 6516 - protein, 221 aa, Cellulosimicrobium cellulans
  REGION 1..221: note = tr|A0A0M0F8G2|A0A0M0F8G2_CELCE GTP cyclohydrolase 1; OS = Cellulosimicrobium cellulans F16 OX=1350482 GN=folE; PE = 3 SV=1
MGTSTHPAPGTGAAPTAITRARAAEDLRAPADVPPYDQERAEAAVRELLLAVGEDPDREGLRETPARVARAYREIFAGLRQEAADVLTTTFDLGHEEMVLVKDIEVYSTCEHHLVPFHGVAHIGYIPNVDGRITGLSKLARLVEVFARRPQVQERLTSQIADALVEHLQPRGAIVVVECEHLCMSMRGVRKPGSRTVTSAVRGQMRDGATRAEAMSLILGR

SEQ ID NO: 6517 - protein, 221 aa, Cellulosimicrobium funkei; identical to SEQ ID NO: 6516
  REGION 1..221: note = tr|A0A0H2KJJ4|A0A0H2KJJ4_9MICO GTP cyclohydrolase 1; OS = Cellulosimicrobium funkei OX=264251 GN=folE PE=3 SV=1

SEQ ID NO: 6518 - protein, 204 aa, Cellulosimicrobium funkei
  REGION 1..204: note = tr|A0A4Y8R0H8|A0A4Y8R0H8_9MICO GTP cyclohydrolase 1; OS = Cellulosimicrobium funkei OX=264251 GN=folE PE=3 SV=1
MTPARSAEGLRAPADVPPYDQDRAEAAVRELLLAVGEDPDREGLRETPARVARAYREIFAGLRQEAADVLTTTFDLGHEEMVLVKDIEVYSTCEHHLVPFHGVAHVGYIPNVDGRITGLSKLARLVEVYARRPQVQERLTSQVADALVEHLKPRGAIVVVECEHLCMSMRGVRKPGARTVTSAVRGQMRDGATRAEAMSLILGR

SEQ ID NO: 6519 - protein, 217 aa, Cellulosimicrobium sp.
  REGION 1..217: note = tr|A0A085LEY9|A0A085LEY9_9MICO GTP cyclohydrolase 1; OS = Cellulosimicrobium sp. MM OX=1523621 GN=folE PE=3 SV=1
MGTPTGASAGTGAITPARSAEGLRAPADVPPYDQDRAEAAVRELLLAVGEDPDREGLRETPARVARAYREIFAGLRQEAADVLTTTFDLGHEEMVLVKDIEVYSTCEHHLVPFHGVAHVGYIPNVDGRITGLSKLARLVEVYARRPQVQERLTSQVADALVEHLKPRGAIVVVECEHLCMSMRGVRKPGARTVTSAVRGQMRDGATRAEAMSLILGR

SEQ ID NO: 6520 - protein, 217 aa, Cellulosimicrobium sp.; identical to SEQ ID NO: 6519
  REGION 1..217: note = tr|A0A1W6DP62|A0A1W6DP62_9MICO GTP cyclohydrolase 1; OS = Cellulosimicrobium sp. TH-20 OX=1980001 GN=folE PE=3; SV = 1

SEQ ID NO: 6521 - protein, 204 aa, Cellulosimicrobium terreum; identical to SEQ ID NO: 6518
  REGION 1..204: note = tr|A0A4V6QJW7|A0A4V6QJW7_9MICO GTP cyclohydrolase 1; OS = Cellulosimicrobium terreum OX=412439 GN=folE PE=3 SV=1

SEQ ID NO: 6522 - protein, 179 aa, Cellvibrio japonicus
  REGION 1..179: note = tr|B3PHF6|B3PHF6_CELJU GTP cyclohydrolase 1; OS = Cellvibrio japonicus (strain Ueda107) OX=498211 GN=folE; PE = 3 SV=1
MREHFANIIASIGEDLNRPGLLDTPDRAAKAFQFLTRGYTQTLDDVVNNALFPSDSQEMIMVKDIELYSLCEHHLLPFIGKAHVAYIPTGKVLGLSKVARIVDMFARRLQIQEQLTLQIAESIQSITGASGVGVIIEAKHMCMMMRGVEKQNSSMKTSAMLGSFRTNQATRNEFLSLLR

SEQ ID NO: 6523 - protein, 312 aa, Cellvibrio mixtus
  REGION 1..312: note = tr|A0A266QAI2|A0A266QAI2_9GAMM GTP cyclohydrolase FolE2 OS=Cellvibrio mixtus OX=39650 GN=folE2 PE=3 SV=1
MNAPTALPDVALQQLSPVNHAIDWVGMSGIALPSLCRGTPVQLHLDISVNLSNRTAKGIHMSRLYQLAQTHLANMELTQGGIAKLLRAVIESHRDLGSTAAQLTLRTQLLLKRPALISDLEGWKYYPLRLNAQWDSNRNQAELRLQVGVDYSSTCPCSAALSRQLLQDAFLAHWKNEWRYEPPTAHAIGEWLAQHGSVATPHSQRSQALVSVSLSESANTSRDDNQLPIIALIDAVEAALGTPVQTAVKRVDEQAFAKLNGENLMYVEDAVRRLQAALQPQFSAVNIQVIHRESLHQHDAVASIHSALAVPF

SEQ ID NO: 6524 - protein, 180 aa, Cellvibrio mixtus
  REGION 1..180: note = tr|A0A266Q5H2|A0A266Q5H2_9GAMM GTP cyclohydrolase 1; OS = Cellvibrio mixtus OX=39650 GN=folE PE=3 SV=1
MKEHFASIIASIGEDLTRPGLLDTPERAAKAFQFLTRGYHQTLDDVVNDALFPSDSEEMIMVKDIELYSLCEHHLLPFIGKAHVAYIPTGKVLGLSKVARIVDMFARRLQIQEQLTVQIAECIQQITGASGVGVIIEAKHMCMMMRGVEKQNSSMKTSSMLGSFRTNQATRSEFLSLLRN

SEQ ID NO: 6525 - protein, 312 aa, Cellvibrio sp.
  REGION 1..312: note = tr|A0A1U9NEK6|A0A1U9NEK6_9GAMM GTP cyclohydrolase FolE2 OS=Cellvibrio sp. PSBB023 OX=1945512 GN=folE2 PE=3; SV = 1
MNAPTALPDVALQQLSPVNHAIDWVGMSGIALPSLCRGTPVQLHLDISVNLSNRTAKGIHMSRLYQLAQTHLANMELTQGGIAKLLRAVIESHRGLGSTAAQLTLRTQLLLKRPALISDLEGWKYYPLRLNAQWDSNRNQAELRLQVGVDYSSTCPCSAALSRQLLQDAFLAHWKNEWRYEPPCANAIGEWLAQHGSVATPHSQRSQALVSVSLSESVNTSSDDNQLPIIELIDAIEAALGTAVQTAVKRVDEQAFAKLNGENLMYVEDAVRRLQAALHAQFSAVNIQVIHRESLHQHDAVASIHNVPAVPF

SEQ ID NO: 6526 - protein, 179 aa, Cellvibrio sp.
  REGION 1..179: note = tr|A0A5J6P7E1|A0A5J6P7E1_9GAMM GTP cyclohydrolase I FolE OS=Cellvibrio sp. KY-GH-1 OX=2303332 GN=folE PE=4 SV=1
MRDHFASIIASIGEDLNRPGLLDTPDRAAKAFQFLTRGYNQTLDEVVNGALFPSDSEEMIMVKDIELYSLCEHHLLPFIGKAHVAYIPTGKVLGLSKIARIVDMFARRLQIQEQLTVQIAESVQEITGASGVGVIIEAKHMCMMMRGVEKQNSSMKTSAMLGSFRTNQATRNEFLSLLR

SEQ ID NO: 6527 - protein, 179 aa, unidentified
  source 1..179: note = Cellvibrionaceae bacterium
  REGION 1..179: note = tr|A0A2E2XNX3|A0A2E2XNX3_9GAMM GTP cyclohydrolase 1; OS = Cellvibrionaceae bacterium OX=2026723 GN=folE PE=3 SV=1
MKEQYANIISAIGEDLNRPGLQDTPERAAKAMKFLTRGYEQSIEDVVNDALFPSDSKEMIIVKDIELYSMCEHHMLPFIGKAHVAYIPTGKVLGLSKIARIVDMFARRLQIQEQLTVQIADTVKQVTGAEGVGVIVEAKHMCMMMRGVEKQNSSMKTSAMLGSFRDNTATRTEFLSLIR

SEQ ID NO: 6528 - protein, 179 aa, unidentified
  source 1..179: note = Cellvibrionaceae bacterium
  REGION 1..179: note = tr|A0A545SRT6|A0A545SRT6_9GAMM GTP cyclohydrolase 1; OS = Cellvibrionaceae bacterium R142 OX=2591008 GN=folE PE=3; SV = 1
MKEHFARIIASIGEDLERPGLADTPERAAKAMQYLTRGYQQNIDEVINGALFPSDSSEMILVENIELYSLCEHHLLPFIGKAHVAYIPTGKVLGLSKIARIVDMFARRLQIQEQLTLQIAETLQQVTEATGVGVIIEAKHMCMMMRGVEKQDSMMKTSAMLGSFRNNPSTRSEFLSLLR

SEQ ID NO: 6529 - protein, 302 aa, unidentified
  source 1..302: note = Cellvibrionales bacterium
  REGION 1..302: note = tr|A0A1Z8Z1F8|A0A1Z8Z1F8_9GAMM GTP cyclohydrolase FolE2 OS=Cellvibrionales bacterium TMED79 OX=1986768; GN = folE2 PE=3 SV=1
  VARIANT 2: note = Xaa can be any naturally occurring amino acid
  VARIANT 134: note = Xaa can be any naturally occurring amino acid
  VARIANT 143: note = Xaa can be any naturally occurring amino acid
MXPSDTLPDITSEALAQRGLPLQWVGMEQLDLPVSIALENGETVQAPAKANVFVSLDDTASKGIHMSRLHALVQKLGRQLCSRETIDRFLTECVESQAGISAHAKIELHFDLLLEKPALLSGEVGYQAYPVSLXGTVISGEFXYELGYTVPYSSTCPCSASLARQLFANAVDEQFEGDVIDKARLLEWMQSESGSVATPHAQRSYAYVKLVSDAPTWPAFDTVIRTIESTIGTPVQTAVKRVDEQEFARLNAQNLMFCEDAARRIKHALEAMPHVVDYWLKVDHQESLHAHNAVAIDRKSKN

SEQ ID NO: 6530 - protein, 191 aa, unidentified
  source 1..191: note = Cellvibrionales bacterium
  REGION 1..191: note = tr|A0A3D5SBS5|A0A3D5SBS5_9GAMM GTP cyclohydrolase 1; OS = Cellvibrionales bacterium OX=2026722 GN=folE PE=3 SV=1
MSEELDNTALVTSYETILSELGEDLDREGLHNTPMRAAKAMRAITRGYGQSLDDIVNGAVFESGTDEMIVVKSIELYSMCEHHMLPFVGTCHVGYIPNGKVLGLSKFARIVDMYSTRFQIQERLTRQIADAVESVTGAIGVGVIVEAKHMCMMMRGVEKQNSVMGSSVMLGEFRDSYNTRQEFLRLLGDLG

SEQ ID NO: 6531 - protein, 203 aa, Centipeda periodontii
  REGION 1..203: note = tr|F5RP13|F5RP13_9FIRM GTP cyclohydrolase 1; OS = Centipeda periodontii DSM 2778 OX=888060 GN=folE PE=3; SV = 1
MEEACTTVDLARAERAMREFLTAVGVNLAARGMEETPTRVAQLYGELFAGLRADTSKLWADVLTEKTDGLIAVRAIPVYSICEHHLLPFFGTVHIVYRPHAGRVAGFGVFTRLVECMARRPQLQERLTADIASEIEQGLGAEGVLVVLDAQQLCMTMRGARAHGTRTTTSACRGIFREDKAMELQAWKMLGEWDDGRENISLS

SEQ ID NO: 6532 - protein, 263 aa, Centipeda periodontii
  REGION 1..263: note = tr|F5RP82|F5RP82_9FIRM GTP cyclohydrolase FolE2; OS = Centipeda periodontii DSM 2778 OX=888060 GN=folE2 PE=3; SV = 1
MLDVQNREDSRGIAIQRVGVKEVRLPFLIKKQAGGYQQVLARIAFTVSLPMEFKGTHMSRFLEILLPWSEKPLAEEEMDAMLTEALDRLHAEEAEVSLAFTYFIEKCAPVSGRMSLLDVDASFTGRKRRNEPMQFELGLTMPFTSLCPCSKEISAYGAHNQRSIARVRLRYHEGVPCIYIEELAALLEQQGSAPIYSLLKRADEKYVTEAAYENPKFVEDILRDTVLALRAQPGLAYFSLECENEESIHNHNAFAAHEEYISK

SEQ ID NO: 6533 - protein, 312 aa, Cerasibacillus quisquiliarum
  REGION 1..312: note = tr|A0A511UVE6|A0A511UVE6_9BACI GTP cyclohydrolase FolE2 OS=Cerasibacillus quisquiliarum OX=227865 GN=folE2; PE = 3 SV=1
MEKHVDLIEKKQLPHKEERLKLFGSVKPGPKTKPVDKCQMTDIQNMKKDFLFELDAVGIDRVKHPITVTSQLSPQEQTTVAQFTFTSSIKQTSKGTNMSRFMEQLQAYHERGFVANFNSLKHFAKELSERLNQRDATISVKFPWFYERRGPASRLAGLNHADITMTVNYDQKEGYTLSAGMTVQVTTLCPCSKEISEYSAHNQRGNVTMEISFIDDNIDDYMNWKEELLEAAESNASARLHPVLKRPDEKMVTEQAYENPRFVEDMVRLVAADLYELDYIRKFKVSCRNEESIHMHDAIASLTYDKLKEKNA

SEQ ID NO: 6534 - protein, 312 aa, Cerasibacillus sp.
  REGION 1..312: note = tr|A0A5C8P3S7|A0A5C8P3S7_9BACI GTP cyclohydrolase FolE2 OS=Cerasibacillus sp. CC-CFT480 OX=2498845 GN=folE2; PE = 3 SV=1
MDKFKFNNHLKQLPSKQERLKLFGSVSPGPKTKPVNKCDMKDLQNVQKDFLFKLDQVGIDRVKHPVTVISKTHPNEQTTIANFTFTSAIKQTSKGTNMSRFMEQLNNYHKKGFIADFTTLKTFTKELASRLKQEDATISVGFPWFFERRGPQSNLPGLNHADIEMTTTYHKTNGFSISASLTASITTLCPCSKEISEYSAHNQRGHVTMDVQFMEHYDEGEMDWKLELLEAAESNASARLHPVLKRPDEKMVTEQAYENPRFVEDVVRLVAADLYEMDFIRAFKVTCRNEESIHMHDAIASLSFDKLKEVGS

SEQ ID NO: 6535 - protein, 359 aa, unidentified
  source 1..359: note = Cereibacter changlensis
  REGION 1..359: note = tr|A0A2T4JTP5|A0A2T4JTP5_9RHOB GTP cyclohydrolase FolE2 OS=Cereibacter changlensis JA139 OX=1188249 GN=folE2; PE = 3 SV=1
MNIQTPVADRKPSREEAEAALAVLRRWAGRSSDAEIATLDPAATALVYPELSRAYPKQFRVDAAYKDTLPDLQNGPASLIVGANRLIQHVGISNFRLPIRYHTRDNGDLMLETSVTGTVSLEAEKKGINMSRIMRSFYAHAERCFSFEVIEHALEDYKRDLDSFDARIQMRFSFPVRVQSLRSGLSGWQYYDIALELVDKGGVRKKFLHLDYVYSSTCPCSLELSEHARRERGQLATPHSQRSVARISVEVVGKTCLWFEDLIDLARAAVPTETQVMVKREDEQAFAELNAANPIFVEDAARSFAAQLLAEPRIGDFRVVASHQESLHSHDAVSVLTEGPTFAAESLDPRLFGTLFHVG

SEQ ID NO: 6536 - protein, 359 aa, unidentified; identical to SEQ ID NO: 6535
  source 1..359: note = Cereibacter changlensis
  REGION 1..359: note = tr|A0A2W7RGY4|A0A2W7RGY4_9RHOB GTP cyclohydrolase FolE2 OS=Cereibacter changlensis OX=402884 GN=folE2 PE=3; SV = 1

SEQ ID NO: 6537 - protein, 229 aa, Cesiribacter andamanensis
  REGION 1..229: note = tr|M7NQB3|M7NQB3_9BACT GTP cyclohydrolase 1; OS = Cesiribacter andamanensis AMV16 OX=1279009 GN=folE PE=3; SV = 1
MKQKETLLNIQPEGSLHIHEMGDEHVASSAETPLRPDAFELDDSLKVELITRHFKEIMHIMGLDLTDDSLAGTPQRVAKMFVQEIFSGLNPANKPDVRLFENKYQYNQMLVEKDITFYSNCEHHFVPIIGKAHVAYISSGKVIGLSKINRLVQFFAKRPQVQERLTVQIAQELSQALQTEDVAVVLDAAHLCVSMRGIQDDSSRTITSQFLGKFREEATKAEFLKYIGM

SEQ ID NO: 6538 - protein, 185 aa, Cetobacterium ceti
  REGION 1..185: note = tr|A0A1T4JWM1|A0A1T4JWM1_9FUSO GTP cyclohydrolase 1; OS = Cetobacterium ceti OX=180163 GN=folE PE=3 SV=1
MDKDKIKEGVRLILEGVGEDLNREGLIDTPSRVARMYEEIFEGLHKKSADEINAFFTVEENNRVIVKDIEFYSMCEHHLLPFYGKAHVAYIPSEKKVTGLSKIARLVTMASKKPQLQEKMTEEIKKGLEEKISCEGVLVVVEGEHMCMTMRGIKSKGSTTVTIGASGVFKENISLRDETLRLMGM

SEQ ID NO: 6539 - protein, 184 aa, Cetobacterium somerae
  REGION 1..184: note = tr|U7VBS5|U7VBS5_9FUSO GTP cyclohydrolase 1; OS = Cetobacterium somerae ATCC BAA-474 OX=1319815 GN=folE; PE = 3 SV=1
MNLKTHIKNIILEINNDNNLISDEVIENTPERIETFYKEIFSGLLLNPYDFLKRTFPIQNNDLIIEKNISFHSMCEHHFLPFFGKISVGYIPNNKIVGFGDIIKVIEAYCKRPQLQERLCDEIAETIYKGLECQGVYILMEAEHMCMTMRGVKSIGTKVTTTSSKGIFNTNNSLKTEFLTLVKN

SEQ ID NO: 6540 - protein, 231 aa, Chamaesiphon minutus
  REGION 1..231: note = tr|K9UPH3|K9UPH3_CHAP6 GTP cyclohydrolase 1; OS = Chamaesiphon minutus (strain ATCC 27169 / PCC 6605); OX = 1173020 GN=folE PE=3 SV=1
MTISSPQGSNSTGNERVGKIDSRPDRNTHNGEPVKIHDPEEVSLEDMMASVRQIILGVGEDPEREGLLKTPKRVAESMRFLTSGYNQSLEDIINGAIFDEGHNEMVLVRDINFFSMCEHHMLPFMGRAHVAYIPNQKVVGLSKLARIVDMYSRRMQVQERLTRQVAEALQAVLEPKGVAVVMEASHMCMVMRGVQKPGSWTVTSAMLGVFQEDQRTREEFLNLIRHQPGAF

SEQ ID NO: 6541 - protein, 219 aa, Chamaesiphon minutus
  REGION 1..219: note = tr|K9UQM5|K9UQM5_CHAP6 GTP cyclohydrolase 1; OS = Chamaesiphon minutus (strain ATCC 27169 / PCC 6605); OX = 1173020 GN=folE PE=3 SV=1
MTIADRNSFNSSSTPKSSGTIEILPTTAKVSPADMADAVRTIILGVAEDPNREGLLKTPDRVAKAMQFLTSGYQQSLEELINGAVFDEGHNEMVLVRDIDLFSLCEHHMLPFVGRAHIAYLPNQKVVGLSKLARIVEMYARRLQVQERLTRQIADAIQTVLEPQGVAVVIEATHMCMSMRGVQKPGAWTVTSAMVGAFQEDPKTREEFLSLIRHKPAFW

SEQ ID NO: 6542 - protein, 231 aa, unidentified
  source 1..231: note = Chamaesiphon polymorphus
  REGION 1..231: note = tr|A0A2T1GFX7|A0A2T1GFX7_9CYAN GTP cyclohydrolase 1; OS = Chamaesiphon polymorphus CCALA 037 OX=2107692 GN=folE; PE = 3 SV=1
MTISSPQGSNSTGNERVGKIDSRPDRNTHNGEPVKIHDPEEVSLEDMMASVRQIILGVGEDPDREGLLKTPKRVAESMRFLTSGYNQSLDDIINGAIFDEGHNEMVLVRDINFFSMCEHHMLPFMGRAHVAYIPNQKVVGLSKLARIVDMYSRRMQVQERLTRQVAEALQEVLEPKGVAVVMEASHMCMVMRGVQKPGAWTVTSAMLGAFQEDQRTREEFLNLIRHQPGAF

SEQ ID NO: 6543 - protein, 221 aa, unidentified
  source 1..221: note = Chania multitudinisentens
  REGION 1..221: note = tr|W0LHE0|W0LHE0_9GAMM GTP cyclohydrolase 1; OS = Chania multitudinisentens RB-25 OX=1441930 GN=folE PE=3; SV = 1
MKSSLSNEATLVHAALEARGLETPLCGEVLDRETRKQRIKEHMTEIMKLLNLDLSDDSLAETPHRIAKMYVDEIFSGLDYANFPKITVIENKMKVDEMVTVRDITLTSTCEHHFVTIDGKATVAYIPKDSVIGLSKINRIVQFFAQRPQVQERLTQQILVALQTLLGTNNVAVSIDAVHYCVKARGVRDATSATTTTSLGGLFKSSQNTRQEFLRAVRHHG

SEQ ID NO: 6544 - protein, 222 aa, Chelativorans sp.
  REGION 1..222: note = sp|Q11JM4|GCH1_CHESB GTP cyclohydrolase 1; OS = Chelativorans sp. (strain BNC1) OX=266779 GN=folE PE=3; SV = 1
MDAIIKSFPPRPDQTSVPAEQAGYLDKPITDRPSREEAEAAVRTLLRWAGDNPDREGLKETPARVVKAYQELFGGYDLCPAEELGRTFEEVAGYEDMVLVKDIPFHSHCEHHMVPIVGKAHVGYLPDGKVVGLSKIARVVDIFARRLQTQEAITAQIAGAIQNVLQPLGVAVMVEAEHMCMAMRGVRKQGASTLTTTFTGAFKTRPEDQARFITMVRDSRSG

SEQ ID NO: 6545 - protein, 213 aa, Chelatococcus asaccharovorans
  REGION 1..213: note = tr|A0A2V3U6G0|A0A2V3U6G0_9RHIZ GTP cyclohydrolase 1; OS = Chelatococcus asaccharovorans OX=28210 GN=folE PE=3 SV=1
MDAVVKSLSARMADATADKPSVTRPSREEAEAAVRVLLQWAGEDPDREGLIDTPRRVVRTYEELFRGYRDDPSIVLDRVFEEVAGYDGLVLLRDIPFYSHCEHHMVPIIGTAHIAYYPTQGVVGLSKLARVVDVYARRLQTQERLTAQITDALEETLKPRGVAVMIEAEHMCMSMRGIQKQGVSTLTTRFTGLFKEEPGEQARFMAMVRSKAA

SEQ ID NO: 6546 - protein, 217 aa, Chelatococcus sambhunathii
  REGION 1..217: note = tr|A0A0K6GYE0|A0A0K6GYE0_9RHIZ GTP cyclohydrolase 1; OS = Chelatococcus sambhunathii OX=363953 GN=folE PE=3 SV=1
MKTAAKSSNTGAAGSGCNKMAAPPPSRAEAEAAVRTLIRWAGDDPDREGLVGTPERVVRTFEEVYAGYRENPADLLGSTFTDVGGYEEMVLVRDIPFHSHCEHHMVPFVGRAHIAYYPAGGVVGLSKFARLVDAYARRLQTQETLTTQIADTIETHLSPRGTAVMIEAEHMCMSMRGVQKQGSLTVTTRFGGVFRDDPAEQVRFFTLLRCGRDRTAG

SEQ ID NO: 6547 - protein, 218 aa, Chelatococcus sp.
  REGION 1..218: note = tr|A0A0K2D8E2|A0A0K2D8E2_9RHIZ GTP cyclohydrolase 1; OS = Chelatococcus sp. CO-6 OX=1702325 GN=folE PE=3 SV=1
MKTAARSSNTGTVRNGCGKDAAAVRPSRAEAEAAVRTLIRWAGDDPDREGLVETPERVVRTFEEVYAGYRENPGELLDSIFTDVGGYDDMVLVRDIPFHSHCEHHMVPFVGRAHIAYYPAGGVVGLSKFARLVDAYAKRLQTQEALTAQIADAIETHLSPRGTAVMIEAEHMCMSMRGVQKQGSLTVTTRFGGVFRDDPAEQVRFFTLLRCGRDRTAG

SEQ ID NO: 6548 - protein, 213 aa, Chelatococcus sp.
  REGION 1..213: note = tr|A0A2W6YHB5|A0A2W6YHB5_9RHIZ GTP cyclohydrolase 1; OS = Chelatococcus sp. OX=1953771 GN=folE PE=3 SV=1
MNPVVKSLSVERAISPSADKFLIKQPSQEEAEAAIRTLILWAGDDPQREGLAETPRRVAKAFREFYKGYDEDPHEVLDRVFEEVEGYQDMILVRDIPFYSHCEHHMVPFVGKAHIGYYPSKGVVGLSKLARVVDVFARRLQTQETMTAQIAKAVEQALEPRGVAVLVEAEHMCMSMRGVRKQGSSTMTTQYTGVFREPAEQVRFFTMVKSPGL

SEQ ID NO: 6549 - protein, 218 aa, Chelonobacter oris
  REGION 1..218: note = tr|A0A0A3AU36|A0A0A3AU36_9PAST GTP cyclohydrolase 1; OS = Chelonobacter oris OX=505317 GN=folE PE=3 SV=1
MSNISVEAAKVRDALIAKGIETPMKSVGLSLEHRRKQIEKHMREVLQLIGLDLTDDSIEETPIRMAKMYLDEIFTGMDYANFPKITNIRNRMKVSEMVLVNDITLTSTCEHHFVTIDGKVSVAYYPKEWVIGLSKINRVVAFLAQRPQVQERLTEQVLTALQTILQTSDVAVYVKATHFCVKCRGIKDTNSYTVTSAFGGVFLEDRETRKEFLSLISK

SEQ ID NO: 6550 - protein, 225 aa, unidentified
  source 1..225: note = Chishuiella changwenlii
  REGION 1..225: note = tr|A0A1M6T936|A0A1M6T936_9FLAO GTP cyclohydrolase 1; OS = Chishuiella changwenlii OX=1434701 GN=folE PE=3 SV=1
MCDKHLHDEIGDDHMSANLETPLRDDAFELSAEEKVEKIEADFRNIMETLGLDLTDDSLKGTPKRVAKMFVKEIFGGLLPERKPGMSTFENKYNYNQMLVEKDIVVYSTCEHHFLPIVGRAHVGYISKGKVIGLSKMNRIVEYYAKRPQVQERLTMQIVKAMQEALGTDDVACIVDAKHLCVNSRGIKDIESSTVTAEYGGAFKDNEQLRKEFIAYIGMKTPFNV

SEQ ID NO: 6551 - protein, 270 aa, Chitinimonas sp.
  REGION 1..270: note = tr|A0A516SI58|A0A516SI58_9MICO GTP cyclohydrolase FolE2 OS=Chitinimonas sp. R3-44 OX=2594795 GN=folE2 PE=3; SV = 1
MNAALPPATIEDVQGSHDARNIAINKVGIKSIRHPVKVGDKADGVQHTIATFDMYVFLPQHFKGTHMSRFVQILNSHEKEISVESFETMLRETVAKLEADSGYIEMRFPFFINKTAPVSGVQSLLDYDVSLIGEIKHGVFTQTLKVLVAATSLCPCSKKISAYGAHNQRSHITITARVNQHVWIEDLIRVAEEEASCEVFGLLKRPDEKYVTERAYDNPKFVEDLVRDVAARLLADPRIDAYVVEAENFESIHNHSAYALIEHDKSSAAA

SEQ ID NO: 6552 - protein, 268 aa, Chitiniphilus sp.
  REGION 1..268: note = tr|A0A4U0PWK3|A0A4U0PWK3_9NEIS GTP cyclohydrolase FolE2 OS=Chitiniphilus sp. HX-2-15 OX=2571148 GN=folE2; PE = 3 SV=1
MNAPQAPTSMEDVQSSPDHRNIAINKVGVKSIRHPVIVADRADGKQHTIATFDMYVFLPQHFKGTHMSRFVEILNSHQKEISVESFETILRQMCARLEADAGYLEMRFPYFINKEAPVSGVRSLLDYEVSLIGEIKEGRFVQQLKVLVPVTSLCPCSKKISQYGAHNQRSHVTITATLGDQHVWIEELVEVAESEASCELYGLLKRPDEKYVTERAYENPKFVEDMVRDVAARLNADPRVVSYIVESENFESIHNHSAYALIEHDKRV

SEQ ID NO: 6553 - protein, 181 aa, unidentified
  source 1..181: note = Chitinivibrio alkaliphilus
  REGION 1..181: note = tr|U7DAF4|U7DAF4_9BACT GTP cyclohydrolase 1; OS = Chitinivibrio alkaliphilus ACht1 OX=1313304 GN=folE; PE = 3 SV=1
MIDESIRSILTAVGENPDREGLIDTPRRVRKAYEHILGGYQISPEELLRNAIFTEDVNHMIIVRDIEIYSMCEHHMLPFFGKVHIGYISENRVYGVSKLARVADAFARRLQVQERMTQQIADTIMAPIGAEGVGVVVEAKHLCMMMRGVGKQNSVMTTSAMLGSFREDQKVRDEFLRLIGK

SEQ ID NO: 6554 - protein, 195 aa, Chitinophaga arvensicola
  REGION 1..195: note = tr|A0A1I0QRT5|A0A1I0QRT5_9BACT GTP cyclohydrolase 1; OS = Chitinophaga arvensicola OX=29529 GN=folE PE=3 SV=1
MAYNKIESYDDKITSGLVENYKECLHLLGEDPEREGLQKTPERVAKAMQFLTQGYQQDAKEILEGAKFTEAYSEMVIVKDIELYSMCEHHMLPFFGKAHVAYIPNGYITGLSKIARVVDVFARRLQVQERLTHQILDAIQETLQPQGVAVVIEAQHLCMMMRGVQKQNSLTTTSAFSGQFEHGTTRAEFMKLIAK

SEQ ID NO: 6555 - protein, 201 aa, unidentified
  source 1..201: note = Chitinophaga barathri
  REGION 1..201: note = tr|A0A3N4M6Q8|A0A3N4M6Q8_9BACT GTP cyclohydrolase 1; OS = Chitinophaga barathri OX=1647451 GN=folE PE=3 SV=1
MAYNKEESYDDNVTSGLIRNYTEAIQLLGEDPQREGLLKTPERVAKAMQFLTQGYQQDAKEILNSAKFTESYSEMVIVKDIELYSMCEHHMLPFFGKAHVAYIPNGYITGLSKIARVVDIFSRRMQVQERLTHQILDAIQETLEPQGVAVVIEAQHLCMMMRGVQKQNSVTTTSAFSGQFEHGATRAEFMKLISSDLMYRR

SEQ ID NO: 6556 - protein, 198 aa, unidentified
  source 1..198: note = Chitinophaga caeni
  REGION 1..198: note = tr|A0A291QTM5|A0A291QTM5_9BACT GTP cyclohydrolase 1; OS = Chitinophaga caeni OX=2029983 GN=folE PE=3 SV=1
MAYKKIESYDEAVTGGLMESYRKSIELLGENPDREGLEKTPERVAKAMQFLTQGYQQDARAILNSAKFKESYSEMVIVKDIELYSLCEHHMLPFFGKAHVAYIPNGHITGLSKIARVVDVYARRLQVQERMTHEILEAIQESLQPQGVAVVIEAQHLCMMMRGVQKQNSVTTTSAFSGQFEDGRTREEFLKLIRNKLS

SEQ ID NO: 6557 - protein, 198 aa, unidentified
  source 1..198: note = Chitinophaga costaii
  REGION 1..198: note = tr|A0A1C4BVD3|A0A1C4BVD3_9BACT GTP cyclohydrolase 1; OS = Chitinophaga costaii OX=1335309 GN=folE PE=3 SV=1
MAYHKEESFDEKITQELTAHYHDVIEKLGEDPAREGLLKTPERVAKAMQFLTQGYTLDAHAILNEAKFTEAYSEMVIVKDIELYSMCEHHMLPFFGKAHVAYIPNGYITGLSKLARVVDVFARRLQVQERLTHQVLDAIQETLQPLGVAVVIEAQHLCMMMRGVQKQNSVTTTSAFSGQFEDGRTRAEFIRLIGANII

SEQ ID NO: 6558 - protein, 206 aa, unidentified
  source 1..206: note = Chitinophaga cymbidii
  REGION 1..206: note = tr|A0A512RIJ9|A0A512RIJ9_9BACT GTP cyclohydrolase 1; OS = Chitinophaga cymbidii OX=1096750 GN=folE2 PE=3 SV=1
MRTIVEEKALLDTEAISLTTEERIEAIRYHFHKIMVTLGLDLENDSLKDTPMRVAKMFVNEAFAGLDPANEPAITLFKNRFKYNEMVLEKDIPLFTYCEHHFVPIIGKVHIAYISKGEVIGLSKLNRITHYLSKRPQVQERLTIQIAEYLKRTMQIEDVAVIVKAEHLCVASRGVNHTGCTTVTNSLHGHFVSESGYSKLVSLLAV

SEQ ID NO: 6559 - protein, 195 aa, unidentified
  source 1..195: note = Chitinophaga cymbidii
  REGION 1..195: note = tr|A0A512RJW1|A0A512RJW1_9BACT GTP cyclohydrolase 1; OS = Chitinophaga cymbidii OX=1096750 GN=folE PE=3 SV=1
MAYNKKESFDEEITSGLMDSYRECIALLGEDPTREGLLKTPERMAKAMQYLTQGYQADAKAILNGAKFTEAYSEMVIVKDIELYSMCEHHMLPFFGKAHVAYIPNGYITGLSKIARVVDVFARRMQVQERMTHQILDAIQDTLQPQGVAVVIEAQHLCMMMRGVQKQNSWTTTSAFSGQFEHGATRAEFMKLIGR

SEQ ID NO: 6560 - protein, 195 aa, unidentified
  source 1..195: note = Chitinophaga dinghuensis
  REGION 1..195: note = tr|A0A327VIL5|A0A327VIL5_9BACT GTP cyclohydrolase 1; OS = Chitinophaga dinghuensis OX=1539050 GN=folE PE=3 SV=1
MAYHKNDSYDELTTTGLMANYKECLELLGEDSEREGLVKTPERMAKAMQFLTQGYQQDAKAILHGAKFTEAYSEMVIVKDIELYSMCEHHMLPFFGKAHVAYIPNGYITGLSKLARVVDVFARRLQVQERLTHQILDAIQEALEPQGVGVVIEAQHLCMMMRGVQKQNSVTTTSAFSGQFLEGATRAEFLKLIGK

SEQ ID NO: 6561 - protein, 195 aa, Chitinophaga eiseniae
  REGION 1..195: note = tr|A0A1T4QAR2|A0A1T4QAR2_9BACT GTP cyclohydrolase 1; OS = Chitinophaga eiseniae OX=634771 GN=folE PE=3 SV=1
MAYNKVESYDEKITSGLVKNYKECLELLGEDAEREGLLKTPERMAKAMQYLTQGYQLDAREILNGAKFTEAYSEMVIVKDIELYSMCEHHMLPFFGKAHVAYIPNGYITGLSKLARVVDVYARRLQVQERMTHQILDAIQETLQPQGVAVVIEAQHLCMMMRGVSKQNSITTTSAFSGQFQDGTTRSEFMKLIKK

SEQ ID NO: 6562 - protein, 195 aa, Chitinophaga filiformis
  REGION 1..195: note = tr|A0A1G7GM70|A0A1G7GM70_CHIFI GTP cyclohydrolase 1; OS = Chitinophaga filiformis OX=104663 GN=folE PE=3 SV=1
MAYNKIETYDEKITNELIHHYKSSIELLGEDASREGLLKTPERVAKAMQFLTEGYQMDAKAILEGARFTEAYSEMVIVKDIELYSLCEHHMLPFFGKAHIAYIPNGYITGLSKLARVVDVFARRLQVQERMTHQILDAIQETLQPLGVGVVIEAQHLCMMMRGVQKQNSVTTTSAFSGQFEDGRTRNEFMRLITK

SEQ ID NO: 6563 - protein, 195 aa, unidentified
  source 1..195: note = Chitinophaga flava
  REGION 1..195: note = tr|A0A365Y203|A0A365Y203_9BACT GTP cyclohydrolase 1; OS = Chitinophaga flava OX=2259036 GN=folE PE=3 SV=1
MAYTKVESYDEKITSGLVKNYKECLELLGEDSEREGLLKTPERMAKAMQFLTQGYQQDARVILNGAKFTEAYSEMVIVKDIELYSMCEHHMLPFFGKAHVAYIPNGYITGLSKLARVVDVYARRLQVQERMTHQILDAIQETLEPQGVAVVIEAQHLCMMMRGVSKQNSLTTTSAFSGQFMDGTTRAEFMKLIGR

SEQ ID NO: 6564 - protein, 195 aa, Chitinophaga ginsengisegetis
  REGION 1..195: note = tr|A0A1T5NLW9|A0A1T5NLW9_9BACT GTP cyclohydrolase 1; OS = Chitinophaga ginsengisegetis OX=393003 GN=folE PE=3 SV=1
MAYNKNESYDEKITSGLVENYKECLHLLGEDPEREGLQKTPERVAKAMQFLTQGYQQDAREILEGAKFTEAYSEMVIVKDIELYSMCEHHMLPFFGKAHVAYIPNGYITGLSKIARVVDVYARRLQVQERLTHQILDAIQETLQPQGVAVVIEAQHLCMMMRGVQKQNSLTTTSAFSGQFEHGTTRAEFLKLIAK

SEQ ID NO: 6565 - protein, 195 aa, Chitinophaga ginsengisoli
  REGION 1..195: note = tr|A0A2P8GGQ2|A0A2P8GGQ2_9BACT GTP cyclohydrolase 1; OS = Chitinophaga ginsengisoli OX=363837 GN=folE PE=3 SV=1
MAYNKIETYDEKITNDLIHHYKSSIELLGEDVSREGLLKTPERVAKAMQFLTEGYQMDAKAILEGARFTEAYSEMVIVKDIELYSLCEHHMLPFFGKAHIAYIPNGYITGLSKLARVVDVFARRLQVQERMTHQILDAIQETLQPLGVGVVIEAQHLCMMMRGVQKQNSVTTTSAFSGQFEDGRTRNEFMRLITK

SEQ ID NO: 6566 - protein, 195 aa, Chitinophaga japonensis
  REGION 1..195: note = tr|A0A562TAZ4|A0A562TAZ4_CHIJA GTP cyclohydrolase 1; OS = Chitinophaga japonensis OX=104662 GN=folE PE=3 SV=1
MAYKKIETFDEKVTSGLIDNYRECLGLIGEDADREGLQKTPERLAKAMQYLTQGYQLDARAILRGAKFTEAYSEMVIVKDIELYSLCEHHMLPFFGKAHVAYIPNGYITGLSKIARVVDVYARRLQVQERLTHQILDAIQETLEPLGVAVVIEAQHLCMMMRGVQKQNSVTTTSAFSGQFEDGRTRSEFMRLIGK

SEQ ID NO: 6567 - protein, 195 aa, unidentified
  source 1..195: note = Chitinophaga jiangningensis
  REGION 1..195: note = tr|A0A1M6W457|A0A1M6W457_9BACT GTP cyclohydrolase 1; OS = Chitinophaga jiangningensis OX=1419482 GN=folE PE=3 SV=1
MAYNKIESYDEKITADLKDNYKRCLELLGEDSEREGLEKTPERMAKAMQFLTQGYQQDAKEILLGARFTEAYSEMVIVKDIELYSMCEHHMLPFFGKAHVAYIPNGYITGLSKIARVVDVFARRLQVQERLTHQILDAIQEALEPQGVAVVIEAQHLCMMMRGVQKQNSITTTSAFSGQFADGTTRDEFLKLIGR

SEQ ID NO: 6568 - protein, 201 aa, Chitinophaga niabensis
  REGION 1..201: note = tr|A0A1N6HE43|A0A1N6HE43_9BACT GTP cyclohydrolase 1; OS = Chitinophaga niabensis OX=536979 GN=folE PE=3 SV=1
MAYKKEESFDEKVTAGLIENYRGAIELLGEDPEREGLLKTPERMAKAMQYLTQGYGLDAKAILNGAKFTEAYSEMVIVKDIELYSMCEHHMLPFFGKAHVAYIPNGYITGLSKIARVVDVFSRRMQVQERLTHQILDAIQETLEPQGVAVVIEAQHLCMMMRGVSKQNSVTTTSAFSGQFEHAATRAEFMKLISSDLISRR

SEQ ID NO: 6569 - protein, 195 aa, Chitinophaga niastensis
  REGION 1..195: note = tr|A0A2P8HVD2|A0A2P8HVD2_9BACT GTP cyclohydrolase 1; OS = Chitinophaga niastensis OX=536980 GN=folE PE=3 SV=1
MAYNKIETFDEKVTSGLVDHYKECLELLGEDSEREGLLKTPERIAKAMQFLTQGYQQDAREILNGARFTEAYSEMVIVKDIELYSMCEHHMLPFFGKAHVAYIPNGYITGLSKIARVVDVYARRLQVQERLTHQILDAIQESLMPEGVAVVIEAQHLCMMMRGVQKQNSLTTTSAFSGQFQDGTTRAEFMKLIGK

SEQ ID NO: 6570 - protein, 198 aa, unidentified
  source 1..198: note = Chitinophaga parva
  REGION 1..198: note = tr|A0A2T7BNN4|A0A2T7BNN4_9BACT GTP cyclohydrolase 1; OS = Chitinophaga parva OX=2169414 GN=folE PE=3 SV=1
MAYHKEESYDAAITQELTAHYHAVIGKLGEDPEREGLLKTPERVAKAMQFLTQGYSQDARAILNGAKFTEAYSEMVIVKDIELYSMCEHHMLPFFGKAHVAYIPNGYITGLSKLARVVDVFARRLQVQERLTHQVLDAIQETLQPLGVAVVIEAQHLCMMMRGVQKQNSVTTTSAFSGQFEDGRTRAEFIRLIGANIM

SEQ ID NO: 6571 - protein, 197 aa, Chitinophaga pinensis
  REGION 1..197: note = tr|A0A561J1T0|A0A561J1T0_9BACT GTP cyclohydrolase 1; OS = Chitinophaga pinensis OX=79329 GN=folE PE=3 SV=1
MAYKKVESYDEKVTSDLIEHYKNSITLLGEDVEREGLQKTPERVAKAMQYLTTGYQQDAREILNSAKFTESYSEMVIVKDIELYSLCEHHMLPFFGKAHIAYIPNGYITGLSKLARVVDVYARRLQVQERMTHQILDAIQDTLQPLGVAVVIEAQHLCMMMRGVQKQNSVTTTSAFSGQFEDGRTRSEFMRLLGQSI

SEQ ID NO: 6572 - protein, 195 aa, Chitinophaga pinensis
  REGION 1..195: note = tr|C7PRB8|C7PRB8_CHIPD GTP cyclohydrolase 1; OS = Chitinophaga pinensis (strain ATCC 43595 / DSM 2588 / NCIB 11800 / UQM 2034) OX=485918 GN=folE PE=3 SV=1
MAYNKIETYDEKVTSDLIQHYKSSIALLGEDVEREGLQKTPERVAKAMQFLTEGYQMDAKAILEGAKFTETYSEMVIVKDIELYSLCEHHMLPFFGKAHIAYIPNGYITGLSKLARVVDVFARRLQVQERLTHQILDAIQETLQPLGVGVVIEAQHLCMMMRGVQKQNSVTTTSAFSGQFEDGRTRNEFMRLITK

SEQ ID NO: 6573 - protein, 195 aa, unidentified
  source 1..195: note = Chitinophaga polysaccharea
  REGION 1..195: note = tr|A0A561Q5B3|A0A561Q5B3_9BACT GTP cyclohydrolase 1; OS = Chitinophaga polysaccharea OX=1293035 GN=folE PE=3 SV=1
MAYNKIETYDDKITSGLVENYRECLQLLGEDPDREGLQKTPERMAKAMQVLTQGYQLDAKAILEGARFTEAYSEMVIVKDIELYSMCEHHMLPFFGKAHVAYIPNGYITGLSKIARVVDVFARRLQVQERLTHQILDAIQETLQPQGVAVVIEAQHLCMMMRGVQKQNSVTTTSAFSGQFENGTTRAEFLKLIGR

SEQ ID NO: 6574 - protein, 206 aa, unidentified
  source 1..206: note = Chitinophaga polysaccharea
  REGION 1..206: note = tr|A0A561PW05|A0A561PW05_9BACT GTP cyclohydrolase 1; OS = Chitinophaga polysaccharea OX=1293035 GN=folE PE=3 SV=1
MQTDFAKESIVAHSNITLTSEEKIKVIRYHFREIMLALGLDLEDDSLKDTPGRVAKMFVNETFSGLNPVNEPSVTLFENKFKYNEIVLEKDIPLYSYCEHHFVPIIGKVHIAYISKGMVIGLSKLNRITEYFSKRPQVQERLTIQIAEYLKKVMEMEDVAVIIKAEHLCVASRGVNHTGCSTVTQSLHGEFLRKERSSELYSLLAI

SEQ ID NO: 6575 - protein, 195 aa, Chitinophaga rupis
  REGION 1..195: note = tr|A0A1H8BR74|A0A1H8BR74_9BACT GTP cyclohydrolase 1; OS = Chitinophaga rupis OX=573321 GN=folE PE=3 SV=1
MAYKKTETFDEHVTSGLMDNYRECLQLIGEDADREGLQKTPERLAKAMQYLTQGYQLDAKAILRGAKFTEAYSEMVIVKDIELYSLCEHHMLPFFGKAHVAYIPNGYITGLSKIARVVDVFARRLQVQERLTHQVLDAIQETLEPLGVAVVIEAQHLCMMMRGVQKQNSVTTTSGFSGQFEDGRTRSEFMRLIGK

SEQ ID NO: 6576 - protein, 197 aa, Chitinophaga sancti
  REGION 1..197: note = tr|A0A1K1PCB2|A0A1K1PCB2_9BACT GTP cyclohydrolase 1; OS = Chitinophaga sancti OX=1004 GN=folE PE=3 SV=1
MAYKKVESYDEKVTADLIGHYKNSITLLGEDVEREGLQKTPERVAKAMQYLTTGYQQDAREILNSAKFTESYSEMVIVKDIELYSLCEHHMLPFFGKAHIAYIPNGYITGLSKLARVVDVYARRLQVQERMTHQILDAIQDTLQPLGVAVVIEAQHLCMMMRGVQKQNSVTTTSAFSGQFEDGRTRSEFMRLLGQSI

SEQ ID NO: 6577 - protein, 198 aa, Chitinophaga skermanii
  REGION 1..198: note = tr|A0A327Q1Z4|A0A327Q1Z4_9BACT GTP cyclohydrolase 1; OS = Chitinophaga skermanii OX=331697 GN=folE PE=3 SV=1
MAYNKIESYDEHVTASLMQHYRESIALLGEDPDREGLVKTPERMAKAMQVLTQGYQQDARAILNSAKFTEAYSEMVIVKDIELYSMCEHHMLPFFGKAHVAYIPNGYITGLSKIARVVDVYSRRLQVQERLTHQILDAIQDTLQPLGVAVVIEAQHLCMMMRGVQKQNSLTTTSAFSGQFGDGKTRAEFMKLITSRLG

SEQ ID NO: 6578 - protein, 195 aa, Chitinophaga sp.
  REGION 1..195: note = tr|A0A5B9WSU3|A0A5B9WSU3_9BACT GTP cyclohydrolase 1; OS = Chitinophaga sp. XS-30 OX=2604421 GN=folE PE=3 SV=1
MAYNKQESFDEEITSGLIDNYRECIALLGEDPEREGLQKTPERMAKAMQYLTQGYQTDAKAILEGAKFTEAYSEMVIVKDIELYSMCEHHMLPFFGKAHVAYIPNGYITGLSKIARVVDVYSRRMQVQERLTHQILDAIQDTLRPQGVAVVIEAQHLCMMMRGVQKQNSVTTTSAFSGQFEHGATRAEFMKLIGR

SEQ ID NO: 6579 - protein, 200 aa, Chitinophaga sp.
  REGION 1..200: note = tr|A0A1I0NC45|A0A1I0NC45_9BACT GTP cyclohydrolase 1; OS = Chitinophaga sp. YR573 OX=1881040 GN=folE PE=3 SV=1
MAYSKTESYDEKVTSGLIENYKNAIHLLGEDPEREGLLKTPERMAKAMQYMTVGYQQDAKAILEGAKFTESYSEMVIVKDIELYSMCEHHMLPFFGKAHIAYIPNGYITGLSKLARVVDVFSRRLQVQERLTHQILDAIQETLQPEGVAVVIEAQHLCMMMRGVQKQNSTTTTSAFSGQFQDNTTRSEFLRLISANLIGK

SEQ ID NO: 6580 - protein, 195 aa, Chitinophaga terrae
  REGION 1..195: note = tr|A0A1H4DBU5|A0A1H4DBU5_9BACT GTP cyclohydrolase 1; OS = Chitinophaga terrae Kim and Jung 2007 OX=408074 GN=folE; PE = 3 SV=1
MAYNKNETYDEDITTGLISNYKDCLRLLGEDPEREGLEKTPERVAKAMQFLTQGYQQDAKEILEGAKFTEAYSEMVIVKDIELYSMCEHHMLPFFGKAHVAYIPNGYITGLSKIARVVDVFARRLQVQERLTHQILDAIQETLQPQGVAVVIEAQHLCMMMRGVQKQNSLTTTSAFSGQFGSGATRAEFMKLIGK

SEQ ID NO: 6581 - protein, 239 aa, unidentified
  source 1..239: note = Chitinophagaceae bacterium
  REGION 1..239: note = tr|A0A257HZ98|A0A257HZ98_9BACT GTP cyclohydrolase 1; OS = Chitinophagaceae bacterium BSSC1 OX=2015574 GN=folE; PE = 3 SV=1
MKQKETLLNIQLNGEKIELSDTMIDDMGDNHVSTSVDTPMRADAFVLSDDQKVEEITKHFTAIMETLGLDLTDDSLKGTPKRVAKMYVKEIFNGLNPANKPNMAMFENKYQYNQMLVEKNISFYSNCEHHFVPIIGKAHVAYISNGSVVGLSKLNRLVQYFAKRPQVQERLTMQIGKELQKALGTDDIAVLIDAKHLCVASRGVEDDTSSTITAFYSGKFKEDKTREEFLKYIEFKTEF

SEQ ID NO: 6582 - protein, 254 aa, unidentified
  source 1..254: note = Chitinophagaceae bacterium
  REGION 1..254: note = tr|A0A3D4TDH4|A0A3D4TDH4_9BACT GTP cyclohydrolase 1; OS = Chitinophagaceae bacterium OX=1869212 GN=folE PE=3 SV=1
MKPKETLLNTQHNGNGHHNGHHNGHHHGPAYVELSDVTIDEIGENHVSTSYDTPLRADAFELSDADKIAQIEQHFRSIMEIMGLDLTDDSLKGTPKRVAKMYVQEIFSGLNPANKPSVTLFENKYKYNQMLVEKDISFHSNCEHHFVPIFGKAHVAYISSGQVIGLSKLNRLVQYFAKRPQVQERLTMQIGKELQRALNTEDVAVVLDAKHMCVASRGVNDVTSSTITAFYGGKFKEEKTKSEFLKYLELKTEF

SEQ ID NO: 6583 - protein, 258 aa, unidentified
  source 1..258: note = Chlamydia avium
  REGION 1..258: note = tr|W8JGH8|W8JGH8_9CHLA GTP cyclohydrolase 1 type 2; OS = Chlamydia avium 10DC88 OX=1229831 GN=M832_04150 PE=4; SV = 1
MNLTFIMNVADLLTYLNDLFSPQIFSDYCPNGLQVGKDIQTPISKIAVATSADLETIQIAAESNVNVLIVHHGLFWNGMPYPITDMLYTRLQKLIENRIHLIAYHLPLDAHKTLGNNWKVALDLQWENLQSFGSSLPHLGVQGTFPPLPIEEFISILSKYYDAPIKAQALGGPESISSAAIISGGAYKELSQAIKSKVHCFITGNFDEPAWSIALENHIHFLAFGHTATEKVGPKALANYLEDQFRIPTIFIDTSNPF

SEQ ID NO: 6584 - protein, 251 aa, unidentified
  source 1..251: note = Chlamydia pneumoniae
  REGION 1..251: note = tr|A0A0F7WXX6|A0A0F7WXX6_CHLPN Putative GTP cyclohydrolase 1 type 2 OS=Chlamydia pneumoniae OX=83558; GN = BN1224_DC9_AP_00120 PE=4 SV=1
MNVADLLSHLETLLSSKIFQDYGPNGLQVGDPQTPVKKIAVAVTADLETIKQAVAAEANVLIVHHGIFWKGMPYPITGMIYKRIQLLIEHNIQLIAYHLPLDAHPTLGNNWRVALDLNWHDLKPFGSSLPYLGVQGSFSPIDIDSFIDLLSQYYQAPLKGSALGGPSRVSSAALISGGAYRELSSAATSQVDCFITGNFDEPAWSTALESNINFLAFGHTATEKVGPKSLAEHLKSEFPIPTTFIDTANPF

SEQ ID NO: 6585 - protein, 251 aa, unidentified
  source 1..251: note = Chlamydia pneumoniae
  REGION 1..251: note = tr|A0A0F7WN53|A0A0F7WN53_CHLPN Putative GTP cyclohydrolase 1 type 2 OS=Chlamydia pneumoniae OX=83558; GN = BN1224_CV15_B_00700 PE=4 SV=1
MNVADLLSHLETLLSSKIFQDYGPNGLQVGDPQTPVKKIAVAVTADLETIKQAVAAEANVLIVHHGIFWKGMPYPITGMIHKRIQLLIEHNIQLIAYHLPLDAHPTLGNNWRVALDLNWHDLKPFGSSLPYLGVQGSFSPIDIDSFIDLLSQYYQAPLKGSALGGPSRVSSAALISGGAYRELSSAATSQVDCFITGNFDEPAWSTALESNINFLAFGHTATEKVGPKSLAEHLKSEFPISTTFIDTANPF

SEQ ID NO: 6586 - protein, 225 aa, Chlamydia sp.
  REGION 1..225: note = tr|A0A1M3BEL5|A0A1M3BEL5_9CHLA GTP cyclohydrolase 1; OS = Chlamydia sp. 32-24 OX=1895742 GN=folE PE=3 SV=1
MFIDIEEEVGFSQNQIDFNLIPSSPFRKNNFSEEQKIQLISYHFEKILEIIGLDLTDDSICKTPHRFAKMLIQELFKGLDERNFPTITTQENKFNYDQMLFEANISIKSVCEHHFAPILGYCHIAYFPKNKVIGLSKLNRVAQYFASRPQVQERMTRQIKEALVQVLETDDIAVVVDAVHLCVRMRGVQDNDALTRTASYGGKFNESEFRREFLSSIPKLTDVKL

SEQ ID NO: 6587 - protein, 220 aa, unidentified
  source 1..220: note = Chlamydiae bacterium
  REGION 1..220: note = tr|A0A2H0VTU4|A0A2H0VTU4_9BACT GTP cyclohydrolase 1; OS = Chlamydiae bacterium CG10_big_fil_rev_8_21_14_0_10_35_9; OX = 1973935 GN=folE PE=3 SV=1
MKSYLKEKNLNIEKATTTSYPSPFTEKVQESNRKKIRLIEKHFRAILEILGLDLENDSVAKSPIRISKMFVDELFSGMTPEAFPKLTFINADSITNTDSPIFTKNISVNSICEHHFLPMIGKAHIAYMPNQKIIGLSKLNRIVHYFARRPQLQERLTMQIADCLSYVLGTNDVAVYLDLQHYCVKLRGVEDISNTITSAYLGSFKKDFSFQESFERKFSR

SEQ ID NO: 6588 - protein, 228 aa, unidentified
  source 1..228: note = Chlamydiales bacterium
  REGION 1..228: note = tr|A0A1M3CQF4|A0A1M3CQF4_9CHLA GTP cyclohydrolase 1; OS = Chlamydiales bacterium 38-26 OX=1895743 GN=folE PE=3; SV = 1
MKKKSNSNKTKSLHIRTRYPSPILASPPDLSDDEKVGLIAEKYKEIMEILGLDLSDDSLQKTPYRIAKMYVKEIFSGLNPKNFPEISFFENKFQPSRAENANIILVKVNFTSFCEHHFVPMRGYAYVAYVPHKKLIGLSKIPRIVRFFAKRPQVQERLAAQIVDSLSILLETENVAISIIAEHYCVISRGIENEHSNTVTNILRGNFQTHDSLRREFFEGIKQQDTHV

SEQ ID NO: 6589 - protein, 205 aa, unidentified
  source 1..205: note = Chloracidobacterium thermophilum
  REGION 1..205: note = tr|A8DJQ3|A8DJQ3_9BACT GTP cyclohydrolase I; OS = Chloracidobacterium thermophilum OX=458033; GN = YS_M60-F11.146 PE=4 SV=1
MPKDDEQTKLESSDELLTAARALRSTLEALRLTPDRDTHLERTAENVVEFWTEFFAPFIAAQPRPAVSTFSAGELSGQFVAIGKMAFHSMCAHHLAPFFGVAHIAYVPNALAMGIGAPAKLLEYAARRPQLQERLAMDVAMAIEQACHPQGVAVCLIARQMCMEMRGLRANGRVESTVLRGCFQEARWRDQFFNYLSRQATDPGE

SEQ ID NO: 6590 - protein, 207 aa, unidentified
  source 1..207: note = Chloracidobacterium thermophilum
  REGION 1..207: note = tr|G2LDV8|G2LDV8_CHLTF GTP cyclohydrolase I; OS = Chloracidobacterium thermophilum (strain B) OX=981222; GN = Cabther_A0009 PE=4 SV=1
MPKHDEQTKPESNEGMELLTAARALQRMLEALRLTADRDTHLERTAENVAEFWAEFFAPFIADQPPPVVSTFPAAELSGQFIAVGGMSFHSMCAHHLTPFFGAAYVAYVPAALAMGIGAPAKLLEHAARRPQLQERLAMDVATAIERVCHPQGVAVCLIARQMCMEMRGVRADGSVESTVLRGCFQEAPWREQFFNYLSRQATSRGG

SEQ ID NO: 6591 - protein, 224 aa, Chlorobaculum limnaeum
  REGION 1..224: note = tr|A0A1D8D2V0|A0A1D8D2V0_CHLLM GTP cyclohydrolase 1; OS = Chlorobaculum limnaeum OX=274537 GN=folE PE=3 SV=1
MKQEKTVSPILENNRIGQSSLASCDLDECFDETHDREEETLGSMADAVYTLLKGVGEDPEREGLLLTPERVAKSLRFLTKGYRQDPEQLLRKAVFTESYDEMVLVKDIDIYSMCEHHMLPFFGKAHVAYIPDGKIVGLSKIPRVVEVFARRLQVQERLTQQIRDAIQNVLNPRGVAVVIEATHMCMVMRGVEKQNSVTTTSAMSGEFMNNQSTRSEFLRLIGNR

SEQ ID NO: 6592 - protein, 230 aa, Chlorobaculum parvum
  REGION 1..230: note = tr|B3QP43|B3QP43_CHLP8 GTP cyclohydrolase 1; OS = Chlorobaculum parvum (strain NCIB 8327) OX=517417; GN = folE PE=3 SV=1
MKSKYMKQEKTVSPIVENNRSAESRLSQCDLDECFDEACDHQEEERLSLMGNAVYSLLQGIGEDPEREGLLMTPERVAKSLRFLTKGYEQDPEELLMKALFTESYDEMVLVKDIDLYSMCEHHMLPFFGKAHVAYIPDGKIVGLSKIPRVVEVFARRLQVQERLTQQIRDAIQNVLNPRGVAVVIEATHMCMVMRGVEKQNSVTTTSAMSGDFMTSQSTRSEFLRLIGSH

SEQ ID NO: 6593 - protein, 225 aa, Chlorobaculum sp.
  REGION 1..225: note = tr|A0A4Q1DFD5|A0A4Q1DFD5_9CHLB GTP cyclohydrolase 1; OS = Chlorobaculum sp. 24CR OX=2508878 GN=folE PE=3 SV=1
MKQEKTALPTLENSHHTHSALSQCDLDECFEEARDRHEEERIGSMSSAVQTLLKGIGEDPEREGLLMTPERVAKSLRFLTKGYEQDPEELLMKALFTESYDEMVLVKDIDLYSMCEHHMLPFFGKAHVAYIPDGKIVGLSKIPRVVEVFARRLQVQERLTQQIRDAIQNVLSPRGVAVVIEATHMCMVMRGVEKQNSVTTTSAMSGDFMTSQSTRSEFLRLIGNR

SEQ ID NO: 6594 - protein, 224 aa, Chlorobaculum tepidum
  REGION 1..224: note = sp|Q8KEA8|GCH1_CHLTE GTP cyclohydrolase 1; OS = Chlorobaculum tepidum (strain ATCC 49652 / DSM 12025 / NBRC 103806 / TLS) OX=194439 GN=folE PE=3 SV=1
MKQEKTVSPTVENNRSAESRLSQCDLDECFDESHDRDEEVLGSMTDAVYSLLKGVGEDPEREGLLLTPERVAKSLRFLTKGYRQDPEQLLKKAVFTESYDEMVLVKDIDIYSMCEHHMLPFFGKAHVAYIPDGKIVGLSKIPRVVEVFARRLQVQERLTQQIRDAIQNVLNPRGVAVVIEATHMCMVMRGVEKQNAVTTTSAMSGDFMTSQSTRSEFLRLIGNH

SEQ ID NO: 6595 - protein, 224 aa, Chlorobaculum thiosulfatiphilum
  REGION 1..224: note = tr|A0A5C4S6U6|A0A5C4S6U6_CHLTI GTP cyclohydrolase 1; OS = Chlorobaculum thiosulfatiphilum OX=115852 GN=folE PE=3; SV = 1
MKQEKTVSPTVENNRIGQSHLASCNLDECFDEEHDREEETLDSMADAVYSLLKGVGEDPEREGLLLTPERVSKSLRFLTKGYRQDPEQLLKKAVFTESYDEMVLVKDIDIYSMCEHHMLPFFGKAHVAYIPDGKIVGLSKIPRVVEVFARRLQVQERLTQQIRDAIQNVLNPRGVAVVIEATHMCMVMRGVEKQNSVTTTSAMSGEFMSNQSTRSEFLRLIGNR

SEQ ID NO: 6596 - protein, 213 aa, unidentified
  source 1..213: note = Chlorobi bacterium
  REGION 1..213: note = tr|A0A136N9L4|A0A136N9L4_9BACT Putative GTP cyclohydrolase 1 type 2 OS=Chlorobi bacterium OLB5; OX = 1617412 GN=UZ05_CHB002002900 PE=4 SV=1
MANAAGTAQKYFGKANIKSIKYVSPVYAKKFKVVVFVPLESADELSFKMASAGAGNIGKYSLCSFRTKGIGTFMGSRTSNPATGTPGKFEMTEEIRLEMICPRESLDKVINIIYASHPYEEPACEIYPVIVKETQLHKDTALIELKKPVILNDVMKKMNRKIELPGMNIKAFSKKYKRIFIDLAGKTEFSITPAKEKTLVIKKINNIINIEVI

SEQ ID NO: 6597 - protein, 219 aa, unidentified
  source 1..219: note = Chlorobi bacterium
  REGION 1..219: note = tr|A0A136K5D8|A0A136K5D8_9BACT GTP cyclohydrolase 1; OS = Chlorobi bacterium OLB4 OX=1617411 GN=folE PE=3 SV=1
MNSENTVQKILNFNWHDNIENEQPAQSNELNDNSKIKLIEYHFARIMEALGLNLEDESLQGTPARVAKMYVNEIFSGLKQNSKPEISLFQNNYGYNKMIIEKDITLYSTCEHHFVPIIGKVHVAYIPNGQVIGLSKINRLVQYYAKRPQVQERLTVQISDALKDALGHDNVAVVIDADHLCVASRGIKDTSSKTVTFSFSGQFELGDIKKEFLSFVNIK

SEQ ID NO: 6598 - protein, 223 aa, unidentified
  source 1..223: note = Chlorobium chlorochromatii
  REGION 1..223: note = sp|Q3ATN0|GCH1_CHLCH GTP cyclohydrolase 1; OS = Chlorobium chlorochromatii (strain CaD3) OX=340177; GN = folE PE=3 SV=1
MKQEKTPSAITENKLPFSSSNCGCGCHNDDDTLTHDDGLLTDNLESAVYTMLQNVGEDPQREGLLKTPERVARSMRFLTKGYHENPEELLQKALFTESYDEMVLVRDIDLFSMCEHHMLPFFGKAHVAYIPDGKIVGLSKLARVVEVFSRRLQVQERLTQQIRDAIQNVLNPKGVAVVIEAKHLCMVMRGVEKLNSITTTSAMSGVFMTSPSTRGEFLRLIQK

SEQ ID NO: 6599 - protein, 223 aa, unidentified
  source 1..223: note = Chlorobium ferrooxidans
  REGION 1..223: note = tr|Q0YQ66|Q0YQ66_9CHLB GTP cyclohydrolase 1; OS = Chlorobium ferrooxidans DSM 13031 OX=377431 GN=folE; PE = 3 SV=1
MKQEKIPSAISASNPLPSGRGSCCDDDDCYRDTPDTEPHILGGLSEAVTAMLEGIGEDPRREGLLKTPERVARSMRFLTRGYSQDPEELLKNAVFTESYDEMVLVKDIDIFSMCEHHMLPFFGKAHIAYIPDGKIVGLSKLARVAEVFSRRLQVQERLTQQIRDAIQSVLNPKGVGVVIEARHMCMVMRGVEKLNSVTTTSAMSGQFITSQSTRSEFLRLIKP

SEQ ID NO: 6600 - protein, 219 aa, Chlorobium limicola
  REGION 1..219: note = tr|B3EIA8|B3EIA8_CHLL2 GTP cyclohydrolase 1; OS = Chlorobium limicola (strain DSM 245 / NBRC 103803 / 6330) OX=290315 GN=folE PE=3 SV=1
MLSDTSENESLVSSGRASQCIDDDCLHELQDTDTEALSRIADAVSSMLDGVGEDPEREGLVKTPERVARSMRFLTRGYRQDPEEVLKKAVFTEAYDEMVLVRDIDIFSMCEHHLLPFFGKAHVAYIPDGKIVGLSKIARVVEVYARRLQVQERLTQQIRDAIQNVLNPRGVAVVIEARHMCMVMRGVEKLNSITTTSAMSGEFLASPSTRSEFLRLIRP

SEQ ID NO: 6601 - protein, 224 aa, Chlorobium limicola
  REGION 1..224: note = tr|A0A101JTL3|A0A101JTL3_CHLLI GTP cyclohydrolase 1; OS = Chlorobium limicola OX=1092 GN=folE PE=3 SV=1
MKQEKMLSDTLENKSIVSSGRASQCIDDDCLHELQDTDTGALSRIADAVSSMLDGVGEDPEREGLVKTPERVARSMRFLTRGYRQDPEEVLKKAVFTEAYDEMVLVRDIDIFSMCEHHLLPFFGKAHVAYIPDGKIVGLSKIARVVEVYARRLQVQERLTQQIRDAIQNVLNPKGVAVVIEARHMCMVMRGVEKLNSITTTSAMSGEFLASPSTRSEFLRLIRP

SEQ ID NO: 6602 - protein, 223 aa, Chlorobium phaeobacteroides
  REGION 1..223: note = tr|B3EK82|B3EK82_CHLPB GTP cyclohydrolase 1; OS = Chlorobium phaeobacteroides (strain BS1) OX=331678; GN = folE PE=3 SV=1
MKQEKTLSDIVANNKTSHSGYSSCADDDCCQENCDTDQEIISSMSEAVYTMLEGIGENPEREGLKKTPERVARSMRFLTKGYLEDPEEMLKKAVFTESYDEMVLVKEIELFSMCEHHMLPFFGKAHVAYIPDGKIVGLSKLGRVVDVYARRLQVQERLTQQIRDAIQNVLNPRGVGVVIEAKHMCMVMRGVEKQNSITTTSAMSGEFLSSQSTRSEFLRLIGL

SEQ ID NO: 6603 - protein, 219 aa, Chlorobium phaeobacteroides
  REGION 1..219: note = tr|A1BF47|A1BF47_CHLPD GTP cyclohydrolase 1; OS = Chlorobium phaeobacteroides (strain DSM 266) OX=290317; GN = folE PE=3 SV=1
MPSDISVSKTPSSLNSGGFCEDDECLMDGDTASPEEISNLSGAVSMLLQGIGENPDREGLLKTPERVARSMRFLTRGYRQNPEELLKKAVFTESYDEMVLVRDIDIFSMCEHHLLPFFGKAHVAYIPDGKIVGLSKIGRVVEVFARRLQVQERLTQQIRDAIQDVLNPKGVAVVIEAKHLCMVMRGVEKLNSVTTTSAMSGEFISSPSTRSEFLRLIGA

SEQ ID NO: 6604 - protein, 223 aa, Chlorobium phaeovibrioides
  REGION 1..223: note = sp|A4SF37|GCH1_CHLPM GTP cyclohydrolase 1; OS = Chlorobium phaeovibrioides (strain DSM 265 / 1930); OX = 290318 GN=folE PE=3 SV=1
MKQEKTVSATLVNNPALTGRGTCCDDDECLNDPAQLPAEIMESMSESVYTLLEGVGEDPEREGLLKTPERVARSLAFLTRGYRQDPEEMLKKAVFTESYDEMVLVKDIDIFSMCEHHMLPFFGKAHVAYIPDGKIVGLSKLARVVEVFARRLQVQERLTQQIRDAIQDVLHPKGVGVVIEAKHMCMVMRGVEKLNSVTTTSAMSGEFISSESTRGEFLRLIRP

SEQ ID NO: 6605 - protein, 223 aa, Chlorobium phaeovibrioides
  REGION 1..223: note = tr|A0A5C2QDI9|A0A5C2QDI9_CHLPH GTP cyclohydrolase 1; OS = Chlorobium phaeovibrioides OX=1094 GN=folE PE=3 SV=1
MKQEKTVSATLVNNPALTGRGACCDDDECLNDPAQLPAEIMESMSESVYTLLEGVGEDPEREGLLKTPERVARSLAFLTRGYRQDPEEMLKKAVFTESYDEMVLVKDIDIFSMCEHHMLPFFGKAHVAYIPDGKIVGLSKLARVVEVFARRLQVQERLTQQIRDAIQDVLHPKGVGVVIEAKHMCMVMRGVEKLNSVTTTSAMSGEFISSESTRGEFLRLIRP

SEQ ID NO: 6606 - protein, 223 aa, Chlorobium sp.
  REGION 1..223: note = tr|A0A4R0QLV0|A0A4R0QLV0_9CHLB GTP cyclohydrolase 1; OS = Chlorobium sp. N1 OX=2491138 GN=folE PE=3 SV=1
MKQERTASAISENNSHLTGRGACCDDDEYPLDPQQLTPEASSALESAVSTMLESVGEDPEREGLLKTPERVARSLAFLTRGYRQDPEEMLRKAVFTESYDEMVLVRDIDIFSMCEHHMLPFFGKAHVAYIPDGKIVGLSKLARVVEVFARRLQVQERLTQQIRDAIQDVLNPKGVGVVIEARHMCMVMRGVEKLNSVTTTSAMSGQFITSESTRSEFLRLIRQ

SEQ ID NO: 6607 - protein, 222 aa, Chlorobium sp.
  REGION 1..222: note = tr|A0A533TQ24|A0A533TQ24_CHLSQ GTP cyclohydrolase 1; OS = Chlorobium sp. OX=1095 GN=folE PE=3 SV=1
MPSDILASNPIISGRGSCCDDDECFADIPENVPENDPLALGKLSSAVYQMLEGIGEDTGREGLLKTPERVARSLRFLTRGYSQNPEELLKNAVFTESYDEMVVVRDIDIFSMCEHHMLPFFGKAHVAYIPDGKIVGLSKLARVVEVFARRLQVQERLTQQIRDAIVSVLNPKGVGVVIEARHMCMVMRGVEKLNSVTTTSAMSGQFITSESTRSEFLRLIKP

SEQ ID NO: 6608 - protein, 188 aa, unidentified
  source 1..188: note = Chloroflexi bacterium
  REGION 1..188: note = tr|A0A2M7JXU7|A0A2M7JXU7_9CHLR GTP cyclohydrolase 1; OS = Chloroflexi bacterium CG_4_8_14_3_um_filter_45_15; OX = 1973939 GN=folE PE=3 SV=1
MIDKEKIRLAAISIIEAIGENPSRESLRDTPQRIAEMYAELFSGIDVDPKNELMIGFEEGHHEMIVLRDIPFYSMCEHHLLPFYGVAHVGYIPSEDGRVVGVSKLARVVEICARRPQLQERMTRQIADAIFEALHPDGVAVVVRAEHLCMTMRGIKKPGANVVTSAVRGTFRSKIATRSEFLSLISGS

SEQ ID NO: 6609 - protein, 210 aa, unidentified
  source 1..210: note = Chloroflexi bacterium
  REGION 1..210: note = tr|A0A1F8PEZ5|A0A1F8PEZ5_9CHLR GTP cyclohydrolase 1; OS = Chloroflexi bacterium RBG_16_51_16 OX=1797644 GN=folE; PE = 3 SV=1
MNAQEFDDDILENIENSGLDTTAIEEAVNRILQAVGEDPSRAGLQFTPKRVARMYAELLGGYTADPVKTVGDAIFEIKYDEMVLVRDIEFYSLCEHHILPFMGRVHVAYLPDGKVLGLSKIPRIVDIYAHRLQVQERMTRQIADFILDLLKPKGVAVVVEALHLCSMMRGVKKQNARMTTSAMHGAFRANLATRQEFLDNISRGAGPLQI

SEQ ID NO: 6610 - protein, 224 aa, Chloroflexus aggregans
  REGION 1..224: note = tr|B8GBZ6|B8GBZ6_CHLAD GTP cyclohydrolase 1; OS = Chloroflexus aggregans (strain MD-66 / DSM 9485); OX = 326427 GN=folE PE=3 SV=1
MSTNDYHPTHDLDEDHYEHLIIPGRGKLEGMTFSSDPRIEDAVHTILTAIGEIPEREGLQKTPSRVAKMYAELTAGYHIDPQALINGAVFSVAYDEMVLVTNIDYYSLCEHHMLPFFGQVHVAYIPNGKVVGLSKIPRIVEMFARRLQVQERMTVQIADFINETLEPAGVAVVAEGIHMCGVMRGVKKANARMVTSAMRGAFREDPKTRAEFMAHVNRASSRQD

SEQ ID NO: 6611 - protein, 226 aa, Chloroflexus aggregans
  REGION 1..226: note = tr|A0A2J6XDD3|A0A2J6XDD3_9CHLR GTP cyclohydrolase 1; OS = Chloroflexus aggregans OX=152260 GN=folE PE=3 SV=1
MSTNGYHLTHNHDLDEDHYEHLIVPGRGKLEGMTFSSDPRIEDAVRTVLTAIGEIPEREGLQKTPSRVAKMYAELTAGYHIDPQALINGAIFHVAYDEMVLVTNIDYYSLCEHHMLPFFGQVHVAYIPNGKVVGLSKIPRIVEMFARRLQVQERMTVQIADFINETLEPAGVAVVAEGTHMCGVMRGVKKANARMVTSAMRGAFREDPKTRAEFMAHVNRASSRQD

SEQ ID NO: 6612 - protein, 227 aa, Chloroflexus aurantiacus
  REGION 1..227: note = tr|A9WIX0|A9WIX0_CHLAA GTP cyclohydrolase 1; OS = Chloroflexus aurantiacus (strain ATCC 29366 / DSM 635 / J-10-fl) OX=324602 GN=folE PE=3 SV=1
MSSNGNGYHHPTPELDEEHYESLIIPGRGKLEGMSFNADPRIEEAVRTILAAIGEVPDREGLQKTPSRVAKMYAELTAGYHIDPQALINGAVFSVAYDEMVLVTNIDYYSLCEHHMLPFFGQVHVAYIPNGKVVGLSKIPRIVEMFARRLQVQERMTVQIADFINATLEPAGVAVVAEGIHMCGVMRGVKKANARMVTSAMRGVFREDPKTRAEFMAHINRVNNRQE

SEQ ID NO: 6613 - protein, 227 aa, unidentified
  source 1..227: note = Chloroflexus islandicus
  REGION 1..227: note = tr|A0A178MJQ0|A0A178MJQ0_9CHLR GTP cyclohydrolase 1; OS = Chloroflexus islandicus OX=1707952 GN=folE PE=3 SV=1
MSSNGNGYHHIHDHDIDEEHYDSLIIPGRGKIEGMSFNSDPHIEEAVRTILGAIGEIPDREGLQKTPSRVAKMYAELTAGYHIDPKALINGAVFSVAYDEMVLVTNIDYYSLCEHHMLPFFGQVHVAYIPNGKVVGLSKIPRIVEMFARRLQVQERMTVQIADFINETLEPAGVAVVAEGVHMCGVMRGVKKANARMVTSAMRGAFREDPKTRAEFMAHIDRNRQER

SEQ ID NO: 6614 - protein, 241 aa, Chlorogloea sp.
  REGION 1..241: note = tr|A0A2T1EMT6|A0A2T1EMT6_9CHRO GTP cyclohydrolase 1; OS = Chlorogloea sp. CCALA 695 OX=2107693 GN=folE PE=3 SV=1
MNTNSDRAESFLISDMRESMDGQNSLNLNLSTRPDRNTQNGKEPNLQPPSEDLNEPMREAVRTLLLGVGEDPEREGLLKTPKRVAEAMRFLTSGYNQSLEDLVNGAIFDEGHNEMVLVRDISTFSLCEHHMLPFMGKTHVAYIPNQKVVGLSKLARIVEMYSRRLQVQERLTRQIAEAVQTILEPKGVAVVIEASHMCMVMRGVQKPGSWTVTSAMVGVFQDEQKTREEFFNLIRHQAAFF

SEQ ID NO: 6615 - protein, 245 aa, Chlorogloeopsis fritschii
  REGION 1..245: note = tr|A0A3S0ZJB2|A0A3S0ZJB2_CHLFR GTP cyclohydrolase 1; OS = Chlorogloeopsis fritschii PCC 6912 OX=211165 GN=folE; PE = 3 SV=1
MLIPRKNTWNLTTSKSKVSPVKTFQQNQNMTLSIPPELNSASEVLSSLSTQQTPKVTEAEMMQAVRTLLLGLGEDPEREGLKDTPKRVVKALQFLTKGYHESLDELLNGAVFTEDANEMVLVRDIDIFSSCEHHILPIIGRAHVAYIPNGKVIGLSKIARICEMYARRLQVQERLTLQIADALQGLLKPQGVAVVLEATHMCMVMRGVQKPGSWTVTSAMRGVFADDARTREEFMNLILHNTKFR

SEQ ID NO: 6616 - protein, 172 aa, Chlorogloeopsis fritschii
  REGION 1..172: note = tr|A0A3S1A111|A0A3S1A111_CHLFR GTP cyclohydrolase 1; OS = Chlorogloeopsis fritschii PCC 6912 OX=211165 GN=folE; PE = 3 SV=1
MGLLWGGLPEGMEETPQRVAKHWATITRGLHQDPLEPLKKTFTCDHDEIVLIKDISFNSLCEHHLLPFFGVAHVGYIPSGRVVGLSKIPRSLDILAARPQLQERLTSELTQVIEDAIAPVGVIVVMEATHTCMSTRGVVKANAITTTSCVRGVFKTDFQARQEVLSLINKDA

SEQ ID NO: 6617 - protein, 237 aa, Chloroherpeton thalassium
  REGION 1..237: note = tr|B3QUQ2|B3QUQ2_CHLT3 GTP cyclohydrolase 1; OS = Chloroherpeton thalassium (strain ATCC 35110 / GB-78); OX = 517418 GN=folE PE=3 SV=1
MKHAEKSLTDARNGHRTATSFIDAVTEEIGDEHISTSVDTPIRPDAFDQDDELKMELIAEHFEKIMLILGLDLKDDSLRGTPKRVAKMYVKEIFSGLNPANKPKVALFDNSYKYNEMLIEKDIIVHSTCEHHFVPILGKAHVGYISSGKVIGLSKINRIVQYYAKRPQVQERMTMQIVKELKETLQTEDVAVVIDARHLCVSVRGVEDVASSTVTSSYNGKFLNEQTRNEFLKHIYG

SEQ ID NO: 6618 - protein, 242 aa, Chondrocystis sp.
  REGION 1..242: note = tr|A0A1Z4RRA0|A0A1Z4RRA0_9CHRO GTP cyclohydrolase 1; OS = Chondrocystis sp. NIES-4102 OX=2005460 GN=folE PE=3 SV=1
MTIVSSNGSSRSESFDTNSSNPLKSTLLDQVASRPDRNTHNGKAAEIKATSEAAKEKMMEAVYTMLESVGEDPEREGLLKTPKRVAEAMQYLTSGYNQSLEELVNGAIFDEGHNEMVLVRDINFFSLCEHHMLPFMGRAHVAYIPNQKVVGLSKLARIVEMYARRLQVQERLTRQIAEAVQEILDPQGVAVVMEATHMCMSMRGVQKPGSWTVTSAMIGVFQDQQKTREEFLNLIRHQPNFH

SEQ ID NO: 6619 - protein, 212 aa, unidentified
  source 1..212: note = Chromatiaceae bacterium
  REGION 1..212: note = tr|A0A3D4RUP1|A0A3D4RUP1_9GAMM GTP cyclohydrolase 1; OS = Chromatiaceae bacterium OX=2049432 GN=folE PE=3 SV=1
MTGKIPRISAHTRYEDEDRFEPSDSQDVYDPDKEALIREMLVRLGEDPEREGLKRTPLRVAKAMDFLTQGYHLSAEDIIKKAMFDEDVTEMVVVRDIEFYSLCEHHMLPFFGHAHIGYLPNGRVVGLSKVARVVDAFARRLQVQERLTSQIADTLLKHLDAKGVAVVMEASHTCMMMRGVQKQSSITISSAMRGAFESDARTRAEFMGLIRR

SEQ ID NO: 6620 - protein, 285 aa, unidentified
  source 1..285: note = Chromatiaceae bacterium
  REGION 1..285: note = tr|A0A3D4S1I4|A0A3D4S1I4_9GAMM GTP cyclohydrolase FolE2 OS=Chromatiaceae bacterium OX=2049432 GN=folE2 PE=3; SV = 1
MDRTVLTATVPATTTIADVQSRADTRRIPIDKVGIKDIRHPVRIKDRGGQEQHTVATFNMYVYLPHHFKGTHMSRFVAILNGHEHEIGVSTFREMLSEMAERLESEAGHIEMRFPFFIDKKAPISGVASLLDYDVTLIGDIHDGKPKMSIKVVVPVTSLCPCSKQISDYGAHNQRSHVTVEARTRGFLWIEELIEMVEAEASCELYGLLKRPDEKYVTERAYDNPKFVEDTVRDVARRLNDDERISAYIVEAENFESIHNHSAYALIECDKEIEARKAGSAPDCD

SEQ ID NO: 6621 - protein, 280 aa, unidentified
  source 1..280: note = Chromatiales bacterium
  REGION 1..280: note = tr|A0A257SYH8|A0A257SYH8_9GAMM GTP cyclohydrolase FolE2 OS=Chromatiales bacterium 21-64-14 OX=1970504; GN = folE2 PE=3 SV=1
MKATIPAPQPTAPIADVQNSVDTRRIPINKVGIKEIRHPVRVKDRSEGEQNTIATFNMYVNLPHDFKGTHMSRFVEILNHHEREISVQSFKDMLREMTTVLEAESGHIEMRFPYFVTKAAPVTKVHSLMDYDVSLIGEIHDRAVHTHIRVVVPVTSLCPCSKEISDYGAHNQRSHVTVMARTRGFIWIEELIDLVEQEASCELYGLLKRPDEKYVTERAYNNPKFVEDMVRDVAVRLNHDERIEAYIVESENFESIHNHSAYAMIERDKTQDEPAQQPRR

SEQ ID NO: 6622 - protein, 175 aa, unidentified
  source 1..175: note = Chromatiales bacterium
  REGION 1..175: note = tr|A0A524K6T6|A0A524K6T6_9GAMM GTP cyclohydrolase 1 (Fragment) OS=Chromatiales bacterium OX=2026725 GN=folE; PE = 3 SV=1
EIMKVLGLDLRDDSLMDTPRRIAKMYVNEIFGGLDYRTFPKLTVVDNKMQCDEMIQVRKISMSSTCEHHFITIDGTATVAYIPKDKVIGLSKINRIVAFFAQRPQIQERLTEQVLLALQTLLVTDDVAVSITATHFCVKARGVRDANSETTTTALGGVFKTHPETRKEFLMGLEG

SEQ ID NO: 6623 - protein, 278 aa, Chromatium okenii
  REGION 1..278: note = tr|A0A2S7XNM1|A0A2S7XNM1_9GAMM GTP cyclohydrolase FolE2 OS=Chromatium okenii OX=61644 GN=folE2 PE=3 SV=1
MDHSLESTCCNTSTAEMVDVQGSADTRHIAIDKVGIKDIRHPVRVRERNGNEQHTVATFNMYVYLPHDFKGTHMSRFVQILNNHEREISVDSFKDMLTEMSARLESEAGHIEMRFPYFINKKAPVSGVESLLDYDVTFIGEICHGQPTLEIKVQIPVTSLCPCSKEISRYGAHNQRSHVTVQIRAQDFIWLEEIIEMVEQEASSELFGLLKRPDEKFVTERAYENPKFVEDMVRDVAKRLNDDVRVAAYIVEAENFESIHNHSAYALIARDKAIEVAP

SEQ ID NO: 6624 - protein, 182 aa, Chromatocurvus halotolerans
  REGION 1..182: note = tr|A0A4R2LEX8|A0A4R2LEX8_9GAMM GTP cyclohydrolase 1; OS = Chromatocurvus halotolerans OX=1132028 GN=folE PE=3 SV=1
MREHWAGIIKAVGEDLSRPGLADTPERAAKAFEFLTHGYRQSVDEVVNGALFPSESSEMVLVQDIELYSLCEHHLLPFIGKCHVAYIPTGQVIGLSKVARIVDVFARRLQIQESLTTQIAETLMSVTNAAGVGVIIEARHMCMMMRGVEKQNSVMKTSSMLGNFRHDQKTRDEFLALLQMRV

SEQ ID NO: 6625 - protein, 226 aa, Chromatocurvus halotolerans
  REGION 1..226: note = tr|A0A4R2L190|A0A4R2L190_9GAMM GTP cyclohydrolase 1; OS = Chromatocurvus halotolerans OX=1132028 GN=folE PE=3 SV=1
MTTAHAITCPDVTTNLSAEAAMVQKALTDKGLETPLVHNGLDRDEKYARIRDAFTEIAQVLGLDLRDDSLRETPHRIAKMYVDEIFSGLDYAKFPSISVIDNKMQVEEMVCIDKIDLVSTCEHHFVTIDGSARVAYIPRHRIIGLSKINRIVRFFSQRPQVQERLTQQILVALQTLLETDDVAVTVNAVHYCVKSRGVMDSNSTTRTTALGGAFKTDASTRGEFLG

SEQ ID NO: 6626 - protein, 226 aa, Chromatocurvus sp.
  REGION 1..226: note = tr|A0A2N5Y1Q3|A0A2N5Y1Q3_9GAMM GTP cyclohydrolase 1; OS = Chromatocurvus sp. F02 OX=1905677 GN=folE PE=3 SV=1
MTPALAKKNITFSHTLSPEAASVRQALLDKGLETPLVDNGLTRDEKYLKIAAAFTDITQTLGLDLTDDSLCDTPSRIARMYVDEIFSGLDYSHFPKIAVIANKMQVEEMVQIDDIGLVSTCEHHFVTIDGTAKVAYIPGNKIIGLSKINRIVRFFAQRPQVQERLTQQILVALQTLLETEDVAVSINAVHYCVKSRGVMDGNSRTRTTSLGGAFKETPSTRAEFLN

SEQ ID NO: 6627 - protein, 182 aa, Chromatocurvus sp.
  REGION 1..182: note = tr|A0A2N5Y4H3|A0A2N5Y4H3_9GAMM GTP cyclohydrolase 1; OS = Chromatocurvus sp. F02 OX=1905677 GN=folE PE=3 SV=1
MEEHWAHIIEAIGEDLSRPGLADTPKRAARAFEFLTRGYQQSVEEVVNNALFPSASSEIVLVQNVELYSLCEHHMLPFIGKCHVAYIPTGKVLGLSKIARLVDIFARRLQIQESLTMQIAETIMEVTGADGVGVIIEAQHMCMMMRGVEKQNSIMKTSAMLGSFRTEPKTRDEFLSLLQLGR

SEQ ID NO: 6628 - protein, 294 aa, Chromobacterium haemolyticum
  REGION 1..294: note = tr|A0A1W0CAS0|A0A1W0CAS0_9NEIS GTP cyclohydrolase FolE2 OS=Chromobacterium haemolyticum OX=394935 GN=folE2; PE = 3 SV=1
MNAPLPDIARSGAAAALLPLNWVGMDGIALPLRLADAAQGCVAARASVQVNLPRPAIKGIHMSRLYRLLQAHADAAPLNPDALSRLLQAMADSHADCGSDAARAEFRFELLCQRPALATPGLSGWKAYPAALGAELDGDGCRLWAEVEIAYSSTCPCSAALARRLIADAFLQQNCAATPDAVHAWLLEHATLATPHSQRSQARLRFDIPADAAGWELAARIDLAEQALATPVQTAVKRADEQAFAALNGANLMYVEDAARRLQAALAGHGLSRVDVRHQESLHPHDAVAASQLS

SEQ ID NO: 6629 - protein, 298 aa, Chromobacterium haemolyticum
  REGION 1..298: note = tr|A0A2T5NTP3|A0A2T5NTP3_9NEIS GTP cyclohydrolase FolE2 OS=Chromobacterium haemolyticum OX=394935 GN=folE2; PE = 3 SV=1
MNAPLPDIARSGAAAALLPLNWVGMDGIALPLRLADAAHGRVAARASVQVNLPRPTIKGIHMSRLYRLLQPHAEAAPLSPAALSRLLQEMVDSHADCGSNAARAEFRFELLCQRPALATPDLSGWKAYSAALGAERDGDGCRLWAEVEIAYSSTCPCSAALARRLIADAFLQQACAATPDAVYDWLLEHATLATPHSQRSQARLRFDIAADAAHWDLAARIDLAEQALATPVQTAVKRADEQAFAALNGANLMYVEDAARRLRAALTSHGLSRVDVRHQESLHPHDAVAASQLTEERA

SEQ ID NO: 6630 - protein, 294 aa, Chromobacterium sp.
  REGION 1..294: note = tr|A0A2T5NH92|A0A2T5NH92_9NEIS GTP cyclohydrolase FolE2 OS=Chromobacterium sp. Panama OX=2161826 GN=folE2; PE = 3 SV=1
MNAPLPDIARSGAAAALLPLNWVGMDGIALPLRLADAAHGCVAARASAQVNLPRPAIKGIHMSRLYRLLQAHADAAPLSPDALGRLLRAMADSHADCGSDAARAELRFELLCQRPALATPGLSGWKAYPAALGAELDGDGCRLWAEVEIAYSSTCPCSAALARRLIADAFRQQERAATPDAVYDWLLEHATLATPHSQRSQARLRFDIPADAAGWDLAARIDLAEQALATPVQTAVKRADEQAFAALNGANLMYVEDAARRLQAALAGHGLSRVDVRHQESLHPHDAVAASQLS

SEQ ID NO: 6631 - protein, 210 aa, Chromobacterium sp.
  REGION 1..210: note = tr|A0A344ULJ1|A0A344ULJ1_9NEIS GTP cyclohydrolase 1; OS = Chromobacterium sp. IIBBL 274-1 OX=2202142 GN=folE PE=3; SV = 1
MEPRMSFSDDHDHSACQRPLDRVRPFDAAAFEQAVADMLTASGIAIDPIHTGKTAQRVRELWQKRLLDGYDTEPAEALGSGFADERRDMVVIRSLAVHGMCPHHLLPFRGVAHVAYLPGGRLHGFGRIARMVDAISHRYTYQEWITHEISRTLVEHGGARGAACLIEAEQLCLLMGENRRGDERVITQCYAGEFETDASARNEFLRAIER

SEQ ID NO: 6632 - protein, 206 aa, unidentified
  source 1..206: note = Chromobacterium vaccinii
  REGION 1..206: note = tr|A0A1D9LKM7|A0A1D9LKM7_9NEIS GTP cyclohydrolase 1; OS = Chromobacterium vaccinii OX=1108595 GN=BKX93_18740 PE=3; SV = 1
MSFIDDHDHSACQRPLDRVRPFDAAAFEKAVADMLTASGIAIDPIHTGKTAQRVRELWQKRLLDGYDTVPAEALGSGFADDRRDMVVIRSLAVHGMCPHHLLPFRGVAHVAYLPGGRLHGFGRIARMVDAISHRYTYQEWITHEISRTLVEHGGARGAACLIEAEQLCLLMGENRRGDERVITQCYAGDFETDANARNEFLRAIER

SEQ ID NO: 6633 - protein, 206 aa, unidentified
  source 1..206: note = Chromobacterium vaccinii
  REGION 1..206: note = tr|A0A2L2B9M4|A0A2L2B9M4_9NEIS GTP cyclohydrolase 1; OS = Chromobacterium vaccinii OX=1108595 GN=CFN79_09815 PE=3; SV = 1
MSFIDDHDHSACQRPLDRIRPFDAAAFEKAVADMLTASGIAIDPIHTGKTAQRVRELWQKRLLDGYDTVPAEALGSGFADDRRDMVVIRSLAVHGMCPHHLLPFRGVAHVAYLPGGRLHGFGRIARMVDAISHRYTYQEWITHEISRTLVEHGGARGAACLIEAEQLCLLMGENRRGDERVITQCYAGDFETDANARNEFLRAIER

SEQ ID NO: 6634 - protein, 206 aa, Chromobacterium violaceum
  REGION 1..206: note = sp|Q7NYZ2|GCH1_CHRVO GTP cyclohydrolase 1; OS = Chromobacterium violaceum (strain ATCC 12472 / DSM 30191 / JCM 1249 / NBRC 12614 / NCIMB 9131 / NCTC 9757); OX = 243365 GN= folE PE=3 SV=1
MSFTDDHDHAACQRPLERVRPFDAAAFERAVADMLTASGIAIDPIHTGKTAQRVRELWQKRLLDGYDTVPAEALGSGFADERRDMVVIRSLAVHGMCPHHLLPFRGVAHVAYLPGGRLHGFGRIARMVDAISHRYTYQEWITHEIARTLVEHGEARGAACLIEAEQLCLLMGENRRGDERVITQCYAGDFETDAEARNQFLRAIER

SEQ ID NO: 6635 - protein, 206 aa, Chromobacterium violaceum; identical to SEQ ID NO: 6632
  REGION 1..206: note = tr|A0A381EPL7|A0A381EPL7_CHRVL GTP cyclohydrolase 1; OS = Chromobacterium violaceum OX=536 GN=folE_1 PE=3 SV=1

SEQ ID NO: 6636 - protein, 184 aa, Chromohalobacter canadensis
  REGION 1..184: note = tr|A0A285VPN2|A0A285VPN2_9GAMM GTP cyclohydrolase 1; OS = Chromohalobacter canadensis OX=141389 GN=folE PE=3 SV=1
MTEELATHYRDIIAGLGEDPDREGLRDTPMRAAKAMQFLNQGYGQTLESLVNGAVFESQTDEMILVKDIELYSMCEHHLLPFIGKCHIAYLPKGKVLGLSKFARIVDMYARRMQIQENLTRQIAEAVQEVTEARGVGVIVEAQHMCMMMRGVEKQNSCMKTSVMLGAFRNNLNTRQEFLTLVHG

SEQ ID NO: 6637 - protein, 300 aa, Chromohalobacter japonicus
  REGION 1..300: note = tr|A0A1Q8T905|A0A1Q8T905_9GAMM GTP cyclohydrolase FolE2 OS=Chromohalobacter japonicus OX=223900 GN=folE2; PE = 3 SV=1
MNQHTLHDVANGASDLEGPLAWVGMEDIALPFRLANSTVNGRASAGVSLDDATARGIHMSRLYLALEALEHQEVTLSRVSAVLQRFLDSHDDLSRTAFLDLSGDVLIKRPALISPRSGWKAYPCALRCRQEAQGMQATLEVTIGYSSTCPCSAALARQSIQQVFDEDFTDMPISHDAVRAWLGSEQGILATPHSQRSQAHLSLRLADDLEALPVTALIDTVEEALGTALQTAVKRVDEQAFALANGHNLMFCEDAARRVRHALQARDEVQGFQVRIVHAESLHAHDAVAHAEWNWTSASP

SEQ ID NO: 6638 - protein, 184 aa, Chromohalobacter japonicus
  REGION 1..184: note = tr|A0A1Q8TAP2|A0A1Q8TAP2_9GAMM GTP cyclohydrolase 1; OS = Chromohalobacter japonicus OX=223900 GN=folE PE=3 SV=1
MTEELATHYRDIIAGLGEDPDREGLRDTPMRAAKAMQFLNQGYGQTLESLVNGAVFESKTDEMVLIKDIELYSMCEHHLLPFIGKCHIAYLPKGKVLGLSKFARIVDMYARRMQIQENLTRQIAEAVQEVTEARGVGVIVEAQHMCMMMRGVEKQNSCMKTSVMLGAFRNNLNTRQEFLTLVHG

SEQ ID NO: 6639 - protein, 184 aa, Chromohalobacter marismortui
  REGION 1..184: note = tr|A0A4R7NRA5|A0A4R7NRA5_9GAMM GTP cyclohydrolase 1; OS = Chromohalobacter marismortui OX=42055 GN=folE PE=3 SV=1
MTEELATHYRAIIAGLGEDPDREGLRDTPMRAAKAMQFLNQGYGQTLESLVNGAVFESQTDEMVLIKDIELYSMCEHHLLPFIGKCHIAYLPEGRVLGLSKFARIVDMYARRMQIQENLTRQIAEAVQQVTQARGVGVIIEAQHMCMMMRGVEKQNSSMKTSVMLGAFRNNLTTRQEFLTLVHG

SEQ ID NO: 6640 - protein, 304 aa, Chromohalobacter salexigens
  REGION 1..304: note = sp|Q1R153|GCH4_CHRSD GTP cyclohydrolase FolE2; OS = Chromohalobacter salexigens (strain DSM 3043 / ATCC BAA-138 / NCIMB 13768) OX=290398 GN=folE2 PE=3 SV=1
MQEPKNSQTLHDVANGASDLEGPLAWVGMEDIALPFRLANSAVNGRASAGVSLDATSARGIHMSRLYLALEALEHEEVTLSGLGAVLQRFLASHDGLARTAFLDLSGDVLIKRPALISPRAGWKAYPCALRCRQDTQGMQAVLEVTIGYSSTCPCSAALARQSIQQAFDEDFTDMPISHEAVRTWLGSEQGILATPHSQRSQAHLSLRLADDLETLPVTALIDTVEDALGTALQTAVKRVDEQAFALANGQNLMFCEDAARRVRHALQARDEVQGFRVRIVHAESLHAHDAVAHAEWNWTPNSP

SEQ ID NO: 6641 - protein, 184 aa, Chromohalobacter salexigens
  REGION 1..184: note = tr|A0A317R5N0|A0A317R5N0_CHRSL GTP cyclohydrolase 1; OS = Chromohalobacter salexigens OX=158080 GN=folE PE=3 SV=1
MTEELADNYRHIIAGLGEDPDREGLRDTPKRAAKAMQFLTQGYGQTLESLVNGAVFESQTDEMVLIKDIELYSMCEHHLLPFIGKCHIAYLPEGRVLGLSKFARIVDMYARRMQIQENLTRQIAEAVQQVTQARGVGVIIEAQHMCMMMRGVEKQNSSMKTSVMLGAFRNNLTTRQEFLTLVHG

SEQ ID NO: 6642 - protein, 239 aa, unidentified
  source 1..239: note = Chroococcales cyanobacterium
  REGION 1..239: note = tr|A0A2G7GRU5|A0A2G7GRU5_9CHRO GTP cyclohydrolase 1; OS = Chroococcales cyanobacterium IPPAS B-1203 OX=2049454; GN = folE PE=3 SV=1
MTIGFSGGSSRSNSPLMPDSLEDKINRIATRPDRNTQNGKEAKLQPPPEDLDEKMVDAVRTMLLGVGEDPDREGLLKTPKRVVEAMHFLTSGYNQSLEELVNDAIFDEGHNEMVLVRDINFFSLCEHHMLPFMGRAHVAYIPNEKVVGLSKLARIVEMYSRRLQVQERLTRQIAEAVQTILEPQGVAVVMEATHMCMVMRGVQKPGSWTVTSAMVGVFHDEQKTREEFLNLIRHQPAFF

SEQ ID NO: 6643 - protein, 179 aa, unidentified
  source 1..179: note = Chroococcales cyanobacterium
  REGION 1..179: note = tr|A0A3N5IUK2|A0A3N5IUK2_9CHRO GTP cyclohydrolase 1 (Fragment) OS=Chroococcales cyanobacterium metabat2.561; OX = 2485785 GN=folE PE=3 SV=1
MTIASSNGLNGNLTDAIQARVTTSPDRNTHNGKTAQIHPTSDENKEQMMDAVRNILISVGEDPEREGLLKTPKRVAEAMQFLTQGYQQSLETLVNGAIFDEGHNEMVLVRDIDFFSLCEHHMLPFMGRAHVAYIPNQKVVGLSKLARIVEMYSRRLQVQERLTRQIAEAIQEILDPQGV

SEQ ID NO: 6644 - protein, 241 aa, unidentified
  source 1..241: note = Chroococcidiopsis cubana
  REGION 1..241: note = tr|A0A433W6J4|A0A433W6J4_9CYAN GTP cyclohydrolase 1; OS = Chroococcidiopsis cubana SAG 39.79 OX=388085 GN=folE; PE = 3 SV=1
MTIAASNGSNGSTNRFQSSPLNSDLVEAIQSRPDRNTHNGQKPNLQTPTEAEAHESMMEAVRALLIGVGEDPEREGLLKTPKRVAEAMRFLTSGYSQSLEELVNGAIFDEGHNEMVLVRDINFFSLCEHHMLPFMGRAHVAYIPNQKVVGLSKLARIVEMYSRRLQVQERLTRQIAEAVQEILDPQGVAVVMEATHMCMVMRGVQKPGSWTVTSAMLGVFQDEQKTREEFFNLIRHQPAFF

SEQ ID NO: 6645 - protein, 239 aa, unidentified
  source 1..239: note = Chroococcidiopsis sp.
  REGION 1..239: note = tr|A0A2S6V473|A0A2S6V473_9CYAN GTP cyclohydrolase 1; OS = Chroococcidiopsis sp. TS-821 OX=1378066 GN=folE PE=3; SV = 1
MTIGFPNGSPRSNSPLMPDSIEDTINRITTRPDRNTQNGKEAQLQPPSEELDEAMVEAVRTILLGVGEDPNREGLLKTPKRVVEAMRFLTSGYNQSLEEIVNNAIFDEGHNEMVLVRDINFFSLCEHHMLPFMGRAHVAYIPNEKVVGLSKLARIVEMYSRRLQVQERLTRQIAEAVQKILEPQGVAVVMEATHMCMVMRGVQKPGSWTVTSAMVGVFHDDQKTREEFLNLIRHQPAFF

SEQ ID NO: 6646 - protein, 241 aa, unidentified
  source 1..241: note = Chroococcidiopsis sp.
  REGION 1..241: note = tr|A0A2P8QQS9|A0A2P8QQS9_9CYAN GTP cyclohydrolase 1; OS = Chroococcidiopsis sp. CCALA 051 OX=869949 GN=folE PE=3; SV = 1
MTIAASNGSNGSTNRFQSSPLNSDLVEAIQSRPDRNTHNGQKPNLQTPTEAEAHESMMEAVRALLIGVGEDPEREGLLKTPKRVAEAMRFLTSGYSQSLEELVNGAIFDEGHNEMVLVRDINFFSLCEHHMLPFMGKAHLAYIPNQKVVGLSKLARIVEMYSRRLQVQERLTRQIAEAVQEILEPQGVAVVMEATHMCMVMRGVQKPGSWTVTSAMLGVFQDEQKTREEFFNLIRHQPAFF

SEQ ID NO: 6647 - protein, 212 aa, unidentified
  source 1..212: note = Chroococcidiopsis thermalis
  REGION 1..212: note = tr|K9U4P6|K9U4P6_CHRTP GTP cyclohydrolase 1; OS = Chroococcidiopsis thermalis (strain PCC 7203) OX=251229; GN = folE PE=3 SV=1
MTFSISPDEILKQSAIATAKSPVSEAEMMQAVRTLLLGMGEDPDREGLRDTPKRVVKALKFLTSGYRQSLDELLNGAIFHEDADEMVLVRDIDLFSSCEHHILPIIGRAHVAYIPNGKVIGLSKIARICEMYARRLQVQERLTVQIADALQGLLKPQGVAVVVEATHMCMVMRGVQKPGSWTVSSAMRGVFADDAKTRQEFMSLVRHSPAFH

SEQ ID NO: 6648 - protein, 241 aa, unidentified; identical to SEQ ID NO: 6644
  source 1..241: note = Chroococcidiopsis thermalis
  REGION 1..241: note = tr|K9TYJ1|K9TYJ1_CHRTP GTP cyclohydrolase 1; OS = Chroococcidiopsis thermalis (strain PCC 7203) OX=251229; GN = folE PE=3 SV=1

SEQ ID NO: 6649 - protein, 239 aa, unidentified
  source 1..239: note = Chroogloeocystis siderophila
  REGION 1..239: note = tr|A0A1U7HG04|A0A1U7HG04_9CHRO GTP cyclohydrolase 1; OS = Chroogloeocystis siderophila 5.2 s.c.1 OX=247279; GN = folE PE=3 SV=1
MTIGFPNGSPRSNSPLMPDSLEDTINRIATRPDRNTQNGKEAQLQPPSEELNEAMVEAVRTMLLGVGEDPEREGLIKTPKRVVEAMRFLTSGYNQSLEDLVNNAIFDEGHNEMVLVRDINFFSLCEHHMLPFMGRAHVAYIPNEKVVGLSKLARIVEMYSRRLQVQERLTRQIAEAVQTILEPQGVAVVMEATHMCMVMRGVQKPGSWTVTSAMIGVFHDEQKTREEFLNLIRHQPAFF

SEQ ID NO: 6650 - protein, 222 aa, unidentified
  source 1..222: note = Chryseobacterium angstadtii
  REGION 1..222: note = tr|A0A0J7IJ56|A0A0J7IJ56_9FLAO GTP cyclohydrolase 1; OS = Chryseobacterium angstadtii OX=558151 GN=folE PE=3 SV=1
MVDFTDNDDDIFTGKEHTPIRKDAFDKSPQEKIEKITELFGEIMETLGMDMTDDSLKDSPRRVAKMYVNEIFGGLLPENKPGISTFSNKYKYRQMLVEKDITVYSFCEHHFLPIIGRAHVAYISNGEVIGLSKINRIVDYYAKRPQVQERLTMQIVDALKEALGTKDVACIIDAKHLCVNCRGIKDTASSTITAELSGIFRTNPITRQEFLHYVGSHAKLDY

SEQ ID NO: 6651 - protein, 221 aa, Chryseobacterium antarcticum
  REGION 1..221: note = tr|A0A448NRT3|A0A448NRT3_9FLAO GTP cyclohydrolase 1; OS = Chryseobacterium antarcticum OX=266748 GN=folE PE=3 SV=1
MNENLDNDDDVFTGKEHTPLRPDAFEKSPAEKIEIIQKHFHEIMETLGMDMTDDSLKDSPKRVAKMYVNEIFGGLLPENTPRISTFSNKYKYRQMLVEKDITVYSFCEHHFLPIIGRAHVAYISNGEVIGLSKINRVVDYYAKRPQVQERLTMQIVEALKGALGTNDVACIIEAKHLCVNCRGIKDTASSTTTAELSGLFRTNPITRQEFLHYVGSRSSLE

SEQ ID NO: 6652 - protein, 222 aa, Chryseobacterium aquaticum
  REGION 1..222: note = tr|A0A0Q3SGG9|A0A0Q3SGG9_9FLAO GTP cyclohydrolase 1; OS = Chryseobacterium aquaticum OX=452084 GN=folE PE=3 SV=1
MVDFTDNDDDIFIGKEHTPIRENAFEKSPQEKIEKITELFGEIMETLGLDMTDDSLKDSPKRVAKMYVNEIFGGLLPENKPGISTFSNKYKYRQMLVEKDITVYSFCEHHFLPIIGRAHVAYISNGDVIGLSKINRIVDYYAKRPQVQERLTMQIVDALKEALGTKDVACIIDAKHLCVNCRGIKDTASSTITAELSGIFRTNPITRQEFLHYVGSHAKLDY

SEQ ID NO: 6653 - protein, 221 aa, Chryseobacterium aquifrigidense
  REGION 1..221: note = tr|A0A543ECY3|A0A543ECY3_9FLAO GTP cyclohydrolase 1; OS = Chryseobacterium aquifrigidense OX=558021 GN=folE PE=3; SV = 1
MVDFTDNDDDIFTGKEHTPIREDAFDKSPQEKIEKITELFGEIMETLGMDMTDDSLKDSPRRVAKMYVNEIFGGLLPENKPGISTFSNKYKYRQMLVEKDITVYSFCEHHFLPIIGRAHVAYISNGEVIGLSKINRIVDYYAKRPQVQERLTMQIVDALKEALGTKDVACIIDAKHLCVNCRGIKDTASSTITAELSGIFRTNPITRQEFLHYVGSHAKLD

SEQ ID NO: 6654 - protein, 221 aa, unidentified
  source 1..221: note = Chryseobacterium arachidiradicis
  REGION 1..221: note = tr|A0A420DB98|A0A420DB98_9FLAO GTP cyclohydrolase 1; OS = Chryseobacterium arachidiradicis OX=1617282 GN=folE; PE = 3 SV=1
MEQFPDNDDDLFTGKDHTPLRKDAFDLSPDEKVKKIEQLFGEIMQTLGLDMTDDSLKDSPKRVAKMYVNEIFGGLLPENKPGVSTFKNQYKYRQMLVEKDITVYSFCEHHFLPIIGKAHVAYISNGEVIGLSKINRIVDYYAKRPQVQERLTMQIVDALKEALGTNNVACIIDAKHLCVNCRGIKDTASSTITAELSGIFRTNPITRQEFLHYVGSHAKFD

SEQ ID NO: 6655 - protein, 221 aa, unidentified
  source 1..221: note = Chryseobacterium arachidis
  REGION 1..221: note = tr|A0A1M4WT29|A0A1M4WT29_9FLAO GTP cyclohydrolase 1; OS = Chryseobacterium arachidis OX=1416778 GN=folE PE=3 SV=1
MVDFTDNDDDIFTGKEHTPIRKDAFDKSPEEKIEKITELFGEIMETLGMDMTDDSLKDSPRRVAKMYVNEIFGGLLPENKPGISTFSNKYKYRQMLVEKDITVYSFCEHHFLPIIGRAHVAYISNGEVIGLSKINRIVDYYAKRPQVQERLTMQIVDALKEALGTKDVACIIDAKHLCVNCRGIKDTASSTITAELSGIFRTNPITRQEFLHYVGSHAKLD

SEQ ID NO: 6656 - protein, 222 aa, Chryseobacterium arthrosphaerae
  REGION 1..222: note = tr|A0A1B8ZJJ5|A0A1B8ZJJ5_9FLAO GTP cyclohydrolase 1; OS = Chryseobacterium arthrosphaerae OX=651561 GN=folE PE=3; SV = 1
MVDFTDNDDDIFTGKEHTPIRKDAFDKSPQEKIEKITELFGEIMETLGLDMTDDSLKDSPKRVAKMYVNEIFGGLLPENKPGISTFSNKYKYRQMLVEKDITVYSFCEHHFLPIIGRAHVAYISNGEVIGLSKINRIVDYYAKRPQVQERLTMQVVDALKEALGTKDVACIIDAKHLCVNCRGIKDTASSTITAELSGIFRTNPITRQEFLHYVGSHAKLDY

SEQ ID NO: 6657 - protein, 221 aa, unidentified
  source 1..221: note = Chryseobacterium artocarpi
  REGION 1..221: note = tr|A0A1B8ZE50|A0A1B8ZE50_9FLAO GTP cyclohydrolase 1; OS = Chryseobacterium artocarpi OX=1414727 GN=folE PE=3 SV=1
MVDFTDNDDDIFTGKEHTPIREDAFDKSPQEKIEKITELFGEIMETLGLDMTDDSLKDSPKRVAKMYVNEIFGGLLPENKPGISTFSNKYKYRQMLVEKDITVYSFCEHHFLPIIGRAHVAYISNGEVIGLSKINRIVDYYAKRPQVQERLTMQIVDALKEALGTKDVACIIDAKHLCVNCRGIKDTASSTITAELSGIFRTNPITRQEFLHYVGSHAKLD

SEQ ID NO: 6658 - protein, 222 aa, Chryseobacterium balustinum
  REGION 1..222: note = tr|A0A3G6TSE9|A0A3G6TSE9_9FLAO GTP cyclohydrolase 1; OS = Chryseobacterium balustinum OX=246 GN=folE PE=3 SV=1
MVDFTDNDDDIFTGKEHTPIREDAFEKSPQEKIEKITELFGEIMETLGLDMTDDSLKDSPKRVAKMYVNEIFGGLLPENKPGISTFSNKYKYRQMLVEKDITVYSFCEHHFLPIIGRAHVAYISNGDVIGLSKINRIVDYYAKRPQVQERLTMQIVDALKDALGTKNVACIIDAKHLCVNCRGIKDTASSTITAELSGIFRTNPITRQEFLHYVGSHAKLDY

SEQ ID NO: 6659 - protein, 221 aa, unidentified; identical to SEQ ID NO: 6657
  source 1..221: note = Chryseobacterium bernardetii
  REGION 1..221: note = tr|A0A3G6TD70|A0A3G6TD70_9FLAO GTP cyclohydrolase 1; OS = Chryseobacterium bernardetii OX=1241978 GN=folE PE=3; SV = 1

SEQ ID NO: 6660 - protein, 221 aa, Chryseobacterium bovis
  REGION 1..221: note = tr|A0A1U7PXH5|A0A1U7PXH5_9FLAO GTP cyclohydrolase 1; OS = Chryseobacterium bovis DSM 19482 OX=1121284 GN=folE; PE = 3 SV=1
MEDFPDNDDDLFTGKDHTPLRKDAFDLKPEEKVKKIEQLFGEIMQTLGLDMTDDSLKDSPKRVAKMYVNEIFGGLLPENKPGISTFKNQYKYRQMLVEKDITVYSFCEHHFLPIIGKAHVAYISNGEVIGLSKINRIVDYYAKRPQVQERLTMQIVEALKEALGTKNVACIIDAKHLCVNCRGIKDTASSTITAELSGIFRTNPITRQEFLHYVGSHAKFD

SEQ ID NO: 6661 - protein, 222 aa, unidentified
  source 1..222: note = Chryseobacterium carnipullorum
  REGION 1..222: note = tr|A0A1M7N7T4|A0A1M7N7T4_9FLAO GTP cyclohydrolase 1; OS = Chryseobacterium carnipullorum OX=1124835 GN=folE PE=3; SV = 1
MVDFTDNDDDIFTGKEHTPIRKDAFDKSPQEKIEKITELFGEIMETLGMDMTDDSLKDSPKRVAKMYVNEIFGGLLPENKPGISTFSNKYKYRQMLVEKDITVYSFCEHHFLPIIGRAHVAYISNGEVIGLSKINRIVDYYAKRPQVQERLTMQIVDALKEALGTKDVACIIDAKHLCVNCRGIKDTASSTITAELSGIFRTNPITRQEFLHYVGSHAKLDY

SEQ ID NO: 6662 - protein, 221 aa, unidentified
  source 1..221: note = Chryseobacterium carnis
  REGION 1..221: note = tr|A0A3G8XMF0|A0A3G8XMF0_9FLAO GTP cyclohydrolase 1; OS = Chryseobacterium carnis OX=1241979 GN=folE PE=3 SV=1
MNQDIDFDDDVFTGKEHTPLRKDAFDKSPEEKIEIIQKHFHAIMETLGMDMTDDSLKDSPKRVAKMYVNEIFGGLLPENNPRISTFSNKYKYRQMLVEKDITVYSFCEHHFLPIIGRAHVAYISNGEVIGLSKINRVVDYYAKRPQVQERLTMQIVDALKKALGTNDVACIIEAKHLCVNCRGIKDTASSTTTAELSGLFRTNAITRQEFLHYVGNRSSLD

SEQ ID NO: 6663 - protein, 221 aa, Chryseobacterium chaponense
  REGION 1..221: note = tr|A0A1N7J422|A0A1N7J422_9FLAO GTP cyclohydrolase 1; OS = Chryseobacterium chaponense OX=713588 GN=folE PE=3 SV=1
MSKNFDNDDDLFTGKGFTPLRDDAFEKSPEEKIEIIQKHFHQIMETLGMDMTDDSLKDSPKRVAKMYVNEIFGGLLPENNPRISTFSNKYKYRQMLVEKDITVYSFCEHHFLPIIGRAHVAYISNGEVIGLSKINRVVDYYAKRPQVQERLTMQIVEALKVALGTKDVACIIEAKHLCVNCRGIKDTASSTTTAELSGLFRTNSITRQEFLHYVGNRSNLE

SEQ ID NO: 6664 - protein, 221 aa, unidentified
  source 1..221: note = Chryseobacterium contaminans
  REGION 1..221: note = tr|A0A1M6WPN4|A0A1M6WPN4_9FLAO GTP cyclohydrolase 1; OS = Chryseobacterium contaminans OX=1423959 GN=folE PE=3; SV = 1
MVDFTDNDDDIFTGKEHTPIREDAFDKSPQEKIEKITELFGEIMETLGLDMTDDSLKDSPKRVAKMYVNEIFGGLLPENKPGISTFSNKYKYRQMLVEKDITVYSFCEHHFLPIIGRAHVAYISNGEVIGLSKINRIVDYYAKRPQVQERLTMQIVEALKEALGTKNVACIIDAKHLCVNCRGIKDTASSTITAELSGIFRTNPITRQEFLHYVGSHAKLD

SEQ ID NO: 6665 - protein, 221 aa, Chryseobacterium culicis; identical to SEQ ID NO: 6653
  REGION 1..221: note = tr|A0A2S9CT69|A0A2S9CT69_9FLAO GTP cyclohydrolase 1; OS = Chryseobacterium culicis OX=680127 GN=folE PE=3 SV=1

SEQ ID NO: 6666 - protein, 221 aa, Chryseobacterium culicis
  REGION 1..221: note = tr|A0A1H6HK36|A0A1H6HK36_9FLAO GTP cyclohydrolase 1; OS = Chryseobacterium culicis OX=680127 GN=folE PE=3 SV=1
MVDFTDNDDDIFTGKEHTPIREDAFDKSPQEKIEKITELFGEIMQTLGLDMTDDSLKDSPRRVAKMYVNEIFGGLLPENKPGISTFSNKYKYRQMLVEKDITVYSFCEHHFLPIIGRAHVAYISNGEVIGLSKINRIVDYYAKRPQVQERLTMQIVDALKEALGTKDVACIIDAKHLCVNCRGIKDTASSTITAELSGIFRTNPITRQEFLHYVGSHAKLD

SEQ ID NO: 6667 - protein, 221 aa, Chryseobacterium daecheongense
  REGION 1..221: note = tr|A0A3N0VS34|A0A3N0VS34_9FLAO GTP cyclohydrolase 1; OS = Chryseobacterium daecheongense OX=192389 GN=folE PE=3; SV = 1
MVDFTDNDDDIFTGKEHTPIRKDAFDKSPEEKIEKITELFGEIMYTLGMDMTDDSLKDSPKRVAKMYVNEIFGGLLPENKPGISTFSNKYKYRQMLVEKDITVYSFCEHHFLPIIGKAHVAYISNGEVIGLSKINRIVDYYAKRPQVQERLTMQIVDALKEALGTKDVACIIDAKHLCVNCRGIKDTASSTITAELSGIFRTNPITRQEFLHYVGSHAKFD

SEQ ID NO: 6668 - protein, 221 aa, Chryseobacterium defluvii; identical to SEQ ID NO: 6667
  REGION 1..221: note = tr|A0A495S8C4|A0A495S8C4_9FLAO GTP cyclohydrolase 1; OS = Chryseobacterium defluvii OX=160396 GN=folE PE=3 SV=1

SEQ ID NO: 6669 - protein, 222 aa, Chryseobacterium elymi; identical to SEQ ID NO: 6661
  REGION 1..222: note = tr|A0A3D9DJ79|A0A3D9DJ79_9FLAO GTP cyclohydrolase 1; OS = Chryseobacterium elymi OX=395936 GN=folE PE=3 SV=1

SEQ ID NO: 6670 - protein, 221 aa, Chryseobacterium flavum
  REGION 1..221: note = tr|A0A3D9CSF8|A0A3D9CSF8_9FLAO GTP cyclohydrolase 1; OS = Chryseobacterium flavum OX=415851 GN=folE PE=3 SV=1
MVDFTDNDDDIFTGKEHTPIRKDAFDKSPQEKIEKITELFGEIMETLGLDMTDDSLKDSPKRVAKMYVNEIFGGLLPENKPGISTFSNKYKYRQMLVEKDITVYSFCEHHFLPIIGRAHVAYISNGEVIGLSKINRIVDYYAKRPQVQERLTMQIVDALKEALGTKDVACIIDAKHLCVNCRGIKDTASSTITAELSGIFRTNPITRQEFLHYVGSHAKLD

SEQ ID NO: 6671 - protein, 222 aa, Chryseobacterium formosense
  REGION 1..222: note = tr|A0A085Z300|A0A085Z300_9FLAO GTP cyclohydrolase 1; OS = Chryseobacterium formosense OX=236814 GN=folE PE=3 SV=1
MVDFTDNDDDIFTGKEHTPIRDDAFEKSPEEKIEKITGLFAEIMETLGLDMTDDSLKDSPKRVAKMYVNEIFGGLLPENKPGISTFSNKYKYRQMLVEKDITVYSFCEHHFLPIIGRAHVAYISNGEVIGLSKINRIVDYYAKRPQVQERLTMQIVNALKEALGTKDVACIIDAKHLCVNCRGIKDTASSTITAELSGIFRTNPITRQEFLHYVGSHAKLDY

SEQ ID NO: 6672 - protein, 221 aa, unidentified
  source 1..221: note = Chryseobacterium frigidisoli
  REGION 1..221: note = tr|A0A1I3GGX9|A0A1I3GGX9_9FLAO GTP cyclohydrolase 1; OS = Chryseobacterium frigidisoli OX=1125876 GN=folE PE=3; SV = 1
MQDFLDNDDDVFTGKEHTPLREDAFDKLPAEKIEIIQHHFGKIMETLGLDMTDDSLKDSPKRVAKMYVNEIFGGLLPENKPTISSFSNKYKYRQMLVEKDITVYSFCEHHFLPIIGRAHVAYISNGEVIGLSKINRIVDYYSKRPQVQERLTMQIVDALKEALNTIDVACIIDAKHLCVNCRGIKDTASSTITAELSGIFRSNPITRQEFLHYVGSHAKID

SEQ ID NO: 6673 - protein, 221 aa, unidentified
  source 1..221: note = Chryseobacterium gallinarum
  REGION 1..221: note = tr|A0A0G3M7I9|A0A0G3M7I9_9FLAO GTP cyclohydrolase 1; OS = Chryseobacterium gallinarum OX=1324352 GN=folE PE=3 SV=1
MVDFTDNDDDIFTGKEHTPIREDAFDKSPQEKIEKITELFGEIMETLGLDMTDDSLKDSPKRVAKMYVNEIFGGLLPENKPGISTFSNKYKYRQMLVEKDITVYSFCEHHFLPIIGRAHVAYISNGEVIGLSKINRIVDYYAKRPQVQERLTMQIVAALKEALGTKDVACIIDAKHLCVNCRGIKDTASSTITAELSGIFRTNPITRQEFLHYVGSHAKLD

SEQ ID NO: 6674 - protein, 221 aa, Chryseobacterium gambrini; identical to SEQ ID NO: 6136
  REGION 1..221: note = tr|A0A1N7QEW7|A0A1N7QEW7_9FLAO GTP cyclohydrolase 1; OS = Chryseobacterium gambrini OX=373672 GN=folE PE=3 SV=1

SEQ ID NO: 6675 - protein, 222 aa, unidentified
  source 1..222: note = Chryseobacterium geocarposphaerae
  REGION 1..222: note = tr|A0A2M9C136|A0A2M9C136_9FLAO GTP cyclohydrolase 1; OS = Chryseobacterium geocarposphaerae OX=1416776 GN=folE; PE = 3 SV=1
MVDFTDNDDDIFTGKEHTPIRKDAFDKSPEEKVEKITELFGEIMETLGLDMTDDSLKDSPKRVAKMYVNEIFGGLLPENKPGISTFSNKYKYRQMLVEKDITVYSFCEHHFLPIIGRAHVAYISNGEVIGLSKINRIVDYYAKRPQVQERLTMQIVDALKEALGTKDVACIIDAKHLCVNCRGIKDTASSTITAELSGIFRTNPITRQEFLHYVGSHAKLDY

SEQ ID NO: 6676 - protein, 221 aa, unidentified
  source 1..221: note = Chryseobacterium glaciei
  REGION 1..221: note = tr|A0A172XTC8|A0A172XTC8_9FLAO GTP cyclohydrolase 1; OS = Chryseobacterium glaciei OX=1685010 GN=folE PE=3 SV=1
MVDFTDNDDDIFTGKEHTPIREDAFDKSPQEKIEKITELFGEIMETLGLDMTDDSLKDSPTRVAKMYVNEIFGGLLPENKPGISTFSNKYKYSQMLVEKDITVYSFCEHHFLPIIGRAHVAYISNGEVIGLSKINRIVDYYAKRPQVQERLTMQIVNALKEALGTKNVACIIDAKHLCVNCRGIKDTASSTITAELSGIFKTNPITRQEFLHYVGSHAKLD

SEQ ID NO: 6677 - protein, 221 aa, Chryseobacterium gleum
  REGION 1..221: note = tr|A0A4U8WDD2|A0A4U8WDD2_9FLAO GTP cyclohydrolase 1; OS = Chryseobacterium gleum OX=250 GN=folE PE=3 SV=1
MVDFTDNDDDIFTGKEHTPIREDAFEKSPEEKIEKITALFGEIMETLGLDMTDDSLKDSPRRVAKMYVNEIFGGLLPENKPGISTFSNKYKYRQMLVEKDITVYSFCEHHFLPIIGRAHVAYISNGEVIGLSKINRIVDYYAKRPQVQERLTMQIVNALKEALGTKDVACIIDAKHLCVNCRGIKDTASSTITAELSGIFRTNPITRQEFLHYVGSHAKLD

SEQ ID NO: 6678 - protein, 221 aa, Chryseobacterium gleum
  REGION 1..221: note = tr|A0A3S4M314|A0A3S4M314_9FLAO GTP cyclohydrolase 1; OS = Chryseobacterium gleum OX=250 GN=folE PE=3 SV=1
MVDFTDNDDDIFTGKEHTPIREDAFDKSPQEKIEKITELFGEIMETLGLDMTDDSLKDSPRRVAKMYVNEIFGGLLPENKPGISTFSNKYKYRQMLVEKDITVYSFCEHHFLPIIGRAHVAYISNGEVIGLSKINRIVDYYAKRPQVQERLTMQIVDALKEALGTKDVACIIDAKHLCVNCRGIKDTASSTITAELSGIFRTNPITRQEFLHYVGSHAKLD

SEQ ID NO: 6679 - protein, 222 aa, Chryseobacterium greenlandense
  REGION 1..222: note = tr|A0A101CCS6|A0A101CCS6_9FLAO GTP cyclohydrolase 1; OS = Chryseobacterium greenlandense OX=345663 GN=folE PE=3; SV = 1
MVDFTDNDDDIFTGKEHTPIRENAFEKSPQEKIEKITELFGEIMETLGLDMTDDSLKDSPKRVAKMYVNEIFGGLLPENKPGISTFSNKYKYRQMLVEKDITVYSFCEHHFLPIIGRAHVAYISNGDVIGLSKINRIVDYYAKRPQVQERLTMQIVDALKEALGTKDVACIIDAKHLCVNCRGIKDTASSTITAELSGIFRTNPITRQEFLHYVGSHAKLDY

SEQ ID NO: 6680 - protein, 221 aa, Chryseobacterium hagamense
  REGION 1..221: note = tr|A0A511YIT8|A0A511YIT8_9FLAO GTP cyclohydrolase 1; OS = Chryseobacterium hagamense OX=395935 GN=folE2 PE=3 SV=1
MVDFTDNDDDIFTGKEHTPIREDAFDKSPEEKIEKITELFGEIMQTLGMDMTDDSLKDSPRRVAKMYVNEIFGGLLPENKPGISTFSNKYKYRQMLVEKDITVYSFCEHHFLPIIGRAHVAYISNGDVIGLSKINRIVDYYAKRPQVQERLTMQIVDALKEALGTKDVACIIDAKHLCVNCRGIKDTASSTITAELSGIFRTNPITRQEFLHYVGSHAKLD

SEQ ID NO: 6681 - protein, 221 aa, Chryseobacterium haifense
  REGION 1..221: note = tr|A0A2D0A6H6|A0A2D0A6H6_9FLAO GTP cyclohydrolase 1; OS = Chryseobacterium haifense DSM 19056 OX=1450526 GN=folE; PE = 3 SV=1
MNQDIDNDDDLFTGKDHTPLRSDAFEKTPQEKIEIIQHHFHQIMETLGMDMNDDSLKDSPKRVAKMYVNEIFGGLLPENKPGISTFSNKYKYRQMLVEKDITVYSFCEHHFLPIIGKAHVAYISNGEVIGLSKINRLVDYYAKRPQVQERLTMQIVDALKQALGTKDVACIIDAKHLCVNCRGIKDTASSTITAELSGIFRTNPITRQEFLHYVGSHAKFD

SEQ ID NO: 6682 - protein, 221 aa, Chryseobacterium haifense
  REGION 1..221: note = tr|A0A3G6SWU5|A0A3G6SWU5_9FLAO GTP cyclohydrolase 1; OS = Chryseobacterium haifense OX=421525 GN=folE PE=3 SV=1
MNQDIDNDDDLFTGKDHTPLRSDAFEKTPQEKIEIIQHHFHQIMETLGMDMNDDSLKDSPKRVAKMYVNEIFGGLLPENKPGISTFSNKYKYRQMLVEKDITVYSFCEHHFLPIIGKAHVAYISNGEVIGLSKINRIVDYYAKRPQVQERLTMQIVDALKQALGTKDVACIIDAKHLCVNCRGIKDTASSTITAELSGIFRTNPITRQEFLHYVGSHAKFD

SEQ ID NO: 6683 - protein, 221 aa, unidentified
  source 1..221: note = Chryseobacterium halperniae
  REGION 1..221: note = tr|A0A085BIK2|A0A085BIK2_9FLAO GTP cyclohydrolase 1; OS = Chryseobacterium halperniae OX=421072 GN=folE PE=3 SV=1
MEHIPDNDDDLFTGKDHTPLRPDAFDLKPEEKIKKIEGLFGEIMETLGLDMTDDSLKDSPKRVAKMYVNEIFGGLLPENKPGISTFKNQYKYRQMLVEKDITVYSFCEHHFLPIIGKAHVAYISSGEVIGLSKINRIVDYYAKRPQVQERLTMQIVDALKEALGTNNVACIIDAKHLCVNCRGIKDTASSTITAELSGIFRTNPITRQEFLHYVGSHAKFD

SEQ ID NO: 6684 - protein, 221 aa, Chryseobacterium hispanicum
  REGION 1..221: note = tr|A0A3D9D3J1|A0A3D9D3J1_9FLAO GTP cyclohydrolase 1; OS = Chryseobacterium hispanicum OX=358687 GN=folE PE=3 SV=1
MEHFPDNDDDLFTGKDHTPLRADAFELKPEEKVKKIEGLFSEIMHTLGLDMTDDSLKDSPKRVAKMYVNEIFGGLLPENKPGVSTFKNQYKYRQMLVEKDITVYSFCEHHFLPIIGKAHVAYISNGEVIGLSKINRIVDYYAKRPQVQERLTMQIVEAMKEALGTENVACIIDAKHLCVNCRGIKDTASSTITAELSGIFRKNPTTRREFLHYVGTHMKLD

SEQ ID NO: 6685 - protein, 221 aa, Chryseobacterium hominis
  REGION 1..221: note = tr|A0A1H6J5K5|A0A1H6J5K5_9FLAO GTP cyclohydrolase 1; OS = Chryseobacterium hominis OX=420404 GN=folE PE=3 SV=1
MEQFPDNDDDVFTGKEHTPLRNDAFELDPDKKIRKIEGLFAEIMHTLGLDMTDDSLKDSPKRVAKMYVNEIFGGLLPENKPAISTFKNQYKYRQMLVEKDITVYSFCEHHFLPIIGKAHVAYISNGEVIGLSKINRIVDYYAKRPQVQERLTMQIVDALKDALGTNNVACIIDAKHLCVNCRGIKDTASSTITAELSGIFRTNPITRQEFLHYVGSHAKFD

SEQ ID NO: 6686 - protein, 221 aa, Chryseobacterium humi
  REGION 1..221: note = tr|A0A1H5W2U9|A0A1H5W2U9_9FLAO GTP cyclohydrolase 1; OS = Chryseobacterium humi OX=493375 GN=folE PE=3 SV=1
MQDFLDNDDDVFTGKEHTPLREDAFEKLPSEKIEIIQHHFGKIMETLGLDMTDDSLKDSPKRVAKMYVNEIFGGLLPENKPTISSFSNKYKYRQMLVEKDITVYSFCEHHFLPIIGRAHVAYISNGEVIGLSKINRIVDYYAKRPQVQERLTMQIVDALKEALNTTDVACIIDAKHLCVNCRGIKDTASSTITAELSGIFRSNPITRQEFLHYVGSHTKLD

SEQ ID NO: 6687 - protein, 221 aa, Chryseobacterium hungaricum
  REGION 1..221: note = tr|A0A1G7HD33|A0A1G7HD33_9FLAO GTP cyclohydrolase 1; OS = Chryseobacterium hungaricum OX=454006 GN=folE PE=3 SV=1
MEHFPDNDDDLFTGKDHTPLRPDAFELGPEDKVKKIEGLFSEIMHTLGLDMTDDSLKDSPKRVAKMYVNEIFGGLLPENKPGVSTFKNQYKYRQMLVEKDITVYSFCEHHFLPIIGKAHVAYISNGEVIGLSKINRIVDYYAKRPQVQERLTMQIVDALKEALGTKNVACIIDAKHLCVNCRGIKDTASSTITAELSGIFRTNPITRQEFLHYVGSHAKFD

SEQ ID NO: 6688 - protein, 221 aa, Chryseobacterium indologenes; identical to SEQ ID NO: 6678
  REGION 1..221: note = tr|A0A411DN92|A0A411DN92_9FLAO GTP cyclohydrolase 1; OS = Chryseobacterium indologenes OX=253 GN=folE PE=3 SV=1

SEQ ID NO: 6689 - protein, 221 aa, Chryseobacterium indologenes
  REGION 1..221: note = tr|A0A1Z3W7L7|A0A1Z3W7L7_9FLAO GTP cyclohydrolase 1; OS = Chryseobacterium indologenes OX=253 GN=folE PE=3 SV=1
MVDFTDNDDDIFTGKEHTPIRDDAFDKSPQEKIEKITELFGEIMETLGLDMTDDSLKDSPKRVAKMYVNEIFGGLLPENKPGISTFSNKYKYRQMLVEKDITVYSFCEHHFLPIIGRAHVAYISNGEVIGLSKINRIVDYYAKRPQVQERLTMQIVEALKEALGTKNVACIIDAKHLCVNCRGIKDTASSTITAELSGIFRTNPITRQEFLHYVGSHAKLD

SEQ ID NO: 6690 - protein, 222 aa, Chryseobacterium indoltheticum
  REGION 1..222: note = tr|A0A381FJQ4|A0A381FJQ4_9FLAO GTP cyclohydrolase 1; OS = Chryseobacterium indoltheticum OX=254 GN=folE PE=3 SV=1
MVDFTDNDDDIFTGKEHTPIREDAFEKSPQEKIEKITKLFGEIMETLGLDMTDDSLKDSPKRVAKMYVNEIFGGLLPENKPGISTFSNKYKYRQMLVEKDITVYSFCEHHFLPIIGRAHVAYISNGDVIGLSKINRIVDYYAKRPQVQERLTMQIVDALKDALGTKNVACIIDAKHLCVNCRGIKDTASSTITAELSGIFRTNPITRQEFLHYVGSHAKLDY

SEQ ID NO: 6691 - protein, 222 aa, Chryseobacterium indoltheticum; identical to SEQ ID NO: 6658
  REGION 1..222: note = tr|A0A381F7K5|A0A381F7K5_9FLAO GTP cyclohydrolase 1; OS = Chryseobacterium indoltheticum OX=254 GN=folE PE=3 SV=1

SEQ ID NO: 6692 - protein, 221 aa, Chryseobacterium jejuense; identical to SEQ ID NO: 6664
  REGION 1..221: note = tr|A0A2X2X2I8|A0A2X2X2I8_9FLAO GTP cyclohydrolase 1; OS = Chryseobacterium jejuense OX=445960 GN=folE PE=3 SV=1

SEQ ID NO: 6693 - protein, 221 aa, Chryseobacterium jeonii
  REGION 1..221: note = tr|A0A0C1F4T2|A0A0C1F4T2_9FLAO GTP cyclohydrolase 1; OS = Chryseobacterium jeonii OX=266749 GN=folE PE=3 SV=1
MSKNFDNDDDLFTGKGYTPLRDDAFEKSPEEKIEIIQKHFHEIMETLGMDMTDDSLKDSPRRVAKMYVNEIFGGLLPENNPRISTFSNKYKYRQMLVEKDITVYSFCEHHFLPIIGRAHVAYISNGEVIGLSKINRIVDYYAKRPQVQERLTMQIVEALKVALGTKDVACIIEAKHLCVNCRGIKDTASSTTTAELSGLFRTNPITRQEFLHYVGSRSNLD

SEQ ID NO: 6694 - protein, 222 aa, Chryseobacterium joostei
  REGION 1..222: note = tr|A0A1N7IB78|A0A1N7IB78_9FLAO GTP cyclohydrolase 1; OS = Chryseobacterium joostei OX=112234 GN=folE PE=3 SV=1
MVDFTDNDDDIFTGKEHTPIRKDAFDKSPQEKIEKITELFGEIMETLGLDMTDDSLKDSPKRVAKMYVNEIFGGLLPENKPGISTFSNKYKYRQMLVEKDITVYSFCEHHFLPIIGRAHVAYISNGEVIGLSKINRIVDYYAKRPQVQERLTMQIVDALKEALGTKDVACIIDAKHLCVNCRGIKDTASSTITAELSGIFRTNPITRQEFLHYVGSHAKLDY

SEQ ID NO: 6695 - protein, 221 aa, Chryseobacterium koreense
  REGION 1..221: note = tr|A0A0J7J0H9|A0A0J7J0H9_9FLAO GTP cyclohydrolase 1; OS = Chryseobacterium koreense CCUG 49689 OX=1304281 GN=folE; PE = 3 SV=1
MNPEFENDDDLFTGKDHTPLRKDAFEKSPAEKIEIIQEHFRAIMETLGMDMSDDSLKDSPKRVAKMYVNEIFGGLLPENKPGISTFSNKYKYRQMLVEKDITVYSFCEHHFLPIIGKAHVAYISNGEVIGLSKINRIVDYYAKRPQVQERLTMQIVDALKEALGTKDVACIIDAKHLCVNCRGIKDTASSTITAELSGIFRTNPITRQEFLHYVGSHAKFD

SEQ ID NO: 6696 - protein, 222 aa, unidentified; identical to SEQ ID NO: 6650
  source 1..222: note = Chryseobacterium kwangjuense
  REGION 1..222: note = tr|A0A135WDK7|A0A135WDK7_9FLAO GTP cyclohydrolase 1; OS = Chryseobacterium kwangjuense OX=267125 GN=folE PE=3 SV=1

SEQ ID NO: 6697 - protein, 221 aa, unidentified; identical to SEQ ID NO: 6664
  source 1..221: note = Chryseobacterium lactis
  REGION 1..221: note = tr|A0A3G6RV52|A0A3G6RV52_9FLAO GTP cyclohydrolase 1; OS = Chryseobacterium lactis OX=1241981 GN=folE PE=3 SV=1

SEQ ID NO: 6698 - protein, 222 aa, Chryseobacterium lathyri; identical to SEQ ID NO: 6661
  REGION 1..222: note = tr|A0A511YBU7|A0A511YBU7_9FLAO GTP cyclohydrolase 1; OS = Chryseobacterium lathyri OX=395933 GN=folE2 PE=3 SV=1

SEQ ID NO: 6699 - protein, 221 aa, unidentified; identical to SEQ ID NO: 6676
  source 1..221: note = Chryseobacterium limigenitum
  REGION 1..221: note = tr|A0A1K2IGB6|A0A1K2IGB6_9FLAO GTP cyclohydrolase 1; OS = Chryseobacterium limigenitum OX=1612149 GN=folE PE=3; SV = 1

SEQ ID NO: 6700 - protein, 222 aa, Chryseobacterium luteum
  REGION 1..222: note = tr|A0A085ZVG7|A0A085ZVG7_9FLAO GTP cyclohydrolase 1; OS = Chryseobacterium luteum OX=421531 GN=folE PE=3 SV=1
MVDFTDNDDDIFTGKEHTPIRKDAFDKSPQEKIEKITELFGEIMETLGMDMTDDSLKDSPKRVAKMYVNEIFGGLLPENKPGISTFSNKYKYRQMLVEKDITVYSFCEHHFLPIIGRAHVAYISNGEVIGLSKINRIVDYYAKRPQVQERLTMQIVDALKEALGTKDVACIIDAKHLCVNCRGIKDTSSSTITAELSGIFRTNPITRQEFLHYVGSHAKLDN

SEQ ID NO: 6701 - protein, 221 aa, Chryseobacterium molle
  REGION 1..221: note = tr|A0A1M6P0N0|A0A1M6P0N0_9FLAO GTP cyclohydrolase 1; OS = Chryseobacterium molle OX=216903 GN=folE PE=3 SV=1
MEQFPDNDDDVFTGKEHTPLRKDAFDLQPEEKINKIENLFSEIMHTLGLDMTDDSLKDSPRRVAKMYVNEIFGGLLPENKPSISTFKNQYKYRQMLVEKDITVYSFCEHHFLPIIGKAHVAYISNGEVIGLSKINRIVDYYAKRPQVQERLTMQIVDALKEALGTKNVACIIDAKHLCVNCRGIKDTASSTITAELSGIFRTNPITRQEFLHYVGSHAKFD

SEQ ID NO: 6702 - protein, 221 aa, unidentified; identical to SEQ ID NO: 6136
  source 1..221: note = Chryseobacterium mucoviscidosis
  REGION 1..221: note = tr|A0A202C6F9|A0A202C6F9_9FLAO GTP cyclohydrolase 1; OS = Chryseobacterium mucoviscidosis OX=1945581 GN=folE PE=3; SV = 1

SEQ ID NO: 6703 - protein, 221 aa, unidentified; identical to SEQ ID NO: 6664
  source 1..221: note = Chryseobacterium nakagawai
  REGION 1..221: note = tr|A0A3G6QHL1|A0A3G6QHL1_9FLAO GTP cyclohydrolase 1; OS = Chryseobacterium nakagawai OX=1241982 GN=folE PE=3 SV=1

SEQ ID NO: 6704 - protein, 221 aa, unidentified
  source 1..221: note = Chryseobacterium nematophagum
  REGION 1..221: note = tr|A0A3M7TBQ9|A0A3M7TBQ9_9FLAO GTP cyclohydrolase 1; OS = Chryseobacterium nematophagum OX=2305228 GN=folE PE=3; SV = 1
MVDLTDNDDDIFTGKEHTPIREDAFDKSPEEKIEKITQLFGEIMETLGLDMTDDSLKDSPKRVAKMYVNEIFGGLLPENKPGVSTFSNKYRYSQMLVEKDITVYSFCEHHFLPIIGRAHVAYISNGEVIGLSKINRIVDYYAKRPQVQERLTMQIVNALKEALGTKNVACIIDAKHLCVNCRGIKDTASSTITAELSGIFKTNPITRQEFLHYVGSHAKLD

SEQ ID NO: 6705 - protein, 222 aa, unidentified; identical to SEQ ID NO: 6661
  source 1..222: note = Chryseobacterium oleae
  REGION 1..222: note = tr|A0A1I4ZMP9|A0A1I4ZMP9_9FLAO GTP cyclohydrolase 1; OS = Chryseobacterium oleae OX=491207 GN=folE PE=3 SV=1

SEQ ID NO: 6706 - protein, 222 aa, Chryseobacterium oncorhynchi; identical to SEQ ID NO: 6694
  REGION 1..222: note = tr|A0A316WUM3|A0A316WUM3_9FLAO GTP cyclohydrolase 1; OS = Chryseobacterium oncorhynchi OX=741074 GN=folE PE=3 SV=1

SEQ ID NO: 6707 - protein, 222 aa, Chryseobacterium oranimense
  REGION 1..222: note = tr|A0A1M5NQQ4|A0A1M5NQQ4_9FLAO GTP cyclohydrolase 1; OS = Chryseobacterium oranimense OX=421058 GN=folE PE=3 SV=1
MVDFTDNDDDIFTGKEHTPIRKDAFDKSPEEKIEKITELFGEIMETLGMDMTDDSLKDSPRRVAKMYVNEIFGGLLPENKPGISTFSNKYKYRQMLVEKDITVYSFCEHHFLPIIGRAHVAYISNGEVIGLSKINRIVDYYAKRPQVQERLTMQIVDALKEALGTKDVACIIDAKHLCVNCRGIKDTASSTITAELSGIFRTNPITRQEFLHYVGSHAKLDY

SEQ ID NO: 6708 - protein, 221 aa, Chryseobacterium piperi
  REGION 1..221: note = tr|A0A086B8I8|A0A086B8I8_9FLAO GTP cyclohydrolase 1; OS = Chryseobacterium piperi OX=558152 GN=folE PE=3 SV=1
MVDFTDNDDDIFTGKEHTPIREDAFDKSPQEKIEKITQLFGEIMETLGMDMTDDSLKDSPKRVAKMYVNEIFGGLLPENKPGISTFSNKYKYRQMLVEKDITVYSFCEHHFLPIIGKAHVAYISNGEVIGLSKINRIVDYYAKRPQVQERLTMQIVNALKEALGTKDVACIIDAKHLCVNCRGIKDTASSTITAELSGIFRTNPITRQEFLHYVGTHTTLG

SEQ ID NO: 6709 - protein, 222 aa, Chryseobacterium piscicola
  REGION 1..222: note = tr|A0A1N7KKT9|A0A1N7KKT9_9FLAO GTP cyclohydrolase 1; OS = Chryseobacterium piscicola OX=551459 GN=folE PE=3 SV=1
MVDFTDNDDDIFTGKDHTPIREDAFEKSPQEKIEKITQLFGEIMETLGLDMTDDSLKDSPKRVAKMYVNEIFGGLLPENKPGISTFSNKYKYRQMLVEKDITVYSFCEHHFLPIIGRAHVAYISNGDVIGLSKINRIVDYYAKRPQVQERLTMQIVDALKEALGTQNVACIIDAKHLCVNCRGIKDTASSTITAELSGIFRTNPITRQEFLHYVGSHAKLDY

SEQ ID NO: 6710 - protein, 222 aa, Chryseobacterium piscium; identical to SEQ ID NO: 6658
  REGION 1..222: note = tr|A0A3D9BUI6|A0A3D9BUI6_9FLAO GTP cyclohydrolase 1; OS = Chryseobacterium piscium OX=333702 GN=folE PE=3 SV=1

SEQ ID NO: 6711 - protein, 221 aa, unidentified; identical to SEQ ID NO: 6676
  source 1..221: note = Chryseobacterium polytrichastri
  REGION 1..221: note = tr|A0A1M7G0L0|A0A1M7G0L0_9FLAO GTP cyclohydrolase 1; OS = Chryseobacterium polytrichastri OX=1302687 GN=folE PE=3; SV = 1

SEQ ID NO: 6712 - protein, 222 aa, unidentified; identical to SEQ ID NO: 6650
  source 1..222: note = Chryseobacterium rhizoplanae
  REGION 1..222: note = tr|A0A521BQL1|A0A521BQL1_9FLAO GTP cyclohydrolase 1; OS = Chryseobacterium rhizoplanae OX=1609531 GN=folE PE=3; SV = 1

SEQ ID NO: 6713 - protein, 222 aa, Chryseobacterium rhizosphaerae
  REGION 1..222: note = tr|A0A3D9CYZ4|A0A3D9CYZ4_9FLAO GTP cyclohydrolase 1; OS = Chryseobacterium rhizosphaerae OX=395937 GN=folE PE=3; SV = 1
MVDFTDNDDDIFTGKEHTPIRENAFDKSPQEKIEKITELFGEIMETLGLDMTDDSLKDSPKRVAKMYVNEIFGGLLPENKPGISTFSNKYKYRQMLVEKDITVYSFCEHHFLPIIGRAHVAYISNGEVIGLSKINRIVDYYAKRPQVQERLTMQIVDALKEALGTKDVACIIDAKHLCVNCRGIKDTASSTITAELSGIFRTNPITRQEFLHYVGSHAKLDY

SEQ ID NO: 6714 - protein, 222 aa, Chryseobacterium scophthalmum
  REGION 1..222: note = tr|A0A1N6HX08|A0A1N6HX08_9FLAO GTP cyclohydrolase 1; OS = Chryseobacterium scophthalmum OX=59733 GN=folE PE=3 SV=1
MVDFTDNDDDIFTGKEHTPIREDAFEKSPQEKIEKITELFGEIMETLGLDMTDDSLKDSPKRVAKMYVNEIFGGLLPENKPGISTFSNKYKYRQMLVEKDITVYSFCEHHFLPIIGRAHVAYISNGEVIGLSKINRIVDYYAKRPQVQERLTMQIVDALKEALGTKDVACIIDAKHLCVNCRGIKDTASSTITAELSGIFRTNPITRQEFLHYVGSHAKLDY

SEQ ID NO: 6715 - protein, 221 aa, unidentified; identical to SEQ ID NO: 6653
  source 1..221: note = Chryseobacterium sediminis
  REGION 1..221: note = tr|A0A5B2U4H3|A0A5B2U4H3_9FLAO GTP cyclohydrolase 1; OS = Chryseobacterium sediminis OX=1679494 GN=folE PE=3 SV=1

SEQ ID NO: 6716 - protein, 221 aa, unidentified
  source 1..221: note = Chryseobacterium shandongense
  REGION 1..221: note = tr|A0A3G6QUB9|A0A3G6QUB9_9FLAO GTP cyclohydrolase 1; OS = Chryseobacterium shandongense OX=1493872 GN=folE PE=3; SV = 1
MVDFTDNDDDIFTGKEHTPIRKDAFDKSPEEKIEKITELFGEIMETLGLDMTDDSLKDSPRRVAKMYVNEIFGGLLPENKPGISTFSNKYKYRQMLVEKDITVYSFCEHHFLPIIGRAHVAYISNGEVIGLSKINRIVDYYAKRPQVQERLTMQIVDALKESLGTKDVACIIDAKHLCVNCRGIKDTASSTITAELSGIFRTNPITRQEFLHYVGSHAKLD

SEQ ID NO: 6717 - protein, 222 aa, Chryseobacterium shigense; identical to SEQ ID NO: 6661
  REGION 1..222: note = tr|A0A1N7ID34|A0A1N7ID34_9FLAO GTP cyclohydrolase 1; OS = Chryseobacterium shigense OX=297244 GN=folE PE=3 SV=1

SEQ ID NO: 6718 - protein, 128 aa, Chryseobacterium shigense
  REGION 1..128: note = tr|A0A376EI22|A0A376EI22_9FLAO GTP cyclohydrolase 1; OS = Chryseobacterium shigense OX=297244 GN=folE PE=3 SV=1
MLVEKDITVYSFCEHHFLPIIGRAHVAYISNGEVIGLSKINRIVDYYAKRPQVQERLTMQIVDALKEALGTKDVACIIDAKHLCVNCRGIKDTASSTITAELSGIFRTNPITRQEFLHYVGSHAKLDY

SEQ ID NO: 6719 - protein, 222 aa, Chryseobacterium soldanellicola
  REGION 1..222: note = tr|A0A1H0ZWG1|A0A1H0ZWG1_9FLAO GTP cyclohydrolase 1; OS = Chryseobacterium soldanellicola OX=311333 GN=folE PE=3; SV = 1
MVDFTDNDDDIFTGKEHTPIRKDAFDKSPQEKIEKITELFGEIMETLGMDMTDDSLKDSPKRVAKMYVNEIFGGLLPENKPGISTFSNKYKYRQMLVEKDITVYSFCEHHFLPIIGRAHVAYISNGEVIGLSKINRIVDYYAKRPQVQERLTMQIVDALKEALGTKDVACIIDAKHLCVNCRGIKDTSSSTITAELSGIFRTNPITRQEFLHYVGSHAKLDY

SEQ ID NO: 6720 - protein, 221 aa, Chryseobacterium soli
  REGION 1..221: note = tr|A0A086A4J4|A0A086A4J4_9FLAO GTP cyclohydrolase 1; OS = Chryseobacterium soli OX=445961 GN=folE PE=3 SV=1
MVDFTDNDDDIFTGKEHTPIREDAFDKSPQEKIEKITALFGEIMETLGLDMTDDSLKDSPKRVAKMYVNEIFGGLLPENKPGISTFSNKYKYSQMLVEKDITVYSFCEHHFLPIIGRAHVAYISNGEVIGLSKINRIVDYYAKRPQVQERLTMQIVNALKEALGTKNVACIIDAKHLCVNCRGIKDTASSTITAELSGIFKTNPITRQEFLHYVGSHAKLD

SEQ ID NO: 6721 - protein, 221 aa, Chryseobacterium solincola
  REGION 1..221: note = tr|A0A0C1F3Y0|A0A0C1F3Y0_9FLAO GTP cyclohydrolase 1; OS = Chryseobacterium solincola OX=510955 GN=folE PE=3 SV=1
MDQDIDFDDDVFTGKEHTPLRADAFDKLPAEKIQLIQQHFHEIMETLGLDMTDDSLKDSPRRVAKMYVNEIFGGLLPENKPRISTFSNKYKYRQMLVEKDITVYSFCEHHFLPIIGKAHVAYISNGEVIGLSKINRIVDYYSKRPQVQERLTMQIVDALKDALGTKDVACIIEAKHLCVNCRGIKDTASSTTTAELSGLFRTNPITRQEFLHYVGNHAKLD

SEQ ID NO: 6722 - protein, 222 aa, Chryseobacterium sp.
  REGION 1..222: note = tr|A0A0T0MBD0|A0A0T0MBD0_9FLAO GTP cyclohydrolase 1; OS = Chryseobacterium sp. Leaf394 OX=1736361 GN=folE PE=3; SV = 1
MVDFTDNDDDIFTGKEHTPIREDAFEKSPQEKIEKITELFGEIMETLGLDMTDDSLKDSPKRVAKMYVNEIFGGLLPENKPGISTFSNKYKYRQMLVEKDITVYSFCEHHFLPIIGRAHVAYISSGDVIGLSKINRIVDYYAKRPQVQERLTMQIVDALKDALGTQNVACIIDAKHLCVNCRGIKDTASSTITAELSGIFRTNPITRQEFLHYVGSHAKLDY

SEQ ID NO: 6723 - protein, 222 aa, Chryseobacterium sp.
  REGION 1..222: note = tr|A0A2G6UBN4|A0A2G6UBN4_9FLAO GTP cyclohydrolase 1; OS = Chryseobacterium sp. 52 OX=2035213 GN=folE PE=3 SV=1
MVDFTDNDDDIFTGKEHTPIRKDAFDKSPQEKIEKITELFGEIMETLGMDMTDDSLKDSPKRVAKMYVNEIFGGLLPENKPGISTFSNKYKYRQMLVEKDITVYSFCEHHFLPIIGRAHVAYISNGEVIGLSKINRIVDYYAKRPQVQERLTMQIVDALKGALGTKDVACIIDAKHLCVNCRGIKDTASSTITAELSGIFRTNPITRQEFLHYVGSHAKLDY

SEQ ID NO: 6724 - protein, 221 aa, Chryseobacterium taeanense
  REGION 1..221: note = tr|A0A1G8GTX8|A0A1G8GTX8_9FLAO GTP cyclohydrolase 1; OS = Chryseobacterium taeanense OX=311334 GN=folE PE=3 SV=1
MVDFTDNDDDIFTGKEHTPIRKDAFEKSPEEKIEKITTLFGEIMETLGLDMTDDSLKDSPRRVAKMYVNEIFGGLLPENKPGISTFSNKYKYRQMLVEKDITVYSFCEHHFLPIIGRAHVAYISNGEVIGLSKINRIVDYYAKRPQVQERLTMQIVDALKEALGTKDVACIIDAKHLCVNCRGIKDTASSTITAELSGIFRTNPITRQEFLHYVGSHAKLD

SEQ ID NO: 6725 - protein, 221 aa, Chryseobacterium taichungense
  REGION 1..221: note = tr|A0A1H7Z8X6|A0A1H7Z8X6_9FLAO GTP cyclohydrolase 1; OS = Chryseobacterium taichungense OX=295069 GN=folE PE=3; SV = 1
MVDFTDNDDDIFTGKEHTPIRKDAFDKSPEEKIEKITELFGEIMETLGLDMTDDSLKDSPRRVAKMYVNEIFGGLLPENKPGISTFSNKYKYRQMLVEKDITVYSFCEHHFLPIIGRAHVAYISNGEVIGLSKINRIVDYYAKRPQVQERLTMQIVDALKEALGTKDVACIIDAKHLCVNCRGIKDTASSTITAELSGIFRTNPITRQEFLHYVGSHAKLD

SEQ ID NO: 6726 - protein, 221 aa, unidentified; identical to SEQ ID NO: 6677
  source 1..221: note = Chryseobacterium taihuense
  REGION 1..221: note = tr|A0A1G9QS85|A0A1G9QS85_9FLAO GTP cyclohydrolase 1; OS = Chryseobacterium taihuense OX=1141221 GN=folE PE=3 SV=1

SEQ ID NO: 6727 - protein, 222 aa, Chryseobacterium taiwanense
  REGION 1..222: note = tr|A0A0B4D8P3|A0A0B4D8P3_9FLAO GTP cyclohydrolase 1; OS = Chryseobacterium taiwanense OX=363331 GN=folE PE=3 SV=1
MVDFTDNDDDIFTGKEHTPIREDAFDKSPEEKIEKITELFGQIMETLGMDMTDDSLKDSPKRVAKMYVNEIFGGLLPENKPGISTFSNKYKYRQMLVEKDITVYSFCEHHFLPIIGRAHVAYISNGEVIGLSKINRIVDYYAKRPQVQERLTMQIVDALKEALGTKDVACIIDAKHLCVNCRGIKDTASSTITAELSGIFRTNPITRQEFLHYVGSHAKLDY

SEQ ID NO: 6728 - protein, 221 aa, unidentified
  source 1..221: note = Chryseobacterium takakiae
  REGION 1..221: note = tr|A0A1M4VX88|A0A1M4VX88_9FLAO GTP cyclohydrolase 1; OS = Chryseobacterium takakiae OX=1302685 GN=folE PE=3 SV=1
MVDFTDNDDDIFTGKEHTPIRKDAFDKSPEEKIEKITALFGEIMETLGLDMTDDSLKDSPRRVAKMYVNEIFGGLLPENKPGISTFSNKYKYRQMLVEKDITVYSFCEHHFLPIIGRAHVAYISNGEVIGLSKINRIVDYYAKRPQVQERLTMQVVDALKEALGTKDVACIIDAKHLCVNCRGIKDTASSTITAELSGIFRTNPITRQEFLHYVGSHAKLD

SEQ ID NO: 6729 - protein, 220 aa, unidentified
  source 1..220: note = Chryseobacterium taklimakanense
  REGION 1..220: note = tr|A0A239X9M4|A0A239X9M4_9FLAO GTP cyclohydrolase 1; OS = Chryseobacterium taklimakanense OX=536441 GN=folE PE=3; SV = 1
MTDFENDDDVFTGKDHTPLRSDAFNMSPSAKVEKIEKLFGEIMETLGLDMTDDSLKDSPKRVAKMYVNEIFGGLLPENKPGISTFSNKYKYRQMLVEKDITVYSFCEHHFLPIIGRAHVAYISNGEVIGLSKINRLVDYYAKRPQVQERLTMQIVDALKEALGTKDVACIIDAKHLCVNCRGIKDTASSTITAELSGIFRTNPITRQEFLHYVGSHAKLD

SEQ ID NO: 6730 - protein, 221 aa, Chryseobacterium treverense
  REGION 1..221: note = tr|A0A1I3NFS2|A0A1I3NFS2_9FLAO GTP cyclohydrolase 1; OS = Chryseobacterium treverense OX=631455 GN=folE PE=3 SV=1
MDQDIDFDDDVFTGKEHTPLRANAFDKLPAEKIQLIQQHFHEIMETLGLDMTDDSLKDSPRRVAKMYVNEIFGGLLPENKPRISTFSNKYKYRQMLVEKDITVYSFCEHHFLPIIGKAHVAYISNGEVIGLSKINRIVDYYSKRPQVQERLTMQIVDALKDALGTKDVACIIEAKHLCVNCRGIKDTASSTTTAELSGLFRTNPITRQEFLHYVGNHAKLD

SEQ ID NO: 6731 - protein, 221 aa, Chryseobacterium ureilyticum; identical to SEQ ID NO: 6657
  REGION 1..221: note = tr|A0A1N7QS86|A0A1N7QS86_9FLAO GTP cyclohydrolase 1; OS = Chryseobacterium ureilyticum OX=373668 GN=folE PE=3 SV=1

SEQ ID NO: 6732 - protein, 222 aa, unidentified; identical to SEQ ID NO: 6661
  source 1..222: note = Chryseobacterium viscerum
  REGION 1..222: note = tr|A0A316X1N5|A0A316X1N5_9FLAO GTP cyclohydrolase 1; OS = Chryseobacterium viscerum OX=1037377 GN=folE PE=3 SV=1

SEQ ID NO: 6733 - protein, 222 aa, Chryseobacterium wanjuense
  REGION 1..222: note = tr|A0A1I0REE1|A0A1I0REE1_9FLAO GTP cyclohydrolase 1; OS = Chryseobacterium wanjuense OX=356305 GN=folE PE=3 SV=1
MVDFTDNDDDIFTGKEHTPIREDAFEKSPEEKIEKISELFGEIMETLGLDMTDDSLKDSPKRVAKMYVQEIFGGLLPENKPGISTFSNKYKYRQMLVEKDITVYSFCEHHFLPIIGRAHVAYISNGEVIGLSKINRIVDYYAKRPQVQERLTMQIVAALKEALGTKDVACIIDAKHLCVNCRGIKDTASSTITAELSGIFRTNPITRQEFLHYVGSHAKLDY

SEQ ID NO: 6734 - protein, 221 aa, unidentified
  source 1..221: note = Chryseobacterium xixisoli
  REGION 1..221: note = tr|A0A4R8IHM7|A0A4R8IHM7_9FLAO GTP cyclohydrolase 1; OS = Chryseobacterium xixisoli OX=1476462 GN=folE PE=3 SV=1
MEHIPDNDDDLFTGKDHTPLRPDAFDLNTDEKIKKIEGLFGEIMQTLGLDMTDDSLKDSPKRVAKMYVKEIFGGLLPENKPGISTFKNQYKYRQMLVEKDITVYSFCEHHFLPIIGKAHVAYISSGEVIGLSKINRIVDYYAKRPQVQERLTMQIVDALKEALGTNNVACIIDAKHLCVNCRGIKDTTSSTITAELSGIFRTNPITRQEFLHYVGSHAKFD

SEQ ID NO: 6735 - protein, 221 aa, unidentified
  source 1..221: note = Chryseobacterium zeae
  REGION 1..221: note = tr|A0A1N6DXF1|A0A1N6DXF1_9FLAO GTP cyclohydrolase 1; OS = Chryseobacterium zeae OX=1416779 GN=folE PE=3 SV=1
MEHFPDNDDDLFTGKDHTPLRKDAFDLKPEEKVEKIEGLFAEIMETLGLDMEDDSLKDSPKRVAKMYVNEIFGGLLPENKPGVSTFKNQYKYRQMLVEKDITVYSFCEHHFLPIIGKAHVAYISNGEVIGLSKINRIVDYYAKRPQVQERLTMQIVDALKEALGTNNVACIIDAKHLCVNCRGIKDTASSTITAELSGIFRTNPITRQEFLHYVGSHAKFD

SEQ ID NO: 6736 - protein, 227 aa, unidentified
  source 1..227: note = Chryseolinea flava
  REGION 1..227: note = tr|A0A364Y3K8|A0A364Y3K8_9BACT GTP cyclohydrolase 1; OS = Chryseolinea flava OX=2059302 GN=folE PE=3 SV=1
MRQKEISLNIQPEPDEFGDDHHGSSAADTPLRPDAFEMDDEVKIEKIEKHFREIMHILGLDLNDDSLNGTPRRVAKMFVKEVFSGLNPKNRPHARLFENKYNYDQMLVEKDITFYSHCEHHFVPIYGKAHVAYFSSGKVIGLSKINRIVQYFSKRPQVQERLTVQIGKELERILQTEDVGVVLDANHMCVASRGVGDTNSKTGTAYFSGKFKDENIKREFLNYINSK

SEQ ID NO: 6737 - protein, 229 aa, unidentified
  source 1..229: note = Chryseolinea serpens
  REGION 1..229: note = tr|A0A1M5L1C8|A0A1M5L1C8_9BACT GTP cyclohydrolase 1; OS = Chryseolinea serpens OX=947013 GN=folE PE=3 SV=1
MRQKGISLNIRPLKPEDDDFEDEHPYSSIETPLRADAFELEDDVKIERIEKHFTEIMNILGLDLTDDSLKGTPRRVAKMYVKEVFSGLNPKNRPNARLFENKYNYDQMLVEKDITFYSHCEHHFVPIYGKAHVAYFSNGKVIGLSKINRIVQYFAKRPQVQERLTVQIGKEIERVLHTENVGVVIDANHMCVASRGVGDTNSKTGTAYFSGKFKDENIKREFLNYINSK

SEQ ID NO: 6738 - protein, 229 aa, unidentified
  source 1..229: note = Chryseolinea sp.
  REGION 1..229: note = tr|A0A385SQD8|A0A385SQD8_9BACT GTP cyclohydrolase 1; OS = Chryseolinea sp. KIS68-18 OX=2321403 GN=folE PE=3 SV=1
MRQKGISLNIRPLKPEDDDFEDEHPYSSIETPLRADAFELDDDVKIERIEKHFTEIMNILGLDLNDDSLKGTPRRVAKMYVKEVFSGLNPKNRPNARLFENKYNYDQMLVEKDITFYSHCEHHFVPIYGKAHVAYFSNGKVIGLSKINRIVQYFAKRPQVQERLTVQIGKEIERVLHTENVGVVIDANHMCVASRGVGDTNSKTGTAYFSGKFKDENIKREFLNYINSK

SEQ ID NO: 6739 - protein, 189 aa, unidentified
  source 1..189: note = Chryseomicrobium excrementi
  REGION 1..189: note = tr|A0A2M9F2Y2|A0A2M9F2Y2_9BACL GTP cyclohydrolase 1; OS = Chryseomicrobium excrementi OX=2041346 GN=folE PE=3 SV=1
MTAVDLHKIENAVKMILEAVGEDSSREGLIETPKRVAKMYAEMFEGLHQDPKEYFKTIFHEDHEELVLVKDIPFHSMCEHHLVPFYGKAHVAYIPRNGVVTGLSKLARAVETTARRPQLQERITSTIADSIMEMLNPYGAYVVIEAEHMCMTMRGIKKPGAKTITAVARGVYEDDAVKRSEIHSFIQMT

SEQ ID NO: 6740 - protein, 189 aa, unidentified
  source 1..189: note = Chrysiogenales bacterium
  REGION 1..189: note = tr|A0A524K1F8|A0A524K1F8_9BACT GTP cyclohydrolase 1; OS = Chrysiogenales bacterium OX=2528039 GN=folE PE=3 SV=1
MDIEKIKKGVGLILAGIGEDAASERLRETPARAAAMFAEVLSGTGKDPNDFLKCLTEEKHDEMVILKDIPIYSMCEHHLLPFSGKASIAYIPKKGRIIGLNNLGYLVDYLARRLQLQERLTKQIADYLVQALDPMGVMVVIKAEHLCMTMRGVKKPGSLTITSAVRGVFRENLGPRQEAMSLLMTPENR

SEQ ID NO: 6741 - protein, 184 aa, unidentified
  source 1..184: note = Chrysiogenales bacterium
  REGION 1..184: note = tr|A0A524Q4L2|A0A524Q4L2_9BACT GTP cyclohydrolase 1; OS = Chrysiogenales bacterium OX=2528039 GN=folE PE=3 SV=1
MDTDKLIKAVHEMIIAIGEDPARPGLQGTPERVARMFEEILGGEKKEIADILGKTHELEHDEMVVVKDISFYSMCEHHLLPFFGVCHVGYIPDERRIVGLSKIARIVDVFSKRLQVQEHLTAEIADAVMTHVRPKGVAVVVNARHLCMEMRGVSKPGSSTITSVVRGIFRSDIRTREEFLKLIG

SEQ ID NO: 6742 - protein, 268 aa, unidentified
  source 1..268: note = Chthoniobacter flavus
  REGION 1..268: note = tr|B4D398|B4D398_9BACT GTP cyclohydrolase FolE2; OS = Chthoniobacter flavus Ellin428 OX=497964 GN=folE2 PE=3; SV = 1
MQSAPMKQLTPLSDTQSQRDERRIPIDRVGVRALRYPMQIRDKAREVQHTIATSTLTVDLPHHFKGTHMSRFVEVLNEFGPELHVDNIHTILRELTQRLHSVSAHVDFEFPYFLTKKAPVTGSPGMMDYTARFSATLEKDVIDFVVTVIVPVTTLCPCSKAISVHGAHNQRGQVTFSVRFSEPIWIEDLIRLVEESASSELYSLLKRPDEKAVTERAYENPVFVEDLVRNIALRSNAVPEITWYRVEAENFESIHNHNAYALIEHRKE

SEQ ID NO: 6743 - protein, 262 aa, unidentified
  source 1..262: note = Chthoniobacter sp.
  REGION 1..262: note = tr|A0A257X3Q7|A0A257X3Q7_9BACT GTP cyclohydrolase FolE2 OS=Chthoniobacter sp. 12-60-6 OX=1970334 GN=folE2; PE = 3 SV=1
MSALTDTQNERDDRRLPIDRVGVRSLRFPLSIRDRDAAVQHTVATVSLAVDLPHQFKGTHMSRFVEVLHAHGKELTVSNIVKMPRELMKKLHADKAHVEMRFPYFRTKKAPVSGAEGMLDYGVIFEVNADKEETDFVLTVEVPVTTLCPCSKAISARGAHNQRGTVTLAIRFSEPVWIEDLLELVESSASSELYSVLKRPDEKFVTEAAYDNPVFVEDLVRNIAVKAKAHPRITWFRVEAENYESIHNHNAWAVIESHTSPS

SEQ ID NO: 6744 - protein, 207 aa, unidentified
  source 1..207: note = Chthoniobacterales bacterium
  REGION 1..207: note = tr|A0A2W5Z0W7|A0A2W5Z0W7_9BACT GTP cyclohydrolase 1; OS = Chthoniobacterales bacterium OX=2201154 GN=folE PE=3; SV = 1
MRNHETELQAAERRIASLRPCGAAKLAGMEHSFRALLESIGEDPKRQGLLKTPQRAARAFEFITNGYRQSLDVVLNDAIFDSEASEIVLVKDIELYSMCEHHLLPFIGKAHVAYIPNGKVIGLSKVARIVDVFARRLQIQENLTIQIADALMKTLHPSGVAVVIEAKHLCMMMRGVEKQNSLMKTSCLLGSFKEDARTRSEFLALLA

SEQ ID NO: 6745 - protein, 233 aa, unidentified
  source 1..233: note = Chthoniobacterales bacterium
  REGION 1..233: note = tr|A0A2W6A2Y7|A0A2W6A2Y7_9BACT GTP cyclohydrolase 1; OS = Chthoniobacterales bacterium OX=2201154 GN=folE PE=3; SV = 1
MFRSLLSDLRQPSRTLATSRNGHTCETPDRNRLAPSEPSPSPVVQLRDLSRVDSKELVREILRRIGDDPDREGLQQTPERIVRSWKEIYGGYAQRAEDVLVTQFQAEQYDAMVLLRDIEFFSTCEHHMLPFHGKVHIAYLPNEKIVGLSKLARLTEIYARRLQVQERMTYQIAMELERVLKPKGVAVMIEAMHQCMCSRGVRKRESKMVTSCLLGAFKENLASRTEFLALVKQ

SEQ ID NO: 6746 - protein, 187 aa, Chthonomonas calidirosea
  REGION 1..187: note = tr|S0ES81|S0ES81_CHTCT GTP cyclohydrolase 1; OS = Chthonomonas calidirosea (strain DSM 23976 / ICMP 18418 / T49) OX=1303518 GN=folE PE=3 SV=1
MKSKLEEIYASLLEEIGENPEREGLIKTPHRAAEAMRFVTRGYRMNLEDIVNGAIFKADSDDMVIVRGIEFFSMCEHHLFPFFGHANIAYIPDGRIIGLSKLARITEMFARRLQVQERLTVQIAEAVQEILKPKGVGVVLQAKHLCMMARGVEKKSSDMVTSHVLGVFRTDRSTRMEFMNLLDLKEA

SEQ ID NO: 6747 - protein, 201 aa, unidentified
  source 1..201: note = Ciceribacter sp.
  REGION 1..201: note = tr|A0A4Q2TDJ2|A0A4Q2TDJ2_9RHIZ GTP cyclohydrolase 1; OS = Ciceribacter sp. F8825 OX=2509717 GN=folE PE=3 SV=1
MDAFAKKLSQESARPTREEAEEAVRVLLRWAGDDPSREGLLDTPKRVVKAYSELFAGYDADIDDVLGTTFEEVAGYDDIVLVRDIPFFSHCEHHMLPVIGKAHIAYLPSGRVLGLSKIARIVEVFARRLQTQEAMTAQIADAINQGLSPRGVAVFVEAEHMCMAMRGVQKSGSTTLTTTFTGSFKDSAAEQARFMSMVRGR

SEQ ID NO: 6748 - protein, 365 aa, Citreicella sp.
  REGION 1..365: note = tr|A0A355QUY6|A0A355QUY6_9RHOB GTP cyclohydrolase FolE2 OS=Citreicella sp. OX=1960284 GN=folE2 PE=3 SV=1
MNVHTPEIDRKPSLEEAETALALLRQWTGKAQDAEIEALDPALLGLVPGALPYPDLSRDYPRDFGVDEAYRDTLPDLQNGPSSLIRGANRMIQHVGISNFRLPIRYRMRGEGELMLETSVTGTVSLDADKKGINMSRIMRSFYEHSEKTFSFEVIEAALDDYKSDLESFDARIQMRFSFPMQVPSLRSGLKGYQYYDIALELVELNGVRRRIVHLDYVYSSTCPCSLELSEHARRTRNQLATPHSQRSVARLSVELRPGQDILWFEDLVEICRSAVPTETQVMVKREDEQAFAELNAANPIFVEDAARLYAEALLNDPRIGDFRVLASHQESLHSHDAVAVLTEGPTFAATSLDPMLLPSLIHRG

SEQ ID NO: 6749 - protein, 365 aa, Citreicella sp.
  REGION 1..365: note = tr|D0D6D4|D0D6D4_9RHOB GTP cyclohydrolase FolE2; OS = Citreicella sp. SE45 OX=501479 GN=folE2 PE=3 SV=1
MNVFTPEIDRKPSKEEAAKALEVLRSFAEMALDYEIDALDPGIAALRDGGVPYPDLSRVYPTAFRADEAYRETLPDLQNGPSSLIKGENRLIQHVGISNFRLPIHYRTRDHGELTLETSVTGTVSLEADKKGINMSRIMRSFYAHAEKTFSFEVIEAALDDYKSDLESFDARIMMRLSFPVRRDSLRSGLSGYQYYDIALELVELDGVRRKILHLDYVYSSTCPCSLELSEHARRTRGQLATPHSQRSVARVSAVLANEGDCLWFEDLIGLCRKAVPTETQVMVKREDEQAFAELNAANPIFVEDAARLFAEQLQADPRIGDFRVLASHQESLHSHDAVSVLTEGTTFANDSLDPKLFSTLFHVG

SEQ ID NO: 6750 - protein, 209 aa, Citricoccus muralis
  REGION 1..209: note = tr|A0A3D9LG23|A0A3D9LG23_9MICC GTP cyclohydrolase 1; OS = Citricoccus muralis OX=169134 GN=folE PE=3 SV=1
MEQTQNTLRDVDVDDEAELAPAGVDRPRIEAAVREILEAIGEDPDREGLQDTPKRVAKAYDEFFAGVKQDPGDILGTTFDIAHEELVLVKDIPFYSTCEHHLVPFHGTAHIGYIPSPEGLVTGLSKLARLVEVFARRPQVQERLTTQIVEALMTHLSPRGAIVVIEAEHMCMSMRGVRKPGAKTVTSAVRGQLRDSSTRSEAMSLILHG

SEQ ID NO: 6751 - protein, 202 aa, Citricoccus sp.
  REGION 1..202: note = tr|A0A4P9JDP9|A0A4P9JDP9_9MICC GTP cyclohydrolase 1; OS = Citricoccus sp. SGAir0253 OX=2567881 GN=folE PE=3 SV=1
MAGLLADPEAELPPAGVDLQRIEAAVREILEAVGEDPDREGLEDTPARVAKAYAEFFAGLHQDPADVLGTTFDISHEELVLVKDIPFYSTCEHHLVPFHGTVHIGYIPSKDGRVTGLSKLARLVEVFARRPQVQERLTTQVVEALMTHLHPRGAIVVVEAEHLCMSMRGVRKPGAKTVTSAVRGQLRDATTRAEAMGLILHG

SEQ ID NO: 6752 - protein, 223 aa, Citrobacter amalonaticus
  REGION 1..223: note = tr|A0A2S4S4C8|A0A2S4S4C8_CITAM GTP cyclohydrolase 1; OS = Citrobacter amalonaticus OX=35703 GN=folE PE=3 SV=1
MPSLSKEAALVHEALVARGLETPLRPPVHEMDNETRKRLISGHMTEIMQLLNLDLSDDSLMETPHRIAKMYVDEIFSGLDYANFPKITVIENKMKVDEMVTVRDITLTSTCEHHFVTIDGKATVAYIPKDSVIGLSKINRIVQFFAQRPQVQERLTQQILTALQTLLGTNNVAVSIDAVHYCVKARGIRDATSATTTTSLGGLFKSSQNTRQEFLRAVRHHNS

SEQ ID NO: 6753 - protein, 222 aa, Citrobacter amalonaticus
  REGION 1..222: note = tr|A0A0X8S188|A0A0X8S188_CITAM GTP cyclohydrolase 1; OS = Citrobacter amalonaticus OX=35703 GN=folE PE=3 SV=1
MSSLSKEAALVHEALVARGLETPLRPPVHEMDNETRKRLISGHMTEIMQLLNLDLSDDSLMETPHRIAKMYVDEIFSGLDYANFPKITVIENKMKVDEMVTVRDITLTSTCEHHFVTIDGKATVAYIPKESVIGLSKINRIVQFFAQRPQVQERLTQQILTALQTLLGTNNVAVSIDAVHYCVKARGIRDATSATTTTSLGGLFKSSQNTRQEFLRAVRHHN

SEQ ID NO: 6754 - protein, 222 aa, Citrobacter braakii
  REGION 1..222: note = tr|A0A1R0FQ85|A0A1R0FQ85_CITBR GTP cyclohydrolase 1; OS = Citrobacter braakii OX=57706 GN=folE PE=3 SV=1
MSSLSKEAALVHEALVARGLETPLRPPVQEMDNETRKRLISGHMTEIMQLLNLDLSDDSLMETPHRIAKMYVDEIFSGLDYANFPKITVIENKMKVDEMVTVRDITLTSTCEHHFVTIDGKATVAYIPKDSVIGLSKINRIVQFFAQRPQVQERLTQQILTALQTLLGTNNVAVSIDAVHYCVKARGIRDATSATTTTSLGGLFKSSQNTRQEFLRAVRHHN

SEQ ID NO: 6755 - protein, 222 aa, Citrobacter farmeri
  REGION 1..222: note = tr|A0A223JTW0|A0A223JTW0_9ENTR GTP cyclohydrolase 1; OS = Citrobacter farmeri OX=67824 GN=folE PE=3 SV=1
MSSLSKEAALVHEALVARGLETPLRPPVHEMDNETRKRLISGHMTEIMQLLNLDLSDDSLMETPHRIAKMYVDEIFSGLDYANFPKITVIENKMKVDEMVTVRDITLTSTCEHHFVTIDGKATVAYIPKDSVIGLSKINRIVQFFAQRPQVQERLTQQILTALQTLLGTNNVAVSIDAVHYCVKARGIRDATSATTTTSLGGLFKSSQNTRQEFLRAVRHHN

SEQ ID NO: 6756 - protein, 222 aa, Citrobacter freundii
  REGION 1..222: note = tr|A0A4P7Q034|A0A4P7Q034_CITFR GTP cyclohydrolase 1; OS = Citrobacter freundii OX=546 GN=folE PE=3 SV=1
MSSLSKEAALVHEALVARGLETPLRPPVQEMDNETRKRLISGHMTEIMQLLNLDLSDDSLMETPHRIAKMYVDEIFSGLDYANFPKITVIENKMKVDEMVTVRDITLTSTCEHHFVTIDGKATVAYIPKESVIGLSKINRIVQFFAQRPQVQERLTQQILTALQTLLGTNNVAVSIDAVHYCVKARGIRDATSATTTTSLGGLFKSSQNTRQEFLRAVRHHN

SEQ ID NO: 6757 - protein, 222 aa, Citrobacter freundii; identical to SEQ ID NO: 6754
  REGION 1..222: note = tr|A0A0A5P801|A0A0A5P801_CITFR GTP cyclohydrolase 1; OS = Citrobacter freundii OX=546 GN=folE PE=3 SV=1

SEQ ID NO: 6758 - protein, 222 aa, Citrobacter gillenii; identical to SEQ ID NO: 6756
  REGION 1..222: note = tr|A0A3E2KMX0|A0A3E2KMX0_9ENTR GTP cyclohydrolase 1; OS = Citrobacter gillenii OX=67828 GN=folE PE=3 SV=1

SEQ ID NO: 6759 - protein, 222 aa, Citrobacter koseri; identical to SEQ ID NO: 6755
  REGION 1..222: note = sp|A8AE79|GCH1_CITK8 GTP cyclohydrolase 1; OS = Citrobacter koseri (strain ATCC BAA-895 / CDC 4225-83 / SGSC4696) OX=290338 GN=folE PE=3 SV=1

SEQ ID NO: 6760 - protein, 222 aa, Citrobacter koseri; identical to SEQ ID NO: 6755
  REGION 1..222: note = tr|A0A078LBW9|A0A078LBW9_CITKO GTP cyclohydrolase 1; OS = Citrobacter koseri OX=545 GN=folE PE=3 SV=1

SEQ ID NO: 6761 - protein, 222 aa, Citrobacter murliniae; identical to SEQ ID NO: 6753
  REGION 1..222: note = tr|A0A4S3RS55|A0A4S3RS55_9ENTR GTP cyclohydrolase 1; OS = Citrobacter murliniae OX=67829 GN=folE PE=3 SV=1

SEQ ID NO: 6762 - protein, 222 aa, unidentified; identical to SEQ ID NO: 6754
  source 1..222: note = Citrobacter pasteurii
  REGION 1..222: note = tr|A0A0A1RPV0|A0A0A1RPV0_9ENTR GTP cyclohydrolase 1; OS = Citrobacter pasteurii OX=1563222 GN=folE PE=3 SV=1

SEQ ID NO: 6763 - protein, 222 aa, unidentified
  source 1..222: note = Citrobacter portucalensis
  REGION 1..222: note = tr|A0A4P7USP7|A0A4P7USP7_9ENTR GTP cyclohydrolase 1; OS = Citrobacter portucalensis OX=1639133 GN=folE PE=3 SV=1
MSSLSKKAALVHEALVARGLETPLRPPVQEMDNETRKRLISGHMTEIMQLLNLDLSDDSLMETPHRIAKMYVDEIFSGLDYANFPKITVIENKMKVDEMVTVRDITLTSTCEHHFVTIDGKATVAYIPKDSVIGLSKINRIVQFFAQRPQVQERLTQQILTALQTLLGTNNVAVSIDAVHYCVKARGIRDATSATTTTSLGGLFKSSQNTRQEFLRAVRHHN

SEQ ID NO: 6764 - protein, 222 aa, unidentified; identical to SEQ ID NO: 6754
  source 1..222: note = Citrobacter portucalensis
  REGION 1..222: note = tr|A0A5B0T2A9|A0A5B0T2A9_9ENTR GTP cyclohydrolase 1; OS = Citrobacter portucalensis OX=1639133 GN=folE PE=3 SV=1

SEQ ID NO: 6765 - protein, 222 aa, Citrobacter rodentium
  REGION 1..222: note = tr|A0A482PFZ8|A0A482PFZ8_CITRO GTP cyclohydrolase 1; OS = Citrobacter rodentium OX=67825 GN=folE PE=3 SV=1
MSSLSKEAALVHEALVARGLETPLRPPVHEMDNETRKRLISGHMTEIMQLLNLDLSDDSLMETPHRIAKMYVDEIFSGLDYANFPKITVIENKMKVDEMVTVRDITLTSTCEHHFVTIDGKATVAYIPKDAVIGLSKINRIVQFFAQRPQVQERLTQQILTALQTLLGTNNVAVSIDAVHYCVKARGIRDATSATTTTSLGGLFKSSQNTRQEFLRAVRHHN

SEQ ID NO: 6766 - protein, 221 aa, Citrobacter sp.
  REGION 1..221: note = tr|A0A318W5D8|A0A318W5D8_9ENTR GTP cyclohydrolase 1; OS = Citrobacter sp. YR018 OX=2135606 GN=folE PE=3 SV=1
MPSLSKEAALVHEALLARGLETPLRPPVDMDNESRKRLIAGHMTEIMQLLNLDLSDDSLTETPHRIAKMYVDEIFSGLDYANFPKITVIENKMKVDEMVTVRDITLTSTCEHHFVTIDGKATVAYIPKESVIGLSKINRIVQFFAQRPQVQERLTQQILTALQTLLGTNNVAVSIDAVHYCVKARGIRDATSATTTTSLGGLFKSSQNTRQEFLRAVRHHN

SEQ ID NO: 6767 - protein, 222 aa, Citrobacter sp.; identical to SEQ ID NO: 6754
  REGION 1..222: note = tr|A0A0J1L6R1|A0A0J1L6R1_9ENTR GTP cyclohydrolase 1; OS = Citrobacter sp. MGH103 OX=1686378 GN=folE PE=3 SV=1

SEQ ID NO: 6768 - protein, 222 aa, Citrobacter werkmanii; identical to SEQ ID NO: 6754
  REGION 1..222: note = tr|A0A090TV66|A0A090TV66_9ENTR GTP cyclohydrolase 1; OS = Citrobacter werkmanii NBRC 105721 OX=1114921 GN=folE; PE = 3 SV=1

SEQ ID NO: 6769 - protein, 222 aa, Citrobacter werkmanii; identical to SEQ ID NO: 6754
  REGION 1..222: note = tr|A0A422VBH4|A0A422VBH4_9ENTR GTP cyclohydrolase 1; OS = Citrobacter werkmanii OX=67827 GN=folE PE=3 SV=1

SEQ ID NO: 6770 - protein, 235 aa, Citrobacter youngae
  REGION 1..235: note = tr|D4B7U5|D4B7U5_9ENTR GTP cyclohydrolase 1; OS = Citrobacter youngae ATCC 29220 OX=500640 GN=folE PE=3; SV = 1
MQGRGATPAGEKEMSSLSKEAALVHEALVARGLETPLRPPVQEMDNETRKRLISGHMTEIMQLLNLDLSDDSLMETPHRIAKMYVDEIFSGLDYANFPKITVIENKMKVDEMVTVRDITLTSTCEHHFVTIDGKATVAYIPKDSVIGLSKINRIVQFFAQRPQVQERLTQQILTALQTLLGTNNVAVSIDAVHYCVKARGIRDATSATTTTSLGGLFKSSQNTRQEFLRAVRHHN

SEQ ID NO: 6771 - protein, 222 aa, Citrobacter youngae; identical to SEQ ID NO: 6754
  REGION 1..222: note = tr|A0A549UQR7|A0A549UQR7_9ENTR GTP cyclohydrolase 1; OS = Citrobacter youngae OX=133448 GN=folE PE=3 SV=1

SEQ ID NO: 6772 - protein, 202 aa, unidentified
  source 1..202: note = Citromicrobium sp.
  REGION 1..202: note = tr|A0A2P0B1K4|A0A2P0B1K4_9SPHN GTP cyclohydrolase 1; OS = Citromicrobium sp. RCC1897 OX=1812182 GN=folE PE=3 SV=1
MSSLVGPDEDREDGKPAVPEDVQAAIRTLIEWAGDDPAREGLLDTPKRVARAWKEYCVGYTEDPAVHLGRVFEEVGGYNDIVLLKDIPFQSHCEHHMAPIIGVAHIAYLPTDFVVGISKLARVLHGFARRLQVQERLTAEVAECIWNNLKPEGVAVVIEASHACMTARGVRTPGVTMVTSRMMGVFRDDPRSREEVLKLMGH

SEQ ID NO: 6773 - protein, 203 aa, unidentified
  source 1..203: note = Citromicrobium sp.
  REGION 1..203: note = tr|A0A2E9V0M6|A0A2E9V0M6_9SPHN GTP cyclohydrolase 1; OS = Citromicrobium sp. OX=2024827 GN=folE PE=3 SV=1
MSSLVGPDEDDPRAKPPVPQHVQDAIRTLIEWTGDDPSREGLLDTPKRVARAWKEYCVGYEEDPAQHLGRVFEEVGGYNEIVLLKDIPFQSHCEHHMAPIIGKAAIAYLPNDRVVGISKLARVLHGFARRLQVQERLTAEVADCIWDNLQPQGVAVVIDAQHSCMTARGVRTPGVGMVTSRMMGTFLDDHRSREEVLKLMGYG

SEQ ID NO: 6774 - protein, 194 aa, unidentified
  source 1..194: note = Clavibacter cf.
  REGION 1..194: note = tr|A0A067LIZ2|A0A067LIZ2_9MICO GTP cyclohydrolase 1; OS = Clavibacter cf. michiganensis LMG 26808 OX=1291006; GN = folE PE=3 SV=1
MGVDRARIEAAVAELILAIGEDPGREGLATTPARVAEAYGEFFSGVGADPLRHLRETFPLPETDAAPQPVIVTGIAFRSICEHHLLPFTGVAHLAYVPGERIVGLGRLPRVVDDLASRPQMQERLGEQIAEALEHGLGARGVAVILDATHGCVTARGTRQAGSTTITIAARGSLAEPAARAEVLALLPTAAGRT

SEQ ID NO: 6775 - protein, 194 aa, Clavibacter michiganensis
  REGION 1..194: note = tr|A5CP84|A5CP84_CLAM3 GTP cyclohydrolase 1; OS = Clavibacter michiganensis subsp. michiganensis (strain NCPPB 382) OX=443906 GN=folE PE=3 SV=1
MGVDRARIEAAVAELILAIGEDPGREGLATTPARVAEAYAEFFSGVGADPLRHLRETFPLPETDAAPQPVIVTGIAFRSICEHHLLPFTGVAHLAYVPGERIVGLGRLPRVVDDLASRPQMQERLGEQIAEALERGLGARGVAVILDATHGCVTARGTRQAGSTTITIAARGSLAEPAARAEVLALLPTAAGRA

SEQ ID NO: 6776 - protein, 194 aa, Clavibacter michiganensis
  REGION 1..194: note = tr|A0A0D5CJF2|A0A0D5CJF2_9MICO GTP cyclohydrolase 1; OS = Clavibacter michiganensis subsp. insidiosus OX=33014; GN = folE PE=3 SV=1
MGVDRARIEAAVAELILAIGEDPGREGLATTPARVAEAYGEFFAGVGTDPLRHLRETFPLPETDAAPQPVIVTGIAFRSICEHHLLPFTGVAHLAYVPGERIVGLGRLPRVVDDLASRPQMQERLGEQIAEALEHGLGARGVAVILDATHGCVTARGTRQAGSTTITIAARGSLAEPAARAEVLALLPASGGRA

SEQ ID NO: 6777 - protein, 196 aa, Clavibacter sp.
  REGION 1..196: note = tr|A0A3D9PPN9|A0A3D9PPN9_9MICO GTP cyclohydrolase 1; OS = Clavibacter sp. 199 OX=2183923 GN=folE PE=3 SV=1
MGVDRARIEAAVAELILAIGEDPHREGLATTPQRVAEAYAEFFAGVGADPLRHLRETFPLPETAAAPQPVIVTGIAFRSICEHHLLPFTGVAHLAYVPGERIVGLGRLPRVVDDLASRPQMQERLGEQIAQVLEEGLGARGVAVILDATHGCVTARGTRQAGSTTVTIAARGSLAEPSARAEVLALLPAVGGRDRP

SEQ ID NO: 6778 - protein, 190 aa, Clavibacter sp.
  REGION 1..190: note = tr|A0A388P1J7|A0A388P1J7_9MICO GTP cyclohydrolase 1; OS = Clavibacter sp. OX=1871044 GN=folE PE=3 SV=1
MSKSFDQDRAERAISELLAALGEDLERDGLRDTPKRVARALKENFQGLYQDPKDVLTTTFDLGHEELIIVKDIEVYSHCEHHLAPFFGVAHIGYIPGESGKVTGLSKLARLVDLYARRPQVQERLTTQIADSMVEILQPGGVIVIIDCEHLCMSMRGVRKSQARTVTSAVRGMLRDPATRAEAMSLITGK

SEQ ID NO: 6779 - protein, 277 aa, unidentified
  source 1..277: note = Cloacibacillus porcorum
  REGION 1..277: note = tr|A0A1B2I797|A0A1B2I797_9BACT GTP cyclohydrolase FolE2 OS=Cloacibacillus porcorum OX=1197717 GN=folE2 PE=3; SV = 1
MRDVQNETDNRNMAIDRVGIRDISWPISVPDRTNGTQETVAQVSLSVSLPQDYRGTHMSRFVEVLGAQEKRVTFHNMEGLLVTLKERLKARDAHAVFDFPYFITKAAPVSGAKGRLRCDVRFDAALRGDDFDLVTTVTSPIQTLCPCSKEISQFGAHNQRAHAVMEVRLAGFVWLEEFVQMADDCASAPIYSLLKREDEKYVTERAYENPRFVEDSVRELALAMQADERVVWYRVSVTSHESIHNHDAFAVIERDKRTGSIPSRENLPCSPRRTEEG

SEQ ID NO: 6780 - protein, 258 aa, Cloacibacillus sp.
  REGION 1..258: note = tr|A0A1Y4GEQ2|A0A1Y4GEQ2_9BACT GTP cyclohydrolase FolE2 OS=Cloacibacillus sp. An23 OX=1965591 GN=folE2 PE=3; SV = 1
MRDVQNEADDRNLAIDRVGISGISWPISVPDRENGVQETVAEVSLSVSLPRDYRGTHMSRFVEVLSAQEKKVTFHNMEGLLANLKERLHASDAHAIFDFPYFITKTAPVSGARGRVRCDVRFDAALLGEDFDLVTTVEIPVQTLCPCSKEISEYGAHNQRAHASIAVRLASFVWLEEFIEIADRCASAPIYSLLKREDEKFVTERAYENPRFVEDAVRDLALAMQADERVRWFRVSVTSHESIHNHDAFAVIERDKRR

SEQ ID NO: 6781 - protein, 221 aa, Cloacibacterium normanense
  REGION 1..221: note = tr|A0A2S7I2C6|A0A2S7I2C6_9FLAO GTP cyclohydrolase 1; OS = Cloacibacterium normanense OX=237258 GN=folE PE=3 SV=1
MSNFFENDDDVFTGKDHTPLREDAFVKTPEEKIKIIEEKFAEIMHTLGLDMTDDSLKDSPKRVAKMYVNEIFGGLLPENKPGISTFSNKYKYRQMLVEKDITVYSFCEHHFLPIIGKAHVAYISNGDVIGLSKINRIVDYYAKRPQVQERLTMQIVDALKEALGTKDVACIIDAKHLCVNCRGIKDTASSTITAELSGIFRTNPITRQEFLHYVGSHAKLD

SEQ ID NO: 6782 - protein, 221 aa, Cloacibacterium normanense
  REGION 1..221: note = tr|A0A1E5UB93|A0A1E5UB93_9FLAO GTP cyclohydrolase 1; OS = Cloacibacterium normanense OX=237258 GN=folE PE=3 SV=1
MSNFFENDDDVFTGKDHTPLREDAFVKTPEEKIKIIEEKFAEIMHTLGLDMTDDSLKDSPKRVAKMYVNEIFGGLLPENKPGISTFSNKYKYRQMLVEKDITVYSFCEHHFLPIIGKAHVAYISNGEVIGLSKINRIVDYYAKRPQVQERLTMQIVDALKEALGTKDVACIIDAKHLCVNCRGIKDTASSTITAELSGIFRTNPITRQEFLHYVGSHAKLD

SEQ ID NO: 6783 - protein, 257 aa, unidentified
  source 1..257: note = Cloacimonas acidaminovorans
  REGION 1..257: note = tr|B0VHH4|B0VHH4_CLOAI GTP cyclohydrolase FolE2; OS = Cloacimonas acidaminovorans (strain Evry) OX=459349; GN = folE2 PE=3 SV=1
MSIPDIQSQTDNRKITIDKVGVKGIRYPIVVQDREKGIQHSVADLNIYVELPHHRRGTHMSRFLEVLNRYHTEVFIDKLDAFLSELKTTLKADSAYIDIMFPFFMKKQAPVSRVSSLLGYDCSFNASFKDCFELWIGVKVPVTTLCPCSKAISVYGAHNQRSDIFIKVRYREFVWLEELIQLAEKHSSCEIYPILKRSDEKYVTEKAYNNPKFVEDVVREITLELNKDKRITGFYVEAENFESVHNHNAYALISRNL

SEQ ID NO: 6784 - protein, 225 aa, unidentified
  source 1..225: note = Clostridia bacterium
  REGION 1..225: note = tr|A0A124FDD7|A0A124FDD7_9FIRM GTP cyclohydrolase 1; OS = Clostridia bacterium 41_269 OX=1635275 GN=folE PE=3 SV=1
MQKRWIVIIKHMDLNKKETEDFYRSIFLFKYILEVKEKLDVKKIEEGVKLILQGLGTEVEIGQEVMENTPKRVAQMYAEIFGGLKEKPEELLEVFTEEHEEMVLIKDIPLYSMCEHHLLPFYGLAHVAYIPSKHKVTGLSKLARVVDSFCKRPQIQERLTRQIADTIMKVLTPQGVLVVIEAEHMCMTMRGIKKPGSKTVTSAVRGIFRTNPATRAEAFSLINSR

SEQ ID NO: 6785 - protein, 189 aa, unidentified
  source 1..189: note = Clostridia bacterium
  REGION 1..189: note = tr|A0A523C2C2|A0A523C2C2_9FIRM GTP cyclohydrolase 1; OS = Clostridia bacterium OX=2044939 GN=folE PE=3 SV=1
MDREKVIQGVRLLLEGIGEDLQREGLRDTPNRIASMCEEIFCGLEQDPRELLQVVFTEEQHEEIILVKDIPLYSVCEHHLLPFYGKSHVAYIPKRGRLTGLSKLARVVEVLAKRPQMQERLTSQIADTIMQGLQPRGVLVVVEAEHMCMTMRGVRKPGSMTVTSAVRGYFATNDATRAEAFALINSRGQ

SEQ ID NO: 6786 - protein, 202 aa, unidentified
  source 1..202: note = Clostridiaceae bacterium
  REGION 1..202: note = tr|A0A316N7Y0|A0A316N7Y0_9CLOT GTP cyclohydrolase 1; OS = Clostridiaceae bacterium OX=1898204 GN=folE PE=3 SV=1
MAIDKDAIEKHIRGILVALGDDPDREGLKETPARVAKMYEEVFEGMNYSNHEIAQMFNKTFQDKMDFEEAGNDMVMVKDIEIFSYCEHHLALMYDMKVSVAYVPNGKVIGLSKIARIADMVGKRLQLQERIGSDIAEIMQEILDTKDVAVVIEGTHSCMTARGIKKNAASTKTYTLRGAFREDSFLQMRLESSLAMPQNKTE

SEQ ID NO: 6787 - protein, 185 aa, unidentified
  source 1..185: note = Clostridiaceae bacterium
  REGION 1..185: note = tr|A0A3R6LG17|A0A3R6LG17_9CLOT GTP cyclohydrolase 1; OS = Clostridiaceae bacterium AF29-16BH OX=2292179 GN=folE; PE = 3 SV=1
MVDKAKVEQAIRLLLEGIGEDVEREGLKETPNRIARMCEEIYGGLNQEADEHLLKQFEVENNEMVLEKDITFYSMCEHHLMPFYGKAHIAYIPDGKVTGLSKLARTVDVYARRPQIQERLTVQIADALERALSPKGVMVMLEAEHTCMTMRGIKKPGSKTITTITRGQFKEDRELQKMFLSMVKD

SEQ ID NO: 6788 - protein, 194 aa, unidentified
  source 1..194: note = Clostridiales bacterium
  REGION 1..194: note = tr|U2CK87|U2CK87_9FIRM GTP cyclohydrolase 1; OS = Clostridiales bacterium oral taxon 876 str. F0540; OX = 1321778 GN=folE PE=3 SV=1
MQCNRSVKMIDKLKIKEAVKMILEAIGEDPEREGLIDTPDRIARMYEEIFSGNFESAKTHLDRVFTVEEDGIVLEKDIQFYSMCEHHLIPFYGKVHIAYISNGKVTGLSKLARTVEVFAKRPQLQERMTNQIAKALMDYLNPKGVMVVIEAEHLCMTMRGVKKPGSKTVTAAYLGDFKDNDNLKNEVFRMISLG

SEQ ID NO: 6789 - protein, 186 aa, unidentified
  source 1..186: note = Clostridiales bacterium
  REGION 1..186: note = tr|A0A349Q9X1|A0A349Q9X1_9FIRM GTP cyclohydrolase 1; OS = Clostridiales bacterium OX=1898207 GN=folE PE=3 SV=1
MKNNNIDREKIKKAVCDILEAIGEDPMREGLLQTPDRVERMLEELTAGYNDDAKTHLSKTFVESGSEVVVEKDIDFSSTCEHHLMPFFGKVHIAYIPCGKVVGLSKLARVVEVYAKRLQLQERLNAQIADAIFEQLNPKGVIVVIEAHHTCMSARGVKKIGAKTVTFAKRGEVDELVEKMLIEGIK

SEQ ID NO: 6790 - protein, 190 aa, unidentified
  source 1..190: note = Clostridioides difficile
  REGION 1..190: note = sp|Q18BW7|GCH1_CLOD6 GTP cyclohydrolase 1; OS = Clostridioides difficile (strain 630) OX=272563 GN=folE; PE = 3 SV=1
MNKVDKEKIQHAVREILEAIGEDPDREGLIETPNRVARMYEEIFSGLSEEPRDHLKVLFADEKHEELVLVKDIPFYSCCEHHLVPFFGKAHIAYLPKGGRLTGLSKLARVIDTLAKRPQLQERITKNAADIIMEELQPYGVLVVVEAEHMCMTMRGVKKPGSKTVTSAVRGIFEKDIASRAEAMSLITMK

SEQ ID NO: 6791 - protein, 190 aa, unidentified; identical to SEQ ID NO: 6790
  source 1..190: note = Clostridioides difficile
  REGION 1..190: note = tr|A0A031WEP4|A0A031WEP4_CLODI GTP cyclohydrolase 1; OS = Clostridioides difficile OX=1496 GN=folEA PE=3 SV=1

SEQ ID NO: 6792 - protein, 188 aa, Clostridium aceticum
  REGION 1..188: note = tr|A0A0D8IEF0|A0A0D8IEF0_9CLOT GTP cyclohydrolase 1; OS = Clostridium aceticum OX=84022 GN=folE PE=3 SV=1
MDKPKIERAIRDILEAIGEDPDREGLIDTPKRIARMYEEIFMGLEADPKEHLDIYFQDEKHEELVLVKDISFYSSCEHHLVPFYGKAHVGYIPKDGKLTGLSKLARVVDTIARRPQLQERLTSMIADTIVEKLQPQGVIVVVEAEHMCMTMRGVKKPGAKTLTSVVRGVFQKDAKARAEAMALIDFGR

SEQ ID NO: 6793 - protein, 192 aa, Clostridium acetireducens
  REGION 1..192: note = tr|A0A1E8EYV4|A0A1E8EYV4_9CLOT GTP cyclohydrolase 1; OS = Clostridium acetireducens DSM 10703 OX=1121290; GN = folE_2 PE=3 SV=1
MVDEGKIKEAVKMIIEAVGEDPTREGLLETPDRIAKMYSEIFSGIEESPKKHLSKVFTVESDDLVIERDINFYSMCEHHFLPFFGKAHIAYVPNGKVAGLSKLARTLEIFAKRPQLQERLTSQIADALMENLNCKGVMIIVEAEHLCMSMRGIKKPGSKTTTMVIRGIFKEDYKLQQHVLNIINFKRIEDRA

SEQ ID NO: 6794 - protein, 195 aa, Clostridium acetireducens
  REGION 1..195: note = tr|A0A1E8EYJ1|A0A1E8EYJ1_9CLOT GTP cyclohydrolase 1; OS = Clostridium acetireducens DSM 10703 OX=1121290; GN = folE_1 PE=3 SV=1
MAIDTKAIQEHIKGILIALGDDPNREGLKDTPKRVAKMYEEVFEGMNYTNDEISEMFNKTFEDDLSIEENNKDMVLMKNIEIFSHCEHHLALMYNMKVTVAYVPNKKVIGLSKIARIADMVGKRLQLQERIGSDIAEIIQKITGSKDVAVIIEAEHGCMTTRGIKKPGTKTLSTTLKGRFNTDVILNNKLMMLYK

SEQ ID NO: 6795 - protein, 195 aa, Clostridium acetobutylicum
  REGION 1..195: note = sp|Q97D54|GCH1_CLOAB GTP cyclohydrolase 1; OS = Clostridium acetobutylicum (strain ATCC 824 / DSM 792 / JCM 1419 / LMG 5710 / VKM B-1787) OX=272562 GN=folE PE=3; SV = 1
MSIDTKAIEKHIRGILIALGDDPDREGLKETPKRVAKMYEEVFKGMEYSNDDIAEMFNKTFEEDLKESEEDNIVLVKDIEIFSHCEHHLTLMYNMTVAVAYIPNKRLIGLSKIARIADMVSRRLQLQERIGKDIAEIMEKVTASKDIAVIIKGEHGCMTSRGIKKPGALTTTMTLKGRFKNDDSLVTKLMALYKA

SEQ ID NO: 6796 - protein, 263 aa, Clostridium acidisoli
  REGION 1..263: note = tr|A0A1W1XQH5|A0A1W1XQH5_9CLOT GTP cyclohydrolase FolE2 OS=Clostridium acidisoli DSM 12555 OX=1121291; GN = folE2 PE=3 SV=1
MEDIQNKKGDFDFKIDKVGVENIQHPFYIKKKDGNVIETIGNFSMSVSLEKYLKGINMSRLPIILSELYVDKWKMENYKEDTEFVLKKICEKLESKDSYFDIKFKYFLAKSAPVSKFEGLMPYECKIESALNKEKDKFDMILTVEVPITTLCPCSKAISEYSAHNQRGYVVVSVRYNGEIHIEDIISMIEEVGSCELYPILKRIDEKYVTEKAYENPRFVEDIVRLAAKKLYDNKNITWFKISSHHQESIHPHDAYAVIEINK

SEQ ID NO: 6797 - protein, 186 aa, Clostridium algidicarnis
  REGION 1..186: note = tr|A0A2S6FYN2|A0A2S6FYN2_9CLOT GTP cyclohydrolase 1; OS = Clostridium algidicarnis DSM 15099 OX=1121295 GN=folE; PE = 3 SV=1
MDNERIENAVREILYAIGEDPDREGLLDTPKRMARMYEEIFSGLNEDPKKHLEVYFQEEQYEELVLIKDIPFYSVCEHHLVPFYGKAHVGYLPKGGRLTGLSKLARVVDSISKRPQLQERLTASIANAIVEKLDPYGVIVVIEAEHMCMTMRGVKKPGSKTITSAVRGTFATDPKSRAEVLSMINK

SEQ ID NO: 6798 - protein, 191 aa, unidentified
  source 1..191: note = [Clostridium] algidixylanolyticum
  REGION 1..191: note = tr|A0A419T845|A0A419T845_9FIRM GTP cyclohydrolase 1; OS = [Clostridium] algidixylanolyticum OX=94868 GN=folE PE=3; SV = 1
MAIDIEAIRKHIRGIIVALGDNPDREGLKDTPERVAHMYEEIFEGMNYSNHEISEMFDKTFEENLEFIQDNQDLIMVRDIDVFSYCEHHLALMYDMKVSVAYVPNGKVIGLSKIARIVDMVSKRLQLQERIGSDIAEIMQEITGSEDVAVLIEGYHSCMSTRGIKKVSAKTQTATFRGRFQTDVALQIRLR

SEQ ID NO: 6799 - protein, 185 aa, Clostridium argentinense
  REGION 1..185: note = tr|A0A0C1R3M1|A0A0C1R3M1_9CLOT GTP cyclohydrolase 1; OS = Clostridium argentinense CDC 2741 OX=1418104 GN=folE; PE = 3 SV=1
MVNEEKIREAVSMIIEAIGEDPEREGLKDTPDRIARMYSEIFSGLTEDPKEHLKKTFTVENDDIVIEKDIVFYSMCEHHFVPFYGKAHIAYIPNGKVAGLSKLARTVEVFAKRPQLQERMTSQIADSIMKNLQTKGALVIIEAEHLCMTMRGVRKPGTKTATIVSRGIFKDNISLQNQVISLIDK

SEQ ID NO: 6800 - protein, 195 aa, Clostridium argentinense
  REGION 1..195: note = tr|A0A0C1QZ87|A0A0C1QZ87_9CLOT GTP cyclohydrolase 1; OS = Clostridium argentinense CDC 2741 OX=1418104 GN=folE; PE = 3 SV=1
MAIDTKAIEGHVRGILIALGDNPDREGLKDTPKRVAKMYKEVFEGMNYTNDEIASMFNTTFENDLDIKENNKDMVFMKGIEIFSYCEHHLALMYNMKVSVAYIPNKKVVGLSKIARIADMVGRRLQLQERIGSDIAEIIQKVTGSEDVAVIIEGEHGCMTSRGIQKPGTKTISTTLEGRFNTDPILNNKLMMLYQ

SEQ ID NO: 6801 - protein, 186 aa, unidentified
  source 1..186: note = Clostridium autoethanogenum
  REGION 1..186: note = tr|A0A3M0SKZ4|A0A3M0SKZ4_9CLOT GTP cyclohydrolase 1; OS = Clostridium autoethanogenum OX=84023 GN=folE PE=3 SV=1
MMDEKKIREAVKMMLEAIGEDPEREGLVETPDRIARMYKEIFEGLDESPEKHLRKVFTVDSDDIVLEKDITFYSMCEHHLLPFYGKAHIAYIPDGKVVGLSKLARTVEVFAKRLQLQERMSAQIADAMMKYVKVKGVMVVVEAEHMCMTMRGIKKPGSKTVTAVARGLFKSEPRLRDEVYRMINME

SEQ ID NO: 6802 - protein, 185 aa, unidentified
  source 1..185: note = Clostridium autoethanogenum
  REGION 1..185: note = tr|U5RWI5|U5RWI5_9CLOT GTP cyclohydrolase 1; OS = Clostridium autoethanogenum DSM 10061 OX=1341692; GN = folE PE=3 SV=1
MDEKKIREAVKMMLEAIGEDPEREGLVETPDRIARMYKEIFEGLDESPEKHLRKVFTVDSDDIVLEKDITFYSMCEHHLLPFYGKAHIAYIPDGKVVGLSKLARTVEVFAKRLQLQERMSAQIADAMMKYVKVKGVMVVVEAEHMCMTMRGIKKPGSKTVTAVARGLFKSEPRLRDEVYRMINME

SEQ ID NO: 6803 - protein, 184 aa, Clostridium baratii
  REGION 1..184: note = tr|A0A174TNL8|A0A174TNL8_9CLOT GTP cyclohydrolase 1; OS = Clostridium baratii OX=1561 GN=folE PE=3 SV=1
MVNKEKIIEGVKLIIEGIGEDPNREGLIETPDRIARMYEEIFSGLHKTAKDHLSKTFKVSRDDLVIEKDIVFYSMCEHHFVPFFGKAHIAYIPNGKVAGLSKLARTLETYAKKPQLQENLTNEVADALMEYLDAKGVVVMIEAEHMCMTMRGVKKPGTKTITTTYRGICKEDKDLKNEILSLMK

SEQ ID NO: 6804 - protein, 184 aa, Clostridium baratii
  REGION 1..184: note = tr|A0A0A7G1U7|A0A0A7G1U7_9CLOT GTP cyclohydrolase 1; OS = Clostridium baratii str. Sullivan OX=1415775 GN=folE; PE = 3 SV=1
MVNKEKIIEGVKLIIEGIGEDPNREGLIETPDRIARMYEEIFAGLHKTAEEHLSKTFKVSRDDLVIEKDIVFYSMCEHHFVPFFGKAHIAYIPNGRVAGLSKLARTLEIYAKKPQLQENLTNEVADALMEYLDAKGVVVMIEAEHMCMTMRGVKKPGTRTITTTYRGICKEDKDLKNEILSLMK

SEQ ID NO: 6805 - protein, 188 aa, Clostridium bartlettii
  REGION 1..188: note = tr|R5Y0G5|R5Y0G5_9CLOT GTP cyclohydrolase 1; OS = Clostridium bartlettii CAG:1329 OX=1263063 GN=folE PE=3; SV = 1
MAVDQAKIRKAVRDILEAIGEDPDREGLVGTPDRVARMYEEIFCGLHQDPREHLKVLFADEKHEEMVVVKDIPFYSSCEHHLVPFFGKAHVVYIPKDGRLTGLSKLARVIETIAKRPQLQERITKDTANIIMEELRPYGVMVVVEAEHMCMTMRGVKKPGSKTVTSAVRGVFESDALARSEAMALINL

SEQ ID NO: 6806 - protein, 197 aa, Clostridium beijerinckii
  REGION 1..197: note = sp|A6LWG6|GCH1_CLOB8 GTP cyclohydrolase 1; OS = Clostridium beijerinckii (strain ATCC 51743 / NCIMB 8052) OX=290402 GN=folE PE=3 SV=1
MPKKIDTKKIEECIREIIVALGDDPNREGLLDTPKRVSKMYEEVFQGMTLSNREIAEAFGTTFENEDYDSETHNNMVVVKDIPIHSYCEHHLALMYNMKVTVVYIPKDKIIGLSKISRIADMVGRRLQLQERIGTDIAEIVSMVTKSSDVGVLITGEHGCMTSRGIKKPGTLTTTTTFTGKFQTNDLLRQEALLIMK

SEQ ID NO: 6807 - protein, 197 aa, Clostridium beijerinckii
  REGION 1..197: note = tr|A0A0K2MEJ6|A0A0K2MEJ6_CLOBE GTP cyclohydrolase 1; OS = Clostridium beijerinckii NRRL B-598 OX=1428454 GN=folE; PE = 3 SV=1
MPKKIDTKKIEECIREIIVALGDDPDREGLLDTPKRVSKMYEEVFQGMTLSNREIAEAFGTTFENEDYDSETHNNMVVVKEIPIHSYCEHHLALMYNMKVTVVYIPKDKIIGLSKISRIADMVGRRLQLQERIGTDIAEIVSMVTKSSDVGVLITGEHGCMTSRGIKKPGTLTTTTTFTGKFQTNDLLRQEALLIMR

SEQ ID NO: 6808 - protein, 185 aa, unidentified
  source 1..185: note = [Clostridium] bolteae
  REGION 1..185: note = tr|R0B2T0|R0B2T0_9FIRM GTP cyclohydrolase 1; OS = [Clostridium] bolteae 90B8 OX=997897 GN=folE PE=3 SV=1
MIDRNKVEQAVRLLLEGMGEDPSREGLIDTPERVARMYEELYSGMDEHPGMYLEKTFRAENNDLIVEKDITFYSVCEHHLLPFYGKVHVAYVPDKKVAGLSKLARTVEVFSRRLQIQEQLTAQIADALMDGLAPRGVMVMMEAEHMCMTMRGIKKPGSRTVTVVKRGCFCQREDLVNLFFQMVRG

SEQ ID NO: 6809 - protein, 185 aa, unidentified
  source 1..185: note = [Clostridium] bolteae
  REGION 1..185: note = tr|R0AMY7|R0AMY7_9FIRM GTP cyclohydrolase 1; OS = [Clostridium] bolteae 90A9 OX=997894 GN=folE PE=3 SV=1
MIDRNKVEQAVRLLLEGMGEDPSREGLIDTPERVARMYEELYSGMDEHPGMYLEKTFRAENNDLIVEKDITFYSVCEHHLLPFYGKVHVAYVPDKKVAGLSKLARTVEVFSRRLQIQEQLTAQIADALMDGLAPRGVMVMMEAEHMCMTMRGIKKPGSRTVTVVKRGCFCRQEDLVNLFFQMVRG

SEQ ID NO: 6810 - protein, 185 aa, Clostridium bolteae
  REGION 1..185: note = tr|A8RZ27|A8RZ27_CLOBW GTP cyclohydrolase 1; OS = Clostridium bolteae (strain ATCC BAA-613 / WAL 16351); OX = 411902 GN=folE PE=3 SV=1
MIDRNKVEQAVRLLLEGMGEDPSREGLIDTPERVARMYEELYSGMDEHPGMYLEKTFRAENNDLIVEKDITFYSVCEHHLLPFYGKVHVAYVPDKKVAGLSKLARTVEVFSRRLQIQEQLTAQIADALMDGLAPRGVMVMMEAEHMCMTMRGIKKPGSRTVTVVKRGCFCQRENLVNLFFQMVRG

SEQ ID NO: 6811 - protein, 185 aa, Clostridium bolteae; identical to SEQ ID NO: 6809
  REGION 1..185: note = tr|R5F5Y3|R5F5Y3_9CLOT GTP cyclohydrolase 1; OS = Clostridium bolteae CAG:59 OX=1263064 GN=folE PE=3 SV=1

SEQ ID NO: 6812 - protein, 263 aa, unidentified
  source 1..263: note = Clostridium bornimense
  REGION 1..263: note = tr|W6RYM9|W6RYM9_9CLOT Putative GTP cyclohydrolase 1 type 2 OS=Clostridium bornimense OX=1216932 GN=CM240_1566; PE = 4 SV=1
MKIKDFEVYMNGIAPTYLKEDFDNVGLMVGDFEDEISKILVALDGTIEVIEEAAEKKCDLILTHHPLIFSKPSSITNKTIQGIKIRNLIKNNIALYSAHTNLDSVNGGITDTLGQILELENMTLLSSNPLSSDAGIGRIGVTSGDITLKDILDKIKKKFGINNIRYCGDLTNKINRVALLNGSGQDFFKYAKEQSCDLIITGDTTYHYVSDYNEEKINIIDMEHFYSEWIPFIEISKNIKKDLKKYGVDVLLSEKSKSPYKNY

SEQ ID NO: 6813 - protein, 197 aa, unidentified
  source 1..197: note = Clostridium bornimense
  REGION 1..197: note = tr|W6RUY1|W6RUY1_9CLOT GTP cyclohydrolase 1; OS = Clostridium bornimense OX=1216932 GN=folE PE=3 SV=1
MAKKIDTNKIQECIREIIIALGDDPNREGLLETPKRVAKMYEEVFEGMNYTNKEIADMFGTTFEEEDYVGETYKNMVVVGNIPIHSYCEHHLALMYNMKVTVVYIPKDKIIGLSKIARIADMVGRRLQLQERIGSDIAEIISMVTETEDVGVLITGEHSCMTARGIKKPGTLTTTTTFLGKFQEDDMLRQEALLIMK

SEQ ID NO: 6814 - protein, 196 aa, Clostridium botulinum
  REGION 1..196: note = sp|A7FU67|GCH1_CLOB1 GTP cyclohydrolase 1; OS = Clostridium botulinum (strain ATCC 19397 / Type A); OX = 441770 GN=folE PE=3 SV=1
MAIDVKAIEEHIRGILIALGDNPEREGLKNTPKRVAKMYEEVFKGMCYSNDEIAEMFNVTFEDDLCINDNENDMVFMKEIEIFSHCEHHLALMYNMKVAIAYIPKKKIIGLSKIARIADMVGRRLQLQERIGSDIAEILQKITDSEDVAVIIEGEHGCMTTRGIKKPGTKTITTTLRGKFNTDPIVSNKLMMLYTK

SEQ ID NO: 6815 - protein, 196 aa, Clostridium botulinum
  REGION 1..196: note = tr|A0A0B4WEA4|A0A0B4WEA4_CLOBO GTP cyclohydrolase 1; OS = Clostridium botulinum Prevot_594 OX=1408284 GN=folE; PE = 3 SV=1
MAIDVKAIEEHIRGILIALGDNPEREGLKDTPKRVAKMYQEVFKGMCYSNDEIAEMFNVTFEDDLCINDNVNDMVFMKDIEIFSHCEHHLALMYNMKVAIAYIPKGKIIGLSKIARIADMVGRRLQLQERIGSDIAEILQKVTNSEDVAVIIEGEHGCMTTRGIKKPGTKTITTTLRGKFNTDSIVSNKLMMLYTK

SEQ ID NO: 6816 - protein, 198 aa, Clostridium butyricum
  REGION 1..198: note = tr|C4IIS4|C4IIS4_CLOBU GTP cyclohydrolase 1; OS = Clostridium butyricum E4 str. BoNT E BL5262 OX=632245; GN = folE PE=3 SV=1
MKKKIDTEKIQECIREILIALGDNPDREGLKDTPKRVAKMYEEVFEGMTHTNEEIAAMFGTTFEEESCVEEVHNNMVIVRDIPIHSYCEHHLALMYNMKVNVVYIPNKKIIGLSKIARIADMVGKRLQLQERIGADIAEIVSMITETKDVGVVITGEHSCMTARGIKKPGTLTTTTTFIGDFEENYMLRQEALLLIKQ

SEQ ID NO: 6817 - protein, 198 aa, Clostridium butyricum
  REGION 1..198: note = tr|A0A2S7F9Q6|A0A2S7F9Q6_CLOBU GTP cyclohydrolase 1; OS = Clostridium butyricum OX=1492 GN=folE PE=3 SV=1
MKKKIDTEKIQECIREILIALGDNPDREGLKDTPKRVAKMYEEVFEGMTHTNEEIAAMFGTTFEEESCVEEVHNNMVIVRDIPIHSYCEHHLALMYNMKVSVVYIPNKKIIGLSKIARIADMVGKRLQLQERIGADIAEIVSMITETKDVGVVITGEHSCMTARGIKKPGTLTTTTTFIGDFEENSMLRQEALLLIKQ

SEQ ID NO: 6818 - protein, 185 aa, Clostridium carboxidivorans
  REGION 1..185: note = tr|C6Q2N5|C6Q2N5_9CLOT GTP cyclohydrolase 1; OS = Clostridium carboxidivorans P7 OX=536227 GN=folE PE=3; SV = 1
MIDENKIKTAVRMIIEAIGENPDREGLQETPDRIARMYSEIFAGLEQSPEKHLKKIFTVKSNDIVLEKDIQFYSMCEHHLVPFYGKAHIAYIPDGKVTGLSKLARTVEVFAKRPQLQERLTGQVADAIMEYLNAKGVMVVVEAEHMCMTMRGVKKPGSRTVTVVTRGEFHENHSLKDEVYKMINL

SEQ ID NO: 6819 - protein, 33 aa, Clostridium carnis
  REGION 1..33: note = tr|A0A3P6K8T2|A0A3P6K8T2_9CLOT GTP cyclohydrolase I; OS = Clostridium carnis OX=1530 GN=folE PE=4 SV=1
MMDKEKICEGVKLILEGIGEDINREGLIETPIK

SEQ ID NO: 6820 - protein, 184 aa, Clostridium cavendishii
  REGION 1..184: note = tr|A0A1M6EVP9|A0A1M6EVP9_9CLOT GTP cyclohydrolase 1; OS = Clostridium cavendishii DSM 21758 OX=1121302 GN=folE; PE = 3 SV=1
MDKQKIKEAVKMIIEAVGDDPNREGLLETPDRIARMYEEIFSGISQTAETYLTKNFSVEGEDIVLEKDITFYSMCEHHFLPFYGKVHIAYIPNGKVAGLSKLARCVDVYSKKPQLQERLTYEIADAIMEYLDAKGSMVIIEAEHMCMTMRGVRKPGTKTITSSYRGVFKEDSSLKNEVYKMLSM

SEQ ID NO: 6821 - protein, 183 aa, Clostridium celatum
  REGION 1..183: note = tr|L1QDR7|L1QDR7_9CLOT GTP cyclohydrolase 1; OS = Clostridium celatum DSM 1785 OX=545697 GN=folE PE=3 SV=1
MDKEKIMEGVKLILEGVGEDVTREGLIETPDRIARMYMEIFEGLGKDASEILSKTFSVEDNDLVIEKDINFFSMCEHHLVPFFGKAHVAYIPKGKVVGLSKLARTVDLYAKKPQLQERLTTEIADALMKYLDAEGAMVVIEAEHTCMTMRGIKKLGAKTVTTTYRGVFKENLELRREVMNFIK

SEQ ID NO: 6822 - protein, 260 aa, Clostridium cellulovorans
  REGION 1..260: note = tr|D9SS47|D9SS47_CLOC7 GTP cyclohydrolase FolE2; OS = Clostridium cellulovorans (strain ATCC 35296 / DSM 3052 / OCM 3 / 743B) OX=573061 GN=folE2 PE=3 SV=1
MIDIQNTRGNYGKKIDKVGINNLIHPIRIQGKNNEIQNTVGNFSLSVSLAQELRGVNMSRLPIVLTELYEENFVFKNYREDLLYFLNEIKNKVEGEDSYISVCFDYFLYKKAPVSGFSGLMNYKCNFEGELKEDKYSYFLTVEVPITTLCPCSKAISISSAHNQRGYVTVRAELSENIEIEEFINIIEQAGSCDLYPILKREDEKYVTEKSYDNPRFVEDIVRIVADGLCEVDNVVSFNVKSVHEESIHAHNAFAEISYK

SEQ ID NO: 6823 - protein, 184 aa, Clostridium chauvoei
  REGION 1..184: note = tr|S6FNE0|S6FNE0_9CLOT GTP cyclohydrolase 1; OS = Clostridium chauvoei JF4335 OX=1351755 GN=folE PE=3 SV=1
MIDKDKVKAGVKLILEAIGEDVNREGLIETPDRIARMYEEIFSGIGQTAEEILSKTFKVESNDLVIEKDITFFSMCEHHLVPFYGKAHIAYIPKDRVAGLSKLARCVEIYAKKPQLQEKLTAEVADAIMEYLGAEGAMVVIEAEHMCMTMRGVKKPGTRTVTTTYRGRFKEDYELRREVLALIK

SEQ ID NO: 6824 - protein, 263 aa, Clostridium chromiireducens
  REGION 1..263: note = tr|A0A1V4IJJ1|A0A1V4IJJ1_9CLOT Putative GTP cyclohydrolase 1 type 2 OS=Clostridium chromiireducens; OX = 225345 GN=CLCHR_31800 PE=4 SV=1
MIRVMDIEMEIERLAPKFLAESYDNVGLMVGDELKEVKKVFLALDCTKEVIKEAVENKSDLIITHHPLIFRKPKSIIKGELLGDKVIELIKEDIALYSCHTNLDSVKGGINETLVKMLGFNSDEIIEPCENSNYKDSGIGRIVRLQNETTLNDIINIVKKNLNIKNMRIVRGNDKIKALAIINGSGQDYFSKAKALGADCIITGDTTYHYASDFKEMGISIIDAGHFATEYLIFLKTLDFLREKFKGVEFTVSKKCEDPYEFV

SEQ ID NO: 6825 - protein, 197 aa, Clostridium chromiireducens
  REGION 1..197: note = tr|A0A1V4IBU3|A0A1V4IBU3_9CLOT GTP cyclohydrolase 1; OS = Clostridium chromiireducens OX=225345 GN=folE PE=3 SV=1
MPKKINTNKIEECIREIIIALGDDPNREGLLDTPKRVAKMYEEVFQGMTLSNEEIAEMFGTTFENEEFISDTYNNMVVVKDIPIHSFCEHHLALMYNMKVTVVYIPGEKIIGLSKISRIADMVGRRLQLQERIGSDIAEIVSMATGSNDVGVLITGEHSCMTSRGIKKPGTATTTTTFIGKFQVNDMLRQEALLIMK

SEQ ID NO: 6826 - protein, 185 aa, unidentified; identical to SEQ ID NO: 6809
  source 1..185: note = [Clostridium] clostridioforme
  REGION 1..185: note = tr|N9Z4Y6|N9Z4Y6_9FIRM GTP cyclohydrolase 1; OS = [Clostridium] clostridioforme 90A7 OX=999407 GN=folE; PE = 3 SV=1

SEQ ID NO: 6827 - protein, 188 aa, unidentified
  source 1..188: note = [Clostridium] cocleatum
  REGION 1..188: note = tr|A0A1I0EX52|A0A1I0EX52_9FIRM GTP cyclohydrolase 1; OS = [Clostridium] cocleatum OX=69824 GN=folE PE=3 SV=1
MIDTKKIEKHIYGILEALGDDPNREGLKDTPKRVAKMYEEVFAGMNYTNQQIAEMFNKTFEDDLDFANQEVVVIKDIDIFSYCEHHLALMYDMKVTVAYIPCNKVIGLSKIARIADMAARRLQLQERIGTDIAEIISLVTGSKDIAVIIKGKHSCMSSRGIKKVNSTTITSILTGRFETDSKLQIYLR

SEQ ID NO: 6828 - protein, 110 aa, Clostridium colicanis
  REGION 1..110: note = tr|A0A151AL13|A0A151AL13_9CLOT Putative GTP cyclohydrolase 1 type 2 OS=Clostridium colicanis DSM 13634; OX = 1121305 GN=CLCOL_20280 PE=4 SV=1
MDFQLFKVETFIPEEYVNELRFELNKVGALTVDEKYDNCMSTSRVKGSWRPLEGTNPYLGEVGEICEAEEIKVEFTCKKEVIRKAIEVIKEVHPYEVPVINVIPVMTNYF

SEQ ID NO: 6829 - protein, 191 aa, Clostridium colicanis
  REGION 1..191: note = tr|A0A151AQV4|A0A151AQV4_9CLOT GTP cyclohydrolase 1; OS = Clostridium colicanis DSM 13634 OX=1121305 GN=folE PE=3; SV = 1
MAIDTEAIQEHIKGIIIALGDDPNREGLKDTPKRVARMFEEVFEGMNYSNHEIANMFNKTFEEDLAFVEENQDLIIVRDIEVFSHCEHHLALMYDMKVTVAYVPNGKVIGLSKIARIVDMVSKRLQLQERIGSDIAEIMQKITGSEDIAVLIEGYHSCMTARGINKVAAKTQTSTLRGRFKTDSSLRMRLK

SEQ ID NO: 6830 - protein, 189 aa, Clostridium collagenovorans
  REGION 1..189: note = tr|A0A1M5TXG4|A0A1M5TXG4_9CLOT GTP cyclohydrolase 1; OS = Clostridium collagenovorans DSM 3089 OX=1121306 GN=folE; PE = 3 SV=1
MENRHIDKEKIKTAVSMIIEAIGEDVNREGLKDTPDRIARMYEEVFSGMDEDASVHLSRTFHVEDDNLVLEKDIQFYSMCEHHFLPFFGKVHIAYIPNGKVAGLSKLARTVEVFAKRPQLQERLTFQVAEAIMKNLNAKGVMVVVEAEHLCMSMRGIKKPGSSTATIVAKGNFENNMDLQKQVLELIKL

SEQ ID NO: 6831 - protein, 196 aa, unidentified
  source 1..196: note = Clostridium combesii
  REGION 1..196: note = tr|A0A2G7HGK2|A0A2G7HGK2_9CLOT GTP cyclohydrolase 1; OS = Clostridium combesii OX=39481 GN=folE PE=3 SV=1
MAIDVKAIEEHIRGILIALGDNPEREGLKNTPKRVAKMYEEVFKGMCYSNDEIAEMFNVTFEDDLCINDNENDMVFMKKIEIFSHCEHHLALMYNMKVAIAYIPKKKIIGLSKIARIADMVGRRLQLQERIGSDIAEILQKVTDSEDVAVIIEGEHSCMTTRGIKKPGTKTITTTLRGKFNTDPIVSNKLMMLYTK

SEQ ID NO: 6832 - protein, 271 aa, unidentified
  source 1..271: note = Clostridium coskatii
  REGION 1..271: note = tr|A0A166SL08|A0A166SL08_9CLOT Putative GTP cyclohydrolase 1 type 2 OS=Clostridium coskatii OX=1705578; GN = WX73_00947 PE=4 SV=1
MYLKVQDIHDILEKRAPSILKESYDNVGLMVGDMKCEVGSILVALDCTLEVIEEALRNNCNLIFTHHPLLFKRPYTITTDTLIGKKIIELIRNNINVYSSHTNLDSVKGGINDIIMEKLGFTNYNVIEPSRIKNYGENDCGIGRIASLTEPMTLARFCNEVKKCLNISSVRYSGNELKIINKVALINGSGQDYFDAAKALGADCVITGDTTYHYVSDFQEQGIAVIDAGHFGTEWPAMEIIANFLRHEIKVRGFENTVILSKVNKSPYKYK

SEQ ID NO: 6833 - protein, 111 aa, unidentified
  source 1..111: note = Clostridium coskatii
  REGION 1..111: note = tr|A0A166TEW9|A0A166TEW9_9CLOT Putative GTP cyclohydrolase 1 type 2 OS=Clostridium coskatii OX=1705578; GN = WX73_04094 PE=4 SV=1
MEYKNYKMETFIPEEYVTKLRESLNDIGALTIGGNYDNCMSVSKVTGYWRPLSGANPFKGEKGEVSEEEECKVEFCCKSDIVEKAISTIRKVHPYDEPVINVIPLSNFVKY

SEQ ID NO: 6834 - protein, 258 aa, Clostridium cylindrosporum
  REGION 1..258: note = tr|A0A0J8D980|A0A0J8D980_CLOCY GTP cyclohydrolase FolE2 OS=Clostridium cylindrosporum DSM 605 OX=1121307; GN = folE2 PE=3 SV=1
MKDVQSQKDTRNIALKKVGINDLKWPIKVLDKTSGEQTTVSTMDLSVYLPHDQRGTHMSRFVEVIKEAPQFSPKGLEEMLKHLVERLEAKTGHCRIAFDYFVTKASPVTGIMAPYDVQCCFDAEYSVETGFKFILEVAVPATTLCPCSKEISEFGAHNQRAIIKMKIEMDKLIWIEDLVKIAEESASSPIFTLLKRQDEKWVTEQAYLNPRFVEDVARETAARLEAYEGITWYSTYVESIESIHNHNAFAYTEKGCTL

SEQ ID NO: 6835 - protein, 197 aa, Clostridium diolis; identical to SEQ ID NO: 6807
  REGION 1..197: note = tr|A0A2P8RLZ1|A0A2P8RLZ1_9CLOT GTP cyclohydrolase 1; OS = Clostridium diolis OX=223919 GN=folE PE=3 SV=1

SEQ ID NO: 6836 - protein, 195 aa, Clostridium disporicum
  REGION 1..195: note = tr|A0A174EQW7|A0A174EQW7_9CLOT GTP cyclohydrolase 1; OS = Clostridium disporicum OX=84024 GN=folE_1 PE=3 SV=1
MAIDKEKIEMHIKGILEAIGEKPEREGLIDTPKRVAKMYEEIFDGINYSNEDIVEMFNKTFSEELDGIDKCGNMIIIKDIDFFSYCEHHMALMYNMKAHIAYIPNEKIIGLSKVARIVDLVGKRLQLQERIGMDISEIIKTIVGTENVAVIIEGEHGCMTTRGIKKNNSKTITSIFSGLFETNESIKNQMLLLYK

SEQ ID NO: 6837 - protein, 183 aa, Clostridium disporicum
  REGION 1..183: note = tr|A0A173YEJ3|A0A173YEJ3_9CLOT GTP cyclohydrolase 1; OS = Clostridium disporicum OX=84024 GN=folE_2 PE=3 SV=1
MNKEMIMEGVKLILEGIGEDVNREGLIETPDRIARMYMEIFDGIGKDAKDVLSKTFSVENNDLVLEKDITFFSMCEHHLVPFFGKAHIAYIPKGKVAGLSKLARTVEVYAKKPQLQEKLTTEIADAIMEYLDAEGAMVVIEAEHTCMTMRGVKKPGAKTVTTTYRGVFRENIDLRREVMNFIK

SEQ ID NO: 6838 - protein, 185 aa, Clostridium drakei
  REGION 1..185: note = tr|A0A2U8DK98|A0A2U8DK98_9CLOT GTP cyclohydrolase 1; OS = Clostridium drakei OX=332101 GN=folE PE=3 SV=1
MIDEGKIKTAVRMIIEAIGENPDREGLQETPDRIARMYSEIFAGLDQNPEKHLKKIFTVKSNDIVLEKDVQFYSMCEHHLVPFYGKVHIAYIPNGKVTGLSKLARTVEVFAKRPQLQERLTGQVADAIMEYLNAKGVMVVIEAEHMCMTMRGIKKPGSKTVTVVTRGEFHENYSLKDEVYKMINL

SEQ ID NO: 6839 - protein, 196 aa, Clostridium estertheticum
  REGION 1..196: note = tr|A0A1J0GDY6|A0A1J0GDY6_9CLOT GTP cyclohydrolase 1; OS = Clostridium estertheticum subsp. estertheticum OX=1552; GN = folE PE=3 SV=1
MAIDTEAIEKHIRGILIALGDDPNREGLKDTPKRVAKMYEEVFAGMCYSNAEIAKMFDTTFADDLIVNDDSRDIVIMKDIQIFSHCEHHLALMYDMKVTVAYVPNKKIIGLSKIARIADMVGRRLQLQERIGTDIAETMEMVTTSSDIAVIIEGEHACMTTRGIKKPGTKTMSTTFRGRFNTDVILNNKLMMLYNK

SEQ ID NO: 6840 - protein, 268 aa, Clostridium felsineum
  REGION 1..268: note = tr|A0A1S8LFL8|A0A1S8LFL8_9CLOT Putative GTP cyclohydrolase 1 type 2 OS=Clostridium felsineum DSM 794; OX = 1121310 GN=CLFE_21810 PE=4 SV=1
MSLKVKDLCNIIEDFAPISLKEDYDNVGLMLGDREDTVEGILTALDCTIKVIDEAIEKKCNMIITHHPILFKKPSSITNDTLLGKKIIKLIKNNINVYSAHTNLDSVKNGINDAIVSILGFDNSSILAKNFRAVKEAGIGRVVELEEGIQLKELCHRVKENLKVQNLRYCGNDDKKIQKIAIINGSGQDFFEEARKKGADCIITGDTSYHYVSDYNEMGMAVIDAGHFGTEWPSVIVMTKMLKDSLNSKGIDTSISVSQNNIDPYKIK

SEQ ID NO: 6841 - protein, 110 aa, Clostridium felsineum
  REGION 1..110: note = tr|A0A1S8LE73|A0A1S8LE73_9CLOT Putative GTP cyclohydrolase 1 type 2 OS=Clostridium felsineum DSM 794; OX = 1121310 GN=CLFE_24440 PE=4 SV=1
MQINQFKIEIFIPKEFVEQLGDKLSEANVGKIGNYDHCMSINEVKGYWRPLKGAEPHEGNIGELCKGEECKIEMRCKREYVENALKIIRKVHPYEEPVINVIPILNELFE

SEQ ID NO: 6842 - protein, 191 aa, unidentified
  source 1..191: note = [Clostridium] fimetarium
  REGION 1..191: note = tr|A0A1I0RKX7|A0A1I0RKX7_9FIRM GTP cyclohydrolase 1; OS = [Clostridium] fimetarium OX=99656 GN=folE PE=3 SV=1
MAIDIEAIQEHIKGILVALGDNPDREGLKGTPERVARMYAEVFEGMNYSNHEIAVMFNKTFEDDLEFVQGNQDLIVVKDIEIFSYCEHHMALMYDMKVSVAYVPNGKVIGLSKIARIADMVSKRLQLQERIGSDIAEIMQEVTESVDVAVLIEGCHSCMSTRGIKKTSAKTQTSTLRGRFMTDINLQMRLK

SEQ ID NO: 6843 - protein, 188 aa, Clostridium formicaceticum
  REGION 1..188: note = tr|A0A1D9FLU5|A0A1D9FLU5_9CLOT GTP cyclohydrolase 1; OS = Clostridium formicaceticum OX=1497 GN=folE PE=3 SV=1
MDKPKIERAIRDILEAIGEDPDREGLKDTPKRIARMYEEIFLGLEADPKEHLDIYFQDEKHEELVLVKDISFYSSCEHHLVPFYGKAHVGYIPKDGKLTGLSKLARVVDTIAKRPQLQERLTSMIADTIVEKLQPHGVIVVVEAEHMCMTMRGVKKPGAKTLTSVVRGVFQKDAKARAEAMALIDFGR

SEQ ID NO: 6844 - protein, 185 aa, Clostridium frigidicarnis
  REGION 1..185: note = tr|A0A1I0WTL5|A0A1I0WTL5_9CLOT GTP cyclohydrolase 1; OS = Clostridium frigidicarnis OX=84698 GN=folE PE=3 SV=1
MIDENKIREGVKLIIEGIGENPNREGLKETPDRIARMYSEVFSGLYEDVSTHLSKTFEVKEDNLVIEKDITYYSMCEHHFLPFFGKAHIAYIPNGKVAGLSKLARCVDVYAKRPQLQEKMTTDIAEALMEHLDAKGVMVMVQGEHLCMTMRGIKKPGSRTVTLCYKGEFEKDKDLRDEVYKLMTL

SEQ ID NO: 6845 - protein, 196 aa, Clostridium gasigenes
  REGION 1..196: note = tr|A0A1H0NV01|A0A1H0NV01_9CLOT GTP cyclohydrolase 1; OS = Clostridium gasigenes OX=94869 GN=folE PE=3 SV=1
MAIDTKAIEEHIRGILIALGDNPDREGLQDTPKRVAKMYEDVFKGMNYSNDEIVTMFNTTFEDDLSVKGNPNDIVFMKDIEIFSHCEHHLALMYNMKVSVAYIPNGKVIGLSKIARIADMVGRKLQLQERIGTDIAYIMQKVTCSEDVAVIIEGEHGCMSTRGIQKPGTKTVSTTLRGRFNTDQILNNNLMMLYRK

SEQ ID NO: 6846 - protein, 184 aa, Clostridium gasigenes
  REGION 1..184: note = tr|A0A1H0MAL9|A0A1H0MAL9_9CLOT GTP cyclohydrolase 1; OS = Clostridium gasigenes OX=94869 GN=folE PE=3 SV=1
MVDKEKIRQGAKLILEAIGEDVNREGLLETPDRMARMYEEIFSGIGQTAEEVLSKTFEVENNDLVIEKDITFFSMCEHHLVPFYGKAHIAYIPNGRVAGLSKLARCVEIYGKKPQLQERLTTEIADAVMKYLDAEGVMVIIEAEHMCMTMRGVKKPGTKTVTTTYKGVFKENADLRREVISLIK

SEQ ID NO: 6847 - protein, 263 aa, Clostridium grantii
  REGION 1..263: note = tr|A0A1M5X204|A0A1M5X204_9CLOT GTP cyclohydrolase 1; OS = Clostridium grantii DSM 8605 OX=1121316 GN=folE PE=3; SV = 1
MDYKLYYNQIESKMNKYNFKLLNKNDVVKFVIDPVTVVDLMKEHKLNNIKLQLQLHKIIWGHEERGVNVINKEKIEYHIREILLALGENPDREGLKKTPERYAKMCEEIFEGINYTNDEIADMFNVTFEEEDYYNEKSNDFVLMKDIEIFSQCEHHLALMYNMKVAVAYIPKEKIIGLSKIARIADMVAKRLQLQERIGSDIAEIMQKIAQTENVAVIIQGEHACMTTRGIKKPGTKTITTNFNGKFESDEKLASRLLNLYNA

SEQ ID NO: 6848 - protein, 183 aa, Clostridium haemolyticum
  REGION 1..183: note = tr|A0A0A0IUX9|A0A0A0IUX9_CLOHA GTP cyclohydrolase 1; OS = Clostridium haemolyticum NCTC 8350 OX=1443115 GN=folE; PE = 3 SV=1
MVDYEKIKKAVVMIIEAIGEDPSREGLKETPDRIARMYEEIFSGLKETPEKHLSKVFKVNNDDVVIEKDIQFYSMCEHHFLPFFGKVHIAYIPNEEVVGLSKLARTMEVFSKRPQLQERLTSQIADSLMKYLNCKGVMVVIEAEHLCMSMRGVKNWGAKTTTIVTRGTFQDDSSLKQNVLIRF

SEQ ID NO: 6849 - protein, 185 aa, Clostridium haemolyticum
  REGION 1..185: note = tr|A0A1V2YAS2|A0A1V2YAS2_CLOHA GTP cyclohydrolase 1; OS = Clostridium haemolyticum OX=84025 GN=folE PE=3 SV=1
MVDYEKIKKAVVMIIEAIGEDPSREGLKETPDRIARMYEEIFSGLKETPEKHLSKVFKVNNDDVVIEKDIQFYSMCEHHFLPFFGKVHIAYIPNEEVVGLSKLARTMEVFSKRPQLQERLTSQIADSLMKYLNCKGVMVVIEAEHLCMSMRGVKNWGAKTTTIVTRGTFQDDSSLKQNVLNIIRF

SEQ ID NO: 6850 - protein, 201 aa, unidentified
  source 1..201: note = [Clostridium] hiranonis
  REGION 1..201: note = tr|B6FWH6|B6FWH6_9FIRM GTP cyclohydrolase 1; OS = [Clostridium] hiranonis DSM 13275 OX=500633 GN=folE; PE = 3 SV=1
MLDSKENVELKEGKMDKEKIKRAVRDILEAIGEDPDREGLKDTPDRVARMYEEIFCGIFQDPREHLKVTFPEESHEEMVIVKDIPFYSCCEHHLVPFFGKAHVVYIPKGGRLTGLSKLARVVETIAKRPQLQERIAKETADIIMEELRPYGVMVVIEAEHMCMTMRGVKKPGSKTVTSAVRGVFAKDIATRTEAMNLILMK

SEQ ID NO: 6851 - protein, 201 aa, unidentified; identical to SEQ ID NO: 6850
  source 1..201: note = [Clostridium] hiranonis
  REGION 1..201: note = tr|A0A5C0T553|A0A5C0T553_9FIRM GTP cyclohydrolase 1; OS = [Clostridium] hiranonis OX=89152 GN=folE PE=3 SV=1

SEQ ID NO: 6852 - protein, 195 aa, Clostridium homopropionicum
  REGION 1..195: note = tr|A0A0L6ZCL6|A0A0L6ZCL6_9CLOT GTP cyclohydrolase 1; OS = Clostridium homopropionicum DSM 5847 OX=1121318; GN = folE_1 PE=3 SV=1
MAIDIKAIEEHIKGILVALGDNPDREGLIETPNRVAKMYEEIFKGMCYTNDEIAEMFNKTFEEDLSVGENPQDMVLMKDIEIFSYCEHHLALMYNMKVAVAYIPNKKIIGLSKIARIADMVGRRLQLQERIGTDIAEIMQKITGSEDVAVIIEGEHGCMTTRGIEKPGARTSTTTLRGKFNSDPVLNNKLMMLYK

SEQ ID NO: 6853 - protein, 195 aa, Clostridium homopropionicum
  REGION 1..195: note = tr|A0A0L6Z6T8|A0A0L6Z6T8_9CLOT GTP cyclohydrolase 1; OS = Clostridium homopropionicum DSM 5847 OX=1121318; GN = folE_2 PE=3 SV=1
MAIDIKSIEEHIRGILIALGDDPDREGLKDTPNRVAKMYEEVFKGMCYTNDEIAEMFNKTFEEDLLLDENPQDMVLIKDIEIFSYCEHHLALMYNMKAAVAYIPNKKIIGLSKIARIADMVGRRLQLQERIGADIAEIMQKITDSEDVAVIIEGEHGCMTTRGIQKPGTKTISTTFKGKFITDSMLNNKLLTLYK

SEQ ID NO: 6854 - protein, 292 aa, unidentified
  source 1..292: note = [Clostridium] indolis
  REGION 1..292: note = tr|A0A3P6JA83|A0A3P6JA83_9FIRM GTP cyclohydrolase FolE2 OS=[Clostridium] indolis OX=69825 GN=folE2 PE=3 SV=1
MTEFDLSTREGRWKHFGSVDPIEGTKPTVKEEMKDLQSTNKNFLFEIEEVGIKNLVYPVLVDRFQTAGNFSFSTSLNQDEKGINMSRILESVEKHYDNGIELDFDSLYRLLRSLQERMEQNAAGLDVSAKWFFDRHSPITNIKAVGHADVTYGMAIDKENVTRKEITLQVAVTTLCPCSKEISEYSAHNQRGIVTVKAYLSKDANLTDDYKEKILDAMEANASSILYPILKRPDEKSVTEHAYENPRFVEDLIRLIAADLVDFDWIEGFDIECRNEESIHQHDAFAKLKYRR

SEQ ID NO: 6855 - protein, 185 aa, Clostridium intestinale
  REGION 1..185: note = tr|A0A1M5WSX9|A0A1M5WSX9_9CLOT GTP cyclohydrolase 1; OS = Clostridium intestinale DSM 6191 OX=1121320 GN=folE; PE = 3 SV=1
MIDKNKIEEAVRMMLEAIGEDPEREGLKETPLRIAKMYEEIFDGIGKTAKEHLEKTFTVERDDLVIEKDITYYSMCEHHLVPFFGKAHIAYIPNGKVAGLSKLARCVEIYSKKPQLQERLTSEVCDALMAYLKPKGVMVLVEGEHMCMTMRGVKKPGTKTITYSYRGVFEEDAELRREVRELING

SEQ ID NO: 6856 - protein, 185 aa, Clostridium intestinale
  REGION 1..185: note = tr|U2PTN2|U2PTN2_9CLOT GTP cyclohydrolase 1; OS = Clostridium intestinale URNW OX=1294142 GN=folE PE=3; SV = 1
MIDKNKIEEAVRMMLEAIGEDPDREGLKETPLRIAKMYEEIFDGIGKTAKEHLEKTFTVERDDLVIEKDITYYSMCEHHLVPFFGKAHIAYIPNGKVAGLSKLARCVEIYSKKPQLQERLTSEVCDALMEYLKPKGVMVLVEGEHMCMTMRGVKKPGTKTITYSYRGIFEEDAELRREVRELING

SEQ ID NO: 6857 - protein, 185 aa, Clostridium isatidis
  REGION 1..185: note = tr|A0A343JAD2|A0A343JAD2_9CLOT GTP cyclohydrolase 1; OS = Clostridium isatidis OX=182773 GN=folE PE=3 SV=1
MALNKEKIIEGVKLILEGVGEDINREGLIETPDRIARMYEEIFSGLNANAEKELSKTFEVDENNLVLEKDITFFSMCEHHLVPFYGKAHIAYIPKGRVVGLSKLARCVEIYAKKPQLQERLTNEIANAVMNYLDAEGVMVVIEGEHMCMAMRGIKKPGAKTLTTAFKGCFKEDFNLRKEVLDLIK

SEQ ID NO: 6858 - protein, 185 aa, Clostridium kluyveri
  REGION 1..185: note = sp|A5N6S3|GCH1_CLOK5 GTP cyclohydrolase 1; OS = Clostridium kluyveri (strain ATCC 8527 / DSM 555 / NCIMB 10680) OX=431943 GN=folE PE=3 SV=1
MDENKIKDAVRMIIEAIGENPEREGLAETPDRIARMYTEIFSGLKEKPEEHLKKVFTVNNDDIVLEKDIQFYSMCEHHFMPFYGKTHVAYIPNGKVVGLSKLARTVEVFAKRLQLQERMTVQIADSIMDYLKVKGVMVVIEAEHMCMTMRGIKKPGSKTVTVATRGIFKNKIEFRNQVYEMIKMK

SEQ ID NO: 6859 - protein, 185 aa, Clostridium kluyveri
  REGION 1..185: note = tr|A0A1L5F5R8|A0A1L5F5R8_CLOKL GTP cyclohydrolase 1; OS = Clostridium kluyveri OX=1534 GN=folE PE=3 SV=1
MDENKIKDAVRMIIEAIGENPEREGLAETPDRIARMYTEIFSGLKEKPEEHLKKVFTVNNDDIVLEKDIQFYSMCEHHFMPFYGKAHVAYIPNGKVVGLSKLARTVEAFAKRLQLQERMTVQIADSIMDYLEVKGAMVVIEAEHMCMTMRGIKKPGSKTVTVATRGIFKNKIEFRNEVYEMIKIR

SEQ ID NO: 6860 - protein, 189 aa, unidentified
  source 1..189: note = [Clostridium] leptum
  REGION 1..189: note = tr|A0A412R5S7|A0A412R5S7_9FIRM GTP cyclohydrolase 1; OS = [Clostridium] leptum OX=1535 GN=folE PE=3 SV=1
MDKKRIEAAVTEILLAVGENPDREGLKETPKRVAKMYEEIFSGLHDDPARHLKIFHEPEQHNELVIVRDIPLYSVCEHHLLPFIGAAHIAYIPQKGNIIGLSKFARIVDCFARRPQVQERLTAQIADFLFENLEPYGVAVIIEAEHLCMTMRGARAAGSKTQTSALRGIMRTDAKSRSEVMALLTGSGR

SEQ ID NO: 6861 - protein, 189 aa, unidentified
  source 1..189: note = [Clostridium] leptum
  REGION 1..189: note = tr|A7VNB6|A7VNB6_9FIRM GTP cyclohydrolase 1; OS = [Clostridium] leptum DSM 753 OX=428125 GN=folE PE=3 SV=1
MDKKRIEAAVTEILLAVGENPEREGLKETPKRVAKMYEEIFSGLHDDPARHLKIFHEPEQHNELVIVRDIPLYSVCEHHLLPFIGAAHIAYIPQKGNIIGLSKFARIVDCFARRPQVQERLTAQIADFLFENLEPYGVAVIIEAEHLCMTMRGARAAGSKTQTSALRGIMRTDAKSRSEVMALLTGSGR

SEQ ID NO: 6862 - protein, 189 aa, Clostridium leptum; identical to SEQ ID NO: 6860
  REGION 1..189: note = tr|R6N144|R6N144_9CLOT GTP cyclohydrolase 1; OS = Clostridium leptum CAG:27 OX=1263068 GN=folE PE=3 SV=1

SEQ ID NO: 6863 - protein, 195 aa, unidentified
  source 1..195: note = Clostridium liquoris
  REGION 1..195: note = tr|A0A2T0B275|A0A2T0B275_9CLOT GTP cyclohydrolase 1; OS = Clostridium liquoris OX=1289519 GN=folE PE=3 SV=1
MAIDVKAIEQHIKGILIALGDDPNREGLKDTPKRVAKMYEEVFEGMCYSNDEIAEMFNKTFEDDLSVQEGSNDMVLMKDIEIFSHCEHHLALMYNMKVAVAYIPNKKIIGLSKIARIADMVGKRLQLQERIGTDIAYIIQKITDSEDVAVIIEGEHGCMTTRGIKKPGTKTITTTLRGRFNTDITLNNKLMMLYK

SEQ ID NO: 6864 - protein, 270 aa, unidentified
  source 1..270: note = Clostridium liquoris
  REGION 1..270: note = tr|A0A2T0B0U8|A0A2T0B0U8_9CLOT Putative GTP cyclohydrolase 1 type 2 OS=Clostridium liquoris OX=1289519; GN = CLLI_23950 PE=4 SV=1
MPLKIKDIRKIMEDYAPLRLKESYDNVGLMIGDPDCEVTSILVALDCTMKVIKEAEEKGCNLIITHHPILFKKPNNITTETLQGRKIIELIKKDINIYSSHTNLDSTKGGINDLIMQLLDFRNCEVIEVNHMDAQDKECGIGRFTTLNVPITLEELCEKVKEAFEISSLKYSGEDKQVIEKVAVINGSGNDFLMKAKSLGADCIITGDTSYHYVSDLQEEGICIIDVGHFESEWPGMKIVGKWIGNRIRFMGYSNSVIISTETISPYKYK

SEQ ID NO: 6865 - protein, 185 aa, Clostridium ljungdahlii
  REGION 1..185: note = tr|A0A168NAB3|A0A168NAB3_9CLOT GTP cyclohydrolase 1; OS = Clostridium ljungdahlii OX=1538 GN=folE PE=3 SV=1
MDEKKIREAVKMILEAIGEDPEREGLLETPDRIARMYKEIFEGLDQSPEKHLRKVFTVDSDDIVLEKDITFYSMCEHHLLPFYGKAHIAYIPDGKVVGLSKLARTVEVFAKRLQLQERLSAQIADAMMKYVKVKGVMVVVEAEHMCMTMRGIKKPGSKTVTAVARGLFKGEPRLRDEVYRMINME

SEQ ID NO: 6866 - protein, 185 aa, Clostridium ljungdahlii; identical to SEQ ID NO: 6802
  REGION 1..185: note = tr|D8GN87|D8GN87_CLOLD GTP cyclohydrolase 1; OS = Clostridium ljungdahlii (strain ATCC 55383 / DSM 13528 / PETC) OX=748727 GN=folE PE=3 SV=1

SEQ ID NO: 6867 - protein, 272 aa, unidentified
  source 1..272: note = Clostridium luticellarii
  REGION 1..272: note = tr|A0A2T0BAQ9|A0A2T0BAQ9_9CLOT Putative GTP cyclohydrolase 1 type 2 OS=Clostridium luticellarii; OX = 1691940 GN=CLLU_32530 PE=4 SV=1
MMYLKIMDIHNIVEKYAPSILKESYDNVGLMVGDMECRVTSILVALDCTLKVIEEAKQNNCNLIFTHHPLLFKRPDSITSDNLLGEKIIKLIESHINVYSCHTNLDSAEGGINDIIVELLGLNSDDIVDPIKTESRPGCKDGIGRISQLEEPIILSELCNRVKKYLEMSSLRYVGNEFKLIKKVAVINGSGQSYFNKARLQGVDCIITGDTTYHYVSDFEEQGMAVIDAGHFGTEWPAMEKVAVFLQKQIKSLGFENSVVLSKINRDPYKYK

SEQ ID NO: 6868 - protein, 208 aa, unidentified
  source 1..208: note = Clostridium luticellarii
  REGION 1..208: note = tr|A0A2T0BM50|A0A2T0BM50_9CLOT GTP cyclohydrolase 1; OS = Clostridium luticellarii OX=1691940 GN=folE PE=3 SV=1
MTYFRLFIGGENVEYSLLNMLIMMDDGKIRKAIKMIIEAIGEDPEREGLVETPDRIARMYKEIFSGFGESPEKHLKKVFTVDSADIVLEKDIVFYSMCEHHFMPFYGKVHIAYVPNDKVVGLSKLARTVEVFAKRLQLQERMTIQIADSIMKYLNAKGVMVVVKAEHMCMTMRGVKKPGSKTVTTATRGIFKEDSRYREEVYKMLNVE

SEQ ID NO: 6869 - protein, 196 aa, Clostridium magnum
  REGION 1..196: note = tr|A0A162T3E3|A0A162T3E3_9CLOT GTP cyclohydrolase 1; OS = Clostridium magnum DSM 2767 OX=1121326 GN=folE_1 PE=3; SV = 1
MKIDRKAIEEHVRGILLALGDDPDREGLKDTPKRVAKMYEEIFDGMRYTNDEIAQMFNKTFEDDLALEESTSDIVIMKDIEIFSHCEHHLALMYNMKVTVAYVPSKKVIGLSKIARIADMVGRRLQLQERIGTDIAEIIQKITSSEDVAVIIEGEHGCMTTRGVKKPGTKTVSTTLRGRFNTDIMLNNRLMMLYNK

SEQ ID NO: 6870 - protein, 271 aa, Clostridium magnum
  REGION 1..271: note = tr|A0A162UHB6|A0A162UHB6_9CLOT Putative GTP cyclohydrolase 1 type 2 OS=Clostridium magnum DSM 2767; OX = 1121326 GN=CLMAG_09580 PE=4 SV=1
MTLKVKNLHRIMEEHAPAKFKESYDNVGLMVGDRDCEITSILVALDCTLEVIEEAKKKGCNLILTHHPLIFKKPNSITTDTLIGKKILQLIKNDINVYSSHTNLDSVKGGINEIIMELLGFNNYFTIDPSDRRGDNDNNTGIGRIATVTESTTLSELCDKVKTSLNIPVLRYSGEDSYKISKVAVINGSGQDYFSEARRLGADCIITGDTTYHYVSDFNEEGIPVIDAGHFGTEWPAMQVVAKWLKNQLKFKGYENFVFESEFSRSPYKYK

SEQ ID NO: 6871 - protein, 185 aa, Clostridium novyi
  REGION 1..185: note = sp|A0Q2L7|GCH1_CLONN GTP cyclohydrolase 1; OS = Clostridium novyi (strain NT) OX=386415 GN=folE PE=3; SV = 1
MIDYEKIKKAVIMIIEAIGEDPNREGLKETPDRIARMYEEIFSGIRETPEKHLSKVFKVNNDDVVVEKDIQFYSMCEHHFLPFFGKVHIAYIPNGKVVGLSKLARTTEVFSKRPQLQERLTSQIADSLMEYLKCKGAMVIIEAEHLCMSMRGVKKWGSKTTTIVTRGEFQKDNSLKQDVLNILRL

SEQ ID NO: 6872 - protein, 185 aa, Clostridium novyi; identical to SEQ ID NO: 6849
  REGION 1..185: note = tr|A0A072YR49|A0A072YR49_CLONO GTP cyclohydrolase 1; OS = Clostridium novyi B str. NCTC 9691 OX=1443122 GN=folE; PE = 3 SV=1

SEQ ID NO: 6873 - protein, 270 aa, unidentified
  source 1..270: note = Clostridium oryzae
  REGION 1..270: note = tr|A0A1V4IHK9|A0A1V4IHK9_9CLOT Putative GTP cyclohydrolase 1 type 2 OS=Clostridium oryzae OX=1450648; GN = CLORY_32850 PE=4 SV=1
MSIKLKKLIEVIENIAPLSLAEDYDNVGLMIGNEEADVSSALITLDCTLDVIQEAIDKKVDLIISHHPLLFVKPKNVTENSLQGKKMIKLIKNNINVYASHTNLDCVAGGLNDIIVKLLGFTDSIILEKSPLQHVYKNSGIGRLVKLDESVDLFTLCELVKNRLGCPKIRCVGEMQWSINKIAIINGSGEDYFHIAVKEGADCIISGDSTYHYASDMYEEQVALIDAGHFGTEWPAMKYFGSILENKCIDMGAKVNFTISQKNKDPYRYI

SEQ ID NO: 6874 - protein, 187 aa, unidentified
  source 1..187: note = [Clostridium] paradoxum
  REGION 1..187: note = tr|A0A150FQ87|A0A150FQ87_CLOPD GTP cyclohydrolase 1; OS = [Clostridium] paradoxum JW-YL-7 = DSM 7308 OX=1121328; GN = folE PE=3 SV=1
MDKDRIKKAVKELLEAIGEDPQREGLKGTPDRIARMFEEIYSGINEDPKKHLEIYFQDEKHEELVLVKDIPFYSTCEHHLVPFFGKAHVAYIPKGGKLTGLSKLARVVETVARRPQLQERITTTVADVINEVLNPHGVVVVVEAEHMCMTMRGIKKPGSKTVTSAVRGIFQKDAAARAEVMSLINHK

SEQ ID NO: 6875 - protein, 211 aa, Clostridium paraputrificum
  REGION 1..211: note = tr|A0A2X3BIN8|A0A2X3BIN8_9CLOT GTP cyclohydrolase 1; OS = Clostridium paraputrificum OX=29363 GN=folE PE=3 SV=1
MMYDHRDDEVHPDIAADRGEDLGPFDHARAEAAVRELLLAVGEDPEREGLRETPARVARAYREVFAGLHVDPTEVLEKTFDEGHQELVLVKDIPIYSTCEHHLVPFFGKAHIGYIPGPEGRVTGLSKLARLVDLYAKRPQVQERLTGQVADALVDKLQPTSAIVVIECEHLCMAMRGIRKPGATTITSAVRGGFKSDARSRAEAMSLITGR

SEQ ID NO: 6876 - protein, 185 aa, Clostridium paraputrificum
  REGION 1..185: note = tr|A0A174Q8F6|A0A174Q8F6_9CLOT GTP cyclohydrolase 1; OS = Clostridium paraputrificum OX=29363 GN=folE PE=3 SV=1
MVDKEKIKEGVKLILEAIGEDTNREGLIETPDRIARMYEEIFSGINATAEEHLKKTFEVDRDDLVLEKDITFYSMCEHHLVPFYGKAHIAYIPKGRVAGLSKLARTVETYAKKPQLQEKLTSEVADALMKYLNAEGVMVVIEAEHMCMTMRGVKKPGTRTFTTTYRGCFEENYNLRREVLDLIQR

SEQ ID NO: 6877 - protein, 187 aa, Clostridium pasteurianum
  REGION 1..187: note = tr|A0A1D9MZ19|A0A1D9MZ19_CLOPA GTP cyclohydrolase 1; OS = Clostridium pasteurianum OX=1501 GN=folE PE=3 SV=1
MIDKIKIEKAVREILIGIGENPDREGLIETPRRVSEMYEEIFAGLHKNPLDDVKKFHEDHDNGMIIVKDIPVYSMCEHHLLPFMGVAHVVYIPSGNEVLGLSKLARIVDTTAKKPQLQERLGNEIADVIIEAVDTKGVAVVIEAEHLCMTMRGIRKPGSKTITSALRGVIKTDSQIRMEALSLINGR

SEQ ID NO: 6878 - protein, 271 aa, Clostridium pasteurianum
  REGION 1..271: note = tr|A0A0H3J351|A0A0H3J351_CLOPA Putative GTP cyclohydrolase 1 type 2 OS=Clostridium pasteurianum DSM 525 = ATCC 6013 OX=1262449 GN=CLPA_c22860 PE=4 SV=1
MSLRVKDICSIMNSIAPKELSESYDNVGLMIGNPEDNVSSVLVALDCTLAVIEEAKKKDCNFIFTHHPLLFRKPSSITTETLLGKKIMNLIKDDINLYSSHTNLDSVEGGLNDTLVDILGFSNSTVIESSLVEGFNDGNSGIGRIVILKEKIQLCELCNLVKQKLNLTHLTYVGEDENFIEKIALINGSGTDYMDISRKLGVDCIITGDVTYHYASDYREMGISVIDAGHFGTEWTALKKIASILKNEIDRLGHDNSVLLSEVVIDPYKMK

SEQ ID NO: 6879 - protein, 185 aa, Clostridium perfringens
  REGION 1..185: note = sp|Q0TRM0|GCH1_CLOP1 GTP cyclohydrolase 1; OS = Clostridium perfringens (strain ATCC 13124 / DSM 756 / JCM 1290 / NCIMB 6125 / NCTC 8237 / Type A) OX=195103; GN = folE PE= 3 SV=1
MIDKDKIREGMKLILEAIGEDINREGLIETPDRIARMYEEIFSGIGMNAKEHLSKTFEVHSNDLVLEKDITFYSMCEHHLVPFYGKVHIAYIPNGRVVGLSKLARCVEVYSKKPQLQERLTTEIADSIMEYLDAQGVMVVVEGEHMCMTMRGVRKPGAKTVTTTYRGKFLEDESLKNDVFRMISM

SEQ ID NO: 6880 - protein, 185 aa, Clostridium perfringens
  REGION 1..185: note = tr|A0A381J117|A0A381J117_CLOPF GTP cyclohydrolase 1; OS = Clostridium perfringens OX=1502 GN=folE PE=3 SV=1
MIDKDKIKEGMKLILEAIGEDVNREGLIETPDRIARMYEEIFSGIGMNAKDHLSKTFEVHSNDLVLEKDITFYSMCEHHLVPFYGKVHIAYIPNGRVVGLSKLARCVEVYSKKPQLQERLTTEIADSIMEYLDAQGVMVVVEGEHMCMTMRGVRKPGAKTVTTTYRGKFLEDESLKNDVFRMISM

SEQ ID NO: 6881 - protein, 184 aa, unidentified
  source 1..184: note = [Clostridium] polysaccharolyticum
  REGION 1..184: note = tr|A0A1I0EYP8|A0A1I0EYP8_9FIRM GTP cyclohydrolase 1; OS = [Clostridium] polysaccharolyticum OX=29364 GN=folE PE=3; SV = 1
MDKNKIEKAVRLFLEGIGEDVNREGLLDTPSRISAMCEELFSGIGNDAEEHLSKTFTAENNEMVIEKDITFYSVCEHHFLPFYGKVHIAYIPDKKVVGLSKLARTVEVYARRAQIQEQLTCQIAEDIMEHLKPKGVMVYIEAEHMCMTMRGIKKPGSKTVSFVTKGIFEEKESLKQTFFQLIKG

SEQ ID NO: 6882 - protein, 188 aa, unidentified
  source 1..188: note = [Clostridium] populeti
  REGION 1..188: note = tr|A0A1I6KS52|A0A1I6KS52_9FIRM GTP cyclohydrolase 1; OS = [Clostridium] populeti OX=37658 GN=folE PE=3 SV=1
MNNKIDKNKIEEAVRLFLEGIGEDVTREGLLDTPTRISSMCEELFAGIGQDASCHLTKTFSAPNNEMVIEKDITFYSVCEHHFLPFYGKVHIAYVPDGKVVGLSKLARTVEVYARRAQIQEQMTSQIADDIMEHLQPRGVMVYIEAEHMCMTMRGIKKPGATTVSFATRGEFQTSEELRKSFLEIIKG

SEQ ID NO: 6883 - protein, 197 aa, Clostridium puniceum
  REGION 1..197: note = tr|A0A1S8TI61|A0A1S8TI61_9CLOT GTP cyclohydrolase 1; OS = Clostridium puniceum OX=29367 GN=folE PE=3 SV=1
MQKKINTKKIEECIREIIIALGDDPNREGLLDTPKRVSKMYEEVFEGMTLSNEEIAKMFGTTFENEEFMSETHKNMVVVRDIPMHSYCEHHLALMYNMKVTVVYMPKEKIIGLSKISRIADMVGRRLQLQERIGSDIAEIVSMATGSEDVGVLITGEHGCMTSRGIKKPGTLTTTTTFTGQFQSNDMLRQEALLIMK

SEQ ID NO: 6884 - protein, 263 aa, Clostridium puniceum
  REGION 1..263: note = tr|A0A1S8TBW5|A0A1S8TBW5_9CLOT Putative GTP cyclohydrolase 1 type 2 OS=Clostridium puniceum OX=29367; GN = CLPUN_35460 PE=4 SV=1
MAKVMEISRKIEEFAPKFLKEDYDNVGLMVGDGQKEVKKVLLSLDCTNEVIKEAVKLNCDLIINHHPLLFKRPSSIVKGDLIGDKIITLIKEDIALYSCHTNLDSAKNGINETIVNMLGFNSSKIIETNESGNYKDGGIGRIVKLEKEMLFLDMVNLVKEKLNIKNMRIVRGNEKIKVLAIINGSGQDFFYKAKSLGADCIITGDTTYHFASDFKEMGVSIIDAGHFSTEYIVFLKTLEFLKEKFKEVEFIASKKSEDPYEFV

SEQ ID NO: 6885 - protein, 186 aa, Clostridium putrefaciens
  REGION 1..186: note = tr|A0A381J5I3|A0A381J5I3_9CLOT GTP cyclohydrolase 1; OS = Clostridium putrefaciens OX=99675 GN=folE PE=3 SV=1
MDNERIENAVREILYAIGEDPNREGLLDTPKRMARMYEEIFSGLNEDPKKHLEVYFQEEQYEELVLIKDIPFYSVCEHHLVPFYGKAHVGYLPKGGRLTGLSKLARVVDSVSKRPQLQERLTASIADSIVEKLDPYGVIVVIEAEHMCMTMRGVKKPGSKTITSAVRGTFATDSKSRAEVLSIINK

SEQ ID NO: 6886 - protein, 185 aa, unidentified; identical to SEQ ID NO: 6802
  source 1..185: note = Clostridium ragsdalei
  REGION 1..185: note = tr|A0A1A6AMR2|A0A1A6AMR2_9CLOT GTP cyclohydrolase 1; OS = Clostridium ragsdalei P11 OX=1353534 GN=folE PE=3 SV=1

SEQ ID NO: 6887 - protein, 111 aa, unidentified
  source 1..111: note = Clostridium ragsdalei
  REGION 1..111: note = tr|A0A1A6AYC6|A0A1A6AYC6_9CLOT Putative GTP cyclohydrolase 1 type 2 OS=Clostridium ragsdalei P11; OX = 1353534 GN=CLRAG_14000 PE=4 SV=1
MEYKNYKMETFIPEEYVTKLRESLNDIGALTIGGNYDNCMSVSKVTGYWRPLSGANPFKGEKGEVSREEECKVEFCCKSEIVEKAISTIRKVHPYEEPVINVIPISNFVKY

SEQ ID NO: 6888 - protein, 110 aa, Clostridium roseum; identical to SEQ ID NO: 6841
  REGION 1..110: note = tr|A0A1S8LZU3|A0A1S8LZU3_9CLOT Putative GTP cyclohydrolase 1 type 2 OS=Clostridium roseum OX=84029; GN = CROST_17030 PE=4 SV=1

SEQ ID NO: 6889 - protein, 195 aa, Clostridium roseum
  REGION 1..195: note = tr|A0A1S8L6Q8|A0A1S8L6Q8_9CLOT GTP cyclohydrolase 1; OS = Clostridium roseum OX=84029 GN=folE PE=3 SV=1
MSIDTKAIEKHIRGILLALGDDPDREGLKETPKRVAKMYEEVFEGMNYSNEAIAEMFNKTFEEDLKENEEDNIVLVKDIEIFSHCEHHMTLMYNMKVAVAYIPNKRLIGLSKIARIADMVSKRLQLQERIGKDIAEIMEKITNSRDVAVIIQGEHGCMTSRGIKRPGTKTTTMTLKGKFKTDDSLVNKLMALYKA

SEQ ID NO: 6890 - protein, 197 aa, Clostridium saccharobutylicum
  REGION 1..197: note = tr|U5MPQ4|U5MPQ4_CLOSA GTP cyclohydrolase 1; OS = Clostridium saccharobutylicum DSM 13864 OX=1345695; GN = folE PE=3 SV=1
MKKKIDTEKIQECIKEILIALGDDPNREGLIDTPKRVAKMYEEVFEGMTHSNEEIAEMFGTTFEEEDCTSENYKNMVVVKDIPIHSYCEHHLALMYNMKVTVIYKPKDKIIGLSKIARIADMVGRRLQLQERIGKDIAEIVSMVTETKDVGVLITGEHSCMTSRGVKKPGTLTTTTTFTGEFEENDLLRQEALLIMK

SEQ ID NO: 6891 - protein, 263 aa, Clostridium saccharobutylicum
  REGION 1..263: note = tr|A0A1S8MRB0|A0A1S8MRB0_CLOSA Putative GTP cyclohydrolase 1 type 2 OS=Clostridium saccharobutylicum; OX = 169679 GN=CLOSAC_41430 PE=4 SV=1
MTKIKDIIREIEKFAPKCLQEDYDNVGLMVGDDEKEVKRVLLSLDCTNDAIEEAANLKCDFMITHHPLFFRKPKRIAKKDLLGNKVINLIKEDITLYSCHTNLDSAKDGINETIVKMLGFNSCITLEPNKIRNYKEDGIGRLVKLDNPISLNNLVDLIKKTLNINNMRIVKGSEMVTTLAIINGSGQDLFPLAKSFGADCIITGDTTYHFALDYKEMGISIIDAGHFSTEYLAFLKTLEFLKKEFNDVEFITSKTCQDPYEFT

SEQ ID NO: 6892 - protein, 197 aa, Clostridium saccharoperbutylacetonicum
  REGION 1..197: note = tr|M1MLD5|M1MLD5_9CLOT GTP cyclohydrolase 1; OS = Clostridium saccharoperbutylacetonicum N1-4(HMT); OX = 931276 GN=folE PE=3 SV=1
MPKKIDTDKIEKCIREILIALGDDPNREGLIDTPKRVAKMYEEVFAGMNLTNEEIAKMFGTTFENEEYVPENYNNMVVVKEIPIHSYCEHHLALMYNMKVSVVYIPKEKIIGLSKISRIADMVGRRLQLQERIGSDIAEIVAMATGSDDVGVLITGEHGCMTSRGIKKPGSVTTTTTFTGRFENNDMLRQEALIIMK

SEQ ID NO: 6893 - protein, 184 aa, Clostridium sartagoforme
  REGION 1..184: note = tr|A0A4S2DMP9|A0A4S2DMP9_9CLOT GTP cyclohydrolase 1; OS = Clostridium sartagoforme OX=84031 GN=folE PE=3 SV=1
MVDREKIMEGVKLIIEGIGEDTSREGLLETPDRIARMYEEIFSGIGQTAEKELSKTFTVEGNDLVLEKDITFFSMCEHHFVPFYGKVHIAYIPKGKVAGLSKLARCVEVYAKKPQLQERLTTEIADALMKYLDAKGVMVVIEGEHMCMTMRGVKKPGAKTVTTTYRGCFKEDYELRKEVMNFIR

SEQ ID NO: 6894 - protein, 184 aa, Clostridium sartagoforme
  REGION 1..184: note = tr|R9C9K4|R9C9K4_9CLOT GTP cyclohydrolase 1; OS = Clostridium sartagoforme AAU1 OX=1202534 GN=folE PE=3; SV = 1
MIDREKVLEGVKLILEGIGEDPNREGLLETPDRIARMYEEIFSGIGKDAKCELEKTFTVEENDLVLEKDITFYSMCEHHLVPFYGKAHIAYIPKGKVAGLSKLARCVEVYAKKPQLQEKLTTEVADAIMKYLNAEGVMVVIEAEHMCMTMRGVKKPGTKTVTTTYRGCFKEDYQLRKEVMSLLK

SEQ ID NO: 6895 - protein, 185 aa, Clostridium scatologenes
  REGION 1..185: note = tr|A0A0E3K2I1|A0A0E3K2I1_CLOSL GTP cyclohydrolase 1; OS = Clostridium scatologenes OX=1548 GN=folE PE=3 SV=1
MIDEIKIKTAVRMIIEAIGENPDREGLQETPDRIARMYSEIFAGLDQNPEKHLKKIFTVKSNDVVLEKDVQFYSMCEHHLIPFYGKVHIAYIPNGKVTGLSKLARTVEVFAKRPQLQERLTGQVADAIMEHLNAKGVMVVIEAEHMCMTMRGIKKPGSKTVTVVTRGEFHENHFLKDEVYKMINL

SEQ ID NO: 6896 - protein, 186 aa, Clostridium scindens
  REGION 1..186: note = tr|B0NCH3|B0NCH3_CLOS5 GTP cyclohydrolase 1; OS = Clostridium scindens (strain ATCC 35704 / DSM 5676 / VPI 13733 / 19) OX=411468 GN=folE PE=3 SV=1
MIDQQKIKQAVTLLLEGIGEDVTREGLIDTPDRIARMYEEIYGGMEEDAATHLSKVFHVDSSEMVIEKDIPFYSTCEHHMLPFYGKVHIAYIPDGKVVGLSKLARTVEVFARRLQLQEQLTGQIVDALMTHMQPKGVMVMVEAEHLCMTMRGIKKPGSQTVTVARRGEFETNPVLEELFFRMLGRS

SEQ ID NO: 6897 - protein, 184 aa, Clostridium septicum
  REGION 1..184: note = tr|A0A386PIW5|A0A386PIW5_CLOSE GTP cyclohydrolase 1; OS = Clostridium septicum OX=1504 GN=folE PE=3 SV=1
MIDKEKIKTGVKLILEAIGEDVNREGLIETPDRIARMYEEIFSGIGQTAEDALSKTFKVENNDLVIEKDITFFSMCEHHLVPFYGKAHIAYIPNERVAGLSKLARCVEVYAKKPQLQEKLTSEVADALMEYLGAEGVMVVIEAEHMCMTMRGVRKPGTKTVTTTYRGRFKEDYELRKEVLSLIK

SEQ ID NO: 6898 - protein, 196 aa, Clostridium sp.
  REGION 1..196: note = tr|A0A099RUN4|A0A099RUN4_9CLOT GTP cyclohydrolase 1; OS = Clostridium sp. HMP27 OX=1487921 GN=folE PE=3 SV=1
MAIDIKAIEEHIRGILVALGDDPNREGLKDTPKRVAKMYEEVFKGMCFTNDEIAEMFNTTFEDDLSINENSSDIVFMKDIEIFSHCEHHLALMYNMKVAVAYVPNGKVIGLSKIARIADMVGRRLQLQERIGSDIAEIMKKITGSEDVAVIIEGEHGCMSTRGIKKPGTKTISTTLRGRFNTDTILNNKLMMLYTK

SEQ ID NO: 6899 - protein, 194 aa, Clostridium sp.
  REGION 1..194: note = tr|R5JSX4|R5JSX4_9CLOT GTP cyclohydrolase 1; OS = Clostridium sp. CAG:632 OX=1262830 GN=folE PE=3 SV=1
MAIDTKAIEEHIRGILEALGENPDREGLVETPQRVARMYEEVFAGMNYTNRELAEMYGKTFRVPTEHEDMVVVKDIEVFSYCEHHMALMYDMKVSVAYLPKERVIGLSKIARIADMAAKRLQLQERIGTDIAEIIQMATDSDDVAVLISANHSCMTARGIKKPSAKTVTTTFRGRFEKETELQNRFFCMLNQGA

SEQ ID NO: 6900 - protein, 188 aa, unidentified
  source 1..188: note = [Clostridium] spiroforme
  REGION 1..188: note = tr|A0A1Y4EL83|A0A1Y4EL83_9FIRM GTP cyclohydrolase 1; OS = [Clostridium] spiroforme OX=29348 GN=folE PE=3 SV=1
MIDTKKIEAHIYGIIEALGDDPNREGLKETPKRVAKMYEEVFMGMNYTNEQIAKMFDKTFLDDLDFSNQEVVVVKDINIFSYCEHHLALMYDMKVTVAYIPNKKVIGLSKIARIADMVARRLQLQERIGSDIAKIIELITDSNDIAVIIEGKHSCMNARGIKKANSKTITSTLTGRFKTDDKLQIYLR

SEQ ID NO: 6901 - protein, 196 aa, Clostridium sporogenes
  REGION 1..196: note = tr|A0A2X3BYM3|A0A2X3BYM3_CLOSG GTP cyclohydrolase 1; OS = Clostridium sporogenes OX=1509 GN=folE PE=3 SV=1
MAIDVKAIEEHIRGILIALGDNPEREGLKDTPKRVAKMYEEVFKGMCYSNDEIAEMFNVTFEDDLCINDNVNDMVFMKDIEIFSHCEHHLALMYNMKVAIAYIPKGKIIGLSKIARIADMVGRRLQLQERIGSDIAEILQKVTNSEDVAVIIEGEHGCMTTRGIKKPGTKTITTTLRGKFNTDSIVSNKLMMLYTK

SEQ ID NO: 6902 - protein, 196 aa, Clostridium sporogenes
  REGION 1..196: note = tr|J7TB44|J7TB44_CLOS1 GTP cyclohydrolase 1; OS = Clostridium sporogenes (strain ATCC 15579) OX=471871; GN = folE PE=3 SV=1
MAIDVKAIEEHIKGILIALGDNPEREGLKDTPKRVAKMYEEVFKGMCYTNDEIAEMFNVTFEDDLCVSDNVGDMVFMKDIEIFSHCEHHLALMYNMKVAIAYIPKGKIIGLSKIARIADMVGRRLQLQERIGSDIAEILKMVTDSEDVAVIIEGEHGCMTTRGIKKTNTKTITTTLRGKFNTDTIVSNKLMMLYTK

SEQ ID NO: 6903 - protein, 196 aa, unidentified
  source 1..196: note = Clostridium taeniosporum
  REGION 1..196: note = tr|A0A1D7XK22|A0A1D7XK22_9CLOT GTP cyclohydrolase 1; OS = Clostridium taeniosporum OX=394958 GN=folE PE=3 SV=1
MDIDVKAIEEHIKGILVALGDDPNREGLKDTPKRVAKMYEEIFKGMCYSNDEIANMFNTTFEDDLLLKENNNDIVFMKDIEIFSHCEHHLALMYNMKVAIAYIPDKKVIGLSKIARIADMVGRRLQLQERIGTDIAEILQKVTESEDVAVIIQGEHGCMTTRGIQKPGAKTISTTLRGRFNSDPMLNSKLMMLYSQ

SEQ ID NO: 6904 - protein, 196 aa, Clostridium tagluense
  REGION 1..196: note = tr|A0A401UUK8|A0A401UUK8_9CLOT GTP cyclohydrolase 1; OS = Clostridium tagluense OX=360422 GN=folE PE=3 SV=1
MAIDTKAIEEHIRGILIALGDDPCREGLKDTPARVAKMYEEVFAGMCYSNDEIAEMFNTTFVDDLIVNDDSLDIVIMKDIQIFSHCEHHLALMYNMKVSVAYVPTKKIIGLSKIARIADMVGRRLQLQERIGTDIADIMQKVTNSPDVAIIIEGEHGCMTTRGIKKPGTKTMSTTFRGRFNTDVILNNKLMMLYNK

SEQ ID NO: 6905 - protein, 111 aa, Clostridium tepidiprofundi
  REGION 1..111: note = tr|A0A151B3H7|A0A151B3H7_9CLOT Putative GTP cyclohydrolase 1 type 2 OS=Clostridium tepidiprofundi DSM 19306 OX=1121338 GN=CLTEP_17680 PE=4 SV=1
MKFNIFKIETFIPEEYVTELRKSLNDIGVLSIGGNYDNCMTVSKVIGSWRPLEGANPFEGNIGEICIAEEIKVEFCCKRDIVKTAVETIKRVHPYEVPVINIIPIVNIEDI

SEQ ID NO: 6906 - protein, 189 aa, Clostridium tepidiprofundi
  REGION 1..189: note = tr|A0A151B3B6|A0A151B3B6_9CLOT GTP cyclohydrolase 1; OS = Clostridium tepidiprofundi DSM 19306 OX=1121338 GN=folE; PE = 3 SV=1
MAIDKKAIEEHIRGILIALGENPDREGLKETPKRVANMYEEVFEGINYTNDEIAEMFNKTFEDDLNIEKSTGDMVIMKDIDIFSYCEHHIALMYNMKVTVAYIPNKKVIGLSKIARIADMVGKRLQLQERIGSDIAEIIQKVTESEDVAVIIEGEHGCMTSRGIKKPGTKTLTTTLRGKFIDSIRLPLL

SEQ ID NO: 6907 - protein, 196 aa, unidentified
  source 1..196: note = Clostridium tepidum
  REGION 1..196: note = tr|A0A1S9I1E3|A0A1S9I1E3_9CLOT GTP cyclohydrolase 1; OS = Clostridium tepidum OX=1962263 GN=folE PE=3 SV=1
MAIDVKSIEEHIKGILIALGDNPEREGLKDTPKRVAKMYEEIFKGMSYSNDEIAEMFNVTFQDDLCVNENVGDMVFMKDIEIFSHCEHHLALMYNMKVAVAYIPNGKIIGLSKIARIADMVGRRLQLQERIGSDIAEILQKITDSEDVAVIIEGEHGCMTTRGIKKPGTKTITTTLRGKFNTDSILSNKLMMMYAK

SEQ ID NO: 6908 - protein, 195 aa, Clostridium tetanomorphum
  REGION 1..195: note = tr|A0A037Z706|A0A037Z706_CLOTT GTP cyclohydrolase 1; OS = Clostridium tetanomorphum DSM 665 OX=1230342 GN=folE; PE = 3 SV=1
MSIDVKAIQEHIKGILIALGDDPNREGLKDTPKRVAKMYEEVFKGMCYSNDEIAEMFNKTFEDDLSVEENSNDMVLMKDIEIFSHCEHHLALMYNMKVAVAYIPNKKIIGLSKIARIADMVGRRLQLQERIGTDIAYIIQKITDSKDVAVIIEGEHGCMTTRGIKKPGTKTISTTLKGRFNGDAILNNKLMMLYR

SEQ ID NO: 6909 - protein, 185 aa, Clostridium tetanomorphum
  REGION 1..185: note = tr|A0A037Z631|A0A037Z631_CLOTT GTP cyclohydrolase 1; OS = Clostridium tetanomorphum DSM 665 OX=1230342 GN=folE; PE = 3 SV=1
MVDEGKVKEAVRMILEAIGEDPSREGLLETPDRIARMYSEIFSGIGKDASEHLKKNFTIERDDLVIEKDIIFYSMCEHHLVPFYGKVNIAYVPNGKVAGLSKLARCVEVYARKPQLQERLTSEIADALYEHLGAQGVMVVIEAEHMCMTMRGVRKPGTKTVTSTYRGIFKEDNDLRDEVLRFIGK

SEQ ID NO: 6910 - protein, 187 aa, unidentified
  source 1..187: note = [Clostridium] thermoalcaliphilum
  REGION 1..187: note = tr|A0A1V4IBZ6|A0A1V4IBZ6_9FIRM GTP cyclohydrolase 1; OS = [Clostridium] thermoalcaliphilum OX=29349 GN=folE PE=3; SV = 1
MDKEKIQRAVKDILEAIGENPEREGLKGTPDRIARMFEEIYCGLNEDPKKHLEIYFQDEKHEELVLVKDIPFYSTCEHHLVPFFGKAHVAYIPKGGKLTGLSKLARVVETVARRPQLQERITTTVADAINEVLNPHGVVVIVEAEHMCMTMRGIKKPGSKTVTSAVRGIFQKDAAARAEVMSLINHK

SEQ ID NO: 6911 - protein, 198 aa, Clostridium thermobutyricum
  REGION 1..198: note = tr|A0A1V4SXU0|A0A1V4SXU0_9CLOT GTP cyclohydrolase 1; OS = Clostridium thermobutyricum DSM 4928 OX=1121339; GN = folE_2 PE=3 SV=1
MNIWTSKEKEERAEELIKELLTLIGEDPNREGLKETPKRAVSMIKEVLEGTTLTNKEIAERYGKCFSADYEASGNSGMVIMRDIPIFSFCEHHLALMYNMKVTIAYVPKEKVIGLSKLARIADMVGKRLQLQEKIGTDIAEIIEMATGSSDVAVLISGEHSCMTARGIKKTGSLTKTSCFKGRFKEDILLRQELLLNN

SEQ ID NO: 6912 - protein, 261 aa, Clostridium thermobutyricum
  REGION 1..261: note = tr|A0A1V4SPS1|A0A1V4SPS1_9CLOT Putative GTP cyclohydrolase 1 type 2 OS=Clostridium thermobutyricum DSM 4928 OX=1121339 GN=CLTHE_30350 PE=4 SV=1
MSRCVQDIINEMEAFAPSKLKEDFDNVGLMVGDRNREVKKVLLALDCTKEVIDEAIENKCEMIITHHPLIFRKPNRIVKGDLLGDKIIKLIENKISVYSSHTNLDAIKDGINDKVVNILGFKKSKIIDKSILEDSGIGRIVYLEEPIKTKDLINNIKEKLNIDMLTGNISSEYVSNIAIINGSGSSYFNKAYEMGADCIITGDTSYHFVSDYKELGVTILDAGHFGTEWLAFLSAMENIKENIKDVEFVKSIKTSNPYSFF

SEQ ID NO: 6913 - protein, 191 aa, Clostridium thermopalmarium; identical to SEQ ID NO: 6829
  REGION 1..191: note = tr|A0A2T0AQU1|A0A2T0AQU1_9CLOT GTP cyclohydrolase 1; OS = Clostridium thermopalmarium DSM 5974 OX=1121340 GN=folE; PE = 3 SV=1

SEQ ID NO: 6914 - protein, 271 aa, Clostridium thermopalmarium
  REGION 1..271: note = tr|A0A2T0AUC8|A0A2T0AUC8_9CLOT Putative GTP cyclohydrolase 1 type 2 OS=Clostridium thermopalmarium DSM 5974 OX=1121340 GN=CPAL_10540 PE=4 SV=1
MALKIRDIKEIIEKFAPINLKESYDNVGLMVGELDKEITSILVALDCTMEVIKEAVEKNCNLIITHHPLLFKKPSSITGETLVGRKIMELIKNDISLYSAHTNLDSVDGGINDTVMNLLGLNEYVTMELSSERYFEDNKSGIGRLANLNETITLKDLCNRVKKSFKIPYVRYAGEDFMKIKKVAVINGSGQEYFSLAKKMGADCIITGDTSYHYVSDFSEEGIGIIDAGHFGTEWPAFKILAFMLESKLQRDGHKNRIFVSEKVKDPYKIY

SEQ ID NO: 6915 - protein, 187 aa, Clostridium tyrobutyricum
  REGION 1..187: note = tr|A0A4P8A3J7|A0A4P8A3J7_CLOTY GTP cyclohydrolase 1; OS = Clostridium tyrobutyricum OX=1519 GN=folE PE=3 SV=1
MIDETKIKKAVRMIIEAIGENPDREGLLQTPDRIARMYKEVFKGLNQDPEKHLSKMFTLESDDIVLEKDIIFYSMCEHHFLPFYGKAHIAYISSGKVVGLSKLARTVEVFAKRPQLQERMTRQIADAIFKYLNAKGVMVIVEAEHMCMTMRGIKKPGSKTVTAVTLGTFNGDPKLIDQVYSMINMGK

SEQ ID NO: 6916 - protein, 187 aa, Clostridium tyrobutyricum; identical to SEQ ID NO: 6915
  REGION 1..187: note = tr|W6N4S3|W6N4S3_CLOTY GTP cyclohydrolase 1; OS = Clostridium tyrobutyricum DIVETGP OX=1408889 GN=folE; PE = 3 SV=1

SEQ ID NO: 6917 - protein, 196 aa, Clostridium uliginosum
  REGION 1..196: note = tr|A0A1I1GR08|A0A1I1GR08_9CLOT GTP cyclohydrolase 1; OS = Clostridium uliginosum OX=119641 GN=folE PE=3 SV=1
MKIDIKAIEEHIRGILIALGDNPDREGLKDTPKRVAKMYEEVFQGMCCSNDDIASMFNTTFEDDLLIKENTKDIVFMKDIEIFSHCEHHLALMYNMKVAVAYIPNKKIIGLSKIARISDMVGRRLQLQERIGTDIAEILQKITESEDVAVIIEGEHGCMTTRGIQKPGAKTISTTLRGRFNTDPILNNKLMMLYTK

SEQ ID NO: 6918 - protein, 198 aa, unidentified
  source 1..198: note = Clostridium ventriculi
  REGION 1..198: note = tr|A0A173WTX5|A0A173WTX5_CLOVE GTP cyclohydrolase 1; OS = Clostridium ventriculi OX=1267 GN=folE PE=3 SV=1
MNIWESREKEERAISLVKEFIELLGEDPNREGLKDTPKRCVNMIKEVLEGVRYTNEEIAKMFDKCFTEDYESKASEGMVIMRDIPIFSFCEHHLALMYNMNVTVAYIPRKKVIGLSKIARIADMVGRRLQLQEKIGNDIAEIMCMITDSEDVAVVIEGEHACMTTRGIKKNGSKTRTTTFKGAFKEDSSLRQELLMSI

SEQ ID NO: 6919 - protein, 185 aa, Clostridium vincentii
  REGION 1..185: note = tr|A0A2T0BHS9|A0A2T0BHS9_9CLOT GTP cyclohydrolase 1; OS = Clostridium vincentii OX=52704 GN=folE PE=3 SV=1
MINKEKIIQGVKLILEGIGEDPTREGLIETPDRIARMYEEIFAGMDKTAEKHLSKTFSIGRDDLVLEKDITFYSTCEHHLVPFYGKVHIAYIPNGRVAGLSKLARTVEVYAKKPQLQEKLTSEIADAIMEYLGAQGVMVFIEAEHMCMTMRGVKKPGTKTITTTYRGVFEENSELRQEVLSLIKN

SEQ ID NO: 6920 - protein, 264 aa, Clostridium vincentii
  REGION 1..264: note = tr|A0A2T0BJ56|A0A2T0BJ56_9CLOT Putative GTP cyclohydrolase 1 type 2 OS=Clostridium vincentii OX=52704; GN = CLVI_05580 PE=4 SV=1
MEINVRDIIREMEILAPPFLQESYDNVGLMVGTEEKKVEKILLALDCTKDVIEEAKENNVDLIITHHPLIFRKPSRIISEDLQGWKIIELIKNDISIYSSHTNLDAAKGGINEELVKSLGFKNSKLIDNKNIKGYEEAGIGRIVELEEEILVEDLINLVKEKLLIKSLRAVVADKGIKKIAFINGSGQDFFAKALDLGADCIITGDTTYHFALDYKEMGVTIIDAGHFSTEWIMFLKVMKKIEELFKDIEFIHSKVNKDPYIFF

SEQ ID NO: 6921 - protein, 198 aa, unidentified
  source 1..198: note = Cnuella takakiae
  REGION 1..198: note = tr|A0A1M5C345|A0A1M5C345_9BACT GTP cyclohydrolase 1; OS = Cnuella takakiae OX=1302690 GN=folE PE=3 SV=1
MAYNKQETYNEEVTEGLVKNYREALGLLGEDPNREGLLKTPERMAKAMQFMTQGYQQDAVAILNSAKFTENVSEMILVKDIELYSMCEHHMLPFYGKAHIAYIPNGTITGLSKLARVVDVFARRLQVQERLTTQILEAIMEGLNPLGVAVVIEAKHMCMLVRGVQKQNSVTTTSAFSGQFENTTTRMEFLKLIASKLS

SEQ ID NO: 6922 - protein, 244 aa, unidentified
  source 1..244: note = Cnuibacter physcomitrellae
  REGION 1..244: note = tr|A0A1X9LH97|A0A1X9LH97_9MICO GTP cyclohydrolase 1; OS = Cnuibacter physcomitrellae OX=1619308 GN=folE PE=3 SV=1
MGSVDRDRIRAAVGEILAAIGEDPAREGLRDTPRRVAELYGELFAGVGDDPADAFGGAFALRDGGSDAGADRAGSGAAKVAGLPDADADGDADATADAADATADAADEAADAADEALDRIGSVVLMRDLAFRSICEHHLLPFEGVVHIAYEPDAELAGLGRFAAVVEVASSRPQLQERLGDDIADAVERGLTARGVLVVIEARHGCVTARGPRQTASTTVTLSARGSLADPAARAEVMALVARS

SEQ ID NO: 6923 - protein, 183 aa, Cobetia crustatorum
  REGION 1..183: note = tr|A0A558HXK0|A0A558HXK0_9GAMM GTP cyclohydrolase 1; OS = Cobetia crustatorum OX=553385 GN=folE PE=3 SV=1
MTEEIANHYRQIITALGEDPQREGLLDTPKRAAKAMQFLTHGYHQSLEEIVNGAVFTSDTDEMVLVKDIELYSMCEHHLLPFIGKCHIAYLPAGKVLGLSKFARIVDMYSRRMQIQENLTKQIAEAVQQVTGARGVAVVVEARHMCMMMRGVEKQNSSMKTSVMLGAFRDNQPTRQEFLTLIS

SEQ ID NO: 6924 - protein, 299 aa, Cobetia marina
  REGION 1..299: note = tr|A0A4Y4GL83|A0A4Y4GL83_COBMA GTP cyclohydrolase FolE2 OS=Cobetia marina OX=28258 GN=folE2 PE=3 SV=1
MTAILPDVSLTERPRSLSPLDWVGMQGIDLPVLIEEGDYRRELHACVDAQVDLPMPHTKGIHMSRLYRLLDGLAEGKALTPGSLRDVLAAMVESHHDCASRNARVKMAFALLVKRPALVTPALYGWKSYPVTLEASLHEGRFTLQASVTVGYSSTCPCSAALSRQLIEQAFLEAHHNDATLTPEQVAEWLTHHATLATPHSQRSEAIVRVTLKPEAEDLGLIALIDAIEQAVATPVQTAVKRADEQAFAALNGQNLMFVEDAARRLINGLAVSQGEAHVHVRHIESLHPHDAVAWGGGA

SEQ ID NO: 6925 - protein, 183 aa, Cobetia marina
  REGION 1..183: note = tr|A0A4U1M3E9|A0A4U1M3E9_COBMA GTP cyclohydrolase 1; OS = Cobetia marina OX=28258 GN=folE PE=3 SV=1
MTEEIANHYRQIITALGEDPQREGLQDTPMRAAKAMQFLTHGYHQSLEEIVNGAVFTSDTDEMVLVKDIELYSMCEHHMLPFIGKCHIAYLPAGKVLGLSKFARITDMYSRRMQIQENLTKQIAEAVQQVTGARGVAVVVEARHMCMMMRGVEKQNSSMKTSVMLGAFRENQPTRQEFLTLIS

SEQ ID NO: 6926 - protein, 299 aa, Cobetia sp.
  REGION 1..299: note = tr|A0A2S4K5K5|A0A2S4K5K5_9GAMM GTP cyclohydrolase FolE2 OS=Cobetia sp. MM1IDA2H-1 OX=1268241 GN=folE2 PE=3; SV = 1
MTAILPDVSLTECSRSLSPLEWVGMQGIDLPVLIEEGDYRRELHAHVDAQVDLPMPHTKGIHMSRLYRLLDGLAEGKALTPGNLQEVLAAMVASHHDCASRNARVRLEFALLVKRPALVTPGLSGWKSYPVMLEANLQECRFTLQASVTVGYSSTCPCSAALSRQLIEQAFLEAHRNDITLTPEQVAEWLTQHATLATPHSQRSEALVQVTLKPEAKDLGLIGLIDAIEQAVATPVQTAVKRADEQAFAALNGQNLMFVEDAARRLINGLSITDGEAHVHVRHIESLHPHDAVAWGRRD

SEQ ID NO: 6927 - protein, 183 aa, Cobetia sp.
  REGION 1..183: note = tr|A0A0P7EFC8|A0A0P7EFC8_9GAMM GTP cyclohydrolase 1; OS = Cobetia sp. UCD-24C OX=1716176 GN=folE PE=3 SV=1
MTEEIANHYRQIITALGEDPEREGLLDTPKRAAKAMQYLTHGYQQSLEEIVNGAVFTSDTDEMVLVKDIELYSMCEHHLLPFIGKCHIAYLPSGKVLGLSKFARIVDMYSRRMQIQENLTKQIAEAVQQVTGARGVAVVVEARHMCMMMRGVEKQNSSMKTSVMLGAFRDNQPTRQEFLTLIS

SEQ ID NO: 6928 - protein, 324 aa, Cocleimonas flava
  REGION 1..324: note = tr|A0A4R1FAB5|A0A4R1FAB5_9GAMM GTP cyclohydrolase FolE2 OS=Cocleimonas flava OX=634765 GN=folE2 PE=3 SV=1
MSASESCNDNSCNLPDVTNEPHSGPNATLNWVGMSEIELPVHMLTGKGKEIQTVASVQAYVNLIDPESKGIHMSRLYLAVDQILSDNTITPDLLHTVVEQFANSQDGKSDSAYLECRFNFFERRDSLISDNTGWKSYPVRAISSLRQGELTTELSIEVPYSSTCPCSAALARDIIQQGFQTKFGDSGQIDASLVHQWLGTTEGISATPHSQRSIAQVRVKLTDQVKDMPISRLIDQIEDALSTPVQAAVKREDEQEFARLNAANLMFCEDAARRVQAALESDNTLEDFWIRVNHMESLHPHDAVAIVTKGLKDGYRDDPREFPH

SEQ ID NO: 6929 - protein, 183 aa, Cocleimonas flava
  REGION 1..183: note = tr|A0A4R1F3I9|A0A4R1F3I9_9GAMM GTP cyclohydrolase 1; OS = Cocleimonas flava OX=634765 GN=folE PE=3 SV=1
MDNSKLYSELLTNLGEDVNRDGLQKTPDRAAKAMEFLTKGYDQDLDDVINGAVFDSDNDQMVIVKDIEMYSLCEHHLLPFVGKVHVAYLPEGKVIGLSKVARITDMYARRLQIQENMTKQIAEAIKYATGSSSVGVVIEAQHFCMMMRGVEKQGSSTISSMMLGTFRENAKTREEFLNLIKKF

SEQ ID NO: 6930 - protein, 366 aa, unidentified
  source 1..366: note = Cognatishimia maritima
  REGION 1..366: note = tr|A0A1M5KSH0|A0A1M5KSH0_9RHOB GTP cyclohydrolase FolE2 OS=Cognatishimia maritima OX=870908 GN=folE2 PE=3; SV = 1
MNIQSSKADTPMTKEDALEALEKLRAWAKAASPTEIAELDPAVARLIPGQEVSNYPDLKRSYPDDFVADEAYKATLPDLQNGPTSLIKGAKKQIQHVGISNFRLPITYRTREGGDVTLETSVTGTVSLEEDKKGINMSRIMRSFYKHAEKTFSFEVLEHALADYKADLGSFDARIQMRFRYPMKIPSLRSGLEGYQYYDLAMEKVETGGQPLKIMHLDYVYSSTCPCSLELSEHARQARGQLATPHSQRSVARISVVTKSLQRLWFEDLIEMARRAVPTETQVMVKREDEQAFAELNAANPIFVEDAARLFCRELQQDERIGDFRVIASHQESLHSHDAVSILTEGDTFVSGSIDPKLFTTLFHVG

SEQ ID NO: 6931 - protein, 405 aa, unidentified
  source 1..405: note = Cognatiyoonia koreensis
  REGION 1..405: note = tr|A0A1I0NE87|A0A1I0NE87_9RHOB GTP cyclohydrolase FolE2 OS=Cognatiyoonia koreensis OX=364200 GN=folE2 PE=3; SV = 1
MPIPNDPRAGLLRIYEQTIGKSSTKAQFEGSDARQKAADMNIHSPDFDRDPSREEAEAALAMLRRWVGNVTPEEVATLDPLVARLIPGQEVSNYPALARAYPEDFAVDDAYKASMPDLQNGPASLIRGAKQQIQHVGISNFRLPIRFHTRDNGDLTLETSVTGTVSLEAEKKGINMSRIMRTFYKHAEETFSFDVIEKALDAYKSDLESFDARIQMRFSFPMKVQSLRSGLEGYQYYDIALELVETAGVRKKIVHLDYVYSSTCPCSLELSEHARQFRGQLATPHSQRSVARISVLVEDGPCLWFEDLIDRARAAVPTETQVMVKREDEQAFAELNAANPIFVEDAARLFTQQLQLDARISDFRVIASHQESLHSHDAVSVLTEGTTFAAESLDPRLFASLFHVG

SEQ ID NO: 6932 - protein, 403 aa, unidentified
  source 1..403: note = Cognatiyoonia sediminum
  REGION 1..403: note = tr|A0A1M5MZ73|A0A1M5MZ73_9RHOB GTP cyclohydrolase FolE2 OS=Cognatiyoonia sediminum OX=1508389 GN=folE2 PE=3; SV = 1
MIDLKAELSRIYWENVGKVSTEPHIDRSDGPEGAAEMNLHSRDLDRLPSREEAEDALALLRRWASDVSAEEVATLDPLVSRLIPGQEVSNYPALARAYPDAFEVDETYKASMPDLQNGPSSLIRGAKQQIQHVGISNFRLPIRFRTRDGGEITLETSVTGTVSLDAEKKGINMSRIMRTFYQHAEETFSFDVIERALDAYKTDLDSFDARIQMRFSFPMKVESLRSGLSGYQYYDIALELVETDGARKKIMHLDYVYSSTCPCSLELSEHARQYRGQLATPHSQRSVARISALVEDEGDVLWFEDLIDQARSAVPTETQVMVKREDEQAFAELNAANPIFVEDAARLFTEQLKLDQRISDFRVIASHQESLHSHDAVSVLTEGETFAAVSLDPRLFQSLFHVG

SEQ ID NO: 6933 - protein, 211 aa, Cohaesibacter gelatinilyticus
  REGION 1..211: note = tr|A0A285NG65|A0A285NG65_9RHIZ GTP cyclohydrolase 1; OS = Cohaesibacter gelatinilyticus OX=372072 GN=folE PE=3; SV = 1
MDTIIKTDTSSRPAQGQTVTERKRPSRQEAEAAVRTLIEWIGDNPDREGLLDTPARFVKAYEEVYRGYREDPVEPLKRTFKEVNGYKDMVLLRDVEFFSACEHHMVPFVGKAHIAYYPSDGVVGLSKLARVIDTYARRLQTQETMTAQIIEVIEKTLNPRGIALMIEAEHMCMSMRGVQKKGVSTVTTTFTGVFEDDMAKQDRFMTLVGVR

SEQ ID NO: 6934 - protein, 238 aa, Cohaesibacter marisflavi
  REGION 1..238: note = tr|A0A1I5K7A3|A0A1I5K7A3_9RHIZ GTP cyclohydrolase 1; OS = Cohaesibacter marisflavi OX=655353 GN=folE PE=3 SV=1
MDMIVDTSNPAGDKAEEGQDNALKNNKQKQLQALATLEEKADDWALTERPSRQEAEEAVRTLIKWIGDDPEREGLIDTPKRVVKAYEELYRGYREDPAEPLGRTFEEVNGYEDMVLLRDVEFFSACEHHMVPFVGKAHIAYYPSKGVVGLSKLARLIDAFARRLQTQESLTEQIIETIETTLAPRGIALLIEAEHMCMTMRGVRKRGASTVTTRFTGVFAEDVDKQNRFMSLTGECRG

SEQ ID NO: 6935 - protein, 237 aa, Cohaesibacter sp.
  REGION 1..237: note = tr|A0A285MAG2|A0A285MAG2_9RHIZ GTP cyclohydrolase 1; OS = Cohaesibacter sp. ES.047 OX=1798205 GN=folE PE=3 SV=1
MAIVVDTSDTASASKSEHETALKNNKNTENLHPFPRAENTAEDWALTERPSREEAEEAVRTLIKWIGDDPEREGLIDTPRRVVNAYEDLYKGYREDPTVPLERVFEEVNGYKDMVLLRDVEFYSACEHHMVPFVGKAHIAYYPANGVVGLSKLARVIDTFARRLQTQESMTSQIIKTIETSLAPRGIALMIEAEHMCMSMRGVQKRGVSTVTTCFTGVFEDDADKQERFMRLVGERR

SEQ ID NO: 6936 - protein, 233 aa, Cohaesibacter sp.
  REGION 1..233: note = tr|A0A2N5XXR4|A0A2N5XXR4_9RHIZ GTP cyclohydrolase 1; OS = Cohaesibacter sp. H1304 OX=2067669 GN=folE PE=3 SV=1
MLVDTKTSTTLSHEGQGTILNNNKTPENLHPFPAVENKDEWALCERPSRDEAEAAVRTLIKWIGDNPDREGLLDTPKRVVRAYEDLYHGYREDPSAPLARTFEEVNGYKDMVLLRDVEFYSACEHHMVPFFGKAHIAYYPRNGVVGLSKLARVIDTFARRLQTQETLTSQIMDAIETTLAPRGVALLIEAEHMCMSMRGVQKKGVSTVTSSFTGVFENDIEKQNRFMTLVGER

SEQ ID NO: 6937 - protein, 197 aa, unidentified
  source 1..197: note = Cohnella kolymensis
  REGION 1..197: note = tr|A0A0C2R725|A0A0C2R725_9BACL GTP cyclohydrolase 1; OS = Cohnella kolymensis OX=1590652 GN=folE PE=3 SV=1
MAGTKDYVNTQVGQNREKIEHHVREILKLIGENVEREGLLETPARVTRMYEEIFGGYDVDPRSVLGVTFDEQHEELVIVKDIVYYSQCEHHMAPFFGKAHVGYIPSGKVAGLSKLARLVDAVTRRLQVQERITSQIADTLEEVLRPHGVMVVVEGEHLCMCARGVKKYGSNTVTSAVRGQFRQNPALRSEFLELLNR

SEQ ID NO: 6938 - protein, 197 aa, Cohnella luojiensis
  REGION 1..197: note = tr|A0A4Y8LZE3|A0A4Y8LZE3_9BACL GTP cyclohydrolase 1; OS = Cohnella luojiensis OX=652876 GN=folE PE=3 SV=1
MAGAKDYSNSQVSNNREQVEFHVREILKLIGENVEREGLLETPARVTRMYEEIFAGYAVDPRDVLGVTFDERHEELVIVKDIVYYSQCEHHMAPFFGMAHIGYIPSGKIAGLSKLARLVEAVSRRLQVQERITSQIADILEEVLQPHGVMVVVEGEHMCMCSRGVKKPGSKTVTSAVRGQFRQSAALRSEFLELLKR

SEQ ID NO: 6939 - protein, 197 aa, unidentified
  source 1..197: note = Cohnella lupini
  REGION 1..197: note = tr|A0A3D9INM6|A0A3D9INM6_9BACL GTP cyclohydrolase 1; OS = Cohnella lupini OX=1294267 GN=folE PE=3 SV=1
MAGAKDYSNSQVSHNREQMEFHIREILKLIGEDVEREGLLETPARVTRMYEEIFAGYAVDPRDVLGVTFDEQHEELVIVKDIVYYSQCEHHMAPFFGKAHIGYIPSGKIAGLSKLARLVEAVSRRLQVQERITSQIANILEEVLMPHGVMVVVEGEHLCMCARGVKKPGSKTVTSAVRGQFRQSSALRSEFLELLKR

SEQ ID NO: 6940 - protein, 197 aa, Cohnella phaseoli
  REGION 1..197: note = tr|A0A3D9IQJ1|A0A3D9IQJ1_9BACL GTP cyclohydrolase 1; OS = Cohnella phaseoli OX=456490 GN=folE PE=3 SV=1
MAGAKDYSNSHVGQNREQLEFHVREILKLIGENVEREGLLETPARVTRMYEEIFAGYAVNPRDVLGVTFDEQHEELVIVKDIVYYSQCEHHMAPFFGKAHIGYIPSGKIAGLSKLARLVEAISRKLQVQERITSQIADILEEVLQPHGVMVVVEGEHLCMCARGVKKPGSKTVTSAVRGEFRKSPALRSEFLELLNR

SEQ ID NO: 6941 - protein, 197 aa, Cohnella sp.
  REGION 1..197: note = tr|A0A1I0VX04|A0A1I0VX04_9BACL GTP cyclohydrolase 1; OS = Cohnella sp. OV330 OX=1855288 GN=folE PE=3 SV=1
MAGLKDYLNTNVTRNREQVEHHVREILKLIGEDVEREGLLDTPARVTRMYEEIFGGYAIDPRDALGVTFDEQHEELVIVKDIVYYSQCEHHMAPFFGKAHIGYIPSGKIAGLSKLARLVEAVTRRLQVQERITSQIADILDDVLKPNGVMVVVEGEHLCMCARGVKKYGSKTVTSAVRGQFRGSSALRSEFLSLLKE

SEQ ID NO: 6942 - protein, 197 aa, Cohnella sp.
  REGION 1..197: note = tr|A0A231RDX1|A0A231RDX1_9BACL GTP cyclohydrolase 1; OS = Cohnella sp. CIP 111063 OX=1955714 GN=folE PE=3 SV=1
MAGAKDYSNAQVGQNREQVEFHVREILKLIGENVEREGLLETPARVTRMYEEIFAGYAVDPRDVLGVTFDEQHEELVIVKDIVYYSQCEHHMAPFFGKAHIGYIPSGKIAGLSKLARLVEAISRRLQVQERITSQIADILEEVLKPHGVMVVVEGEHLCMCARGVKKPGSKTVTSAVRGEFRKSPALRSEFLELLNR

SEQ ID NO: 6943 - protein, 207 aa, unidentified
  source 1..207: note = Coleofasciculus chthonoplastes
  REGION 1..207: note = tr|B4W132|B4W132_9CYAN GTP cyclohydrolase 1; OS = Coleofasciculus chthonoplastes PCC 7420 OX=118168; GN = folE PE=3 SV=1
MALNGVMPSLSTSDKPLVSDEEMRQAVRTLLLGLGENPDREGLQDTPKRVVKALKFLTSGYHQSLDELLNGAVFTEDANEMVLVRDIDIFSSCEHHILPILGRAHVAYIPNGKVIGLSKIARICEMYGRRLQVQERLTAQIADALTELLKPQGVAVVVEATHLCMVMRGVQKPGSWTVTSAVRGVFAEDARTRQEFMDLVRHNPRFN

SEQ ID NO: 6944 - protein, 224 aa, unidentified
  source 1..224: note = Coleofasciculus chthonoplastes
  REGION 1..224: note = tr|B4VSW2|B4VSW2_9CYAN GTP cyclohydrolase 1; OS = Coleofasciculus chthonoplastes PCC 7420 OX=118168; GN = folE PE=3 SV=1
MTPVTRNTSSTQVEPRPDRNTQNGQEAKLQIPGEASTEDMMDAVRTLLLGVGEDPEREGLLKTPKRVAEAMRFLTGGYNQSLEELVNGAIFDEGHNEMVLVRDINFFSLCEHHMLPFMGRAHVAYIPNQKVVGLSKLARVVEMYARRLQVQERLTRQIAEAIQTILEPQGVAVVMEATHMCMVMRGVQKPGSWTVTSAMVGVFQEEQKTREEFLNLIRHQPSFM

SEQ ID NO: 6945 - protein, 208 aa, Collimonas arenae
  REGION 1..208: note = tr|A0A0A1FC62|A0A0A1FC62_9BURK GTP cyclohydrolase 1; OS = Collimonas arenae OX=279058 GN=folE PE=3 SV=1
MASTDSSSAAALPALSERPSRAEAESAIRTLLRWAGDDPDREGLLDTPARVARAYEEFFAGYSKDPVEILSTTFSEVEGYDEMVVLTNIRFESHCEHHMAPIIGKAHVAYLPDRRVVGISKLARLVDIYAKRLQIQEKMTVQIADTLQQVLLPKGVAVVIEASHGCMTTRGIHKPGTSLVTSRMLGAFRDDPSTRREFMSIIGQKRSE

SEQ ID NO: 6946 - protein, 208 aa, Collimonas arenae
  REGION 1..208: note = tr|A0A127QG07|A0A127QG07_9BURK GTP cyclohydrolase 1; OS = Collimonas arenae OX=279058 GN=folE PE=3 SV=1
MASKDALQTVAASALSERPSRAEAESAIRTLLRWAGDDPDREGLLDTPARVARAYEEFFAGYSKDPVEILSTTFSEVEGYDEMVVLTDIRFESHCEHHMAPIIGKAHVAYLPDRRVVGISKLARLVDIFAKRLQIQEKMTVQIADTLQQVLLPKGVAVVIEASHGCMTTRGIHKPGTSLVTSRMLGAFRDDPSTRREFMSIISQKRNG

SEQ ID NO: 6947 - protein, 267 aa, Collimonas fungivorans
  REGION 1..267: note = tr|A0A127P7D8|A0A127P7D8_9BURK GTP cyclohydrolase FolE2 OS=Collimonas fungivorans OX=158899 GN=folE2 PE=3; SV = 1
MNTRDQNLTIPDVQSSVDTRHLAIQRVGVKGVRYPVTVRTGATAQPTIGSWNMYVHLPEQQKGTHMSRFIALLEGLEGPLDVASFGDLMRKMVTLLDAERGRIELTFPYFINKTAPVSGVQSLMDYEVGLTGEISQGQLEITLKVLVPVTSLCPCSKQISAYGAHNQRSHITVNAVLDGEIQVDQLIAKIEAQASCELFGLLKRPDEKYVTERAYENPKFVEDLVRDVAVALNNEPRVLAYVLEAENFESIHNHSAYALIEHDKRGK

SEQ ID NO: 6948 - protein, 206 aa, Collimonas fungivorans
  REGION 1..206: note = tr|A0A419TV57|A0A419TV57_9BURK GTP cyclohydrolase 1; OS = Collimonas fungivorans OX=158899 GN=folE PE=3 SV=1
MASKDPVPAASALSERPSRAEAESAIRTLLRWAGDDPDREGLLDTPARVARAYEEFFAGYSKDPVEILSTTFSEVEGYDEMVVLTNIRFESHCEHHMAPIIGKAHVAYLPDRRVVGISKLARLVDIFAKRLQIQEKMTVQIADTLQQVLLPKGVAVVIEASHECMTTRGIHKPGTSLVTSRMLGAFRDDPSTRREFMSIISQKRNE

SEQ ID NO: 6949 - protein, 267 aa, Collimonas pratensis
  REGION 1..267: note = tr|A0A127QTS9|A0A127QTS9_9BURK GTP cyclohydrolase FolE2 OS=Collimonas pratensis OX=279113 GN=folE2 PE=3 SV=1
MNTRDQNLTIPDVQSSVDTRRLAIQRVGVKGVRYPLTVRTGAAAQATVGSWNMYVHLPEQQKGTHMSRFIALLEGLDGPLDVASFGELLRKMVTLLDAERGRVELSFPYFINKTAPVSGVQSLMDYEVGLTGEINQGALEITLKVMVPVTSLCPCSKQISAYGAHNQRSHITVNAVLDGELQVDELIARIEAQASCELFGLLKRPDEKYVTERAYENPKFVEDLVRDVAVALNQEPRVLAYVLEAENFESIHNHSAYALIEHDKRSN

SEQ ID NO: 6950 - protein, 202 aa, Collimonas pratensis
  REGION 1..202: note = tr|A0A127QV17|A0A127QV17_9BURK GTP cyclohydrolase 1; OS = Collimonas pratensis OX=279113 GN=folE PE=3 SV=1
MPATAASTLPERPSRAEAESAIRTLLRWAGDDPDREGLLDTPARVARAYEEFFAGYSKDPVEILSTTFSEVEGYDEMVVLTNIRFESHCEHHMAPIIGKAHVAYLPDRRVVGISKLARLVDIYAKRLQIQEKMTVQIADTLQQVLLPKGVAVVIEASHGCMTTRGIHKPGTSLVTSRMLGAFRDDPSTRREFMSIISQKRSE

SEQ ID NO: 6951 - protein, 208 aa, Collimonas sp.
  REGION 1..208: note = tr|A0A1I3H2Q3|A0A1I3H2Q3_9BURK GTP cyclohydrolase 1; OS = Collimonas sp. OK307 OX=1801620 GN=folE PE=3 SV=1
MASKDPVPAVAVNALSERPSRAEAESAIRTLLRWAGDDPDREGLLDTPARVARAYEEFFAGYSKDPVEILSTTFSEVEGYDEMVVLTDIRFESHCEHHMAPIIGKAHVAYLPDRRVVGISKLARLVDIFAKRLQIQEKMTVQIADTLQQVLLPKGVAVVIEASHGCMTTRGIHKPGTSLVTSRMLGAFRDDPSTRREFMSIISQKRNG

SEQ ID NO: 6952 - protein, 206 aa, Collimonas sp.
  REGION 1..206: note = tr|A0A1I1Q309|A0A1I1Q309_9BURK GTP cyclohydrolase 1; OS = Collimonas sp. OK412 OX=1801619 GN=folE PE=3 SV=1
MASKDPVPAASALSERPSRAEAESAIRTLLRWAGDDPDREGLLDTPARVARAYEEFFAGYSKDPVEILSTTFSEVEGYDEMVVLTNIRFESHCEHHMAPIIGKAHVAYLPDRRVVGISKLARLVDIFAKRLQIQEKMTVQIADTLQQVLLPKGVAVVIEASHECMTTRGIHKPGTSLVTSRMLGAFRDDPSTRREFMSIISQKHGE

SEQ ID NO: 6953 - protein, 185 aa, Collinsella aerofaciens
  REGION 1..185: note = tr|A4E7U6|A4E7U6_9ACTN GTP cyclohydrolase 1; OS = Collinsella aerofaciens ATCC 25986 OX=411903 GN=folE; PE = 3 SV=1
MVDQEKVETAIKLLLEGIGEDPTREGLLETPARVARMYGEIAGGMDQSAEEHLSKTFAVASNDLVIERDITFYSLCEHHLLPFYGKAAIGYIPNGRVAGLSKLARTVEVYARRLQLQEQLCTQVADALMEYLAPQGAIVLMEAEHMCMTMRGVQKPGTKTVTLARRGVFETDPSLEERFFRMLGR

SEQ ID NO: 6954 - protein, 185 aa, Collinsella aerofaciens
  REGION 1..185: note = tr|A0A5K1IVH1|A0A5K1IVH1_9ACTN GTP cyclohydrolase 1; OS = Collinsella aerofaciens OX=74426 GN=folE PE=4 SV=1
MVDQEKVETAIKLLLEGIGEEPSREGLLETPARVARMYSEIAGGMDQSAEEHLSKTFAVASNDLVIERDITFYSLCEHHLLPFYGKAAIGYIPNGRVAGLSKLARTVEVYARRLQLQEQLCAQVADALMDYLAPQGAIVLMEAEHMCMTMRGVQKPGTKTVTLARRGVFETDPALEERFFRMLGR

SEQ ID NO: 6955 - protein, 185 aa, Collinsella intestinalis
  REGION 1..185: note = tr|A0A414NH70|A0A414NH70_9ACTN GTP cyclohydrolase 1; OS = Collinsella intestinalis OX=147207 GN=folE PE=3 SV=1
MVDQDKVREAVRLLLEGIGEDPTREGLVETPDRVARMYSELCDGMDRSASEHLSKTFTVLGDDLVIERDITFYSLCEHHMLPFYGKAAIGYIPNGRVAGLSKLARTVEVFARRLQLQEQLTAQVADALMAELDCRGAIVYMEAEHMCMTMRGVQKPGTKTATLARRGAFVENPELEARFFRMLDR

SEQ ID NO: 6956 - protein, 193 aa, Collinsella intestinalis
  REGION 1..193: note = tr|A0A5K1JN08|A0A5K1JN08_9ACTN GTP cyclohydrolase 1; OS = Collinsella intestinalis OX=147207 GN=folE_2 PE=4 SV=1
MVRGKLVEMVDQDKVREAVRLLLEGIGEDPTREGLVETPDRVARMYSELCDGMDRSASEHLSKTFAVSGDDLVIERDITFYSLCEHHMLPFYGKAAIGYIPNGRVAGLSKLARTVEVFARRLQLQEQLTAQVADALMAELDCKGAIVYMEAEHMCMTMRGVQKPGTKTATLARRGAFVENPELEARFFRMLGR

SEQ ID NO: 6957 - protein, 188 aa, unidentified
  source 1..188: note = [Collinsella] massiliensis
  REGION 1..188: note = tr|A0A1Y3XY55|A0A1Y3XY55_9ACTN GTP cyclohydrolase 1; OS = [Collinsella] massiliensis OX=1232426 GN=folE PE=3 SV=1
MAVDRARAERAIREFLIAVGEDPDRPGLVETPNRVARAAEEVLGGYDDDPAHHLRKQFQESESDDMVIVRDIPFSSLCEHHILPFTGRAHVAYIPRGGRITGLSKIARCVTGFARRLQLQERLTSQIADALMEELDPQGVLVVLEAEHMCMTMRGVKSAGALTMTSAVRGAFRKDIKTREEALRLLGL

SEQ ID NO: 6958 - protein, 190 aa, Collinsella sp.
  REGION 1..190: note = tr|A0A1Y4AR88|A0A1Y4AR88_9ACTN GTP cyclohydrolase 1; OS = Collinsella sp. An307 OX=1965630 GN=folE PE=3 SV=1
MAVDLERAQAAVREFLLAVGEDPDRPGLVETPDRVARAAAELFGGYDEDPAVHLRKQFHESDNEEMVIVRDIPFSSMCEHHILPFTGKAHVVYIPRAGRITGLSKIARCVSGFAHRMQLQERLTAQIADALMAELEPLGVLVVLEAEHTCMTMRGVRAAGALTVTSAVRGGFKNDIKTREEALRLIGLNG

SEQ ID NO: 6959 - protein, 185 aa, Collinsella sp.
  REGION 1..185: note = tr|A0A374VF49|A0A374VF49_9ACTN GTP cyclohydrolase 1; OS = Collinsella sp. OM07-12 OX=2292328 GN=folE PE=3 SV=1
MVDQEKVEAAIKLLLEGIGEDPTREGLLETPARVARMYGEIAGGMDQSAEEHLSKTFAVASNDLVIERDITFYSLCEHHLLPFCGKAAIGYIPNGRVAGLSKLARTVEVYARRLQLQEQLCAQVADALMDYLAPQGAIVLMEAEHMCMTMRGVQKPGTKTVTLARRGVFETDPALEERFFRMLGR

SEQ ID NO: 6960 - protein, 194 aa, Collinsella stercoris
  REGION 1..194: note = tr|B6GEC9|B6GEC9_9ACTN GTP cyclohydrolase 1; OS = Collinsella stercoris DSM 13279 OX=445975 GN=folE PE=3; SV = 1
MKQHGKLVEMVDQEKARVAVRMLLEAIGEDPDREGLVETPDRVARMYSELCDGMDRRASEHLSKTFAVSGDDLVIERDITFYSLCEHHMLPFYGKAAIGYIPNGRVAGLSKLARAVEVFARRLQLQEQLTAQVADALMAELDCKGAIVYMEAEHMCMTMRGVQKSGTKTATLARRGAFVENPELEARFFRMLDR

SEQ ID NO: 6961 - protein, 186 aa, Collinsella tanakaei
  REGION 1..186: note = tr|A0A3E4QXJ8|A0A3E4QXJ8_9ACTN GTP cyclohydrolase 1; OS = Collinsella tanakaei OX=626935 GN=folE PE=3 SV=1
MVDQQKIEEAVRLLLEGIGEDPSREGLVETPARVARMYAELAAGMDQDGSEHLSKTFSVGSDDLVIERDITFYSLCEHHMLPFYGKAAIGYIPNGRVAGLSKLARTVETFARRLQLQEQLCAQVADAMMEFLAPQGVIVLMEAEHMCMTMRGVQKPGTKTVTLARRGVFEDDPALEQRFFNMLDRG

SEQ ID NO: 6962 - protein, 186 aa, Collinsella tanakaei
  REGION 1..186: note = tr|G1WFE1|G1WFE1_9ACTN GTP cyclohydrolase 1; OS = Collinsella tanakaei YIT 12063 OX=742742 GN=folE PE=3; SV = 1
MVDQQKIEEAVRLLLEGIGEDSSREGLVETPARVARMYAELAAGMDQDGSEHLSKTFSVGSDDLVIERDITFYSLCEHHMLPFYGKAAIGYIPNGRVAGLSKLARTVETFARRLQLQEQLCAQVADAMMEFLAPQGVIVLMEAEHMCMTMRGVQKPGTKTVTLARRGVFEDDPALEQRFFNMLDRG

SEQ ID NO: 6963 - protein, 180 aa, unidentified
  source 1..180: note = Colwellia beringensis
  REGION 1..180: note = tr|A0A222GDL7|A0A222GDL7_9GAMM GTP cyclohydrolase 1; OS = Colwellia beringensis OX=1967665 GN=folE PE=3 SV=1
MENNYKEILSAIGEDINRNGLIDTPKRAAKAMGFLTQGYQQNIDDVVNGALFDSDADEMVVVKNIELYSMCEHHMLPFIGKCHIAYIPSGKVLGLSKFARIVDMYARRLQIQENLAREIALSIQKITGSIGVGVIIEAQHLCMMMRGVEKQNSSMTTSVMLGQMRKNASARQEMLSLVKS

SEQ ID NO: 6964 - protein, 308 aa, unidentified
  source 1..308: note = Colwellia beringensis
  REGION 1..308: note = tr|A0A222G6P7|A0A222G6P7_9GAMM GTP cyclohydrolase FolE2 OS=Colwellia beringensis OX=1967665 GN=folE2 PE=3; SV = 1
MPTLMPDIANHTTAQTEGTLDWVGMSNIEMPIMVASKGQSERMVSAYVDAFVNLKEPKAKGIHMSRLYLLLDELSNSNVLNHQSLVTLLDGFISSHQELSDNAKVKFSFDYHLRRKSLISGKQGWKAYPVTVTGRLNKGKLDIELSLDVRYSSTCPCSAALARQLIQKAFKEKFSDDANVDLADVHEWLGTTEGIVATPHSQRSVAEIKVKLNSSTTEFPITDLVDLIENSLKTPVQAAVKREDEQEFALLNGQNLMFCEDAARRLQHTMNITDQFDDFWLRINHLESLHAHDAVSVTTKGVVDGYQA

SEQ ID NO: 6965 - protein, 336 aa, Colwellia chukchiensis
  REGION 1..336: note = tr|A0A1H7LJ19|A0A1H7LJ19_9GAMM GTP cyclohydrolase FolE2 OS=Colwellia chukchiensis OX=641665 GN=folE2 PE=3; SV = 1
MPTKILLGTEVTKDSPLPSAQANSGVKMPTLMPDIANHTTAQTEGTLDWVGMSNIEMPIMVASKGESERMVSAHVDAFVNLKEPKAKGIHMSRLYLLLDELSTADVLNHQSLVTLLDGFISSHQELSDNAKVKFSFDYPLRRKSLISGKQGWKAYPVTITGRLNKGKLDIELCLDVRYSSTCPCSAALARQLIQKAFKEKFSTQDGIDLETVHEWLGTTEGIVATPHSQRSVAEVKVKLNHATTEFPITDLVDLIENSLKTPVQAAVKREDEQEFALLNGQNLMFCEDAARRLQHTMNAATQFDDFWLRVNHLESLHAHDAVSITTKGIAGGYQAN

SEQ ID NO: 6966 - protein, 180 aa, Colwellia demingiae
  REGION 1..180: note = tr|A0A5C6Q5N9|A0A5C6Q5N9_9GAMM GTP cyclohydrolase 1; OS = Colwellia demingiae OX=89401 GN=folE PE=3 SV=1
MEQNFKSIIEQIGEDSSREGLVDTPKRAAKAMKFLTQGYEQDLDSVINGALFSSDCNSMVVVNNIELYSLCEHHMLPFTGRCHIGYIPNGKVLGLSKLARIVDMFARRLQIQENLTQEIANAIMDVTGAKGVGVVMSASHLCMRMRGVEKQNSEMKTSCMLGSFMKCKDTRAEFLQLIRD

SEQ ID NO: 6967 - protein, 181 aa, Colwellia demingiae
  REGION 1..181: note = tr|A0A5C6Q3Q6|A0A5C6Q3Q6_9GAMM GTP cyclohydrolase 1; OS = Colwellia demingiae OX=89401 GN=folE PE=3 SV=1
MSIESNYREIIATIGEDINRDGLVDTPKRTAKAMEFLTQGYQQNINDVVNGALFTSDADEMVVVKNIELYSMCEHHMLPFIGKCHIAYIPSGKVLGLSKFARIVDMYARRLQIQENLAREIALSIQEITGSIGVGVIIEAQHLCMMMRGVEKQNSSMTTSVMLGEMRENSAARQEMLSLVK

SEQ ID NO: 6968 - protein, 307 aa, Colwellia hornerae
  REGION 1..307: note = tr|A0A5C6QLC2|A0A5C6QLC2_9GAMM GTP cyclohydrolase FolE2 OS=Colwellia hornerae OX=89402 GN=folE2 PE=3 SV=1
MSTLMPDIANHTTAQTEGTLDWVGMSNIEMPMMVASQGENERMVSAFIDAFVNLKEPQAKGIHMSRLYLLLDELSTSNTLDFQSLVTLLDGFISSHHDLSDNAKVQFRFDYHLRRKSLISGKQGWKAYPVTLTGRLNKGKVDIELAVDVRYSSTCPCSAALARQLIQKAFKAKFHDQDADLDSIHEWLGTTEGIVATPHSQRSVAELKVKLNANTSEFPITALVDIIEGCLKTPVQAAVKREDEQEFALLNGQNLMFCEDAARRLQHAMNNTAEYDDFWLRINHLESLHAHDAVSITTKGIEGGYQP

SEQ ID NO: 6969 - protein, 180 aa, unidentified
  source 1..180: note = Colwellia marinimaniae
  REGION 1..180: note = tr|A0A1Z5I7D5|A0A1Z5I7D5_9GAMM GTP cyclohydrolase 1; OS = Colwellia marinimaniae OX=1513592 GN=folE2_2 PE=3 SV=1
MEQEFKSIIEQIGEDPQREGLIDTPKRAAKALKFLTQGYEQDLNSVINGALFNSDCDSMVVVNNIELYSLCEHHMLPFTGRCHIGYIPNGKVLGLSKIARIVDMYARRLQIQENLTQEIAHAIMAVTDAKGVGVVMSASHLCMRMRGVEKQNSEMKTSCMLGSFLKCKDTRAEFLTLIRD

SEQ ID NO: 6970 - protein, 308 aa, unidentified
  source 1..308: note = Colwellia marinimaniae
  REGION 1..308: note = tr|A0A1Z5HYJ6|A0A1Z5HYJ6_9GAMM GTP cyclohydrolase FolE2 OS=Colwellia marinimaniae OX=1513592 GN=folE2_1 PE=3; SV = 1
MTTSMPDIANHTTAQTEGTLDWVGMSNIEMPIMVASKGESDRMVSAHIDAFVNLKDAQAKGIHMSRLYLLIDELSTSNVLNYQSLVSLLDGFISSHQELSDEAKVEFSFEYHLRRKSLISGKEGWKAYPVTLTGYLNKGKITIELTVNVPYSSTCPCSAALARQLIQQAFQDKFAQQDELALTDIHDWLGTTEGIMATPHSQRSIAEVKVKLNSTVNDFPITELVDLIEYSLKTPVQAAVKREDEQEFARLNGQNLMFCEDAARRLQHSMNQANHFDDFWLRINHLESLHAHDAVSITTKGIEGGYQP

SEQ ID NO: 6971 - protein, 308 aa, Colwellia psychrerythraea
  REGION 1..308: note = sp|Q47VM6|GCH4_COLP3 GTP cyclohydrolase FolE2; OS = Colwellia psychrerythraea (strain 34H / ATCC BAA-681); OX = 167879 GN=folE2 PE=3 SV=1
MTTSMPDIANHTTAQTEGTLDWVGMSNIEMPIMVASKGESERMVSAHIDAFVNLKDAQAKGIHMSRLYLLIDELSTSNILNYQSLVSLLDGFISSHQELSDQAKVQFCFDYHLRRKSLISGKEGWKAYPVTLTGNLNQGKLTIELTIDVPYSSTCPCSAALARQLIQKAFQDKFAQQSELALTDVHDWLGTTEGIVATPHSQRSVAEVKVKLNSSINDFPITEIVDLVENSLKTPVQAAVKREDEQEFARLNGQNLMFCEDAARRLQHSLNQTDQFDDFWLRINHLESLHAHDAVSVTTKGIKDGYQP

SEQ ID NO: 6972 - protein, 180 aa, Colwellia psychrerythraea
  REGION 1..180: note = tr|A0A099KUR3|A0A099KUR3_COLPS GTP cyclohydrolase 1; OS = Colwellia psychrerythraea OX=28229 GN=folE PE=3 SV=1
MEQNFKSIIEQIGEDSNREGLIDTPKRAAKALKFLTQGYEQNLDSVINGALFSSDCDSMVVVNNIELYSLCEHHMLPFTGVCHIGYIPNGKVLGLSKLARIVDMFARRLQIQENLTQEIANAIMAVTGAKGVGVVMSASHLCMRMRGVEKQNSTMKTSCMLGSFLKCKDTRAEFLQLIRD

SEQ ID NO: 6973 - protein, 308 aa, Colwellia sp.; identical to SEQ ID NO: 6971
  REGION 1..308: note = tr|A0A2N1HD72|A0A2N1HD72_9GAMM GTP cyclohydrolase FolE2 OS=Colwellia sp. Bg11-28 OX=2058305 GN=folE2 PE=3; SV = 1

SEQ ID NO: 6974 - protein, 306 aa, Colwellia sp.
  REGION 1..306: note = tr|A0A2G2EHX1|A0A2G2EHX1_COLSX GTP cyclohydrolase FolE2 OS=Colwellia sp. OX=56799 GN=folE2 PE=3 SV=1
MQTNMPDIADTAPALQTGKLDWVGMGEIELPFIFESRDLSPVTVNAKARAFVNLHKEDAKGIHMSRLFLALDLLSTEQQVNPQTISQALNTFISSHEGLSNKAQIEFKFELPLRRKSLLSGKAGWKSYPITLTSTIEDNIISYELTVDVTYSSTCPCSAALARQLIQNAFSEKFNQDTLNQKEVLEWLGTTQGIVATPHSQRSIANVKVKLNSNINEFDVVNLINTLEGELKTPVQAAVKREDEQEFARLNGQNLMFCEDAARKIKAILETDGYADYWLQINHYESLHAHDAVAVAVKGINGGYKA

SEQ ID NO: 6975 - protein, 308 aa, unidentified
  source 1..308: note = Colwelliaceae bacterium
  REGION 1..308: note = tr|A0A2D6RCU3|A0A2D6RCU3_9GAMM GTP cyclohydrolase FolE2 OS=Colwelliaceae bacterium OX=2026726 GN=folE2 PE=3; SV = 1
  VARIANT 224: note = Xaa can be any naturally occurring amino acid
  VARIANT 247..248: note = Xaa can be any naturally occurring amino acid
  VARIANT 255: note = Xaa can be any naturally occurring amino acid
MPTSMPDIANHTTAQTEGKLDWVGMSNIEMPLVVLSKGQPERMVSAHIDAFVNLKEPEAKGIHMSRLYLLLDELSTNNELSYSSLASLLDGFISSHQDLSDDAQVKFSFDYHLRRKSLISGKQGWKAYPVTITGRLNKGELDVELAIDVRYSSTCPCSAALARQLIQQAFMAKFEESDTIDKQTMHDWLGTTEGIVATPHSQRSVAEVKVKLAKGCAEFPIADXVNLLEDTLQTPVQAAVKREDEQXXARLNGQXLMFCEDAARKLQHAMNQATEYNDFWLKVNHLESLHAHDAVSITTKGVEGGYKA

SEQ ID NO: 6976 - protein, 188 aa, unidentified
  source 1..188: note = Comamonadaceae bacterium
  REGION 1..188: note = tr|A0A4Q3PCV5|A0A4Q3PCV5_9BURK GTP cyclohydrolase 1; OS = Comamonadaceae bacterium OX=1871071 GN=folE PE=3 SV=1
MFDQPRAEAAVRELLLAIGEDPDRPGLIDTPARVARSYREVFAGLYTDPAEVLGTTFDEGHSELVLVRDIPLYSTCEHHLVSFHGVAHVGYIPGATGKVTGLSKIARVVDLYAKRPQVQERLTSQVADAVMRKLNPRGAIVVIEAEHLCMAMRGIRKPGASTTTSAVRGTLQSSAASRSEALALILRN

SEQ ID NO: 6977 - protein, 900 aa, Comamonas testosteroni
  REGION 1..900: note = tr|A0A1Y1IVH3|A0A1Y1IVH3_COMTE Diguanylate cyclase; OS = Comamonas testosteroni OX=285 GN=CTR2_0206 PE=4 SV=1
MKSEEGHSPLTPWVIVTLYLCVGMLWLGAQAGVLGYFDVSLNRQSLRWQIGLFIVWLLATALVALLFMQRKARADQRGRETAQELELVVRHAPAGMARVHVGGAEIVWANAKLAGWLGRSVESLRGQDFRVLVPVHDRDEVVLQLQRLLDGSTDYFQVLRQCVHAETGKVTPVLCTTSRVAASGVGGPVALVCVLQDLSEMVSARNAMMRSETMLRLALEGSGNGVWEWDALEQRLNFSTGMSALLRYQGQDLAREFDFHQRLHPEDAATARAQAEQALEQGSMLVLTARLLCFDGLYRWFRARGQAYKDESGRLIRISGLLSDQTASREADERSRLASTVVDNTIEGVVVTDAHSRILSVNHAFTKLLGFSEAEMLGKTPRMFKSGRHDKAFYDAMWASMHATGHWQGEIWNRRKNGEVFPERMSLSAVKDANDKVTHYVCMFTDISAEKAREQQLEFLAHRDTLTGLPNRSQFTRMLGEAVELSQSTNRRMAVLLFNIDRFKDVNDSYGHSIGDEVLRHVSVQMQGALRHGDIIGRLAGDEICVVAQSICGRDSAVDVAERLMAAAGQPWTTPDGLSVVVSVSAGICLYPDHALTADDLLQGAHAAVYGAKARGSNAWCFFHENMTQAARERLALEARLRRALELGHMRLYYQPQIDLATGRVVGAEALLRWLDPEEGLISPARFIPVAENSGVIGPLGLWVLGEACRQGQQWRAAGLPDLTIAVNVSLHQFLLTDIAGATADALNKSGFPASLLELEITESALAEKPEEALAVLNRLRELGLRLAIDDFGTGYSSLAHLKRFPLDLLKIDQGFIRDIPHSADDMTISSSVIALGHAMGLKVLAEGVETQEQLSFLQQKGCDYFQGYFCSRPLPAEDFTRLLEKTREGQSLVAVATAG

SEQ ID NO: 6978 - protein, 314 aa, Comamonas testosteroni
  REGION 1..314: note = tr|A0A1Y1J193|A0A1Y1J193_COMTE GTP cyclohydrolase FolE2 OS=Comamonas testosteroni OX=285 GN=folE2 PE=3 SV=1
MGAHPNWILSMNAALPDVSLTDIAPSLSPLAWVGMQGIDLPITVAEPGCRRELHARADVQVDLPAPHVKGIHMSRLYRLLDTLGQGEALSPTGLCHLLQDMIASHQDCDSRCARLRLNFALLVRRPALVTQGLSGWKSYPVRLDVSLIDGVFRCRVQVTAGYSSTCPCSAALSRQIIEQGFLKAFDRQSPVEPADVAAWLHQHATLATPHSQRSEAQVTVDVPSDADTLGLLALIDRIEQAVGTPVQTAVKRADEQAFAALNGQNLMFVEDAARRIEAALSGYVRPSVHVRHLESLHPHDAVAWAAPISEGVFA

SEQ ID NO: 6979 - protein, 200 aa, unidentified
  source 1..200: note = Commensalibacter intestini
  REGION 1..200: note = tr|G6F1V8|G6F1V8_9PROT GTP cyclohydrolase 1; OS = Commensalibacter intestini A911 OX=1088868 GN=folE PE=3; SV = 1
MKPTDNSPPSREDAEEAIRTLIRWAGDNPEREGLLDTPKRVVNSFDEFFAGYKEDPREVLSRTFDEVGGYKEIVLLKDIRFESHCEHHMVPIIGTAHVAYFPNSRVVGISKLARIVEIFAKRLQIQERMTSEIANIIQEVLEPKGVAVIIEGSHQCMTTRGVHNPGVSMITSKMLGIFRDDPASRTELLMTLNRPTTLGL

SEQ ID NO: 6980 - protein, 200 aa, unidentified; identical to SEQ ID NO: 6979
  source 1..200: note = Commensalibacter intestini
  REGION 1..200: note = tr|A0A251ZVM2|A0A251ZVM2_9PROT GTP cyclohydrolase 1; OS = Commensalibacter intestini OX=479936 GN=folE PE=3 SV=1

SEQ ID NO: 6981 - protein, 200 aa, unidentified
  source 1..200: note = Commensalibacter sp.
  REGION 1..200: note = tr|W7DKM1|W7DKM1_9PROT GTP cyclohydrolase 1; OS = Commensalibacter sp. MX01 OX=1208583 GN=folE PE=3 SV=1
MNSKNNSAPTRQDAEEAIRTLIRWAGDNPEREGLLDTPARVVNSYDEFFSGYKEDPREVLSRTFDEVGGYKETVLLRDIRFESHCEHHMVPIIGTAHIAYFPHSRVVGISKLARVVEIFAKRLQIQERMTSEIANVIQEVLEPKGVAVIIEGSHQCMTTRGVHNTGVSMITSKMLGIFRDDPTTRNELLMTLNRPSTLGL

SEQ ID NO: 6982 - protein, 199 aa, unidentified
  source 1..199: note = Commensalibacter sp.
  REGION 1..199: note = tr|A0A318NBZ2|A0A318NBZ2_9PROT GTP cyclohydrolase 1; OS = Commensalibacter sp. ESL0284 OX=2070537 GN=folE PE=3; SV = 1
MTDKKTSAPSRSEAEEAVRTLIRWAGDDPDREGLIDTPSRVINAYAEFFSGYKENPKEILGRTFEEVGGYKEIVLLRDIRFESHCEHHMVPIIGKAHVAYLPNNYVVGISKLARIVEVFAKRLQIQERMTAEIANIMQEVLQPRGVAVIIEATHQCMTTRGVHNPGVSMVTSKLLGVFQQDQNARAELSALLNRSVSFI

SEQ ID NO: 6983 - protein, 191 aa, unidentified
  source 1..191: note = Compostimonas suwonensis
  REGION 1..191: note = tr|A0A2M9C504|A0A2M9C504_9MICO GTP cyclohydrolase 1; OS = Compostimonas suwonensis OX=1048394 GN=folE PE=3 SV=1
MSGVDRARVEAAVTELLLAIGEDPARPGLESTPRRVAESYAEFFGGLGEDPLEHLRDAVPLGDHVGELVLVRDISFRSMCEHHLLPFVGTAHIAYLPSTRIVGLGRLPKVVDTLATRPQLQERLTEQIADTLVAGLEPLGVLVILEAVHGCVTTRGPRQINSSTVTIASRGALSEPAARAELIALATRGTE

SEQ ID NO: 6984 - protein, 260 aa, Conchiformibius steedae
  REGION 1..260: note = tr|A0A3P2A7V2|A0A3P2A7V2_9NEIS GTP cyclohydrolase FolE2 OS=Conchiformibius steedae OX=153493 GN=folE2 PE=3; SV = 1
MTHSIPDIQSTPDTRNMPINRVGIKDLHFPVRIESAQGVVHTTAKLKMAVYLPAEQKGTHMSRFVALMEEHDAALSPAALHHLTESMLARLHAHSGSIEAAFAFFRTKTAPVSGIKSLMDYQVTLACDINQGQTRHRLSVLVPVTSLCPCSKEISQYGAHNQRSHVTVSLESDGAVAVEEIIDLVENQASCQLYGLLKRPDEKFVTERAYENPKFVEDMVRDIALALQNDARIHRFSVESENFESIHNHSAYALIESAPV

SEQ ID NO: 6985 - protein, 195 aa, unidentified
  source 1..195: note = Confluentibacter sp.
  REGION 1..195: note = tr|A0A2N3HPF1|A0A2N3HPF1_9FLAO GTP cyclohydrolase 1; OS = Confluentibacter sp. 3B OX=1909700 GN=folE PE=3 SV=1
MPYKKFEEYNIQITDDVRERYKNIIKDLGEDTERDGLLKTPERAAKAMQFLTQGYHQDPIKVLKSAMFKESYNEMVIVKDIELYSLCEHHLLPFFGKAHIAYIPNGHIVGLSKLPRIVDIFSRRLQVQERLTEQILDCINDTLKPQGVAVVIEASHMCMMMRGVQKQNSITTTSGFRGQFEKIETRNEFLKLIGK

SEQ ID NO: 6986 - protein, 225 aa, unidentified
  source 1..225: note = Confluentibacter sp.
  REGION 1..225: note = tr|A0A2N3HMB8|A0A2N3HMB8_9FLAO GTP cyclohydrolase 1; OS = Confluentibacter sp. 3B OX=1909700 GN=folE PE=3 SV=1
MKIEKNIEDFDALGEDHIGTSSNTPMRQDAFKLSIEEKIDIIKDDVRHIMETLGLDLTDDSLNGTPNRVAKMFVKELFGGLDPKKKPSASTFENKYKYGEMLVEKNITVYSTCEHHLLPIVGKAHIAYISSGRVIGLSKMNRIVDYYAKRPQVQERLTIQVVKELQEALKTQDVACIIDAKHLCVNSRGIRDVESSTVTSEFGGKFKEEATRREFLDYIKLDTKF

SEQ ID NO: 6987 - protein, 363 aa, unidentified
  source 1..363: note = Confluentimicrobium lipolyticum
  REGION 1..363: note = tr|A0A238KKR5|A0A238KKR5_9RHOB GTP cyclohydrolase FolE2 OS=Confluentimicrobium lipolyticum OX=1524263; GN = folE2 PE=3 SV=1
MNIHDRDPDREEVEHALATLRRWAQTAPEEELAGLEPPLARLVPGAELSNGPALRRAYPEEFTVDEAYKATLPDLQNGPSSLIRGAKQAIQHVGISNFRLPIRFHTRDDGDLTLETSVTGTVSLEAEKKGINMSRIMRSFYGHAERAFSFEVIDSALDAYKRDLDSFDARIMMRFSFPVLRPSLRSGLEGYQYYDIALELVEQDGVRKKIMHVDYVYSSTCPCSLELAEHARQVRGQMATPHAQRSVARVSVLLADGAECLWFEDLIDMCRDAVPTETQVMVKREDEQAFAELNAANPIFVEDAARLFCEGLRNDARISDFRVVASHQESLHSHDAVSVLVEGPTFANESLDPQLFATLIHRG

SEQ ID NO: 6988 - protein, 191 aa, unidentified
  source 1..191: note = Confluentimicrobium sp.
  REGION 1..191: note = tr|A0A0N9NWH3|A0A0N9NWH3_9RHOB GTP cyclohydrolase 1; OS = Confluentimicrobium sp. EMB200-NS6 OX=1609966 GN=folE; PE = 3 SV=1
MKSAAEVQAQIEAAVRSILEALGEDPGREGLLETPARVARMYQEVFAGRNQDPAVHLQTQFTADAHEDVVIVKDISFFSMCEHHLLPFFGKASVAYLPDGGRLAGLSKLARVTHTIAARPQLQERLCAQIADTLDQALRPRGVMVSIEAEHMCMAMRGVRADKSTTITLVTRGELSTDPRLRSETLRLLRD

SEQ ID NO: 6989 - protein, 182 aa, Congregibacter litoralis
  REGION 1..182: note = tr|A4A3J9|A4A3J9_9GAMM GTP cyclohydrolase 1; OS = Congregibacter litoralis KT71 OX=314285 GN=folE PE=3; SV = 1
MESHWAGIITGIGEDLERPGLKDTPKRAAKAFEFLTRGYHQNVEDVVNDALFPSDSNEMVVVQNIEMYSMCEHHMLPFIGKCHVAYIPTGKVIGLSKIARLVDMYARRLQIQESLTMQVAETILDVTEAAGVGVIVEAQHMCMMMRGVEKQNSMMKTSAMLGSFRSDQKTRDEFLSLLQLHQ

SEQ ID NO: 6990 - protein, 226 aa, Congregibacter litoralis
  REGION 1..226: note = tr|A4AAA0|A4AAA0_9GAMM GTP cyclohydrolase 1; OS = Congregibacter litoralis KT71 OX=314285 GN=folE PE=3; SV = 1
MNQAVATETLDFIEDISPEALKVRQALEDRGLETPLVDNGLTRQQKYERIRDSFREITETLGLDLRDDSLQETPHRIAKMYVDEIFSGLNYSQFPKISVIENKMQVEEMVLVDDIDLVSTCEHHFVTIDGTARVAYIPGNKIIGLSKINRIVRFFAQRPQVQERLTQQVLVALQALLETDDVAITINAVHYCVKSRGVMDSNSSTRTTALGGVFKSDNATRSEFLR

SEQ ID NO: 6991 - protein, 218 aa, unidentified
  source 1..218: note = Conservatibacter flavescens
  REGION 1..218: note = tr|A0A2M8S5J1|A0A2M8S5J1_9PAST GTP cyclohydrolase 1; OS = Conservatibacter flavescens OX=28161 GN=folE PE=3 SV=1
MNNISPEAARVRQALQEKGIETPIIESHKSPHERREGIENHMREVMKLIGLDLNDDSLEETPKRLAKMFVDEIFSGLDYANFPKITNIENRMQVSEMVLVNDVTLTSTCEHHFVTIDGKVSVAYYPKKWVIGLSKINRVVSFFAQRPQVQERLTEQVLLAFQTILETDDVAVYVKATHFCVKCRGIKDSNSYTVTSAFGGVFLNDRETRKEFLTLINK

SEQ ID NO: 6992 - protein, 202 aa, unidentified
  source 1..202: note = Consotaella salsifontis
  REGION 1..202: note = tr|A0A1T4L7N2|A0A1T4L7N2_9RHIZ GTP cyclohydrolase 1; OS = Consotaella salsifontis OX=1365950 GN=folE PE=3 SV=1
MNAIVERFPNAAETARPSREEAEAAVATLIRWAGDDPSREGLLETPARVVRAYEELFGGYRQDPADILGRTFEEVAGYDDIVLVRDIDFFSHCEHHMVPIIGRAHVGYRPAGRVVGLSKIARCIEVFGRRLQTQEALTAQVASAIEEVLAPKGVAVVIEAEHMCMSMRGVRTKGAKTITTVFRGAFEDKDEQARFLGMLGTR

SEQ ID NO: 6993 - protein, 188 aa, Coprobacillus sp.
  REGION 1..188: note = tr|G9QXV6|G9QXV6_9FIRM GTP cyclohydrolase 1; OS = Coprobacillus sp. 3_3_56FAA OX=665941 GN=folE PE=3 SV=1
MIDTKKIEEHIYGILKALGDDPEREGLKDTPKRVAKMYGEVFAGMNYSNLEIATMFDKTFVDDLDFDNQEVVVIKDIDIFSYCEHHLALMYDMKVTVAYIPCGKVIGLSKIARIADMAARRLQLQERIGTDIAEIISLVTNSKDIAVIIEGKHSCMSSRGIKKVNSTTVTSTLTGRFKTDSKLQIYLH

SEQ ID NO: 6994 - protein, 188 aa, Coprobacillus sp.; identical to SEQ ID NO: 6993
  REGION 1..188: note = tr|H1AM48|H1AM48_9FIRM GTP cyclohydrolase 1; OS = Coprobacillus sp. 8_2_54BFAA OX=469597 GN=folE PE=3 SV=1

SEQ ID NO: 6995 - protein, 199 aa, unidentified
  source 1..199: note = Coprobacter fastidiosus
  REGION 1..199: note = tr|A0A495VNI7|A0A495VNI7_9BACT GTP cyclohydrolase 1; OS = Coprobacter fastidiosus NSB1 OX=1349822 GN=folE PE=3; SV = 1
MQKVQDRLSDQEKEDLIAGHYKSILELLGEDVNREGLEKTPIRVARAMKFLTSGYDQSPEEILRSAIFHENYGDSQRIVLVKDIEFYSLCEHHLLPFFGKVHIGYMPGDKIVGLSKPARLVDAFARRFQVQERMTREILDCFDSVIEPYGTIVMVEARHLCMQMRGVEKQNASTTTCLYSGNFKDRELREEFFSMLRNR

SEQ ID NO: 6996 - protein, 199 aa, unidentified
  source 1..199: note = Coprobacter fastidiosus
  REGION 1..199: note = tr|A0A354M586|A0A354M586_9BACT GTP cyclohydrolase 1; OS = Coprobacter fastidiosus OX=1099853 GN=folE PE=3 SV=1
MQKVQDRLSDQEKEDLIAGHYKSILELLGEDVNREGLEKTPIRVARAMKFLTSGYDQSPEEILRSAIFHENYGDSQRIVLVKDIEFYSLCEHHLLPFFGKVHIGYMPGDKIVGLSKPARLVDAFARRFQVQERMTQEILDCFDSVIEPYGTIVMVEARHLCMQMRGVEKQNASTTTCLYSGNFKDRELREEFFSMLRNR

SEQ ID NO: 6997 - protein, 190 aa, unidentified
  source 1..190: note = Coprobacter secundus
  REGION 1..190: note = tr|A0A0B2JG33|A0A0B2JG33_9BACT GTP cyclohydrolase 1; OS = Coprobacter secundus OX=1501392 GN=folE PE=3 SV=1
MSSSEIQEQLAYHYKSIISLLGEDTDREGLVKTPERVAKAMQFLTQGYAQSPEEIISSAMFREDYRQMVIVKDIDFYSLCEHHMLPFYGKAHVAYIPNKYITGLSKIARIVDVFARRLQIQERMTMQIKDCLQKTLNPLGVMVVIEAQHMCMQMRGVEKRHSLTTTSDFTGAFKDLKTREEFISLIKNNR

SEQ ID NO: 6998 - protein, 199 aa, unidentified
  source 1..199: note = Coprobacter sp.
  REGION 1..199: note = tr|A0A316SQP2|A0A316SQP2_9BACT GTP cyclohydrolase 1; OS = Coprobacter sp. OX=1941478 GN=folE PE=3 SV=1
MMDEQKIGPEDEKNSVKEQLAYHYRCILSLLGEDVEREGLKKTPERVAKAMMFLTKGYKQSAKEILSSARFKYEGTQMVVVKDIEFYSMCEHHILPFFGKVHIGYIAADQIVGLSKIPRLVDAFARRLQVQERFTTEMMNALSCELSTHGVIVLVEARHLCMQMRGVEKQDSSTVTCDFCGDFKNESLRQEFYRRIGRY

SEQ ID NO: 6999 - protein, 193 aa, Coprococcus catus
  REGION 1..193: note = tr|D4J8R1|D4J8R1_9FIRM GTP cyclohydrolase 1; OS = Coprococcus catus GD/7 OX=717962 GN=folE PE=3 SV=1
MAIDTEAIKEHVRGILVALGDDPEREGLKETPERVAKMYEEVFEGMNYTNHEIAQMFDKTFEQDLELSGKSDDMVYVRDIEIFSYCEHHMALMYDMKVSVAYIPNGKVIGLSKIARIADMAAKRLQLQERIGSDIAEIMAEVTGSDSIAVKIEGCHSCMTARGIKKTAAKTLTTTFTGRFKTDASLQMRVMMQ

SEQ ID NO: 7000 - protein, 193 aa, Coprococcus catus
  REGION 1..193: note = tr|A0A3E2XLA4|A0A3E2XLA4_9FIRM GTP cyclohydrolase 1; OS = Coprococcus catus OX=116085 GN=folE PE=3 SV=1
MAIDTEAIKEHVRGILVALGDDPEREGLKETPERVAKMYEEVFEGMNYTNHEIAQMFDKTFDQDLELSGKSDDMVYVRDIEIFSYCEHHMALMYDMKVSVAYIPNGKVIGLSKIARIADMAAKRLQLQERIGSDIAEIMAEVTGSDSIAVKIEGCHSCMTARGIKKTAAKTLTTTFTGRFKTDASLQMRVMMQ

SEQ ID NO: 7001 - protein, 184 aa, Coprococcus comes
  REGION 1..184: note = tr|R6LQW9|R6LQW9_9FIRM GTP cyclohydrolase 1; OS = Coprococcus comes CAG:19 OX=1263070 GN=folE PE=3 SV=1
MVDHKKVEQAIRLLLEGIGEDPDREGLAETPDRIARMYEEICGGMNEDAAEHLKKTFTAENNEMVVEKDITFYSMCEHHMLPFYGKVHIAYIPDGKVVGLSKLARTVEVFARRLQLQEQMTAQIADALMENLHPKGVMVLAEAEHMCMTMRGIKKPGSKTVSVVTRGAFEENEKLQNMFFRMIG

SEQ ID NO: 7002 - protein, 207 aa, Coprococcus comes
  REGION 1..207: note = tr|A0A412QB02|A0A412QB02_9FIRM GTP cyclohydrolase 1; OS = Coprococcus comes OX=410072 GN=folE PE=3 SV=1
MEKHKKIDTKAIEYHIAGILKALGDNPEREGLIDTPKRVAKMYEEVFEGMNYTNEEIADMFNKTFALDRLEEEFENVECKSQNGNSDMVVVKDIDIFSYCEHHLALMYDMKVTVAYIPKGRVIGLSKIARIADMVSKRLQLQERIGSDIADIMQMVTGAEDIAVLIEGCHSCMTARGIKKTNTKTYTQTLRGRFNNESNGFVQWWNR

SEQ ID NO: 7003 - protein, 197 aa, Coprococcus eutactus
  REGION 1..197: note = tr|R5WKX0|R5WKX0_9FIRM GTP cyclohydrolase 1; OS = Coprococcus eutactus CAG:665 OX=1263071 GN=folE PE=3; SV = 1
MAIDKEAIKEHVRGILIALGDDPDREGLIETPDRVARMYEEVFEGMNYTNDELAEMFGKTFAEDGVARQAGDMVFVKDIEVFSYCEHHMALMYDMKVSVAYIPNGRVLGLSKIARIADMVAKRLQLQERIGSDIAYVISKAAGTEDVAVMIEAHHSCMTARGIKKPGSKTMTTTLRGRFESDTALQNKMLMMYNAGR

SEQ ID NO: 7004 - protein, 200 aa, Coprococcus eutactus
  REGION 1..200: note = tr|A8STP4|A8STP4_9FIRM GTP cyclohydrolase 1; OS = Coprococcus eutactus ATCC 27759 OX=411474 GN=folE PE=3; SV = 1
MYKMAIDKEAIKEHVRGILIALGDDPDREGLIETPDRVARMYEEVFEGMNYTNDELAEMFGKTFAEDGVARQAGDMVFVKDIEVFSYCEHHMALMYDMKVSVAYIPNGRVLGLSKIARIADMVAKRLQLQERIGSDIAYVISKAAGTEDVAVMIEAHHSCMTARGIKKPGSKTMTTTLRGRFESDTALQNKMLMMYNAGR

SEQ ID NO: 7005 - protein, 194 aa, Coprococcus sp.
  REGION 1..194: note = tr|A0A3R6Y7N0|A0A3R6Y7N0_9FIRM GTP cyclohydrolase 1; OS = Coprococcus sp. OM04-5BH OX=2293093 GN=folE PE=3 SV=1
MAIDKDAIREHVRGILIALGDDPDREGLKETPDRVARMYEEVFAGMNYTNDEIAEMYGKTFKEEDTRHTEDMVFVKDIEVFSYCEHHMALMYDMKVSIAYLPKDKLIGLSKLARIADMVARRLQLQERIGTDIAYIVSKVTGSEDVAVLIEANHSCMTARGIKKPGTKTFTTTFRGKFENDITLQNKLLLMNTH

SEQ ID NO: 7006 - protein, 197 aa, Coprococcus sp.
  REGION 1..197: note = tr|A0A1Q6MLG9|A0A1Q6MLG9_9FIRM GTP cyclohydrolase 1; OS = Coprococcus sp. CAG:131_42_139 OX=1896997 GN=folE PE=3; SV = 1
MAIDKEAIKEHVRGILIALGDDPDREGLVETPDRVARMYEEVFEGMNYTNDELAEMFGKTFAEDGVARQAGDMVFVKDIEVFSYCEHHMALMYDMKVSVAYIPNGRVLGLSKIARIADMVAKRLQLQERIGSDIAYVISKAAGTEDVAVMIEAHHSCMTARGIKKPGSKTMTTTLRGRFESDTALQNKLLMMYNAGR

SEQ ID NO: 7007 - protein, 271 aa, Coprothermobacter proteolyticus
  REGION 1..271: note = sp|B5Y6R9|GCH4_COPPD GTP cyclohydrolase FolE2; OS = Coprothermobacter proteolyticus (strain ATCC 35245 / DSM 5265 / BT) OX=309798 GN=folE2 PE=3 SV=1
MRDVQSERDPRNVPLDYVGIENVRLPITVRTKEGGKQPTVGTFSIGVDFPHSFRGTHMSRFMEVLYQHLEEISQTRLRVTLEDIKERLKATKAMIEVAFPFAIKKSTPVTKLETVMYVDASFKAELNSTRGYVVTSTVTVPVHSLCPCSRDISEFGAHNQRVDVTVSWQGDLWIEDVIALVESSASQPLYPLLKRPDEKYVTEKAYLNPKFVEDIAKDLFLKLDPLSPCFRIKVVSYESIHPHNAVAIKEKRAEVSESSVRSNDQEHRDCT

SEQ ID NO: 7008 - protein, 270 aa, Coprothermobacter sp.
  REGION 1..270: note = tr|A0A348VCU5|A0A348VCU5_9BACT GTP cyclohydrolase FolE2 OS=Coprothermobacter sp. OX=55509 GN=folE2 PE=3 SV=1
MRDVQSERDPRNVPLDYVGIENVRLPITVRTKEGGKQPTVGTFSIGVDFPHSFRGTHMSRFMEVLYQHLEEISQTRLRVTLQDIKERLKATKAMIEVAFPFAVKKSTPITKLETIMYVDASFKAELNSTGYVVTSTVTVPVHSLCPCSRDISEFGAHNQRVDVTVSWQGDLWIEDVIALVESSASQPLYPLLKRPDEKYVTEKAYLNPKFVEDIAKDLFLKLDPLSPCFRIKVVSYESIHPHNAVAIKEKRAEVTESSAKSNDQEHRDCT

SEQ ID NO: 7009 - protein, 326 aa, Coraliomargarita akajimensis
  REGION 1..326: note = tr|D5EM69|D5EM69_CORAD GTP cyclohydrolase FolE2; OS = Coraliomargarita akajimensis (strain DSM 45221 / IAM 15411 / JCM 23193 / KCTC 12865 / 04OKA010-24) OX=583355; GN = fo lE2 PE=3 SV=1
MKEKSSSQSQEILASDASKPSKIYDEEFVLTDEYRASLPDMQNADAQQIYGANVPILKVGISNFRLPLRYITPSSDTHRLETSVTGTVSLEANQKGINMSRIMRVFYEYQERIFTPDLLQDILMAYKDEIRAHRAQLKLEFEYPILKPSLRSGLEGWQYYRCAFEGKVDELNRFRKYLHFDFIYSSACPCSSELSEHARESRNIYGIPHSQRSTARVSVEIAQDVLLSIEELQQLCLAGLKTETQVMVKREDEQAFAELNGAYTKFVEDAARLLYEQLDGDERIVDFQVACAHLESLHSHDAVAVINKGVPGGFTGHFEDFKGLIR

SEQ ID NO: 7010 - protein, 326 aa, Coraliomargarita sp.
  REGION 1..326: note = tr|A0A3R7VL63|A0A3R7VL63_9BACT GTP cyclohydrolase FolE2 OS=Coraliomargarita sp. TMED73 OX=1986604 GN=folE2; PE = 3 SV=1
MSEDSIGTSRDTLSPATSKPSVRYDKDFVLTDEYRASMPDMQNEGSREIFGANVPILKVGISNFRLPLRYITPDSDTHTLETSVTGTVSLEAGQKGINMSRIMRVFYDYEERIFTPDLLCEILQEYKKTLRAHRAQIKLDFTYPIAQSSLRSGLEGWQYYPCAIEGRIDELDRFRKYIHFDYTYSSACPCSSELSEHARDKRNVYGIPHSQRSTARVSVEIAENEHLNIESIQQMCLEALKTETQVMVKREDEQAFAELNGAFTKFVEDAARLLYEQFNADSRIVDFQIACAHLESLHSHDAVAVINKGMPGGFSGQFEDFKSLIR

SEQ ID NO: 7011 - protein, 308 aa, unidentified
  source 1..308: note = Corallincola sp.
  REGION 1..308: note = tr|A0A368NQ87|A0A368NQ87_9GAMM GTP cyclohydrolase FolE2 OS=Corallincola sp. C4 OX=2282215 GN=folE2 PE=3 SV=1
MPSIMPDIANHASAQTEGTLDWVGMDNIELPLMVEVRGEAPRQVSAHVGAFVNLTRPKAKGIHMSRLYLLLDTLSTEGTLNSQALMTLLDNFITSHDELSDHAKVSFTFDYHMRRKSLISGKQGWKAYPVTLTGELKQGELSIEMGVQVPYSSTCPCSAALARQLIQDAFEAKFSGQGSIDRAEMHAWLGTTEGVVATPHSQRSIADVKIKLDNANLGFPLRQLIDQIEDALQTPVQAAVKRVDEQEFARLNGQNLMFCEDAARRLKHLLNQHAEYKDFLLRVNHYESLHAHDAVSITAKGVKGGYHA

SEQ ID NO: 7012 - protein, 205 aa, unidentified
  source 1..205: note = Coriobacteriaceae bacterium
  REGION 1..205: note = tr|U2VI65|U2VI65_9ACTN GTP cyclohydrolase 1; OS = Coriobacteriaceae bacterium BV3Ac1 OX=1111135 GN=folE; PE = 3 SV=1
MADEQTYTQMAGQATSKIDRPRAEAAIRELLYAIGEDPHREGLQGTPDRVARACEELFAGLSDDPARYLRKQFQEDHNEEMVIVRDIPFHSMCEHHLLPFIGKAHVAYIPRAGRITGLSKIARCVAGFAARPQVQERLTAEVADAMVAELNPLGVMVVIEAEHTCMTMRGVRAAGAVTVTSSVRGCFKQNEKTRTEALRLLGVSH

SEQ ID NO: 7013 - protein, 189 aa, unidentified
  source 1..189: note = Coriobacteriaceae bacterium
  REGION 1..189: note = tr|A0A143X160|A0A143X160_9ACTN GTP cyclohydrolase 1; OS = Coriobacteriaceae bacterium CHKCI002 OX=1780377 GN=folE; PE = 3 SV=1
MDRAKIEAGVRLILEGVGEDPDREGLLKTPERVAKMYEEVFAGLVEDPAEHFETTFDEHHEEMVLVRDIPFYSMCEHHLVPFFGVAHVAYVPAADGRICGLSKLARLVDAFAKRPQVQERLTSQIADTLMEQLHPRGVIVVLEAEHLCMSMRGVKKPGTRTTTSAVRGALERNQTTRAEALSLIFARRD

SEQ ID NO: 7014 - protein, 195 aa, unidentified
  source 1..195: note = Coriobacteriales bacterium
  REGION 1..195: note = tr|A0A437UY44|A0A437UY44_9ACTN GTP cyclohydrolase 1; OS = Coriobacteriales bacterium OH1046 OX=2491116 GN=folE; PE = 3 SV=1
MAGKLSYRILDEPRIEAAIRELLIGIGEDPDRAGLKDTPGRVARACKEIFGGMQEDPGSHLLRQFDEPGNEDMVIVKDIPFSSMCEHHLLPFVGRAHICYLPGNGKITGLSKLARCVDGFARRPQLQERLTQQIADALVERLSPRGVLVVLEAEHTCMTMRGIKSAGSKTVTSAVRGWFKDDLKAREEALGLIGV

SEQ ID NO: 7015 - protein, 201 aa, unidentified
  source 1..201: note = Coriobacteriales bacterium
  REGION 1..201: note = tr|A0A133ZG62|A0A133ZG62_9ACTN GTP cyclohydrolase 1; OS = Coriobacteriales bacterium DNF00809 OX=1588753 GN=folE; PE = 3 SV=1
MMEHNQERKETTPSRFDFDKVQQGVRLILEGIGENPAREGLRETPARVARMYQEVFSGMHTDPHEFFTTLFDEHHQEMVLVKDISFYSMCEHHLAPFFGYAHVAYIPSVDGRICGLSKLARLVEAFAHRPQVQERLTSQIADTLVKELKPQGVMVVIEAEHMCMSMRGVKKPSSKTTTSAVRGSFKMNLSTRNEVMHLMFN

SEQ ID NO: 7016 - protein, 185 aa, unidentified
  source 1..185: note = Coriobacteriia bacterium
  REGION 1..185: note = tr|A0A2V2EAA7|A0A2V2EAA7_9ACTN GTP cyclohydrolase 1; OS = Coriobacteriia bacterium OX=2052159 GN=folE PE=3 SV=1
MVDQEKIQQAVRLLLEGMGEDVEREGLLETPQRVGRMYAEICRGMDESALGHLSTTFSIDSDDMVVERDIQFYSLCEHHLLPFYGKVHLAYIPNGRVTGLSKLARTVEVFSRRLQLQERLTSQIADALMDDLGAKGAIVMVEGEHMCMSMRGVSKPGASTATLAKRGVFEGDQALVDEFFRLIGK

SEQ ID NO: 7017 - protein, 205 aa, unidentified
  source 1..205: note = Coriobacteriia bacterium
  REGION 1..205: note = tr|A0A357ZDW9|A0A357ZDW9_9ACTN GTP cyclohydrolase 1; OS = Coriobacteriia bacterium OX=2052159 GN=folE PE=3 SV=1
MPKSPERKGTLKTTRSEKTVDTRKIEEGVRLILEGIGENLDREGLLDTPGRVARMYEEVCAGIGKTPEGLFEKSFGEDHQELVLVKDIPFYSLCEHHLAPFFGLAHVGYIPGRDGRVCGISKLARLVDLYARRLQVQERLTSQVAETLVEQLSPRGAIVVIEAEHLCMSMRGVKKPGARTTTSAVRGVFETSQKSREEALSLVFR

SEQ ID NO: 7018 - protein, 186 aa, Coriobacterium glomerans
  REGION 1..186: note = tr|F2N7H8|F2N7H8_CORGP GTP cyclohydrolase 1; OS = Coriobacterium glomerans (strain ATCC 49209 / DSM 20642 / JCM 10262 / PW2) OX=700015 GN=folE PE=3 SV=1
MIDQKKIEQAVELLLEGIGEDPGRAGLIETPARVARMYAELCAGKLDDASKHLARTFSVSGNDLVIERDIMFHSLCEHHLLPFFGHVHIGYVPCGRVVGLSKLARLVEVFARRLQLQERMTAQIADALMEQLAPQGVIVMIEAEHLCMAMRGVAKPGTWTTTLAVRGIIEQDPEIEQRFFRMLGRP

SEQ ID NO: 7019 - protein, 311 aa, unidentified
  source 1..311: note = Corticibacter populi
  REGION 1..311: note = tr|A0A3M6QYY8|A0A3M6QYY8_9BURK GTP cyclohydrolase FolE2 OS=Corticibacter populi OX=1550736 GN=folE2 PE=3 SV=1
MTVSLPDISLTETSPTLSPLRWVGMQGIDLPLTVSEPGYRRELHARGDVQVDLPAPHIKGIHMSRLYRLLDDLGDGEALSPVGLRRCLQAIVESHRDCNTSSARMRLQFDLLARRQALVTKGLAGWKSYPVRLDATLRPGSFSKQGFFTLRAQVTVGYSSTCPCSAALTRQLIEQGFTRAFAGQPSVEVSEVADWLRRHATLATPHSQRSEAVVGVDVAAGAPDMGLLTLIDRIEQAVGTPVQTAVKRADEQAFAALNGQNLMFVEDAVRRIQAALTVGYAQPLVHVRHLESLHPHDAVAWAAPAAEGVLA

SEQ ID NO: 7020 - protein, 202 aa, Corynebacterium accolens
  REGION 1..202: note = tr|E0N052|E0N052_9CORY GTP cyclohydrolase 1; OS = Corynebacterium accolens ATCC 49726 OX=862512 GN=folE; PE = 3 SV=1
MSENHTDNQQVPARAPYDQERAEAAVRELLLAVGEDPDREGLRETPARVARAYREVFAGLHEDPTEVLHKTFAEDHQELVLVRDIPIYSTCEHHLVPFYGVAHIGYIPGKDGHVTGLSKLARLADMYAKRPQVQERLTQQIADALVNVLEAQSVIVVIECEHLCMAMRGIRKPGATTTTSAVRGGFKNNAASRAEVLSFIRT

SEQ ID NO: 7021 - protein, 196 aa, Corynebacterium accolens
  REGION 1..196: note = tr|A0A2A4AHF5|A0A2A4AHF5_9CORY GTP cyclohydrolase 1; OS = Corynebacterium accolens OX=38284 GN=folE PE=3 SV=1
MSNNIPAKGEFDQARAEAAIRELLIAVGEDPDREGLQETPARVARAYKEVFAGLHADPTEVLHKTFAEEHQELVLVRDIPIYSTCEHHLVPFYGVAHIGYIPGPDGHVTGLSKLARLADMYAKRPQVQERLTSQVADALVEVLHAQSVIVVIECEHLCMAMRGIRKPGATTTTSAVRGGFKSNAASRAEVMSLIRS

SEQ ID NO: 7022 - protein, 191 aa, Corynebacterium afermentans
  REGION 1..191: note = tr|A0A1N6Q1D1|A0A1N6Q1D1_9CORY GTP cyclohydrolase 1; OS = Corynebacterium afermentans OX=38286 GN=folE PE=3 SV=1
MTNANFDRERAEAAVRELLIAVGEDPDREGLVETPARVARAYEEVFAGLHEDPKVHLEKSFSENHRELVLVRDIPIYSTCEHHLVPFYGEAHIGYIPGPEGKVTGLSKLARVADMYAKRPQVQERLTAQIADAIVEKLNASAVIVVIECEHLCMAMRGIRKPGATTTTSAVRGGFQNNAASRAEVLSLIRG

SEQ ID NO: 7023 - protein, 197 aa, Corynebacterium ammoniagenes
  REGION 1..197: note = tr|D5NY15|D5NY15_CORAM GTP cyclohydrolase 1; OS = Corynebacterium ammoniagenes DSM 20306 OX=649754; GN = folE PE=3 SV=1
MSDNSIPARRPFDQERAEAAIRELLFAVGEDPDRKGLEETPARVARSYAEIFAGLHKDPTEVLKKTFAEDHQELVLVRDIPIYSTCEHHLVPFYGVAHIGYIPGSDGRVTGLSKLARLADGFAKRPQVQERLTRQIADALTEVLEAQSVIVVIECEHLCMGMRGVQKPGSVTTTSAVRGGFKNNSASRAEVLSLIRS

SEQ ID NO: 7024 - protein, 191 aa, Corynebacterium amycolatum
  REGION 1..191: note = tr|A0A1V2C292|A0A1V2C292_CORAY GTP cyclohydrolase 1; OS = Corynebacterium amycolatum OX=43765 GN=folE PE=3 SV=1
MEREFDQERAEAAVRELLIAVGEDPDREGLKETPARVARAYREVFAGLFEDPSEVLAKTFNEDHQELVLVKDIPIYSTCEHHLVPFFGVAHIGYIPGKDGRVTGLSKLARLVDGYAKRPQVQERLTSQVADALVERLDPASAIVVIEAEHLCMAMRGIRKPGARTVTSAVRGGFKTDARSRAEAMALIRKS

SEQ ID NO: 7025 - protein, 191 aa, Corynebacterium amycolatum
  REGION 1..191: note = tr|A0A2I1WXF8|A0A2I1WXF8_CORAY GTP cyclohydrolase 1; OS = Corynebacterium amycolatum OX=43765 GN=folE PE=3 SV=1
MEREFDQGRAEAAVRELLIAVGEDPDREGLKETPARVARAYREVFAGLFEDPSEVLAKTFNEDHQELVLVKDIPIYSTCEHHLVPFFGVAHIGYIPGKDGRVTGLSKLARLVDGYAKRPQVQERLTSQVADALVERLDPASAIVVIEAEHLCMAMRGIRKPGARTVTSAVRGGFKTDARSRAEAMALIRKS

SEQ ID NO: 7026 - protein, 205 aa, Corynebacterium appendicis
  REGION 1..205: note = tr|A0A1N7J729|A0A1N7J729_9CORY GTP cyclohydrolase 1; OS = Corynebacterium appendicis CIP 107643 OX=1161099; GN = folE PE=3 SV=1
MTENDYAAVEQAEKEERPAFDRERAEAAVRELLLAVGEDPDREGLVDTPARVARAYEEVFAGLHTDPTTVLEKTFAENHEELVLVRDVPIYSTCEHHLVPFYGVAHIGYIPGEDGHVTGLSKLARLADMYAKRPQVQERLTSQIADALVDKLHAQSVIVVIECEHLCMAMRGIRKPGAMTTTSAVRGGFKRNAASRAEVLSLIRG

SEQ ID NO: 7027 - protein, 189 aa, Corynebacterium aquilae
  REGION 1..189: note = tr|A0A1L7CI55|A0A1L7CI55_9CORY GTP cyclohydrolase 1; OS = Corynebacterium aquilae DSM 44791 OX=1431546 GN=folE; PE = 3 SV=1
MGEFDSARAEAAVRELLIAVGEDPDREGLKDTPARVARAYEEIFAGLHTDPTVVLEKTFNEDHQELVLVKDIPIYSTCEHHLVPFYGHAHIGYIPGKNGKVTGLSKLARLVDLYAKRPQVQERLTSQVADALVDKLDASAVIVVLECEHLCMAMRGIRKPGARTTTSAVRGGFKTDSRSRAEALSLIRG

SEQ ID NO: 7028 - protein, 187 aa, Corynebacterium argentoratense
  REGION 1..187: note = tr|U3GUT8|U3GUT8_9CORY GTP cyclohydrolase 1; OS = Corynebacterium argentoratense DSM 44202 OX=1348662; GN = folE PE=3 SV=1
MFDRERAEAAVRELLIAVGEDPDREGLQDTPARVARAYEEVFAGLHVDPTEVLNKTFSEDHQELVLVKDIPIYSTCEHHLVPFFGHAHIGYIPGKNGQVTGLSKLARLVDLFAKRPQVQERLTTQVADAIVEKLGAQSVIVVIECEHLCMAMRGIRKPGARTTTSAVRGGFKANAASRAEVLSLIRG

SEQ ID NO: 7029 - protein, 177 aa, Corynebacterium atypicum
  REGION 1..177: note = tr|A0A075TWV3|A0A075TWV3_9CORY GTP cyclohydrolase 1; OS = Corynebacterium atypicum OX=191610 GN=folE PE=3 SV=1
MRELLIAVGEDPDREGLKETPARVARAYKETLAGLFCDPADVLEKVFNEGHQELVLVRDIPVYSTCEHHLLPFIGTAHVGYIPSADGKVTGLSKLARLVDMYAKRPQVQERLTSQVADALVERLHAQSVIVVIECEHLCMAMRGIRKPGAITTTSAVRGGFQRNAASRSEALALIRG

SEQ ID NO: 7030 - protein, 196 aa, Corynebacterium aurimucosum
  REGION 1..196: note = sp|C3PJE8|GCH1_CORA7 GTP cyclohydrolase 1; OS = Corynebacterium aurimucosum (strain ATCC 700975 / DSM 44827 / CN-1) OX=548476 GN=folE PE=3 SV=1
MSDNIPAQREFDHERAEAAVRELLIAVGEDPDREGLRETPARVARAYAEVFAGLHQDPTEVLHKTFAEEHQELVLVRDIPIYSTCEHHLVPFYGTAHIGYIPGTDGHVTGLSKLARLADMYAKRPQVQERLTSQIADALVEVLHAQSVIVVIECEHLCMAMRGIRKPGATTTTSAVRGGFKKNAASRAEVMSLIRS

SEQ ID NO: 7031 - protein, 196 aa, Corynebacterium aurimucosum
  REGION 1..196: note = tr|A0A2I1MY40|A0A2I1MY40_9CORY GTP cyclohydrolase 1; OS = Corynebacterium aurimucosum OX=169292 GN=folE PE=3 SV=1
MSDNIPAQREFDHERAEAAVRELLIAVGEDPDREGLRETPARVARAYAEVFAGLHQDPTEVLHKTFAEEHQELVLVRDIPIYSTCEHHLVPFYGKAHIGYIPGPDGHVTGLSKLARLADMYAKRPQVQERLTSQIANALVDVLHAQSVIVVIECEHLCMAMRGIRKPGATTTTSAVRGGFKKNAASRAEVMSLIRS

SEQ ID NO: 7032 - protein, 207 aa, Corynebacterium auriscanis
  REGION 1..207: note = tr|A0A0A2DL37|A0A0A2DL37_9CORY GTP cyclohydrolase 1; OS = Corynebacterium auriscanis OX=99807 GN=folE PE=3 SV=1
MSDSPQPIDTDDTGNSFPTFDRERAEAAVRELLFAVGENPDREGLKDTPARVARAYEEIFAGLYTDPTEVLNKTFSEDHRELVLVRDIPFYSTCEHHLVPFFGHAHIGYIPGQSGKVTGLSKLARLIDGLGKRPQVQERLTSQVADALMERLEATAVIVVIEAEHLCMAMRGIRKPGANTVTSAVRGGFRTNASSRAEAMALIQRGR

SEQ ID NO: 7033 - protein, 191 aa, Corynebacterium bovis
  REGION 1..191: note = tr|A0A3R8PH92|A0A3R8PH92_9CORY GTP cyclohydrolase 1; OS = Corynebacterium bovis OX=36808 GN=folE PE=3 SV=1
MTGTFDHDRAAAAVRELLLAVGEDPDRPGLRDTPDRVARAYRETFAGLYTEPSDVLGTTFEENHRELVLVRDIPIFSTCEHHLVPFHGHAHIGYIPGESGTVTGLSKLARVVDLYARRPQVQERLTTQVADALVDRLDPSAVIVVIECEHMCMAMRGIRKPGASTVTSAVRGTFLDDAAARAEALTLIRGR

SEQ ID NO: 7034 - protein, 196 aa, Corynebacterium callunae
  REGION 1..196: note = tr|M1V0A5|M1V0A5_9CORY GTP cyclohydrolase 1; OS = Corynebacterium callunae DSM 20147 OX=1121353 GN=folE; PE = 3 SV=1
MDDHVAIREFDEERAVAAVRELLIAVGEDPEREGLQETPARVARAYKEIFAGLHEDPTEVLEKTFSEGHEELVLVREIPIYSTCEHHLVPFFGVAHIGYIPGKSGKVTGLSKLARLADMYAKRPQVQERLTSQIADALVEKLDAQAVAVVIEAEHLCMAMRGIRKPGAVTTTSAVRGGFKNNAASRAEVFTLIRGR

SEQ ID NO: 7035 - protein, 197 aa, Corynebacterium camporealensis
  REGION 1..197: note = tr|A0A0F6TC02|A0A0F6TC02_9CORY GTP cyclohydrolase 1; OS = Corynebacterium camporealensis OX=161896 GN=folE PE=3; SV = 1
MTNHNVPARAPFDQERAEAAVRELLLAVGEDPDREGLQETPARVARAYKEVFAGLHTDPTEVLHRTFAENHQELVLVRDIPIYSTCEHHLVPFYGTAHIGYIPGKDGHVTGLSKLARLADMYAKRPQVQERLTSQIADALVDVLGAQSVIVVIECEHLCMAMRGIRKPGATTTTSAVRGGFQSNPASRAEVLSLIRS

SEQ ID NO: 7036 - protein, 192 aa, Corynebacterium canis
  REGION 1..192: note = tr|A0A5C5UBD0|A0A5C5UBD0_9CORY GTP cyclohydrolase 1; OS = Corynebacterium canis OX=679663 GN=folE PE=3 SV=1
MSEAVFDQARAEAAVRELLFAVGEDPDREGLQDTPARVARAYAEMFVGLHTDPTEVLNKTFSENHQELVLVRDIPIYSTCEHHLVPFYGKAHIGYIPGRSGQVTGLSKLARLVDLFAKRPQVQERLTSQVADALVDKLGAQAVIVVIECEHLCMAMRGIRKPGTTTTTSAVRGLFQRNAASRAEVLSLIRGS

SEQ ID NO: 7037 - protein, 197 aa, Corynebacterium casei
  REGION 1..197: note = tr|W5XVU7|W5XVU7_9CORY GTP cyclohydrolase 1; OS = Corynebacterium casei LMG S-19264 OX=1285583 GN=folE; PE = 3 SV=1
MSDNSIPARKPFDQARAEAAIRELLIAVGEDPEREGLQETPARVARSYAEIFSGLHTDPTEVLNKTFAEDHQELVLVRDIPIYSTCEHHLVPFYGVAHIGYIPGNDGKVTGLSKLSRLADGFAKRPQVQERLTRQIADALTEELGAQSVIVVIECEHLCMGMRGVRKPGAVTTTSAVRGGFKNNSASRAEVMSLIRS

SEQ ID NO: 7038 - protein, 197 aa, Corynebacterium casei
  REGION 1..197: note = tr|G7HYB5|G7HYB5_9CORY GTP cyclohydrolase 1; OS = Corynebacterium casei UCMA 3821 OX=1110505 GN=folE PE=3; SV = 1
MSDNSIPARKPFDQARAEAAIRELLIAVGEDPEREGLQETPARVARSYAEIFSGLHTDPTEVLNKTFAEDHQELVLVRDIPIYSTCEHHLVPFYGVAHIGYIPGKDGKVTGLSKLSRLADGFAKRPQVQERLTRQIADALTEELGAQSVIVVIECEHLCMGMRGVRKPGAVTTTSAVRGGFKNNSASRAEVMSLIRS

SEQ ID NO: 7039 - protein, 200 aa, unidentified
  source 1..200: note = Corynebacterium choanis
  REGION 1..200: note = tr|A0A3G6J491|A0A3G6J491_9CORY GTP cyclohydrolase 1; OS = Corynebacterium choanis OX=1862358 GN=folE PE=3 SV=1
MTDQQSHEVSGIDLPRAERAIRELLLAVGEDPDREGLRETPRRVAKAYAEIFAGMHVDPAAQLEKTFDEDHQELVLVRDIPIYSTCEHHLVPFFGHAHIGYIPSEEGTVTGLSKLARLADLYAKRPQVQERLTSQIADALVDKLNPQAVIVVVECEHLCMAMRGIRKPGAKTITSAVRGGFKTNAASRAEALSLISRRDR

SEQ ID NO: 7040 - protein, 191 aa, Corynebacterium coyleae
  REGION 1..191: note = tr|A0A1H4JKH4|A0A1H4JKH4_9CORY GTP cyclohydrolase 1; OS = Corynebacterium coyleae OX=53374 GN=folE PE=3 SV=1
MTTPKFDHERAEAAVRELLIAVGEDPDREGLVETPARVARAYAEVFAGLHEDPKVHLEKSFSENHRELVLVRDIPIYSTCEHHLVPFYGVAHIGYIPGQDGKVTGLSKLARVADMYAKRPQVQERLTAQIADAIVEKLDASAVIVVIECEHLCMAMRGIRKPGATTTTSAVRGGFQKNAASRAEVMSLIRG

SEQ ID NO: 7041 - protein, 196 aa, unidentified
  source 1..196: note = Corynebacterium crenatum
  REGION 1..196: note = tr|R0JQ08|R0JQ08_CORCT GTP cyclohydrolase 1; OS = Corynebacterium crenatum MT OX=1310164 GN=folE PE=3 SV=1
MDNHAAVREFDEERATAAIRELLIAVGEDPDREGLLETPARVARAYKETFAGLHEDPTTVLEKTFSEGHEELVLVREIPIYSMCEHHLVPFFGVAHIGYIPGKSGKVTGLSKLARLADMFAKRPQVQERLTSQIADALVEKLDAQAVAVVIEAEHLCMAMRGIRKPGAVTTTSAVRGGFKNNAASRAEVFSLIRGH

SEQ ID NO: 7042 - protein, 201 aa, unidentified
  source 1..201: note = Corynebacterium crudilactis
  REGION 1..201: note = tr|A0A172QVZ1|A0A172QVZ1_9CORY GTP cyclohydrolase 1; OS = Corynebacterium crudilactis OX=1652495 GN=folE PE=3 SV=1
MKETTVDNHAAVREFDEERATAAIRELLIAVGEDPDREGLLETPARVARAYKETFAGLHEDPTTVLEKTFSEGHEELVLVREIPIYSMCEHHLVPFYGVAHIGYIPGKSGKVTGLSKLARLADMYAKRPQVQERLTSQIADALVDKLDAQAVAVVIEAEHLCMAMRGIRKPGAVTTTSAVRGGFKTNAASRAEVFSLIRGR

SEQ ID NO: 7043 - protein, 1048 aa, Corynebacterium cystitidis
  REGION 1..1048: note = tr|A0A1H9V6X9|A0A1H9V6X9_9CORY Multifunctional fusion protein OS=Corynebacterium cystitidis DSM 20524; OX = 1121357 GN=folE PE=3 SV=1
MKNSKVVRYGIIAAVVLMILYLFTLLGDETRSFQRVETSVAMEQLKNQNVKEVQIDDREQRLRITLNEPITVEEREGVEEIMAQYPARTTPQVFDAVANSGAEKYTTNVTQESFLMSMLGFMLPMILIFGLLFFFMYRMQSGGIFGIGGSKAKEMTKDNPDTTFEDVAGADDAVDELQEVVDFLKDPTIYERLGAKIPRGVLLYGPPGTGKTLLARAVAGEAGVPFYTISGSDFVEMFVGVGASRVRDLFKQARENSPCIIFIDEIDAVGRQRGSGMGGGHDEREQTLNQLLVEMDGFGDREGVILMAATNRPDILDPALLRPGRFDRQIPVTNPDLAGRAQILKVHAQGKPLADDANLDSLAKRTAGMSGADLANVLNEAALLTARIGGNVITADALEEATDRVIGGPRRSSRVISEREKKITAYHEGGHTLSAWALKDIERVYKVTILARGRTGGHAMTAAEDDKGMYNRDELYARLVFAMGGRAAEELVFGEVTTGASADIEQATKIARAMVTEYGMSSTLGTVKYGEEQGDPFSGHGAGGALDYSPHVAETIDREVHALIDAAHERAYAILRDHRDYLDTLATKLLEKETLRRPDLEVIFDDIDPQPSGLELLDERFPQQPGYEPVKTPVELAEERGEEPPKQFSLLEASRAARAKREKERAERAKRDSTAPKWAGTGSTSINAGSWPGQPGQPGQPGQPGTAGPQVPPRYGGEQPPANWHVPGGAWPGQDGTNQPVQPVQPAQPDQPNSPQRPAEHPGIKNYGAGQPKQSSTLEPEEQIGFRLPEHERPDHAWPSEEKPHRCQRLTRPMSPARTSLSHSFPMGTTLIPPVMAIQESIGRTDRMDRVDNSTNIPAIAEFDHARAEAAVRELLIAIGEDPEREGLQDTPGRVARAYAEIFAGLHEDPTEVLGTTFAEDHQELVLVRDIPIYSTCEHHLVPFYGKAHIGYIPNKEGKVTGLSKLARLADLYAKRPQVQERLTSQIADALVDKLDAQSVIVVIECEHMCMGMRGIRKPGAITTTSAVRGGFKRNAASRAEVLSLIRR

SEQ ID NO: 7044 - protein, 196 aa, Corynebacterium deserti
  REGION 1..196: note = tr|A0A0M3QA32|A0A0M3QA32_9CORY GTP cyclohydrolase 1; OS = Corynebacterium deserti GIMN1.010 OX=931089 GN=folE; PE = 3 SV=1
MDNHVAIREFDEERAVAAVRELLIAVGEDPDREGLLETPARVARAYKEIFAGLHEDPTMVLEKTFSEGHEELVLVREIPIYSTCEHHLVPFFGVAHIGYIPGKSGKVTGLSKLARLADMYAKRPQVQERLTSQIADALVEKLDAQAVAVVIEAEHLCMGMRGIRKPGAVTTTSAVRGGFKNNAASRAEVFSLIRGR

SEQ ID NO: 7045 - protein, 190 aa, Corynebacterium diphtheriae
  REGION 1..190: note = tr|A0A3M8PV27|A0A3M8PV27_CORDP GTP cyclohydrolase 1; OS = Corynebacterium diphtheriae OX=1717 GN=folE PE=3 SV=1
MTAQFDQQRAEAAVRELLIAVGEDPDREGLQETPARVAKAYAEMFAGLHTDPTEVLAKTFSEDHREVVLVRDIPIYSTCEHHLVPFFGKAHIGYIPGESGKVTGLSKLARLVDLYAKRPQVQERLTTQVADALVNKLQAQAVIVVIECEHLCMAMRGIRKPGAVTTTSAVRGGFKTNAASRAEVLSLIRS

SEQ ID NO: 7046 - protein, 190 aa, Corynebacterium diphtheriae
  REGION 1..190: note = tr|A0A0F5D962|A0A0F5D962_CORDP GTP cyclohydrolase 1; OS = Corynebacterium diphtheriae OX=1717 GN=folE PE=3 SV=1
MTAQFDQQRAEAAVRELLIAVGEDPDREGLQETPARVAKAYAEMFAGLHTDPTEVLAKTFSEDHREVVLVRDIPIYSTCEHHLVPFFGKAHIGYIPGESGKVTGLSKLARLVDLYAKRPQVQERLTTQVADALVDKLQAQAVIVVIECEHLCMAMRGIRKPGAVTTTSAVRGGFKTNAASRAEVLSLIRS

SEQ ID NO: 7047 - protein, 196 aa, Corynebacterium doosanense
  REGION 1..196: note = tr|A0A097II97|A0A097II97_9CORY GTP cyclohydrolase 1; OS = Corynebacterium doosanense CAU 212 = DSM 45436; OX = 558173 GN=folE PE=3 SV=1
MISEVEFPENFDAPRAEAAIRELLIAVGEDPDREGLQDTPARVARAYAENFAGLHKDPTEVLERTFSEHHQELVLIKDIPIYSMCEHHLLPFYGHAHIGYIPNREGRVTGLSKLARLADLYAKRPQVQERLTSQIADAIQEKLQAQSVIVVIECEHLCMGMRGIRKPGAMTTTSAVRGGFKRSAASRAEVLSLIRD

SEQ ID NO: 7048 - protein, 192 aa, Corynebacterium durum
  REGION 1..192: note = tr|L1M9C4|L1M9C4_9CORY GTP cyclohydrolase 1; OS = Corynebacterium durum F0235 OX=1035195 GN=folE PE=3 SV=1
MPSGVFDRERAEAAVRELLIAVGEDPDREGLLETPARVARAYAEMFAGLHTEPTDVLNKTFSEDHQELVLVRDIPIYSTCEHHLVPFFGVAHIGYIPGESGQVTGLSKLARLVDLFAKRPQVQERLTSQVADALVDKLGAQAVIVVIECEHLCMAMRGIRKPGAMTTTSAVRGGFKRNASSRAEALALIRGH

SEQ ID NO: 7049 - protein, 197 aa, Corynebacterium efficiens
  REGION 1..197: note = sp|Q8FMG3|GCH1_COREF GTP cyclohydrolase 1; OS = Corynebacterium efficiens (strain DSM 44549 / YS-314 / AJ 12310 / JCM 11189 / NBRC 100395) OX=196164 GN=folE PE=3; SV = 1
MADKLGAVREFDQERAEAAVRELLIAVGENPEREGLLETPARVARAYREIFAGLHEDPTAVLNKTFSEDHQELVLVREIPIYSTCEHHLVPFFGVAHIGYIPGESGQVTGLSKLARLADMYAKRPQVQERLTSQIADALVDKLGAQSVAVVIEAEHLCMGMRGIRKPGAVTTTSAVRGGFKTSMASRAEVFALIRGN

SEQ ID NO: 7050 - protein, 197 aa, unidentified
  source 1..197: note = Corynebacterium endometrii
  REGION 1..197: note = tr|A0A4P7QJL5|A0A4P7QJL5_9CORY GTP cyclohydrolase 1; OS = Corynebacterium endometrii OX=2488819 GN=folE PE=3 SV=1
MTKKQTHTPGTFDQARAEAAVRELLIAVGEDPDREGLVETPARVARAYAECFAGLYTDPTEVLAKTFAEDHQELVLVRDIPIYSTCEHHLVPFYGKAHIGYIPGKEGHVTGLSKLARLADMYAKRPQVQERLTTQIADALVEKLHAQSVIVVLECEHLCMAMRGIRKPGAMTTTSAVRGGFKKNPASRAEVLSLIRG

SEQ ID NO: 7051 - protein, 195 aa, unidentified
  source 1..195: note = Corynebacterium epidermidicanis
  REGION 1..195: note = tr|A0A0G3GTX0|A0A0G3GTX0_9CORY GTP cyclohydrolase 1; OS = Corynebacterium epidermidicanis OX=1050174 GN=folE PE=3; SV = 1
MTDPLPANIDHARAEAAVRELLIAVGEDPDREGLRETPARVARAYAEVFAGLHVDPTEVLNKTFSEDHRELVLVRDIPIYSTCEHHLVPFFGKAHIGYIPGKDGKVTGLSKLARLVDMYAKRPQVQERLTSQVADALLHKLDAHAVIVVIECEHLCMAMRGIRKPGAVTTTSAVRGGFQTNAASRAEVLSLIRGA

SEQ ID NO: 7052 - protein, 192 aa, Corynebacterium falsenii
  REGION 1..192: note = tr|A0A418Q4Z6|A0A418Q4Z6_9CORY GTP cyclohydrolase 1; OS = Corynebacterium falsenii OX=108486 GN=folE PE=3 SV=1
MSYPEFDQPRAEAAIRELLFAIGEDPDREGLVETPARVARAYKEACAGLHTDPTAVLEKTFNEDHQELVLVRDITFYSMCEHHLVPFFGKAHVGYIPGEEGKVTGLSKLARLVDGLAKRPQVQERLTSQIANALVERLDPTAVVAVLEAEHLCMAMRGIRKPGATTVTSAVRGLFQTSATSRAEAMALIRGH

SEQ ID NO: 7053 - protein, 197 aa, Corynebacterium flavescens
  REGION 1..197: note = tr|A0A1L7CQ11|A0A1L7CQ11_CORFL GTP cyclohydrolase 1; OS = Corynebacterium flavescens OX=28028 GN=folE PE=3 SV=1
MTSSEIPAIAAFDQDRAEAAVRELLLAVGEDPDREGLRETPARVARSYREVFAGLHEDPTEVLHKTFSEEHQELVLVRDIPIYSTCEHHLVPFFGVAHIGYIPGKDGRVTGLSKLARLADVYAKRPQVQERLTRQVADALVSVLGAQSVIVVIECEHLCMAMRGIRKPGATTTTSAVRGGFKTNAASRAEVLSLIRS

SEQ ID NO: 7054 - protein, 969 aa, Corynebacterium flavescens
  REGION 1..969: note = tr|A0A4Y3US87|A0A4Y3US87_CORFL Multifunctional fusion protein OS=Corynebacterium flavescens OX=28028; GN = ftsH PE=3 SV=1
MKITRNKNILRYGAIAALVLIAIYSFTFFTNDSRSYMPVDTSVAVQQLQDKNVAEAQIDDREQQVRLKLKNPVKVEEREGVEEVIAKYPARAGEQIFNAVKDSGADKYQTKVTQESFFGSMISFLLPMLILFAFLFWFMSRMQQNGGGMFGIGGSKAKELTKDMPTNTFADVAGADEAVDELREIKDFLDNPDRYYALGAKIPRGVLLYGPPGTGKTLLARAVAGEAGVPFYSISGSDFVEMFVGVGASRVRDLFKQAKENSPCIIFVDEIDAVGRQRGSGTGGGHDEREQTLNQLLVEMDGFGDREGVILIAATNRPDILDPALLRPGRFDRQIPVTNPDLAGREQILRVHAKDKPLAKEVDVAQLAKRTAGMSGADLANVLNEAALLTARIGGNVITYDALEEATDRVVGGPRRQGKIISEHEKKVTAYHEGGHTLAAWALKDIERVYKVTILARGRTGGHAMTAQEDDKGMYTRDELFARLVFAMGGRAAEELVFGAPTTGASSDIENATKIARSMLTEYGFSPDLGTVKYGKEQGDPFGYGMGGGSIEYSDAVAARIDDQLRYLLDRAHQQAYDILAQHRDYLDKLADLLLEKETVRRPDLERIFTGIEPRPAFDVFPNEDDRFPRQAGREPVKTPVELAQARGEEIPKRMTLLDASRAARERRQAGEEAKGQIGFNFGQHAGDVVDESVESTESSAGKRAQKAQRTLRAQRVPRTPRAQGIPRLSRNHPRSWPGGGTPSRAITGLCPAWKSRARTLMPPAPTRKKEKMTSSEIPAIAAFDQDRAEAAVRELLLAVGEDPDREGLRETPARVARSYREVFAGLHEDPTEVLHKTFSEEHQELVLVRDIPIYSTCEHHLVPFFGVAHIGYIPGKDGRVTGLSKLARLADVYAKRPQVQERLTRQVADALVSVLGAQSVIVVIECEHLCMAMRGIRKPGATTTTSAVRGGFKTNAASRAEVLSLIRS

SEQ ID NO: 7055 - protein, 196 aa, unidentified
  source 1..196: note = Corynebacterium frankenforstense
  REGION 1..196: note = tr|A0A1L7CUL6|A0A1L7CUL6_9CORY GTP cyclohydrolase 1; OS = Corynebacterium frankenforstense DSM 45800 OX=1437875; GN = folE PE=3 SV=1
MEGTAESGRHFDQERAEAAVRELLIAVGEDPDREGLRETPARVARAYKETLAGLFCDPADVLEKVFNEGHQELVLVRDIPVYSTCEHHLLPFLGKAHVGYIPSVDGKVTGLSKLARLVDMYAKRPQVQERLTSQVADALVERLHAQSVIVVIECEHLCMAMRGIRKPGAVTTTSAVRGGFQRNSASRAEALSLIRG

SEQ ID NO: 7056 - protein, 198 aa, Corynebacterium freneyi
  REGION 1..198: note = tr|A0A095XXP3|A0A095XXP3_9CORY GTP cyclohydrolase 1; OS = Corynebacterium freneyi DNF00450 OX=1287475 GN=folE; PE = 3 SV=1
MAAGHATDSGTFDQPRAEAAVRELLLAVGEDPDREGLRETPARVARAYREVFAGLHVEPSEVLEKTFDEGHQELVLVKDIPIYSTCEHHLVPFFGKAHIGYIPGPKGRVTGLSKLARLVDLYAKRPQVQERLTGQVADALVEKLRPTSAIVVIECEHLCMAMRGIRKPGATTITSAVRGGFKSDARSRAEAMSLITGR

SEQ ID NO: 7057 - protein, 230 aa, unidentified
  source 1..230: note = Corynebacterium genitalium
  REGION 1..230: note = tr|D7W9Y8|D7W9Y8_9CORY GTP cyclohydrolase 1; OS = Corynebacterium genitalium ATCC 33030 OX=585529 GN=folE; PE = 3 SV=1
MTVTKPEDNVDNIDDIVNPGLLAGDEEVEPIVEPGTGDGSGRPAFDRERAEAAVRELLLAVGEDPDREGLVDTPARVARAYEEVFAGLHVDPTEVLDKTFAENHEELVLVRDVPIYSTCEHHLVPFYGVAHIGYIPGSDGHVTGLSKLARLADMYAKRPQVQERLTSQIADALVDKLQAQSVIVVIECEHLCMAMRGIRKPGATTTTSAVRGGFKRNAASRAEVLSLIRG

SEQ ID NO: 7058 - protein, 191 aa, unidentified; identical to SEQ ID NO: 7022
  source 1..191: note = Corynebacterium genitalium
  REGION 1..191: note = tr|A0A433G9I4|A0A433G9I4_9CORY GTP cyclohydrolase 1; OS = Corynebacterium genitalium OX=38288 GN=folE PE=3 SV=1

SEQ ID NO: 7059 - protein, 188 aa, unidentified
  source 1..188: note = Corynebacterium geronticis
  REGION 1..188: note = tr|A0A3G6J3G2|A0A3G6J3G2_9CORY GTP cyclohydrolase 1; OS = Corynebacterium geronticis OX=2079234 GN=folE PE=3 SV=1
MAIDQARAEAAVRELLIAVGEDPDREGLLETPARVARAYAEMFAGLHEDPTEVLSKTFSEDHRELVLVRDIPIYSTCEHHLVPFFGVAHIGYIPGESGKVTGLSKLARLVDMFAKRPQVQERLTSQVADALVDKLQAHSVIVVIECEHLCMAMRGIRKPGATTTTSAVRGGFQRNAASRAEALSLIRG

SEQ ID NO: 7060 - protein, 390 aa, unidentified
  source 1..390: note = Corynebacterium geronticis
  REGION 1..390: note = tr|A0A3G6J1E4|A0A3G6J1E4_9CORY GTP cyclohydrolase 1 type 2 OS=Corynebacterium geronticis OX=2079234; GN = CGERO_07725 PE=4 SV=1
MSTLESSTHDHRAPATVADVVEVLEAAYPPHLAESWDAVGLVCGDPEAAVNTVCFALDCTLEVAQEAVNQGADMLVVHHPLLLRGVNSVAANTPKGKVIHTLIRAGVALFAAHTNADSARPGVNDKLAELCGITPGRPIAPKQQGLDKWGVQVPPQHAETLKEAIFGAGAGHIGEYSECAFNISGEGEFLPGSHANPTIGEAGKREVLQELRIECVAPRHRRGAILEALRSAHPYEEPAFDITALEASQPLDEACGLGRIGELDTPMRFEDYVQFIADQLPETTWGVRAAGDPERMVHTIAVSSGAGDSFLETAANLGVDVFLTSDLRHHPVDETLRAHDICVIDTAHWASEFPWTEQASRIVQQSLRHIDTKVLHIRTDPWTLSKHPQR

SEQ ID NO: 7061 - protein, 213 aa, Corynebacterium glaucum
  REGION 1..213: note = tr|A0A1Q2HZ17|A0A1Q2HZ17_9CORY GTP cyclohydrolase 1; OS = Corynebacterium glaucum OX=187491 GN=folE PE=3 SV=1
MSDNANILDPEQVSPGASDHLVAAKGTFDRERAEAAVRELLIAVGENPDREGLIETPARVARAYEECFAGLHTEPTEVLEKTFAENHRELVLVRDIPIYSTCEHHLVPFYGKAHIGYIPGKEGKVTGLSKLARLADLYAKRPQVQERLTAQIADALVSKLGASAVIVVIECEHLCMAMRGIRKPGAVTTTSAVRGGFQNNPASRAEVMSLIRS

SEQ ID NO: 7062 - protein, 189 aa, Corynebacterium glucuronolyticum
  REGION 1..189: note = tr|C2GEG7|C2GEG7_9CORY GTP cyclohydrolase 1; OS = Corynebacterium glucuronolyticum ATCC 51866 OX=548478; GN = folE PE=3 SV=1
MADFDFERAQAAVRELLIAIGEDPDRPGLKETPRRVAKAFEENTGGLHINPADHLEKTFPENHTELVIVRDIPIYSMCEHHLLPFYGVAHIGYIPGGHGSVTGLSKLARLADGYARRPQVQERLTSQIADALVDRLDTQAVAVVLECEHMCMTMRGIRKPGSKTTTSAMRGGFKTSAASRAEFLTLIRG

SEQ ID NO: 7063 - protein, 189 aa, Corynebacterium glucuronolyticum; identical to SEQ ID NO: 7062
  REGION 1..189: note = tr|A0A1W1UNH7|A0A1W1UNH7_9CORY GTP cyclohydrolase 1; OS = Corynebacterium glucuronolyticum OX=39791 GN=folE PE=3; SV = 1

SEQ ID NO: 7064 - protein, 196 aa, Corynebacterium glutamicum
  REGION 1..196: note = sp|A4QH94|GCH1_CORGB GTP cyclohydrolase 1; OS = Corynebacterium glutamicum (strain R) OX=340322 GN=folE; PE = 3 SV=1
MDNHAAVREFDEERATAAIRELLIAVGEDPDREGLLETPARVARAYKETFAGLHEDPTTVLEKTFSEGHEELVLVREIPIYSMCEHHLVPFFGVAHIGYIPGKSGKVTGLSKLARLADMLAKRPQVQERLTSQIADALVEKLDAQAVAVVIEAEHLCMAMRGIRKPGAVTTTSAVRGGFKNNAASRAEVFSLIRGH

SEQ ID NO: 7065 - protein, 201 aa, Corynebacterium glutamicum; identical to SEQ ID NO: 5766
  REGION 1..201: note = tr|A0A1B4WP45|A0A1B4WP45_CORGT GTP cyclohydrolase 1; OS = Corynebacterium glutamicum OX=1718 GN=folE PE=3 SV=1

SEQ ID NO: 7066 - protein, 204 aa, unidentified
  source 1..204: note = Corynebacterium glyciniphilum
  REGION 1..204: note = tr|X5EEY4|X5EEY4_9CORY GTP cyclohydrolase 1; OS = Corynebacterium glyciniphilum AJ 3170 OX=1404245; GN = folE PE=3 SV=1
MTDSVTDSDNSRDGGRVFDQARAEAAVRELLLAVGEDPDREGLQETPARVARAYRESFGGLYEDPAEVLAKTFNEDHRELVLVKDIPIYSTCEHHLVPFYGHAHIGYIPGESGTVTGLSKLARLADGYAKRPQVQERLTSQIADAVSERLQAHAVIVVIEAEHLCMAMRGIRKPGASTVTSAVRGGFREDARSRAEALSLIRGH

SEQ ID NO: 7067 - protein, 190 aa, unidentified
  source 1..190: note = Corynebacterium godavarianum
  REGION 1..190: note = tr|A0A556Q8W5|A0A556Q8W5_9CORY GTP cyclohydrolase 1; OS = Corynebacterium godavarianum OX=2054421 GN=folE PE=3; SV = 1
MTNKFDQQRAEAAVRELLIAVGEDPDREGLKETPARVARAYEEVFAGLHTDPTEVLEKTFAENHQELVLVRDIPIYSTCEHHLVPFYGKAHVGYIPGKDGKVTGLSKLARLTDMYAKRPQVQERLTGQVADAIVDKLGASAVIVVVECEHLCMAMRGIRKPGAVTTTSAVRGGFQSNAASRAEVMSLIRS

SEQ ID NO: 7068 - protein, 190 aa, unidentified; identical to SEQ ID NO: 7067
  source 1..190: note = Corynebacterium gottingense
  REGION 1..190: note = tr|A0A3M0UBZ8|A0A3M0UBZ8_9CORY GTP cyclohydrolase 1; OS = Corynebacterium gottingense OX=2041036 GN=folE PE=3 SV=1

SEQ ID NO: 7069 - protein, 190 aa, unidentified; identical to SEQ ID NO: 7067
  source 1..190: note = Corynebacterium hadale
  REGION 1..190: note = tr|A0A269PF69|A0A269PF69_9CORY GTP cyclohydrolase 1; OS = Corynebacterium hadale OX=2026255 GN=folE PE=3 SV=1

SEQ ID NO: 7070 - protein, 190 aa, Corynebacterium halotolerans
  REGION 1..190: note = tr|M1N0G0|M1N0G0_9CORY GTP cyclohydrolase 1; OS = Corynebacterium halotolerans YIM 70093 = DSM 44683; OX = 1121362 GN=folE PE=3 SV=1
MSGNFDQARAEAAVRELLLAVGEDPDREGLKETPARVARACQEVFAGLHEEPAEVLAKTFAEDHQELVLVRDIPIYSLCEHHLLPFYGMAHIGYIPDENGRVTGLSKLARLVDLYAKRPQVQERLTSQVADALMEHLGAQSVIVVIECEHLCMGMRGIRKPGATTTTSAVRGGFRTSAASRAEVLSLIKG

SEQ ID NO: 7071 - protein, 197 aa, unidentified
  source 1..197: note = Corynebacterium heidelbergense
  REGION 1..197: note = tr|A0A364V5B9|A0A364V5B9_9CORY GTP cyclohydrolase 1; OS = Corynebacterium heidelbergense OX=2055947 GN=folE PE=3; SV = 1
MTSDRPATGKFDHARVEAAVRELLFAVGEDPDREGLRETPARVARAYEEVFSGLFEDPREVLAKTFNEEHRELVLVRDIPFYSTCEHHLVPFYGKAHIGYIPGKEGKVTGLSKLARLIEGYSRRPQVQERLTSQVANALESALGAQAVVVVIEAEHLCMAMRGVRKPGASTVTSAVRGLFQTNPSSRAEAMSLIRGS

SEQ ID NO: 7072 - protein, 197 aa, unidentified
  source 1..197: note = Corynebacterium heidelbergense
  REGION 1..197: note = tr|A0A364VE65|A0A364VE65_9CORY GTP cyclohydrolase 1; OS = Corynebacterium heidelbergense OX=2055947 GN=folE PE=3; SV = 1
MTSDRPATGKFDHARVEAAVRELLFAVGEDPDREGLRETPARVARAYEEVFSGLFEDPREVLAKTFNEEHRELVLVRDIPFYSTCEHHLVPFYGKAHIGYIPGKEGKVTGLSKLARLIEGYSRRPQVQERLTSQVANALESALGAQAVVVVIEAEHLCMAMRGVRKPGANTVTSAVRGLFQTNPSSRAEAMSLIRGS

SEQ ID NO: 7073 - protein, 193 aa, Corynebacterium humireducens
  REGION 1..193: note = tr|A0A0B5D507|A0A0B5D507_9CORY GTP cyclohydrolase 1; OS = Corynebacterium humireducens NBRC 106098 = DSM 45392; OX = 1223515 GN=folE PE=3 SV=1
MTDTHNAFDRERAEAAVRELLIAVGEDPDREGLRDTPARVARAYEEVFAGLHCDPTDVLERTFAEDHQELVLVRDIPIYSTCEHHLVPFYGKAHIGYIPGRNGHVTGLSKLARLADMYAKRPQVQERLTSQIADALVDKLGAQAVIVVIECEHLCMAMRGIRKPGSTTTTSAVRGGFKTSAASRAEVLSLIRG

SEQ ID NO: 7074 - protein, 190 aa, Corynebacterium imitans
  REGION 1..190: note = tr|A0A076NTI9|A0A076NTI9_9CORY GTP cyclohydrolase 1; OS = Corynebacterium imitans OX=156978 GN=folE PE=3 SV=1
MTNNFDHARAEAAVRELLIAVGEDPDREGLKETPARVARAYEEVFAGLHTDPTEVLEKTFAENHQELVLVHDIPIYSTCEHHLVPFYGKAHVGYIPGKDGKVTGLSKLARLADLYAKRPQVQERLTGQVADAIVEKLGASAVIVVVECEHLCMAMRGIRKPGAITTTSAVRGGFQKNAASRAEVLSLIRR

SEQ ID NO: 7075 - protein, 198 aa, Corynebacterium jeikeium
  REGION 1..198: note = tr|A0A381KH45|A0A381KH45_CORJE GTP cyclohydrolase 1; OS = Corynebacterium jeikeium OX=38289 GN=folE PE=3 SV=1
MNNPQQPLDPGSFDQERAEAAIRELLFAIGEDPDREGLQETPARVARAYRETCAGLYEDPTEVLNKTFSEDHRELVLVRDITFYSMCEHHLVPFFGKAHIGYIPGESGKVTGLSKLARLIDGLAKRPQVQERLTSQVADALVEKLDPSAVIVVLEAEHLCMAMRGIRKPGANTVTSAVRGGFQKNAASRAEAMALIRP

SEQ ID NO: 7076 - protein, 198 aa, Corynebacterium jeikeium
  REGION 1..198: note = tr|A0A2X4TB72|A0A2X4TB72_CORJE GTP cyclohydrolase 1; OS = Corynebacterium jeikeium OX=38289 GN=folE PE=3 SV=1
MNNPQQPLDPGSFDQERAEAAIRELLFAIGEDPDREGLQETPARVARAYRETCAGLYEDPTEVLNKTFSEDHRELVLVRDITFYSMCEHHLVPFFGKAHIGYIPGESGKVTGLSKLARLIDGLAKRPQVQERLTSQVADALVDKLDPSAVIVVLEAEHLCMAMRGIRKPGANTVTSAVRGGFQKNAASRAEAMALIRP

SEQ ID NO: 7077 - protein, 197 aa, unidentified
  source 1..197: note = Corynebacterium kefirresidentii
  REGION 1..197: note = tr|A0A243VIL1|A0A243VIL1_9CORY GTP cyclohydrolase 1; OS = Corynebacterium kefirresidentii OX=1979527 GN=folE PE=3; SV = 1
MPDNHIPARAPFDQDRAEAAVRELLLAVGEDPDREGLRETPARVARAYREVFAGLHEDPTEVLHKTFAEDHQELVLVRDIPIYSTCEHHLVPFYGVAHIGYIPGKDGHVTGLSKLARLADMYAKRPQVQERLTQQVADALVEVLGAQSVIVVIECEHLCMAMRGIRKPGATTTTSAVRGGFKNNAASRAEVLSLIRS

SEQ ID NO: 7078 - protein, 188 aa, Corynebacterium kroppenstedtii
  REGION 1..188: note = tr|C4LKM0|C4LKM0_CORK4 GTP cyclohydrolase 1; OS = Corynebacterium kroppenstedtii (strain DSM 44385 / JCM 11950 / CIP 105744 / CCUG 35717) OX=645127 GN=folE PE=3; SV = 1
MAVDHERARAAVRDLLIAVGEDPDREGLVDTPERVARAYEEIFAGLHQDPSEVLTKTFNEDHRELVLVRDIPVYSTCEHHLVPFYGKAHIGYIPGKSGKVTGLSKLARLVDLYAKRPQVQERLTKQVADAMVNRLQPQAVIVVIECEHLCMAMRGIRKPGATTTTSAVRGGFQTNPASRAEVLSLIRG

SEQ ID NO: 7079 - protein, 188 aa, Corynebacterium kroppenstedtii
  REGION 1..188: note = tr|A0A133Z5S4|A0A133Z5S4_9CORY GTP cyclohydrolase 1; OS = Corynebacterium kroppenstedtii OX=161879 GN=folE PE=3; SV = 1
MAVDHERARAAVRDLLIAVGEDPDREGLVDTPERVARAYEEIFAGLHQDPSEVLTKTFNEDHRELVLVRDIPVYSTCEHHLVPFYGKAHIGYIPGKSGKVTGLSKLARLVDLYAKRPQVQERLTKQVADAMVKRLQPQAVIVVIECEHLCMAMRGIRKPGATTTTSAVRGGFQTNPASRAEVLSLIRG

SEQ ID NO: 7080 - protein, 191 aa, Corynebacterium kutscheri
  REGION 1..191: note = tr|A0A0F6R0Z7|A0A0F6R0Z7_9CORY GTP cyclohydrolase 1; OS = Corynebacterium kutscheri OX=35755 GN=folE PE=3 SV=1
MPKAFDYQRAEAAIRELLFAVGEDPDREGLAETPARVARAYAEIFAGLHSDPTEVLEKTFAEDHRELVLVKDIPIYSTCEHHLVPFFGVAHIGYIPGESGQVTGLSKLARLVDLYAKRPQVQERLTSQVADALVAKLGAQSVIVVIECEHLCMAMRGIRKPGASTTTSAVRGGFRSNAASRAEALSLIRGS

SEQ ID NO: 7081 - protein, 191 aa, unidentified
  source 1..191: note = Corynebacterium lactis
  REGION 1..191: note = tr|A0A0K2H2B5|A0A0K2H2B5_9CORY GTP cyclohydrolase 1; OS = Corynebacterium lactis RW2-5 OX=1408189 GN=folE PE=3; SV = 1
MEENFDQARAEAAVRELLLAVGEDPDREGLLETPARVARAYREIFAGLYTDPSEVLAKTFSEDHQELVLVKDIPIYSTCEHHLVPFFGVAHIGYIPGKDGKVTGLSKLARLVDLYAKRPQVQERLTSQVADAIVEKLDPASAIVVIECEHLCMAMRGIRKPGATTVTSAVRGGFKSDARSRAEAMALIRKN

SEQ ID NO: 7082 - protein, 191 aa, Corynebacterium lipophiloflavum
  REGION 1..191: note = tr|C0XP51|C0XP51_CORLD GTP cyclohydrolase 1; OS = Corynebacterium lipophiloflavum (strain DSM 44291 / CCUG 37336) OX=525263 GN=folE PE=3 SV=1
MSARAFDRDRAEAAVRELLIAVGEDPDREGLAETPARVARAYEEVFAGLHSEPTDVLEKTFAENHQELVLVRDIPIYSTCEHHLVPFFGTAHIGYIPGPDGKVTGLSKLARLADLYAKRPQVQERLTAQIADALVDKLGAQAVIVVIECEHLCMAMRGIRKPGAVTTTSAVRGGFQHNAASRSEVLSLIRR

SEQ ID NO: 7083 - protein, 192 aa, unidentified
  source 1..192: note = Corynebacterium lowii
  REGION 1..192: note = tr|A0A0Q0YHS1|A0A0Q0YHS1_9CORY GTP cyclohydrolase 1; OS = Corynebacterium lowii OX=1544413 GN=folE PE=3 SV=1
MSAEKNFDQARAEAAVRELLLAVGEDPDREGLRETPARVARAYRETFGGLHADPTEVLDKVFHEDHQELVLVRDIPVYSTCEHHLLPFLGKAHIGYIPNKQGMVTGLSKLARLVDLYARRPQVQERLTSQVADALVEKLGAQSVIVVIECEHLCMAMRGIRKPGAVTTTSAVRGGFKASAASRAEVLSLLKG

SEQ ID NO: 7084 - protein, 274 aa, unidentified
  source 1..274: note = Corynebacterium lowii
  REGION 1..274: note = tr|A0A0Q0UFJ1|A0A0Q0UFJ1_9CORY Putative GTP cyclohydrolase 1 type 2 OS=Corynebacterium lowii; OX = 1544413 GN=Clow_01038 PE=4 SV=1
MNTVARVREVIEEAYPPELAESWDQVGLICGDPQAPVTKVAFALDCTLAVAQRAVEIGAQMLAVHHPLLLRGVHSVAADTPKGKVLHTLITGGVALIAAHTNADSARPGVNDRLAQLVGITPGRPIKPTDPTFQPLNEATGLGRVGELPAPMRLGDFVQQVADALPETAWGVRATGDPEQMVRTVAVSSGSGDSFLDAVRDLGVDVYVTSDLRHHPVDEYLRAGGPAVIDTAHWASEFPWTSQAAEIVAKQTGLDTEVIDIRTDPWTISAHPRG

SEQ ID NO: 7085 - protein, 202 aa, Corynebacterium macginleyi
  REGION 1..202: note = tr|A0A3M0H2K6|A0A3M0H2K6_9CORY GTP cyclohydrolase 1; OS = Corynebacterium macginleyi OX=38290 GN=folE PE=3 SV=1
MSENHTDSQQVPARAPYDQERAEAAVRELLLAVGEDPDREGLRETPARVARAYREVFGGLHEDPTEVLHKTFAEDHQELVLVRDIPIYSTCEHHLVPFYGVAHIGYIPGKDGHVTGLSKLARLADMYAKRPQVQERLTQQIADALVNVLEAQSVIVVIECEHLCMAMRGIRKPGATTTTSAVRGGFKNNAASRAEVLSFIRT

SEQ ID NO: 7086 - protein, 190 aa, Corynebacterium marinum
  REGION 1..190: note = tr|A0A0B6TU32|A0A0B6TU32_9CORY GTP cyclohydrolase 1; OS = Corynebacterium marinum DSM 44953 OX=1224162 GN=folE; PE = 3 SV=1
MSNFFDQERAEAAVRELLIAVGEDPDREGLKDTPARVARSYREIFAGLHCDPTEVLHRTFAEDHQELVLVRDIPIYSTCEHHLVPFYGKAHIGYIPGKEGHVTGLSKLARLADMYAKRPQVQERLTSQVADALVETLGAQAVIVVIECEHLCMAMRGIRKPGSTTTTSAVRGGFKTNAASRAEVLSLIRG

SEQ ID NO: 7087 - protein, 197 aa, Corynebacterium maris
  REGION 1..197: note = tr|S5SWV7|S5SWV7_9CORY GTP cyclohydrolase 1; OS = Corynebacterium maris DSM 45190 OX=1224163 GN=folE PE=3; SV = 1
MSDTERSLPEGFDQKRAEAAVRELLIAVGEDPDREGLLETPARVARAYAETFAGLHEEPTAVLNKTFDEGHQELVLVRDIPIYSTCEHHLVPFYGTAHIGYIPNQDGKVTGLSKLARVADLYARRPQVQERLTAQIADALVEKLDAQSVIVVIECEHLCMAMRGIRKPGAMTTTSAVRGGFKNSAASRAEVLSLIRS

SEQ ID NO: 7088 - protein, 192 aa, Corynebacterium mastitidis
  REGION 1..192: note = tr|A0A2N0X6U9|A0A2N0X6U9_9CORY GTP cyclohydrolase 1; OS = Corynebacterium mastitidis OX=161890 GN=folE PE=3 SV=1
MSAERVFDQRRAEAAVRELLLAVGEDPDREGLRETPARVARAYRETFGGLHADPTEVLDKVFHEDHQELVLVRDIPVYSTCEHHLLPFLGKAHVGYIPNKRGVVTGLSKLARLVDLYARRPQVQERLTSQVADALVDKLQAQSVIVVIECEHLCMAMRGIRKPGAVTTTSAVRGGFKASAASRAEALSLLKG

SEQ ID NO: 7089 - protein, 206 aa, Corynebacterium matruchotii
  REGION 1..206: note = tr|E0DDL3|E0DDL3_9CORY GTP cyclohydrolase 1; OS = Corynebacterium matruchotii ATCC 14266 OX=553207; GN = folE PE=3 SV=1
MAQEFERAEPGWEQSSVSQGVDHERAERAVRELLLAIGEDPDREGLRETPARVARAYAEIFAGLHTDPTAVLDRTFSEDHRELVVVKDIPIYSTCEHHLVPFFGRAHIGYIPGESGKVIGLSKLARVVDLFAKRPQVQERLTRQVADALVTKLEPHGVIVVIECEHLCMAMRGIRKPGAATVTSAVRGGFAHSAKSRAEALSLIRE

SEQ ID NO: 7090 - protein, 206 aa, Corynebacterium matruchotii; identical to SEQ ID NO: 7089
  REGION 1..206: note = tr|A0A448TIT2|A0A448TIT2_9CORY GTP cyclohydrolase 1; OS = Corynebacterium matruchotii OX=43768 GN=folE PE=3 SV=1

SEQ ID NO: 7091 - protein, 196 aa, Corynebacterium minutissimum
  REGION 1..196: note = tr|A0A2X4RQC3|A0A2X4RQC3_9CORY GTP cyclohydrolase 1; OS = Corynebacterium minutissimum OX=38301 GN=folE PE=3 SV=1
MSDNIPAQREFDHERAEAAVRELLIAVGEDPDREGLRETPARVARAYAEVFAGLHEDPTEVLHKTFAEEHQELVLVRDIPIYSTCEHHLVPFYGTAHIGYIPGPDGHVTGLSKLARLADMYAKRPQVQERLTSQIADALVEVLHAQSVIVVIECEHLCMAMRGIRKPGATTTTSAVRGGFKKNAASRAEVMSLIRS

SEQ ID NO: 7092 - protein, 196 aa, Corynebacterium minutissimum
  REGION 1..196: note = tr|A0A0M2XNB6|A0A0M2XNB6_9CORY GTP cyclohydrolase 1; OS = Corynebacterium minutissimum OX=38301 GN=folE PE=3 SV=1
MSDNIPAQRDFDHERAEAAIRELLIAVGEDPDREGLRETPARVARAYAEVFAGLHQDPTEVLHKTFAEEHQELVLVRDIPIYSTCEHHLVPFYGTAHIGYIPGSDGHVTGLSKLARLADMYAKRPQVQERLTSQIADALVEVLHAQSVIVVIECEHLCMAMRGIRKPGATTTTSAVRGGFKKNAASRAEVMSLIRS

SEQ ID NO: 7093 - protein, 189 aa, Corynebacterium mustelae
  REGION 1..189: note = tr|A0A0G3H564|A0A0G3H564_9CORY GTP cyclohydrolase 1; OS = Corynebacterium mustelae OX=571915 GN=folE PE=3 SV=1
MGSFDQARAEAAVRELLLAVGEDPDREGLRETPARVARAYAEIFAGLHSDPTEVLNKTFNEDHRELVLVKDIPIYSTCEHHLVPFFGKAHIGYIPGASGKVTGLSKLARLVDLFAKRPQVQERLTSQVADALVDKLEAHSVIVVIECEHLCMAMRGIRKPGASTTTSAVRGGFKRDAASRAEALSLIWG

SEQ ID NO: 7094 - protein, 192 aa, Corynebacterium mycetoides
  REGION 1..192: note = tr|A0A1G9P3W5|A0A1G9P3W5_9CORY GTP cyclohydrolase 1; OS = Corynebacterium mycetoides OX=38302 GN=folE PE=3 SV=1
MTVTAKFDRARAEAAVRELLIAVGEDPDREGLVETPARVARSYEEIFVGLHSEPTDVLEKTFAEDHQELVLVHDIPIYSTCEHHLVPFYGKAHIGYIPGPEGKVTGLSKLARLADLYAKRPQVQERLTGQIADALVSKLGAQAVIVVLECEHLCMAMRGIRKPGAVTTTSAVRGGFQHNAASRAEVLSLIRR

SEQ ID NO: 7095 - protein, 192 aa, Corynebacterium nuruki
  REGION 1..192: note = tr|A0A3D4SYS1|A0A3D4SYS1_9CORY GTP cyclohydrolase 1; OS = Corynebacterium nuruki OX=1032851 GN=folE PE=3 SV=1
MTGRTFDQERAEAAVRELLIAVGEDPDREGLQETPARVARAYHEIFEGLFTDPSEVLEKTFNENHRELVLVKDIPIYSTCEHHLVPFYGHAHIGYIPGASGKVTGLSKLARLVDGFAKRPQVQERLTSQVADAVAAHLEASAVIVVIECEHLCMAMRGIRKPGATTVTSAVRGGFQTDARTRAEAMSLIRGH

SEQ ID NO: 7096 - protein, 192 aa, unidentified
  source 1..192: note = Corynebacterium oculi
  REGION 1..192: note = tr|A0A0Q0UAM0|A0A0Q0UAM0_9CORY GTP cyclohydrolase 1; OS = Corynebacterium oculi OX=1544416 GN=folE PE=3 SV=1
MSADNAFDQARAEAAVRELLLAVGEDPDREGLRDTPARVARAYRETFGGLHTDPAEVLEKVFHEDHQELVLVRDIPVYSTCEHHLLPFLGKAHIGYIPNKQGMVTGLSKLARLVDLYARRPQVQERLTSQVADALVDKLDAQSVIVVIECEHLCMAMRGIRKPGATTTTSAVRGGFQASAASRAEVLSLIKG

SEQ ID NO: 7097 - protein, 288 aa, unidentified
  source 1..288: note = Corynebacterium oculi
  REGION 1..288: note = tr|A0A0Q1AEP8|A0A0Q1AEP8_9CORY Putative GTP cyclohydrolase 1 type 2 OS=Corynebacterium oculi; OX = 1544416 GN=Cocul_00287 PE=4 SV=1
MNHVNNATVRESGSAITVGEVRAALEAAYPPHLAESWDRVGLICGDPQAPVDTVAFALDCTQAVAERAVEMGAQMLVVHHPLLLRGVHSVAADTPKGRVIHTLIAGGVALMAAHTNADSARPGVNDRLAELVGITPGRPIRPTDPHAERLDEATGLGRIGTLPAAMPLKDFVQQVANALPTTAWGVRAAGDPEQMVRTVAVSSGSGDSFLDAVRELDVDVYVTSDLRHHPVDEYLRAGGPAVIDTAHWASEFPWTQQAAQIVADRTGLRTEVIDIRTDPWTLSAHPQG

SEQ ID NO: 7098 - protein, 190 aa, unidentified
  source 1..190: note = Corynebacterium otitidis
  REGION 1..190: note = tr|I7LCC0|I7LCC0_9CORY GTP cyclohydrolase 1; OS = Corynebacterium otitidis ATCC 51513 OX=883169 GN=folE; PE = 3 SV=1
MSASFDQERAEAAVRELLAAVGEDPDREGLRDTPARVARAFKETFAGLHTDPAKVLERTFDEKHEELVLVKDIPVYSTCEHHLLPFYGTAHIGYIPSKEGRVTGLSKLARLVDMYAKRPQVQERLTTQVADAIVERLDAQAVIVVIECEHLCMAMRGIRKPGANTTTSAVRGGFKHSAASRAEVLSLIKS

SEQ ID NO: 7099 - protein, 188 aa, unidentified
  source 1..188: note = Corynebacterium pelargi
  REGION 1..188: note = tr|A0A410W6Q3|A0A410W6Q3_9CORY GTP cyclohydrolase 1; OS = Corynebacterium pelargi OX=1471400 GN=folE PE=3 SV=1
MSIDHARAEAAVRELLLAIGEDPDREGLQETPARVARAYEEMFAGLHVDPTEVLQKTFSEDHRELVLVRDIPIYSTCEHHLVPFYGVAHIGYIPGESGKVTGLSKLARLVDLYAKRPQVQERLTSQVADALVEKLQAHSVIVVIECEHLCMAMRGIRKPGATTTTSAVRGGFQRNAASRAEALSLIKE

SEQ ID NO: 7100 - protein, 194 aa, Corynebacterium phocae
  REGION 1..194: note = tr|A0A1L7D5K7|A0A1L7D5K7_9CORY GTP cyclohydrolase 1; OS = Corynebacterium phocae OX=161895 GN=folE PE=3 SV=1
MSDKATPRFDQERAEAAVRELLLAVGEDPDREGLQETPARVARSYREIFAGLHTDPTEVLAKTFAEDHQELVLVRGIPIYSTCEHHLVPFYGKAHIGYIPGKDGHVTGLSKLARLADMYAKRPQVQERLTSQIADALVEKLHAQSAIVVIEAEHLCMAMRGIRKPGATTTTSAVRGGFKTNPASRAEVMSLIRH

SEQ ID NO: 7101 - protein, 220 aa, unidentified
  source 1..220: note = Corynebacterium phoceense
  REGION 1..220: note = tr|A0A540R5M4|A0A540R5M4_9CORY GTP cyclohydrolase 1; OS = Corynebacterium phoceense OX=1686286 GN=folE PE=3 SV=1
MTNPEATAGSDALTEALTDAAEGGATPDIPAVRAFDQERAEAAVRELLIAVGEDPDREGLQETPARVARAYRETFAGLHEDPTAVLAKTFAEGHQELVLVRDIPIYSTCEHHLLPFYGKAHIGYIPGKDGHVTGLSKLARLADMYAKRPQVQERLTSQIANALMDKLGAQSAIVVIECEHLCMAARGIRKPGSTTTTSAVRGGFKKNAASRAEVMSLIRS

SEQ ID NO: 7102 - protein, 198 aa, Corynebacterium pilosum
  REGION 1..198: note = tr|A0A376CKY9|A0A376CKY9_9CORY GTP cyclohydrolase 1; OS = Corynebacterium pilosum OX=35756 GN=folE PE=3 SV=1
MDKNPNIPAVADFDHARAEAAVRELLIAVGEDPDREGLQDTPARVARAYAETFAGLHKDPTEVLGTTFAENHQELVLVRDIPIYSTCEHHLVPFYGKAHIGYIPNKEGKVTGLSKLARLADMYAKRPQVQERLTSQIADALVAKLEAQSVIVVIECEHMCMGMRGIRKPGAITTTSAVRGGFQRNAASRAEVLSLIRG

SEQ ID NO: 7103 - protein, 190 aa, unidentified
  source 1..190: note = Corynebacterium pollutisoli
  REGION 1..190: note = tr|A0A1X7J336|A0A1X7J336_9CORY GTP cyclohydrolase 1; OS = Corynebacterium pollutisoli OX=1610489 GN=folE PE=3 SV=1
MTNAFDQERAEAAVRELLIAVGEDPDREGLKDTPARVARAYQEVFAGLHSEPTDVLERTFAEDHQELVLVRDIPIYSTCEHHLVPFYGKAHIGYIPGKSGHVTGLSKLARLADMYAKRPQVQERLTSQIADALVDKLGAQAVIVVIECEHLCMAMRGIRKPGSTTTTSAVRGGFKTSAASRAEVLSLIRG

SEQ ID NO: 7104 - protein, 198 aa, Corynebacterium propinquum
  REGION 1..198: note = tr|A0A433FGW2|A0A433FGW2_9CORY GTP cyclohydrolase 1; OS = Corynebacterium propinquum OX=43769 GN=folE PE=3 SV=1
MTNAESTGKVGSFDQQRAEAAVRELLFAVGEDPDREGLRDTPARVARAYKESFAGLHEDPTAVLERTFSEDHQELVLVRDIPIYSTCEHHLVPFFGSVHIGYIPGRNGDVTGLSKLARLADLYAKRPQVQERLTSQIADALMNKLQAQSVIVVIECEHLCMAMRGIRKPGAVTTTSAVRGGFRVNASSRAEVMSLIRS

SEQ ID NO: 7105 - protein, 198 aa, Corynebacterium propinquum
  REGION 1..198: note = tr|A0A2W5L5V1|A0A2W5L5V1_9CORY GTP cyclohydrolase 1; OS = Corynebacterium propinquum OX=43769 GN=folE PE=3 SV=1
MTNAESTGNVGSFDQQRAEAAVRELLFAVGEDPDREGLRDTPARVARAYKESFAGLHEDPTAVLERTFSEDHQELVLVRDIPIYSTCEHHLVPFFGSVHIGYIPGRNGDVTGLSKLARLADLYAKRPQVQERLTSQIADALMNKLQAQSVIVVIECEHLCMAMRGIRKPGAVTTTSAVRGGFRVNASSRAEVMSLIRS

SEQ ID NO: 7106 - protein, 220 aa, unidentified
  source 1..220: note = Corynebacterium provencense
  REGION 1..220: note = tr|A0A2Z3YTI3|A0A2Z3YTI3_9CORY GTP cyclohydrolase 1; OS = Corynebacterium provencense OX=1737425 GN=folE PE=3 SV=1
MSATDSTDTPDNVPDKGDDRGTDPVRSLLTGRPFDRQRAEAAVRELLIAVGEDPDREGLQETPARVARAYREIFDGLYRDPAEVLAKTFNEDHRELVLVKDIPIYSTCEHHLVPFYGHAHIGYIPGSDGTVTGLSKLARLVDGFAKRPQVQERLTSQVADAVSGRLRASAVIVVIECEHLCMAMRGIRKPGATTVTSAVRGGFRSDARTRAEAMSLIRGH

SEQ ID NO: 7107 - protein, 127 aa, Corynebacterium pseudodiphtheriticum
  REGION 1..127: note = tr|A0A3S0UTN9|A0A3S0UTN9_9CORY GTP cyclohydrolase 1 (Fragment) OS=Corynebacterium pseudodiphtheriticum; OX = 37637 GN=folE PE=3 SV=1
NDEMVILKDIELYSLCEHHLLPFIGKAHVAYIPTGKVLGLSKLARIVDMYARRLQIQENLTRQIADAIQQVTQAAGVAVVIEAKHMCMMMRGVEKQNSTMNTSVMLGAFRESNTTRMEFLQLIGRSK

SEQ ID NO: 7108 - protein, 174 aa, Corynebacterium pseudodiphtheriticum
  REGION 1..174: note = tr|U2I671|U2I671_9CORY GTP cyclohydrolase 1; OS = Corynebacterium pseudodiphtheriticum 090104 OX=1381111; GN = folE PE=3 SV=2
MLIAVGEDPDREGLRDTPARVARAYKESFAGLHEDPTSVLERTFSEDHQELVLVRDIPIYSTCEHHLVPFFGTVHIGYIPGRNGDVTGLSKLARLADLYAKRPQVQERLTSQIADALMEKLQAQSVIVVIECEHLCMAMRGIRKPGAVTTTSAVRGGFRVNASSRAEVMSLIRS

SEQ ID NO: 7109 - protein, 197 aa, unidentified
  source 1..197: note = Corynebacterium pseudogenitalium
  REGION 1..197: note = tr|E2S309|E2S309_9CORY GTP cyclohydrolase 1; OS = Corynebacterium pseudogenitalium ATCC 33035 OX=525264; GN = folE PE=3 SV=1
MPDNHIPARAAFDQDRAEAAVRELLLAVGEDPDREGLRETPARVARAYREVFAGLHEDPTEVLHKTFAEDHQELVLVRDIPIYSTCEHHLVPFYGVAHIGYIPGKDGHVTGLSKLARLADMYAKRPQVQERLTQQVADALVEVLGAQSVIVVIECEHLCMAMRGIRKPGATTTTSAVRGGFKNNAASRAEVLSLIRS

SEQ ID NO: 7110 - protein, 188 aa, unidentified
  source 1..188: note = Corynebacterium pseudopelargi
  REGION 1..188: note = tr|A0A3G6IV05|A0A3G6IV05_9CORY GTP cyclohydrolase 1; OS = Corynebacterium pseudopelargi OX=2080757 GN=folE PE=3; SV = 1
MSIDHARAEAAVRELLLAVGEDPDREGLQETPARVARAYAEMFAGLHVDPTEVLSKTFSEDHRELVLVRDIPIYSTCEHHLVPFYGVAHIGYIPGESGKVTGLSKLARLVDLYAKRPQVQERLTSQVADALVEKLQAHSVIVVIECEHLCMAMRGIRKPGATTTTSAVRGGFQRNAASRAEALSLIKG

SEQ ID NO: 7111 - protein, 187 aa, Corynebacterium pseudotuberculosis
  REGION 1..187: note = tr|D9QCG3|D9QCG3_CORP2 GTP cyclohydrolase 1; OS = Corynebacterium pseudotuberculosis (strain C231); OX = 681645 GN=folE PE=3 SV=1
MFDRVRAEAAVRELLIAVGEDPEREGLKETPARVAKAYAEVFAGLHTDPTEVLNKTFSEDHRELVLVRDIPIYSTCEHHLVPFFGIAHIGYIPGESGKVTGLSKLARLVDLYAKRPQVQERLTSQVADALVEKLEAQAVIVVLECEHLCMAMRGIRKPGATTTTSAVRGGFQTNAASRAEVLSLIRS

SEQ ID NO: 7112 - protein, 187 aa, Corynebacterium pseudotuberculosis; identical to SEQ ID NO: 7111
  REGION 1..187: note = tr|A0A515DWZ3|A0A515DWZ3_CORPS GTP cyclohydrolase 1; OS = Corynebacterium pseudotuberculosis OX=1719 GN=folE PE=3; SV = 1

SEQ ID NO: 7113 - protein, 189 aa, Corynebacterium pyruviciproducens
  REGION 1..189: note = tr|S2YYA5|S2YYA5_9CORY GTP cyclohydrolase 1; OS = Corynebacterium pyruviciproducens ATCC BAA-1742; OX = 1125779 GN=folE PE=3 SV=1
MSEFDFDRAEKAVRELLIAIGEDPDRPGLKETPRRVAKAFEENTGGLHIDPADHLEKTFPENHTELVIVRDIPIYSMCEHHLLPFYGLAHIGYIPGGHGSVTGLSKLARLADGYARRPQVQERLTSQIADAIVDRLDTQAVAVVLECEHMCMTMRGIRKPGSKTTTSAMRGGFKTSAASRAEFLTLIRG

SEQ ID NO: 7114 - protein, 189 aa, Corynebacterium pyruviciproducens
  REGION 1..189: note = tr|A0A2I1VSG7|A0A2I1VSG7_9CORY GTP cyclohydrolase 1; OS = Corynebacterium pyruviciproducens OX=598660 GN=folE; PE = 3 SV=1
MPEFDFDRAEKAVRELLIAIGEDPDRPGLKETPRRVAKAFEENTGGLHMDPADNLEKTFPENHTELVIVRDIPIYSMCEHHLLPFYGLAHIGYIPGGHGSVTGLSKLARLADGYARRPQVQERLTSQIADAIVDRLDTQAVAVVLECEHMCMTMRGIRKPGSKTTTSAMRGGFKTSAASRAEFLTLIRG

SEQ ID NO: 7115 - protein, 189 aa, Corynebacterium renale
  REGION 1..189: note = tr|A0A2A9DPZ2|A0A2A9DPZ2_9CORY GTP cyclohydrolase 1; OS = Corynebacterium renale OX=1724 GN=folE PE=3 SV=1
MAEFDQQRAEAAVRELLLAVGEDPDREGLLETPTRVAKAYREVFAGLHEDPKEVLNKTFDEGHQELVLVRDIPIYSTCEHHLVPFFGHAHIGYIPNADGRVTGLSKLARLVDLYAKRPQVQERLTKQVADALVEKLDPQAVIVVIECEHLCMAMRGIRKPGAVTTTSAVRGGFQTNAASRAEALTLIRG

SEQ ID NO: 7116 - protein, 176 aa, Corynebacterium resistens
  REGION 1..176: note = tr|F8E1Z2|F8E1Z2_CORRG GTP cyclohydrolase 1; OS = Corynebacterium resistens (strain DSM 45100 / JCM 12819 / GTC 2026) OX=662755 GN=folE PE=3 SV=1
MLFAVGENPDREGLKDTPARVARAYEEIFAGLYTDPTEVLDKTFNEDHRELVLVRDIPFYSTCEHHLVPFFGHAHIGYIPGTSGKVTGLSKLARLIDGLAKRPQVQERLTSQVADALVERLEASAVIVVIEAEHLCMAMRGIRKPGANTVTSAVRGGFRTNASSRAEAMALIQRGR

SEQ ID NO: 7117 - protein, 189 aa, Corynebacterium riegelii
  REGION 1..189: note = tr|A0A2I1V3H4|A0A2I1V3H4_9CORY GTP cyclohydrolase 1; OS = Corynebacterium riegelii OX=156976 GN=folE PE=3 SV=1
MGTFDRERAEAAVRELLIAVGEDPDREGLVETPARVARAYEEVFAGLHQDPTTQLEKTFSENHRELVLVRDIPIYSTCEHHLVPFYGKAHIGYIPGKDGKVTGLSKLARLADLYAKRPQVQERLTAQIADALVEKLDASAVIVVIECEHLCMAMRGIRKPGAVTTTSAVRGGFQNNAASRAEVMSLIRS

SEQ ID NO: 7118 - protein, 189 aa, Corynebacterium riegelii
  REGION 1..189: note = tr|A0A0K1RE32|A0A0K1RE32_9CORY GTP cyclohydrolase 1; OS = Corynebacterium riegelii OX=156976 GN=folE PE=3 SV=1
MGTFDRKRAEAAVRELLIAVGEDPDREGLVETPARVARAYEEVFAGLHQDPTTQLEKTFSENHRELVLVRDIPIYSTCEHHLVPFYGKAHIGYIPGKDGKVTGLSKLARLADLYAKRPQVQERLTAQIADALVEKLDASAVIVVIECEHLCMAMRGIRKPGAVTTTSAVRGGFQNNAASRAEVMSLIRS

SEQ ID NO: 7119 - protein, 202 aa, unidentified
  source 1..202: note = Corynebacterium segmentosum
  REGION 1..202: note = tr|A0A448N8I4|A0A448N8I4_9CORY GTP cyclohydrolase 1; OS = Corynebacterium segmentosum OX=43990 GN=folE PE=3 SV=1
MSENHTDNQQVPARAPYDHERAEAAVRELLLAVGEDPDREGLRETPARVARAYREVFAGLHEDPTEVLHKTFAEDHQELVLVRDIPIYSTCEHHLVPFYGVAHIGYIPGKDGHVTGLSKLARLADLYAKRPQVQERLTQQIADALVNVLEAQSVIVVIECEHLCMAMRGIRKPGATTTTSAVRGGFKNNAASRAEVLSFIRT

SEQ ID NO: 7120 - protein, 196 aa, Corynebacterium simulans
  REGION 1..196: note = tr|A0A127NVM5|A0A127NVM5_9CORY GTP cyclohydrolase 1; OS = Corynebacterium simulans OX=146827 GN=folE PE=3 SV=1
MSNNIPARGEFDQARAEAAIRELLIAVGEDPDREGLQETPARVARAYKEVFAGLHADPTEVLHKTFAEEHQELVLVRDIPIYSTCEHHLVPFYGVAHIGYIPGPDGQVTGLSKLARLADMYAKRPQVQERLTSQIADALVEVLHAQSVIVVIECEHLCMAMRGIRKPGATTTTSAVRGGFKSNAASRAEVMSLIRS

SEQ ID NO: 7121 - protein, 196 aa, Corynebacterium singulare
  REGION 1..196: note = tr|A0A0B6ETH8|A0A0B6ETH8_9CORY GTP cyclohydrolase 1; OS = Corynebacterium singulare OX=161899 GN=folE PE=3 SV=1
MSDNIPATRDFDHERAEAAVRELLIAVGEDPDREGLRETPGRVARAYAEVFAGLHEDPTEVLHKTFAEEHQELVLVRDIPIYSTCEHHLVPFYGKAHIGYIPGPDGHVTGLSKLARLADMYAKRPQVQERLTSQIADALVEVLHAQSVIVVIECEHLCMAMRGIRKPGATTTTSAVRGGFKKNAASRAEVMSLIRS

SEQ ID NO: 7122 - protein, 191 aa, Corynebacterium sp.; identical to SEQ ID NO: 7025
  REGION 1..191: note = tr|S2XAS8|S2XAS8_9CORY GTP cyclohydrolase 1; OS = Corynebacterium sp. HFH0082 OX=1078764 GN=folE PE=3 SV=1

SEQ ID NO: 7123 - protein, 190 aa, Corynebacterium sp.
  REGION 1..190: note = tr|A0A1S0YM45|A0A1S0YM45_9CORY GTP cyclohydrolase 1; OS = Corynebacterium sp. HMSC074A01 OX=1715030 GN=folE PE=3; SV = 1
MTNKFDQARAEAAVRELLIAVGEDPDREGLKETPARVARAYEEVFAGLHTDPTEVLEKTFAENHQELVLVHDIPIYSTCEHHLVPFYGKAHVGYIPGKDGKVTGLSKLARLADLYAKRPQVQERLTGQVADAIVEKLGASAVIVVVECEHLCMAMRGIRKPGAITTTSAVRGGFQKNAASRAEVLSLIRR

SEQ ID NO: 7124 - protein, 188 aa, Corynebacterium sphenisci
  REGION 1..188: note = tr|A0A1L7D0B4|A0A1L7D0B4_9CORY GTP cyclohydrolase 1; OS = Corynebacterium sphenisci DSM 44792 OX=1437874 GN=folE; PE = 3 SV=1
MFDQERAEAAVRELLLAVGEDPDREGLVETPARVARAYREVFAGLHVDPREVLDKTFDEDHQELVLVKDIPIYSTCEHHLVPFFGHAHIGYIPGPRGRVTGLSKLARLVDLYAKRPQVQERLTSQVADALVERLEPTSAIVVIECEHLCMAMRGIRKPGSRTVTSAVRGGFKSDARSRAEALSLITGR

SEQ ID NO: 7125 - protein, 227 aa, Corynebacterium spheniscorum
  REGION 1..227: note = tr|A0A1I2T9R4|A0A1I2T9R4_9CORY GTP cyclohydrolase 1; OS = Corynebacterium spheniscorum OX=185761 GN=folE PE=3 SV=1
MGLETKQHSATVFQWERCAADGLAKESEIRTHTMDDKQLTHFDQERAEKAVRELLLAVGEDPDREGLKQTPARVARAFQETFAGLHSDPREVLSTTFDENHQELVLVRDIPIYSTCEHHLVPFFGKAHIGYIPGKDGKVTGLSKLARLVDGYAKRPQVQERLTTQVADALVECLDAQSVIVVIECEHLCMAMRGIRKPGAMTTTSAVRGGFKRNAASRAEVLSLIRQ

SEQ ID NO: 7126 - protein, 197 aa, Corynebacterium stationis
  REGION 1..197: note = tr|A0A3D3IKW7|A0A3D3IKW7_9CORY GTP cyclohydrolase 1; OS = Corynebacterium stationis OX=1705 GN=folE PE=3 SV=1
MSASLIPARGPFDQERAEAAIRELLIAVGEDPDREGLLETPARVARSYAEIFAGLHVDPTEVLNKTFDEDHQELVLVRDIPIYSTCEHHLVPFYGAAHIGYIPGKDGHVTGLSKLARLADGFAKRPQVQERLTRQIADALTETLQAQSVIVVIECEHLCMGMRGVKKPGSVTTTSAVRGGFKSNAASRAEVLSLIRS

SEQ ID NO: 7127 - protein, 197 aa, Corynebacterium stationis
  REGION 1..197: note = tr|A0A241TXK6|A0A241TXK6_9CORY GTP cyclohydrolase 1; OS = Corynebacterium stationis OX=1705 GN=folE PE=3 SV=1
MSESLIPARGPFDQERAEAAIRELLIAVGEDPDREGLLETPARVARSYAEVFAGLHVDPTEVLHKTFDEDHQELVLVRDIPIYSTCEHHLVPFYGVAHIGYIPGKDGHVTGLSKLARLADGFAKRPQVQERLTRQIADALTESLQAQSVIVVIECEHLCMGMRGVKKPGSVTTTSAVRGGFKSNAASRAEVLSLIRS

SEQ ID NO: 7128 - protein, 196 aa, Corynebacterium striatum
  REGION 1..196: note = tr|A0A376GR93|A0A376GR93_CORST GTP cyclohydrolase 1; OS = Corynebacterium striatum OX=43770 GN=folE PE=3 SV=1
MSDNIPAKGEFDQARAEAAVRELLIAVGEDPDREGLQETPARVARAYKEVFAGLHADPTEVLHKTFAEEHQELVLVRDIPIYSTCEHHLVPFYGVAHIGYIPGPDGQVTGLSKLARLADMYAKRPQVQERLTSQIANALVDVLHAQSVIVVIECEHLCMAMRGIRKPGATTTTSAVRGGFKSNAASRAEVMSLIRS

SEQ ID NO: 7129 - protein, 196 aa, Corynebacterium striatum
  REGION 1..196: note = tr|A0A2Z2IXC5|A0A2Z2IXC5_CORST GTP cyclohydrolase 1; OS = Corynebacterium striatum OX=43770 GN=folE PE=3 SV=1
MSGNIPAKGEFDQARAEAAVRELLISVGEDPDREGLQETPARVARAYKEVFAGLHADPTEVLHKTFAEEHQELVLVRDIPIYSTCEHHLVPFYGVAHIGYIPGPDGQVTGLSKLARLADMYAKRPQVQERLTSQIANALVDVLHAQSVIVVIECEHLCMAMRGIRKPGATTTTSAVRGGFKSNAASRAEVMSLIRS

SEQ ID NO: 7130 - protein, 190 aa, unidentified
  source 1..190: note = Corynebacterium tapiri
  REGION 1..190: note = tr|A0A5C4U2Y2|A0A5C4U2Y2_9CORY GTP cyclohydrolase 1; OS = Corynebacterium tapiri OX=1448266 GN=folE PE=3 SV=1
MSANFDAARAEAAVRELLLAVGEDPDREGLRETPARVARAFRENFAGLGVDPAEVLERTFSEDHQELVLVKDIPIYSMCEHHLLPFFGVAHIGYIPNKQGKVTGLSKLARLADLYAKRPQVQERLTSQIADALVDRLQAQSVIVVIECEHLCMGMRGIRKPGAMTTTSAVRGGFKQSAASRAEVLSLIRG

SEQ ID NO: 7131 - protein, 212 aa, Corynebacterium terpenotabidum
  REGION 1..212: note = tr|S4XEL2|S4XEL2_9CORY GTP cyclohydrolase 1; OS = Corynebacterium terpenotabidum Y-11 OX=1200352 GN=folE; PE = 3 SV=1
MNTEDMTGSAGAAVDSAVSLSTGRVFDQARAEAAIRELLLAVGEDPDREGLRETPARVARAYREIFDGLYHDPAEVLAKTFNEDHRELVLVKDIPIYSTCEHHLVPFYGHAHIGYIPGVDGTVTGLSKLARLVDGFAKRPQVQERLTSQVADAVAEHLHASAVIVVIECEHLCMAMRGIRKPGASTVTSAVRGGFRNDARARAEAMSLIRGQ

SEQ ID NO: 7132 - protein, 189 aa, Corynebacterium testudinoris
  REGION 1..189: note = tr|A0A0G3H8N2|A0A0G3H8N2_9CORY GTP cyclohydrolase 1; OS = Corynebacterium testudinoris OX=136857 GN=folE PE=3 SV=1
MTEFDQARAEAAVRELLIAVGEDPDREGLQETPARVARSYREIFAGLHSDPTEVLTKTFAEDHQELVLVRDIPIYSTCEHHLVPFYGKAHIGYIPGKAGHVTGLSKLARLADMYAKRPQVQERLTSQIADALVDKLGAQAAIVVIECEHLCMAMRGIRKPGATTTTSAVRGGFKTNAASRAEVLSLIRS

SEQ ID NO: 7133 - protein, 191 aa, Corynebacterium timonense
  REGION 1..191: note = tr|A0A1H1L5R6|A0A1H1L5R6_9CORY GTP cyclohydrolase 1; OS = Corynebacterium timonense OX=441500 GN=folE PE=3 SV=1
MTSSGVDRARAEAAVRELLLAVGEDPDRPGLEETPARVARAYEEVFAGLHTDPTEVLNKSFAEDHNELVLVRDIPIYSMCEHHLVPFYGKAHIGYIPGAEGKVTGLSKLARLADLYAKRPQVQERLTSQIADALVDKLGAQAVIVVIECEHLCMAMRGIRKPGSTTTTSAVRGGFKTNAASRAEVLSLIRS

SEQ ID NO: 7134 - protein, 197 aa, Corynebacterium tuberculostearicum; identical to SEQ ID NO: 7109
  REGION 1..197: note = tr|C6RC98|C6RC98_9CORY GTP cyclohydrolase 1; OS = Corynebacterium tuberculostearicum SK141 OX=553206; GN = folE PE=3 SV=1

SEQ ID NO: 7135 - protein, 187 aa, Corynebacterium tuscaniense
  REGION 1..187: note = tr|A0A095YQA5|A0A095YQA5_9CORY GTP cyclohydrolase 1; OS = Corynebacterium tuscaniense DNF00037 OX=1401064 GN=folE; PE = 3 SV=1
MFDRARAEAAVRELLLAVGENPDREGLLETPARVARAYEEVFAGLHTDPTTVLEKTFAENHEELVLVRDVPIYSTCEHHLVPFYGVAHIGYIPGEDGHVTGLSKLARLADMYAKRPQVQERLTSQIADALVDKLNAQSVIVVIECEHLCMAMRGIRKPGATTTTSAVRGGFKRNAASRAEVLSLIRG

SEQ ID NO: 7136 - protein, 198 aa, Corynebacterium tuscaniense
  REGION 1..198: note = tr|A0A2N6T6Q0|A0A2N6T6Q0_9CORY GTP cyclohydrolase 1; OS = Corynebacterium tuscaniense OX=302449 GN=folE PE=3 SV=1
MTDPLNAEQNPVFDRTRAEAAVRELLLAVGENPDREGLLETPARVARAYEEVFAGLHTDPTTVLEKTFAENHEELVLVRDVPIYSTCEHHLVPFYGVAHIGYIPGEDGHVTGLSKLARLADMYAKRPQVQERLTSQIADALVDRLNAQSVIVVIECEHLCMAMRGIRKPGATTTTSAVRGGFKRNAASRAEVLSLIRG

SEQ ID NO: 7137 - protein, 197 aa, Corynebacterium ulcerans
  REGION 1..197: note = tr|V6V2R4|V6V2R4_CORUL GTP cyclohydrolase 1; OS = Corynebacterium ulcerans NCTC 12077 OX=1258583 GN=folE; PE = 3 SV=1
MRVVKAKGQIVFDRDRAEAAVRELLIAVGEDPEREGLQETPARVAKAYAEVFAGLHTDPTEVLNKTFSEDHRELVLVRDIPIYSTCEHHLVPFFGTAHIGYIPGQSGKVTGLSKLARLVDLYAKRPQVQERLTSQVADALVEKLEAQAVIVVIECEHLCMAMRGIRKPGATTTTSAVRGGFQTNAASRAEVLSLIRS

SEQ ID NO: 7138 - protein, 187 aa, Corynebacterium ulcerans
  REGION 1..187: note = tr|A0A5F0AB22|A0A5F0AB22_CORUL GTP cyclohydrolase 1; OS = Corynebacterium ulcerans OX=65058 GN=folE PE=3 SV=1
MFDRDRAETAVRELLIAVGEDPDREGLKETPARVAKAYAEVFAGLHTDPTEVLNKTFSEEHRELVLVRDIPIYSTCEHHLVPFFGTAHIGYIPGQSGKVTGLSKLARLVDLYAKRPQVQERLTSQVADALVEKLEAQAVIVVIECEHLCMAMRGIRKPGATTTTSAVRGGFQTNAASRAEVLSLIRS

SEQ ID NO: 7139 - protein, 204 aa, Corynebacterium urealyticum
  REGION 1..204: note = tr|B1VHL0|B1VHL0_CORU7 GTP cyclohydrolase 1; OS = Corynebacterium urealyticum (strain ATCC 43042 / DSM 7109) OX=504474 GN=folE PE=3 SV=1
MADSTKPDSTTSESTRHFDRERAEAAVRELLIAVGEDPDREGLADTPARVARAYEEVFSGLGTDPTEVLNTTFNEDHRELVLVKDIPFYSTCEHHLVPFFGHAHIGYIPGRSGKVTGLSKLARLVEGFARRPQVQERLTTSIADALMERLDASAVIVVIEAEHLCMAMRGVRKPGANTVTSAVRGGFQNNAATRAEAMALIRGN

SEQ ID NO: 7140 - protein, 204 aa, Corynebacterium urealyticum; identical to SEQ ID NO: 7139
  REGION 1..204: note = tr|A0A5D4FQU3|A0A5D4FQU3_9CORY GTP cyclohydrolase 1; OS = Corynebacterium urealyticum OX=43771 GN=folE PE=3 SV=1

SEQ ID NO: 7141 - protein, 194 aa, Corynebacterium ureicelerivorans
  REGION 1..194: note = tr|A0A077HM99|A0A077HM99_9CORY GTP cyclohydrolase 1; OS = Corynebacterium ureicelerivorans OX=401472 GN=folE PE=3; SV = 1
MTSQNVGGFDRERAEAAVRELLIAVGEDPDREGLAETPARVARAYEEVFAGLREDPKIHLEKSFSENHRELVLVRDIPIYSTCEHHLVPFYGVAHIGYIPGADGKVTGLSKLARLADMYAKRPQVQERLTAQIADAIVEKLDASAVIVVIECEHLCMAMRGIRKPGATTTTSAVRGGFQNNAASRAEVLSLIRG

SEQ ID NO: 7142 - protein, 191 aa, unidentified
  source 1..191: note = Corynebacterium uterequi
  REGION 1..191: note = tr|A0A0G3HL88|A0A0G3HL88_9CORY GTP cyclohydrolase 1; OS = Corynebacterium uterequi OX=1072256 GN=folE PE=3 SV=1
MADTNFDHARAEAAVRELLLAVGEDPDREGLRETPARVARAFAENLQGLRTDPTSVLEKTFSEDHQELVLVKDIPIYSMCEHHLLPFFGHAHIGYIPNKEGQVTGLSKLARLADLYARRPQVQERLTSQIADALVEKLRAQSVIVVIECEHLCMGMRGIRKPGAVTVTSAVRGGFKTSAASRAEALSLIRS

SEQ ID NO: 7143 - protein, 205 aa, Corynebacterium variabile
  REGION 1..205: note = tr|G0HBX9|G0HBX9_CORVD GTP cyclohydrolase 1; OS = Corynebacterium variabile (strain DSM 44702 / JCM 12073 / NCIMB 30131) OX=858619 GN=folE PE=3 SV=1
MSNSESTDQPVSQITGRPFDQERAEAAVRELLFAVGADPDREGLQETPARVARAYREIFDGLFRDPAEVLNKTFNEDHRELVLVKDIPIYSTCEHHLVPFYGHAHIGYIPGNDGTVTGLSKLARLVDGFAKRPQVQERLTSQVADAVATRLNASAVIVVIECEHLCMAMRGIRKPGATTVTSAVRGGFRNDARTRAEAFSLIRGN

SEQ ID NO: 7144 - protein, 205 aa, Corynebacterium variabile; identical to SEQ ID NO: 7143
  REGION 1..205: note = tr|A0A0X2NMW9|A0A0X2NMW9_9CORY GTP cyclohydrolase 1; OS = Corynebacterium variabile OX=1727 GN=folE PE=3 SV=1

SEQ ID NO: 7145 - protein, 191 aa, Corynebacterium vitaeruminis
  REGION 1..191: note = tr|W5Y2Z2|W5Y2Z2_9CORY GTP cyclohydrolase 1; OS = Corynebacterium vitaeruminis DSM 20294 OX=1224164; GN = folE PE=3 SV=1
MATGTFDRERAEAAVRELLIAVGEDPDREGLIETPARVARAYEECFAGLRTDPKEVLSKVFNEEHRELVLVRDIPIYSTCEHHLVPFFGKAHIGYIPGDSGKVTGLSKLARLVDLYAKRPQVQERLTSQVADALVEKLQAQSVIVVIECEHLCMAMRGIRKPGATTTTSAVRGGFQRNAASRAEALALIRS

SEQ ID NO: 7146 - protein, 210 aa, Corynebacterium xerosis
  REGION 1..210: note = tr|A0A494RVI7|A0A494RVI7_9CORY GTP cyclohydrolase 1; OS = Corynebacterium xerosis OX=1725 GN=folE PE=3 SV=1
MYDHRDDEVHPDIAADRGEDLGTFDHARAEAAVRELLLAVGEDPEREGLRETPARVARAYREVFAGLHVDPTEVLEKTFDEGHQELVLVKDIPIYSTCEHHLVPFFGKAHIGYIPGPEGRVTGLSKLARLVDLYAKRPQVQERLTGQVADALVDKLQPTSAIVVIECEHLCMAMRGIRKPGATTITSAVRGGFKSDARSRAEAMSLITGR

SEQ ID NO: 7147 - protein, 210 aa, Corynebacterium xerosis
  REGION 1..210: note = tr|A0A2N6SYA1|A0A2N6SYA1_9CORY GTP cyclohydrolase 1; OS = Corynebacterium xerosis OX=1725 GN=folE PE=3 SV=1
MYDHRDDEVHPDIAGDRGEDLGTFDHARAEAAVRELLLAVGEDPEREGLLETPARVARAYREVFAGLHVDPTEVLEKTFDEGHQELVLVKDIPIYSTCEHHLVPFFGKAHIGYIPGPEGRVTGLSKLARLVDLYAKRPQVQERLTGQVADALVDKLQPTSAIVVIECEHLCMAMRGIRKPGATTITSAVRGGFKSDARSRAEAMSLITGR

SEQ ID NO: 7148 - protein, 219 aa, Cosenzaea myxofaciens
  REGION 1..219: note = tr|A0A198F7R7|A0A198F7R7_9GAMM GTP cyclohydrolase 1; OS = Cosenzaea myxofaciens ATCC 19692 OX=1354337 GN=folE; PE = 3 SV=1
MSSLSKEAQDVHAALVEHGLETPLREPQLSPSESKQQIEHHMTEVMKLLNLDLSDDSLMETPKRIAKMYVGEIFSGLDYHNFPKITLIDNKMQVDEMVTVRDITLTSTCEHHFVTIDGKATVAYIPKDKVIGLSKINRIVQFFAQRPQVQERLTQQILIALQVLLGTKNVAVSIDAVHYCVKARGIRDANSATATTSLGGLFKSSQNTRQEFLRAIRHP

SEQ ID NO: 7149 - protein, 212 aa, Couchioplanes caeruleus
  REGION 1..212: note = tr|A0A3N1GJW6|A0A3N1GJW6_9ACTN GTP cyclohydrolase 1; OS = Couchioplanes caeruleus OX=56438 GN=folE PE=3 SV=1
MTSTAWTGTRDPGTVDQPPHLRLVRAVAPIDLEAATDAVRALLKALGQDIDSAHLLDTPRRVAAAYAELLTPEPFVLTTFPNDDRYDELVLVREVPFRSLCEHHLLPFHGVAHIGYLPDQRIVGLSKLARVVEHYARGLQVQERLTRQIAVCLQDNLQAKGVAVVLEAEHLCMSLRGVRAAGARTTTSALLGLHREQPATRAEFFALTGLRH

SEQ ID NO: 7150 - protein, 212 aa, Couchioplanes caeruleus; identical to SEQ ID NO: 7149
  REGION 1..212: note = tr|A0A1K0FX83|A0A1K0FX83_9ACTN GTP cyclohydrolase 1; OS = Couchioplanes caeruleus subsp. caeruleus OX=56427; GN = folE PE=3 SV=1

SEQ ID NO: 7151 - protein, 184 aa, Coxiella burnetii
  REGION 1..184: note = sp|A9NDB3|GCH1_COXBR GTP cyclohydrolase 1; OS = Coxiella burnetii (strain RSA 331 / Henzerling II); OX = 360115 GN=folE PE=3 SV=1
MSNTIADHVKAILIALGEDPNREGLRDTPKRYEKALEHLTKGYHEKLPSVVKKAVFQSGMDEMVILKDIELYSLCEHHLLPFIGRCHVAYLPSGKIIGISKLARIVDMFAKRLQVQENLTKQIAEAILTATEAKGVGVIIEAKHLCMMMRGVEKQNSEMTTSVMLGTFRKDDRTRSEFLSLIRK

SEQ ID NO: 7152 - protein, 184 aa, Coxiella burnetii; identical to SEQ ID NO: 7151
  REGION 1..184: note = sp|A9KFF3|GCH1_COXBN GTP cyclohydrolase 1; OS = Coxiella burnetii (strain Dugway 5J108-111) OX=434922; GN = folE PE=3 SV=1

SEQ ID NO: 7153 - protein, 184 aa, unidentified
  source 1..184: note = Coxiella endosymbiont
  REGION 1..184: note = tr|A0A0A8E8L1|A0A0A8E8L1_9COXI GTP cyclohydrolase 1; OS = Coxiella endosymbiont of Amblyomma americanum OX=325775; GN = folE PE=3 SV=1
MSSAIEKHIEAILVHLGENILREGLKETPRRFQKTLEYLTSGYQDKLCKIVKNAIFQSDINEIIIVRSIELYSLCEHHLLPFIGKCHVAYLPNGKIIGISKISRIVDMYSRRFQVQENLTKQIAESIAEVTDAKGVGVIIEAKHLCMMMRGVKKQNPEMITFLMLGAFCKDDRARTELLNLIKS

SEQ ID NO: 7154 - protein, 186 aa, Coxiella sp.
  REGION 1..186: note = tr|A0A2G2A064|A0A2G2A064_9COXI GTP cyclohydrolase 1; OS = Coxiella sp. (in: Bacteria) OX=59288 GN=folE PE=3 SV=1
MTTTDNLKDHYSKILTDLGEDVTREGLVKTPLRAAKAMQDLTHGYKSNLDEIINGAIFTSDADQMILINDIEFYSLCEHHLLPFYGKCHIAYIPDKKVLGISKFARIVDHFSRRLQIQEGLTNQIAESIYASTGAKGVGVIIEAQHFCMMMRGVEKQHSNMKTSVMLGSFRESSVTRNEFLQLLAI

SEQ ID NO: 7155 - protein, 198 aa, Coxiella sp.
  REGION 1..198: note = tr|A0A0S7XVZ5|A0A0S7XVZ5_9COXI GTP cyclohydrolase 1; OS = Coxiella sp. DG_40 OX=1703354 GN=folE PE=3 SV=1
MRTEKKMSDKDKTKVDTKRIEKAVKEILLAVGEDVGREGVKGTPERVAKMYAELLAGMDEDPKKHLRRVFSEDYDEIVLLRDIPFYSICEHHLMPFIGTAAVAYLPKGVVLGVSKLARIVDCFAHRLQTQERLTYQIADFIMNSLKPRGVAVVLEASHSCMTIRGIKKPGSMMVTSALRGIFKRDPRSRNEVMSLMQK

SEQ ID NO: 7156 - protein, 184 aa, unidentified
  source 1..184: note = Unknown
  REGION 1..184: note = tr|A0A2N6N5V2|A0A2N6N5V2_9COXI GTP cyclohydrolase 1; OS = Coxiella-like endosymbiont OX=1592897 GN=folE PE=3 SV=1
MTNTIKKHIEAILTNLGEDIHREGLKETPRRFQKALEYLTSGYQDKLHEIINNAIFQSDMDEIVIVKNIELYSLCEHHLLPFIGKCHVAYLPNGKIIGLSKIARIVDIYAKRLQVQENLTKQIAESIDKVTDAKGVAVIIEAKHLCMMMRGVEKQNSEMTTSMMLGIFRKDERTRAEFLSLIRN

SEQ ID NO: 7157 - protein, 184 aa, unidentified; identical to SEQ ID NO: 7153
  source 1..184: note = Unknown
  REGION 1..184: note = tr|A0A3S6R4B6|A0A3S6R4B6_9COXI GTP cyclohydrolase 1; OS = Coxiella-like endosymbiont of Amblyomma americanum; OX = 1987500 GN=folE PE=3 SV=1

SEQ ID NO: 7158 - protein, 192 aa, unidentified
  source 1..192: note = Coxiellaceae bacterium
  REGION 1..192: note = tr|A0A3B9W6F2|A0A3B9W6F2_9COXI GTP cyclohydrolase 1; OS = Coxiellaceae bacterium OX=2026727 GN=folE PE=3 SV=1
MSTTQSPTSPFDTQTESVKQLIEFLGENPQREGLQGTPERAVKALQFLTKGYHEDLDTIINGALFSSNMDEMVLVKGIEFFSLCEHHLLPFIGKCHIAYIPQGKVLGLSKFARIVEHFSRRLQIQEQLTEDIANTIAEITGAKGVGVIIESQHLCMMMRGVEKQQASMTTSKMVGLFKDNEKTRTEFLSLIQ

SEQ ID NO: 7159 - protein, 179 aa, unidentified
  source 1..179: note = Coxiellaceae bacterium
  REGION 1..179: note = tr|A0A370CJ17|A0A370CJ17_9COXI GTP cyclohydrolase 1; OS = Coxiellaceae bacterium RA15029 OX=2016198 GN=folE PE=3; SV = 1
MEKHIKAILTALGEDPEREGLKKTPERLAKSLRYLTSGTRESLPNILNDALFQSDMEEMILVKDIELYSLCEHHLLPFMGVCHMAYIPNGQIIGLSKIPRIINFYARRLQIQENLTRQIADTLMDKLNAKGVAIIIEAKHLCMMMRGVEKQQATMKTSVMLGIFQQNMRIRAEFFSLVV

SEQ ID NO: 7160 - protein, 186 aa, unidentified
  source 1..186: note = Crassaminicella sp.
  REGION 1..186: note = tr|A0A5C0SDL7|A0A5C0SDL7_9CLOT GTP cyclohydrolase 1; OS = Crassaminicella sp. SY095 OX=2599308 GN=folE PE=3 SV=1
MDKARIEKAIREILEAIGEDPNREGLKDTPKRIAKMYEEIFSGLNEDPKKHLEIFFQEEKHEELVLVKDIPFYSMCEHHFVPFFGKAHVGYLPKNGRLTGLSKLARVVETVAKRPQLQERLTSSIAEALVEKLDPYGVIVVVEAEHMCMTMRGVKKPGSKTITSAVRGLFERDAKARSEAMALIKF

SEQ ID NO: 7161 - protein, 264 aa, unidentified
  source 1..264: note = Crenobacter cavernae
  REGION 1..264: note = tr|A0A4Q2J696|A0A4Q2J696_9NEIS GTP cyclohydrolase FolE2 OS=Crenobacter cavernae OX=2290923 GN=folE2 PE=3 SV=1
MNAQTIPDVQSSHDSRNLPINKVGIKAIRHPVRLAEREGGVQHSVATFDMYVHLPAHFKGTHMSRFVEILHTQEKEISVSSFENIVRAMVDRLEAESGYIEMRFDYFVNKTAPVSGVKSLLDYQVTYIGEIKGGQYHFTMKVLVPVTSLCPCSKKISQYGAHNQRSHVTVTARTDEYIWIEELVDMVEQEASCELYGILKRPDEKYVTERAYENPKFVEDMVRDVAGRLNADPRVLAFVVESENFESIHNHSAYALIEQDKTAR

SEQ ID NO: 7162 - protein, 264 aa, unidentified
  source 1..264: note = Crenobacter cavernae
  REGION 1..264: note = tr|A0A345Y907|A0A345Y907_9NEIS GTP cyclohydrolase FolE2 OS=Crenobacter cavernae OX=2290923 GN=folE2 PE=3 SV=1
MNAQTIPDVQSSHDSRNLPINKVGIKAIRHPVRLAEREGGVQHSVATFDMYVHLPAHFKGTHMSRFVEILHTQEKEISVSSFENIVRAMVDRLEAESGYIEMRFDYFVNKTAPVSGVKSLLDYQVTYIGEIKGGQYHFTMKVLVPVTSLCPCSKKISQYGAHNQRSHVTVTARTDEYIWIEELVDMVEQEASCELYGILKRPDEKYVTERAYENPKFVEDMVRDVAGRLNADPRVLAFVVESENFESIHNHSAYALIEQDKRAR

SEQ ID NO: 7163 - protein, 266 aa, unidentified
  source 1..266: note = Crenobacter luteus
  REGION 1..266: note = tr|A0A163CMK2|A0A163CMK2_9NEIS GTP cyclohydrolase FolE2 OS=Crenobacter luteus OX=1452487 GN=folE2 PE=3 SV=1
MGVVEWLPDVQSAEADFGFDIDQVGIKSIRFPLTVATADGGTQATVASCDLYVALPSTQKGTHMSRFVELLEAQEAALDAHSLRALLASMVDRLDAEAGEVTLRFPLFVRKTAPVSGVQSLLDVDVTLFGRLSADGFAHRLTVTTPVTSLCPCSKQISQYGAHNQRSHITLSVELDGEMAPEELVRLAEAKASCELFGLLKRPDEKWVTERAYENPKFVEDLVREIALALRDDARVSAFTVESENFESIHNHSAFARIRWQRPAAR

SEQ ID NO: 7164 - protein, 264 aa, unidentified
  source 1..264: note = Crenobacter luteus
  REGION 1..264: note = tr|A0A161S4M8|A0A161S4M8_9NEIS GTP cyclohydrolase FolE2 OS=Crenobacter luteus OX=1452487 GN=folE2 PE=3 SV=1
MNALTIPDVQSSHDSRNLPINKVGIKAIRHPVRLAEREGGVQHSIATFDMYVHLPAHFKGTHMSRFVEILNAQEKEISVSSFESIVRAMVERLEAESGYIEMRFDYFVNKTAPVSGVQSLLDYQVTYIGEISDGEYRFTMKVLVPVTSLCPCSKKISQYGAHNQRSHVTVTARTASHVWIEELIEMVEQEASCELYGLLKRPDEKYVTERAYENPKFVEDMVRDVAGRLNADARVLAFVVESENFESIHNHSAYALIEQDKTAR

SEQ ID NO: 7165 - protein, 200 aa, unidentified
  source 1..200: note = Crenotalea thermophila
  REGION 1..200: note = tr|A0A1I7N4J5|A0A1I7N4J5_9BACT GTP cyclohydrolase 1; OS = Crenotalea thermophila OX=1393122 GN=folE PE=3 SV=1
MSYKKIEQYEEKITSHLVENYRETLTLLGENPDREGLKKTPHRVAKAMQYLTQGYHMDPKAILESAKFKESFSEMVLVKDIELYSLCEHHLLPFFGKAHVAYIPNGYIVGLSKIARVVDCFSRRLQVQERLTHQILDAIQDVLHPLGVAVVIEAQHLCMMMRGVQKQNSVTTTSAFSGQFEDERTRSEFIRLISADLMHR

SEQ ID NO: 7166 - protein, 180 aa, Crenothrix polyspora
  REGION 1..180: note = tr|A0A1R4HGU0|A0A1R4HGU0_9GAMM GTP cyclohydrolase 1; OS = Crenothrix polyspora OX=360316 GN=folE PE=3 SV=1
MEEQFAKIIESIGEDLNREGLVDTPKRAAKAFKFLNNGYDKTLEDVLNGAIFSAETEDMVIVKDIELYSLCEHHLLPFIGKCHVGYLPQGKVLGLSKIARIVDMYARRLQIQEKLTKQIADAISLAVDAKGVAVVIEAKHLCMMMRGVEKQNSVMTTSVMTGIFRKSISTRSEFLNLINR

SEQ ID NO: 7167 - protein, 180 aa, Crenothrix polyspora
  REGION 1..180: note = tr|A0A1R4H123|A0A1R4H123_9GAMM GTP cyclohydrolase 1; OS = Crenothrix polyspora OX=360316 GN=folE PE=3 SV=1
MEEQFAKIITAVGEDLTREGLVDTPKRAAKAFKFLNNGYEKTLEEVLNGAIFSAETEDMVIVKDIELYSLCEHHLLPFIGKCHVGYLPQGKVLGLSKIARIVDMYARRLQIQEKLTKQIADAISVAVDAKGVAVVIEAKHLCMMMRGVEKQNSVMTTSVMTGIFRKSISTRSEFLNLINR

SEQ ID NO: 7168 - protein, 180 aa, Crenothrix sp.
  REGION 1..180: note = tr|A0A1Y3A165|A0A1Y3A165_9GAMM GTP cyclohydrolase 1; OS = Crenothrix sp. D3 OX=1880899 GN=folE PE=3 SV=1
MEEHFAKIITAIGEDLSREGLVDTPKRAAKAFKFLNNGYDKTLEEVLNGAIFTADTEDMVIVKDIELYSLCEHHLLPFIGKCHVGYLPNGKVLGLSKIARVVDMYARRLQIQEQLTRQIADAIETAVGARGVAVVIEAKHLCMMMRGVEKQNSVMTTSAMTGIFRKDFSTRTEFLTLINR

SEQ ID NO: 7169 - protein, 222 aa, unidentified
  source 1..222: note = Criblamydia sequanensis
  REGION 1..222: note = tr|A0A090CYC7|A0A090CYC7_9BACT GTP cyclohydrolase 1; OS = Criblamydia sequanensis CRIB-18 OX=1437425 GN=folE PE=3; SV = 1
MKEDDFFYEEAIQTSFPYPKSKTAPKLSKQEKMDLIASRFRDIMIALGLDLDHPSLARTPERVAKMYVNEVFTGLDDTTFPSLSFVDNEFRNSENGNIVFIKVNFNSFCEHHFVPISGNAYVAYIPKDKVIGLSKIPRIVRFFAQRPQMQERLGAQISDSLQKILGTEDVAVCIAAKHYCMIARGIEDAVSHTITYVLKGAFEKDLKRREEFYQALKAKDLD

SEQ ID NO: 7170 - protein, 367 aa, unidentified
  source 1..367: note = Cribrihabitans marinus
  REGION 1..367: note = tr|A0A1H6TMH7|A0A1H6TMH7_9RHOB GTP cyclohydrolase FolE2 OS=Cribrihabitans marinus OX=1227549 GN=folE2 PE=3; SV = 1
MNLHAGGLDDTPDRDAAQAALDTLRAWAASASPAEIAQLDPAVARLVPDLVPLNYPALSRDYPHDFRPDEAYRATLPDLQNGPTSLIRGARQQIQHVGISNFRLPIRFHRKDGKDLTLETSVTGTVSLEAGKKGINMSRIMRSFYKHAERTFSFEVIEAALDDYMTDLDSFDARIQMRFSYPDRIESLRSGLTGYQYYDIALELVEKGGVRQKIMHLDYVYSSTCPCSLELSEHARAQRGQLATPHSQRSVARISVQVNCDTDCLWFEDLIALCRRAVPTETQVMVKREDEQAFAELNAANPIFVEDAARLFCEQLQADHHIGDFRVVASHQESLHSHDAVSILTQGETFAADSLDPRLFASLFHVG

SEQ ID NO: 7171 - protein, 218 aa, unidentified
  source 1..218: note = Cricetibacter osteomyelitidis
  REGION 1..218: note = tr|A0A4R2SS93|A0A4R2SS93_9PAST GTP cyclohydrolase 1; OS = Cricetibacter osteomyelitidis OX=1521931 GN=folE PE=3; SV = 1
MNNISPEAAKVRNALLEKGIETPMIELTQSQDERRDGIERHMRAVMGLIGLDLNDDSLEETPKRLAKMFVDEIFSGLDYANFPKITNIENRMKVSEMVLVNDVTLTSTCEHHFVTIDGMVSVAYYPKKWVIGLSKINRVVAFFAQRPQVQERLTEQILLAFQTILETEDVAVYVKATHFCVKCRGIKDTNSYTVTSAFGGVFLEDRETRKEFLSLINK

SEQ ID NO: 7172 - protein, 234 aa, unidentified
  source 1..234: note = Crinalium epipsammum
  REGION 1..234: note = tr|K9W6V1|K9W6V1_9CYAN GTP cyclohydrolase 1; OS = Crinalium epipsammum PCC 9333 OX=1173022 GN=folE PE=3; SV = 1
MTIAHPDSAKDSQSAIGNTEIRVETRPDRNTLNGREPNLQRPSEEIHDEMMDAVTTLLLGVGEDPQREGLLKTPKRVAEAMRFLTSGYTQSLEELVNGAIFDEGHNEMVLVRDINVFSLCEHHMLPFMGKAHVAYIPNQKVVGLSKLARIVEMYSRRLQVQERLTRQIAEAVQTILEPKGVAVVMEASHMCMTMRGVQKPGSWTVTSAMLGIFQEEQKTREEFLNLIRHQPAFF

SEQ ID NO: 7173 - protein, 225 aa, Croceibacter atlanticus
  REGION 1..225: note = tr|A3U4S9|A3U4S9_CROAH GTP cyclohydrolase 1; OS = Croceibacter atlanticus (strain ATCC BAA-628 / HTCC2559 / KCTC 12090) OX=216432 GN=folE PE=3 SV=1
MKLDDLLENVEERGDNHAGASRETPLRDNAFDLDDQEKITLIQDDVKRILETLGMDLTDDSLKGTPLRVAKMFVKEIFGGLHPDRKPKASTFENKYQYGEMLVEKNITVYSTCEHHLLPIVGKAHVAYISKGNVVGLSKMNRIVDYYAKRPQVQERLTLQIVEELQKVLGTEDVACVIDAKHLCVNSRGIRDIDSSTVTSEFGGQFKDKETKREFLDYIKLDTEF

SEQ ID NO: 7174 - protein, 199 aa, Croceibacter atlanticus
  REGION 1..199: note = tr|A3UBT5|A3UBT5_CROAH GTP cyclohydrolase 1; OS = Croceibacter atlanticus (strain ATCC BAA-628 / HTCC2559 / KCTC 12090) OX=216432 GN=folE PE=3 SV=1
MALYRNFEEFNIEVTDEIKSQFSSIITNLGEDVAREGIVKTPERAAKAMQFLTSGYDIDAAEILKGAMFKEDYNDMVVVKNIELYSLCEHHMLPFFGKAHIAYIPNGHIVGLSKLPRVVDVFARRLQVQERLTHDILECINDTLKPKGVAVVIEASHMCMMMRGVQKQNSTTTTSGFRGQFEAQETRNEFLKLISSDLA

SEQ ID NO: 7175 - protein, 202 aa, Croceicoccus marinus
  REGION 1..202: note = tr|A0A1Z1FBQ3|A0A1Z1FBQ3_9SPHN GTP cyclohydrolase 1; OS = Croceicoccus marinus OX=450378 GN=folE PE=3 SV=1
MSSLVGPDEDNPRGKPPVPQEVQDAIRTLIRWTGDDPEREGLLDTPQRVARAWKEYCQGYGEDPAIHLSRIFEEVGGYDEVVLLKDIPFQSHCEHHMAPIIGKAAIAYLPRDHVVGISKLARVLHGFARRLQIQERLTAEVAECIWNHLKPHGVAVVIEASHACMTARGVRTPGVSMVTSRMMGTFRDDERSRKEVLSLMGY

SEQ ID NO: 7176 - protein, 202 aa, unidentified
  source 1..202: note = Croceicoccus naphthovorans
  REGION 1..202: note = tr|A0A0G3XDE1|A0A0G3XDE1_9SPHN GTP cyclohydrolase 1; OS = Croceicoccus naphthovorans OX=1348774 GN=folE PE=3 SV=1
MSSLVGPDEDNPLGKPPVPEDVQDAIRTLIRWAGDDPEREGLLDTPKRVARAWKEYCQGYTEDPAIHLSRIFEEVGGYDEVVLLKDIPFQSHCEHHMAPIIGKAAIAYLPRDHVVGISKLARVLHGFARRLQIQERLTAEVAQCIWDHLKPHGVAVVIEASHACMTARGVRTPGVAMTTSRMMGTFLEDDRTRKEVLSLMCY

SEQ ID NO: 7177 - protein, 202 aa, unidentified
  source 1..202: note = Croceicoccus ponticola
  REGION 1..202: note = tr|A0A437GVQ7|A0A437GVQ7_9SPHN GTP cyclohydrolase 1; OS = Croceicoccus ponticola OX=2217664 GN=folE PE=3 SV=1
MSSLVGPDEDDPQGKPPVPQDVQDAIRTLIRWTGDDPQREGLIDTPKRVARAWKEYCLGYNEDPAVHLSRIFEEVGGYDEVVLLKDIPFQSHCEHHMAPIIGKAAIAYLPRDHVVGISKLARVLHGFARRLQIQERLTAEVAQCIWEHLNPHGVAVVIEASHACMTARGVRTPGVAMTTSRMMGTFLDDERSRKEVLSLMGY

SEQ ID NO: 7178 - protein, 202 aa, Croceicoccus sp.
  REGION 1..202: note = tr|A0A2D8D9K6|A0A2D8D9K6_9SPHN GTP cyclohydrolase 1; OS = Croceicoccus sp. OX=1927144 GN=folE PE=3 SV=1
MSSLVGPDEDNPLGKPPVPEEVQEAIRTLLRWTGDDPSREGLLDTPKRVARAWKEYCQGYGEDPAIHLSRVFEEVGGYDEVVLLKDIPFQSHCEHHMAPIIGKAAIAYLPRDHVVGISKLARVLHGFARRLQIQERLTAEVAECIWNHLKPHGVAVVIEASHACMTARGVRTPGVGMVTSRMMGTFRDDERSRKEVLSLMGY

SEQ ID NO: 7179 - protein, 234 aa, Croceitalea dokdonensis
  REGION 1..234: note = tr|A0A0P7AZZ0|A0A0P7AZZ0_9FLAO GTP cyclohydrolase 1; OS = Croceitalea dokdonensis DOKDO 023 OX=1300341 GN=folE; PE = 3 SV=1
MEGKHILSQGLVESDTMITELSIDEIGDDHMYTGLETPIKADAFKLSDAEKKEKIAVLFGEIMEVMGLDLTDDSLKGTPKRVAKMYIDEIYSGLNPANKPKVALFDNKYQYNQMLVEKDITFYSNCEHHFVPIIGKAHVAYISSGKVIGLSKLNRMVQYFAKRPQVQERLTNQIGVELQNILGTKNVAVIIDAKHLCVSSRGIKDDTSATVTSFYGGQFLEQDKIQELYNYITN

SEQ ID NO: 7180 - protein, 226 aa, Croceitalea dokdonensis
  REGION 1..226: note = tr|A0A0P7ANJ4|A0A0P7ANJ4_9FLAO GTP cyclohydrolase 1; OS = Croceitalea dokdonensis DOKDO 023 OX=1300341 GN=folE; PE = 3 SV=1
MKLRETLDSKDDARGDDHVGSSHDTPMRKDAFVLSDMEKIEKIQGHVRDIMHTLGLDLNDDSLQGTPRRVAKMYVNELFGGLHPDKKPTSSTFDNKYKYGEMLVEKNITLYSTCEHHLLPIVGRAHIAYISNGTVVGLSKMNRIVDYYAKRPQVQERLNIQVVKELQAVLGTEDVACVMDAKHLCVNSRGIRDIESSTVTAEYGGKFKEESVRREFLDYINLDTEF

SEQ ID NO: 7181 - protein, 234 aa, unidentified
  source 1..234: note = Croceivirga radicis
  REGION 1..234: note = tr|A0A1V6LSP2|A0A1V6LSP2_9FLAO GTP cyclohydrolase 1; OS = Croceivirga radicis OX=1929488 GN=folE PE=3 SV=1
MKEKDLVLEALTGTNGYLNGHTHEEIGDDHLYTGVETPLKANAFELSNQEKKNRIAELFAEIMDVMGLDLTDDSLQGTPMRVAKMYIDEIYSGLDPANKPKVALFENKYQYNQMLVEKDITFYSNCEHHFVPIIGKAHVAYISSGKVIGLSKLNRIVQYFAKRPQVQERLTNQIALELQKILDTEDVAVIIDAKHLCVSSRGIKDDTSATVTSFYGGTFNTPEKIQELYNYINN

SEQ ID NO: 7182 - protein, 199 aa, unidentified
  source 1..199: note = Croceivirga radicis
  REGION 1..199: note = tr|A0A1V6LSI4|A0A1V6LSI4_9FLAO GTP cyclohydrolase 1; OS = Croceivirga radicis OX=1929488 GN=folE PE=3 SV=1
MAPYRNLEEYNIEVANEVKDRYAKIIDEIGEDVTREGLLKTPERAAKAMLFLTQGYKQDAEQILKSAMFKEDYDDMVIIKDIELYSLCEHHMLPFFGKAHVAYIPNGQIVGLSKIPRIVDVFARRLQVQERLTHDILECLNNTLQPKGVAVVIEASHMCMMMRGVQKQNSVTTTSGFRGQFEKIETRNEFLKLISAKLS

SEQ ID NO: 7183 - protein, 231 aa, unidentified
  source 1..231: note = Crocinitomicaceae bacterium
  REGION 1..231: note = tr|A0A2D5V1I5|A0A2D5V1I5_9FLAO GTP cyclohydrolase 1; OS = Crocinitomicaceae bacterium OX=2026728 GN=folE PE=3 SV=1
  VARIANT 70: note = Xaa can be any naturally occurring amino acid
  VARIANT 72: note = Xaa can be any naturally occurring amino acid
  VARIANT 78: note = Xaa can be any naturally occurring amino acid
  VARIANT 94: note = Xaa can be any naturally occurring amino acid
  VARIANT 219: note = Xaa can be any naturally occurring amino acid
MKLKETSLYIQPETSSEFNYDEIGNDHLGNPYDTPIRSDAFDISNNEKKEIIAEHFRAIMETLGLDLDDXSXMGTPYXVAKMYVEEIFHGLDPXNKPKIALFENKYQYNEMLVEKNITFYSNCEHHFVPIIGKAHIAYISSGKVIGLSKINRIVDYFARRPQVQERLTNQIGNELKDILGTEDVAVVIDAKHLCVSSRGIKDDTSSTTTSFYSGKFKSXSAKKEFQNYLIS

SEQ ID NO: 7184 - protein, 221 aa, unidentified
  source 1..221: note = Crocinitomicaceae bacterium
  REGION 1..221: note = tr|A0A2E4YTA3|A0A2E4YTA3_9FLAO GTP cyclohydrolase 1; OS = Crocinitomicaceae bacterium OX=2026728 GN=folE PE=3 SV=1
MSKFEELGDDHWMSSQETPVKKEALALSDQEKVSKISFHFKKIMELLGLDLNDMSLSGTPNRVAKMYVNEVFSGLNPKNAPKISLFPNNYRYTGMLVEKDIEVYSTCEHHFVPIIGKAHVAYIAKDNVIGLSKINRIVQHYCKRPQVQERLTIEITNELKKVLDIEDVACVIEAKHLCVNMRGVRDTKSVTITAKYSGAFNNESQKKEFLSHINLDSNFDL

SEQ ID NO: 7185 - protein, 220 aa, Crocinitomix sp.
  REGION 1..220: note = tr|A0A2W1N5A6|A0A2W1N5A6_9FLAO GTP cyclohydrolase 1; OS = Crocinitomix sp. SM1701 OX=2219161 GN=folE PE=3 SV=1
MKNNTEIEEMGDDHFGTAGDTPLRKDAFLLSDDQKIDIIQEKFAEIMETLGLDLTDDSLKATPKRVAKMYVKELFGGLNPDKSPKNSTFENKYAYTEMLVEKDITVYSTCEHHFLPIVGKAHIAYISSGRVIGLSKMNRIVDYYSKRPQVQERLTMQVVNHLKDYLQTEDVACVIDAKHLCVNSRGIQDIQSSTVTAEFGGKFAEPEVKKEFLSYLRMKL

SEQ ID NO: 7186 - protein, 218 aa, unidentified
  source 1..218: note = Crocosphaera chwakensis
  REGION 1..218: note = tr|A3IRZ7|A3IRZ7_9CHRO GTP cyclohydrolase 1; OS = Crocosphaera chwakensis CCY0110 OX=391612 GN=folE PE=3; SV = 1
MTLAQSEPNPVNKIDNKLPSLTTTQQPPVSEEEMRQAVRTLLLGLGEDPDREGLKDTPKRVVKALKFLTSGYHQSLDELLNGAVFHENANEMVLVRDIDLFSSCEHHILPILGRAHVAYIPDGKVIGLSKIARICEMYGRRLQVQERLTAQIADALQGLLQPKGVAVVVEATHMCMVMRGVQKPGSWTSTSALRGEFANDAKTRQEFMSLIQHNPRLR

SEQ ID NO: 7187 - protein, 239 aa, unidentified
  source 1..239: note = Crocosphaera chwakensis
  REGION 1..239: note = tr|A3IMW7|A3IMW7_9CHRO GTP cyclohydrolase 1; OS = Crocosphaera chwakensis CCY0110 OX=391612 GN=folE PE=3; SV = 1
MTIASSNGSNFRQSNGSNVLNPNLVDRVASRPDRNTHNGQQAKIQPTSDESTEKMKEAVYTMLEAVGEDPEREGLLKTPKRVAEAMKFLTQGYNQSLEELVNGAIFDEGHNEMVLVRDINFFSLCEHHMLPFMGQAHVAYIPNQKVVGLSKLARIVEMYSRRLQVQERLTRQIAEAIQEILEPRGVAVVMEASHMCMVMRGVQKPGSWTVTSAMIGEFDEEQKTREEFLNLIRHQPKFF

SEQ ID NO: 7188 - protein, 212 aa, unidentified
  source 1..212: note = Crocosphaera subtropica
  REGION 1..212: note = tr|B1WXA7|B1WXA7_CROS5 GTP cyclohydrolase 1; OS = Crocosphaera subtropica (strain ATCC 51142 / BH68); OX = 43989 GN=folE2 PE=3 SV=1
MTLSKEYNSALPRLVSSSHPPVTEEEMRQAVRTLLLGLGEDPDREGLRDTPKRVVKALKFLTSGYHQSLDELLNGAVFHENTDEMVLVRDIDLFSSCEHHILPILGRAHVAYIPDGKVIGLSKIARICEMYGRRLQVQERLTAQIADALQGLLQPKGVAVVVEATHMCMVMRGVQKPGSWTTTSAVRGVFAEDAKTRQEFMSLIRHSPTFQG

SEQ ID NO: 7189 - protein, 239 aa, unidentified
  source 1..239: note = Crocosphaera subtropica
  REGION 1..239: note = tr|B1WPW8|B1WPW8_CROS5 GTP cyclohydrolase 1; OS = Crocosphaera subtropica (strain ATCC 51142 / BH68); OX = 43989 GN=folE1 PE=3 SV=1
MTIASSNGSNFRQSNGSNVLNPNLVERVASRPDRNTHNGQQATIQPTSDESTEKMKEAVYTMLEAVGEDPEREGLLKTPKRVAEAMKFLTQGYNQSLEELVNGAIFDEGHNEMVLVRDINFFSLCEHHMLPFMGQAHVAYIPNQKVVGLSKLARIVEMYSRRLQVQERLTRQIAEAIQEILEPRGVAVVMEASHMCMVMRGVQKPGSWTVTSAMIGEFDEEQKTREEFLNLIRHQPKFF

SEQ ID NO: 7190 - protein, 218 aa, unidentified
  source 1..218: note = Crocosphaera watsonii
  REGION 1..218: note = tr|T2IEA7|T2IEA7_CROWT GTP cyclohydrolase 1; OS = Crocosphaera watsonii WH 8502 OX=423474 GN=folE PE=3; SV = 1
MTLAQSQPNPLNNIDNKLPSLTTTQRPLVSDEEMRQAVRTLLLGLGEDPDREGLKDTPKRVVKALKFLTSGYHQSLDELLNEAVFHESANEMVLVRDIDLFSSCEHHILPILGRAHVAYIPDGKVIGLSKIARICEMYGRRLQVQERLTGQIADALQGLLQPKGVAVVVEATHMCMVMRGVQKPGSWTSTSAVRGEFANDAKTRQEFMSLIQHNPGLG

SEQ ID NO: 7191 - protein, 241 aa, unidentified
  source 1..241: note = Crocosphaera watsonii
  REGION 1..241: note = tr|T2J0G9|T2J0G9_CROWT GTP cyclohydrolase 1; OS = Crocosphaera watsonii WH 0005 OX=423472 GN=folE PE=3; SV = 1
MTIASTNAPNLRQSNGSDLLNPDIVEQVVTTRLDRNTHDGQEAKIQPTSNDESMDRMEEAVYTMLEELGEDPEREGLLKTPKRVAEAMKFLTQGYNQSLEELVNGAIFDEGHNEMVLVRDINFFSLCEHHMLPFMGQAHVAYIPNQKVVGLSKLARIVEMYSRRLQVQERLTRQIAEAIQEILEPRGVAVVIEASHMCMVMRGVQKPGSWTVTSAMLGEFDEEQKTREEFLNLIRHQPKPF

SEQ ID NO: 7192 - protein, 223 aa, Cronobacter condimenti
  REGION 1..223: note = tr|K8AGJ6|K8AGJ6_9ENTR GTP cyclohydrolase 1; OS = Cronobacter condimenti 1330 OX=1073999 GN=folE PE=3 SV=1
MPSLSKEAALVHEALLARGLETPLRPPVNELDNETRKRLIAGHMTEIMQLLNLDLSDDSLMETPHRIAKMYVDEIFSGLDYANFPKITVIENKMKVDEMVTVRDITLTSTCEHHFVTIDGKATVAYIPKDAVIGLSKINRIVQFFAQRPQVQERLTQQVLVALQTLLGTNNVAVSIDAVHYCVKARGIRDATSATTTTSLGGLFKSSQNTRQEFLRAVRHHNG

SEQ ID NO: 7193 - protein, 223 aa, Cronobacter dublinensis
  REGION 1..223: note = tr|K8B070|K8B070_9ENTR GTP cyclohydrolase 1; OS = Cronobacter dublinensis 1210 OX=1208656 GN=folE PE=3; SV = 1
MPSLSKEAALVHEALVARGLETPLRPPINELDNETRKRLIAGHMTEIMQLLNLDLSDDSLMETPHRIAKMYVDEIFSGLDYANFPKITVIENKMKVDEMVTVRDITLTSTCEHHFVTIDGKATVAYIPKDAVIGLSKINRIVQFFAQRPQVQERLTQQVLVALQTLLGTNNVAVSIDAVHYCVKARGIRDATSATTTTSLGGLFKSSQNTRQEFLRAVRHHNG

SEQ ID NO: 7194 - protein, 223 aa, Cronobacter dublinensis
  REGION 1..223: note = tr|K8BA57|K8BA57_9ENTR GTP cyclohydrolase 1; OS = Cronobacter dublinensis 582 OX=1208661 GN=folE PE=3 SV=1
MPSLSKEAALVHEALVARGLETPLRPPVNELDNETRKRLIAGHMTEFMQLLNLDLSDDSLMETPHRIAKMYVDEIFSGLDYANFPKITVIENKMKVDEMVTVRDITLTSTCEHHFVTIDGKATVAYIPKDAVIGLSKINRIVQFFAQRPQVQERLTQQVLVALQTLLGTNNVAVSIDAVHYCVKARGIRDATSATTTTSLGGLFKSSQNTRQEFLRAVRHHNG

SEQ ID NO: 7195 - protein, 223 aa, Cronobacter malonaticus
  REGION 1..223: note = tr|V5TX72|V5TX72_9ENTR GTP cyclohydrolase 1; OS = Cronobacter malonaticus OX=413503 GN=folE PE=3 SV=1
MPSLSKEAALVHEALVARGLETPLRPPVNELDNETRKRLIAGHMTEIMQLLNLDLSDDSLMETPHRIAKMYVDEIFSGLDYANFPKITVIENKMKVDEMVTVRDITLTSTCEHHFVTIDGKATVAYIPKDAVIGLSKINRIVQFFAQRPQVQERLTQQVLVALQTLLGTNNVAVSIDAVHYCVKARGIRDATSATTTTSLGGLFKSSQNTRQEFLRAVRHHNG

SEQ ID NO: 7196 - protein, 223 aa, Cronobacter muytjensii; identical to SEQ ID NO: 7195
  REGION 1..223: note = tr|A0A2T7AV94|A0A2T7AV94_9ENTR GTP cyclohydrolase 1; OS = Cronobacter muytjensii OX=413501 GN=folE PE=3 SV=1

SEQ ID NO: 7197 - protein, 243 aa, Cronobacter sakazakii
  REGION 1..243: note = tr|A7MLK2|A7MLK2_CROS8 GTP cyclohydrolase 1; OS = Cronobacter sakazakii (strain ATCC BAA-894) OX=290339; GN = folE PE=3 SV=1
MSHAPPRPGRVWLHLQEKITMPSLSKEAALVHEALVARGLETPLRPPVNELDNETRKRLIAGHMTEIMQLLNLDLSDDSLMETPHRIAKMYVDEIFSGLDYANFPKITVIENKMKVDEMVTVRDITLTSTCEHHFVTIDGKATVAYIPKDAVIGLSKINRIVQFFAQRPQVQERLTQQVLVALQTLLGTNNVAVSIDAVHYCVKARGIRDATSATTTTSLGGLFKSSQNTRQEFLRAVRHHNG

SEQ ID NO: 7198 - protein, 223 aa, Cronobacter sakazakii; identical to SEQ ID NO: 7195
  REGION 1..223: note = tr|K8D4R8|K8D4R8_CROSK GTP cyclohydrolase 1; OS = Cronobacter sakazakii 696 OX=1208664 GN=folE PE=3 SV=1

SEQ ID NO: 7199 - protein, 223 aa, Cronobacter turicensis
  REGION 1..223: note = tr|A0A2T7B8M9|A0A2T7B8M9_9ENTR GTP cyclohydrolase 1; OS = Cronobacter turicensis OX=413502 GN=folE PE=3 SV=1
MPSLSKEAALVHEALVARGLETPLRPPVNELDNETRKRLIAGHMTEIMQLLNLDLSDDSLMETPHRIAKMYVDEIFSGLDYANFPKITVIENKMKVDEMVTVRDITLTSTCEHHFVIIDGKATVAYIPKDAVIGLSKINRIVQFFAQRPQVQERLTQQVLVALQTLLGTNNVAVSIDAVHYCVKARGIRDATSATTTTSLGGLFKSSQNTRQEFLRAVRHHNG

SEQ ID NO: 7200 - protein, 223 aa, Cronobacter turicensis; identical to SEQ ID NO: 7199
  REGION 1..223: note = tr|C9XW48|C9XW48_CROTZ GTP cyclohydrolase 1; OS = Cronobacter turicensis (strain DSM 18703 / LMG 23827 / z3032) OX=693216 GN=folE PE=3 SV=1

SEQ ID NO: 7201 - protein, 223 aa, Cronobacter universalis; identical to SEQ ID NO: 7195
  REGION 1..223: note = tr|A0A376EPV7|A0A376EPV7_9ENTR GTP cyclohydrolase 1; OS = Cronobacter universalis NCTC 9529 OX=1074000 GN=folE; PE = 3 SV=1

SEQ ID NO: 7202 - protein, 218 aa, unidentified
  source 1..218: note = Cruoricaptor ignavus
  REGION 1..218: note = tr|A0A1M6G6J0|A0A1M6G6J0_9FLAO GTP cyclohydrolase 1; OS = Cruoricaptor ignavus OX=1118202 GN=folE PE=3 SV=1
MKYSKDAALGNAIKEYLVEKGVETPVLMTDKSNTTKIRIIEKNFTNIMKTLGLDLSDDSLKDSPHRVAKMFVNEIFYGLDYGNFPKATAVENKMKYNEVVLVKNISITSTCEHHFVTIDGKCHIAYIPKEKVIGLSKINRIAKFFAKRPQIQERLSEQIYYALSFILETEDIAVIIDAEHYCVKSRGIEDISSSTTTSKIGGVFLDDSARAELIGLIK

SEQ ID NO: 7203 - protein, 219 aa, unidentified
  source 1..219: note = Cruoricaptor ignavus
  REGION 1..219: note = tr|A0A1M6A8F1|A0A1M6A8F1_9FLAO GTP cyclohydrolase 1; OS = Cruoricaptor ignavus OX=1118202 GN=folE PE=3 SV=1
MDFAENDDDIFTGKEHTPLREDAFAISPEEKMERIERHFAEIMHTLGLDMADDSLKDSPKRVAKMYVHEIFGGLLPENKPKISTFSNKYKYRQMLVEKDISVYSFCEHHFLPIIGKAHVAYISNGEVIGLSKINRIVDYYARRPQVQERLTMQVVDAMKEALGTKDVACIIEAKHLCVNCRGIKDTASSTITAELSGIFRTNPITRQEFLHYVNIGSLI

SEQ ID NO: 7204 - protein, 189 aa, Cryobacterium arcticum
  REGION 1..189: note = tr|A0A317ZK74|A0A317ZK74_9MICO GTP cyclohydrolase 1; OS = Cryobacterium arcticum OX=670052 GN=folE PE=3 SV=1
MAVDQPRIEAAVAEILAAIGEDPARPGLGSTPQRVAAAYAEFFAGLAQDPLDHLRDPVPVGDRTGELVLLRDIEFRSVCEHHLLPFLGTAHLAYLPGDHVVGLGKLAAVVETLAARPQLQERLTEEIADALQTGLAPRGVLVVLDASHGCVTTRGPRQVHSSTVTMASRGELALPVARSEIIALIGGSK

SEQ ID NO: 7205 - protein, 189 aa, Cryobacterium arcticum
  REGION 1..189: note = tr|A0A1B1BN49|A0A1B1BN49_9MICO GTP cyclohydrolase 1; OS = Cryobacterium arcticum OX=670052 GN=folE PE=3 SV=1
MGVDQPRIQAAVAEILAAIGEDPGRPGLETTPERVASAYAEFFSGLGTDPLEHLRDSVPVGERTGELVLLRDIEFRSVCEHHLLPFLGTAHLAYLPGDHIVGLGKLAAVVETIAARPQLQERLTEEIADTLEAGLAPRGILVVLDASHGCVTTRGPRQSRSSTVTMASRGELAQPVARSEIIALIGGSL

SEQ ID NO: 7206 - protein, 189 aa, Cryobacterium flavum
  REGION 1..189: note = tr|A0A4R8V8D6|A0A4R8V8D6_9MICO GTP cyclohydrolase 1; OS = Cryobacterium flavum OX=1424659 GN=folE PE=3 SV=1
MAVDRARIQAAVSEILAAIGEDPERVGLESTPRRVADAYAEFFAGLDQNPQDLLADSVPVGESTGELVLLRDIAFRSICEHHLLPFLGIAHVAYLPGDRVVGLGRLPAVVETIAARPQLQERLTEEIADALQTGLDPLGVLVVLDAVHGCVGTRGPRQSASSTVTMASRGALTDPTARAEIIALIAAGG

SEQ ID NO: 7207 - protein, 189 aa, unidentified
  source 1..189: note = Cryobacterium levicorallinum
  REGION 1..189: note = tr|A0A1I3D5Y6|A0A1I3D5Y6_9MICO GTP cyclohydrolase 1; OS = Cryobacterium levicorallinum OX=995038 GN=folE PE=3 SV=1
MAVDRARIEAAVSEILAAIGENPERVGLESTPRRVADAYAEFFAGLDQDPQELLQDFVPVGDSTGELVLLRDIAFRSICEHHLLPFLGTAHVAYLPRGRVVGLGRLPAVVETIAARPQLQERLTEEIAGALQDGLDPLGVLVVLDAVHGCVGTRGPRQSASSTVTMASRGVLTEPTARAEIIALIAAGQ

SEQ ID NO: 7208 - protein, 189 aa, Cryobacterium luteum
  REGION 1..189: note = tr|A0A1H8BPA6|A0A1H8BPA6_9MICO GTP cyclohydrolase 1; OS = Cryobacterium luteum OX=1424661 GN=folE PE=3 SV=1
MAVDRARIQAAVAEILAAIGEDPTRAGLESTPRRVADAYAEFFAGLDQNPQDHLKDFVPVDGSTGELVLLRDIAFRSVCEHHLLPFLGIAHVAYLPRGRVVGLGRLPAVVETLAARPQLQERLTEEIADALHEGLDPLGVLVVLDAVHGCVGTRGPRQTASSTVTMATRGALTDPTARAEIIALISAGG

SEQ ID NO: 7209 - protein, 191 aa, Cryobacterium mesophilum
  REGION 1..191: note = tr|A0A4R8VA12|A0A4R8VA12_9MICO GTP cyclohydrolase 1; OS = Cryobacterium mesophilum OX=433647 GN=folE PE=3 SV=1
MSIDTARIRSAVTELLEAIGEDPSRAGLVETPARVAEAYTEYFAGIGQDPLEHLAHTETIADAGHQPGELIILRDIDFRSMCEHHLLPFVGIAHIAYVPRDRVVGLGKLPRVVETLAARPQLQERLTEQVADTIERGLDALGVLVVLDAVHGCVTARGARQSRSSTVTLAARGTLTDPAARAEAVTLIGKG

SEQ ID NO: 7210 - protein, 194 aa, Cryobacterium mesophilum
  REGION 1..194: note = tr|A0A4R8VD30|A0A4R8VD30_9MICO GTP cyclohydrolase 1; OS = Cryobacterium mesophilum OX=433647 GN=folE PE=3 SV=1
MPAPLHAIDINDQQVRAENAVAELLSALGRDVTSAHLVETPRRVAASLLEMLTPRDFTMTTFPNDEGYEELVIVRDIPFHSLCEHHLLPFRGVAHIGYVPGDRIVGLSKLARVVELFSRDLQVQERLTQQISAYLTEQLAPRGVGVVLEAEHLCMTMRGAQAAGAMTTTTSFTGVLSKDNPMRRQFRLAGDLTA

SEQ ID NO: 7211 - protein, 189 aa, Cryobacterium psychrophilum
  REGION 1..189: note = tr|A0A4Y8KR97|A0A4Y8KR97_9MICO GTP cyclohydrolase 1; OS = Cryobacterium psychrophilum OX=41988 GN=folE PE=3 SV=1
MGVDKARIQAAVAEILVAIGEDPDREGLESTPTRVADAYAEFFGGIGRDPLDHLRDFLPVGPHTGELVLLRDVSFRSICEHHLLPFLGTAHIAYLPRERVVGLGRLPAVIETIAARPQLQERLTEEIAEVLQDGLDPLGVLVVLDAVHGCVGTRGPRQTRSSTVTLASRGSLSSPVARAEIISLIASGS

SEQ ID NO: 7212 - protein, 189 aa, Cryobacterium psychrotolerans
  REGION 1..189: note = tr|A0A1G9DH36|A0A1G9DH36_9MICO GTP cyclohydrolase 1; OS = Cryobacterium psychrotolerans OX=386301 GN=folE PE=3; SV = 1
MAVDKARIEAAVAEILAAIGEDPARPGLETTPRRVAEAYAELFAGLEQDPLAPLRDTIPVGPDTGELVLLRNISFRSTCEHHLLPFIGTAHLAYLPSDRVVGLGRLPAVVEILAARPQVQERLTEEIAEALQAGLRPRGILVVLDAVHGCVSARGQRQVSSSTVTMASRGELTDPVARAEIIALIGAGG

SEQ ID NO: 7213 - protein, 189 aa, Cryobacterium roopkundense
  REGION 1..189: note = tr|A0A099JJK3|A0A099JJK3_9MICO GTP cyclohydrolase 1; OS = Cryobacterium roopkundense OX=1001240 GN=folE PE=3 SV=1
MGVDRARIEAAVSEILAAIGEDTDREGLESTPKRVADAYAEFFGGLDRNPLDHLRDSIPVGPHTGELVLLRDVAFRSICEHHLLPFLGTAHVAYLPNKRVVGLGRLPAVVETISARPQLQERLTEEIAEALQEGLNPLGVLVVLDAVHGCVGTRGPRQASSSTVTMASRGTLSDPVARAEIIALIAAGS

SEQ ID NO: 7214 - protein, 189 aa, Cryobacterium sp.
  REGION 1..189: note = tr|A0A4R8Y3B4|A0A4R8Y3B4_9MICO GTP cyclohydrolase 1; OS = Cryobacterium sp. TmT2-59 OX=1259264 GN=folE PE=3 SV=1
MAVDRARIEAAVAEIIAAIGEDVARPGLEATPRRVAESYAEFFAGLDVDPVDHLRDTIPVGPHTGELVLLRDIAFRSVCEHHLLPFLGTAHLAYLPDERVVGLGKLPAVVDTLATRPQLQERLTEEIAEALHTGLRPRGVLVVLDAVHGCVTARGPRQSASSTVTMASRGELSEPAARAEIMALIGAGR

SEQ ID NO: 7215 - protein, 189 aa, Cryobacterium sp.; identical to SEQ ID NO: 7214
  REGION 1..189: note = tr|A0A5F0G8S0|A0A5F0G8S0_9MICO GTP cyclohydrolase 1; OS = Cryobacterium sp. TMT4-10 OX=1259256 GN=folE PE=3 SV=1

SEQ ID NO: 7216 - protein, 214 aa, unidentified
  source 1..214: note = Cryobacterium zongtaii
  REGION 1..214: note = tr|A0A2S3ZNE5|A0A2S3ZNE5_9MICO GTP cyclohydrolase 1; OS = Cryobacterium zongtaii OX=1259217 GN=folE PE=3 SV=1
MRTSPSAPPHANRAPQPRRPAPVGVDQPRIEAAVAEILAAIGEDPGRAGLASTPERVASAYAEFFAGLGQDPLDHLRDTVPVGDRTGELVLLRDIEFRSVCEHHLLPFLGTAHLAYLPGERIVGLGKLASVVTTLAARPQLQERLTEEIADTLETGLAPRGILVVLDASHGCVTTRGPRQTHSSTVTMASRGDLALPVARSEIIALIGGTQVGR

SEQ ID NO: 7217 - protein, 214 aa, unidentified
  source 1..214: note = Cryobacterium zongtaii
  REGION 1..214: note = tr|A0A2S3ZBZ6|A0A2S3ZBZ6_9MICO GTP cyclohydrolase 1; OS = Cryobacterium zongtaii OX=1259217 GN=folE PE=3 SV=1
MRTSPSAPPHSNRAPQPRRPAPVGVDQPRIEAAVAEILAAIGEDPGRAGLASTPERVASAYAEFFAGLGQDPLDHLRDTVPVGDRTGELVLLRDIEFRSVCEHHLLPFLGTAHLAYLPGERIVGLGKLASVVTTLAARPQLQERLTEEIADTLETGLAPRGILVVLDASHGCVTTRGPRQTHSSTVTMASRGDLALPVARSEIIALIGGTQVVR

SEQ ID NO: 7218 - protein, 223 aa, unidentified
  source 1..223: note = Cryomorphaceae bacterium
  REGION 1..223: note = tr|A0A3B8QSF4|A0A3B8QSF4_9FLAO GTP cyclohydrolase 1; OS = Cryomorphaceae bacterium OX=1898111 GN=folE PE=3 SV=1
MNPVDHHDDADHMGGAFDTPMRKDAFELSEDEKISRIETHVRGIMDALGLDLQDDSLRGTPKRVAKMYVKEAFGGLDPAKKPILNTFENNYQYGEMLVEKNIVVYSTCEHHLLPIVGRAHVAYLSKDRVIGLSKMNRIVDFYAKRPQVQERLTRQITAALQQALGTDDVAVMIDAKHLCVNARGIRDIDSSTVTAEYGGRFAKEAALKQDFLSYVQLKTEFGD

SEQ ID NO: 7219 - protein, 227 aa, unidentified
  source 1..227: note = Cryomorphaceae bacterium
  REGION 1..227: note = tr|A0A352EFV0|A0A352EFV0_9FLAO GTP cyclohydrolase 1; OS = Cryomorphaceae bacterium OX=1898111 GN=folE PE=3 SV=1
MSNHIDPILAEEIGDAHESFKAETPLKDDAFVKSDREKIDIISTHVRGILETLGMDLDDDSLKGTPLRVAKMYVTEAFAGLHPDKKPGMSTFNNTYRYNEMLVEKNIVLYSTCEHHLLPIIGRAHVAYISNGKVVGLSKMNRIVDYYAKRPQVQERLTRQVVQALQEVLETENVACVIDAKHLCVNSRGIRDIDSSTVTAEFGGVFQQEDKKAEFLDYINLKTDFGA

SEQ ID NO: 7220 - protein, 198 aa, Cryptobacterium curtum
  REGION 1..198: note = tr|C7MPL0|C7MPL0_CRYCD GTP cyclohydrolase 1; OS = Cryptobacterium curtum (strain ATCC 700683 / DSM 15641 / 12-3) OX=469378 GN=folE PE=3 SV=1
MSNDLDITGTRMDLDKVAQGVRLILEGVGEDPNREGLRKTPERVAKMYAECFAGLYADPASYFETTFDENHEEMVLVRDIPFYSMCEHHLAPFFGRAHVAYVPAEDGRICGISKLARLVDAFARRPQVQERLTSQIADTLVEQLHPQGVIVVMEAEHLCMSMRGVKKPGSKTTTSAVRGLFRRNPATRAEALSLIFQR

SEQ ID NO: 7221 - protein, 201 aa, Cryptobacterium sp.
  REGION 1..201: note = tr|R7CJT8|R7CJT8_9ACTN GTP cyclohydrolase 1; OS = Cryptobacterium sp. CAG:338 OX=1262868 GN=folE PE=3 SV=1
MSEQLTEPLKGSMDLEKIEAGVRMILEGIGEDPDREGLLKTPSRVARMYEEVFAGLYEDPAVHFETTFDEHHEELVIVHDIPFYSMCEHHLVPFFGKAHVAYIPAKSGRICGISKLARLVDAFARRPQVQERLTSQVADTLMEQLNPQGVIVIMEAEHLCMSMRGVKKPGSKTTTSAVRGIFKSSASAATRAEALSLLMGR

SEQ ID NO: 7222 - protein, 203 aa, Cryptosporangium arvum
  REGION 1..203: note = tr|A0A010YW51|A0A010YW51_9ACTN GTP cyclohydrolase 1; OS = Cryptosporangium arvum DSM 44712 OX=927661 GN=folE PE=3; SV = 1
MTPAGEGGTSAAEAVDLPRIQRAVREILTAVGEDPDREGLRETPARVARAYAEIFSGLHVDPSTVLTTVFEEDHEELVLVKDIELYSTCEHHLVPFHGVAHVGYIPGEDGRITGLSKLARLVEAYARRPQVQERLTSQIADTLMAKLEPRGVIVVVECEHLCMSMRGVRKPGARTVTSAVRGWFQRSQAARAEAMSLILGSGR

SEQ ID NO: 7223 - protein, 203 aa, Cryptosporangium aurantiacum
  REGION 1..203: note = tr|A0A1M7NCB9|A0A1M7NCB9_9ACTN GTP cyclohydrolase 1; OS = Cryptosporangium aurantiacum OX=134849 GN=folE PE=3 SV=1
MTPAGDGGTSAEHTVDLLRIQRAVREILSAVGEDPDREGLRETPARVARAYAEIFSGLHVDPSALLTTVFEEDHEEIVLVKDIELYSTCEHHLVPFHGVAHVGYIPGEEGRITGLSKLARLVEAYARRPQVQERLTSQIADTLMEKLEPRGVIVVVECEHLCMSMRGIRKPGARTVTSAVRGWFQRSQAARAEAMSLILGSGR

SEQ ID NO: 7224 - protein, 210 aa, Cryptosporangium sp.
  REGION 1..210: note = tr|A0A545AN77|A0A545AN77_9ACTN GTP cyclohydrolase 1; OS = Cryptosporangium sp. A-T 5661 OX=2593070 GN=folE PE=3; SV = 1
MLNSPDEASGIVSRGAAGRVALVGERPHHEEAAACAAGMLTALDVDLDDEHRRDTPARLARALAEMLTPPAFDPTTFDNADGYDELVVVEAIPFHSLCEHHVLPFVGTATIAYLPDQHIAGLSKLAWVVQLFARCLQVQERMTGQIADWLVENLRPRGAAVLLRAEHLCMSLRGARALGAVTTTSACRGALAEDRPRRREWLELVATLPR

SEQ ID NO: 7225 - protein, 213 aa, Cryptosporangium sp.
  REGION 1..213: note = tr|A0A545AGY4|A0A545AGY4_9ACTN GTP cyclohydrolase 1; OS = Cryptosporangium sp. A-T 5661 OX=2593070 GN=folE PE=3; SV = 1
MSTEAVASDALTPAGEPGKSAAEAVDLPRIQRAVREILIAVGEDPDRDGLKQTPARVARAYAEIFSGLHVDPAEVLTTVFEEDHEELVLVKDIELYSTCEHHLVPFHGVAHVGYIPGEDGRITGLSKLARLVEAYARRPQVQERLTSQIADTLMTQLEPRGVIVVVECEHLCMSMRGIRKPGARTVTSAVRGWFQRSQAARAEAMSLILGSGR

SEQ ID NO: 7226 - protein, 207 aa, unidentified
  source 1..207: note = Culturomica sp.
  REGION 1..207: note = tr|A0A356DKX9|A0A356DKX9_9BACT GTP cyclohydrolase 1; OS = Culturomica sp. OX=1926652 GN=folE PE=3 SV=1
MDQEITNEAEFYQKVEYFNTEKTEKLSYHYREILKLLGEDPEREGLQKTPLRVAKAMQFMTQGYYQNPEKILSSALFKEDYQQMVIVKDIEIYSLCEHHMLPFYGRVHVAYIPNGYVTGLSKIARVVETYARRLQVQERLTHEIKNCIQNTLHPLGVAVVIEAKHMCMAIRGVQKQNSVTTTSDFSGAFEKLATREEFIRLISSNLH

SEQ ID NO: 7227 - protein, 186 aa, unidentified
  source 1..186: note = Cuneatibacter caecimuris
  REGION 1..186: note = tr|A0A4Q7PNZ5|A0A4Q7PNZ5_9FIRM GTP cyclohydrolase 1; OS = Cuneatibacter caecimuris OX=1796618 GN=folE PE=3 SV=1
MVNHEKIETAVRMLLEGIGEDPEREGLKDTPARIARMYEEIFGGMEEDAGAYLSRTFTAENNEIVLEKDITLFSTCEHHLMPFYGKAHVAYIPDGMVVGLSKLARTVEAYARRLQLQERLTAQIADALMEYLKPRGAMVVIEAEHMCMTMRGVRKPGAKTLTYVCRGAFEENQALCDRVFRMIGRD

SEQ ID NO: 7228 - protein, 267 aa, unidentified
  source 1..267: note = Cupriavidus alkaliphilus
  REGION 1..267: note = tr|A0A329B022|A0A329B022_9BURK GTP cyclohydrolase FolE2 OS=Cupriavidus alkaliphilus OX=942866 GN=folE2 PE=3; SV = 1
MNDINPAFIMPDVQSSPDTRQIPIQRVGVKGVRYPVTLKTPAGIVPTVGTFNLDVHLPAEQKGTHMSRFVALLEEERAPLELASFRLMLDKMLEKLEAEAGRIEVTFPYFISKIAPVSGVESLLDYEVTLTGEVRNGATRVFLKALVPVTSLCPCSKKISQYGAHNQRSHITMNVELAGELPVEALVRMAEEEASCELWGLLKRPDEKFVTERAYENPKFVEDLVRDIAMRLNADERIVAYVLEAENFESIHNHSAYAVIERDKRVA

SEQ ID NO: 7229 - protein, 267 aa, unidentified
  source 1..267: note = Cupriavidus alkaliphilus
  REGION 1..267: note = tr|A0A2W7QJ52|A0A2W7QJ52_9BURK GTP cyclohydrolase FolE2 OS=Cupriavidus alkaliphilus OX=942866 GN=folE2 PE=3; SV = 1
MNDINPAFVMPDVQSSPDTRQIPIQRVGVKGVRYPVTLKTPAGIVPTVGTFNLDVHLPAEQKGTHMSRFVALLEEERAPLELASFRLMLDKMLEKLEAEAGRIEVTFPYFISKIAPVSGVESLLDYEVTLTGEVRNGATRVFLKALVPVTSLCPCSKKISQYGAHNQRSHITMNVELAGELPVEALVRMAEEEASCELWGLLKRPDEKFVTERAYENPKFVEDLVRDIAMRLNADERIVAYVLEAENFESIHNHSAYAVIERDKRVG

SEQ ID NO: 7230 - protein, 241 aa, Cupriavidus basilensis
  REGION 1..241: note = tr|A0A0C4YF64|A0A0C4YF64_9BURK GTP cyclohydrolase I type 1 OS=Cupriavidus basilensis OX=68895 GN=RR42_s2841; PE = 4 SV=1
MESDHQAPDPGLDEALGSVSTRIRSRLQAARERFHANDNIAAYVEPGELDELLDEVQSRMEEVLRSLVIDIDHDHNTRETARRVAKMYLKEIFAGRYVNQPNVTEFPNAERINELMIVGPLRVRSACSHHLCPIIGKLWVGVMPNQHSNLIGLSKYARLAEWIMCRPQIQEEAVTQVADLLQEKMSPDGLAIVMEAEHFCMHWRGVRDTDAKMTNSVMRGSFLKDDSLRREFLTLLNRTRD

SEQ ID NO: 7231 - protein, 268 aa, Cupriavidus basilensis
  REGION 1..268: note = tr|H1S6E4|H1S6E4_9BURK GTP cyclohydrolase FolE2; OS = Cupriavidus basilensis OR16 OX=1127483 GN=folE2 PE=3; SV = 1
MNDINPAFVMPDVQSSLDTRQIPIQRVGVKGVRYPLSLKTPAGVLATVGTFNLDVHLPADQKGTHMSRFVALLEDEREPLELATFRTLLDKMLVKLEAEAGRIEVTFPYFINKIAPVSGVQSLMDYEVTLIGEVRNGTTKVFLKALVPVTSLCPCSKKISQYGAHNQRSHITMNVELAGDLPVEALVRMAEEEASCELWGLLKRPDEKFVTERAYENPKFVEDLVRDIAMRLNADERIVAYVLEAENFESIHNHSAYAVIERDKRTAQ

SEQ ID NO: 7232 - protein, 268 aa, Cupriavidus campinensis
  REGION 1..268: note = tr|A0A556UR39|A0A556UR39_9BURK GTP cyclohydrolase FolE2 OS=Cupriavidus campinensis OX=151783 GN=folE2 PE=3; SV = 1
MNDINPAFVMPDVQSSVDTRQIVIQRVGVKGVRYPLTLKTPAGVVATVGTFDLDVRLPADQKGTHMSRFVALLEDYRAPLDLAAFRTLLDDMLVRLEADAGRIEVTFPYFISKTAPVSGVESLMDYAVTLTGEVRDGQSRLWLTALVPVTSLCPCSKKISQYGAHNQRSHITMRVELAGDLPVEALVRMAEEEASCELWGLLKRPDEKFVTERAYENPKFVEDLVRDIAMRLNADARIVAYTLEAENFESIHNHSAYAVIEHDKRQPA

SEQ ID NO: 7233 - protein, 267 aa, Cupriavidus gilardii
  REGION 1..267: note = tr|A0A0M4LEM2|A0A0M4LEM2_9BURK GTP cyclohydrolase FolE2 OS=Cupriavidus gilardii CR3 OX=1267562 GN=folE2 PE=3; SV = 1
MNDINPAFVMPDVQSSLDTRQIPIQRVGVRGVRYPLTMRTPGGVHPTVGTFNLDVHLPADQKGTHMSRFVALLEDEREPLDLAAFRALVGKMLQRLEAQAGRIEVTFPYFINKIAPVSGVASLMDYEVTLIGEARDGVTKVWLKALVPVTSLCPCSKKISQYGAHNQRSHITMCVELAADLPVETLVRMAEEEASCELWGLLKRPDEKYVTERAYENPKFVEDLVRDIAMRLNADERIVAYVLEAENFESIHNHSAYAVIERDKRLS

SEQ ID NO: 7234 - protein, 271 aa, Cupriavidus gilardii
  REGION 1..271: note = tr|A0A5A8EWL4|A0A5A8EWL4_9BURK GTP cyclohydrolase FolE2 OS=Cupriavidus gilardii OX=82541 GN=folE2 PE=3 SV=1
MNDINPAFVMPDVQSSLDTRQIPIQRVGVRGVRYPLTMRTAQGVHPTVGTFNLDVHLPADQKGTHMSRFVALLEDEREPLDLASFPALLDKMLQRLEAQAGRIEVTFPYFINKIAPVSGVASLMDYEVTLIGEARDGVTRVWLKALVPVTSLCPCSKKISQYGAHNQRSHITMSVELAADLPIEALVRMAEEEASCELWGLLKRPDEKYVTERAYENPKFVEDLVRDIAMRLNADERIVAYVLEAENFESIHNHSAYAVIERDKRVSQLAG

SEQ ID NO: 7235 - protein, 267 aa, Cupriavidus metallidurans
  REGION 1..267: note = sp|Q1LK35|GCH42_CUPMC GTP cyclohydrolase FolE2 2; OS = Cupriavidus metallidurans (strain ATCC 43123 / DSM 2839 / NBRC 102507 / CH34) OX=266264 GN=folE2-2 PE=3 SV=1
MNDINPAFVMPDVQSSVDTRQIVIQRVGVKGVRYPLTLKTPAGAVGTVGTFNMDVRLPADQKGTHMSRFVALLEENRAPLDLAAFRALVDDMLVRLEADAGRIEVSFPYFITKTAPVSGVQSLLDYEVTLVAEARDGQTRMFMTALVPVTSLCPCSKKISQYGAHNQRSHITMRVELAGDLDVEALVRMAEEEASCELWGLLKRPDEKFVTERAYENPKFVEDLVRDIAMRLNADDRIVAYTLEAENFESIHNHSAYAVIEHDKRHQ

SEQ ID NO: 7236 - protein, 267 aa, Cupriavidus metallidurans; identical to SEQ ID NO: 7235
  REGION 1..267: note = tr|A0A132HKK3|A0A132HKK3_9BURK GTP cyclohydrolase FolE2 OS=Cupriavidus metallidurans OX=119219 GN=folE2_1; PE = 3 SV=1

SEQ ID NO: 7237 - protein, 267 aa, unidentified
  source 1..267: note = Cupriavidus nantongensis
  REGION 1..267: note = tr|A0A142JMN7|A0A142JMN7_9BURK GTP cyclohydrolase FolE2 OS=Cupriavidus nantongensis OX=1796606 GN=folE2 PE=3; SV = 1
MNDINPAFVMPDVQSSPDTRQIPIQRVGVKGVRYPVTLKTPAGVVPTVGTFNLDVHLPADQKGTHMSRFVALLEEERAPLELASFRLMLDKMLEKLEAEAGRIEVTFPYFISKIAPVSGVESLLDYEVTLTGEVRNGATRVFLKALVPVTSLCPCSKKISQYGAHNQRSHITMNVELAGELPVEALVRMAEEEASCELWGLLKRPDEKFVTERAYENPKFVEDLVRDIAMRLNADERIVAYVLEAENFESIHNHSAYAVIERDKRVG

SEQ ID NO: 7238 - protein, 267 aa, Cupriavidus necator
  REGION 1..267: note = sp|Q0K861|GCH4_CUPNH GTP cyclohydrolase FolE2; OS = Cupriavidus necator (strain ATCC 17699 / H16 / DSM 428 / Stanier 337) OX=381666 GN=folE2 PE=3 SV=1
MNDINPAFVMPDVQSSPDTRQIPIQRVGVKGVRYPVTLKTPAGIMPSVGTFNLDVHLPADQKGTHMSRFVALLEEERAPLELSSFRLMLDKMLEKLEAEAGRIEVTFPYFISKTAPVSGVESLLDYEVTLTGEVRDGAARVFLKALVPVTSLCPCSKKISQYGAHNQRSHITMNVELAGELPVEALVRMAEEEASCELWGLLKRPDEKFVTERAYENPKFVEDLVRDIAMRLNADDRIVAYVLEAENFESIHNHSAYAVIERDKRVD

SEQ ID NO: 7239 - protein, 267 aa, Cupriavidus necator
  REGION 1..267: note = tr|A0A1K0JE45|A0A1K0JE45_CUPNE GTP cyclohydrolase FolE2 OS=Cupriavidus necator OX=106590 GN=folE PE=3 SV=1
MNDINPAFIMPDVQSSPDTRQIPIQRVGVKGVRYPVTLKTPTGIVPTVGTFNLDVHLPADQKGTHMSRFVALLEEERAPLELASFRLMLDKMLEKLEAEAGRIEVAFPYFISKTAPVSGVESLLDYEVTLTGEVRNGAARVFLKALVPVTSLCPCSKKISQYGAHNQRSHITMDVELAGELPVEALVRMAEEEASCELWGLLKRPDEKFVTERAYENPKFVEDLVRDIAMRLNADDRIVAYVLEAENFESIHNHSAYAVIERDKRVD

SEQ ID NO: 7240 - protein, 249 aa, Cupriavidus oxalaticus
  REGION 1..249: note = tr|A0A375FT78|A0A375FT78_9BURK GTP cyclohydrolase I; OS = Cupriavidus oxalaticus OX=96344 GN=CO2235_MP60216 PE=4; SV = 1
MNSKDAAHRPHDPHPADAAAGDPASSVSERIRARLQAAQERFHANDNIARYIEPGELEELQAEVQSRIEGVLRALVIDVDNDHNTQETARRVAKMYLKEIFAGRYAKSPAVTEFPNVGQLNELMIVGPLRVRSACSHHLCPIIGKLWVGVMPNQHSNLIGLSKYARLAEWIMCRPQIQEEAVAQVADLLQEKMNPDGLAIVMEAEHFCMHWRGVRDTDAKMTNSVMRGSFLKDDSLRREFLTLLNNNRG

SEQ ID NO: 7241 - protein, 267 aa, Cupriavidus oxalaticus
  REGION 1..267: note = tr|A0A4P7LK71|A0A4P7LK71_9BURK GTP cyclohydrolase FolE2 OS=Cupriavidus oxalaticus OX=96344 GN=folE2 PE=3 SV=1
MNDINPAFVMPDVQSSLDTRQIPIQRVGVKGVRYPVTLKTPAGIMPSVGTFNLDVHLPADQKGTHMSRFVALLEEERAPLELASFRLLLGKMLEKLEAEAGRIEVTFPYFISKIAPVSGVESLLDYEVTLTGEVRNGQTRVFLKAMVPVTSLCPCSKKISQYGAHNQRSHITMDVELAAELPVEALVRMAEEEASCELWGLLKRPDEKFVTERAYENPKFVEDLVRDIAMRLNADERIVAYVLEAENFESIHNHSAYAVIERDKRVN

SEQ ID NO: 7242 - protein, 267 aa, Cupriavidus pauculus
  REGION 1..267: note = tr|A0A2N5CHF6|A0A2N5CHF6_9BURK GTP cyclohydrolase FolE2 OS=Cupriavidus pauculus OX=82633 GN=folE2 PE=3 SV=1
MNDINPAFVMPDVQSSVDTRQIVIQRVGVKGVRYPLTLKTPAGDIGTVGTFNLDVRLPADQKGTHMSRFVALLEDNRAPLDLAGFRALLDDMLVRLEADAGRIEVSFPYFISKTAPVSGVQSLLDYEVTLAGEKRDGQTRLFLTALVPVTSLCPCSKKISQYGAHNQRSHITMQVELAGDLDVETLVRMAEEEASCELWGLLKRPDEKFVTERAYENPKFVEDLVRDIAMRLNADDRIVAYTLEAENFESIHNHSAYAVIERDKRVQ

SEQ ID NO: 7243 - protein, 267 aa, Cupriavidus pauculus
  REGION 1..267: note = tr|A0A3G8GZS1|A0A3G8GZS1_9BURK GTP cyclohydrolase FolE2 OS=Cupriavidus pauculus OX=82633 GN=folE2 PE=3 SV=1
MNDIHPAFVMPDVQSSVDTRQIVIQRVGVKGVRYPLTLKTPAGQVGTVGTFNLDVRLPADQKGTHMSRFVALLEDNRAPLDLAGFRALLDDMLVRLEADAGRIEVTFPYFISKIAPVSGVQSLLDYEVTLAGERRDGQTRLFLTALVPVTSLCPCSKKISQYGAHNQRSHITMQVELGGDLDVETLVRMAEEEASCELWGLLKRPDEKFVTERAYENPKFVEDLVRDIAMRLNADDRIVAYTLEAENFESIHNHSAYAVIERDKRVG

SEQ ID NO: 7244 - protein, 270 aa, Cupriavidus pinatubonensis
  REGION 1..270: note = sp|Q474C1|GCH4_CUPPJ GTP cyclohydrolase FolE2; OS = Cupriavidus pinatubonensis (strain JMP 134 / LMG 1197); OX = 264198 GN=folE2 PE=3 SV=1
MNDINPAFVMPDVQSSRDTRQIPIQRVGVKGVRYPVSLKTPAGVVPSVGTFNLDVHLPAEVKGTHMSRFVALLEEERAPLELASFRVLLDKMLEKLEAEAGRIEVTFPYFISKIAPVSGVESLMDYEVTLTGEIRNGVTRVFLKALVPVTSLCPCSKKISQYGAHNQRSHITMNVELAGELPVEALVRMAEEEASCELWGLLKRPDEKFVTERAYENPKFVEDLVRDIAMRLNADERIVAYVLEAENFESIHNHSAYAVIERDKRLEPTA

SEQ ID NO: 7245 - protein, 247 aa, Cupriavidus pinatubonensis
  REGION 1..247: note = tr|Q46V05|Q46V05_CUPPJ GTP cyclohydrolase I; OS = Cupriavidus pinatubonensis (strain JMP 134 / LMG 1197); OX = 264198 GN=Reut_B3671 PE=4 SV=1
MTDKDAAHHGAKHKTSDAAPGESSVSDRIRSRLLAARERFHANDNIARYIEPGELDALQEEVQARLEEVLRALVIDVDQDHNTRETARRVAKMYLKEIFAGRYAKAPAVTEFPNVEQLSELMIVGPLRVRSACSHHLCPIIGKLWVGVMPNQHSNLIGLSKYARLAEWIMCRPQIQEEAVAQVADLLQEKMNPDGLAIVMEAEHFCMHWRGVRDTDAKMTNSVMRGSFLKDGSLRREFLALLNRNGK

SEQ ID NO: 7246 - protein, 267 aa, unidentified
  source 1..267: note = Cupriavidus plantarum
  REGION 1..267: note = tr|A0A316F3S6|A0A316F3S6_9BURK GTP cyclohydrolase FolE2 OS=Cupriavidus plantarum OX=942865 GN=folE2 PE=3 SV=1
MNDINPAFVMPDVQSSLDTRQIPIERVGVRGVRYPLSVKTPNGVVATVGTFDLDVRLPADQKGTHMSRFVALLEEGQAPLDLAAFRAMMDTMLARLEADAGRISVRFPYFISKTAPVSGVQSLMDYEVTLTAEARDGQTRVFLTALVPVTSLCPCSKKISQYGAHNQRSHITMKVELAAELPVEALVRMAEEEASCELWGLLKRPDEKYVTERAYENPKFVEDLVRDIAMRLNADDRIVAYTLEAENFESIHNHSAYALIERDKRGG

SEQ ID NO: 7247 - protein, 267 aa, Cupriavidus sp.
  REGION 1..267: note = tr|A0A388RRU1|A0A388RRU1_9BURK GTP cyclohydrolase FolE2 OS=Cupriavidus sp. P-10 OX=2027911 GN=folE2 PE=3 SV=1
MNDINPAFVMPDVQSSVDTRQIPIQRVGVKGVRYPVTLKTPTGIVPSVGTFNLDVHLPADQKGTHMSRFVALLEEERAPLELASFRLLLDKMLEKLEAEAGRIEVTFPYFISKIAPVSGVQSLLDYEVTLTGEVRNGRTRVFLKAMVPVTSLCPCSKKISQYGAHNQRSHITMDVELADELPVEALVRMAEEEASCELWGLLKRPDEKFVTERAYENPKFVEDLVRDIAMRLNADDRIAAYVLEAENFESIHNHSAYAVIERDKRVN

SEQ ID NO: 7248 - protein, 267 aa, Cupriavidus sp.; identical to SEQ ID NO: 7235
  REGION 1..267: note = tr|L2EBD1|L2EBD1_9BURK GTP cyclohydrolase FolE2; OS = Cupriavidus sp. HMR-1 OX=1249621 GN=folE2 PE=3 SV=1

SEQ ID NO: 7249 - protein, 267 aa, Cupriavidus taiwanensis
  REGION 1..267: note = tr|A0A375F316|A0A375F316_9BURK GTP cyclohydrolase FolE2 OS=Cupriavidus taiwanensis OX=164546 GN=folE2 PE=3; SV = 1
MNDINPAFIMPDVQSSPDTRQIPIQRVGVKGVRYPVTLKTPTGIVPTVGTFNLDVHLPADQKGTHMSRFVALLEEERAPLELASFRLMLDKMLEKLEAEAGRIEVTFPYFISKIAPVSGVESLLDYEVTLTGEVRNGATRVFLKALVPVTSLCPCSKKISQYGAHNQRSHITMNVELAGELPVEALVRMAEEEASCELWGLLKRPDEKFVTERAYENPKFVEDLVRDIAMRLNADERIVAYVLEAENFESIHNHSAYAVIERDKRVD

SEQ ID NO: 7250 - protein, 248 aa, Cupriavidus taiwanensis
  REGION 1..248: note = tr|A0A375DKW3|A0A375DKW3_9BURK GTP cyclohydrolase I; OS = Cupriavidus taiwanensis OX=164546 GN=CBM2597_B10227; PE = 4 SV=1
MTSKDAAHRAQDSNAGDSASHPAGSVSARIRARLEAAQERFHANDNIARYIEPGEMEQLQAEVQARLQDVLRALVIDVDNDHNTQETARRVAKMYLKEIFAGRYAKAPPVTEFPNVGQLNELMIVGPLRVRSACSHHLCPIIGKLWIGVMPNQHSNLIGLSKYARLAEWIMCRPQIQEEAVAQVADLLQEKMSPDGLAIVMEAEHFCMHWRGVRDTDAKMTNSVMRGSFLKDDSLRREFLTLLNHNRG

SEQ ID NO: 7251 - protein, 207 aa, Curtobacterium citreum
  REGION 1..207: note = tr|A0A542FF61|A0A542FF61_9MICO GTP cyclohydrolase 1; OS = Curtobacterium citreum OX=2036 GN=folE PE=3 SV=1
MNERLDRARIEAAVRELLLAVGDDPDRPELERTPARVADSYAEFFAGIGVDATAIALDGAVHSEDGERGQLVVVREVRFRSMCEHHLLPFIGVAHLAYAPGEQLIGLGTLSRVLDAVASRPQLQERLGEQVAAAVAEGLDAAGVLVVLDARHQCVTARGERQSGSSTVTVAATGSLAEAAGRAEAIALIGAGLGAAAGTGNDHGADA

SEQ ID NO: 7252 - protein, 203 aa, Curtobacterium citreum
  REGION 1..203: note = tr|A0A1C7C3Q9|A0A1C7C3Q9_9MICO GTP cyclohydrolase 1; OS = Curtobacterium citreum OX=2036 GN=folE PE=3 SV=1
MDRARIEAAVRELLLAVGDDPDRPELERTPARVADSYAEFFAGIGVDATAIARDGAVHSEDGERGQLVVVREVRFRSMCEHHLLPFIGVAHLAYAPGEQLIGLGTLSRVLDAVASRPQLQERLGEQVAAAVAEGLDAAGVLVVLDARHQCVTARGERQSGSSTVTVAATGSLAEAAGRAEAIALIGAGVGAAMAAGTDHGADA

SEQ ID NO: 7253 - protein, 199 aa, Curtobacterium flaccumfaciens
  REGION 1..199: note = tr|A0A4R6DKI6|A0A4R6DKI6_9MICO GTP cyclohydrolase 1; OS = Curtobacterium flaccumfaciens OX=2035 GN=folE PE=3 SV=1
MDRARVEAAVRELLLGIGEDPDRPELVRTPSRVADAYAEFFAGIGTDAVAIARNGTVHAEDGDRGQLVIVRDVRFRSVCEHHLLPFTGVAHMAYAPGDRLIGLGTLSRVLDAVASRPQLQERLGEQVAATIAEGLGAVGVLVVLDAQHQCVTTRGERQSASTTVTVAATGTLSDAAGRAEAIALIGAGVRSGADHEAGA

SEQ ID NO: 7254 - protein, 203 aa, Curtobacterium flaccumfaciens
  REGION 1..203: note = tr|A0A022LVC6|A0A022LVC6_9MICO GTP cyclohydrolase 1; OS = Curtobacterium flaccumfaciens UCD-AKU OX=1292022; GN = folE PE=3 SV=1
MDRARVEAAVRELLLAIGEDPDRPELTRTPARVADSYSEFFSGIGTDAVAIARDGTVHAEDGERGRLVIVRDVKFRSVCEHHLLPFLGVAHLAYAPGERLIGLGTLARVLDAVASRPQLQERLGEQVTATIAEGLGAEGVLVVLDAQHQCVTTRGERQTGSTTVTVAATGSLADTAGRAEAIALIGAGRRTDAAGAATAEAGA

SEQ ID NO: 7255 - protein, 209 aa, Curtobacterium luteum
  REGION 1..209: note = tr|A0A175RRT7|A0A175RRT7_9MICO GTP cyclohydrolase 1; OS = Curtobacterium luteum OX=33881 GN=folE PE=3 SV=1
MDRARIEGAVRELLLAVGDDPDRPELARTPGRVAASYAEFFSGIGTDAVAIARDGVVHAEDGDRGQLVIVRDVKFRSMCEHHLLPFIGVAHLAYAPGDQLIGLGTLSRVLDAVASRPQLQERLGEQVAATVAEGLDATGVLVVLDAQHQCVTTRGERQTGSTTVTVAATGTLATPAGRAEAIALIGAGVGTAGGPTAGADHRADHGADA

SEQ ID NO: 7256 - protein, 205 aa, unidentified
  source 1..205: note = Curtobacterium oceanosedimentum
  REGION 1..205: note = tr|A0A147DNI0|A0A147DNI0_9MICO GTP cyclohydrolase 1; OS = Curtobacterium oceanosedimentum OX=465820 GN=folE PE=3; SV = 1
MDRARVEAAVRELLLAVGDDPDRPELERTPARVADSYAEFFAGMGVDATAIARDGAVHSEDGERGQLVVVRDVRFRSMCEHHLLPFIGVAHLAYAPGEQLIGLGTLSRVLDAVASRPQLQERLGEQVAAAVAEGLDADGVLVVLDATHQCVTARGERQSGSSTVTVAATGSLADAAGRAEAIALIGAGAGAGAVTGAGPDHGADA

SEQ ID NO: 7257 - protein, 221 aa, unidentified
  source 1..221: note = [Curtobacterium] plantarum
  REGION 1..221: note = tr|A0A3M7U1U7|A0A3M7U1U7_9GAMM GTP cyclohydrolase 1; OS = [Curtobacterium] plantarum OX=221276 GN=folE PE=3 SV=1
MSTLSQEAALVHEALLARGLETPLRAPTRDIDDNTRKSLIAGHMTEIMQLLNLDLEDDSLMETPHRIAKMYVDEVFSGLDYANFPKITVIENKMKVDEMVTVRDITLTSTCEHHFVIIDGKATVAYIPKEKVIGLSKINRIVQFFAQRPQVQERLTQQVLVALQTLLGTNNVAVSIDAVHYCVKARGVKDATSATTTTSLGGLFKSSQNTRQEFLRAVRHS

SEQ ID NO: 7258 - protein, 207 aa, Curtobacterium sp.
  REGION 1..207: note = tr|A0A3N1YDJ6|A0A3N1YDJ6_9MICO GTP cyclohydrolase 1; OS = Curtobacterium sp. JUb34 OX=2485109 GN=folE PE=3 SV=1
MTSRMDRARVEAAVRELLLGIGEDPDRPELERTPARVADSYAEFFSGIGTDAVAIARDGTVHAEDGERGRLVIVRDVKFRSVCEHHLLPFLGVAHLAYAPGDRLIGLGTLARVLDAVASRPQLQERLGEQVAATIAEGLGAEGVLVVLDAQHQCVTTRGERQTGSTTVTVAATGSLADAAGRSEAIALIGAGRVTDTTHVASDGADA

SEQ ID NO: 7259 - protein, 197 aa, Curtobacterium sp.
  REGION 1..197: note = tr|A0A4R8BMW9|A0A4R8BMW9_9MICO GTP cyclohydrolase 1; OS = Curtobacterium sp. PhB190 OX=2485201 GN=folE PE=3 SV=1
MDRARVEAAVRELLLGIGEDPDRPELERTPARVADSYAEFFAGIGTDAVAIARDGTVHAEDGERGRLVIVRDVKFRSVCEHHLLPFLGVAHLAYAPGDRLIGLGTLSRVLDAVASRPQLQERLGEQVAATIAEGLGAEGVLVVLDAQHQCVTTRGERQTGSTTVTVAANGSLADAAGRAEAIALIGAGRVPDPEADA

SEQ ID NO: 7260 - protein, 233 aa, unidentified
  source 1..233: note = Curvibacter putative
  REGION 1..233: note = tr|C9Y8H6|C9Y8H6_9BURK GTP cyclohydrolase 1; OS = Curvibacter putative symbiont of Hydra magnipapillata; OX = 667019 GN=folE PE=4 SV=1
MSSSDTFEGTSVSVKIRERLKASRKRFHANDNIAEYIQPGELETLLDEVEVQMRGVLNSLVIDIENDHNTDNTARRVAKMYLNEVFRGRYVPAPTITEFPNVGHLNELMIVGPITVRSACSHHFCPVIGKIWIGVMPNEHTNVIGLSKYARLAEWIMGRPQIQEEAVVQLADLIQEKTQPDGLAIVMEASHYCMAWRGVKDMDSKMINSVMRGVFLKDPNLRREFLSLIPQKG

SEQ ID NO: 7261 - protein, 251 aa, Curvibacter sp.
  REGION 1..251: note = tr|A0A1Y0NDD2|A0A1Y0NDD2_9BURK Putative GTP cyclohydrolase 1 type 2 OS=Curvibacter sp. AEP1-3; OX = 1844971 GN=AEP_03436 PE=4 SV=1
MIERHALLQSLQTLLQPERFKDYCHNGLQVEGRTDIRHLVSGVTASEALIQAAIDCGADAILVHHGLFWKGFDGQVSGWMRKRLSLLLSHDINLFAYHLPLDAHPVLGNNTQLGRLLGLQSHASFGEQSLGLLGSSSSGAWESDAALAQHVEAVLDRPVTLVSGRRGPVSLVGWCTGGAQGYFEPAIAAGAQVFITGEISEPQAHYARECGVSYIACGHHASERYGAPAVASKMAADFGIRHTFIDIPNPA

SEQ ID NO: 7262 - protein, 239 aa, Curvibacter sp.
  REGION 1..239: note = tr|A0A1Y0NFU1|A0A1Y0NFU1_9BURK GTP cyclohydrolase 1; OS = Curvibacter sp. AEP1-3 OX=1844971 GN=folE PE=4 SV=1
MKKKSTMSSSDTFEGTPVSVKIRERLKASRKRFHANDNIAEYIQPGELETLLDEVEVQMRGVLNSLVIDIENDHNTDNTARRVAKMYLNEVFRGRYVPAPTITEFPNVGHLNELMIVGPITVRSACSHHFCPVIGKIWIGVMPNEHTNVIGLSKYARLAEWIMGRPQIQEEAVVQLADLIQEKTQPDGLAIVMEASHYCMAWRGVKDMDSKMINSVMRGVFLKDPNLRREFLSLIPQKG

SEQ ID NO: 7263 - protein, 215 aa, unidentified
  source 1..215: note = Cuspidothrix issatschenkoi
  REGION 1..215: note = tr|A0A2S6CX13|A0A2S6CX13_9CYAN GTP cyclohydrolase 1; OS = Cuspidothrix issatschenkoi CHARLIE-1 OX=2052836 GN=folE; PE = 3 SV=1
MTLSIRPELTAADIISTFSNQQQPTVTEADMMQAVRTLLIGLGENPDREGLKDTPKRVVKALKFLTNGYDQSVDELLNGAVFTEDANEMVLVRDIDIFSSCEHHILPIIGRAHVAYIPNGKVIGLSKIARICEMYARRLQVQERLTLQIANALQGLLKPQGVAVVIEATHMCMVMRGVQKPGSWTVTSAMRGVFSEDARTREEFMNLIRHNANFK

SEQ ID NO: 7264 - protein, 234 aa, unidentified
  source 1..234: note = Cuspidothrix issatschenkoi
  REGION 1..234: note = tr|A0A2S6CYP0|A0A2S6CYP0_9CYAN GTP cyclohydrolase 1; OS = Cuspidothrix issatschenkoi CHARLIE-1 OX=2052836 GN=folE; PE = 3 SV=1
MTIASPNGSNLSQSPLIPDLAEVIVRPDRNTHDGKVAEIHPPSDETMDEMMAAVRTMLVGVGEDPEREGLLKTPKRVAKAMKFLTSGYNESLEDLINGAIFDEGHDEMVLVRDINFFSLCEHHMLPFMGRAHVAYIPNQKVVGLSKLARIVEMYSRRLQVQERLTRQIAEALQTVLEPKGVAVVMEASHMCMVMRGVQKPGSWTVTSSMVGVFQEEHKTREEFFNLIRHQASFF

SEQ ID NO: 7265 - protein, 194 aa, unidentified
  source 1..194: note = Cutibacterium acnes
  REGION 1..194: note = tr|D1Y9P6|D1Y9P6_CUTAC GTP cyclohydrolase 1; OS = Cutibacterium acnes J139 OX=679194 GN=folE PE=3 SV=1
MSSMKLSVDRERAAAAIREFLLAVGEDPDREGLRDTPMRVAQAAEELFGGLSQDPGELLATTFDISHDEMVLVRDIELQSMCEHHLLPFIGVAHVGYIPARDGRVTGLSKIARLVEVYARRPQVQERLTTQVADALVEHLDARGVIVVVEAEHMCMTTRGVRKPGARTVTSAVRGILRNPATRAEAMGLITAGR

SEQ ID NO: 7266 - protein, 79 aa, unidentified
  source 1..79: note = Cutibacterium acnes
  REGION 1..79: note = tr|W4TG62|W4TG62_CUTAC GTP cyclohydrolase 1; OS = Cutibacterium acnes JCM 18909 OX=1302241; GN = JCM18909_1036 PE=3 SV=1
MLATTFDISHDEMVLVRDIELQSMCEHHLLPFIGVAHVGYIPARDGRVTGLSKIARLVEVYARRPQVQERLTTQVADAW

SEQ ID NO: 7267 - protein, 191 aa, unidentified
  source 1..191: note = Cutibacterium avidum
  REGION 1..191: note = tr|A0A1B3PZ99|A0A1B3PZ99_9ACTN GTP cyclohydrolase 1; OS = Cutibacterium avidum OX=33010 GN=folE PE=3 SV=1
MPELPVDLRRARAAVREFLLAIGEDPDREGLRETPERVARAAAEIFRGLAQDPAEILSKTFDISHDELVLVRDIEVQSCCEHHLLPFTGVAHVGYIPAKDGRVTGLSKIARLVDVYSRRPQVQERLTTQVADAMVEYLHARGVIVVIECEHMCMTMRGVRKPGSRTVTSAVRGILRDSATRAEAMGLITGR

SEQ ID NO: 7268 - protein, 195 aa, unidentified
  source 1..195: note = Cutibacterium avidum
  REGION 1..195: note = tr|G4CXS2|G4CXS2_9ACTN GTP cyclohydrolase 1; OS = Cutibacterium avidum ATCC 25577 OX=997355 GN=folE PE=3; SV = 1
MSESMPELPVDLSRARAAVREFLLAIGEDPDREGLRETPERVARAAAEIFRGLAQDPAEILSKTFDISHDELVLVRDIEVQSCCEHHLLPFTGVAHVGYIPAKDGRVTGLSKIARLVDVYSRRPQVQERLTTQVADAMVEYLHARGVIVVIECEHMCMTMRGVRKPGSRTVTSAVRGILRDPATRAEAMGLITGR

SEQ ID NO: 7269 - protein, 196 aa, unidentified
  source 1..196: note = Cutibacterium granulosum
  REGION 1..196: note = tr|A0A239W3U3|A0A239W3U3_9ACTN GTP cyclohydrolase 1; OS = Cutibacterium granulosum OX=33011 GN=folE PE=3 SV=1
MSESTPEFRVDVVRAQAAVREFLLAIGEDPDRDGLRETPTRVAKAAGELFSGMGQDPAEILATTFDMSHDEMVLVRDIEVHSFCEHHLLPFIGVAHVAYIPARNGRVTGLSKIARLVDAYAHRPQVQERLTTQVADAMMACLDARGVMAVVECEHMCMTLRGIRKSGARTITSAVRGIMKDPATRAEAMGLITAGR

SEQ ID NO: 7270 - protein, 196 aa, unidentified
  source 1..196: note = Cutibacterium granulosum
  REGION 1..196: note = tr|U1EYR2|U1EYR2_9ACTN GTP cyclohydrolase 1; OS = Cutibacterium granulosum DSM 20700 OX=1160719 GN=folE; PE = 3 SV=1
MSESTPEFRVDVVRAQAAVREFLLAIGEDPDRDGLRETPARVAKAAGELFSGMGQDPAEILATTFDMSHDEMVLVRDIEVHSFCEHHLLPFIGVAHVAYIPARNGRVTGLSKIARLVDVYARRPQVQERLTTQVADAMMACLDARGVMAVVECEHMCMTLRGIRKSGARTITSAVRGIMKDPATRAEAMGLITAGR

SEQ ID NO: 7271 - protein, 244 aa, unidentified
  source 1..244: note = Cyanobacteria bacterium
  REGION 1..244: note = tr|A0A3M1L765|A0A3M1L765_9CYAN GTP cyclohydrolase 1; OS = Cyanobacteria bacterium J083 OX=2420336 GN=folE PE=3; SV = 1
MTKVSSNGSNPITNSIMNNSSSPLNPNLIDRVTARPDRNTHNGKAAEIHAASIEAKERMMDAVNCMLQAVGEDPEREGLLKTPKRVAEAMQFLTEGYSQSLEEIVNDAIFDEGHNEMVLVRDIDFFSLCEHHMLPFMGRAHVAYIPNQKVVGLSKLARIVEMYSRRLQVQERLSCQIAEAINSILQPQGVAVVMEAIHMCMSMRGVQKPGSWTVTSSMIGVFQEDQKTREEFLNLIRHQPTFFS

SEQ ID NO: 7272 - protein, 238 aa, unidentified
  source 1..238: note = Cyanobacteria bacterium
  REGION 1..238: note = tr|A0A352AL02|A0A352AL02_9CYAN GTP cyclohydrolase 1; OS = Cyanobacteria bacterium UBA9273 OX=2055791 GN=folE PE=3; SV = 1
MTIASSNGFSCSDSTTMTNSTNVTGRIETRPDRNTQNGREPKLHPPSEDMNEEMTNAVRTLLLGVGEDPEREGLLKTPKRVVEAMRFLTGGYNQSLEEIVNGAIFDEGHNEMVLVRDINFFSLCEHHMLPFMGKAHVAYIPNQKVVGLSKLARVVEMYARRLQVQERLTRQIAEAIQTILEPKGVAVVMEATHMCMVMRGVQKPGSWTVTSAMLGVFQESQKTRDEFLNLIRHQANFF

SEQ ID NO: 7273 - protein, 219 aa, unidentified
  source 1..219: note = Cyanobacterium aponinum
  REGION 1..219: note = tr|K9ZAG3|K9ZAG3_CYAAP GTP cyclohydrolase 1; OS = Cyanobacterium aponinum (strain PCC 10605) OX=755178; GN = folE PE=3 SV=1
MTYTESSIIKSANQNNSLPNLITESQPPVTEADMIQAVRTLLLGLGENPDREGLKDTPKRVVKALKFLTSGYGQSLDELLNGAVFHENANEMVLVRDIDLFSSCEHHILPILGRAHVAYIPNGKVIGLSKIARICEMYARRLQVQERLTAQIADALQGLLQPQGVAVVIEATHMCMVMRGVQKPGSWTSTSALRGVFNDDAKTRQEFMNLIQHRPTFNS

SEQ ID NO: 7274 - protein, 220 aa, unidentified
  source 1..220: note = Cyanobacterium aponinum
  REGION 1..220: note = tr|A0A2G3PA61|A0A2G3PA61_9CHRO GTP cyclohydrolase 1; OS = Cyanobacterium aponinum IPPAS B-1201 OX=2047986 GN=folE; PE = 3 SV=1
MTTETYNNVASRPDRNTHNGKEAQIHEAKEENKIQMMDAVRNILDAVGEDPEREGLLKTPKRVAEAMQFLTQGYNQSLEKLVNGAIFDEGHNEMVLVRDIDFFSLCEHHMLPFMGRAHVAYIPNQKVVGLSKLARIVEMYSRRLQVQERLTRQIAEAIQTILDPQGVAVVMEATHMCMVMRGVQKPGSWTVTSAMIGEFQDNDKTRQEFLDLIRHKPSFL

SEQ ID NO: 7275 - protein, 239 aa, Epithemia turgida
  REGION 1..239: note = tr|A0A077JLI4|A0A077JLI4_9CYAN GTP cyclohydrolase 1; OS = cyanobacterium endosymbiont of Epithemia turgida isolate EtSB Lake Yunoko OX=1228987 GN=folE PE=3 SV=1
MTIASSKGFNPLDSNGFNNLSPSLVECVSSQPDHNAHDGEQVHFRPAEKPNKEKIMAAVRTILEALGEDPDREGLLKTPKRVAEAMAFLTDGYNQSLKSLVNDAIFDEGHSEMVLVRDIHFSSLCEHHMLPFIGKAHVAYIPNQKVVGLSKLARIVEMYSRRLQVQERLTHQIAEAIQEILYPQGVAVVMEATHMCMVMRGVQKLGSSTVTSTMLGVFQEEQKTREEFLNFIRRQPSFF

SEQ ID NO: 7276 - protein, 243 aa, Rhopalodia gibberula
  REGION 1..243: note = tr|A0A2Z5TC11|A0A2Z5TC11_9CYAN GTP cyclohydrolase 1; OS = cyanobacterium endosymbiont of Rhopalodia gibberula; OX = 1763363 GN=folE PE=3 SV=1
MTIASSKGFNPLDSNDFNDRSPDLSPSLVECVSSRPDRNAHNGEQVDFRPAEEANKEEIMAAVRTMLEALGEDPNREGLLKTPKRVAEAMAFLTDGYNQSLETLVNDAIFDEGHNEMVLVRDIHFYSLCEHHMLPFMGKAHVAYIPNKKVVGLSKLARIVEMYSRRLQVQERLTRQIAEAIQEILDPQGVAIVMEATHMCMVMRGVQKLGSWTVTSTMLGVFQEEQKNREEFLNLVRHQPSFF

SEQ ID NO: 7277 - protein, 219 aa, unidentified
  source 1..219: note = Cyanobacterium sp.
  REGION 1..219: note = tr|A0A1E5QRK9|A0A1E5QRK9_9CHRO GTP cyclohydrolase 1; OS = Cyanobacterium sp. IPPAS B-1200 OX=1562720 GN=folE PE=3; SV = 1
MTFTESSMMKATVKEKQLPSLATESKPQVTQEEMIQAVRTLLIGLGENPEREGLKDTPKRVVKALKFLTSGYDQSLDELLNGAVFHEKSNEMVLVRDIDLFSSCEHHILPILGRAHVAYIPNGKVIGLSKIARICEMYARRLQVQERLTSQIADALQGLLQPQGVAVVVEASHMCMVMRGVQKPGSWTSTSALRGVFSEDAKTRQEFMNLIQHRPTFNN

SEQ ID NO: 7278 - protein, 240 aa, unidentified
  source 1..240: note = Cyanobacterium sp.
  REGION 1..240: note = tr|A0A2K8WKX2|A0A2K8WKX2_9CHRO GTP cyclohydrolase 1; OS = Cyanobacterium sp. HL-69 OX=2054282 GN=folE2 PE=3 SV=1
MTVFSNGSDSLKENSLNSQSIVTEVFNNVGSRPDRNTHDGKEAQVQAIKEENKQKMMDSVHQMLECLGEDPEREGLLKTPKRVAEAMQFLTQGYSQSLEQLVNGAIFDEGHNEMVLVRDIDFFSLCEHHMLPFMGRAHVAYIPNQKVVGLSKLARIVEMYSRRLQVQERLTRQIAEAVQTILDPRGVAVVMEASHMCMSMRGVQKPGSWTVTSAMVGVFQDEDKTREEFLNLIQHQPRFR

SEQ ID NO: 7279 - protein, 240 aa, unidentified
  source 1..240: note = Cyanobacterium stanieri
  REGION 1..240: note = tr|K9YNA3|K9YNA3_CYASC GTP cyclohydrolase 1; OS = Cyanobacterium stanieri (strain ATCC 29140 / PCC 7202); OX = 292563 GN=folE PE=3 SV=1
MTVFSNGSDSLKENSLNSQSIVTEVFNNVGSRPDRNTHDGKEAKIQAIKEENKQKMMDAVHQMLECLGEDPEREGLLKTPKRVAEAMQFLTQGYSQSLEKLVNGAIFDEGHNEMVLVRDIDFFSLCEHHMLPFMGRAHVAYIPNQKVVGLSKLARIVEMYSRRLQVQERLTRQIAEAVQTILDPRGVAVVMEASHMCMSMRGVQKPGSWTVTSAMIGVFQDEDKTREEFLNLIQHQPQFR

SEQ ID NO: 7280 - protein, 219 aa, unidentified
  source 1..219: note = Cyanobacterium stanieri
  REGION 1..219: note = tr|K9YKI3|K9YKI3_CYASC GTP cyclohydrolase 1; OS = Cyanobacterium stanieri (strain ATCC 29140 / PCC 7202); OX = 292563 GN=folE PE=3 SV=1
MTFTQSSIKKTVGEKNQLPSLVTEAQPQVSEAEMIEAVKTLLIGLGENPDREGLKDTPKRVVKALKFLTSGYHQSLDELLNGAVFHENADEMVLVRDIDLFSSCEHHILPILGRAHVAYIPNGKVIGLSKIARICEMYARRLQVQERLTAQIADALQGLLKPQGVAVVVEASHMCMVMRGVQKPGSWTSTSALRGVFADDAKTRQEFMNLIQHRPRFNN

SEQ ID NO: 7281 - protein, 247 aa, unidentified
  source 1..247: note = Cyanobium sp.
  REGION 1..247: note = tr|B5ILM0|B5ILM0_9CYAN GTP cyclohydrolase I; OS = Cyanobium sp. PCC 7001 OX=180281 GN=mtrA PE=4 SV=1
MTSTLPSSFSAKGSAPAATPLPVSLRIRDRLEKAGVSFFANDNIADHLLDGELDQLEIEVAGKVRELLRSLVIDIDNDHNTEETAERVARMYLHEVFKGRYHEQPKIASFPNVKKLDEIYTVGPISVRSACSHHLVPILGNCWIGIKPGDQVIGLSKFSRVADWVFSRPHIQEEAVMILADEIERLCKPQGLAILVKAQHYCMKWRGVKEPQTSMVNSIVRGDFRHDPSLKAEFFELVKQQEALLST

SEQ ID NO: 7282 - protein, 229 aa, unidentified
  source 1..229: note = Cyanobium sp.
  REGION 1..229: note = tr|A0A182ALZ7|A0A182ALZ7_9CYAN GTP cyclohydrolase I; OS = Cyanobium sp. NIES-981 OX=1851505 GN=mtrA PE=4 SV=1
MPLPVSLRIRDRLEKAGASFFANDNIADHLLEGELDQLEIEVAGKVRELLRSLVIDIDNDHNTEETAERVARMYLQEVFKGRYHQQPKIASFPNVKKLDEIYTVGPISVRSACSHHLVPILGNCWIGIKPGEHVIGLSKFSRVADWVFSRPHIQEEAVMILADEIERLCKPQGLAILVKAQHYCMKWRGVKEPQTSMVNSIVRGDFRHDPSLKAEFFELVKQQEALLAT

SEQ ID NO: 7283 - protein, 241 aa, unidentified; identical to SEQ ID NO: 6644
  source 1..241: note = Cyanosarcina cf.
  REGION 1..241: note = tr|A0A2T1FEE0|A0A2T1FEE0_9CHRO GTP cyclohydrolase 1; OS = Cyanosarcina cf. burmensis CCALA 770 OX=2107697 GN=folE; PE = 3 SV=1

SEQ ID NO: 7284 - protein, 212 aa, unidentified; identical to SEQ ID NO: 6647
  source 1..212: note = Cyanosarcina cf.
  REGION 1..212: note = tr|A0A2T1FHF3|A0A2T1FHF3_9CHRO GTP cyclohydrolase 1; OS = Cyanosarcina cf. burmensis CCALA 770 OX=2107697 GN=folE; PE = 3 SV=1

SEQ ID NO: 7285 - protein, 235 aa, unidentified
  source 1..235: note = Cyanothece sp.
  REGION 1..235: note = tr|B8HSZ7|B8HSZ7_CYAP4 GTP cyclohydrolase 1; OS = Cyanothece sp. (strain PCC 7425 / ATCC 29141) OX=395961; GN = folE PE=3 SV=1
MTLASNSFNANSSNGNPNRVKGISQPRPDRNTLHGRETEIQLPPEERAKEEMMDAVRSILLGVGENPEREGLLKTPKRVAEAMMFLTGGYSQSLEELVNGAIFDEGHDEMVLVRDIHAFSLCEHHMLPFIGKAHVAYIPNQKVIGLSKLARIVEMYSRRLQVQERLTRQIAEAVQTVLEPKGVAVVMEASHMCMVMRGVQKPGSWTVTSSMLGVFKEDQKTREEFLNLIRHQPNF

SEQ ID NO: 7286 - protein, 228 aa, unidentified
  source 1..228: note = Cyanothece sp.
  REGION 1..228: note = tr|A0A3B8Y6A1|A0A3B8Y6A1_9CYAN GTP cyclohydrolase 1 (Fragment) OS=Cyanothece sp. UBA12306 OX=2055757 GN=folE; PE = 3 SV=1
MTIASSNGFNRLNANGSTNLSPNLVERVSSRPDRNTHNGQPAQFHRDTEINKEKMMTAVRTMLEALGEDPDREGLLKTPKRVAEAMQFLTEGYDQSLETLVNGAIFDEGHSEMVLVRDINFFSLCEHHMLPFMGRAHVAYIPNQKVVGLSKLARIVEMYSRRLQVQERLTRQIAEAVQEILEPQGVAVVMEASHMCMVMRGVQKPGSWTVTSAMLGVFQDEQWINLKK

SEQ ID NO: 7287 - protein, 231 aa, unidentified
  source 1..231: note = Cyclobacteriaceae bacterium
  REGION 1..231: note = tr|A0A3N4H6Z4|A0A3N4H6Z4_9BACT GTP cyclohydrolase 1; OS = Cyclobacteriaceae bacterium YHN15 OX=2487897 GN=folE; PE = 3 SV=1
MKQKETLLNTMGIDFSHSIDEIGDEHLGTSTETPLRADAFEMDDQLKMELIEKHFKEIMHILGLDLTDDSLKGTPKRVAKMYVKEIFSGLNPKNMPDAKLFENKYKYNEMLVEKDITFYSNCEHHFVPIHGKAHVAYISSGHVIGLSKINRIVQYFAKRPQVQERLTMQIGNAFKEILGTDDVAVIIDAHHMCVSSRGIQDVNSSTVTAFYSGKFDRDENTRKEFMNYISL

SEQ ID NO: 7288 - protein, 228 aa, unidentified
  source 1..228: note = Cyclobacteriaceae bacterium
  REGION 1..228: note = tr|A0A5C7Z8W4|A0A5C7Z8W4_9BACT GTP cyclohydrolase 1; OS = Cyclobacteriaceae bacterium OX=2099675 GN=folE PE=3 SV=1
MRQKEISLNIRPINPLDDQDEDHMLTSWNTPLREDAFALSDDEKVEQIEKRFREIMEILGLDLNDDSLKGTPRRVAKMYVKEVFSGLNPKNRPQARLFENKYKYDQMLVEKDITFYSHCEHHFVPIYGKAHVGYFSNGKVIGLSKINRIVQYFAKRPQVQERLTVQIGKELQRILGTESVAVVMDANHMCVASRGVGDTNSKTGTAFFGGKFEEENTRREFLNYINSK

SEQ ID NO: 7289 - protein, 233 aa, Cyclobacterium amurskyense
  REGION 1..233: note = tr|A0A0H4P834|A0A0H4P834_9BACT GTP cyclohydrolase 1; OS = Cyclobacterium amurskyense OX=320787 GN=folE PE=3 SV=1
MKQKETLLNSAEIDLNQTIDDLGDEHISSSHETPLREDAFEMDDDLKMELIEKHFKEIMNILGMDLKDDSLKGTPRRVAKMFVKEVFSGLDPKNKPEVKLFQNKYRYNEMLVEKDITFFSHCEHHFVPIYGKAHVAYISKGNVIGLSKINRIVQYFAKRPQVQERLTVQIGNELKTALGTDDVAVIMDADHMCVSSRGVRDTTSSTVTSFYSGQFENDSQKRNEFLKYISMAR

SEQ ID NO: 7290 - protein, 233 aa, unidentified
  source 1..233: note = Cyclobacterium halophilum
  REGION 1..233: note = tr|A0A1H6Y5D2|A0A1H6Y5D2_9BACT GTP cyclohydrolase 1; OS = Cyclobacterium halophilum OX=1416801 GN=folE PE=3 SV=1
MKQKETLLNSAGIDLNQTIEELGDEHMASSHDTPLREDAFEMDDDLKMELIEKHFKEIMYILGLDLTDDSLKGTPKRVAKMFVKEVFSGLDPRNKPDAKLFENKFRYSEMLVEKDITFYSHCEHHFVPIYGKAHVAYISNGHVIGLSKINRIVQYYAKRPQVQERLTVQIGNELKAALGTEDVAVILDADHMCVSSRGVRDTSSSTVTSFYSGQFEHSAQKRNEFLKYLELPR

SEQ ID NO: 7291 - protein, 233 aa, Cyclobacterium lianum
  REGION 1..233: note = tr|A0A1M7QDF3|A0A1M7QDF3_9BACT GTP cyclohydrolase 1; OS = Cyclobacterium lianum OX=388280 GN=folE PE=3 SV=1
MKQKETLLNTAGIDINQAIEEFGNEHVASSHDTPLREDAFEMDDELKMELIEKHFRDIMYVLGLDLTDDSLKGTPKRVAKMFVKEVFSGLDPKNKPEAKLFENKFRYNEMLVEKDITFHSHCEHHFVPIFGRAHVAYISNGHVIGLSKINRIVQYFAKRPQVQERLTMQIGNELKEALGTEDVAVVLDADHMCVSSRGVKDNSSSTVTSFYSGIFENNDQKRNEFLKYLELPR

SEQ ID NO: 7292 - protein, 233 aa, Cyclobacterium marinum
  REGION 1..233: note = tr|G0IUI6|G0IUI6_CYCMS GTP cyclohydrolase 1; OS = Cyclobacterium marinum (strain ATCC 25205 / DSM 745); OX = 880070 GN=folE PE=3 SV=1
MKQKETLLNSAGIDLNQAIDDIGDDHISSSHDTPLREDAFEMDDDLKMELIEKHFKEIMNILGMDLKDDSLKGTPKRVAKMFVKEVFSGLDPKNKPEVKLFENKYKYNEMLVEKDITFFSHCEHHFVPIYGKAHVAYISNGSVIGLSKINRIVQYFAKRPQVQERLTVQIGNELKKALGTDDVAVIMDADHMCVSSRGVRDTSSSTVTSFYSGKFENDNQKRTEFLKYISLSR

SEQ ID NO: 7293 - protein, 217 aa, Cyclobacterium marinum
  REGION 1..217: note = tr|A0A5D9BC73|A0A5D9BC73_9BACT GTP cyclohydrolase 1; OS = Cyclobacterium marinum OX=104 GN=folE PE=3 SV=1
MDKNEIENIGDNHLSTNVQTPLRPDAFEKSDEEKIQNIQQYFSKIMEELGLDLNDDSLSGTPYRFAKMYVKELFYGLNPDKKPKLSVFENKFGYKKMLVEQNITIDSSCEHHFLPITGEANIAYVPKEKVIGLSKINRLVDYYSHRPQVQERLSLQILKDLQYALETEDVIVVISAKHLCVSSRGIKDKNSFTTTIEYGGCFEEEKYRNEFFKILGQ

SEQ ID NO: 7294 - protein, 233 aa, unidentified
  source 1..233: note = Cyclobacterium qasimii
  REGION 1..233: note = tr|A0A512CGL4|A0A512CGL4_9BACT GTP cyclohydrolase 1; OS = Cyclobacterium qasimii OX=1350429 GN=folE2 PE=3 SV=1
MKQKETLLNSAGIDLNQTIDDLGDEHISSSHETPLREDAFEMDDDLKMELIEKHFKGIMNILGLDLTDDSLKGTPKRVAKMFIKEVFSGLDPKNKPEVKLFQNKYRYNEMLVEKDITFFSHCEHHFVPIYGKAHVAYISKGNVIGLSKINRIVQYFAKRPQVQERLTVQIGNELKMALGTDDVAIILDADHMCVSSRGVRDTTSSTVTSFYSGQFENDPQKRNEFLKYISMAR

SEQ ID NO: 7295 - protein, 233 aa, unidentified; identical to SEQ ID NO: 7294
  source 1..233: note = Cyclobacterium qasimii
  REGION 1..233: note = tr|S7WRH4|S7WRH4_9BACT GTP cyclohydrolase 1; OS = Cyclobacterium qasimii M12-11B OX=641524 GN=folE PE=3; SV = 1

SEQ ID NO: 7296 - protein, 260 aa, Cycloclasticus sp.
  REGION 1..260: note = tr|A0A1M6B316|A0A1M6B316_9GAMM GTP cyclohydrolase FolE2 OS=Cycloclasticus sp. DSM 27168 OX=1884353 GN=folE2; PE = 3 SV=1
MTIEDVQNHPDSRNMPINKVGIKDIRHPFVFVDRDGHQRATVGTFNMSVNLPHHQKGTHMSRFVALLNEDCQQLSIKGFSALLEKMTHTLEAETGYLTTEFLYFVNKSAPITGVKSLLDYQIKLDGHWSKSDHKIKITVVIPVTSLCPCSKKISEYGAHNQRSHITVTAEIGDNICAEDIIQLVEKQASSELFSLLKRPDEKYVTELAYDNPKFVEDVVRDIASALNDDQRILAYTLEAENFESIHNHSAYAVIENNKLT

SEQ ID NO: 7297 - protein, 183 aa, Cycloclasticus sp.
  REGION 1..183: note = tr|A0A1Y5F3K1|A0A1Y5F3K1_9GAMM GTP cyclohydrolase 1; OS = Cycloclasticus sp. 44_32_T64 OX=1856282 GN=folE PE=3; SV = 1
MMEKLYKQIIKDIGEDTERQGLVETPKRAAKAMSFLTSGYQQSLEQIVNGAVFDSDADDMVIVKNIELYSMCEHHLLPFIGKCHVAYLPAGKVLGLSKVARIVDMFARRLQIQEQLTTQIADSLLEVTGARGVAVVVEAQHLCMMMRGVEKQNSQMTTSSMLGQFRKNSETRAEFLSLLRMAH

SEQ ID NO: 7298 - protein, 260 aa, unidentified
  source 1..260: note = Cycloclasticus zancles
  REGION 1..260: note = tr|S5TWJ2|S5TWJ2_9GAMM GTP cyclohydrolase FolE2; OS = Cycloclasticus zancles 78-ME OX=1198232 GN=folE2 PE=3; SV = 1
MTIEDVQNHPDSRNMPINKVGIKDIRHPFVFVDRDGHQRATVGTFNMSVNLPHHQKGTHMSRFVALLNEDCQQLSIKGFNALLEKMTHTLEAETGYLTTEFLYFVNKSAPITGVKSLLDYQIKLDGHWSKSDQKIKITVVIPVTSLCPCSKKISEYGAHNQRSHITVTAEIGDNICAEDIIQLVEKQASSELFSLLKRPDEKYVTELAYDNPKFVEDVVRDIASVLNDDQRILAYTLEAENFESIHNHSAYAVIENNKLT

SEQ ID NO: 7299 - protein, 181 aa, unidentified
  source 1..181: note = Cycloclasticus zancles
  REGION 1..181: note = tr|S5TH29|S5TH29_9GAMM GTP cyclohydrolase 1; OS = Cycloclasticus zancles 78-ME OX=1198232 GN=folE PE=3; SV = 1
MEKLYKQIISQVGEDVNRQGLVDTPKRAAKAMSFLTSGYQQSLENIVNGAVFDSDADDMVIVKNIELYSMCEHHLLPFIGKCHVAYLPDGKVLGLSKVARIVDMYARRLQIQEQLTTQIADSILEVTGAKGVAVVVEAKHLCMMMRGVEKQNSQMTTSSMLGQFRKNSETRAEFLSLLKMG

SEQ ID NO: 7300 - protein, 235 aa, Cylindrospermopsis raciborskii
  REGION 1..235: note = tr|A0A1S1ZTS3|A0A1S1ZTS3_9CYAN GTP cyclohydrolase 1; OS = Cylindrospermopsis raciborskii MVCC14 OX=940191 GN=folE; PE = 3 SV=1
MTIASSNGSSRLQSPLIPDLSQAISTRPDRNTHNGKQADLHQPSEESIEQIKAAVRTMLIGVGEDPEREGLLKTPKRVAEAMKFLTSGYNQSLEELVNGAIFDEGHEEMVLVRDINFFSLCEHHMLPFMGRAHVAYIPNKKVVGLSKLARIVEMYARRLQVQERLTRQIAEAVQTILEPKGVAVVMEATHMCMVMRGVQKPGSWTVTSSMIGVFQEEQKTREEFLNLIRHQAAFF

SEQ ID NO: 7301 - protein, 235 aa, Cylindrospermopsis raciborskii
  REGION 1..235: note = tr|A0A1X4GAB8|A0A1X4GAB8_9CYAN GTP cyclohydrolase 1; OS = Cylindrospermopsis raciborskii CENA303 OX=1170769; GN = folE PE=3 SV=1
MTIASSNGSSRLQSPLIPDLSQAISTRPDRNTHNGKQPDLHQPSEESIEQMKAAVQTMLIGVGEDPQREGLLKTPKRVAEAMKFLTSGYNQSLEELVNGAIFDEGHEEMVLVRDINFFSLCEHHMLPFMGRAHVAYIPNKKVVGLSKLARIVEMYARRLQVQERLTRQIAEAVQTILEPKGVAVVMEATHMCMVMRGVQKPGSWTVTSSMIGVFQDEQKTREEFLNLIRHQAAFF

SEQ ID NO: 7302 - protein, 235 aa, Cylindrospermopsis sp.
  REGION 1..235: note = tr|A0A0R0M1Y3|A0A0R0M1Y3_9CYAN GTP cyclohydrolase 1; OS = Cylindrospermopsis sp. CR12 OX=1747196 GN=folE PE=3 SV=1
MTIASSNGSSRLQSPLIPDLSQAISTRPDRNTHNGKQPDLHEPSEESIEQMKAAVRTMLIGVGEDPEREGLLKTPKRVAEAMKFLTSGYNQSLEELVNGAIFNEGHEEMVLVRDINFFSLCEHHMLPFMGRAHVAYIPNQKVVGLSKLARIVEMYARRLQVQERLTRQIAEAVQTILEPKGVAVVMEATHMCMVMRGVQKPGSWTVTSSMIGVFQEEQKTREEFLNLIRHQAAFF

SEQ ID NO: 7303 - protein, 235 aa, Cylindrospermum sp.
  REGION 1..235: note = tr|A0A1Z4QL59|A0A1Z4QL59_9NOST GTP cyclohydrolase 1; OS = Cylindrospermum sp. NIES-4074 OX=2005457 GN=folE PE=3; SV = 1
MTIASSNGSNRAQSPLIPDLADAINPRPDRNTHDGGEPVLLSPTEENTEQMMEAVRTMLLGVGEDPEREGLLKTPKRVAEAMQFLTSGYNQSLEKLVNDAIFDEGHNEMVLVRDINFFSLCEHHMLPFMGRAHVAYIPNQKVVGLSKLARIVEMYSRRLQVQERLTRQIAEAIQTVLEPQGVAVVMEASHMCMVMRGVQKPGSWTVTSAMLGVFQDEQKTREEFFNLIRHQGGFY

SEQ ID NO: 7304 - protein, 235 aa, Cylindrospermum stagnale
  REGION 1..235: note = tr|K9WTB3|K9WTB3_9NOST GTP cyclohydrolase 1; OS = Cylindrospermum stagnale PCC 7417 OX=56107 GN=folE PE=3; SV = 1
MTIASSNGSNRAQSPLNPDLAEAINPRPDRNTHDGREPVLLSPTEENKEQMMEAARTLLLGVGEDPEREGLLKTPKRMAEALLFLTSGYDQSLEELVNGAIFDEGHNEMVLVRDINFFSLCEHHMLPFMGRAHVAYIPNQKVVGLSKLARIVEMYSRRLQVQERLTRQIAEAIQTVLEPQGVAVVMEATHMCMAMRGVQKPGSWTVTSAMVGLFQEEQKTREEFFNLIRHQGSFF

SEQ ID NO: 7305 - protein, 239 aa, Cytophaga hutchinsonii
  REGION 1..239: note = tr|Q11W80|Q11W80_CYTH3 GTP cyclohydrolase 1; OS = Cytophaga hutchinsonii (strain ATCC 33406 / NCIMB 9469); OX = 269798 GN=folE PE=3 SV=1
MEKRIVESDPLRNTPESFNTLSVDEIGDDHLFKGIATPMLPQAFLKTDEEKIASIAGHFKAIMETLGLDLSDDSLAGTPQRVAKMYVQEIFSGLDERNKPKIALFENKYRYGQMLVEKNITFYSNCEHHFVPIFGKVHVAYISSGKVIGLSKLNRIVNYFAKRPQVQERLTMQIAGEMESVLNTKDIAVLIDAKHLCVSSRGIKDDNSATITAYYGGRFSDDAVKNEFLNYLNLNTTYV

SEQ ID NO: 7306 - protein, 227 aa, Cytophaga hutchinsonii
  REGION 1..227: note = tr|Q11VG1|Q11VG1_CYTH3 GTP cyclohydrolase 1; OS = Cytophaga hutchinsonii (strain ATCC 33406 / NCIMB 9469); OX = 269798 GN=folE PE=3 SV=1
MNLVHMKITKAVHIEKEELNDDHYSSNPETPLRVDAFELEDDIKVELISRKFKDIMEILGLDLSDDSLKDTPNRVAKMYVKEIFSGLNPLNKPAVALFENKYKYDEMILEKNITFYSNCEHHFVPIIGKAHVAYISNGKVIGLSKLNRIVDYFARRPQVQERLTVQIANELKSILGTEDVAIVLDAKHLCVSMRGVKDEASSTVTAHYSGKFKEEGVKNEFLAYIKD

SEQ ID NO: 7307 - protein, 234 aa, Cytophaga sp.
  REGION 1..234: note = tr|A0A4R4KJC6|A0A4R4KJC6_9BACT GTP cyclohydrolase 1; OS = Cytophaga sp. DMA-K-7a OX=2070510 GN=folE PE=3 SV=1
MKPNGILLNTQPMAETSFSEENMDENGHDHILTSYDTPLRVDAFEMDDDLKIELIEKHFRHIMEIMGLDLTDDSLKGTPRRVAKMYVKEIFSGMNPENKPSITLFDNKYKYDQMLVEKDITVFSNCEHHFVPIHGKAHVAYISSGKVIGLSKLNRIVHHYSKRPQVQERLTVQIANELKEVLKTEDVAVVIDAQHMCVHSRGVQDTGSSTITSYYGGKFEKEATRREFLSYLGM

SEQ ID NO: 7308 - protein, 207 aa, Cytophaga xylanolytica
  REGION 1..207: note = tr|A0A2W7NM44|A0A2W7NM44_9BACT GTP cyclohydrolase 1; OS = Cytophaga xylanolytica OX=990 GN=folE PE=3 SV=1
MDFTLNGGKGYSKTESYDDEVTQGLTDHYRGVLELLGEDVHREGLEKTPLRVAKAMQFLTQGYHMNPEEIIRSAMFREDYQQMVIVKDIELYSMCEHHILPFFGKAHVAYIPRHHITGLSKIARVVEAFARRLQVQERLTTQIKDCIQKTLNPLGVAVVIEAQHMCMQMRGVQKQHSVTTTSDFTGAFLKNQATREEFFNIIGGKLH

SEQ ID NO: 7309 - protein, 185 aa, unidentified
  source 1..185: note = Cytophagaceae bacterium
  REGION 1..185: note = tr|A0A4Q3PVK9|A0A4Q3PVK9_9BACT GTP cyclohydrolase 1; OS = Cytophagaceae bacterium OX=2026729 GN=folE PE=3 SV=1
MTLEQNYTAILGQLGEDVSREGLLDTPKRAAKAMQYLCRGYEQTLEEVTNGALFSSDNSEMVLVKDIELYSLCEHHLLPIVGRAHVAYISNGTVVGLSKMNRIVDYFAKRPQVQERLTIQIVQELKKVLNTEDVACVIDAKHLCVNSRGIRDIESSTVTSEFGGKFKEEQVRREFLDYIKLDTQF

SEQ ID NO: 7310 - protein, 227 aa, unidentified
  source 1..227: note = Cytophagaceae bacterium
  REGION 1..227: note = tr|A0A1E4A255|A0A1E4A255_9BACT GTP cyclohydrolase 1; OS = Cytophagaceae bacterium SCN 52-12 OX=1660162 GN=folE; PE = 3 SV=1
MKQNGTSSNILLDDQVEEAGDQHLLTSLETPMREDAFGLDDELKAELIAEHFRSIMGILGLDLSDDSLKGTPARVAKMYVQEIFSGLNPANKPEVTLFDNKYRYSQMLVEKDITVFSNCEHHFVPIYGKAHVAYISSGKVIGLSKLNRIVQYYSRRPQVQERLTVQIANELKQVLRTEDVAVLIDAKHMCVSMRGIEDHASSTVTSFYGGRFEQEETRSEFLKYLGL

SEQ ID NO: 7311 - protein, 229 aa, unidentified
  source 1..229: note = Cytophagales bacterium
  REGION 1..229: note = tr|A0A286IIF1|A0A286IIF1_9BACT GTP cyclohydrolase 1; OS = Cytophagales bacterium TFI 002 OX=1945892 GN=folE PE=3; SV = 1
MLNTPDKDKKTIEKLYEELGENHVMTNIATPLREDAFQLDDETKIELIGKHFKEIMQILGLDLTDDSLKGTPHRVAKMYVNEIFSGLNPGNMPQLTLFENQYRYSEMLVERDIKFHSNCEHHFVPINGFAHIAYISSGKVIGLSKLHRIVNHYARRPQVQERMTIQVGNALKEALGTEDVAVILDADHMCVSMRGVGDQSSSTVTSFYSGAFKEAARKEEFLKNLSLRK

SEQ ID NO: 7312 - protein, 219 aa, unidentified
  source 1..219: note = Cytophagales bacterium
  REGION 1..219: note = tr|A0A2M6GM13|A0A2M6GM13_9BACT GTP cyclohydrolase 1; OS = Cytophagales bacterium CG18_big_fil_WC_8_21_14_2_50_42_9 OX=1973956 GN=folE PE=3; SV = 1
MDKYNIDEEGNGLDHLPSSLHTPLREDAFKMTDDLKIELIEKHFREIMHVLGLDLSDDSLQGTPHRVAKMYVNEIFRGLNPEHKPAAKLFENRFSYNQMLVERDITLYSYCEHHFVPIIGKAHVAYIPDKHVVGLSKLNRIVQYYARRPQVQERLTMQIADELRSMLFTENVAVFIEADHLCVMSRGVNDVSSSTITTEYSGLFQQEQYRNEFLNYIRK

SEQ ID NO: 7313 - protein, 233 aa, unidentified
  source 1..233: note = Cytophagia bacterium
  REGION 1..233: note = tr|A0A2E0GY69|A0A2E0GY69_9BACT GTP cyclohydrolase 1; OS = Cytophagia bacterium OX=2026730 GN=folE PE=3 SV=1
MSKDSQSDFELLQIMKDQFEDEGDNHVSSNIDTPLRDDAFDLSDNQKIKKIEKYFQKIMITLGLDLSDDSLKGTPHRVAKMYVKEMCSGLNLSNKPSISLFENQYDYNKMIVEKNINFYSNCEHHFLPIIGKAHIAYISSGKVIGLSKMHRIVNYFAKRPQVQERMTVQIFNELKQALQTKSVALLIDADHLCVASRGIKDVTSSTITFEKGGDFDNHETWTEFLSLINVKLK

SEQ ID NO: 7314 - protein, 184 aa, unidentified
  source 1..184: note = Cytophagia bacterium
  REGION 1..184: note = tr|A0A2E9WI28|A0A2E9WI28_9BACT GTP cyclohydrolase 1; OS = Cytophagia bacterium OX=2026730 GN=folE PE=3 SV=1
MEKITKDLLKELGEDPSREGLLKTPSRVAKSWSFLTSGYKKDLKKLVNNAIFHEDCDNMIVIKDIEFYSLCEHHLLPFFGRAHVSYIPNGKIIGLSKIPRIVDLFSRRLQVQERLTVQIAQTIDSILSPKGVAVVLESNHMCMQMRGVQNKNSYASTSSMIGLFRKDHKTRKEFLDLINMNKKF

SEQ ID NO: 7315 - protein, 213 aa, unidentified
  source 1..213: note = Dactylococcopsis salina
  REGION 1..213: note = tr|K9YWD2|K9YWD2_DACSA GTP cyclohydrolase 1; OS = Dactylococcopsis salina PCC 8305 OX=13035 GN=folE PE=3; SV = 1
MTLSTQESPSPALPSLETEAQPVVSEEEMRQAVRTLLLGLGEDPDREGLLDTPKRVVKALQFLTSGYHQSIDDLLNGAVFHEDTDEMVLVRDIDLFSSCEHHILPIIGRVHVAYMPNGKVIGLSKLARICEMYGRRLQVQERLTAQIADAIEGLLQPKGVAVVVEATHMCMVMRGVQKPGSWTVSSAMRGVFADDPKTRQEFMSLIQHPQNFR

SEQ ID NO: 7316 - protein, 224 aa, unidentified
  source 1..224: note = Dactylococcopsis salina
  REGION 1..224: note = tr|K9YWI9|K9YWI9_DACSA GTP cyclohydrolase 1; OS = Dactylococcopsis salina PCC 8305 OX=13035 GN=folE PE=3; SV = 1
MSNGSAKVTKTVSLDSASSVEAAVSQNGSEEFSRPEIGEMMEAVKTILEGVGEDPEREGLLKTPKRVAEAMQFLTQGYEQSLDDLVNGAIFDEGHNEMVLVRDIDVFSLCEHHMLPFMGKAHVAYIPNEKVVGLSKLARIVEMYARRLQVQERLTRQIAEAIQTILEPQGVAVVMEASHMCMVMRGVQKPGSWTVTSAMLGVFQEDQKTREEFLNLIRHQPSFH

SEQ ID NO: 7317 - protein, 213 aa, unidentified
  source 1..213: note = Dankookia rubra
  REGION 1..213: note = tr|A0A4R5QA27|A0A4R5QA27_9PROT GTP cyclohydrolase 1; OS = Dankookia rubra OX=1442381 GN=folE PE=3 SV=1
MNIQTPPAEIIPTHASLEGRPSRAEAEAAVRTLLRWTGDDPDREGLVDTPARVVRAYEEFFAGYETDPVDLLARSFEETDGYDEMVVLRDIRLESHCEHHVVPILGRAHIAYLPAGRVVGISKLARVLEVYAKRLQIQEKLTAQVANCINDVLKPKGVAVVIEAAHQCMTTRGIHKPGVTMVTSRMLGAFRDDASTRREFLAMIGGQRGAMEG

SEQ ID NO: 7318 - protein, 202 aa, unidentified
  source 1..202: note = Dankookia rubra
  REGION 1..202: note = tr|A0A4V6PKC5|A0A4V6PKC5_9PROT GTP cyclohydrolase 1; OS = Dankookia rubra OX=1442381 GN=folE PE=3 SV=1
MVAKPLAETPIPIARPSRAEAEAAVRTLLRWAGDDPAREGLLDTPARVVRSYEEFFAGYAVDPVALLERTFAETEGYDEIVLLKDIRLESYCEHHMVPIIGRAHVAYLPSNRVVGISKLARVVNAYAKRLQIQEKLTAQIANTIEAVLQPRGVGVVIESEHQCMTTRGVHQHGASMVTSRMLGVFRDDANTRRELMALIGRS

SEQ ID NO: 7319 - protein, 266 aa, unidentified
  source 1..266: note = Dechloromonas aromatica
  REGION 1..266: note = sp|Q47IT5|GCH41_DECAR GTP cyclohydrolase FolE2 1; OS = Dechloromonas aromatica (strain RCB) OX=159087; GN = folE2-1 PE=3 SV=1
MNAPENIFLPDVQAAADTRRLAIQSVGVKGLRYPLQLENAAGELTSTVATFAMSVGLPPEVKGTHMSRFVELLEARTGPLTQVGLLRMMADMLLRLDASSGRIELAFPYFIRKMAPVSGVESLLDYDATLIVDQRAWESATLTLRVVAPVTSLCPCSKKISDYGAHNQRSHITLEARLRSPMSIEDLVRIAEEEASCEVFGLLKRPDEKWVTERAYDNPKFVEDLVRDIALRLMNEPRIAEWKVASENFESIHNHSAYAELYGCNE

SEQ ID NO: 7320 - protein, 270 aa, unidentified
  source 1..270: note = Dechloromonas aromatica
  REGION 1..270: note = sp|Q47BI9|GCH42_DECAR GTP cyclohydrolase FolE2 2; OS = Dechloromonas aromatica (strain RCB) OX=159087; GN = folE2-2 PE=3 SV=1
MSTPTSNIPDVQNSADTRHIAINKVGIKSIRHPIKVQDKSAGIQHTIAMFNMYVGLPHNFKGTHMSRFVEILNSHEREISVENFPTMLRDMVVKLEAETGHIEMNFPYFINKTAPVSGVQSLMDYDVTFIGDICHGEIATSVKVVVPVTSLCPCSKKISEYGAHNQRSHVTVTAKTNDFMWIEEIVQLVEQEASCELFGLLKRPDEKYVTERAYDNPKFVEDMVRDVAARLNAEARVDAYVVESENFESIHNHSAYALIENDKKNPLAHA

SEQ ID NO: 7321 - protein, 266 aa, Dechloromonas denitrificans
  REGION 1..266: note = tr|A0A133XMN2|A0A133XMN2_9RHOO GTP cyclohydrolase FolE2 OS=Dechloromonas denitrificans OX=281362 GN=folE2; PE = 3 SV=1
MSTPTPNIPDVQNSADTRQIAINKVGIKSIRHPIRVQDKSAGIQHTIAMFNMYVGLPHNFKGTHMSRFVEILNSHEREISVESFPVMLGDMIVKLEAETGHIEMNFPYFINKTAPISGVQSLMDYDVTFIGDICNGQITTSVKVVVPVTSLCPCSKKISEYGAHNQRSHVTVTARTNDFVWIEELVQLVEAEASCELFGLLKRPDEKYVTERAYDNPKFVEDMVRDVAARLNAEGRIDAYTVESENFESIHNHSAYALIERDKTTA

SEQ ID NO: 7322 - protein, 266 aa, Dechloromonas denitrificans
  REGION 1..266: note = tr|A0A133XGK1|A0A133XGK1_9RHOO GTP cyclohydrolase FolE2 OS=Dechloromonas denitrificans OX=281362 GN=folE2; PE = 3 SV=1
MNAPENIFLPDVQSTADTRRLAIQNVGVKGLRYPLQLAAANGELLNTVATLAMTVGLPPEVKGTHMSRFVELLEARRGALSQDGLFRMFEEMLLRLEARSGRIELAFPYFIRKAAPVSGVESLLDYDATLIIDQPEGQVASLTLRVVAAVTSLCPCSKKISDYGAHNQRSHITLEAKLRSTMSIEELVRIAEEEASCEVFGLLKRPDEKWVTERAYDNPKFVEDLVRDIALRLMNEPRIAEWKVASENFESIHNHSAFAELFGVNA

SEQ ID NO: 7323 - protein, 266 aa, Dechloromonas sp.
  REGION 1..266: note = tr|A0A5C7ZWZ8|A0A5C7ZWZ8_9RHOO GTP cyclohydrolase FolE2 OS=Dechloromonas sp. OX=1917218 GN=folE2 PE=3 SV=1
MNAPDRFFLPDVQAFADTRALAIQNVGVKGLRYPLRIETGNGEQMSTVATLAMTVGLPPEVKGTHMSRFVEILESRHGVLTQDGVFRMLDEMLLRLEARSGRIEMSFPYFIRKAAPVSGVESLLDYDVTYIIDAPEGEYANLTLRVTAPVTSLCPCSKKISDYGAHNQRSHITLEAKLRSLMSIEELVRIAEDEASCEVFGLLKRPDEKWVTERAYDNPKFVEDLVRDIALRLMNEPRIASWKVASENFESIHNHSAYAELYGTNV

SEQ ID NO: 7324 - protein, 270 aa, Dechloromonas sp.
  REGION 1..270: note = tr|A0A3B7A5L1|A0A3B7A5L1_9RHOO GTP cyclohydrolase FolE2 OS=Dechloromonas sp. HYN0024 OX=2231055 GN=folE2; PE = 3 SV=1
MNTPNSPIADVQNTVDTRHIAINKVGIKSIRHPIKVQDKSTGVQHTIAMFNMYVGLPHNFKGTHMSRFVEILNSHEREISVENFPVMLRDMVAKLEAETGHIEMNFPYFINKTAPISGVQSLMDYDVTFIGDICHGEIATSVKVVVPVTSLCPCSKKISEYGAHNQRSHVTVTARTNDFVWIEEIVQLVEQEASCELFGLLKRPDEKYVTERAYDNPKFVEDMVRDVAARLNAETRIDAYVVESENFESIHNHSAYALIENDKTRPPAHP

SEQ ID NO: 7325 - protein, 260 aa, Deferribacter autotrophicus
  REGION 1..260: note = tr|A0A5A8F8U6|A0A5A8F8U6_9BACT GTP cyclohydrolase FolE2 OS=Deferribacter autotrophicus OX=500465 GN=folE2; PE = 3 SV=1
MLKDIQSQFDDRNLAIDKVGIKGIKYPIILRDKRKGSQHTIATINMFVKLPHNFKGTHMSRFVEILNKYRENISISSFKEILEEMRIRLNSEEAHFDMEFTYFLEKEAPVSKQTSLMDYLCRFSGNVSDEKMDFILSVTVPVISVCPCSKEISAYGAHNQRSYVTISVRYNRMVWIEDLIEIAEKSGSSPIFSLLKREDEKFITECSYDNPVFVEDIVRNAAQYLLEDDRIDWFEVSSENFESIHNHSAFASITIDKKKK

SEQ ID NO: 7326 - protein, 261 aa, Deferribacter desulfuricans
  REGION 1..261: note = tr|D3PA15|D3PA15_DEFDS GTP cyclohydrolase FolE2; OS = Deferribacter desulfuricans (strain DSM 14783 / JCM 11476 / NBRC 101012 / SSM1) OX=639282 GN=folE2 PE=3 SV=1
MNLKDIQSLYDHRNLTIDKVGIKGIKYPIVLKDKRKGNQHTIAAINMFVKLPHNFKGTHMSRFVEILNKYRDNISISSFKEILEEMRVKLDSEEAHFDMQFTYFLEKEAPISKLPSLIDYECRFSGTVSDNKKDFVLTVTVPVVSVCPCSKEISDYGAHNQRSYVTIAVRYNKMVWIEDLIEIAEKSGSSPIYSLLKREDEKFVTERSYENPAFVEDIVRNAAELLLKDERITWFEVSSENFESIHNHSAFASICIDKTNK

SEQ ID NO: 7327 - protein, 363 aa, unidentified
  source 1..363: note = Defluviimonas alba
  REGION 1..363: note = tr|A0A159Z463|A0A159Z463_9RHOB GTP cyclohydrolase FolE2 OS=Defluviimonas alba OX=1335048 GN=folE2 PE=3 SV=1
MNIHVSEIDRRPSREEAEAALALLRKWAGACADDEAAGLDHEALMLKGSGYPEFSRRYPADFTADAVYKAGLPDLQNGPASLIVGARAQIQHVGISNFRLPIRYHTRGGGEGLTLETSVTGTVSLEADKKGINMSRIMRSFYAHAERTFSFAVMEAALDDYKTDLGSFDARIQMRLSFPARVQALRSGLTGWQYYDLALELVETAGLRKRIVHLDYVYSSTCPCSLELSEHARATRGQLATPHSQRSVARISAELVGSQCLWFEDLIDIARAAVPTETQVMVKREDEQAFAELNAAHPIFVEDAARSFAAGLLTDPRVGDFRIIASHQESLHSHDAVSVLTEGPTFAAQSLDPRLFASLHKAG

SEQ ID NO: 7328 - protein, 365 aa, unidentified
  source 1..365: note = Defluviimonas aquaemixtae
  REGION 1..365: note = tr|A0A2R8B381|A0A2R8B381_9RHOB GTP cyclohydrolase FolE2 OS=Defluviimonas aquaemixtae OX=1542388 GN=folE2; PE = 3 SV=1
MNFVGEIGREPDRRDAEQALDLLRRWAEKADPAEIVRLDPAIARLLPGREVGNYPELSRIYPENFTPDASYRASMPDLQNGPASLIVGAQAPIQHVGISNFRLPIRFHTRDGGDITLETSVTGTVSLIGEKKGINMSRIMRSFYAHAERTFSFSVLEAVLEDYKKDHDSVDARLMMRFSFPARVDSLRSGLTGWQYYDIALELMEGEGRQKRITHLDYVYSSTCPCSLELSEHARQSRGQLATPHSQRSVARISVVEEGGKILWYEDLIDLARAAVPTETQVMVKREDEQAFAELNAANPIFVEDAARSFAERLLAEPRVGDFRIVASHQESLHSHDAVSILTEGPTFAAESIDPKLFSTLHRPG

SEQ ID NO: 7329 - protein, 365 aa, unidentified
  source 1..365: note = Defluviimonas denitrificans
  REGION 1..365: note = tr|A0A2S8SDN8|A0A2S8SDN8_9RHOB GTP cyclohydrolase FolE2 OS=Defluviimonas denitrificans OX=404881 GN=folE2; PE = 3 SV=1
MNFIKKIGENPDAKDAQEALAVLRAWAETADPVEVARLDPAIARLLPDGKVSNYPDLSRVYPEDFTPDATYRASMPDLQNGPSSLIVGAKAQIQHVGISNFRLPIRFHTRDGGDLTLETSVTGTVSLGAEKKGINMSRIMRSFYAHAESTFSFDVMESALDDYKAHLGSFDARIQMRFSFPMKVASLRSGLAGWQYYDIALELVEMHGVRKRVIHLDYVYSSTCPCSLELSEHARQRRGQLATPHSQRSVARLSAVEEGAKCLWYEDLIDMARAAVPTETQVMVKREDEQAFAELNAANPIFVEDAARSFAERLLADPRVGDFRIVASHQESLHSHDAVSVLTEGATFASESLDPRLFSSLHKPG

SEQ ID NO: 7330 - protein, 352 aa, unidentified
  source 1..352: note = Defluviimonas sp.
  REGION 1..352: note = tr|A0A059INW8|A0A059INW8_9RHOB GTP cyclohydrolase FolE2 OS=Defluviimonas sp. 20V17 OX=1417296 GN=folE2 PE=3; SV = 1
MNMRIDEPQDEAKNAAAALKTLKTWLETAPEAERAARAAELAALTGSELSRDYDSEFAVDAAYRESLPDLQNGPASLIRGQNRPIQHVGISNFRLPLRHPTRAGAPQLLETSVTGTVSLEAEQKGINMSRILRSFYAHAEKEMGLGVVAAALDDYKRDLGSFDARIALRFAFPMQVESLRSGLSGYQYYDVTLELAEAAGARSAVLHLDYVYSSTCPCSLELSEHARASRGRLATPHSQRSVARISVALTEAPLTVEDLVDLCRAAVPTETQVMVKREDEQAFAELNAANPIFVEDAVRLFAEKLQADPRVGDFRVVASHKESLHSHDAVSVLCEGKTFAADTLDPRLFAAL

SEQ ID NO: 7331 - protein, 190 aa, Dehalobacter sp.
  REGION 1..190: note = tr|A0A1C2XWW2|A0A1C2XWW2_9FIRM GTP cyclohydrolase 1; OS = Dehalobacter sp. TeCB1 OX=1843715 GN=folE PE=3 SV=1
MMAIDHAKIERAVRDILEAIGEDPEREGLKDTPKRVARFYEEAFAGLHEDPSKNLSVLFSENHEEMVLVRDIPIYSMCEHHLLPFVGQAHIAYIPRHGKVTGLSKLARVAEDYARRPQLQERLTSQIANTVNDMLNPRGVIVVIEAEHMCMTVRGIKKPGAQTVTSAVRGMFETSAATRAEAFSLIMGRH

SEQ ID NO: 7332 - protein, 190 aa, Dehalobacter sp.
  REGION 1..190: note = tr|T0J911|T0J911_9FIRM GTP cyclohydrolase 1; OS = Dehalobacter sp. UNSWDHB OX=1339256 GN=folE PE=3 SV=1
MMAIDHAKIERAVRDILEAIGEDPEREGLKDTPKRVARFYEEAFAGLHEDPSKNLSVLFSEKHEEMVLVRDIPIYSMCEHHLLPFVGQAHIAYIPRHGKVTGLSKLARVAEDYARRPQLQERLTSQIADTVNDMLNPRGVIVVIEAEHMCMTVRGIKKPGAQTVTSAVRGMFETSAATRAEAFSLIMGRH

SEQ ID NO: 7333 - protein, 191 aa, unidentified
  source 1..191: note = Dehalococcoidaceae bacterium
  REGION 1..191: note = tr|A0A2E8TBN8|A0A2E8TBN8_9CHLR GTP cyclohydrolase 1; OS = Dehalococcoidaceae bacterium OX=2026731 GN=folE PE=3; SV = 1
MKKFDEKKAMDGITMFLQAYGVDLNEPGLQETPRRIVQAYKEFLSGDNELNTKILSTDFIQQYDEMIVVRDIPFVSMCEHHFLPFWGKAHVSYLPKGKVVGLSKVARLVENIARQPQIQERMTKQVADSIENTLETDGVGVVITAEHSCLSFRGIKKHGSTMITSAMNGNFRTDAKTRSEFMSIIQVGILK

SEQ ID NO: 7334 - protein, 191 aa, unidentified
  source 1..191: note = Dehalococcoidales bacterium
  REGION 1..191: note = tr|A0A2D6J068|A0A2D6J068_9CHLR GTP cyclohydrolase 1; OS = Dehalococcoidales bacterium OX=2026733 GN=folE PE=3 SV=1
MARVIDGTEIKQAITAIIKAIGEDPDREGLAETPSRVAEMYTELFMGLNVDPGRELQAGYELGHREMVIVRDIPFYSMCEHHLLPFYGIVHIGYIPDISGRVVGISKLARVVEIIARRPQIQERMTTQIADTIMDGLKASGVAVVVQAEHMCMVMRGVKKPGSNIVTSALRGSFRTKPETRTEFFSLLQGK

SEQ ID NO: 7335 - protein, 188 aa, unidentified
  source 1..188: note = Dehalococcoidales bacterium
  REGION 1..188: note = tr|A0A2E9M5N9|A0A2E9M5N9_9CHLR GTP cyclohydrolase 1; OS = Dehalococcoidales bacterium OX=2026733 GN=folE PE=3 SV=1
  VARIANT 8: note = Xaa can be any naturally occurring amino acid
  VARIANT 24: note = Xaa can be any naturally occurring amino acid
  VARIANT 46: note = Xaa can be any naturally occurring amino acid
  VARIANT 89: note = Xaa can be any naturally occurring amino acid
  VARIANT 96: note = Xaa can be any naturally occurring amino acid
  VARIANT 103: note = Xaa can be any naturally occurring amino acid
  VARIANT 105: note = Xaa can be any naturally occurring amino acid
  VARIANT 111: note = Xaa can be any naturally occurring amino acid
  VARIANT 117: note = Xaa can be any naturally occurring amino acid
  VARIANT 130: note = Xaa can be any naturally occurring amino acid
  VARIANT 132: note = Xaa can be any naturally occurring amino acid
  VARIANT 148: note = Xaa can be any naturally occurring amino acid
  VARIANT 174: note = Xaa can be any naturally occurring amino acid
MFDEAAIXKAITSIIKAIGVDPEXGGLADTPKRVAEMYAELFMGIXVDPAEELKVEFEEGYREMVILRDIPFYSMCEHHLLPFYGVAHXGYIPNAXGRVVGAXKXARVVEXVARRLXLQERMTTQIAEAXCXGIKPDGVGVVIHAEHXCMIMRGIKKPGSTVVTSAVRGLFRRXSKTRAEFFSLVQSK

SEQ ID NO: 7336 - protein, 189 aa, unidentified
  source 1..189: note = Dehalococcoides mccartyi
  REGION 1..189: note = sp|A5FQD3|GCH1_DEHMB GTP cyclohydrolase 1; OS = Dehalococcoides mccartyi (strain ATCC BAA-2100 / JCM 16839 / KCTC 5957 / BAV1) OX=216389 GN=folE PE=3 SV=1
MFDEQAIKQSVQNILVAIGEDPDREGLKETPRRVAQMYTELFSGMNQDPAEVLRVGYELGHREMVIIKDIPFYSMCEHHLLPFSGVVHIGYIPNIDGRVVGISKLARVVEIYAKRPQIQERMATQIADAIMDGLKCDGVAVVIEAEHMCMVMRGIKKPGSRVITSALRGSFHKSPAARAEFLSLIQHKG

SEQ ID NO: 7337 - protein, 189 aa, unidentified
  source 1..189: note = Dehalococcoides mccartyi
  REGION 1..189: note = tr|A0A0V8M029|A0A0V8M029_9CHLR GTP cyclohydrolase 1; OS = Dehalococcoides mccartyi OX=61435 GN=folE PE=3 SV=1
MFDEQAIKQSVQNMLLAIGEDPEREGLKETPRRVAQMYAELFSGMNQDPAEVLRVGYELGHREMVIIKDIPFYSMCEHHLLPFSGVVHIGYIPNIDGRVVGISKLARVVEIYAKRPQIQERMATQIADAIIDGLKCDGVAVVIEAEHMCMVMRGIKKPGSRVITSALRGSFHKSPAARAEFLSLIQQKH

SEQ ID NO: 7338 - protein, 189 aa, unidentified
  source 1..189: note = Dehalococcoides sp.
  REGION 1..189: note = tr|A0A0C6EEK6|A0A0C6EEK6_9CHLR GTP cyclohydrolase 1; OS = Dehalococcoides sp. UCH007 OX=1522671 GN=folE PE=3 SV=1
MFDEQSIKQSVQNMLLAIGEDPEREGLKETPRRVAQMYAELFSGMNQDPAEVLRVGYELGHREMVIIKDIPFYSMCEHHLLPFSGVVHIGYIPNIDGRVVGISKLARVVEIYAKRPQIQERMATQIADAIIDGLKCDGVAVVIEAEHMCMVMRGIKKPGSRVITSALRGSFHKSPAARAEFLSLIQHKS

SEQ ID NO: 7339 - protein, 186 aa, unidentified
  source 1..186: note = Dehalococcoidia bacterium
  REGION 1..186: note = tr|A0A0S7WPC8|A0A0S7WPC8_9CHLR GTP cyclohydrolase 1; OS = Dehalococcoidia bacterium DG_18 OX=1703392 GN=folE PE=3; SV = 1
MVNKGRIKKAVTSIIEAVGENPSREGLKGTPRRIADMYADIFSGLDMDPRDELTVGFDEGHHEMVIVKDIPFYSMCEHHFLPFFGLVHVGYIPKGRIAGASKVARAVDILAKRPQLQERLTTQIAEAMVEALKPNGVGVVIEAEHMCMTMRGVKKPRSKIVTSAMRGLFRENPATRAEFMSLLQGS

SEQ ID NO: 7340 - protein, 186 aa, unidentified
  source 1..186: note = Dehalococcoidia bacterium
  REGION 1..186: note = tr|A0A0S8EJX0|A0A0S8EJX0_9CHLR GTP cyclohydrolase 1; OS = Dehalococcoidia bacterium SM23_28_2 OX=1703396 GN=folE; PE = 3 SV=1
MVDRAKIAEAVRRIIEAIGEDPQREGLAETPRRIGDMYAYFFSGLERDPVEVLRSGFQGEKDEPVILRDIPFYSLCEHHFLPFYGVAHVGYIPNGRLVGISKIARALDILARRPQIQERLTRQLADCILEALDADGVGVVVEAEHLCLSMRGAHKPGTRVVTFAVQGPFRKGTFARSEFLALVQGR

SEQ ID NO: 7341 - protein, 190 aa, unidentified
  source 1..190: note = Dehalogenimonas alkenigignens
  REGION 1..190: note = tr|A0A0W0GIP8|A0A0W0GIP8_9CHLR GTP cyclohydrolase 1; OS = Dehalogenimonas alkenigignens OX=1217799 GN=folE PE=3; SV = 1
MFMMIDEEAIKAAVESILKAIGDDPAREGLAGTPRRVAQMYSEIFGGMPQNPVDELQVGYELGHREMVILRDIPFYSMCEHHLLPFSGVAHIGYVPGEDGRVVGISKLARVVDIIARRPQIQERMATEIADAIMEGLKPDGVGVVISAEHMCMTMRGIKKPGARVVTSALRGIFAKRAATRAEFMALIQD

SEQ ID NO: 7342 - protein, 187 aa, unidentified
  source 1..187: note = Dehalogenimonas formicexedens
  REGION 1..187: note = tr|A0A1P8F7G0|A0A1P8F7G0_9CHLR GTP cyclohydrolase 1; OS = Dehalogenimonas formicexedens OX=1839801 GN=folE PE=3; SV = 1
MIDEKMIKGAVENILTAIGDDPKREGLIDTPQRVAQMYAEIFGGMRQNPVDELKVGYELGHREMVILKDIPFYSMCEHHLLPFSGVAHVGYVPGIDGRVVGISKLARVVDIIARRPQIQERMATEIADAIMEGLKPDGVGVVIEAEHMCMTMRGIKKPGAKVVTSALRGIFSKKAATRAEFMSLIQK

SEQ ID NO: 7343 - protein, 186 aa, Dehalogenimonas lykanthroporepellens
  REGION 1..186: note = tr|D8K0Y7|D8K0Y7_DEHLB GTP cyclohydrolase 1; OS = Dehalogenimonas lykanthroporepellens (strain ATCC BAA-1523 / JCM 15061 / BL-DC-9) OX=552811 GN=folE PE=3 SV=1
MIDENAIAAAVETMLEAIGDDPNREGLRDTPERVARMYAEIFSGIDKNPADDLKVGYELGHREMVILKDIPFYSMCEHHLLPFSGVVHIGYVPGQDGRVVGISKLARVVETVARRPQIQERMATEIADAIVDGLSPDGVGVVITAEHMCMTMRGIKKPGSKVLTSALRGGFAKRPATRAEFMSLIQ

SEQ ID NO: 7344 - protein, 187 aa, Dehalogenimonas sp.
  REGION 1..187: note = tr|A0A0F7GDT0|A0A0F7GDT0_9CHLR GTP cyclohydrolase 1; OS = Dehalogenimonas sp. WBC-2 OX=943347 GN=folE PE=3 SV=1
MIDEDAIKTAVESILKAIGDDPEREGLKETPRRVAQMYSEIFSGMDRDPVEDLKVGYELGHREMVILKDIPFYSMCEHHLLPFSGVVHIGYVPGKDGRVVGISKLARVVETIARRPQIQERMATDIANAIMEGLSPDGVGVVITAEHMCMTMRGIKKPGSRVVTSALRGGFAKRAATRAEFMSLIQG

SEQ ID NO: 7345 - protein, 187 aa, Dehalogenimonas sp.
  REGION 1..187: note = tr|A0A2P5P925|A0A2P5P925_9CHLR GTP cyclohydrolase 1; OS = Dehalogenimonas sp. GP OX=1536648 GN=folE PE=3 SV=1
MIDEKTIKTAVENILKAIGDDPLREGLIDTPQRVAQMYAEIFGGMNQNPVDELKVGYELGHREMVILRDIPFYSMCEHHLLPFSGVAHVAYVPGVDGRVVGISKLARVVDIIARRPQIQERMATEIADAIMDGLKPDGVGVVIEAEHMCMTMRGIKKPGAKVVTSALRGIFSKRAATRAEFMSLIQK

SEQ ID NO: 7346 - protein, 203 aa, unidentified
  source 1..203: note = Deinococcus actinosclerus
  REGION 1..203: note = tr|A0A0U4BSP1|A0A0U4BSP1_9DEIO GTP cyclohydrolase 1; OS = Deinococcus actinosclerus OX=1768108 GN=folE PE=3 SV=1
MTIEPLISAADEKQEVPGLRALTQDWLGAIGEDPEREGLLKTPHRVAKAWGFLTAGYHKSLQEAVGDAVFEADGSEMVIVKDIEFYSMCEHHMLPFYGRAHIAYIPDGKILGLSKFARIVDLYSRRLQVQERITTQVADAVQELLAPRGVAVMMEGVHLCMAMRGVQKQNSSTSTSAMRGLFKSDARTRAEFMSAVQGTLRGR

SEQ ID NO: 7347 - protein, 203 aa, unidentified
  source 1..203: note = Deinococcus actinosclerus
  REGION 1..203: note = tr|A0A2Z3Z752|A0A2Z3Z752_9DEIO GTP cyclohydrolase 1; OS = Deinococcus actinosclerus OX=1768108 GN=folE PE=3 SV=1
MTIEPMISAADEKQEVPGLRALTQDWLGAIGEDPDREGLLKTPHRVAKAWGFLTAGYHKSLQEAVGDAVFAADGSEMVIVKDIEFYSMCEHHMLPFYGRAHIAYIPDGKILGLSKFARIVDLYSRRLQVQERITTQVADAVQELLAPKGVAVMMEGVHLCMAMRGVQKQNSSTSTSAMRGLFKSDARTRAEFMSAVQGTLRGR

SEQ ID NO: 7348 - protein, 203 aa, Deinococcus aerius
  REGION 1..203: note = tr|A0A2I9DVI0|A0A2I9DVI0_9DEIO GTP cyclohydrolase 1; OS = Deinococcus aerius OX=200253 GN=folE PE=3 SV=1
MTIPPTISAADERQEVPGLRALTQDWLSAIGEDPDREGLQKTPHRVAKAWSFLTAGYQKTLADAAGDAVFAADGSEMVIVKDIEFYSMCEHHMLPFYGRAHIAYIPDGHILGLSKFARIVDLYSRRLQVQERITTQIADAVEELLNPRGVAVLMEGIHLCMAMRGVQKQNSSTTTSAMRGLFKEDARTRAEFMSAVQTTLRGR

SEQ ID NO: 7349 - protein, 200 aa, Deinococcus cellulosilyticus
  REGION 1..200: note = tr|A0A511MZU9|A0A511MZU9_9DEIO GTP cyclohydrolase 1; OS = Deinococcus cellulosilyticus NBRC 106333 = KACC 11606; OX = 1223518 GN=folE PE=3 SV=1
MTATHTVTFEEACKAIEVLLRHLGENPSREGLLDTPHRVVKAWQELVGGYHLDPHEILSTTFDLGDVEEGGALRHVNFVISKNLPFVSYCEHHMLPFEGEAHLAYVPQPGGRVVGLSKLARLLDAYARRFQVQERLTEQLAGTLDRALQPMGVAIMVEASHSCQCARGIRKKGRMVTTAYTGIFQMDAASRQEFLQLVKP

SEQ ID NO: 7350 - protein, 306 aa, Deinococcus cellulosilyticus
  REGION 1..306: note = tr|A0A511MYT0|A0A511MYT0_9DEIO GTP cyclohydrolase FolE2 OS=Deinococcus cellulosilyticus NBRC 106333 = KACC 11606 OX=1223518 GN=folE2 PE=3 SV=1
MANHNPTLTQGSSRLPSKQERHRLFGSVDPIPGNKPTEKEKMVDLQNTPKDFLFALDQVGISSVKHPAVVHSTLSPTVQTTVANFALTTSLVQNSKGINMSRLTEQLDLYHQQGWDLSLKHLCQFAEELAGRMKQSAATIEVTFPWFYERPAPVTGMTGLMHAEAMMRVHFDEVEGFTATVGLKAMVTTLCPCSKEISEYSAHNQRGVVTAEIELTDAQTDWDWKKALLEAEETNASACMHPILKRPDEKRVTESAYENPRFVEDMVRLVAADLYEMPEVAAFFVECRNEESIHLHDAIARVRYRK

SEQ ID NO: 7351 - protein, 205 aa, Deinococcus deserti
  REGION 1..205: note = tr|C1CZ41|C1CZ41_DEIDV GTP cyclohydrolase 1; OS = Deinococcus deserti (strain VCD115 / DSM 17065 / LMG 22923) OX=546414 GN=folE PE=3 SV=1
MTEFDTEHHHIQQEKQELPGLSELTTQWLSAVGEDPQREGLLKTPHRVAKAWNFLTDGYRLTLDDAVGDAVFAAEGSEMVIVKDIEFYSMCEHHMLPFFGRAHVAYIPDGKILGLSKFARIVDLYSRRLQVQERITTQVADAVQDLLQPKGVAVLMEGVHLCMAMRGVQKQNSSTTTSAMRGLFRSDPRTRAEFMSAVQGTLRGR

SEQ ID NO: 7352 - protein, 188 aa, Deinococcus ficus
  REGION 1..188: note = tr|A0A221SZA0|A0A221SZA0_9DEIO GTP cyclohydrolase 1; OS = Deinococcus ficus OX=317577 GN=folE PE=3 SV=1
MPGLNPLTREWLAAIGEDPNREGLQRTPHRVAKAWQFMTAGYGQDVREVVGDGVFAAEGSEMVIVKDIEFYSMCEHHMLPFYGRAHVAYIPDRKILGLSKFARIVDLYSRRLQVQERITTQVADAVQDLLEPKGVAVFMEGVHLCMAMRGVQKQNSSTTTSAMRGLFRSDPRTRAEFMSAVQGTLRGR

SEQ ID NO: 7353 - protein, 202 aa, Deinococcus geothermalis
  REGION 1..202: note = tr|Q1J1X5|Q1J1X5_DEIGD GTP cyclohydrolase 1; OS = Deinococcus geothermalis (strain DSM 11300) OX=319795; GN = folE PE=3 SV=1
MTTSTISAADERQEVPGLSALTYDWLTAIGENPEREGLLKTPHRVAKAWRFLTAGYHQTLADAAGDAVFEAEGSEMVIVKDIEFYSMCEHHMLPFYGRAHIAYIPDGKILGLSKFARIVDLYARRLQVQERITTQIADAVEELLSPRGVAVLMEGVHLCMAMRGVQKQNSSTTTSAMRGVFKEDARTRAEFMSAVQNTLRSR

SEQ ID NO: 7354 - protein, 188 aa, Deinococcus gobiensis
  REGION 1..188: note = tr|H8GUH6|H8GUH6_DEIGI GTP cyclohydrolase 1; OS = Deinococcus gobiensis (strain DSM 21396 / JCM 16679 / CGMCC 1.7299 / I-0) OX=745776 GN=folE PE=3 SV=1
MPGLSGLTRDWLSAIGEDPEREGLERTPHRVAKAWSYLTSGYEQTLQSVVGEGVFASEGSEMVIVKDIEFYSMCEHHMLPFYGRAHVAYIPEGRILGLSKFARIVDLYSRRLQVQERITTQIADAVQDLLAPQGVAVLMEGVHLCMAMRGVQKQNSSTTTSAMRGLFRSDARTRAEFMSAVQGTLRGR

SEQ ID NO: 7355 - protein, 203 aa, Deinococcus grandis
  REGION 1..203: note = tr|A0A117DRC9|A0A117DRC9_9DEIO GTP cyclohydrolase 1; OS = Deinococcus grandis OX=57498 GN=folE PE=3 SV=1
MTIEPLISAADEKQEVPGLRALTHEWLGAIGEDPDREGLLKTPHRVAKAWGFLTAGYQKTLHEAVGDAVFAADGSEMVIVKDIEFYSMCEHHMLPFYGRAHIAYIPDGKILGLSKFARIVDLYSRRLQVQERITTQVADAVQELLAPRGVAVMMEGVHLCMAMRGVQKQNSSTSTSAMRGLFKSDARTRAEFMSAVQGTLRGR

SEQ ID NO: 7356 - protein, 203 aa, Deinococcus hopiensis
  REGION 1..203: note = tr|A0A1W1V7T0|A0A1W1V7T0_9DEIO GTP cyclohydrolase 1; OS = Deinococcus hopiensis KR-140 OX=695939 GN=folE PE=3 SV=1
MTIHPTISADDEGQEVPGLRDLTHGWLAAVGEDPEREGLLKTPHRVAKAWGFLTAGYHKSLQDAAGDAVFEADGSEMVIVKDIEFYSMCEHHMLPFYGRAHIAYIPDGKILGLSKFARIVDLYSRRLQVQERITTQIADAVSELLDPRGVAVLMEGVHLCMAMRGVQKQNSSTTTSAMRGLFKSDARTRAEFMSAVQGTLRSR

SEQ ID NO: 7357 - protein, 203 aa, Deinococcus indicus
  REGION 1..203: note = tr|A0A246BRQ3|A0A246BRQ3_9DEIO GTP cyclohydrolase 1; OS = Deinococcus indicus OX=223556 GN=folE PE=3 SV=1
MTIETVISAADEKQEVPGLSALTHSWLGAIGEDPEREGLIKTPHRVAKAWGFLTAGYQKTLHEAVGDAVFAADGSEMVIVKDIEFYSMCEHHMLPFYGRAHIAYIPDGQILGLSKFARIVDLYSRRLQVQERITTQVADAVQELLAPKGVAVVMEGVHLCMAMRGVQKQNSSTSTSAMRGLFKSDPRTRAEFMSAVQTTLRSR

SEQ ID NO: 7358 - protein, 203 aa, unidentified
  source 1..203: note = Deinococcus irradiatisoli
  REGION 1..203: note = tr|A0A2Z3JFZ2|A0A2Z3JFZ2_9DEIO GTP cyclohydrolase 1; OS = Deinococcus irradiatisoli OX=2202254 GN=folE PE=3 SV=1
MTVYPLISAADEKQEVPGLSALTTDWLSAIGEDPEREGLLKTPHRVAKAWGFLTAGYTKTLGDAAGDAVFDAEGSEMVIVKDIEFYSMCEHHMLPFYGRAHIAYVPSGKILGLSKFARIVDLYSRRLQVQERITAQIADAVEELLAPAGVAVMMEGTHLCMAMRGVQKQNSSTTTSSMRGVFKEDSRTRAEFMSAVQHTLRNR

SEQ ID NO: 7359 - protein, 211 aa, unidentified
  source 1..211: note = Deinococcus koreensis
  REGION 1..211: note = tr|A0A2K3UVQ5|A0A2K3UVQ5_9DEIO GTP cyclohydrolase 1; OS = Deinococcus koreensis OX=2054903 GN=folE PE=3 SV=1
MDGGRSPTLTIEPLISAADEKQEVPGLRALTHSWLDAIGEDPEREGLLKTPHRVAKAWGFLTAGYHKTLHDAVGDAVFAAEGSEMVIVKDIEFYSMCEHHMLPFYGRAHIAYIPDGQILGLSKFARVVDLYSRRLQVQERITTQIADAVQELLAPRGVAVMMEGVHLCMAMRGVQKQNSSTTTSAMRGLFKDDPRTRAEFMSAVQVTLRSR

SEQ ID NO: 7360 - protein, 335 aa, Deinococcus maricopensis
  REGION 1..335: note = tr|E8U4X8|E8U4X8_DEIML GTP cyclohydrolase I; OS = Deinococcus maricopensis (strain DSM 21211 / LMG 22137 / NRRL B-23946 / LB-34) OX=709986 GN=Deima_0457 PE=4 SV=1
MTANEILEPEGTPSTPKKAYLYPNKSGAQPVIARRYDADFRPDDAYKATLPDMTETVDAIEGAPVAIQQVGISGFRLPLRFESPQGELMLEGRVVGTVSLDAAEKGINMSRVMRTFYTFGEETFTPDTLVRIVQAYQQQVGTLCARLKVSFSYPALLGSLRSGLSGYQYYAASFEASVDADGTARRYIELDFVYSSACPCSAELAEHARDVRGAYAIPHSQRSKARVKVELQAGAQLPLIDLIEHLRRALMTETQVMVKREDEQAFAELNGAYVKFVEDAARLIYRELHGDARIVDFRAACSHMESLHSHDAVSVIVRGIPGGFRADFMDFPDLA

SEQ ID NO: 7361 - protein, 209 aa, Deinococcus marmoris
  REGION 1..209: note = tr|A0A1U7NWU3|A0A1U7NWU3_9DEIO GTP cyclohydrolase 1; OS = Deinococcus marmoris OX=249408 GN=folE PE=3 SV=1
MTTNAPDVDIAADPFMQEELELPGLSALTEQWLSAVGEDPQREGLLKTPHRVAKAWNFLTDGYRMTLEEAAGNAVFEAEGSEMVIVKDIEFYSMCEHHMLPFYGRAHVAYIPDGKILGLSKFARIVDLYARRLQVQERITTQLADAVVELLAPKGVAVLMEGTHLCMAMRGVQKQNSSTTTSAMRGVFRDDPRTRAEFMSATQTTLRSR

SEQ ID NO: 7362 - protein, 216 aa, unidentified
  source 1..216: note = Deinococcus metallilatus
  REGION 1..216: note = tr|A0A4Q0VZM8|A0A4Q0VZM8_9DEIO GTP cyclohydrolase 1; OS = Deinococcus metallilatus OX=1211322 GN=folE PE=3 SV=1
MHSCPRAREGAVTLTTPPTISAAEERQEVPGLRGLTYDWLSAIGEDPEREGLQRTPHRVAKAWSFLTAGYQKTLADAAGDAVFEAEGSEMVIVKDIEFYSMCEHHMLPFYGRAHIAYIPDGKILGLSKFARIVDLYSRRLQVQERITTQIADAVEELLAPKGVAVLMEGVHLCMAMRGVQKQNSSTTTSAMRGVFKEDARTRAEFMSAVQNTLRNR

SEQ ID NO: 7363 - protein, 220 aa, Deinococcus peraridilitoris
  REGION 1..220: note = tr|K9ZZN9|K9ZZN9_DEIPD GTP cyclohydrolase 1; OS = Deinococcus peraridilitoris (strain DSM 19664 / LMG 22246 / CIP 109416 / KR-200) OX=937777 GN=folE PE=3 SV=1
MPTDNAQLIGQTEVDDLEQLQDSDTLPEELIKTPGLAQLTHEWLGLIGEDPQREGLLKTPQRVEKAWHYLTAGYRMELADVSNGAVFEAEGSEMVVVKDIEFYSMCEHHMLPFFGRAHIGYIPERKILGLSKFARITDMFARRLQVQERITTQIAQAVQELLEPKGVAVVLEGVHLCMAMRGVEKQHSSTTTSAMRGAFREDARTRAEFMQAIQKRAVSL

SEQ ID NO: 7364 - protein, 203 aa, unidentified
  source 1..203: note = Deinococcus phoenicis
  REGION 1..203: note = tr|A0A016QKA8|A0A016QKA8_9DEIO GTP cyclohydrolase 1; OS = Deinococcus phoenicis OX=1476583 GN=folE PE=3 SV=1
MTVPPTISAAEEKQEVPGLSGLTYDWLSAIGEDPEREGLQKTPHRVAKAWGFLTAGYHKSLADAAGDAVFEAEGSEMVIVKDIEFYSMCEHHMLPFYGRAHIAYIPDGKILGLSKFARIVDLYSRRLQVQERITTQIADAVGELLAPRGVAVLMEGVHLCMAMRGVQKQNSSTTTSAMRGLFKEDARTRAEFMSAVQNTLRSR

SEQ ID NO: 7365 - protein, 208 aa, Deinococcus proteolyticus
  REGION 1..208: note = tr|F0RIY2|F0RIY2_DEIPM GTP cyclohydrolase 1; OS = Deinococcus proteolyticus (strain ATCC 35074 / DSM 20540 / JCM 6276 / NBRC 101906 / NCIMB 13154 / VKM Ac-1939 / CCM 27 03 / MRP) OX=693977 GN=folE PE=3 SV=1
MSSAPDKITLPGAAAQAELEVPGLADLTHSWLSAIGEDPQREGLQRTPHRVAKAWAYMTEGYGQTLADVVGEGVFAAEGSEMVIVKDIEFYSMCEHHMLPFYGRAHVAYIPDGKILGLSKFARIVDLYSRRLQVQERITTQVAEAVEELLQPKGVAVLMEGVHLCMAMRGVQKQNSSTTTSAMRGLFRTDPRTRAEFMSAVQGTLRSR

SEQ ID NO: 7366 - protein, 192 aa, unidentified
  source 1..192: note = Deinococcus puniceus
  REGION 1..192: note = tr|A0A172TD95|A0A172TD95_9DEIO GTP cyclohydrolase 1; OS = Deinococcus puniceus OX=1182568 GN=folE PE=3 SV=1
MGAVRPDLKLLTHDWLSAIGEDPEREGLLKTPERVAKAWGFLTGGYTQTLTGVTNDAVFEAEGSEMVIVKDIEFYSMCEHHMLPFYGRAHIAYIPDGKILGLSKFARIVDLYARRLQVQERITTQVADAVLELLAPKGVAVLMEGVHLCMAMRGVQKQNSSTTTSAMRGLFKDDARTRAEFMSAVQGTLRSR

SEQ ID NO: 7367 - protein, 216 aa, Deinococcus radiodurans
  REGION 1..216: note = sp|Q9RYB4|GCH1_DEIRA GTP cyclohydrolase 1; OS = Deinococcus radiodurans (strain ATCC 13939 / DSM 20539 / JCM 16871 / LMG 4051 / NBRC 15346 / NCIMB 9279 / R1 / VKM B-142 2) OX=243230 GN=folE PE=3 SV=1
MPQARGEGATPPTSLPNPSLKGVPLPDNPNNLEPLTREWLAAIGEDPDREGLQRTPQRVAKAWAYMTEGYGQTLAQVVGEGVFAAEGSEMVIVKDIEFYSMCEHHMLPFYGRAHVAYIPGTRILGLSKFARIVDLYSRRLQVQERITTQVADAVEELLAPKGVAVLMEGIHLCMAMRGVQKQNSSTTTSAMRGLFRSDPRTRAEFMSAVQGTLRGR

SEQ ID NO: 7368 - protein, 216 aa, Deinococcus radiodurans; identical to SEQ ID NO: 7367
  REGION 1..216: note = tr|A0A5C1MQY7|A0A5C1MQY7_DEIRD GTP cyclohydrolase 1; OS = Deinococcus radiodurans OX=1299 GN=folE PE=3 SV=1

SEQ ID NO: 7369 - protein, 215 aa, Deinococcus radiophilus
  REGION 1..215: note = tr|A0A431VWX5|A0A431VWX5_9DEIO GTP cyclohydrolase 1; OS = Deinococcus radiophilus OX=32062 GN=folE PE=3 SV=1
MRQTAGHEKGSELTTPPNISAADEQIEVPGLSGLTRDWLSAIGEDPDREGLQRTPHRVAKAWGFLTAGYGQTLEDAAGSAVFAAEGSEMVIVKDIEFYSMCEHHMLPFYGRAHVAYIPGDKILGLSKFARIVDLYSRRLQVQERITTQVADAIEELLEPKGVAVLMEGIHLCMAMRGVQKQNSSTTTSAMRGLFRNDPRTRAEFMSAVQGTLRNR

SEQ ID NO: 7370 - protein, 209 aa, Deinococcus radiopugnans
  REGION 1..209: note = tr|A0A5C4Y7D0|A0A5C4Y7D0_9DEIO GTP cyclohydrolase 1; OS = Deinococcus radiopugnans ATCC 19172 OX=585398 GN=folE; PE = 3 SV=1
MTTNVPDVDIAADPFMQEELELPGLSALTGQWLAAVGEDPQREGLLKTPHRVAKAWNFLTDGYRMTLEEAAGNAVFEAEGSEMVIVKDIEFYSMCEHHMLPFYGRAHIAYIPDGKILGLSKFARIVDLYSRRLQVQERITTQLADAVQELLDPKGVAVLMEGTHLCMAMRGVQKQNSSTTTSAMRGVFRDDPRTRGEFMSAVQTTLRSR

SEQ ID NO: 7371 - protein, 214 aa, Deinococcus reticulitermitis
  REGION 1..214: note = tr|A0A1H6Z1D8|A0A1H6Z1D8_9DEIO GTP cyclohydrolase 1; OS = Deinococcus reticulitermitis OX=856736 GN=folE PE=3 SV=1
MLYTRLALETSPVTPPEDALRDDPPGLPGLGDLTRAWLSAIGEDPDREGLTRTPQRVARAWAHLTAGYHQTLAEVVGEGVFAAEGSEMVIVKDIEFYSMCEHHMLPFYGRAHVAYIPREKILGLSKFARIVDLYSRRLQVQERVTTQVADAVEELLAPKGVAVLMEGIHLCMAMRGVQKQNSSTTTSAMRGLFRSDPRTRAEFMSAVQVTLRGR

SEQ ID NO: 7372 - protein, 203 aa, unidentified
  source 1..203: note = Deinococcus soli
  REGION 1..203: note = tr|A0A0F7JV94|A0A0F7JV94_9DEIO GTP cyclohydrolase 1; OS = Deinococcus soli Cha et al. 2016 OX=1309411 GN=folE; PE = 3 SV=1
MTIEPLISAADEKQEVPGLRALTHDWLGAIGEDPDREGLLKTPHRVAKAWGFLTAGYQKTLHEAVGDAVFAADGSEMVIVKDIEFYSMCEHHMLPFYGRAHIAYIPDGKILGLSKFARIVDLYSRRLQVQERITTQVADAVQELLAPRGVAVMMEGVHLCMAMRGVQKQNSSTSTSAMRGLFKSDARTRAEFMSAVQGTLRGR

SEQ ID NO: 7373 - protein, 212 aa, Deinococcus sp.
  REGION 1..212: note = tr|A0A3G8YG57|A0A3G8YG57_9DEIO GTP cyclohydrolase 1; OS = Deinococcus sp. S14-83 OX=2489213 GN=folE PE=3 SV=1
MWPTKEVTDLTTSPIIRADNERLEVPGVAALTHDWLAAIGEDPDREGLLKTPQRVARAWGFLTGGYQLTLGEAAGDAVFEAEGSEMVIVKDIEFYSMCEHHMLPFYGRAHIAYIPDGKILGLSKFARIVDLYARRLQVQERITTQVAEAVEELLAPKGVAVLLEGTHLCMAMRGVQKQNSSTTTSAMRGSFRDDPRTRGEFMSAVQQTFKNR

SEQ ID NO: 7374 - protein, 212 aa, Deinococcus sp.; identical to SEQ ID NO: 7373
  REGION 1..212: note = tr|A0A553ULB6|A0A553ULB6_9DEIO GTP cyclohydrolase 1; OS = Deinococcus sp. H1 OX=2592048 GN=folE PE=3 SV=1

SEQ ID NO: 7375 - protein, 209 aa, unidentified; identical to SEQ ID NO: 7370
  source 1..209: note = Deinococcus swuensis
  REGION 1..209: note = tr|A0A0A7KHK3|A0A0A7KHK3_9DEIO GTP cyclohydrolase 1; OS = Deinococcus swuensis OX=1182571 GN=folE PE=3 SV=1

SEQ ID NO: 7376 - protein, 194 aa, Deinococcus wulumuqiensis
  REGION 1..194: note = tr|A0A345IIU0|A0A345IIU0_9DEIO GTP cyclohydrolase 1; OS = Deinococcus wulumuqiensis OX=980427 GN=folE PE=3 SV=1
MNMTDPKLPLEPLTREWLSAIGEDPDREGLQRTPQRVAKAWAYMTEGYGQTLAQVVGEGVFAAEGSEMVIVKDIEFYSMCEHHMLPFYGRAHVAYIPNSRILGLSKFARIVDLYSRRLQVQERITTQVADAVEELLAPKGVAVLMEGIHLCMAMRGVQKQNSSTTTSAMRGLFRSDPRTRAEFMSAVQGTLRSR

SEQ ID NO: 7377 - protein, 220 aa, Deinococcus yavapaiensis
  REGION 1..220: note = tr|A0A318S869|A0A318S869_9DEIO GTP cyclohydrolase 1; OS = Deinococcus yavapaiensis KR-236 OX=694435 GN=folE PE=3; SV = 1
MLIERSIPTGQVDVDEIDQMRDSDTLPDEHIKTSGLADLTDEWLTIIGEDPDREGLLKTPKRVEKAWQFITSGYRMDLQEVANDAVFAAEGSEMVIVKDIEFYSMCEHHMLPFFGRAHIGYIPNGKILGLSKFARITDMFARRLQVQERVTTQIAEAIQELLQPLGTAVVLEGVHLCMAMRGVEKQHSSTTTLAMRGAFKDDARTRAEFMTAIRQRSVTL

SEQ ID NO: 7378 - protein, 342 aa, unidentified
  source 1..342: note = Unknown
  REGION 1..342: note = tr|A0A3M2F2C2|A0A3M2F2C2_9DEIN GTP cyclohydrolase FolE2 OS=Deinococcus-Thermus bacterium OX=1913990 GN=folE2; PE = 3 SV=1
MLRYDDKQTLEPLPPSGQNGGRKAYLFRNTDGAEPVIPRVYDAHFRPDEAYRASLPDMTETVDAVEGANVPIPQVGIAGFRLPLRFAVPSGEPLLLEARVTGTVSLEADLKGINMSRIIRTFYARKEAIFDLDTLAQVVRDYQRELGSLSARVRVAFSYPMLVPSLRSGLEGYQYYDGRYEAAVEGSGPVRRYVELDFVYSSACPCSAELAEHARDVRGAYAIPHSQRSVAHLRVEVAEGARLHLEDLVHHAREALKTEVQVMVKREDEQAFAELNGVYVKFVEDAVRLLYARLVADPRIRDFQVACAHLESLHAHDAVAVIAKGVPGGFRPDFTDFSSLVR

SEQ ID NO: 7379 - protein, 296 aa, Delftia acidovorans
  REGION 1..296: note = sp|A9C020|GCH4_DELAS GTP cyclohydrolase FolE2; OS = Delftia acidovorans (strain DSM 14801 / SPH-1); OX = 398578 GN=folE2 PE=3 SV=1
MLAPLPDVSLTDPAPSLSPLQWVGMQGIDLPVTVAEPGYWRELHARADVQVDLPAAHVKGIHMSRLYRQLDSLAEESALSALALRHALQAMIDSHLDCQSRSARMRLSLDLLAQRPALVTHDLSGWKSYPVRLDATLAQGVFQLRLQVGVGYSSTCPCSAALSRQLLEQGFLQAFAGEPLVEPDQVASWLRRHGTLATAHSQRSEAQVSVDLACDAPDLGILPLIARVEQALGTPVQTAVKRADEQAFAALNGRNLMFVEDAARRIQAALEGIYARPRVHVRHMESLHPHDAVAWA

SEQ ID NO: 7380 - protein, 296 aa, Delftia acidovorans
  REGION 1..296: note = tr|A0A286J291|A0A286J291_DELAC GTP cyclohydrolase FolE2 OS=Delftia acidovorans OX=80866 GN=folE2 PE=3 SV=1
MPAPLPDVSLTDPAPSLSPLQWVGMQGIDLPVTVAEPGYWRELHARADVQVDLPAAHVKGIHMSRLYRQLDSLAEESALSALALRHALQAMIDSHLDCQSRSARLRLSLDLLAQRPALVTHDLSGWKSYPVRLDATLAQGVFQLRLQVGVGYSSTCPCSAALSRQLLEQGFLQAFAGEPLVEPDQVASWLRRHGTLATAHSQRSEAQVSVDLACDAPDLGILPLIARVEQALGTPVQTAVKRADEQAFAALNGRNLMFVEDAARRIQAALEGIYARPRVHVRHMESLHPHDAVAWA

SEQ ID NO: 7381 - protein, 296 aa, Delftia lacustris
  REGION 1..296: note = tr|A0A1H3NTI4|A0A1H3NTI4_9BURK GTP cyclohydrolase FolE2 OS=Delftia lacustris OX=558537 GN=folE2 PE=3 SV=1
MLAPLPDVSLTDPAPSLSPLQWVGMQGIDLPVTVAEPGYWRELHARADVQVDLPAAHVKGIHMSRLYRQLDSLAEESALSALALRHALQAMIDSHLDCQSRSARLRLSLDLLTQRPALVTHDLSGWKSYPVRLDATLAQGVFQLRLQVGVGYSSTCPCSAALSRQLLEQGFLQAFAGEPLVEPDQVASWLRRHGTLATAHSQRSEAQVSVDLACDAPDLGILPLIARVEQALGTPVQTAVKRADEQAFAALNGRNLMFVEDAARRIQAALEGSYAQPRVHVRHMESLHPHDAVSWA

SEQ ID NO: 7382 - protein, 296 aa, Delftia sp.
  REGION 1..296: note = tr|A0A543B958|A0A543B958_9BURK GTP cyclohydrolase FolE2 OS=Delftia sp. HK171 OX=1920191 GN=folE2 PE=3 SV=1
MPAPLPDVSLTDPAPSLSPLQWVGMQGIDLPVTVAEPGYWRELHARADVQVDLPAAHVKGIHMSRLYRQLDSLAEESALSALALRHALQAMIDSHLDCQSRSARLRLSLDLLTQRPALVTHDLSGWKSYPVRLDATLAQGVFQLRLQVGVGYSSTCPCSAALSRQLLEQGFLQAFAGEPLVEPDQVASWLRRHGTLATAHSQRSEAQVSVDLACDAPDLGILPLIARVEQALGTPVQTAVKRADEQAFAALNGRNLMFVEDAARRIQAALEGSYAQPRVHVRHMESLHPHDAVAWA

SEQ ID NO: 7383 - protein, 296 aa, Delftia sp.
  REGION 1..296: note = tr|A0A1C7LBJ9|A0A1C7LBJ9_9BURK GTP cyclohydrolase FolE2 OS=Delftia sp. JD2 OX=469553 GN=folE2 PE=3 SV=1
MPAPLPDVSLTDPAPSLSPLQWVGMQGIDLPVTVAEPGYWRELHARADVQVDLPAAHVKGIHMSRLYRQLDSLAEESALSALALRHALQAMIDSHLDCQSRSARLRLSLDLLAQRPALVTHDLSGWKSYPVRLDATLAQGVFQLRLQVGVGYSSTCPCSAALSRQLLEHGFLQAFAGEPLVEPDQVASWLRRHGTLATAHSQRSKAQVSVDLACDGPDLGILPLIARVEQALGTPVQTAVKRADEQAFAALNGRNLMFVEDAARRIQAALEGIYARPRVHVRHMESLHPHDAVAWA

SEQ ID NO: 7384 - protein, 296 aa, Delftia tsuruhatensis
  REGION 1..296: note = tr|A0A072T4U5|A0A072T4U5_9BURK GTP cyclohydrolase FolE2 OS=Delftia tsuruhatensis OX=180282 GN=folE2 PE=3 SV=1
MLAPLPDVSLTDPAPSLSPLQWVGMQGIDLPVTVAEPGYWRELHARADVQVDLPAAHVKGIHMSRLYRQLDSLAEESALSALALRHALQAMIDSHLDCQSRSARLRLSLDLLAQRPALVTHDLSGWKSYPVRLDATLAQGVFQLRLQVGVGYSSTCPCSAALSRQLLEQGFLQAFAGEPLVEPDQVASWLRRHGTLATAHSQRSEAQVSVDLACDAPDLGILPLIARVEQALGTPVQTAVKRADEQAFAALNGRNLMFVEDAARRIQAALEGSYAQPRVHVRHMESLHPHDAVSWA

SEQ ID NO: 7385 - protein, 296 aa, Delftia tsuruhatensis; identical to SEQ ID NO: 7381
  REGION 1..296: note = tr|A0A1D8IW74|A0A1D8IW74_9BURK GTP cyclohydrolase FolE2 OS=Delftia tsuruhatensis OX=180282 GN=folE2 PE=3 SV=1

SEQ ID NO: 7386 - protein, 258 aa, unidentified
  source 1..258: note = Unknown
  REGION 1..258: note = tr|A0A1V4MPR4|A0A1V4MPR4_9DELT GTP cyclohydrolase FolE2 OS=delta proteobacterium MLS_D OX=1775673 GN=folE2; PE = 3 SV=1
MVDVQSQQDYRNIAIQKVGVKGVKYPVIVLDRANGTQHVNATINMYVNLPHRFKGTHMSRFLEILNKYRGQINIKTFQTILTTIREKLDGESAYMEIEFPYFVEKKAPVSRSRSLMEYHCSFTGENSWHRSDFLVSVTVPVTTVCPCSKEISAGGAHNQRSMVTVKLRFKKFFWIEDVISLVENSASAEVFSLLKRSDEKFVTEKAYENPMFVEDVVRSVAEKLNSDVNFTWYSVEAENLESIHNHSAYAYIESDVDC

SEQ ID NO: 7387 - protein, 244 aa, unidentified
  source 1..244: note = Unknown
  REGION 1..244: note = tr|Q1NY05|Q1NY05_9DELT GTP cyclohydrolase FolE2; OS = delta proteobacterium MLMS-1 OX=262489 GN=folE2 PE=3; SV = 1
MELKSVGIKDIRYPITVRERSGGLQQTVASIDLLANLPRQYRESCVSDFVEVLNRYQEEMSNRIFRQLLAEVKERLRADSAHVEMTFPYFLEKTAPVSGTTSLMEYRCRFTGGIGAGEDFMLSVWVPATTLCPCSREISACGAHNQRAEINLNVKYREFIWLEELISLAAAGASCEVYALLKRPDEKYVTEQAYHNPRFVEDVVRRVAEAALDHPAITWFSVGAESFESIHKHSAYAYVDSDDL

SEQ ID NO: 7388 - protein, 262 aa, unidentified
  source 1..262: note = Deltaproteobacteria bacterium
  REGION 1..262: note = tr|A0A1Q7Z5I1|A0A1Q7Z5I1_9DELT GTP cyclohydrolase FolE2 OS=Deltaproteobacteria bacterium 13_1_20CM_2_69_21; OX = 1805109 GN=folE2 PE=3 SV=1
MRRTLSALRDVHSEDDSRRLALDRAGVKGLRYPICVLDRARGLQHTVAEIDMSVSVPHKRKGAHMSRFVELLNRHRREIDIRKFRTLCAELRRDHDADAARVEVRFPYFIEKKAPVTGAVGLLHYSCTFGASVTRDDYDLWVALEVPVTTLCPCSKAISEHGAHNQRSLVAVRVWFDRFFWIEDLIALVEDSASCDLYALLKRPDEKYVTERAWQRPRFVEDLVREVGTRLRRDPNFTRWEVEAESFESIHAHSAYATLKHP

SEQ ID NO: 7389 - protein, 255 aa, unidentified
  source 1..255: note = Deltaproteobacteria bacterium
  REGION 1..255: note = tr|A0A2N2I0S3|A0A2N2I0S3_9DELT GTP cyclohydrolase FolE2 OS=Deltaproteobacteria bacterium HGW-Deltaproteobacteria-2 OX=2013747 GN=folE2 PE=3 SV=1
MIDIQNQKDFRNIDIKKVGVKNIKYPIIVLDRVKGTQIVNATINMYVNLPHHFKGTHMSRFIEALNEFKGQISIKTFQSILEKTRQKLHAHSAHMEIEFAYFLEKTAPVSKAKSLMEYHCIFCGESNAEKSDFQVGVMVPVTTVCPCSREISQFGAHNQRSIVTTKVRFRKFFWIEDLIKIVEDSASGEVYSLLKRVDEKYVTEKAYENPKFVEDVVRSVAVKLNKDDNFTWYCIEAENFESIHNHSAYAYVEKG

SEQ ID NO: 7390 - protein, 261 aa, Dendrosporobacter quercicolus
  REGION 1..261: note = tr|A0A1G9LG50|A0A1G9LG50_9FIRM GTP cyclohydrolase FolE2 OS=Dendrosporobacter quercicolus OX=146817 GN=folE2; PE = 3 SV=1
MKDVQNLADERGIEIQKVGVSDVHLPFFIKTKNGSLQSVLARIKLTVDLPKEYKGTHMSRFIEILSEWSQKPVSFREMEQILSDTLTRLSARSAYLKIDFKYFIEKIAPVSGLKSMLDLDCSFSAKLLQGQPLDFVMGVNVPFTSLCPCSKEIAQYGAHNQRGLMRVRLKQAAGFIWIEDLAALMEAQGSCPVFPLLKREDEKYVTELAYENPKFVEDILRDLVLALRKLEHITWFEIECENYESIHNHSAYASHTEFVER

SEQ ID NO: 7391 - protein, 267 aa, Denitratisoma sp.
  REGION 1..267: note = tr|A0A518U856|A0A518U856_9PROT GTP cyclohydrolase FolE2 OS=Denitratisoma sp. DHT3 OX=1981880 GN=folE2 PE=3; SV = 1
MHSRNTHAIPDVQNFADSRELPINKVGIKSIRHPVKVLDKSEGIQHTVATFNMYVGLPHNFKGTHMSRFVEILNSQEREISVENFESMLRDMVQKLEAETGHVEMTFPYFIRKEAPISGVASLMDYEVTFIGEILAEGRYRQSIKVLVPTTSLCPCSKKISERGAHNQRSHVTITATTNALVWIEELVRMAEDQASCELFGLLKRPDEKYVTERAYDNPKFVEDLVRDVAAALNAEPRIDAYVIEAENFESIHNHSAYALIEHDKQQ

SEQ ID NO: 7392 - protein, 197 aa, Denitrobacterium detoxificans
  REGION 1..197: note = tr|A0A1H8TF60|A0A1H8TF60_9ACTN GTP cyclohydrolase 1; OS = Denitrobacterium detoxificans OX=79604 GN=folE PE=3 SV=1
MSNELDISGKSMDLKKVEEGVRLILEGVGEDPNREGLLKTPERVAKMYAECFAGLAADPAEYFETTFDEHHEEMVLVRDIPFYSMCEHHLAPFFGKAHVAYIPASDGRICGISKLARLVDAFARRPQVQERLTSQIADTLIEQLHPQGVIVVMEAEHLCMSMRGVKKPGSKTTTSAVRGAFEKNHATRAEALSLIFR

SEQ ID NO: 7393 - protein, 265 aa, unidentified
  source 1..265: note = Denitromonas halophilus
  REGION 1..265: note = tr|A0A557R2M7|A0A557R2M7_9RHOO GTP cyclohydrolase FolE2 OS=Denitromonas halophilus OX=1629404 GN=folE2 PE=3; SV = 1
MSAIDSQAIPDVQNSQDSRQIAIDKVGIKAIRHPVTVSDRSGGVQHTIAMFNMYVGLPHNFKGTHMSRFVEILNGGEREISVESFEPMLRDMVQRLEAETGHVEMTFPYFINKAAPISGVNSLMDYDVTFIGEITEGGVYSFRMKIVVPVTSLCPCSKKISDYGAHNQRSHVTVTASLREHVWIEEIVEQVEAQASCELYGLLKRPDEKYVTERAYDNPKFVEDMVRDVAGVLDRESRIGAYVVESENFESIHNHSAYALIERQK

SEQ ID NO: 7394 - protein, 265 aa, unidentified
  source 1..265: note = Denitromonas halophilus
  REGION 1..265: note = tr|A0A558EPV8|A0A558EPV8_9RHOO GTP cyclohydrolase FolE2 OS=Denitromonas halophilus OX=1629404 GN=folE2 PE=3; SV = 1
MSAIDSQAIPDVQNSQDSRQIAIDKVGIKAIRHPVTVSDRSGGVQHTIAMFNMYVGLPHNFKGTHMSRFVEILNGGEREISVESFEPMLREMVQRLEAETGHVEMTFPYFINKAAPISGVNSLMDYDVTFIGEITEGGVYSFRMKIVVPVTSLCPCSKKISDYGAHNQRSHVTVTANLREHVWIEEIVEQVEAQASCELYGLLKRPDEKYVTERAYDNPKFVEDMVRDVAGVLDRESRIGAYVVESENFESIHNHSAYALIERQK

SEQ ID NO: 7395 - protein, 256 aa, Denitrovibrio acetiphilus
  REGION 1..256: note = tr|D4H3R9|D4H3R9_DENA2 GTP cyclohydrolase FolE2; OS = Denitrovibrio acetiphilus (strain DSM 12809 / N2460); OX = 522772 GN=folE2 PE=3 SV=1
MKDIQSQSDTRNLDVDKVGIKDIRYPIVLSDKERGSQHTVALINMYVKLPHNFKGTHMSRFVEILSRHSSNIDLYTVGDILNEMQERLDSEEAYIELSFDYFMKKKAPVTGLEAVMDYKCRYFGAAGNEGRDQVMTVKVPVMTLCPCSKEISKYGAHNQRSFISISVRMKKMIWIEELIELAESCGSSPIYPLLKREDEKYVTEKSYENPAFVEDVVRNVAEKLMKEDRVTWFEVSSENLESIHNHSAYAVITRSK

SEQ ID NO: 7396 - protein, 271 aa, Denitrovibrio sp.
  REGION 1..271: note = tr|A0A2N6D645|A0A2N6D645_9BACT GTP cyclohydrolase FolE2 OS=Denitrovibrio sp. OX=2053308 GN=folE2 PE=3 SV=1
MPAVSYELENEKKVILKDIQSQHDGRNLDIDKVGIKDIQYPIVLSDKEKGRQHTVARINMYVKLPHNFKGTHMSRFVEILSNHSSNIDLYKVNDILEEMKEKLDSEESFIELSFQYFLNRKAPVSGQSAMMDYHCRYVGSAGAKGRDQVLTIRVPVMTLCPCSKEISSYGAHNQRSYINISVRMKKMVWIEELIELAESCGSSPIYPLLKREDEKYVTEQSYNNPAFVEDVVRNVAEKLMKEDRVTWFEVSSENIESIHNHSAYAVITRSK

SEQ ID NO: 7397 - protein, 200 aa, Dermabacter hominis
  REGION 1..200: note = tr|A0A069SYM8|A0A069SYM8_9MICO GTP cyclohydrolase 1; OS = Dermabacter hominis 1368 OX=1450519 GN=folE PE=3 SV=1
MSESHNAVGSVDHARIERAVREILEAIGEDPSRDGLVDTPSRVARMYAEVFRGLHEDPRVHMQTKFEVEHRELVLVRDIRFYSMCEHHLVPFFGRAHVGYVPGKDGTVAGLSKFARLVEGYAARPQVQERLTSQIADAIHEELQAHGTIVVLQAEHLCMAMRGVKSPNAETVTSAVRGSLQSNAATRSEAMSLILTGLHH

SEQ ID NO: 7398 - protein, 200 aa, Dermabacter hominis
  REGION 1..200: note = tr|A0A2I1LKI9|A0A2I1LKI9_9MICO GTP cyclohydrolase 1; OS = Dermabacter hominis OX=36740 GN=folE PE=3 SV=1
MTENHNVVESIDRERIERAVREILEAVGEDPSRDGLVDTPSRVARMYAEVFRGLHEDPRVHMQTKFEVEHRELVLVRDIRFYSMCEHHLVPFFGRAHVGYVPGKDGTVAGLSKFARLVEGYAARPQVQERLTSQIADAIHEELQAHGTIVVLQAEHLCMAMRGVKSPNAETVTSAVRGSLQSNAATRSEAMSLILTGLHH

SEQ ID NO: 7399 - protein, 200 aa, Dermabacter sp.; identical to SEQ ID NO: 7397
  REGION 1..200: note = tr|A0A1F1U1Q4|A0A1F1U1Q4_9MICO GTP cyclohydrolase 1; OS = Dermabacter sp. HMSC08H10 OX=1581144 GN=folE PE=3 SV=1

SEQ ID NO: 7400 - protein, 200 aa, Dermabacter sp.
  REGION 1..200: note = tr|A0A3S0T6C7|A0A3S0T6C7_9MICO GTP cyclohydrolase 1; OS = Dermabacter sp. HSID17554 OX=2419511 GN=folE PE=3 SV=1
MSENHNAVESIDRERIERAVREILEAIGEDPDRDGLLDTPARVARMYGEVFRGLHENPREHMHTKFEVEHRELVLVRDIRFYSMCEHHLVPFFGRAHVGYVPGKDGTVAGLSKFARLVEGYAARPQVQERLTSQIADAIHEELHAHGTIVVLQAEHLCMAMRGVKSPNAETVTSAVRGSLQSNAATRSEAMSLILTGLHH

SEQ ID NO: 7401 - protein, 200 aa, unidentified
  source 1..200: note = Dermabacter vaginalis
  REGION 1..200: note = tr|A0A1B0ZHM8|A0A1B0ZHM8_9MICO GTP cyclohydrolase 1; OS = Dermabacter vaginalis OX=1630135 GN=folE PE=3 SV=1
MSENHNAVESIDQERIERAVREILEAIGEDPSRDGLLDTPARVARMYSEVFRGLHENPREHMHTKFEVEHRELVLVRDIRFYSMCEHHLVPFFGRAHVGYVPGRDGTVAGLSKFARLVEGYAARPQVQERLTSQIADAIHEELHAHGTIVVLQAEHLCMAMRGVKSPNAETVTSAVRGSLQSNAATRSEAMSLILTGLHH

SEQ ID NO: 7402 - protein, 195 aa, unidentified
  source 1..195: note = Dermacoccaceae bacterium
  REGION 1..195: note = tr|A0A563DVD5|A0A563DVD5_9MICO GTP cyclohydrolase 1; OS = Dermacoccaceae bacterium C5-26 OX=1660198 GN=folE PE=3; SV = 1
MTNPSGVDLTRAAAAVRELLIALGEDPDREGLKDTPGRVARAYAESFAGMWQHPSEALNRTFDVDHDELIIVKDIEVYSTCEHHLVPFHGVAHVGYIPDRDGRVTGLSKIARLVEVFAKRPQVQERLTTQIADALVEHLGALGVIVVVDCEHLCMSMRGVRKPGAHTITSAVRGQLRNPATRAEAMSLLLSDSRR

SEQ ID NO: 7403 - protein, 214 aa, unidentified
  source 1..214: note = Dermacoccaceae bacterium
  REGION 1..214: note = tr|A0A563E5J1|A0A563E5J1_9MICO GTP cyclohydrolase 1; OS = Dermacoccaceae bacterium C5-26 OX=1660198 GN=folE PE=3; SV = 1
MSLNELSEVDLDGQRRAPSGRHLEVVHDRDAVDLPAAARAVSDLLVALGRDPSSAHLQDTPRRVAQSYAELLTPRKFALTTFPNDEAYSELVLVKDIPVQSLCEHHLLPFQGVAHVGYVPGERILGLSKLARVVELFARDLQVQERLTEQVADWLQDNLAPQGVGVVIEAEHLCMSLRGVRATGAHTVTSATRGSLHDDKDARHEFLARSGIYS

SEQ ID NO: 7404 - protein, 197 aa, Dermacoccus abyssi
  REGION 1..197: note = tr|A0A417Z1F2|A0A417Z1F2_9MICO GTP cyclohydrolase 1; OS = Dermacoccus abyssi OX=322596 GN=folE PE=3 SV=1
MADTNAVPSGEVDLPRIEAAVREILAAVGEDPDREGLLDTPARVARAYAETFAGLRRTPADVLDKTFDVEHEELILVRDIEVYSTCEHHLVPFHGVAHVGYIPSPSGRVTGLSKLARLVDVYAKRPQVQERLTTQIADALVEHLDAQGVIVVIEAEHLCMSMRGIRKPGARTITSAVRGQLRNTATRAEAMSLLMAK

SEQ ID NO: 7405 - protein, 200 aa, Dermacoccus nishinomiyaensis
  REGION 1..200: note = tr|A0A4U0RPC1|A0A4U0RPC1_9MICO GTP cyclohydrolase 1; OS = Dermacoccus nishinomiyaensis OX=1274 GN=folE PE=3 SV=1
MSAVAETHDVVGAEVDLARLEAAVREILLAVGENPDREGLVETPARVARAYAEIFAGLRQNPEDVLVKTFDVDHEELILVRDIEVYSTCEHHLVPFHGVAHVGYIPSTSGRVTGLSKLARLVDVFAKRPQVQERLTTQIADALVEHLDAQGVIVVIEAEHLCMSMRGIRKPGARTITSAVRGQLRNPATRAEAMSLVMGK

SEQ ID NO: 7406 - protein, 197 aa, Dermacoccus nishinomiyaensis
  REGION 1..197: note = tr|A0A075JJY4|A0A075JJY4_9MICO GTP cyclohydrolase 1; OS = Dermacoccus nishinomiyaensis OX=1274 GN=folE PE=3 SV=1
MAETHDVVGAEVDLARLEAAVREILLAVGENPDREGLVETPARVARAYAEIFAGLRQNPEDVLVKTFDVDHEELILVRDIEVYSTCEHHLVPFHGVAHVGYIPSTSGRVTGLSKLARLVDVFAKRPQVQERLTTQIADALVEHLDAQGVIVVIEAEHLCMSMRGIRKPGARTITSAVRGQLRNPATRAEAMSLVMGK

SEQ ID NO: 7407 - protein, 197 aa, Dermacoccus sp.; identical to SEQ ID NO: 7406
  REGION 1..197: note = tr|A0A4R1FHD9|A0A4R1FHD9_9MICO GTP cyclohydrolase 1; OS = Dermacoccus sp. SAI-028 OX=2485144 GN=folE PE=3 SV=1

SEQ ID NO: 7408 - protein, 200 aa, Dermacoccus sp.
  REGION 1..200: note = tr|A0A0J0A9C1|A0A0J0A9C1_9MICO GTP cyclohydrolase 1; OS = Dermacoccus sp. PE3 OX=1641401 GN=folE PE=3 SV=1
MRVLADTNAVPSGEVDLPRIEAAVREILTAVGEDPDREGLLDTPARVARAYAETFVGLRQTPADVLDKTFDVEHEELILVRDIEVYSTCEHHLVPFHGVAHVGYIPSASGRVTGLSKLARLVDVYAKRPQVQERLTTQIADALVEHLDAQGVIVVIEAEHLCMSMRGIRKPGARTITSAVRGQLRNTATRAEAMSLLMGK

SEQ ID NO: 7409 - protein, 228 aa, Dermatophilus congolensis
  REGION 1..228: note = tr|A0A376EZA0|A0A376EZA0_9MICO GTP cyclohydrolase 1; OS = Dermatophilus congolensis OX=1863 GN=folE PE=3 SV=1
MSGSTPVGNEGGQEIVEQADKGPDTGQVRAASTAPVTDREVDQPRIAAAVREILIAIGEDPDRDGLRDTPLRVARAYQEIFGGLAMSGPDALTVTFDVHHDELIIVKDIEVYSVCEHHLLPFHGVAHVGYLPNEDGRVTGLSKLARLVDVYARRPQVQERLTAQVADALQETLDPRGVIVVIEAEHMCMSMRGVRKPGATTLTSAVRGQLRNAATRSEALGLILGGRK

SEQ ID NO: 7410 - protein, 228 aa, Dermatophilus congolensis
  REGION 1..228: note = tr|A0A239VCS7|A0A239VCS7_9MICO GTP cyclohydrolase 1; OS = Dermatophilus congolensis OX=1863 GN=folE PE=3 SV=1
MSGSTPVGNEGGQEIVEQAEKGPDTGQVRAASTAPVTDREVDQPRIAAAVREILIAIGEDPDRDGLRDTPLRVARAYQEIFGGLAMSGPDALTVTFDVHHDELIIVKDIEVYSVCEHHLLPFHGVAHVGYLPNEDGRVTGLSKLARLVDVYARRPQVQERLTAQVADALQETLDPRGVIVVIEAEHMCMSMRGVRKPGATTLTSAVRGQLRNAATRSEALGLILGGRK

SEQ ID NO: 7411 - protein, 201 aa, unidentified
  source 1..201: note = Desertifilum sp.
  REGION 1..201: note = tr|A0A1E5QJ09|A0A1E5QJ09_9CYAN GTP cyclohydrolase 1; OS = Desertifilum sp. IPPAS B-1220 OX=1781255 GN=folE PE=3; SV = 1
MAALRTQAAPRVSEEEMRQAVRTLLIGLGEDPDREGLRDTPKRVVKALKFLTQGYNQSLDELLNGAVFHEDTNEMVLVRDIDLFSSCEHHILPILGRAHVAYIPNGKVIGLSKVARICEMYARRLQVQERLTDQIAEALQGLLKPQGVAVVVEATHMCMVMRGVQKPGSWTVTSSMRGVFAEDGRTRQEFMSLIRHTPTFH

SEQ ID NO: 7412 - protein, 232 aa, unidentified
  source 1..232: note = Desertifilum sp.
  REGION 1..232: note = tr|A0A1E5QQI9|A0A1E5QQI9_9CYAN GTP cyclohydrolase 1; OS = Desertifilum sp. IPPAS B-1220 OX=1781255 GN=folE PE=3; SV = 1
MTIASSNGSRFSDSAQEKDANNRLVTRPDRSTSTTQKATEANISDEQMMEAVRTMLLDVGEDPEREGLIKTPKRVMEAMRFLTSGYNQSLEELVNGAIFDEGHNEMVLVRDISLFSLCEHHMLPFMGKAHVAYIPNERVVGLSKLARIVEMYARRLQVQERLTRQVAEAIQEILDPKGVAVVVEASHMCMVMRGVQKPGSWTVTSAMVGVFQDDQKTREEFLNLIRHQPAFF

SEQ ID NO: 7413 - protein, 189 aa, Desmospora activa
  REGION 1..189: note = tr|A0A2T4Z9X8|A0A2T4Z9X8_9BACL GTP cyclohydrolase 1; OS = Desmospora activa DSM 45169 OX=1121389 GN=folE PE=3 SV=1
MEVNHEQIKQAVRMILEAVGEDPNREGLQDTPARVARMYEEVFGGIGQDPEEYFSTIFSEDHEELVLVKDIPFFSMCEHHLVPFFGKAHVGYIPQSGRVTGLSKLARAVEAISRRPQLQERITYTVADSIMKTLRPHGVVVVMEAEHMCMTMRGVKKPGAKTVTSAVRGVFEKDPASRAEVFSLIGIGK

SEQ ID NO: 7414 - protein, 249 aa, Desmospora sp.
  REGION 1..249: note = tr|F5SBH5|F5SBH5_9BACL GTP cyclohydrolase 1; OS = Desmospora sp. 8437 OX=997346 GN=folE PE=3 SV=1
MKPTTRVQSGVEGDPFTICAHRPFGAFVFLSAGGFQVVKFLIGSGLPTRKKLRKREATQDMGVNHEQIQQAVRMILEAVGEDPDREGLKETPARVARMYEEIFSGMGEDPDEYFSTVFGEDHEELVLVKDIPFFSLCEHHLVPFFGKAHVGYIPKSGRVTGLSKLARAVDTVARRPQLQERITYTVADSLERTLQPHGVIVVVEAEHMCMTMRGIKKPGSRTVTSAVRGVFEKNSAARAEAFSLIGFGK

SEQ ID NO: 7415 - protein, 257 aa, Desulfacinum hydrothermale
  REGION 1..257: note = tr|A0A1W1XGE3|A0A1W1XGE3_9DELT GTP cyclohydrolase FolE2 OS=Desulfacinum hydrothermale DSM 13146 OX=1121390; GN = folE2 PE=3 SV=1
MIDVQSQLDHRNINIDKVGVKNIRYPITVMDKKNGVQHTVASINMYVNLPRKFKGTHMSRFIEILNEFYGHLDIREFSKILEAMQERLNAQSAHLEIAFPYFIEKNSPVTGTPGLMEYLCRVSGSLSDQDGYDLVVEVNVPITTVCPCSREISNHGAHNQRGMARLAVRFNRFMWIEDLVRIVEEAASCEVYSLLKRPDEKFVTEKGYENPKFVEDVVRDVAFELKQNEDITWFQVDVENFESIHNHSAYAFIERMR

SEQ ID NO: 7416 - protein, 258 aa, Desulfacinum infernum
  REGION 1..258: note = tr|A0A1M4TL47|A0A1M4TL47_9DELT GTP cyclohydrolase FolE2 OS=Desulfacinum infernum DSM 9756 OX=1121391; GN = folE2 PE=3 SV=1
MIDVQSQYDHRNINIDKVGVKNIRYPITVMDRKNGVQHTVASINMYVNLPRKFKGTHMSRFIEILNEFYGHLDIREFSKILEAMQERLNAQSAHLEISFPYFIEKASPVTGTSGLMEYLCRVSGSLSHQDGYDLVVEVNVPITTVCPCSREISDHGAHNQRGMARLAVRFKKFMWIEDLVRIVEEAASCEVYSLLKRPDEKYVTEKGYENPKFVEDVVRDVAYELKQNSNITWFQVDVENFESIHNHSAYAFIERYRT

SEQ ID NO: 7417 - protein, 213 aa, unidentified
  source 1..213: note = Desulfallas geothermicus
  REGION 1..213: note = tr|A0A1I6DLZ9|A0A1I6DLZ9_9FIRM GTP cyclohydrolase 1; OS = Desulfallas geothermicus DSM 3669 OX=1121426 GN=folE; PE = 3 SV=1
MKNGEILKYRSKSYNNRQEGLRKEKITMIDQNKIETAVRMILEAIGEDPEREGLKETPARVARMYNEIFCGLWDDPDRHLQKMFAEEHEEMVLVKDIPIYSMCEHHLLPFYGKAHVAYIPRRGNVTGLSKLARVVEGFSKRPQLQERLTTQIADTIMKRLNPHGVLVVIEAEHMCMTLRGVRKPGSKTVTSAVRGQFQRNEATRAEAFSLIRR

SEQ ID NO: 7418 - protein, 186 aa, unidentified
  source 1..186: note = Desulfallas gibsoniae
  REGION 1..186: note = tr|R4KP85|R4KP85_9FIRM GTP cyclohydrolase 1; OS = Desulfallas gibsoniae DSM 7213 OX=767817 GN=folE PE=3; SV = 1
MIDMEKIEVAVRMILEAIGEDPDREGLKETPARVARMYNEIFCGLWDDPERHLQKMFSEEHEEMVLVKDIPIYSMCEHHLLPFYGKAHVAYIPRKGNVTGLSKLARVVEGFSKRPQLQERLTSQIADTIMKKLNPHGVLVVIEAEHMCMTLRGVRKPGSKTLTSAVRGSFQRNEATRAEAFSLIRK

SEQ ID NO: 7419 - protein, 262 aa, unidentified
  source 1..262: note = Desulfamplus magnetovallimortis
  REGION 1..262: note = tr|A0A1W1HKL9|A0A1W1HKL9_9DELT GTP cyclohydrolase FolE2 OS=Desulfamplus magnetovallimortis OX=1246637; GN = folE PE=3 SV=1
MIDIQKQRDYRNIPIDKVGIKELRYPIKVLDKQNGMQSTVAMINMYVNLPHQAKGTHMSRFVQMLHTFRSQVSLESITHILEDMKKTLEAQSSHIEITFPYFVEKRSPVTGSRGLMDYTCSIMGTSSSKGSEQNSDLMVKVGVPITSVCPCSREISDFGAHNQRGEVLVSTRFKKFIWIEDIINLVENAASCDVFSVLKREDEKHVTEHAYQNPKFVEDVVRDVAKVLIEDENITWFSVSAENFESIHNHSAYAYIESSQDS

SEQ ID NO: 7420 - protein, 262 aa, Desulfarculus baarsii
  REGION 1..262: note = tr|E1QJ50|E1QJ50_DESB2 GTP cyclohydrolase FolE2; OS = Desulfarculus baarsii (strain ATCC 33931 / DSM 2075 / VKM B-1802 / 2st14) OX=644282 GN=folE2 PE=3 SV=1
MKDVQNQQDHRNIVIDKVGVKNVRYPITVLDQVNVTQNTVATINMYVKLPHQYKGTHMSRFVEILAEHNNNININNIPGILEEMKRRLDAPSAHIEVDFPYFIEKAAPVSGAMGLMEYNIAFRGSLGRRGMDLIVEVAVPITTLCPCSREISRHGAHNQRGMVRLAVRFRSFIWIEKLIRVVEDSASCEVFSLLKREDEKHVTEKAYENPMFVEDIVRDVAEKMDADPNIFWYSVESENFESIHNHSAYAYIERDKRPQPGA

SEQ ID NO: 7421 - protein, 260 aa, Desulfarculus sp.
  REGION 1..260: note = tr|A0A3A6PAM7|A0A3A6PAM7_9DELT GTP cyclohydrolase FolE2 OS=Desulfarculus sp. OX=2093367 GN=folE2 PE=3 SV=1
MIDVQNQPDHRNIDIDKVGVKNIRYPITVLDRANGSQQTVASINMYVNLPHLYKGTHMSRFIELLSHYSSNINLSNLPDILEAMKQRLDAASAHIEIEFPYFISKAAPVSRSQGLMEYNIRFRGSLGSEGMDLVVEIAVPVTTLCPCSKEISASGAHNQRGLVRLAVRFKRFIWIEDLIAMVEESASSDVFSLLKREDEKYVTERAYDNPMFVEDVVREVSRKLGEDPNITWFAVDSENFESIHNHSAYAYIECDKRGRA

SEQ ID NO: 7422 - protein, 260 aa, Desulfatibacillum aliphaticivorans
  REGION 1..260: note = tr|B8F9J3|B8F9J3_DESAL GTP cyclohydrolase FolE2; OS = Desulfatibacillum aliphaticivorans OX=218208 GN=folE2; PE = 3 SV=1
MNDMIDVQSQYDDRNMPINKVGIKNLRYPITVLDKEKRFQPTVATINMYVDLPHEYKGTHMSRFVEMLHDTKPQVSLKTFSVLLDQMKKLLNAASAHIEMTFPYFIEKKAPMSGSLGLMDYTCCLKGSSDAQDQVDLILEISVPITSVCPCSKEISDEGAHNQRGEVKLATRFEKFRWIEDMIELVEKAASCDVYSVLKRVDEKYVTERAFRRPRFVEDVVRDIACVLSQDKNIKWFSVSAENFESIHNHSAYASITSDQ

SEQ ID NO: 7423 - protein, 276 aa, Desulfatibacillum alkenivorans
  REGION 1..276: note = tr|A0A1M7AL40|A0A1M7AL40_9DELT GTP cyclohydrolase FolE2 OS=Desulfatibacillum alkenivorans DSM 16219; OX = 1121393 GN=folE2 PE=3 SV=1
MIICNDRFAPWIQEIKLNDMIDVQNQYDDRNMPINKVGIKNLRYPITVLDKEKRFQPTVATINMYVDLPHEYKGTHMSRFVEMLHETKPQVSLKTFSVLLDQMKKLLNAASAHIEMTFPYFIEKKAPMSGSLGLMDYTCCLKGSSDAQDQVDLILEISVPITSVCPCSKEISDEGAHNQRGEVKLATRFEKFRWIEDMIELVEKAASCDVYSVLKRVDEKYVTERAFRRPRFVEDVVRDIACVLSQDKNIKWFSVSAENFESIHNHSAYASITSDQ

SEQ ID NO: 7424 - protein, 261 aa, unidentified
  source 1..261: note = Desulfatitalea sp.
  REGION 1..261: note = tr|A0A0F2QZ17|A0A0F2QZ17_9DELT GTP cyclohydrolase FolE2 OS=Desulfatitalea sp. BRH_c12 OX=1629708 GN=folE2; PE = 3 SV=1
MKDVQNQPDTRNLPIDKVGIKNLRYPVTVRDRREGRQATVAMINMYVDLPHEFKGTHMSRFVEMLHLLRTDVSLKRFADLLDQMKQHLNAASAHIEMTFPYFIEKKAPISGSPGLMDYTCRIIGFSNSRNEVDLISEVNVPISSVCPCSKEISDEGAHNQRGEVKLQTRFNRFIWLEDMIELVESCASCDVFSVLKRVDEKRVTEKSYNNPKFVEDVVRDIASRLLQDDNITWFSVSAENFESIHNHSAYAHITSGPWPIS

SEQ ID NO: 7425 - protein, 188 aa, Desulfitibacter sp.
  REGION 1..188: note = tr|A0A101VCH8|A0A101VCH8_9FIRM GTP cyclohydrolase 1; OS = Desulfitibacter sp. BRH_c19 OX=1734395 GN=folE PE=3 SV=1
MDREKIAKGVRLILEAIGEDPQREGLLDTPDRVARMYEEIFCGLKQDADKHLNVLFNEDHEEMILVKDIPIYSMCEHHLLPFYGYAHVAYISKNGKVTGLSKLARVVETFAKRPQLQERLTSQVADTLMDKLTPRGVMVVIEAEHMCMTMRGIKKAGSMTLTSAVRGIFKTNEATRAEGFSLIRGGRH

SEQ ID NO: 7426 - protein, 185 aa, Desulfitobacterium chlororespirans
  REGION 1..185: note = tr|A0A1M7UHT4|A0A1M7UHT4_9FIRM GTP cyclohydrolase 1; OS = Desulfitobacterium chlororespirans DSM 11544 OX=1121395; GN = folE PE=3 SV=1
MDLEKIEEAVTMILEAIGEDPRREGLLDTPKRVARMYQEVFAGLHEDPSQHLKVQFSEDHEEMIIVKDIPVYSMCEHHLVPFYGKAHVAYIPRRGKVTGLSKIARVVEGYAKRPQLQERLTGQIADSVMGMLNARGVLVVIEAEHMCMTMRGVKKPGSMTLTSAVRGIFKTNEITRSEGFALIKQ

SEQ ID NO: 7427 - protein, 185 aa, Desulfitobacterium dehalogenans
  REGION 1..185: note = tr|I4A9Z7|I4A9Z7_DESDJ GTP cyclohydrolase 1; OS = Desulfitobacterium dehalogenans (strain ATCC 51507 / DSM 9161 / JW/IU-DC1) OX=756499 GN=folE PE=3 SV=1
MDLEKIEEAVTMILEAIGEDPRREGLLDTPKRVARMYQEVFAGLHEDPSQHLKVQFSEDHEEMIIVKDIPVYSMCEHHLVPFYGKAHVAYIPRKGKVTGLSKIARVVEGYAKRPQLQERLTGQIADSVMSMLNARGVLVVIEAEHMCMTMRGVKKPGSMTLTSAVRGIFKTNEITRSEGFALIKQ

SEQ ID NO: 7428 - protein, 190 aa, unidentified
  source 1..190: note = Desulfitobacterium dichloroeliminans
  REGION 1..190: note = tr|L0F918|L0F918_DESDL GTP cyclohydrolase 1; OS = Desulfitobacterium dichloroeliminans (strain LMG P-21439 / DCA1) OX=871963 GN=folE PE=3 SV=1
MENLSIDLEKIEEAVKMILDAIGEDPQREGLLDTPKRVARMYQEVFSGIHEDPSQHLKVQFSEDHEEMIIVKDIPVYSMCEHHLVPFYGKAHVAYIPRKGKITGLSKIARVVEGYAKRPQLQERLTGQVADSVMSMLNARGVLVVIEAEHMCMTMRGVKKPGSRTLTSAVRGIFKTNEVTRAEGFALIKQ

SEQ ID NO: 7429 - protein, 187 aa, Desulfitobacterium hafniense
  REGION 1..187: note = tr|Q24WH8|Q24WH8_DESHY GTP cyclohydrolase 1; OS = Desulfitobacterium hafniense (strain Y51) OX=138119; GN = folE PE=3 SV=1
MGMDLEKIEEAVTMILEAIGEDPRREGLLDTPKRVARMYQEVFAGLHEDPSQHLKVQFSEDHEEMIIVKDIPVYSMCEHHLVPFYGKAHVAYIPRKGKVTGLSKIARVVEGYAKRPQLQERLTGQIADSVMSMLNARGVLVVIEAEHMCMTMRGVKKPGSMTLTSAVRGIFKTNEITRSEGFALIKQ

SEQ ID NO: 7430 - protein, 185 aa, Desulfitobacterium hafniense; identical to SEQ ID NO: 7427
  REGION 1..185: note = tr|B8FYT0|B8FYT0_DESHD GTP cyclohydrolase 1; OS = Desulfitobacterium hafniense (strain DCB-2 / DSM 10664); OX = 272564 GN=folE PE=3 SV=1

SEQ ID NO: 7431 - protein, 188 aa, Desulfitobacterium metallireducens
  REGION 1..188: note = tr|W0EB74|W0EB74_9FIRM GTP cyclohydrolase 1; OS = Desulfitobacterium metallireducens DSM 15288 OX=871968; GN = folE PE=3 SV=1
MGFDIDKIEQAVSMILEAIGEDPEREGLRDTPKRVARMYAEVFAGLHEDPSQHLKVQFSEDHEEMVLVKDIPVYSMCEHHLVPFYGKAHVAYIPRKGKVTGLSKLARVVEGFAKRPQLQERLTSQIADSIMNMLEPRGVLVVIEAEHMCMTMRGVKKPGSSTITSAVRGIFKTSPVTRSEAFSLIEHK

SEQ ID NO: 7432 - protein, 185 aa, Desulfitobacterium sp.; identical to SEQ ID NO: 7427
  REGION 1..185: note = tr|A0A562HBN2|A0A562HBN2_9FIRM GTP cyclohydrolase 1; OS = Desulfitobacterium sp. LBE OX=884086 GN=folE PE=3 SV=1

SEQ ID NO: 7433 - protein, 188 aa, Desulfitobacterium sp.
  REGION 1..188: note = tr|A0A562HJL2|A0A562HJL2_9FIRM GTP cyclohydrolase 1; OS = Desulfitobacterium sp. LBE OX=884086 GN=folE PE=3 SV=1
MQLIEQAKIREAVLMILEAIGEDPEREGLKDTPDRVARMYAEIFSGLAEDAGVYLECVFTEEHEEMIVVKDIPFYSTCEHHLVPFIGKAHVAYIPAGGKVTGLSKLARVVESIARRPQLQERLTREIADVIMKKLNPQGVAVVVEAEHLCMSMRGIKKPGSKTVTSAVRGLFRKSAKTRAEFLSLIKT

SEQ ID NO: 7434 - protein, 283 aa, Desulfobacca acetoxidans
  REGION 1..283: note = tr|F2NJA1|F2NJA1_DESAR GTP cyclohydrolase FolE2; OS = Desulfobacca acetoxidans (strain ATCC 700848 / DSM 11109 / ASRB2) OX=880072 GN=folE2 PE=3 SV=1
MHKGKVAAAITPLAEIADVQSRPDHRNIDIDKVGVKNISYPIIVLDKFNGTQNTVARINIYVNLPYRHKGTHMSRFIEILSEFRRNISIKNIPQILEETRHRLHAQSAHIEMIFPYFIQKQAPVSRARALMEYICTIKGSLNGEGLIDLVVCVKVPITTLCPCSKEISSVGAHNQRGEVRVQVRFKKFFWIEDLIRLVEASASCEVYSLLKRQDEKFVTERAYSNPMFVEDVVREIALKLDKDDNFTWYSIDSENYESIHNHSAYAYIETDKRQENRRSKPAS

SEQ ID NO: 7435 - protein, 256 aa, Desulfobacca sp.
  REGION 1..256: note = tr|A0A1F9PAS3|A0A1F9PAS3_9DELT GTP cyclohydrolase FolE2 OS=Desulfobacca sp. RBG_16_60_12 OX=1797909 GN=folE2; PE = 3 SV=1
MADVQNHVSPHTIDIDKVGVKNISYPIVVLDKFNGTQHTVACINMYVNLPHRHKGTHMSRFIEILSEYRRDISLKKIGPILEETRRRLHAQSAHIEMTFPYFIDKEAPVSKARGLMEYICTFTGALDADGRLDLVVGITVPITTLCPCSKEISQVGAHNQRGEVRVQVRYRKFFWIEDLIRLVEESASCEVYALLKRQDEKFVTEKAYSNPMFVEDVVREIAHRMSQNDNFTWYAVESENFESIHNHSAYAYIESK

SEQ ID NO: 7436 - protein, 243 aa, Desulfobacca sp.
  REGION 1..243: note = tr|A0A1F9MRE5|A0A1F9MRE5_9DELT GTP cyclohydrolase I (Fragment) OS=Desulfobacca sp. RBG_16_58_9 OX=1797908; GN = A3K23_07455 PE=3 SV=1
MPTHKTPTILPVDMADVQNHVSPHTIDIDKVGVKNISYPIVVLDKFNGTQHTVAKINMYVNLPHRHKGTHMSRFIEILSEYRRDVSLKKIGAILEETRRRLHAQSAHIEMTFPYFIDKEAPVTKARGLMEYICTFTGALYEDGRLDLVVGITVPITTLCPCSKEISQVGAHNQRGEVRVQVRYQKFFWIEDLIRLVEESASCEVYALLKRQDEKYVTEKAYTNPMFVEDVVREIAHKLSQNDN

SEQ ID NO: 7437 - protein, 259 aa, Desulfobacter hydrogenophilus
  REGION 1..259: note = tr|A0A328FB75|A0A328FB75_9DELT GTP cyclohydrolase FolE2 OS=Desulfobacter hydrogenophilus OX=2291 GN=folE2; PE = 3 SV=1
MMIDIQNQPDFRNIPIDKVGIKGLKHPVIVRDKANGSQSTVAEVNMYVDLPHQCKGTHMSRFVELLHTVNTPVSLDSLTSILEDMKASLGAKSAHIDISFPYFIEKTSPCTQSKGLMDYNCTIIGSSNGRKKADIVLKVAVPVTSVCPCSKEISDYGAHNQRGEVLVAARFHKFIWIEEIVNLVEQAASCDIYSVLKRADEKYVTEKAYNNPKFVEDIVRDVAKVLIEDSNITWFSVSAENFESIHNHSAYAYIEHSRD

SEQ ID NO: 7438 - protein, 260 aa, Desulfobacter postgatei
  REGION 1..260: note = tr|I5B504|I5B504_9DELT GTP cyclohydrolase FolE2; OS = Desulfobacter postgatei 2ac9 OX=879212 GN=folE2 PE=3; SV = 1
MMKDIQNQPDFRNIPIDKVGIKGLKYPVVVRDKLNGSQSTVAEINMYVDLPHQCKGTHMSRFVELLHTVVKTLVSLETLTSILEDMKASLGAKSAHIEIFFPYFIEKTSPCTQSKGLMDYNCTIIGSSNGRKKADIVLKVAVPVTSVCPCSKEISEYGAHNQRGEVLVAARFHKFIWIEDIVNLVERAASSDIYSVLKRADEKYVTEKAYDNPKFVEDIVRDVAKALIADSNITWFSVSAENFESIHNHSAYASIEHSRD

SEQ ID NO: 7439 - protein, 258 aa, Desulfobacter postgatei
  REGION 1..258: note = tr|A0A2G6MQQ6|A0A2G6MQQ6_9DELT GTP cyclohydrolase FolE2 OS=Desulfobacter postgatei OX=2293 GN=folE2 PE=3 SV=1
MKDMQNQPDFRNIPIDKVGIKGLKYPVVVRDKAKGSQSTVAEINMYVDLPHQCKGTHMSRFVELLHTVNTPVSPESLTSILDDMKASLGAKSAHIEISFPYFIEKNAPSTQSKGLMDYNCTIIGSSGDRKTADMVLKVAVPVTSVCPCSKEISDHGAHNQRGEVRVAVRCHKFIWIEEIVNLVEQAASCDIYSVLKRADEKYVTEKGYNNPKFVEDIVRDVAKALIEDANITWFSVSAENFESIHNHSAYAWIEHSRA

SEQ ID NO: 7440 - protein, 261 aa, Desulfobacter sp.
  REGION 1..261: note = tr|A0A2D6ETE0|A0A2D6ETE0_9DELT GTP cyclohydrolase FolE2 OS=Desulfobacter sp. OX=2294 GN=folE2 PE=3 SV=1
MKDLQSQRDYRKIPVNKVGIKNLRYPITVRDRKDGFQATIAHINMYVDLPHKNRGTHMSRFVEILHIFRPEVSLDTFSMTLEKMKKHLSAASAHIEMTFPYFIEKNAPISNSSGLMDYTCGIIGSSDSNGKIDLVSEVIVPISSVCPCSKEISDAGAHNQRGKVELRTRFKKFIWLEDMIELVERASSCDIYSVLKRIDEKCVTEKGFANPKFVEDIVRDIAKKLKTDDNIIWFSVSAESFESIHNHSAYAYITSGTDPGS

SEQ ID NO: 7441 - protein, 260 aa, Desulfobacter sp.
  REGION 1..260: note = tr|A0A357YWB5|A0A357YWB5_9DELT GTP cyclohydrolase FolE2 OS=Desulfobacter sp. OX=2294 GN=folE2 PE=3 SV=1
MMKDIQNQPDFRNIPIDKVGIKGLKYPVVVRDKVNGSQSTVAEINMYVDLPHQCKGTHMSRFVELLHTVVKTLVSLETLTSILEDMKASLGAKSAHIEIVFPYFIEKTSPCTQSKGLMDYNCTIIGSSNGRKKADIVLKVAVPVTSVCPCSKEISAYGAHNQRGEVLVAARFHKFIWIEDIVNLVERAASSDIYSVLKRADEKYVTEKAYDNPKFVEDIVRDVAKALIADSNITWFSVSAENFESIHNHSAYAYIEHSRD

SEQ ID NO: 7442 - protein, 256 aa, unidentified
  source 1..256: note = Desulfobacteraceae bacterium
  REGION 1..256: note = tr|A0A1J5E4C1|A0A1J5E4C1_9DELT GTP cyclohydrolase FolE2 OS=Desulfobacteraceae bacterium CG2_30_51_40; OX = 1805128 GN=folE2 PE=3 SV=1
MEDIQNHRDYRNIDIDQVGVKGISYPITVLDKDMGEQQTVALINMYVNLPRYYKGTHMSRFVEILNEHSRRISLQNFTVILKEMKERLTAQSARMEIRFPYFIKKAAPVTGAEGLMEYKCTFKGTLVERPDLVIMINVPISTLCPCSKEISDYGAHNQRGEVKVQVRFKKFVWLEDLIKLVEESASSEVYSVLKREDEKFVTEKAYRNPMFVEDIVREIALKLEGDPNITWFSVESENFESIHNHSAYAYVEKHKI

SEQ ID NO: 7443 - protein, 261 aa, unidentified
  source 1..261: note = Desulfobacteraceae bacterium
  REGION 1..261: note = tr|A0A1W9TI75|A0A1W9TI75_9DELT GTP cyclohydrolase FolE2 OS=Desulfobacteraceae bacterium 4572_187 OX=1971620; GN = folE2 PE=3 SV=1
MKDIQNQHDTRNISIDKVGIKDLKYPITVLDRKDRIQHTVASICMYVDLPHEYKGTHMSRFVEILHMFHPEVALRKISGILEEMKKYLNAASANIEVTFPYFIKKESPVTKTVGLMDYSCSILGSSNSEGKTDIELVVVVPISSVCPCSKEISDAGAHNQRGNVRLSTRFKKFIWIEDMIELVEKSASCEVYSILKRADEKHVTEKGYANPKFVEDIVRDIAEKLQKDRNITWFSVSAENFESIHNHSAYAFITNGQHPRL

SEQ ID NO: 7444 - protein, 258 aa, unidentified
  source 1..258: note = Desulfobacterales bacterium
  REGION 1..258: note = tr|A0A1V1WVV0|A0A1V1WVV0_9DELT GTP cyclohydrolase FolE2 OS=Desulfobacterales bacterium S7086C20 OX=1869302; GN = folE2 PE=3 SV=1
MKDVQNSRDHRNIDIKKVGIKGIKYPVNVLDRANKVQATVATINMYVHLPHRFKGTHMSRFIEVLNDYCGNLNLKTFFEILDVMKDALEARTANLEISFPYFIRKKAPISRVSSLMEYNCEYLGKCDGNKHELFVCVKVPVCTLCPCSKEISSNGAHNQRGMVLVTLLYKEFFWIEEIIELVESSASSEVYALLKREDEKYITEHAYDNPMFVEDVVREVTEKLRFDPRFPWFSVEVENFESIHNHSAYAYTESPPRA

SEQ ID NO: 7445 - protein, 270 aa, unidentified
  source 1..270: note = Desulfobacterales bacterium
  REGION 1..270: note = tr|A0A1E7GL38|A0A1E7GL38_9DELT GTP cyclohydrolase FolE2 OS=Desulfobacterales bacterium S3730MH5 OX=1869298; GN = folE2 PE=3 SV=1
MGVKDLKDVQNEPDHRNIDLTRVGIKDIKYPMNVLDRANKTQSTVATVNMYVHLPHWFKGTHMSRFVEVLNDYCADLNLKTFFQMLDRIKKNLDAPAANLEIRFPYFVKKTAPVSGVPSLMEYTCKYIGEINGEERRLHIGVKVPVCTLCPCSKEISAKGAHNQRGMVSVTLLFKEFFWIEEIIEIVEGSASSDVYALLKREDEKFITEQAFSRPMFVEDIVREVTDKLRKDPRFVCFSVEAESFESIHNHSAYAYTEMDTRTPNHDIAD

SEQ ID NO: 7446 - protein, 261 aa, Desulfobacterium autotrophicum
  REGION 1..261: note = tr|C0QKM7|C0QKM7_DESAH GTP cyclohydrolase FolE2; OS = Desulfobacterium autotrophicum (strain ATCC 43914 / DSM 3382 / HRM2) OX=177437 GN=folE2 PE=3 SV=1
MIDIQKQRDYRNIPIDKVGIKNLRYPIKVMDKSNGVQSTIATIGMFVDLPHQCKGTHMSRFVELLNLFREQVSLDSIDNILEDMKTTLGAQSSHIEITFPYFVEKEAPVTGCKGLMDYICSIHGSSTPERDRDMVLKVAVPITSVCPCSKEISKYGAHNQRGEVLVSTRFKRLIWIEDMINLVEGCASCDVYSVLKREDEKAVTERGYENPKFVEDVVRDVSQILNDDENITWFSVSAENFESIHNHSAYAYIENGDRTNF

SEQ ID NO: 7447 - protein, 268 aa, Desulfobacterium vacuolatum
  REGION 1..268: note = tr|A0A1W1ZDE7|A0A1W1ZDE7_9DELT GTP cyclohydrolase FolE2 OS=Desulfobacterium vacuolatum DSM 3385 OX=1121400; GN = folE2 PE=3 SV=1
MIDMQKMRDYRNIPIDKVGIKGLRYPIKVRDKKSSGLQSTIAEISMYVDLPHQCKGTHMSRFVQMLHTFRSQVSLESIMTILENMKTTLEATSSHIEIIFPYFIEKKSPVTGSKGLMDYTCTIIGSSHPDEDRDMVLRVAVPITSVCPCSKEISDFGAHNQRGEVCVSTRFKKFVWIEDIIELVEHAASCEVYSVLKREDEKHVTEFAYNNPKFVEDVVRDVGKVLLEDDNITWFSVSAENFESIHNHSAYAFIEHGDPGIHGGGTSH

SEQ ID NO: 7448 - protein, 259 aa, Desulfobacula phenolica
  REGION 1..259: note = tr|A0A1H2DPA8|A0A1H2DPA8_9DELT GTP cyclohydrolase FolE2 OS=Desulfobacula phenolica OX=90732 GN=folE2 PE=3; SV = 1
MIDIQNQPDYRNIPIDKVGIKGLKYPVKVLDKTTGLQSTVAQISMYVDLPHQCKGTHMSRFVEILHLFRTKVSLESITNILEDMKKILGAKSSHIEITFPYFIEKKSPETGSKGLMDYTCSIIGSSNGKTDTDIVLTVAVPVTSVCPCSKEISEYGAHNQRGEVLVSTRFKRLIWIEHIVELVEACASCDIFSVLKREDEKFVTEKAYDNPKFVEDIARDVAKALMEDDNITWFSVSAENFESIHNHSAYAYIEKAVIS

SEQ ID NO: 7449 - protein, 259 aa, Desulfobacula sp.
  REGION 1..259: note = tr|A0A1F9NDD8|A0A1F9NDD8_9DELT GTP cyclohydrolase FolE2 OS=Desulfobacula sp. GWF2_41_7 OX=1797910 GN=folE2; PE = 3 SV=1
MIDIQNQPDFRNIPIDKVGIKGLKYPVKVLDKTTGLQPTVAQINMYVDLPHQCKGTHMSRFVEILNLVRTTVSLESLTNILEDMKIILGAKSSHIEISFPYFIEKKSPATGSKGLMDYNCSIIGSSNGKKNTDIVLTVAVPVTSVCPCSKEISEYGAHNQRGEVLVSTRFKKFIWIEDIVELVEASASCDIFSVLKREDEKFVTETAYNNPKFVEDITRDVAKELMADKNITWFSVSAENFESIHNHSAYAYIEKGPIS

SEQ ID NO: 7450 - protein, 259 aa, Desulfobacula sp.
  REGION 1..259: note = tr|A0A1F9Q4I4|A0A1F9Q4I4_9DELT GTP cyclohydrolase FolE2 OS=Desulfobacula sp. RIFOXYB2_FULL_45_6 OX=1797912; GN = folE2 PE=3 SV=1
MIDIQNQPDFRNIPIDKVGIKGLKYPVKVLDKSTGLQSTIAQINMYVDLPHHCKGTHMSRFVEILNLVRTKVSLESLTNILEDMKTILGAKSSHIEISFPYFIEKKSPETGSKGLMDYNCSITGSSNGTKNTDLVLTVAVPVTSVCPCSKEISEYGAHNQRGEVSVSARFKKFIWIEDIVGLVEASASCDIFSVLKREDEKHVTEKAYDNPKFVEDITRDVAQALMADKNITWFSVSAENFESIHNHSAYAYIERGSVS

SEQ ID NO: 7451 - protein, 259 aa, Desulfobacula toluolica
  REGION 1..259: note = tr|K0NLL9|K0NLL9_DESTT GTP cyclohydrolase FolE2; OS = Desulfobacula toluolica (strain DSM 7467 / Tol2); OX = 651182 GN=folE PE=3 SV=1
MIDIQNQPDYRNIPIDKVGIKGLKYPVKVLDKTTGLQSTVAQISMYVDLPHQCKGTHMSRFVEILHLFRTKVSLESITNILEDMKKILGAKSSHIEITFPYFIEKKSPETGSKGLMDYTCSIIGSSNGKTDTDIVLTVAVPVTSVCPCSKEISEYGAHNQRGEVLVSTRFKRLIWIEHIVELVETCASCDIFSVLKREDEKFVTEKAYDNPKFVEDIARDVAKALMEDNNITWFSVSAENFESIHNHSAYAYIEKGIVS

SEQ ID NO: 7452 - protein, 260 aa, Desulfobotulus alkaliphilus
  REGION 1..260: note = tr|A0A562S916|A0A562S916_9DELT GTP cyclohydrolase FolE2 OS=Desulfobotulus alkaliphilus OX=622671 GN=folE2; PE = 3 SV=1
MKDVQSQRDERNLPIDKVGIKNLRYPITVLDREQGRQQTVADISMYVDLPHDAKGTHMSRFVEMLHLFRQEVSLRSFSTILQEMRTLLEAERAHIDVTFPYFVEKKAPVSAEPGLMDYTCTISGSISPEGRTDLLSTVRVPVMSVCPCSLEISEIGAHTQRGMVTVSVRFRKFFWIEALIQRIEKCASSDVFSVLKRVDEKAVTEQAFRNPKFVEDIVRDVALSLKEDANITWFSVSAENYESIHNHSAFAQISSESLLA

SEQ ID NO: 7453 - protein, 255 aa, unidentified
  source 1..255: note = Desulfobulbaceae bacterium
  REGION 1..255: note = tr|A0A1E7HHM7|A0A1E7HHM7_9DELT GTP cyclohydrolase FolE2 OS=Desulfobulbaceae bacterium S3730MH12 OX=1869305; GN = folE2 PE=3 SV=1
MKKCNNRAKIMHIQTVGLKDIKTPVRVKEKSGKLQNTIATISMQARLADGHTDNCVETFISILNSSLGEISVTSFSSILSKVKEELQAKSVRLEMSFPYFINKKAPISNTHSLMEYSCTFSGGIGHDEKFILSVRVPVTTLCPCSKEISAGGAHNQRAEVTLNVKFNNFIWVEDLISMVEESASCELYALLKRPDEKYVTEKAFNNPMFVEDVVRKVAVLALENPDITWFSASVESFESIHKHSAYAYVDSDEVR

SEQ ID NO: 7454 - protein, 247 aa, unidentified
  source 1..247: note = Desulfobulbaceae bacterium
  REGION 1..247: note = tr|A0A1Q6DJC7|A0A1Q6DJC7_9DELT GTP cyclohydrolase FolE2 OS=Desulfobulbaceae bacterium DB1 OX=1920419; GN = folE2 PE=3 SV=1
MKLKTVGIKNIRYPVMIREKSGGGLQSTVASITLQANMPRRFRETCVATFLDVLRKYQEDMSVTIFPKLLVETRDQLQANSAHLEMTFPYFLEKKAPVTKTSGLMEYTCRFAGGIGEDEDFILSVWVPSTTLCPCSKEISEFGAHNQRAEINLNVKSKGFIWVEDLISLVESGASCEVYSILKRPDEKFVTEQAYKNPMFVEDVVRKVAEMAQAHPDIYWFSVGVESFESIHKHSAYAYVDSSGIEA

SEQ ID NO: 7455 - protein, 245 aa, Desulfocapsa sp.
  REGION 1..245: note = tr|A0A432R0L0|A0A432R0L0_9DELT GTP cyclohydrolase FolE2 OS=Desulfocapsa sp. OX=2066021 GN=folE2 PE=3 SV=1
MKIQTVGIQDIQIPVRIREKQGSLQNSVARVSLQVSFPGKYSQSCVHTFTSVLNKYMDEMSVTIFPELLNEVKNDLQAESARLQMSFPYFIEKKAPVSGTRSLMEYDCSFTGEVGTDDDFVLTVTVPVTTLCPCSKEISTAGAHNQRAEVTLNIKFKKFIWVEDLIRMVEESASCELWALLKRPDEKYVTEKAYENPMFVEDVVRKVAVSALKDPKITWFSVSVESFESIHKHSAYAYVDSNEIR

SEQ ID NO: 7456 - protein, 245 aa, Desulfocapsa sulfexigens
  REGION 1..245: note = tr|M1PCY0|M1PCY0_DESSD GTP cyclohydrolase FolE2; OS = Desulfocapsa sulfexigens (strain DSM 10523 / SB164P1); OX = 1167006 GN=folE2 PE=3 SV=1
MKIRSVGIKDIQVPVRIREKNGGLQNSVATISLQASLPGKYRESCVLTFTTVLNKYMDDLSVTNFPELLAEVKEGLCAESARVEMSFPYFIEKKAPVSGTRSLMEYECSFTGEVGTDDDFILSVRVPITTLCPCSKEISTAGAHNQRAEVTLNVKFNKFIWAEDLIAMIEKSASCELWALLKRPDEKYVTERAYENPMFVEDVVRKVAVSALDDSKITWFSASVESFESIHKHSAYAYVDSNEIR

SEQ ID NO: 7457 - protein, 261 aa, unidentified
  source 1..261: note = Desulfocarbo indianensis
  REGION 1..261: note = tr|A0A0K9I5V8|A0A0K9I5V8_9DELT GTP cyclohydrolase FolE2 OS=Desulfocarbo indianensis OX=1348163 GN=folE2 PE=3; SV = 1
MKDVQSQPDHRNIAIDKVGVKNIRHPVTVLDRANGTQQTVANINMYVDLPHLYKGTHMSRFIEVLSEHSNNINLRNIPGILEEMKKRLDAACAHIEVEFPYFIKKAAPVSSAQGLMEYNVAFRGSVNGEGLDLVVEMRVPVTTLCPCSREISEHGAHNQRGMVKLAVRFKRFFWIEDLIQLVEESASSDVFSLLKREDEKYVTERAYEHPMFVEDVVREVARKLEDDPNIVWFSVDSENFESIHNHSAYAFIERDKRSAQA

SEQ ID NO: 7458 - protein, 268 aa, Desulfococcus multivorans
  REGION 1..268: note = tr|S7TWA1|S7TWA1_DESML GTP cyclohydrolase FolE2; OS = Desulfococcus multivorans DSM 2059 OX=1121405 GN=folE2; PE = 3 SV=1
MMIDIQSQRDDRNIPIDKVGIKNLRYPITVRDRRNGRQHTVASINMYVDLPGKYKGTHMSRFVELLHIIRPEISLDKFAHILEQMKAHLDAASAHIEISFPYFIEKKAPVSDSPGLLDYSCKLIGVSDSSDGIDIVSEVTVPISSVCPCSKEISDVGAHNQRGEVRLRTRFKRFIWIEDVIELVEGCASCEVYSVLKRVDEKCVTERGYNNPKFVEDVVRDIAAKLLEDQNITWFSVSAENFESIHNHSAYASITRGENPNAGAESII

SEQ ID NO: 7459 - protein, 260 aa, unidentified
  source 1..260: note = Desulfococcus oleovorans
  REGION 1..260: note = sp|A8ZUJ6|GCH4_DESOH GTP cyclohydrolase FolE2; OS = Desulfococcus oleovorans (strain DSM 6200 / Hxd3); OX = 96561 GN=folE2 PE=3 SV=1
MKDIQKERDFRNMPIDKVGIKNLKYPIRVLDRKNGCQQTVGTINMYVDLPHESKGTHMSRFVEMLHILQPEISPKTFSVILDQMKKDLDAASAHMEVTFPYFIEKAAPVSGTPGFMEYTCKLMGTSRADGRVDLVSEVVVPISSVCPCSKEISDGGAHNQRGEVRLAIRSKKFVWIEDLIQLVEAAASCELYSVLKRVDEKWVTEKGYQNPKFVEDIVRDVAVALKNDTNITWFNISVENFESIHNHSAYATITCGRINP

SEQ ID NO: 7460 - protein, 260 aa, Desulfococcus sp.
  REGION 1..260: note = tr|A0A1W9PYG9|A0A1W9PYG9_9DELT GTP cyclohydrolase FolE2 OS=Desulfococcus sp. 4484_241 OX=1968522 GN=folE2; PE = 3 SV=1
MKDVQKERDNRNMPIDKVGVKNLKYPIKVLDREKGCQHTVGTINMYVDLPHESKGTHMSRFVEMLHMLQPEISPKSFSMILDQMKKDLDAASAHMEVTFPYFIEKQAPVSHTKGYMEYSCRLIGTSRADGSVDLISEVTVPISSVCPCSKEISDYGAHNQRGEAKLAIRSKRFVWIEDIIKVVENAASCDLYSVLKRVDEKWVTEKGYQNPKFVEDIVRDIAVALEKDPNITWFSISVENFESIHNHSAYAMITRGNPDV

SEQ ID NO: 7461 - protein, 264 aa, unidentified
  source 1..264: note = Desulfocurvibacter africanus
  REGION 1..264: note = tr|F3Z005|F3Z005_DESAF GTP cyclohydrolase FolE2; OS = Desulfocurvibacter africanus subsp. africanus str. Walvis Bay OX=690850 GN=folE2 PE=3 SV=1
MAGQTPPTMQDVQSAPAEVALSIDRVGVKHLMLPLVVRDRAQGVQHTVARVDLGVDLPAAFKGTHMSRFVEALENWKEELDYHSFKALLTDIRQRLSARKAYVVFRFPYFLKQASPKSGSPGWMSYECTLTGEMAGETMVFTLAVDVPAMTVCPCSLAISDQGAHSQRAMVRVMARFTGFLWLEDLIEIAEASASSPVYTLLKREDEKHVTESAFAKPTFVEDVVRGAAQRLDRHPQVNWYRVEVESFESIHAHSAFASIEKTK

SEQ ID NO: 7462 - protein, 264 aa, unidentified
  source 1..264: note = Desulfocurvibacter africanus
  REGION 1..264: note = tr|M5Q3F9|M5Q3F9_DESAF GTP cyclohydrolase FolE2; OS = Desulfocurvibacter africanus PCS OX=1262666 GN=folE2; PE = 3 SV=1
MAGQTPPTMQDVQSAPAEVALSIDRVGVKHLMLPLVVRDRAQGVQHTVARVDLGVDLPAAFKGTHMSRFVEALENWKEELDYHSFKALLTDIRQRLSARKAYVVFRFPYFLKQASPKSGSPGWMSYECTLTGEMAGETMIFTLAVDVPVMTVCPCSLAISDQGAHSQRAMVRVMARFTGFLWLEDLIEIAEASASSPVYTLLKREDEKHVTESAFAKPTFVEDVVRGAAQRLDRHPQVNWYRVEVESFESIHAHSAFASIEKTK

SEQ ID NO: 7463 - protein, 260 aa, Desulfofaba hansenii
  REGION 1..260: note = tr|A0A2M9DRW9|A0A2M9DRW9_9DELT GTP cyclohydrolase FolE2 OS=Desulfofaba hansenii OX=157842 GN=folE2 PE=3 SV=1
MIDIQKQPDYRNIPIDKVGIKNLRYPIRILDRAGGYQSTVASIDMYVDLPHHCKGTHMSRFVEMLNMFRAEVSLNSFSVTLGDMKQYLGAASSHIEMRFPYFMEKRAPVSEAAGLMDYTCCFRGGCNAAGRIDLVTEVCVPITSVCPCSKEISDAGAHNQRGEVRLATRFKRFIWIEDMIELVEEEASCDVYSVLKRVDEKSVTERGYANPKFVEDIVRDIAVAVKKDDNITWFSVSTENFESIHNHSAYAYIDGGQKPC

SEQ ID NO: 7464 - protein, 188 aa, unidentified
  source 1..188: note = Desulfofarcimen acetoxidans
  REGION 1..188: note = tr|C8W6F0|C8W6F0_DESAS GTP cyclohydrolase 1; OS = Desulfofarcimen acetoxidans (strain ATCC 49208 / DSM 771 / VKM B-1644 / 5575) OX=485916 GN=folE PE=3 SV=1
MIDQEKIEKAVYMILEAIGEDPEREGLLETPARVARMYKEVFCGLSEDPNIHLRKIFNEEHEELVLVKDIAFSSMCEHHLLPFFGKAHVAYIPHKGRVTGLSKLARVVDSYAKRPQLQERLTSQIADCIMKHLNPYGVIVVVEAEHMCMTLRGIKKPGSKTVTSAVRGAFKSNDATRAEAFALIRTLN

SEQ ID NO: 7465 - protein, 186 aa, unidentified
  source 1..186: note = Desulfofundulus australicus
  REGION 1..186: note = tr|A0A1M5C704|A0A1M5C704_9FIRM GTP cyclohydrolase 1; OS = Desulfofundulus australicus DSM 11792 OX=1121425; GN = folE PE=3 SV=1
MIDTEKIEKAVRMILEAIGEDPDREGLRETPARVARMYKEIFCGLWEDPEIHLEKIFTEQHEEMILVKDIPIYSMCEHHLLPFFGKAHVAYIPRKGKVTGLSKLARVVEGFAKRPQLQERLTTQIADSIMRRLNPQGVLVIIEAEHMCMTLRGIRKPGSKTITSAVRGSFQRSEATRAEALALIKG

SEQ ID NO: 7466 - protein, 187 aa, unidentified
  source 1..187: note = Desulfofundulus kuznetsovii
  REGION 1..187: note = tr|A0A101HXC3|A0A101HXC3_9FIRM GTP cyclohydrolase 1; OS = Desulfofundulus kuznetsovii OX=58135 GN=folE PE=3 SV=1
MDLKKIQEAVRMILEAVGEDPDRPGLKGTPERIAKMYEEIFSGLCEEPKKHLEKIFLEDHEEMVLVKDIPMYSVCEHHLLPFFGVAHVAYIPRQWRVTGLSKLARVVEGYSRRPQLQERLTTQIADAVMSELDPYGVLVVIEAEHMCMTLRGVRKPGSKTVTSAVRGVFQKSVATRAEAMALIKKND

SEQ ID NO: 7467 - protein, 186 aa, unidentified
  source 1..186: note = Desulfofundulus salinum
  REGION 1..186: note = tr|A0A494WUY2|A0A494WUY2_9FIRM GTP cyclohydrolase 1; OS = Desulfofundulus salinum OX=2419843 GN=folE PE=3 SV=1
MIDTEKIEKAVRMILEAIGEDPDREGLRETPARVARMYKEIFCGLWEDPELHLEKIFTEEHEEMILVKDIPIYSMCEHHLLPFFGKAHVAYIPRRGKVTGLSKLARVVEGFAKRPQLQERLTTQIADSIMRRLNPQGVLVVIEAEHMCMTLRGIRKPGSKTITSAVRGSFQRSEATRAEALALIKG

SEQ ID NO: 7468 - protein, 186 aa, unidentified
  source 1..186: note = Desulfofundulus thermosubterraneus
  REGION 1..186: note = tr|A0A1M6DG92|A0A1M6DG92_9FIRM GTP cyclohydrolase 1; OS = Desulfofundulus thermosubterraneus DSM 16057 OX=1121432; GN = folE PE=3 SV=1
MIDTEKIEKAVRMILEAIGEDPDREGLRETPARVARMYKEIFCGLWEDPELHLEKIFTEEHEEMILVKDIPIYSMCEHHLLPFFGKAHVAYIPRRGKVTGLSKLARVVEGFAKRPQLQERLTTQIADSIMRRLNPQGVLVVIEAEHMCMTLRGIRKPGSKTITSAVRGSFQRSEATRAEALALIKD

SEQ ID NO: 7469 - protein, 269 aa, Desulfofustis glycolicus
  REGION 1..269: note = tr|A0A1M5Y478|A0A1M5Y478_9DELT GTP cyclohydrolase FolE2 OS=Desulfofustis glycolicus DSM 9705 OX=1121409; GN = folE2 PE=3 SV=1
MIAQETERFILVRMAIKIAGVKNIKLPITVVQKDGNHQDTVATINLLVRLPAVLQPDCIATFTAVLNRHIERISVEDFPGLLADVCASFSAESARIDMRFPYYLEKTAPVSGTRSLMEYQCIFSGGVGADDGFLLTVKVPVTTLCPCSREISEVGAHNQRAEVTLSARFKKMIWAEDLIALVEQCASCELFALLKRPDEKYVTETAFRNPMFVEDVVRKVAQLTLENPLVTWFSVGVESYESIHKHSAYAYVDSGDISVKNGHVTGMGG

SEQ ID NO: 7470 - protein, 260 aa, Desulfoglaeba alkanexedens
  REGION 1..260: note = tr|A0A4P8L124|A0A4P8L124_9DELT GTP cyclohydrolase FolE2 OS=Desulfoglaeba alkanexedens ALDC OX=980445; GN = folE2 PE=3 SV=1
MIDVQNQEDHRNINIDKVGVKNIRYPLTVMDRENDFQHTVATINMYVNLPRKFKGTHMSRFIEILNEFYGHLDIREFSKILGAMQKRLEAQSAHLEIAFPYFIEKKSPVTETTGLMEYGCRVIGSMDHRKGYDLIVEVNVPITTVCPCSREISNYGAHNQRGMARLAVRYKKFVWIEDLIRVVEEAASCEVYSLLKRPDEKYVTERGYENPKFVEDVVRDIAAQLKPDPNILWFQVDVENFESIHNHSAYAFIERSKANP

SEQ ID NO: 7471 - protein, 264 aa, Desulfohalobium retbaense
  REGION 1..264: note = tr|C8WZN6|C8WZN6_DESRD GTP cyclohydrolase FolE2; OS = Desulfohalobium retbaense (strain ATCC 49708 / DSM 5692 / JCM 16813 / HR100) OX=485915 GN=folE2 PE=3 SV=1
MQDVQNTPAGIPLAIDRVGVKDLRFPLLVQDRERGHQHTVSRVDMFVDLPAHFKGTHMSRFVEVLQDFSGILDYPNFKNLLREVRQRLQAHRAHLSFSFPYFLHQNAPVSASASLMDYQCTLHGELDDADQLRMFLQVQVPVMTVCPCSLAIADEGAHSQRAMVTMNCRFAGMLWLEDLIHIGQHAASCQVHSLLKREDEKFVTEKAFATPTFVEDVVRNAAHQLQSHELISWFRVEVESFESIHNHSAYACIEAPGSQTGAGQ

SEQ ID NO: 7472 - protein, 266 aa, Desulfoluna butyratoxydans
  REGION 1..266: note = tr|A0A4U8YTH7|A0A4U8YTH7_9DELT GTP cyclohydrolase FolE2 OS=Desulfoluna butyratoxydans OX=231438 GN=folE2; PE = 3 SV=1
MIDMQKQPDYRNIPIDQVGIKNLKYPVRVLDRSNGTQHTVASINMYVDLPHHSKGTHMSRFVELLHSFRNDLELSLPTLSRILVEMKKILGAKSSHVDITFPYFIEKTAPESHSPGLVDYSCRFLGTSNEHDEIDLISEVVVPITSLCPCSKEISTHGAHNQRGEVRLATRFRKFNWIEDMIELVEQAASCEIYSVLKRVDEKYVTEQAYNNPKFVEDIVRDIATALNRDDNITWFELSAENFESIHNHSAYAYIASTKEGIVAGA

SEQ ID NO: 7473 - protein, 266 aa, Desulfoluna spongiiphila
  REGION 1..266: note = tr|A0A1G5FPS4|A0A1G5FPS4_9DELT GTP cyclohydrolase FolE2 OS=Desulfoluna spongiiphila OX=419481 GN=folE2 PE=3; SV = 1
MIDMQKQPDYRNIPIDQVGIKNLKYPVRVLDRSNGTQHTVASINMYVDLPHHSKGTHMSRFVELLHSFRNDLELSLTTLSHILDEMKKILGAKSSHVDITFPYFIEKKAPESGSPGLVDYSCRFLGTSNEHDEIDLISEVVVPITSLCPCSKEISTHGAHNQRGEVRLATRFRKFNWIEDMIELVEQAASCEIYSVLKRVDEKFVTEQAYNNPKFVEDIVRDIATALNRDDNITWFQLSAENFESIHNHSAYAYIASSKEGIVAGS

SEQ ID NO: 7474 - protein, 273 aa, unidentified
  source 1..273: note = Desulfomicrobiaceae bacterium
  REGION 1..273: note = tr|A0A3D1NEE7|A0A3D1NEE7_9DELT GTP cyclohydrolase FolE2 OS=Desulfomicrobiaceae bacterium OX=2053547 GN=folE2; PE = 3 SV=1
MRDVQRDPAEVPLPIDRVGVRHVAVPLRVRDRERGVQHTVAQVELGVELPAHFKGTHMSRFLEALAAADFALDAQTCRTLLADVRARLEARRAFLCFRFPYFLARHAPVTGSAAPMDYSCWLRGSLREDGARMTLGVEVPVMTVCPCSKAISREGAHSQRALVRMEAQFSGMLWIEDLIAIAQDSASSPVYPLLKREDEKHVTETAFAHPAFVEDVVRAAAQRLAAHPRVQGFRVEVESMESIHNHSAYACIESWADGEAPTPQLPRDPHPSC

SEQ ID NO: 7475 - protein, 274 aa, Desulfomicrobium apsheronum
  REGION 1..274: note = tr|A0A1I3N530|A0A1I3N530_9DELT GTP cyclohydrolase FolE2 OS=Desulfomicrobium apsheronum OX=52560 GN=folE2; PE = 3 SV=1
MRDVQSGPADVALRIDRVGVKNLSIPLTVRDRAKGRLHTVARVDLSVDLPAEFKGTHMSRFLEALRDMDTTLDADSCKNLLLDLRDRLHAESSHLCFLFTYFMEQRAPVTGSPALMDYSCFLRGVLRDGEVSLMLGVEVPVMTVCPCSKAISREGAHSQRAMVRIEAQCLGMLWLEDLIAIAQESGSSPVYALLKREDEKYVTEAAFAAPTFVEDVVRGAAARLAAHPKVNGFRVEVESFESIHNHSAYACIDQMDEDTDAGHAGLDGSPARVR

SEQ ID NO: 7476 - protein, 274 aa, Desulfomicrobium baculatum
  REGION 1..274: note = tr|C7LXR9|C7LXR9_DESBD GTP cyclohydrolase FolE2; OS = Desulfomicrobium baculatum (strain DSM 4028 / VKM B-1378) OX=525897 GN=folE2 PE=3 SV=1
MRDVQSGPADVALRIDRVGVKNLSIPLTVRDRAKGRLHTVARVDLSVDLPARFKGTHMSRFLEALRDMDTTLDADSCKNLLLDLRDRLQAESSHLCFFFTYFLEQRAPVTGSAALMDYSCFLRGVLRNGEVSLILGVEVPVMTVCPCSKAISREGAHSQRAMVRIEAQCLGMLWLEDLIAIAQESGSSPVYALLKREDEKYVTEAAFAAPTFVEDVVRGAASRLAAHPKVNGFRVEVESFESIHNHSAYACIDQMDEGADTAHTALDGSPACGR

SEQ ID NO: 7477 - protein, 274 aa, Desulfomicrobium norvegicum
  REGION 1..274: note = tr|A0A1I4HVB0|A0A1I4HVB0_DESNO GTP cyclohydrolase FolE2 OS=Desulfomicrobium norvegicum (strain DSM 1741 / NCIMB 8310) OX=52561 GN=folE2 PE=3 SV=1
MRDVQSGPADVALRIDRVGVKNLSIPLTVRDRAKGRLHTVARVDLSVDLPAEFKGTHMSRFLEALRDMDKTLDADSCKNLLLDLRDRLHAQSSHLCFLFTYFMEQRAPVTGSPALMDYSCFLRGVLRDGEVSLMLGVEVPVMTVCPCSKAISREGAHSQRAMVRIEAQCLGMLWLEDLIAIAQESGSSPVYALLKREDEKYVTETAFAAPTFVEDVVRGAAARLAAHPKVNGFRVEVESFESIHNHSAYACIDQMDEDADAGHAGLDGSPARVR

SEQ ID NO: 7478 - protein, 268 aa, Desulfomicrobium orale
  REGION 1..268: note = tr|A0A0X8JSC1|A0A0X8JSC1_9DELT GTP cyclohydrolase FolE2 OS=Desulfomicrobium orale DSM 12838 OX=888061; GN = folE2 PE=3 SV=1
MADVQSQAPSIPLHINRVGIRNMTMPILVRQRDYVEAQCTVAEITLSVDLPAEAKGTHMSRFVETLQGMLRRSGGETSTLDYPLALRLMRETCARLKADRAYLAFSFPYFLVRTTPVSGIRTTMTYHCTLSGEIDETSRETSSFAPFTLAVTVPVMTVCPCSKAISDEGAHSQRAEIHISSRMSGYIWIEDLIELAEEAGSSPVYSLLKRADEKFVTEYAFAHPCFVEDVARCVAASLTVHPLVSSFHVRVESHESIHAHNAFAYIKG

SEQ ID NO: 7479 - protein, 256 aa, Desulfomicrobium orale
  REGION 1..256: note = tr|A0A0X8JND3|A0A0X8JND3_9DELT GTP cyclohydrolase FolE2 OS=Desulfomicrobium orale DSM 12838 OX=888061; GN = folE2 PE=3 SV=1
MRDVQSGPADVPLRIDRVGVKSLSIPLTVRDRARGEQRTVARVDLSVDLPARFKGTHMSRFLEALRGMDTLDMPGCTRLLHDLRDRLQARSAHLCFQFSYFLEHRAPATGIPALVDYACFLRGTMRDAEAELALGVEVPVMTVCPCSKAISREGAHSQRAMIRMEAGCSGMLWLEDLIDIGRESGSSPVYALLKREDEKFVTEAAFAAPAFVEDVVRNAASRLAAHPRVRGFRVEVESMESIHNHSAYACIDQMDG

SEQ ID NO: 7480 - protein, 307 aa, Desulfomonile tiedjei
  REGION 1..307: note = tr|I4C2Z0|I4C2Z0_DESTA GTP cyclohydrolase FolE2; OS = Desulfomonile tiedjei (strain ATCC 49306 / DSM 6799 / DCB-1) OX=706587 GN=folE2 PE=3 SV=1
MADHKREQHVPGTLPANGDGAVDSGRVFANYATLPDIQSLPDERKIPIDKVGVKGLRYPISVKDRQKGLQHTVGLFDLFVNLPHDFKGAHMSRFIEVLNEFRGEISMEKFREILEKIKSKLNAKSAHMNVEFPYFIEKNAPITGTPGLMSYTCFMRGALADRFDLIVGVEVPVTTVCPCSKEISEYGAHNQRGIVRVQLRFRKLFWIEEIIEVVESSVSSEIYSLLKRPDEKFVTEKAYENPMFVEDVVRLALSRLREKNNFPWYKIEAENFESIHNHSAYASIEKDFSPEPDCFTGGSSIRYNGAL

SEQ ID NO: 7481 - protein, 258 aa, Desulfonatronospira thiodismutans
  REGION 1..258: note = tr|D6SNX4|D6SNX4_9DELT GTP cyclohydrolase FolE2; OS = Desulfonatronospira thiodismutans ASO3-1 OX=555779; GN = folE2 PE=3 SV=1
MQDVQSGMPEFPLPIDRVGVKNLKLPLLVQDRLHGQQHTVADVDLCVDLPGEFKGTHMSRFLESLSHWSKVLTYESIKELLAEIIHRLEAQKALLRFDFPYFYSRRTPVSGHEFLMDYKSFLAGEFSMGEIRMTQGVEVPVMTVCPCSLAISKQGAHSQRAYVKIKCGYKGLLWLEELIDTGMSAGSSPVYPLLKREDEKYVTDEAFANPTFVEDVVRCVAFSLSRHPRIIWYEVEVESFESIHNHSAYATITGRGKH

SEQ ID NO: 7482 - protein, 257 aa, Desulfonatronovibrio sp.
  REGION 1..257: note = tr|A0A424Y085|A0A424Y085_9DELT GTP cyclohydrolase FolE2 OS=Desulfonatronovibrio sp. MSAO_Bac4 OX=2293858; GN = folE2 PE=3 SV=1
MQDVQSSPSEVPMSIDRVGVKNLQIPLLVQDRLKGSQHTVADVDLCVDLPARFKGTHMSRFLEVLSSWSQVLDYDSFKDLLSRVRQSLKAERAVLRFDFPYFYGRKAPVSKHEFVINYKSFLSGELSGQKVKMILGVEVPVMTVCPCSLAISEKGAHSQRALVRIKCGFKGLLWLEELIDIASHSGSSPVYPLLKREDEKYVTEAAFSMPSFVEDVVRRAAQSLDEHELIKWYEVDVESFESIHNHSAYARICRPAV

SEQ ID NO: 7483 - protein, 98 aa, Desulfonatronum sp.
  REGION 1..98: note = tr|A0A2T5C764|A0A2T5C764_9DELT GTP cyclohydrolase 1 (Fragment) OS=Desulfonatronum sp. SC1 OX=2109626; GN = C6366_18705 PE=3 SV=1
YIPRHHITGLSKIARVVEAFARRLQVQERLTTQIKECIQETLNPLGVAVVIEAQHMCMQMRGVQKQHSVTTTSDFTGAFLKNIATREEFFNIIGHKLH

SEQ ID NO: 7484 - protein, 263 aa, Desulfonatronum sp.
  REGION 1..263: note = tr|A0A2T5CC52|A0A2T5CC52_9DELT GTP cyclohydrolase FolE2 OS=Desulfonatronum sp. SC1 OX=2109626 GN=folE2 PE=3; SV = 1
MLDDVQNTPATVPVDIDRVGIRHVHFPLAVLDRAQGRQHTVAQVEMGVDLPARFKGTHMSRFVEALQAWSGVLDYPNLKHLLGDVQNRLDARKAWISFYFPFFLERSAPVSGSRSRMDYQCRVIGEHQDGRLLFGLEVEVPVMTVCPCSLAICDRGAHSQRAMVRIRTRNKGLIWLEDLIELAQESASSPVYALLKREDEKRIIDNAFEKPCFVEDVVRTVSRGLERLNKLLWYRVEVESQESIHNHSAYARIERSLAQAGKG

SEQ ID NO: 7485 - protein, 261 aa, Desulfonatronum thiosulfatophilum
  REGION 1..261: note = tr|A0A1G6C989|A0A1G6C989_9DELT GTP cyclohydrolase FolE2 OS=Desulfonatronum thiosulfatophilum OX=617002; GN = folE2 PE=3 SV=1
MLDVQNDPASVPVDIDRVGIKHVHFPLMVLDRAQGRQHTVAQVEMGVDLPACFKGTHMSRFVEALQDWSGILDYPSLKHLLNDVQARLDAQRAWISFSFPFFLERAAPASGSKARMDYHCRVAGEFQGSRLLFSLEVEVPVMTVCPCSLAICDQAAHSQRAVVRVQTRNKGLIWLEDLIELAQESASSPVYALLKREDEKLVIDNAFKRPCFVEDVVRNVSHELEKLTQLLWYRVEVESQESIHNHSAYACIERSLTGMKA

SEQ ID NO: 7486 - protein, 259 aa, Desulfonauticus sp.
  REGION 1..259: note = tr|A0A124F8S7|A0A124F8S7_9DELT GTP cyclohydrolase FolE2 OS=Desulfonauticus sp. 38_4375 OX=1635258 GN=folE2; PE = 3 SV=1
MLDVQNTPAKIPLRIDKVGVKNLKLPLTVQDKNKGIQHTTAQVDISVDLPKEFKGTHMSRFLEVLSQWQGTLHYDSLKQLLWDLKGKLRAKDAHVLFTFPYFLSQKAPQSGQDFLLDFLAQVEGSLIDDRLTFTLGVEVPVFTVCPCSLAISEKGAHSQRAVIKISAGIKEFLWLEDLIFIAQKAGSSPVYPLLKREDEKEVTEKAFDNPMFVEDVVRKVARELDKLDKILWYKVEVESFESIHNHSAYAIIGPKNKEF

SEQ ID NO: 7487 - protein, 267 aa, Desulfonauticus submarinus
  REGION 1..267: note = tr|A0A1H0C1V9|A0A1H0C1V9_9DELT GTP cyclohydrolase FolE2 OS=Desulfonauticus submarinus OX=206665 GN=folE2; PE = 3 SV=1
MSKGLEDIQNTPADVPLDINRVGIKSLKLPLEILDKQKGLQHTVAEVDLSVDLPKEFKGTHMSRFLEALASWEKKLSYESLKKLLLDLQHKLHAKQAHVSFVFPYFLEQKSPASGQVFEMDFLAKVEGNMKGKELSFVLKVAVPVMTVCPCSLAISDKGAHSQRTFVSITAQIKKFLWLEDLIEIALKSGSSPVYPLLKREDEKKVTENAFSNPTFVEDVVRNVARELNDLDNILWYKVEVESYESIHNHSAYAIIESFDATKLNKS

SEQ ID NO: 7488 - protein, 266 aa, Desulfonema ishimotonii
  REGION 1..266: note = tr|A0A401FRL4|A0A401FRL4_9DELT GTP cyclohydrolase FolE2 OS=Desulfonema ishimotonii OX=45657 GN=folE2 PE=3; SV = 1
MIDIQSQRDERNIPIDKVGIKNLRYPITVRDRKNGFQHTVATINMYVDLPGNYKGTHMSRFVEMLHLFRPEISLQKISQILDQMKSHLDAASAHIEVMFPYFIEKKAPVSRSVGLMDYTCRFIGTSDPVGKVDLVSEVRVPISSVCPCSKEISDAGAHNQRGEVRLSTRFRKFIWIEDMIELVENAASCEVYSILKRVDEKCVTERGYGNPKFVEDVVRDIAGNLYLDDNITWFSVSAENFESIHNHSAYAFIASGDVPSPCHCRR

SEQ ID NO: 7489 - protein, 195 aa, Desulfonispora thiosulfatigenes
  REGION 1..195: note = tr|A0A1W1ULI9|A0A1W1ULI9_DESTI GTP cyclohydrolase 1; OS = Desulfonispora thiosulfatigenes DSM 11270 OX=656914; GN = folE PE=3 SV=1
MSINQAEIAKHIRGILVALGEDPDREGLQDTPQRVASMYAEIFAGIAYTNDQLVDMFNKTFEEDINTTEDSQDIVVMKDIEIFSHCEHHLALMYNMKVTIAYIPKDKVIGLSKMARIADMVGKRLQLQERIGQDIAEIMQKITETEDVAVIIEGEHGCMTTRGIKKPNAKTVTMTLRGNFNTDINLLNRLLILCK

SEQ ID NO: 7490 - protein, 245 aa, Desulfopila sp.
  REGION 1..245: note = tr|A0A4U1A408|A0A4U1A408_9DELT GTP cyclohydrolase FolE2 OS=Desulfopila sp. IMCC35005 OX=2569541 GN=folE2; PE = 3 SV=1
MHIQVVGIKNICTPVKVLEKGGGSQHTIATISMQASMPSSKRESCVETFTSILNQSLDTLSVESFHRILSDVQGSLGSESARLEMTFPYFIEKKAPVTDTRSLMEYSCTFSGGIGKDQDFILSVVVPVTTLCPCSKEISQDGAHNQRAEVTLNVEMRKFVWIEDLITMIEQSASCELYALLKRPDEKYVTERAFNNPMFVEDVVRKVAECALAHEDIGWFSASVESFESIHKHSAYAYVDSDEIR

SEQ ID NO: 7491 - protein, 245 aa, Desulfopila sp.
  REGION 1..245: note = tr|A0A4U1ARV8|A0A4U1ARV8_9DELT GTP cyclohydrolase FolE2 OS=Desulfopila sp. IMCC35004 OX=2569540 GN=folE2; PE = 3 SV=1
MHIQAVGINNIHTPVKVLQKGGGLQHTIATISMQAKLPSSKRESCVETFTSILNQSLDELSWESFGEILREVQSALGSQSARLEMTFPYFIEKKAPVTETRSLMEYSCTFSGGIGEAEGLTLSVAVPVTTLCPCSKEISQHGAHNQRAEVKLNVEMKKFVWIEDLISLVEQSASCELYALLKRPDEKYVTERAFNNPMFVEDVVRKVAESAMAHPEIDRFSASVESFESIHKHSAYAYVDSDEIR

SEQ ID NO: 7492 - protein, 255 aa, unidentified
  source 1..255: note = Desulfoplanes formicivorans
  REGION 1..255: note = tr|A0A194AFU7|A0A194AFU7_9DELT GTP cyclohydrolase FolE2 OS=Desulfoplanes formicivorans OX=1592317 GN=folE2; PE = 3 SV=1
MQDIQSGPSRVPLAIDRVGVKNLTHPLIVRDREQGQQHTVATMDMSVDLPAAFKGTHMSRFLEALGDWTGILDYASFKQLLEDLTIRLQAKRAHLHFSFPYFREQSAPVSKSPALMDYQCSLQGRLEGRDMEMILGVDVPVMTVCPCSLAICDHGAHSQRAMVRIEARFSGLLWIEDLIDIGQQAGSSPVHALLKREDEKFVTDAAFDNAAFVEDVVRNAAQNLAKHPQVHGYKVEVESMESIHNHSAYACIETM

SEQ ID NO: 7493 - protein, 186 aa, unidentified; identical to SEQ ID NO: 6162
  source 1..186: note = Desulforudis audaxviator
  REGION 1..186: note = tr|B1I3V9|B1I3V9_DESAP GTP cyclohydrolase 1; OS = Desulforudis audaxviator (strain MP104C) OX=477974; GN = folE PE=3 SV=1

SEQ ID NO: 7494 - protein, 257 aa, Desulfosoma caldarium
  REGION 1..257: note = tr|A0A3N1UU51|A0A3N1UU51_9DELT GTP cyclohydrolase FolE2 OS=Desulfosoma caldarium OX=610254 GN=folE2 PE=3 SV=1
MIDVQSLIDHRNIHVDKVGVKNIRYPLTVMDKKNGVQHTVASINMYVNLPREFKGTHMSRFVEILNEFYGHLDIREFSKILEAMQSRLNAQSAHLEISFPYFIEKLSPVTGTSGLMEYLCRVSGSLNNQNGFDLVVEVNVPITTVCPCSREISEHGAHNQRGMARLAVRFKKFIWIEDLIRIVEEAASCEVYSLLKRPDEKFVTEKGYDNPKFVEDVVRDVAYRLKKNPHILWFQVDVENFESIHNHSAYAFIERAL

SEQ ID NO: 7495 - protein, 190 aa, unidentified
  source 1..190: note = Desulfosporosinus acididurans
  REGION 1..190: note = tr|A0A0J1IT92|A0A0J1IT92_9FIRM GTP cyclohydrolase 1; OS = Desulfosporosinus acididurans OX=476652 GN=folE PE=3; SV = 1
MGMDLEKIEQAVYMILEAIGEDPKREGLQDTPKRVARMYAEVFAGLHEDPSRHLKVQFSEEHEEMVIVKDIPVYSMCEHHLVPFYGKAHVAYIPRKGKITGLSKFARVVEGFARRPQLQERLTSEIADAIMAELTPLGVLVVIEAEHMCMTMRGVKKAGSRTLTSAVRGIFKTNPITRSEAFSLIQGHKS

SEQ ID NO: 7496 - protein, 289 aa, unidentified
  source 1..289: note = Desulfosporosinus acididurans
  REGION 1..289: note = tr|A0A0J1IMH8|A0A0J1IMH8_9FIRM Putative GTP cyclohydrolase 1 type 2 OS=Desulfosporosinus acididurans; OX = 476652 GN=DEAC_c19320 PE=4 SV=1
MAVSIGLVAQHIEKLAPKCWAEEWDNVGLLVGSGSAPVERILIALDGTLEVIEEAKDFGAQLIVAHHPLMFRPLKNLRSDNPAAKIPLTLFNYQIGYYAAHTNLDQSRLSSSITLGEILGLKELKLLEEQSNSSNYSRQANLSSANSTEELRGYGVIGYLERPEPLEVVWENFLEGLLQSNCYAHPYNLTGVRLAGSLKKDVRKVAIVNGSGGRFVPKALFKGADLLITGDVDHHAVLDALEGGMAVGDLGHFLSEAPMLQALYYYLSSERSLQGIEFKVSSKNVSPWL

SEQ ID NO: 7497 - protein, 190 aa, Desulfosporosinus acidiphilus
  REGION 1..190: note = tr|I4D850|I4D850_DESAJ GTP cyclohydrolase 1; OS = Desulfosporosinus acidiphilus (strain DSM 22704 / JCM 16185 / SJ4) OX=646529 GN=folE PE=3 SV=1
MGMDLEKIEKAVYMILEAIGEDPEREGLLDTPKRVARMYAEVFAGLHEDPSRHLKVQFSEEHEEMVIVKDIPVYSMCEHHLVPFYGKAHVAYIPRKGKITGLSKFARVVEGYARRPQLQERLTSQIADAIMGELTPLGVLVVIEAEHMCMTMRGVKKAGSQTLTSAVRGIFKSNSITRSEAFSLIQGNRS

SEQ ID NO: 7498 - protein, 189 aa, unidentified
  source 1..189: note = Desulfosporosinus fructosivorans
  REGION 1..189: note = tr|A0A4Z0R3N1|A0A4Z0R3N1_9FIRM GTP cyclohydrolase 1; OS = Desulfosporosinus fructosivorans OX=2018669 GN=folE; PE = 3 SV=1
MDIEKIEQAVYMILEAIGEDPDREGLRDTPKRVARMYAEVFAGLHEDPSQHFKVQFTEEQHEEMVIVKDIPVYSMCEHHLVPFYGKAHVAYIPRKGKITGLSKFARVVEGFAHRPQLQERLTSQIANAVMGELDPLGVVVVIEAEHMCMTMRGVKKAGSQTLTSAVRGIFKTNPITRSEAFSLIQGHRS

SEQ ID NO: 7499 - protein, 266 aa, unidentified
  source 1..266: note = Desulfosporosinus fructosivorans
  REGION 1..266: note = tr|A0A4Z0R5C4|A0A4Z0R5C4_9FIRM GTP cyclohydrolase FolE2 OS=Desulfosporosinus fructosivorans OX=2018669; GN = folE2 PE=3 SV=1
MIDVQGCADERGISIQKVGVKEIYLPFLIQTKNGDYQTVSANIQLTVDLSMENKGTHMSRFIEVLNEWRQKTFSNKELESLLENVLERLDASSAHMDIHFKYFIEKTAPVSLIKSVVDYDCTFSGVLSKENGFEFTLGVVVPFTALCPCSKEISRFGAHNQRGVMRMKLQQSRAEESLCLEDVVELMEAQGSSQIYSVLKREDEKYVTEKAYENPKFVEDVIRDLILAMRALDGVTWFEIECENFESIHNHSAYAYHNEAITNLDR

SEQ ID NO: 7500 - protein, 190 aa, Desulfosporosinus hippei
  REGION 1..190: note = tr|A0A1G7XKE1|A0A1G7XKE1_9FIRM GTP cyclohydrolase 1; OS = Desulfosporosinus hippei DSM 8344 OX=1121419 GN=folE; PE = 3 SV=1
MGMDLDKIEQAVQMILEAIGEDPDREGLKDTPKRVARMYAEVFSGLHEDPSHHLNVQFSEEHEEMVIVKDIPVYSMCEHHLVPFYGKAHVAYIPRKGKITGLSKFARVVEGFARRPQLQERLTSDIADAIVAKLSPLGVLVVIEAEHMCMTMRGVKKAGSQTLTSAVRGIFKTNPITRSEAFSLIQGHRY

SEQ ID NO: 7501 - protein, 190 aa, Desulfosporosinus lacus
  REGION 1..190: note = tr|A0A1M5WJ32|A0A1M5WJ32_9FIRM GTP cyclohydrolase 1; OS = Desulfosporosinus lacus DSM 15449 OX=1121420 GN=folE; PE = 3 SV=1
MGMDLQKIEQAVYMILEAIGEDPEREGLRDTPKRVAKMYAEVFSGLHEDPGYHLNVQFSEEHEEMVIVKDIPVYSMCEHHLVPFYGKAHVAYIPRKGKITGLSKFARVVEGFARRPQLQERLTSEIADAIMAKLAPLGVLVVIEAEHMCMTMRGVKKAGSQTLTSAVRGIFKTNPITRSEAFSLIQGHRR

SEQ ID NO: 7502 - protein, 189 aa, Desulfosporosinus lacus
  REGION 1..189: note = tr|A0A1M5V3S0|A0A1M5V3S0_9FIRM GTP cyclohydrolase 1; OS = Desulfosporosinus lacus DSM 15449 OX=1121420 GN=folE; PE = 3 SV=1
MKECDMKKVEEAVRNILEAIGEDPEREGLKDTPKRVARFYQEVFAGLKEEPGDYLNVQFTENHEEMIIVKDIPIYSMCEHHLLPFFGLVHVAYIPKDGKITGLSKLARVAEGYARRPQLQERLTSQIANSMEKILTAWGVLVVIEAEHMCMTIRGIKKPGSRTVTSAVRGIFKSNAATRAEAFSLILSG

SEQ ID NO: 7503 - protein, 190 aa, Desulfosporosinus meridiei
  REGION 1..190: note = tr|J7IRL7|J7IRL7_DESMD GTP cyclohydrolase 1; OS = Desulfosporosinus meridiei (strain ATCC BAA-275 / DSM 13257 / NCIMB 13706 / S10) OX=768704 GN=folE PE=3 SV=1
MGMDLDKIEQAVQMILEAIGEDPDREGLKDTPKRVARMYAEVFSGLHEDPSYHLNVQFSEEHEEMVIVKDIPVYSMCEHHLVPFYGKAHVAYIPRKGKITGLSKFARVVEGFARRPQLQERLTSDIADAIVAKLSPLGVLVVIEAEHMCMTMRGVKKAGSQTLTSAVRGIFKTNPITRSEAFSLIQGHRC

SEQ ID NO: 7504 - protein, 190 aa, Desulfosporosinus orientis
  REGION 1..190: note = tr|G7WDS9|G7WDS9_DESOD GTP cyclohydrolase 1; OS = Desulfosporosinus orientis (strain ATCC 19365 / DSM 765 / NCIMB 8382 / VKM B-1628) OX=768706 GN=folE PE=3 SV=1
MGMDLEKIEQAVYMMLEAIGEDPDREGLVDTPKRVARMYAEVFNGLHEDPSEHLNVQFSEEHEEMVIVKDIPVYSMCEHHLVPFYGKAHVAYIPRKGKITGLSKFARVVEGFARRPQLQERLTSEIADAIVAKLSPLGVLVVIEAEHMCMTMRGVKKAGSQTLTSAVRGIFKTNPITRSEAFSLIQGHRR

SEQ ID NO: 7505 - protein, 190 aa, Desulfosporosinus sp.
  REGION 1..190: note = tr|A0A0F2JG23|A0A0F2JG23_9FIRM GTP cyclohydrolase 1; OS = Desulfosporosinus sp. I2 OX=1617025 GN=folE PE=3 SV=1
MGMDLEKIEQAVYMILEAIGEDPEREGLRDTPKRVARMYAEVFSGLHEDPSRHLNVQFSEEHEEMVIVKDIPVYSMCEHHLVPFYGKAHVAYIPRKGKITGLSKFARVVEGFARRPQLQERLTSQIADAIMGELTPLGVLVVIEAEHMCMTMRGVKKAGSQTLTSAVRGIFKTNPITRSEAFSLIQGHKR

SEQ ID NO: 7506 - protein, 188 aa, Desulfosporosinus sp.
  REGION 1..188: note = tr|A0A101WM45|A0A101WM45_9FIRM GTP cyclohydrolase 1; OS = Desulfosporosinus sp. BRH_c37 OX=1734396 GN=folE PE=3; SV = 1
MDLEKIEQAVHMILEAIGEDPDREGLRDTPKRVARMYAEVFTGLHEDPSQHLKVQFSEIHEEMVIVKDIPVYSMCEHHLVPFYGKAHVAYIPRKGKISGLSKFARVVEGFARRPQLQERLTSQVADAIMGELSPLGVLVVIEAEHMCMTMRGVKKAGSQTLTSAVRGIFKTNPLTRSEAFSLIQSQRR

SEQ ID NO: 7507 - protein, 190 aa, Desulfosporosinus youngiae
  REGION 1..190: note = tr|H5XVK6|H5XVK6_9FIRM GTP cyclohydrolase 1; OS = Desulfosporosinus youngiae DSM 17734 OX=768710 GN=folE; PE = 3 SV=1
MGMDLEKIEQAVYMILEAIGEDPEREGLRDTPKRVARMYDEVFHGLHEDPGQHLNVQFSEEHEEMVIVKDIPVYSMCEHHLVPFYGKAHIAYIPRKGKITGLSKFARVIEGFARRPQLQERLTSEVADAIMNKLTPLGVLVVIEAEHMCMTMRGVKKAGSQTLTSAVRGIFKTNPITRSEAFSLIQGHSR

SEQ ID NO: 7508 - protein, 251 aa, Desulfotalea psychrophila
  REGION 1..251: note = sp|Q6AMT5|GCH4_DESPS GTP cyclohydrolase FolE2; OS = Desulfotalea psychrophila (strain LSv54 / DSM 12343); OX = 177439 GN=folE2 PE=3 SV=1
MSKKQSTICQKVGIADLEIPIILGQKDGKLQHSIASCKITATIKETLKGDISGEVQRLLPSFTKEIEPKSWHRLLEEFKENIGVEKITLSLSCPFFVSKKAPVSELRGLMEYNCTFSASTGESGITTSLYVPVTTLCPCSKEISDGGAHNQRAEAIFRVEMKEHLWLEDLIQLVEESASCQVYSVLKRPDEKYVTEKAFDNPMFVEDVVRKIAVRAGEHPLIHAFSISVESFESIHKHNAYAYVNSEDLNL

SEQ ID NO: 7509 - protein, 255 aa, Desulfotignum phosphitoxidans
  REGION 1..255: note = tr|S0G6Z1|S0G6Z1_9DELT GTP cyclohydrolase FolE2; OS = Desulfotignum phosphitoxidans DSM 13687 OX=1286635; GN = folE PE=3 SV=1
MIDTQNQPDYRKIPINKVGIKGLKYPVKVLDKTRGTQSTVADISMYVDLPHQCKGTHMSRFVEILHQSRTRISLESLTTILADMKKILGAQSSHIEITFPYFIAKQSPSAGVSGLMDYTCSIIGSSNSGHPTDIILKVAVPVTSVCPCSKAISDCGAHNQRGEVLVSTRFKKLIWIEDIVAIVERSASCDIFSVLKREDEKYVTEKAYNNPKFVEDLARDVAKILMADPNITWFSVSAENFESIHNHSAYAFIEK

SEQ ID NO: 7510 - protein, 191 aa, Desulfotomaculum aeronauticum
  REGION 1..191: note = tr|A0A1M6NEU7|A0A1M6NEU7_9FIRM GTP cyclohydrolase 1; OS = Desulfotomaculum aeronauticum DSM 10349 OX=1121421; GN = folE PE=3 SV=1
MTIFDLPKIEQAVRMILEAIGEDPEREGLVETPARVAKMYQEIFAGLQEDPEEHLGKIFAEDHEEMVLVKDIRLFSMCEHHLIPFIGKAHVCYIPRNGKVTGLSKLARLVNGYARRPQLQERLTKQIADAIMKKLNPYGVMVVVEAEHLCMSMRGVRSPGATTVTSAVRGIFKKHESSRAEALRLITKGEL

SEQ ID NO: 7511 - protein, 180 aa, unidentified
  source 1..180: note = Desulfotomaculum aquiferis
  REGION 1..180: note = tr|A0A4Q2WKL4|A0A4Q2WKL4_9FIRM GTP cyclohydrolase 1; OS = Desulfotomaculum aquiferis OX=1397668 GN=folE PE=3 SV=1
MFDLPKIEKAVKMILEAIGEDPNREGLVETPTRVAKMYQEIFAGIGENPAAHLDKTFSEEHEEMVLVKDIPLFSMCEHHLVPFLGKAHVCYIPRNGKVTGLSKLARLVEGFARRPQLQERLTKQIADAVMDRLNPYGVVVVVEAEHLCMSMRGVRAPGAHTVTSAVRGIFLKNEASRPRP

SEQ ID NO: 7512 - protein, 186 aa, Desulfotomaculum arcticum
  REGION 1..186: note = tr|A0A1I2S627|A0A1I2S627_9FIRM GTP cyclohydrolase 1; OS = Desulfotomaculum arcticum DSM 17038 OX=1121424 GN=folE; PE = 3 SV=1
MVDREKVEVAVKMILEAIGEDPEREGLRETPARVARMYSEIFCGLWEDPQTHLSKMFSEEHEEMVLVKDIPIYSMCEHHLLPFYGKAHVAYIPRKGNVTGLSKLARVVEGFAKRPQLQERLTSQIADTIMKKLNPHGVIVVIEAEHMCMTLRGVKKPGSKTITSAVRGQFQRSEATRAEAFSLIGK

SEQ ID NO: 7513 - protein, 186 aa, unidentified
  source 1..186: note = Desulfotomaculum copahuensis
  REGION 1..186: note = tr|A0A1B7LE22|A0A1B7LE22_9FIRM GTP cyclohydrolase 1; OS = Desulfotomaculum copahuensis OX=1838280 GN=folE PE=3; SV = 1
MIDTAKIENAVRMILEAIGEDPEREGLLETPARVARMYGEIFCGLWQDPEVHLQKVFSEEHEEMIIVKDIPMYSMCEHHLLPFFGKAHVAYIPRKGNVTGLSKLARVVEGYAKRPQLQERLTKQIADSIMHRLNPQGVLVVVEAEHMCMTLRGVRKPGSKTITSAVRGSFQRNEATRAEAMSLIKG

SEQ ID NO: 7514 - protein, 189 aa, unidentified
  source 1..189: note = Desulfotomaculum ferrireducens
  REGION 1..189: note = tr|A0A1S6J0L4|A0A1S6J0L4_9FIRM GTP cyclohydrolase 1; OS = Desulfotomaculum ferrireducens OX=1833852 GN=folE PE=3; SV = 1
MFDLPKIEQAVRMILEAIGEDPDREGLVETPARVAKMYQEVFAGLQEDPQEHLSKIFSEEHEEMVLVKDIRLYSMCEHHLIPFIGKAHVCYIPRNGKVTGLSKLARLVNGYARRPQLQERLTKQIADAIMNRLNPYGVMVVVEAEHLCMSMRGVRSPGATTVTSAVRGIFKKNESSRAEALRLITKGKL

SEQ ID NO: 7515 - protein, 188 aa, Desulfotomaculum hydrothermale
  REGION 1..188: note = tr|K8DX41|K8DX41_9FIRM GTP cyclohydrolase 1; OS = Desulfotomaculum hydrothermale Lam5 = DSM 18033; OX = 1121428 GN=folE PE=3 SV=1
MFDLPKIEQAVRMILEAIGEDPAREGLVETPARVAKMYQEIFAGLTEDPMIHLDKTFSEEHEEMVLVKDIRLFSMCEHHLIPFIGKAHVCYIPRNGNVTGLSKLARLVNGYARRPQLQERLTKQIADAIMTRLNPYGVLVVVEAEHLCMSMRGVKAPGAKTVTSAVRGIFKKNDACRAEALSLIMKSQ

SEQ ID NO: 7516 - protein, 187 aa, Desulfotomaculum nigrificans
  REGION 1..187: note = tr|F6B587|F6B587_DESCC GTP cyclohydrolase 1; OS = Desulfotomaculum nigrificans (strain DSM 14880 / VKM B-2319 / CO-1-SRB) OX=868595 GN=folE PE=3 SV=1
MFDLHKIEQAVKMILEAIGEDPQREGLLETPARVAKMYQEIFMGLEEDPSEHLSKTFSEEHEEMVLVKDIPLFSMCEHHLIPFIGKAHVCYIPRNGNVTGLSKLARLVNGYARRPQLQERLTKQIADAIMTKLNPYGVVVVVEAEHLCMSMRGVRVPGAHTVTSAVRGLFKKNDASRAEAMSLILKS

SEQ ID NO: 7517 - protein, 188 aa, unidentified
  source 1..188: note = Desulfotomaculum profundi
  REGION 1..188: note = tr|A0A2C6ME54|A0A2C6ME54_9FIRM GTP cyclohydrolase 1; OS = Desulfotomaculum profundi OX=1383067 GN=folE PE=3 SV=1
MFDLAKIEQAVKMILQAIGEDPDREGLVETPSRVAKMYQEIFAGLDEDPEEHLDKTFSEEHEEMVLVKDIRLFSMCEHHLIPFIGKAHVCYIPRNGNVTGLSKLARLVNGYARRPQLQERLTKQIADAIMSRLNPYGVLVVVEAEHLCMSMRGVRAPGAKTVTSAVRGIFKKNEASRAEALSLILKNE

SEQ ID NO: 7518 - protein, 188 aa, Desulfotomaculum putei
  REGION 1..188: note = tr|A0A1M4T0W5|A0A1M4T0W5_9FIRM GTP cyclohydrolase 1; OS = Desulfotomaculum putei DSM 12395 OX=1121429 GN=folE; PE = 3 SV=1
MFDLPKIEQAVKMILEAIGEDPAREGLVETPARVAKMYQEIFAGLEEDPEAHLDKTFSEEHEEMVLVKDIRLFSMCEHHLIPFIGKAHVCYIPRNGNVTGLSKLARLVNGYARRPQLQERLTKQIADAIMSRLNPYGVLVVVEAEHLCMSMRGVRAPGAKTVTSAVRGIFKKNEASRAEAISLIMKSE

SEQ ID NO: 7519 - protein, 187 aa, unidentified
  source 1..187: note = Desulfotomaculum reducens
  REGION 1..187: note = sp|A4J5D0|GCH1_DESRM GTP cyclohydrolase 1; OS = Desulfotomaculum reducens (strain MI-1) OX=349161; GN = folE PE=3 SV=1
MFDLPKIEKAVKMILEAIGEDPNREGLEETPARVARMYQEIFAGLGEDPEEHLGKTFSEEHEEMVIVKDIRLFSMCEHHLIPFIGKAHVCYIPRNGNVTGLSKLARLVNGYARRPQLQERLTKQIADAIMKRLNPYGVVVVVEAEHLCMSMRGVRSPGARTVTSAVRGIFKKNEASRAEAMSLIMKS

SEQ ID NO: 7520 - protein, 188 aa, Desulfotomaculum ruminis
  REGION 1..188: note = tr|F6DLB7|F6DLB7_DESRL GTP cyclohydrolase 1; OS = Desulfotomaculum ruminis (strain ATCC 23193 / DSM 2154 / NCIMB 8452 / DL) OX=696281 GN=folE PE=3 SV=1
MFDKPKIEQAVRMILEAIGEDPDREGLLETPARVARMYEEIFAGLSQDPREHLGKTFSEEHEEMVLVKDIPLYSVCEHHLIPFIGKAHVCYIPRHGNVTGLSKLARLVEGYARRPQLQERLTKQIADAVMEELRPYGVAVVVQAEHLCMSMRGVRAPGAHTVTSAVRGIFQKNEASRAEAMSLILKSE

SEQ ID NO: 7521 - protein, 186 aa, Desulfotomaculum sp.
  REGION 1..186: note = tr|A0A3C2C6J6|A0A3C2C6J6_9FIRM GTP cyclohydrolase 1; OS = Desulfotomaculum sp. OX=41211 GN=folE PE=3 SV=1
MVDIPKIEKAIRMVLEAVGEDPDRPGLKGTPGRVAKMYKEIFCGLREDPRKHLEKIFMEDHKEMVLVKDIPMYSICEHHLLPFFGMAHVAYIPREGRVTGLSKLARVVEGYSKRPQLQERLTTQIADAIVSELNPQGVLVVVEAEHMCMTLRGVRKPGSKTVTSAVRGLFERSEATRAEALALIKE

SEQ ID NO: 7522 - protein, 187 aa, Desulfotomaculum sp.; identical to SEQ ID NO: 7466
  REGION 1..187: note = tr|A0A101G875|A0A101G875_9FIRM GTP cyclohydrolase 1; OS = Desulfotomaculum sp. 46_296 OX=1635262 GN=folE PE=3 SV=1

SEQ ID NO: 7523 - protein, 256 aa, Desulfovibrio alaskensis
  REGION 1..256: note = sp|Q30X45|GCH4_DESAG GTP cyclohydrolase FolE2; OS = Desulfovibrio alaskensis (strain G20) OX=207559; GN = folE2 PE=3 SV=1
MEDVQNSPSQVPLAIDTVGVKSLHLPLIVSDRANGHQHTVAVVDIGVELPARFKGTHMSRFVEALAHWDEHLNYRTIKSLLEDVKTRLQARKAHVHFRFPYFIAKKAPATGSPGLVSYNCCLTGELADGRPAMMLDVEVPVMTVCPCSKAISDEGAHSQRALVRISLRMKEFCWLEEFIELAERSASSPVYTLLKREDEKFVTEDAFAHPTFVEDVVRAAAQQLEAHPSVSWFRVEVESIESIHNHSAFARIEKHK

SEQ ID NO: 7524 - protein, 260 aa, Desulfovibrio alkalitolerans
  REGION 1..260: note = tr|S7UM30|S7UM30_9DELT GTP cyclohydrolase FolE2; OS = Desulfovibrio alkalitolerans DSM 16529 OX=1121439; GN = folE2 PE=3 SV=1
MQDIQSGPSDVALAIDRVGVKGLKAPLTVRDRARGEQHTVASVDLAVDLPAEFKGTHMSRFVEALGQWSGGLDFASCKRLLADLRERLQASSAHARFAFPYFVTRAAPVSGSVGPMHFDCLLDGELSGDKLVFTLRVEVPVMTVCPCSKAISLEGAHSQRALVRIACRSKSFFWIEELVEIAEAAGSSRVYSLLKREDEKFVTEASFANPCFVEDVVRAAAKRLAEDGRFTWFRVECESQESIHNHAAYASIQLPGPAGP

SEQ ID NO: 7525 - protein, 260 aa, Desulfovibrio bizertensis
  REGION 1..260: note = tr|A0A1T4W6K3|A0A1T4W6K3_9DELT GTP cyclohydrolase FolE2 OS=Desulfovibrio bizertensis DSM 18034 OX=1121442; GN = folE2 PE=3 SV=1
MQDVQNGPAKVAMPIDRVGVKELRTPILVRNRDHKENVQHTVASVDLSVDLPAEFKGTHMSRFVEALEAWDEELDYKSFKRLLGNVRERLQAKRAHLTFRFPYFLERTAPSTGSKGLMDYQCELTGVLEGDQLSFVLGVEVPVMTVCPCSLAICHGGAHSQRAIVTIRTRSTGLVWIEDLIAVAEKAGSSPVHSVLKREDERDVVDSAFANPAFVEDVVRSAAHSLQKMEQVSWFRVDVESQESIHNHSAYASIEMENTH

SEQ ID NO: 7526 - protein, 258 aa, Desulfovibrio carbinolicus
  REGION 1..258: note = tr|A0A4V0YRD8|A0A4V0YRD8_9DELT GTP cyclohydrolase FolE2 OS=Desulfovibrio carbinolicus OX=296842 GN=folE2; PE = 3 SV=1
MQDVQSGPPEVPIDLDRVGIKNFRLPLLVRDRTRGRQHTVADVELSVDLPAQFKGTHMSRFVEALSGFAGELDLVTFKALLEDVRARLEAQNAHMTLRFPYFLSKASPATGASALVDYACLVSGEFEGDKFRLTLGVDVPVMTVCPCSLAISDQGAHSQRAVISIRCRFSGLLWLEELIETAEAAGSSPVYALLKREDEKHVTEQAFANPTFVEDVARQVARSLREHPKVTWFRVEVESFESIHNHSAFAGIEGRNAR

SEQ ID NO: 7527 - protein, 263 aa, Desulfovibrio carbinoliphilus
  REGION 1..263: note = tr|G7QCL7|G7QCL7_9DELT GTP cyclohydrolase FolE2; OS = Desulfovibrio carbinoliphilus subsp. oakridgensis; OX = 694327 GN=folE2 PE=3 SV=1
MRDIQSGPPDVAIAVDRVGIKNFRLPLSVRDRASKGRQHTVAEVELSVDLPARFKGTHMSRFVEALSGFTGELDLVSFRALLSDVRARLEAENAHMTLTFPYFLAKSSPSSGAASLMDYVCQVSGEFEGEKFRQTLGVEVPVMTVCPCSLAISDQGAHSQRAVVSIRCRFSGFVWLEELIEMAEAAGSSPVYALLKREDEKHVTEQAFANPTFVEDVARRVASALAAHPKVTWYRVEVESFESIHNHSAFAGIEGRNGPPPAA

SEQ ID NO: 7528 - protein, 260 aa, Desulfovibrio desulfuricans
  REGION 1..260: note = sp|B8J1Q5|GCH4_DESDA GTP cyclohydrolase FolE2; OS = Desulfovibrio desulfuricans (strain ATCC 27774 / DSM 6949) OX=525146 GN=folE2 PE=3 SV=1
MEDVQSHAPQIPLNIDRVGVRELRLPLLVRDRTRGTQQTVASVDLGVDLPSEFKGTHMSRFVEALEQWNDEISYQSVRRLLQDIRQRLEARRAYARFCFPYFISKAAPASGSPALVSYQCRLTGELDDAGQHFILEVDVPVMTVCPCSKAISNEGAHSQRAMVRMRLRMKAFSWLEDFIDIAEASGSSAVYTLLKREDEKYVTEHAFAHPTFVEDVVRNVAQRLSEHGQVEWFSVEVESMESIHNHNAFARIERHISDRS

SEQ ID NO: 7529 - protein, 259 aa, Desulfovibrio desulfuricans
  REGION 1..259: note = tr|F0JCS3|F0JCS3_DESDE GTP cyclohydrolase FolE2; OS = Desulfovibrio desulfuricans ND132 OX=641491 GN=folE2; PE = 3 SV=1
MIFMEDVQQSQATIAMPIDRVGVKGLRLPIVVRDRESGVQHTVAQVSMSVDLPAEFKGTHMSRFVEALEHWEGTLDYHSFLTLLDDIVDRLQARSAHLRFVFPYFLRRRSPVSKAGGMMDYTCRVDGYLKDGKLTFTLGADVPVMTVCPCSKAISDEGAHSQRAEVRILTRFEGFLWLEDLIEIGERAGSCQVYSLLKREDEKYVTETAFAHPTFVEDVVREAAKGLDEHPKVTWYKVEVESFESIHNHSAFAVIESDG

SEQ ID NO: 7530 - protein, 267 aa, unidentified
  source 1..267: note = Desulfovibrio fairfieldensis
  REGION 1..267: note = tr|A0A0X8JHK8|A0A0X8JHK8_9DELT GTP cyclohydrolase FolE2 OS=Desulfovibrio fairfieldensis OX=44742 GN=folE2; PE = 3 SV=1
MEDVQSHAPTVPLNIDRVGVRELRLPLLVRDRARGSQQTVASVDLGVDLPSAFKGTHMSRFVEALEEWNEEISYQSVRRLLENIKERLGARRAWARFSFPYFIRKAAPASGSPGTVAYACRLTGELDENGQSFLLDLDVPVMTVCPCSKAISREGAHSQRAIVRMRVRMTGFSWLEEFIEMAEESGSSAVYTLLKREDEKFVTEHAFAAPAFVEDVVRNVAQRLSRHTHVDWFSVEVESMESIHNHNAFARIERSLAASGARKGARP

SEQ ID NO: 7531 - protein, 255 aa, Desulfovibrio ferrireducens
  REGION 1..255: note = tr|A0A1G9J884|A0A1G9J884_9DELT GTP cyclohydrolase FolE2 OS=Desulfovibrio ferrireducens OX=246191 GN=folE2; PE = 3 SV=1
MEDVQNGPSQVAMSIDRVGVRDLTLPLVVRDRASKSQHTMAKVTLSVDLPAHFKGTHMSRFIEALEDWSEELDYKSFFNLLNDILKRLEAKSAHAKLCFPYCLKKTSPVSGRKGFMSYDCSVEGELIGGHLEFTLGVKVPVMTVCPCSKAISDEGAHSQRAVIHIKTRSKGFVWIEDLIEIAEASGSSQVYSLLKREDEKYVTEDSFANPTFVEDVVRNVAKGLEKQPKVIWYKVDVESFESIHNHCAFASIEKK

SEQ ID NO: 7532 - protein, 260 aa, unidentified
  source 1..260: note = Desulfovibrio ferrophilus
  REGION 1..260: note = tr|A0A2Z6AXI7|A0A2Z6AXI7_9DELT GTP cyclohydrolase FolE2 OS=Desulfovibrio ferrophilus OX=241368 GN=folE2 PE=3; SV = 1
MKDVQSGPADVALPIDRVGVKNLSLPVRVRTRDDKEEVRHTVAEVDLYVDLPAHFKGTHMSRFIEALEGWSEALDYVSFKTLLQSVCDRLEARRAHIRFRFPYFLTKKAPASGSPGTMDYKVTLTGELEDDQLTWGLGVDVPVMTVCPCSLAICDGGAHSQRAIVRVLTRHTGFLWIEDLIAIAEAAGSSPVYALLKREDEKVVTDDAFANPAFVEDVVRAAARALSDHPQIDWYRVEVESQESIHNHNAYASIESENEL

SEQ ID NO: 7533 - protein, 262 aa, Desulfovibrio fructosivorans
  REGION 1..262: note = tr|E1JZE8|E1JZE8_DESFR GTP cyclohydrolase FolE2; OS = Desulfovibrio fructosivorans JJ OX=596151 GN=folE2 PE=3; SV = 1
MRDVQSGPPDVAIAVDRVGIKDFKLPLVVRDRAKGRQHTVADVELSVDLPARFKGTHMSRFVEALSGFAGELDLVSFRTLLTDVRSRLEAENAHLTLRFPYFLAKASPASGAISLMDYACQLSGEFVGDKFRQTLTVSVPVMTVCPCSLAISDQGAHSQRALVTLRCRFSGFVWLEELIELAEAAGSSPVYALLKREDEKHVTEQAFANPTFVEDVARRAASALAAHPKVTWYQVEVESFESIHNHSAFAGIEGVNAPGNGA

SEQ ID NO: 7534 - protein, 267 aa, Desulfovibrio gigas
  REGION 1..267: note = tr|T2GBW1|T2GBW1_DESGG GTP cyclohydrolase FolE2; OS = Desulfovibrio gigas (strain ATCC 19364 / DSM 1382 / NCIMB 9332 / VKM B-1759) OX=1121448 GN=folE2 PE=3 SV=1
MLEDTQNQAAPWPIFIDAVGVCGLRLPVLVADNARAPQLVTATLSLSASLAHDAKGSHMSRFVEVLEEARTQVFSPQRLAALLDELRRRLQARQAALDMAFPFFLERRAPHTGAAALMDYACSYHVRSGDADPQFTLAVEAPVAALCPCSKAISDYGAHNQRGRIRMEITPRRAAEGGWDVPGIEECIAVAEGAASSPVYPLLKRPDERVVTMRMYENPVFVEDMARHTAAALMADERVQAFRVHAETLESIHNHNAFARIAWTRDA

SEQ ID NO: 7535 - protein, 255 aa, unidentified
  source 1..255: note = Desulfovibrio gilichinskyi
  REGION 1..255: note = tr|A0A1X7DNU1|A0A1X7DNU1_9DELT GTP cyclohydrolase FolE2 OS=Desulfovibrio gilichinskyi OX=1519643 GN=folE2; PE = 3 SV=1
MEDVQNSPSQVAMSIDRVGVRDLTLPLLVKDRAAKSQNTMAKVALSVDLPAHFKGTHMSRFIEALEDWSEELDYKSFFNLLSDILKRLEAKSAHAELCFPFCLQKTSPVSGRKGIMSYDCSVEGELIGGQLEFTLGVKVPVMTVCPCSKAISDEGAHSQRAVVHIKTRSKGFVWIEDLIEIAERSGSSQVYSLLKREDEKYVTEKSFSNPTFVEDVVRNAANGLEKQPKITWYKVDVESFESIHNHCAFASIEKK

SEQ ID NO: 7536 - protein, 277 aa, Desulfovibrio gracilis
  REGION 1..277: note = tr|A0A1T4WDQ8|A0A1T4WDQ8_9DELT GTP cyclohydrolase FolE2 OS=Desulfovibrio gracilis DSM 16080 OX=1121449; GN = folE2 PE=3 SV=1
MSKTQRGADHVRPADAKAGMEDVQNGRASIAMPIDRVGVKDIRLPLLVRDRVQGSQHTVASVDLSVDLPAHFKGTHMSRFVEALEGWSEELDYASFKRLLANITERLNARRAYAELRFPFFLHRSAPASGGKSMMGYDCSLVGEYEDGELVFTLGVEVPVMTVCPCSLAISEQGAHSQRAIVRVLARFTGLLWLEDLIEICESAGSSPVYTLLKRADEKYVTESAFANPAFVEDVVRSVARGLSEHPKVSWFRASVESQESIHAHSAYAIIERDLRD

SEQ ID NO: 7537 - protein, 255 aa, Desulfovibrio hydrothermalis
  REGION 1..255: note = tr|L0RE68|L0RE68_9DELT GTP cyclohydrolase FolE2; OS = Desulfovibrio hydrothermalis AM13 = DSM 14728; OX = 1121451 GN=folE PE=3 SV=1
MEDIQNSPAKVAMSIDRVGVRDLTLPLVVRDRESGSQHTMAKVALSVDLPAHFKGTHMSRFVEALEDWSEELDYKSFFNLLSDILRRLEARSAHAKLSFPYCLKKTSPVSGRKGFMSYDCSVEGELIGDKLEFTLGVEVPVMTVCPCSKAISKEGAHSQRAVITIKSKSKGFVWIEDLVEIAEQAGSCEVYSLLKREDEKYVTEKSFSNPTFVEDVVRNVAMGLENHSKILWYKVDVESFESIHNHCAFASIAKK

SEQ ID NO: 7538 - protein, 276 aa, unidentified
  source 1..276: note = Desulfovibrio legallii
  REGION 1..276: note = tr|A0A1G7PJS6|A0A1G7PJS6_9DELT GTP cyclohydrolase FolE2 OS=Desulfovibrio legallii OX=571438 GN=folE2 PE=3; SV = 1
MMEDVQSHAPQVALNIDRVGVRDLHLPLLVRDRSRGSQQTVARVDLGVDLPSSFKGTHMSRFVEALEAWNDEISYQSVRRLLLTIKERLGARRAFACFSFPYFISKKAPVSGSPATVAYACRLTGELDDSGQSFVLEADVPVMTVCPCSKAISKEGAHSQRALVRMRLRMRAFSWLEDFIDIAEASASSAVYTLLKREDEKFVTENAFAHPAFVEDVVRNVAQRLLEHGQVEQFSVEVESMESIHNHNAFARIERDLSAVRRPYATTEQSDGPAAT

SEQ ID NO: 7539 - protein, 260 aa, Desulfovibrio litoralis
  REGION 1..260: note = tr|A0A1M7TGB9|A0A1M7TGB9_9DELT GTP cyclohydrolase FolE2 OS=Desulfovibrio litoralis DSM 11393 OX=1121455; GN = folE2 PE=3 SV=1
MQDIQNSPSSVPIAIDRVGIKSLRVPIWIKDRSKGRQHSVATINLGADLPACKKGTHMSRLVEVIENWEEELDYSTLKKLLENIQQRLQAHKAYVSFMFPYFMSKLAPATQISGLMGYDCVLTGELTEHKKPVFTLTVIVPVMTVCPCSKAISDEGAHSQRALATVSVKQKGFAWIEEFIEIIESSASSQVYSILKRADEKTVTENAFASPCFVEDVVRNIALKLAEHKHVSWYKVEVESFESIHAHNAYAYIESENLSE

SEQ ID NO: 7540 - protein, 260 aa, Desulfovibrio magneticus
  REGION 1..260: note = tr|K6GLP9|K6GLP9_9DELT GTP cyclohydrolase FolE2; OS = Desulfovibrio magneticus str. Maddingley MBC34; OX = 1206767 GN=folE2 PE=3 SV=1
MAMQDVQSGPPEVPIDLDRVGIKNFRLPLLVRDRTRGRQHTVADVELSVDLPAQFKGTHMSRFVEALSGFAGELDLVTFKALLEDVRARLEAQNAHMTLRFPYFLSKASPATGASALMDYACLVSGEFEGDKFRLTLGVDVPVMTVCPCSLAISDQGAHSQRAVISIRCRFSGLLWLEELIETAEAAGSSPVFALLKREDEKHVTEQAFANPTFVEDVARQVARSLREHPKVTWFRVEVESFESIHNHSAFAGIEGRNAR

SEQ ID NO: 7541 - protein, 304 aa, Desulfovibrio magneticus
  REGION 1..304: note = tr|C4XJB5|C4XJB5_DESMR GTP cyclohydrolase FolE2; OS = Desulfovibrio magneticus (strain ATCC 700980 / DSM 13731 / RS-1) OX=573370 GN=folE2 PE=3 SV=1
MPAGRAGRPAAGFTGASARRRKRLPRARRHGGPGAGHPSRRHAIMAMQDVQSGPPEVPIDLDRVGIKNFRLPLLVRDRTRGRQHTVADVELSVDLPAQFKGTHMSRFVEALSGFAGELDLVTFKALLEDVRARLEAQNAHMTLRFPYFLSKASPATGAAALMDYACLVSGEFEGDKFRLTLGVDVPVMTVCPCSLAISDQGAHSQRAVISIRCRFSGLLWLEELIETAEAAGSSPVYALLKREDEKHVTEQAFANPTFVEDVARQVARSLREHPKVTWFRVEVESFESIHNHSAFAGIEGRNAR

SEQ ID NO: 7542 - protein, 263 aa, Desulfovibrio mexicanus
  REGION 1..263: note = tr|A0A238Z2X7|A0A238Z2X7_9DELT GTP cyclohydrolase FolE2 OS=Desulfovibrio mexicanus OX=147047 GN=folE2 PE=3; SV = 1
MAAPMEDVQKHPAPVQLPIDRVGVKDLHLPLVVRDRQSGTQHTVARVDLAVDLPAAFKGTHMSRFVEALENWEEELSRASLEKLLSDISVRLEARRAYARFDFPYFLRQSSPKSGAKCLMGYPCSVIGAWENGRLDFTLGVDVPVMTVCPCSKAISDEGAHSQRTSVRINAKFKGFLWLEDLIEIAERSGSSPVYTLLKREDEKFVTEAAFANPAFVEDVVRAAAKGLSEHPRITWYKVEVESHESIHGHSAQASIESSAKQG

SEQ ID NO: 7543 - protein, 263 aa, Desulfovibrio piger
  REGION 1..263: note = tr|A0A1K1LHV2|A0A1K1LHV2_9DELT GTP cyclohydrolase FolE2 OS=Desulfovibrio piger OX=901 GN=folE2 PE=3 SV=1
MEDVQRHAPKVPINIDRVGIRGITVPLLVRDRAQGSRQTVARVDLGVDLPASFKGTHMSRFIEALEGWNDEINYQSVRRLLATVKERLGARRSYVRFCFPYFVHKPAPSSGIRSIISYECRLTGELDEKGQSFLLEVDVPVMTVCPCSKAISREGAHSQRTMIRLAVRMSGFSWIEEFIEMAEASGSSAVYTLLKREDEKYVTEHAFAQPTFVEDVVRNVAQRLTEHEHVRWFRVEVESMESIHSHNAFACIERDLRTQDGQA

SEQ ID NO: 7544 - protein, 263 aa, Desulfovibrio piger
  REGION 1..263: note = tr|B6WTX4|B6WTX4_9DELT GTP cyclohydrolase FolE2; OS = Desulfovibrio piger ATCC 29098 OX=411464 GN=folE2 PE=3; SV = 1
MEDVQRHAPKVPINIDRVGIRGITVPLLVRDRAQGSRQTVARVDLGVDLPASFKGTHMSRFIEALEEWNDEINYQSVRRLLATVKERLEARRSYVRFCFPYFVHKPAPSSGIKSIISYECRLTGELDEKGQSFLLEVDVPVMTVCPCSKAISREGAHSQRTMIHLAVRMSGFSWIEEFIEMAEASGSSAVYTLLKREDEKYVTEHAFAQPTFVEDVVRNVAQRLTEHEHVRWFRVEVESMESIHSHNAFACIERDLRTQDEQA

SEQ ID NO: 7545 - protein, 256 aa, Desulfovibrio salexigens
  REGION 1..256: note = sp|C6C0U6|GCH4_DESAD GTP cyclohydrolase FolE2; OS = Desulfovibrio salexigens (strain ATCC 14822 / DSM 2638 / NCIB 8403 / VKM B-1763) OX=526222 GN=folE2 PE=3 SV=1
MEDVQNSPAKVAMSIDRVGVRDLTLPLVVRDRESGSQSTMAKVALSVDLPAHFKGTHMSRFVEALEDWSEELDYQSFYNLLSDILRRLEAERAHAELSFPYCLQKKSPVSGRKGIMSYECTVEGEMVGDNLEFTLGVKVPVMTVCPCSKAISDEGAHSQRAVVHIRTKSKGFVWIEDLVEIAEASGSCEVFSLLKREDEKHVTEKSFSNPTFVEDVVRNAAMGLEKHSKILWYQVDVESFESIHNHCAFASIAKPK

SEQ ID NO: 7546 - protein, 263 aa, Desulfovibrio sp.; identical to SEQ ID NO: 7527
  REGION 1..263: note = tr|I2Q2Y5|I2Q2Y5_9DELT GTP cyclohydrolase FolE2; OS = Desulfovibrio sp. U5L OX=596152 GN=folE2 PE=3 SV=1

SEQ ID NO: 7547 - protein, 262 aa, Desulfovibrio sp.
  REGION 1..262: note = tr|A0A231P2F6|A0A231P2F6_9DELT GTP cyclohydrolase FolE2 OS=Desulfovibrio sp. MES5 OX=1899016 GN=folE2 PE=3; SV = 1
MEDVQSHAPQVALNINRVGVRELRLPLLVRDRTKGTQQTVASVDLGVDLPSAFKGTHMSRFVEALEQWNAEISYQSVRRLLLDIKQRLEARRAYARFCFPYFIKKSAPASGIPALVSYQCRLTGELDDEGQHFCLEVDVPVMTVCPCSKAISDEGAHSQRAMVRMNLRMKVFSWLEDFIDIAEASGSSAVYTLLKREDEKFVTEYAFAHPTFVEDVVRNVAQRLSEHGQVEWFSVEVESMESIHNHNAFARIERHMSDKKPA

SEQ ID NO: 7548 - protein, 259 aa, Desulfovibrio vulgaris
  REGION 1..259: note = sp|B8DLK8|GCH4_DESVM GTP cyclohydrolase FolE2; OS = Desulfovibrio vulgaris (strain Miyazaki F / DSM 19637); OX = 883 GN=folE2 PE=3 SV=1
MEDVQNSPAQVAMPIDRVGVKNLKLPLVVRDRAQGSQHTVATVDIGVDLPAEFKGTHMSRFVEALENWSEELDYNSMKRLLEDVKERLHARKAYALFRFPYFVRKGAPATASSGLVWYECRLTGELGDGKPSFLLELEVPVMTVCPCSKAISDEGAHSQRAVVRMSIRMTGFSWMEEFIDLAEAAGSSPVYTLLKREDEKFVTEDAFAHPTFVEDVVRAAAQRLEGHPHVAWFRVEVESFESIHCHNAFASIEREVRKG

SEQ ID NO: 7549 - protein, 266 aa, Desulfovibrio vulgaris
  REGION 1..266: note = tr|A0A0E0T5Z5|A0A0E0T5Z5_DESVR GTP cyclohydrolase FolE2 OS=Desulfovibrio vulgaris (strain RCH1) OX=573059; GN = folE2 PE=3 SV=1
MEMEDVQNSPAQVAMPIDRVGVKNLQLPLVVSDRAQGRQHTVATVDIGVDLPAHFKGTHMSRFVEALENWTEELDYASMKRLLEDVKTRLEARKAYVLFRFPYFIRKKAPATGSPGLVCYQCRLTGELEEGRPSFLLEVEVPVMTVCPCSKAISDEGAHSQRAVVRIAVRMTRFSWLEEFIDLAEVSGSSPVYTLLKREDEKYVTEDAFAHPTFVEDVVRAAAQRLERHPQISWFRVEVESFESIHCHNAFASIERTITPETQPGS

SEQ ID NO: 7550 - protein, 267 aa, unidentified
  source 1..267: note = Desulfovibrionaceae bacterium
  REGION 1..267: note = tr|A0A1J4SM26|A0A1J4SM26_9DELT GTP cyclohydrolase FolE2 OS=Desulfovibrionaceae bacterium CG1_02_65_16; OX = 1805130 GN=folE2 PE=3 SV=1
MAASASSTMEDVQKHPAPVPMPIDRVGVKDLHLPLVVRDRESGTQHTVARVDLAVDLPASFKGTHMSRFVEALENWGEELSRASLEKLLSDICRRLEARRAYARFDFPYFLRQTSPKSRAKGVMGYPCSVVGAYENGRLDFTLGVDVPVMTVCPCSKAISDEGAHSQRTSVRIKAKFKGFLWLEDLIEIAERSGSSPVYTLLKREDEKFVTESSFANPAFVEDVVRAAAKGLSEHKRITWFHVEVESFESIHGHSAQASIESFAEQG

SEQ ID NO: 7551 - protein, 273 aa, unidentified
  source 1..273: note = Desulfovibrionaceae bacterium
  REGION 1..273: note = tr|A0A316N4Y4|A0A316N4Y4_9DELT GTP cyclohydrolase FolE2 OS=Desulfovibrionaceae bacterium OX=2049043 GN=folE2; PE = 3 SV=1
MHKLQDVQNSPSDLAVDIDRVGIKEFRLPLVVRDRDTGLQHTVATVDLGVDLPAAFKGTHMSRFVEALEAWREHAPEGPVPALDYPSMRGLLEDVRLRLDARRAYVRFRFPYFRAKAAPATGSKAPVAYDCTMTGEMTKGEHPVFTLEADVPVTTVCPCSRAISRAGAHGQRALVKLAVRMTRFEWLEEFIDIAESSGSAQVYSLLKRQDEKFVTEQAYDDACFVEDVVRRVAEKLDRHVHVSWFRVEVESFESIHCHNAFAVIERERGPRRC

SEQ ID NO: 7552 - protein, 259 aa, unidentified
  source 1..259: note = Desulfovibrionales bacterium
  REGION 1..259: note = tr|A0A1F9Q5W3|A0A1F9Q5W3_9DELT GTP cyclohydrolase FolE2 OS=Desulfovibrionales bacterium GWA2_65_9 OX=1797915; GN = folE2 PE=3 SV=1
MEDVQKHPASVQMPIDRVGVKDLRLPVVVRDRESGRQHTVARLDLSVDLPAAFKGTHMSRFVEALENWGEELSRSSMEKLLSDMALRLEARRSFARFDFLYFLRQSSPVSKAKGLMGYPCSVVGAWEDGKLDFTLGVDVPVMTVCPCSKAISDEGAHSQRASVRILAKFKGFLWLEDLIEIAERSGSSRVYTLLKREDEKFVTETAFANPAFVEDVVRTAAKGLSEHPRITWFRVEVEAFESIHGHSAQATIESPAQKA

SEQ ID NO: 7553 - protein, 256 aa, Desulfurella acetivorans
  REGION 1..256: note = tr|W0JIF8|W0JIF8_DESAE GTP cyclohydrolase FolE2; OS = Desulfurella acetivorans A63 OX=694431 GN=folE2 PE=3; SV = 1
MSLKDVQSQRDFRNININKVGVKGVKYPITLLDKKNGLQHTIADINMYVLLPSKFKGTHMSRFIEIINENKNEINIKKIHHILSQMKTKLNAQKAYLEINFDYFIEKQAPVSKIKSLMSYTCGLYAFSGDADELTLFVKVPVTSLCPCSKEISDYGAHNQRAFVSVYVKFTDMVWIEDIISIVEANASSDIYCLLKRPDEKFVTEKAYNNPMFVEDIARNIVKDLKLDKRIYWYKVEVESLESIHNHNAYACIEKN

SEQ ID NO: 7554 - protein, 256 aa, unidentified
  source 1..256: note = Desulfurella amilsii
  REGION 1..256: note = tr|A0A1X4XUS1|A0A1X4XUS1_9DELT GTP cyclohydrolase FolE2 OS=Desulfurella amilsii OX=1562698 GN=folE2 PE=3 SV=1
MSLKDVQSQKDFRNININKVGVKGVKYPITLLDKKNGLQHTIADINMYVLLPSKFKGTHMSRFIEIINENKNEINIKKIHHILAQTKAKLNAKKAYLEINFDYFVEKQAPVSKIKSLMSYSCGLHAFSSDVDELTLFVKVPVTSLCPCSKEISDYGAHNQRAFVSVYVKFSDMVWIEDVIGIVEANSSSDIYCLLKRPDEKYVTEKAYDNPMFVEDIARNVVKALESDKRIYWYKVEVESLESIHNHNAYACIEKD

SEQ ID NO: 7555 - protein, 256 aa, Desulfurella multipotens; identical to SEQ ID NO: 7553
  REGION 1..256: note = tr|A0A1G6M445|A0A1G6M445_9DELT GTP cyclohydrolase FolE2 OS=Desulfurella multipotens OX=79269 GN=folE2 PE=3; SV = 1

SEQ ID NO: 7556 - protein, 256 aa, Desulfurella sp.; identical to SEQ ID NO: 7553
  REGION 1..256: note = tr|A0A2N7Q4X1|A0A2N7Q4X1_9DELT GTP cyclohydrolase FolE2 OS=Desulfurella sp. OX=1962857 GN=folE2 PE=3 SV=1

SEQ ID NO: 7557 - protein, 186 aa, unidentified
  source 1..186: note = Desulfurellales bacterium
  REGION 1..186: note = tr|A0A5C7Q6Z6|A0A5C7Q6Z6_9DELT GTP cyclohydrolase 1; OS = Desulfurellales bacterium OX=2482794 GN=folE PE=3 SV=1
MPSNPSNREVAQRFLNHVFVDRIDWSDEHHKDTPVRFVKMLRELTSQEEPEFTTFKANTDEMVIVKDIPFNSLCAHHIIPFVGYCHIGYIPGGTIAGLSKFARVVKYLSATLTVQEDLNRDIALYLMSKLQPKGIAVVMEAEHMCMTLRGVQVPGTKTITSSMHGVFADHNRLARQEFLELIRDRK

SEQ ID NO: 7558 - protein, 188 aa, unidentified
  source 1..188: note = Desulfuribacillus alkaliarsenatis
  REGION 1..188: note = tr|A0A1E5G6G3|A0A1E5G6G3_9BACL GTP cyclohydrolase 1; OS = Desulfuribacillus alkaliarsenatis OX=766136 GN=folE; PE = 3 SV=1
MEKFDLNKIEKAVTMILEAVGEDVNREGLIDTPKRVAKMYKEIFAGLHEDPSEHLNTIFSENHEELVIVKDIPFYSLCEHHLVPFFGVAHVAYIPTGGKVTGLSKLARVVEVVTKRPQLQERITTTVANTIVDKIKPLGVAVVIEAEHMCMTMRGVKKPGSKTITSAVRGIFETDIALRSEAFSLIKG

SEQ ID NO: 7559 - protein, 188 aa, unidentified
  source 1..188: note = Desulfuribacillus stibiiarsenatis
  REGION 1..188: note = tr|A0A1E5L6W5|A0A1E5L6W5_9BACL GTP cyclohydrolase 1; OS = Desulfuribacillus stibiiarsenatis OX=1390249 GN=folE; PE = 3 SV=1
MTNFDHDKIVKAVTMILEAIGEDPTREGLQDTPKRVAKMYEEVFAGIHEDPASPLGTIFNENHGELVIVKDIPFHSMCEHHLVPFFGVAHVAYIPSDGKVTGLSKLARVIDIVTKRPQLQERITTTVAEVIVEKLNPLGVAVVIEAEHMCMTMRGIKKPGSKTITSAVRGIFENDIALRAEAFSLIKG

SEQ ID NO: 7560 - protein, 204 aa, Desulfurispirillum indicum
  REGION 1..204: note = tr|E6W2D0|E6W2D0_DESIS GTP cyclohydrolase 1; OS = Desulfurispirillum indicum (strain ATCC BAA-1389 / S5); OX = 653733 GN=folE PE=3 SV=1
MKTMDYDTKQSSSLPAIEDSVATILQAIGEDSDREGLLKTPQRVARMYRELTSGYRTDIHEIINDAIFASEDEDMVLVKDISFSSLCEHHMLPFLGKAHVAYIPDGNIIGLSKIPRIVEMYARRLQVQERMTAQIGKTLFDVLKPRGVAVMVESVHMCAIIRGVKNHSTTMTTTSMFGSFKEDRHLRSEFMEHTANTSRTSIHW

SEQ ID NO: 7561 - protein, 244 aa, Desulfurivibrio alkaliphilus
  REGION 1..244: note = tr|D6Z0G6|D6Z0G6_DESAT GTP cyclohydrolase FolE2; OS = Desulfurivibrio alkaliphilus (strain DSM 19089 / UNIQEM U267 / AHT2) OX=589865 GN=folE2 PE=3 SV=1
MELQSVGIKDISYPITVREKSGGLQPTVATIDLRANLPRQYRDTCVTTFIEVLNRYQEEMSNRIFRKLLAEVKDKLRADSAHVEMTFPYFLEKKAPVSGTTSLMEYTCRFTGGVGPDEDFLLTVQVPATTLCPCSREISACGAHNQRAEITLSVKYREFIWLEELIEMAEAGSSCEVFALLKRPDEKYVTEAAYQNPMFVEDVVRKVAELAAGHPAISWFGVGAESFESIHKHSAYAYVDSNDL

SEQ ID NO: 7562 - protein, 254 aa, Desulfurivibrio sp.
  REGION 1..254: note = tr|A0A3A6NVQ6|A0A3A6NVQ6_9DELT GTP cyclohydrolase FolE2 OS=Desulfurivibrio sp. OX=2093369 GN=folE2 PE=3 SV=1
MKLKTVGIKNIRYPVKIREKSGGLQDTVASIMLQVNMPRDYRETCVSTFLAVLNKYQEEMSVAIFSKLLREVQDRLQANSAHLEMTFPYFLEKKAPVTRTSGLMEYTCRFTGGIGEGEDFILSVWVPSTTLCPCSKEISRYGAHNQRAEINLNIKSRSFIWVEDLISLVESGVSCEVFSILKRPDEKFVTEQAYDNPMFVEDVVRKVAELVHARPDIYWFSVGVESFESIHKHSAYAFVDSSCLIEDSPDGDLP

SEQ ID NO: 7563 - protein, 186 aa, Desulfurobacterium atlanticum
  REGION 1..186: note = tr|A0A238ZEF6|A0A238ZEF6_9BACT GTP cyclohydrolase 1; OS = Desulfurobacterium atlanticum OX=240169 GN=folE PE=3; SV = 1
MIDTERIEKAVREILLAIGEDPDREGLKDTPKRVAKMYKEVLAGYDDSPENHSVLFTERYDEMIIVKDIPFFSMCEHHMLPFFGKIHIAYIPGEDRVTGLSKLARIADVYAKRLQLQERMTEQIASAIMEKFNAKGVMVVVEAQHLCMIMRGVKKPGSFTITSAIKGMLRKEPTRTEALFLIKGGK

SEQ ID NO: 7564 - protein, 185 aa, unidentified
  source 1..185: note = Desulfurobacterium indicum
  REGION 1..185: note = tr|A0A1R1MKV0|A0A1R1MKV0_9BACT GTP cyclohydrolase 1; OS = Desulfurobacterium indicum OX=1914305 GN=folE PE=3 SV=1
MDKERIKKAVREILIAIGEDPDREGLKDTPKRVANMYEEILAGYEDSPENHSVLFSEKYDEMIIVKDIPFFSMCEHHMLPFFGKIHIAYIPSEEKVTGLSKLARIADVYAKRLQLQERMTEQIADAIMEKFNAKGVMVIVEAQHLCMIMRGAKKPGSFTITSAIKGILRNEPTRTEALFLIKDRK

SEQ ID NO: 7565 - protein, 186 aa, Desulfurobacterium sp.
  REGION 1..186: note = tr|A0A432R455|A0A432R455_9BACT GTP cyclohydrolase 1; OS = Desulfurobacterium sp. OX=2004706 GN=folE PE=3 SV=1
MAFDRERIERAVREILLAIGEDPDREGLRDTPKRVAKMYEEVLSGYNDSPDNHLVLFSEKYDEMIIVKDIPIYSLCEHHMLPFFGKAHVAYIPGNNKVTGLSKLARIVDVYSKRLQLQERMTEQIADAIMEKLKAKGVMVIVEAQHLCMIMRGVKKPGSYTVTSAVKGVMRNEPTRMEALFLIKGR

SEQ ID NO: 7566 - protein, 186 aa, Desulfurobacterium sp.
  REGION 1..186: note = tr|A0A432QRH0|A0A432QRH0_9BACT GTP cyclohydrolase 1; OS = Desulfurobacterium sp. OX=2004706 GN=folE PE=3 SV=1
MAFDRERIEKAVREILIAIGEDPDREGLKDTPKRVAKMYEEVLAGYNDSVENHLVLFTEKYDEMIIVRDIPVYSLCEHHMLPFFGKAHVAYIPGNEKVTGLSKLARIVDVYAKRLQLQERMTEQIADAIMEKLGAKGVMVVIEAQHLCMIMRGVKKPGSYTVTSAVKGAMRKEPTRMEALFLIKGM

SEQ ID NO: 7567 - protein, 186 aa, Desulfurobacterium thermolithotrophum
  REGION 1..186: note = tr|F0RZZ7|F0RZZ7_DESTD GTP cyclohydrolase 1; OS = Desulfurobacterium thermolithotrophum (strain DSM 11699 / BSA) OX=868864 GN=folE PE=3 SV=1
MAFDRERIEKAVREILIAIGEDPDREGLKDTPKRVAKMYEEILAGYNDSAENHLVLFTEKYDEMIIVRDIPIYSLCEHHMLPFFGKAHVAYIPGEDKVTGLSKLARIVDVYAKRLQLQERMTEQIADAIMEKLGAKGVMVVVEAQHLCMIMRGVKKPGSYTVTSAVKGAMRKEPTRMEALFLIKGR

SEQ ID NO: 7568 - protein, 261 aa, unidentified
  source 1..261: note = Desulfuromonadaceae bacterium
  REGION 1..261: note = tr|A0A1G2VVU8|A0A1G2VVU8_9DELT GTP cyclohydrolase FolE2 OS=Desulfuromonadaceae bacterium GWC2_58_13; OX = 1801896 GN=folE2 PE=3 SV=1
MSSMPDLQQSRDDRNIPIDKVGVKNIRYPIVVLDKSRDKQHTVARINMYVDLPHHFKGTHMSRFIEILNQHHGEISIERMDTILQDMKDRLEASSAHLELEFPYFIEKQAPVSRARSLMEYQCQMIGSLGDEADFVLGVTVPVTSLCPCSREISERGAHNQRSSVSVRIRYRSDRHHIWLEDLIEWIESCGSAPIYSLLKREDEKAVTEQAYDNPMFVEDIVRAVTVKLQSVEDIEWFRVECENFESIHNHSAYALVEQRR

SEQ ID NO: 7569 - protein, 270 aa, unidentified
  source 1..270: note = Desulfuromonadales bacterium
  REGION 1..270: note = tr|A0A1E7HM41|A0A1E7HM41_9DELT GTP cyclohydrolase FolE2 OS=Desulfuromonadales bacterium C00003094 OX=1869310; GN = folE2 PE=3 SV=1
MSTMRDIQMERDTRNIPIDKVGVKDIRYPIVVMDKNKDQQHTVARINMYVDLPHHFKGTHMSRFIEILNQYRGEITMRNMGSILQEMKDRLEASCAHLEMDFPYFIEKEAPVSKARSLMEYRCRLSGTLGEHKDFVLGVEVPMTSLCPCSKEISQRGAHNQRSAVRVEIRSEKFVWIEDLISWVEDCGSSPVYSLLKREDEKAVTEQAYDNPMFVEDIVRAVTEKLKSVESIQWFRVECENFESIHNHSAYALVEHPSTFSGPHDASGQS

SEQ ID NO: 7570 - protein, 270 aa, unidentified
  source 1..270: note = Desulfuromonadales bacterium
  REGION 1..270: note = tr|A0A1E7H0Q9|A0A1E7H0Q9_9DELT GTP cyclohydrolase FolE2 OS=Desulfuromonadales bacterium C00003096 OX=1869311; GN = folE2 PE=3 SV=1
MSTMRDIQMERDTRNIPIDKVGVKDIRYPIVVMDKNKDQQHTVARINMYVDLPHHFKGTHMSRFIEILNQYRGEITMRNMGSILQEMKDRLEATCAHLEMEFPYFIEKEAPVSKARSLMEYQCRLSGTLDDHKDFVLGVEVPMTSLCPCSKEISQRGAHNQRSAVRVEIRSDKFVWIEDLISWVEDCGSAPVYSLLKREDEKAVTEQAYDNPMFVEDIVRAVTEKLKGVEGIQWFRVECENFESIHNHSAYALVEHPSAFSGPHNTSGES

SEQ ID NO: 7571 - protein, 255 aa, Desulfuromonas acetexigens
  REGION 1..255: note = tr|A0A550JBZ0|A0A550JBZ0_9DELT GTP cyclohydrolase FolE2 OS=Desulfuromonas acetexigens OX=38815 GN=folE2 PE=3; SV = 1
MPDLQQSRDERNIPIDKVGVKNIHYPIVVLDKSKDRQHTVASINMYVDLPHHFKGTHMSRFIEILNEHHGEISIEGIDAILVEMKERLEASSAHLELEFPYFIEKRAPVSGARGLMEYQCRMLGSLGETGDFILGVTVPVTSLCPCSREISARGAHNQRSAVTVQVRYRDHIWLEDLIDWIEVCGSAPVYSLLKREDEKAVTEQAYDNPRFVEDIVRAVTEKLQSIENVTWFRVECENFESIHNHSAYALVEQRR

SEQ ID NO: 7572 - protein, 264 aa, Desulfuromonas acetoxidans
  REGION 1..264: note = tr|Q1JZH5|Q1JZH5_DESA6 GTP cyclohydrolase FolE2; OS = Desulfuromonas acetoxidans (strain DSM 684 / 11070); OX = 281689 GN=folE2 PE=3 SV=1
MTPSSMPDLQKSQDTRNIAIDKVGIKDVRYPIVVEDKNTSRQQTVASINMYVELPHQFKGTHMSRFLEILNQYRGEQVTLNDMEGLLQAMKERLESDCAHIELTFPYFIEKQAPVSQAKGLMEYECRFIGTLREKKDFVLEVRVPVTSLCPCSRDISRYGAHNQRSSVTVAIRSKKMIWIEDLINWVESCGSAPVYSLLKREDEKAVTEQAYENPMFVEDIVRAVTEKLKSVSSIEWFCVECENYESIHNHSAYATLEYPRRSD

SEQ ID NO: 7573 - protein, 259 aa, unidentified
  source 1..259: note = Desulfuromonas soudanensis
  REGION 1..259: note = tr|A0A0M3QGR9|A0A0M3QGR9_9DELT GTP cyclohydrolase FolE2 OS=Desulfuromonas soudanensis OX=1603606 GN=folE; PE = 3 SV=1
MTVMPDLQKSLDSRNIAIDKVGVKDIRYPIVVMDRSKVHQHTVARINMYVDLPHHFKGTHMSRFIEILNQYHGEISIESLDTILVEMKERLEASSAHLEMEFPYFIEKTAPVSGSRGLMEYQCRMTGSLGKESDFVLGVTVPVTSLCPCSKEISARGAHNQRSAISVQIRYTGHIWLEDLIAWVESCASAPVYSLLKREDEKAVTEQAYDNPMFVEDLVRGVTERLSEVPEIVWFKVECENFESIHNHSAFALVERDRR

SEQ ID NO: 7574 - protein, 257 aa, Desulfuromonas sp.
  REGION 1..257: note = tr|A0A2N6DQ37|A0A2N6DQ37_9DELT GTP cyclohydrolase FolE2 OS=Desulfuromonas sp. OX=892 GN=folE2 PE=3 SV=1
MPDLQKAHDPRNIAIDKVGVKDIRYPIVVQDKHRERQQTVARINMYVDLPHHFKGTHMSRFIEILNQYHGEISIERMDTLLADMKRHLEASCAHIEFDFPYFIEKQAPVSKARSLMEYQCRMTASLGAGYDFVLGVTVPVTSLCPCSKEISARGAHNQRSAVRVEIRYREHVWLEDLIDWVESCGSAPVYALLKREDEKALTEQAYDNPMFVEDVVRAVTQRLQREPAITWFRVACENFESIHNHSAYAMVEQSGAG

SEQ ID NO: 7575 - protein, 255 aa, Desulfuromonas sp.
  REGION 1..255: note = tr|A0A357YCD1|A0A357YCD1_9DELT GTP cyclohydrolase FolE2 OS=Desulfuromonas sp. OX=892 GN=folE2 PE=3 SV=1
MPDLQKSLDGRNIAIDKVGVKDIRYPIVVLDKQRSQQHTVARVNMYVDLPHHFKGTHMSRFIEILNHYHGEISIDRMDAILQAMKDRLEASRAHLEFDFPYFIEKRAPVSGARSLMEYQCQMVGTLGSERDFILGVTVPATSLCPCSREISERGAHNQRSLISVQIRYQGHVWIEDLVTWIEECASSPVYALLKREDEKAVTENAYDNPMFVEDMVRAVTEKLAAVPEITWFRVECENFESIHNHSAYALVESPR

SEQ ID NO: 7576 - protein, 259 aa, Desulfuromonas thiophila
  REGION 1..259: note = tr|A0A1G7CLJ2|A0A1G7CLJ2_9DELT GTP cyclohydrolase FolE2 OS=Desulfuromonas thiophila OX=57664 GN=folE2 PE=3; SV = 1
MKTMPDLQQSRDTRQIAIDRVGIKDVRYPIVVLDKNRSRQHTIASVNMYVELPHQFKGTHMSRFVEILNQYRGEITFYNMDRILAAMKERLESDCAHMELSFPYFIEKTAPVSGARSLMSYDCRFIGTLATDKDFVLEVCVPLTSLCPCSREISRYGAHNQRSYVRVAIRAHDMVWIEDLVALVEECGSAPVYALLKREDEKAVTEQAYENPRFVEDIVREVTRRLKAVAAIDWFSVECENFESIHDHSAYATLEYRRG

SEQ ID NO: 7577 - protein, 268 aa, Desulfuromusa kysingii
  REGION 1..268: note = tr|A0A1H4DCX3|A0A1H4DCX3_9DELT GTP cyclohydrolase FolE2 OS=Desulfuromusa kysingii OX=37625 GN=folE2 PE=3 SV=1
MSNHHKQQRPAVMPDMQQSRDTRNIAIDKVGVKDIGYPIVVMDKYREKQHTVARINMFVDLPEHFKGTHMSRFIEVLNQHHAGISVENMETILTEMKSRLGSGRAHLELDFPYFIEKRAPISGARSLMEYQCRMIGTQAETYDFILEASIPVTSLCPCSKEISERGAHNQRSIVTVQIRYSEHIWLEDLIEWVEDCASCPVYALLKREDEKAVTEQAYDNPMFVEDMVRAVTQKLRSIPQISWFKIQCENFESIHNHSAYAMVEGGNN

SEQ ID NO: 7578 - protein, 190 aa, Dethiobacter alkaliphilus
  REGION 1..190: note = tr|C0GCX5|C0GCX5_9FIRM GTP cyclohydrolase 1; OS = Dethiobacter alkaliphilus AHT 1 OX=555088 GN=folE PE=3; SV = 1
MIDQEKIQKAVRMILEGIGEDPDREGLQDTPARVAKMYGEVFSGLHCDPCDHLETCFYEEKHDEMVLIKDISIYSMCEHHLLPFYGKAHVAYIPNPEKITGLSKLVRVVETLSRRPQLQERLTTQIADTIVEKLDAKGVVVVIEAEHLCMTIRGVKKPGSTTVTSAVRGICRTNHLTRAEAFSLLKGTHR

SEQ ID NO: 7579 - protein, 187 aa, Dethiobacter sp.
  REGION 1..187: note = tr|A0A3A6NK27|A0A3A6NK27_9FIRM GTP cyclohydrolase 1; OS = Dethiobacter sp. OX=2093370 GN=folE PE=3 SV=1
MIDEKKLQKAVRMILEAIGEDPEREGLRDTPRRVTKMYKEVFKGLYQDPKEYLQICFSEDQHDELVLVKDISLYSICEHHLLPFYGKAHIAYIPAKGRIVGLSKLVRVVESIARRPQLQERLTSTVANIIMEVLKPKGVVVVVEAEHLCMSIRGVKKPGSITVTSAVRGIFRQNQVSRSEAFSLIKG

SEQ ID NO: 7580 - protein, 258 aa, unidentified
  source 1..258: note = Dethiosulfatarculus sandiegensis
  REGION 1..258: note = tr|A0A0D2J0U8|A0A0D2J0U8_9DELT GTP cyclohydrolase FolE2 OS=Dethiosulfatarculus sandiegensis OX=1429043; GN = folE2 PE=3 SV=1
MEDVQNQTDHRNIPIDKVGVKDIRHPITVLDRANGVQKTVASINMYVNLPHHYKGTHMSRFIEVLSDYSDNINLRNLKDILEAMKKRLNAHSAHIEVDFPYFIKKTAPVSGARSLLEYNIAYRGSINGSGLDLVVEVKVPVTTLCPCSQMISDQGAHNQRGVVNVAVRFKEFIWIEDIIRLVEESASCEVFSLLKRQDEKYVTEKAYGNPMFVEDVVREVSGKLDKVPEIIWFTVESENFESIHNHSAYAYVEKDKRK

SEQ ID NO: 7581 - protein, 208 aa, Dethiosulfatibacter aminovorans
  REGION 1..208: note = tr|A0A1M6AS32|A0A1M6AS32_9FIRM GTP cyclohydrolase 1; OS = Dethiosulfatibacter aminovorans DSM 17477 OX=1121476; GN = folE PE=3 SV=1
MEIRKITEFAKREKKIDTAAIEKHIRGILVALGDDPGREGLIDTPKRVAKMYEEVFEGMCYSNEEIAEMFDVTFEDDLDVEQGSNDFVLLKDIEIFSYCEHHLALMYNMKVAVAYIPTEKVIGLSKIVRVAEMAGKRLQLQERIGMDIAEIIGMITESEDVAVIIEGEHSCISARGIRKPGTKTLTTTLKGRFNEPELMGKLMMMYRG

SEQ ID NO: 7582 - protein, 208 aa, Devosia chinhatensis
  REGION 1..208: note = tr|A0A0F5FLU1|A0A0F5FLU1_9RHIZ GTP cyclohydrolase 1; OS = Devosia chinhatensis OX=429727 GN=folE PE=3 SV=1
MDAPATPLKPAVAAGQPVDRPSREQAEAAVRTLIAWAGDDPNREGLLETPARVAKAYGELFAGYGQDAEAVLSKTFKEVGGYDDLVLVKDIPFYAHCEHHMVPFYGKAHIAYLPHDGVVGLSKLARLVEVFARRLQTQETMTAQIIDAINENLGPRGAAVMLEAEHMCMTMRGVKAHDVKTVTHRFTGVFAEDRVEQDRFFAMVAGRR

SEQ ID NO: 7583 - protein, 207 aa, Devosia crocina
  REGION 1..207: note = tr|A0A1I7N900|A0A1I7N900_9RHIZ GTP cyclohydrolase 1; OS = Devosia crocina OX=429728 GN=folE PE=3 SV=1
MDASVKHAFSAPASATALPRPTREEAEAAVRTLIAWAGDDPRREGLLETPARVAKAYEELFAGYGQDAREVLSKMFREVGGYDDIVFVRDIPFYAHCEHHMVPFFGKAHIAYLPHDGVVGLSKLARLVEVFARRLQTQETMTAQIIDAINENLGPRGAAVMLEAEHMCMTMRGVRAHDVKTITHRFTGVFAEDRIEQDRFFAMISRR

SEQ ID NO: 7584 - protein, 208 aa, unidentified
  source 1..208: note = Devosia elaeis
  REGION 1..208: note = tr|A0A178I2P0|A0A178I2P0_9RHIZ GTP cyclohydrolase 1; OS = Devosia elaeis OX=1770058 GN=folE PE=3 SV=1
MDAQVKPLKPVPATPGASPRPSREEAEAAVRTLIAWAGDDPNREGLLETPARVAKAYGELFAGYGQDAREVLSKTFREVGGYDDLVLVKDIPFYAHCEHHMVPFYGKAHIAYLPHEGVVGLSKLARLVEVFARRLQTQETMTAQIIDAINENLGPRGAAVMLEAEHMCMTMRGVKAHDVKTVTHRFTGVFAEDRVEQDRFFAMVAGRR

SEQ ID NO: 7585 - protein, 209 aa, unidentified
  source 1..209: note = Devosia enhydra
  REGION 1..209: note = tr|A0A1K2HWG9|A0A1K2HWG9_9RHIZ GTP cyclohydrolase 1; OS = Devosia enhydra OX=665118 GN=folE PE=3 SV=1
MDASAKLQTVKTLEQPRQIVRPSQAEAEAAVRTLIAWAGDDPEREGLLDTPRRVAKAYKELYGGYGQNPREVLERTFKEVGGYDDIVLVRDIPFHSHCEHHMVPFVGKAHIAYLPHDGVVGLSKLARVVEVFARRLQTQENLTAQIIDAINETLNPRGAAVMLEAEHMCMTMRGVHTHGVSTLTHRFTGVFAEDRNEQDRFYALVGKRA

SEQ ID NO: 7586 - protein, 207 aa, unidentified
  source 1..207: note = Devosia epidermidihirudinis
  REGION 1..207: note = tr|A0A0F5Q9B0|A0A0F5Q9B0_9RHIZ GTP cyclohydrolase 1; OS = Devosia epidermidihirudinis OX=1293439 GN=folE PE=3 SV=1
MDARTKPIGATPVTATALPRPTREEAEAAVRTLIAWAGDDPTREGLLETPARVAKAYGEFYSGYEQDAGVVLSKTFKEVGGYDDIVLVRDIPFNSHCEHHMVPFVGKAHIAYLPHDGVVGLSKLARLVEVFARRLQTQENLTAQIIDAINEHLGPRGAAVMLEAEHMCMSMRGVRAHGAATITHRFTGVFAEDRVEQDRFFGLIGKR

SEQ ID NO: 7587 - protein, 207 aa, Devosia geojensis
  REGION 1..207: note = tr|A0A0F5FT51|A0A0F5FT51_9RHIZ GTP cyclohydrolase 1; OS = Devosia geojensis OX=443610 GN=folE PE=3 SV=1
MDARVKPHEVITLDHAPVPRPSLKEVEEAVRTLIAWAGDDPEREGLRDTPMRVAKAYRELFSGYEQEPGEVLERTFKEVGGYDDIVLVRDIPFHSHCEHHMVPFVGKAHIAYLPHDGVVGLSKLARLVDVFARRLQTQENLTAQILDAINEHLGPRGAAVMLEAEHMCMTMRGVRAHGVATITHRFTGVFAEDREEQDRFFSMVGKR

SEQ ID NO: 7588 - protein, 205 aa, Devosia insulae
  REGION 1..205: note = tr|A0A1E5XV24|A0A1E5XV24_9RHIZ GTP cyclohydrolase 1; OS = Devosia insulae DS-56 OX=1116389 GN=folE PE=3 SV=1
MDASAKPQHVKLVPEITRPSREEAEAAVRTLIAWAGDDPTREGLLETPHRVTKAYREFFAGYGDDPREVLHKTFKEVGGYDDVVLVRDIPFSSHCEHHMVPFFGKVHIAYLPHDGVVGLSKLARLVEVYARRLQVQENMTAQIIDAVNEHLNPRGAAVMIEAEHMCMSMRGVRAHGALTITQRFTGVFAEDRNEQDRFFAMVGKR

SEQ ID NO: 7589 - protein, 207 aa, Devosia limi
  REGION 1..207: note = tr|A0A0F5LP45|A0A0F5LP45_9RHIZ GTP cyclohydrolase 1; OS = Devosia limi DSM 17137 OX=1121477 GN=folE PE=3 SV=1
MDARVKPLEVNAVEAQPTTRPSRAEAEAAVRTLIAWTGDNPDREGLLETPARVVKAFGELYAGYDQHPKTILERTFKEVGGYDDIVLVRDIPFHSHCEHHMVPFIGKAHIAYLPHDGVVGLSKLARLVEVFARRLQTQENLTAQIIDAINEHLGPRGAAVMLDAEHMCMSMRGVHAHGVSTVTHRFTGVFAEDRQEQDRFFAMVGKR

SEQ ID NO: 7590 - protein, 207 aa, unidentified
  source 1..207: note = Devosia lucknowensis
  REGION 1..207: note = tr|A0A1Y6ETK4|A0A1Y6ETK4_9RHIZ GTP cyclohydrolase 1; OS = Devosia lucknowensis OX=1096929 GN=folE PE=3 SV=1
MDAHVNPLKPATANSNVPSRPSREEAEAAVRTLIAWAGDDPNREGLLETPARVAKAYGELFAGYDLDAKAVLSKTFKEVGGYDDLVLVKGIPFYAHCEHHMVPFYGQAHIAYLPHDGVVGLSKLARLVEVFARRLQTQETMTAQIIDAINENLGPRGAAVMLEAEHMCMTMRGVRAHDVKTVTHRFTGVFAEDRVEQDRFFAMVGHR

SEQ ID NO: 7591 - protein, 206 aa, Devosia psychrophila
  REGION 1..206: note = tr|A0A0F5Q0C5|A0A0F5Q0C5_9RHIZ GTP cyclohydrolase 1; OS = Devosia psychrophila OX=728005 GN=folE PE=3 SV=1
MDAPSKPFGSVLMSTAPYPRPSREEAEAAVRTLLAWAGDNPNREGLLETPARVTRAYGELFSGYEQDASTILSKTFKEVGGYDDIVLVKDIPFSSHCEHHMVPFIGKAHIAYLPHDGVVGLSKLARLVESFARRLQTQENLTAQIIDAINEHLGPRGAAVMLEAEHMCMSMRGVRAHGASTITQRFTGVFAEDRHEQDRFFAMIKR

SEQ ID NO: 7592 - protein, 207 aa, Devosia riboflavina
  REGION 1..207: note = tr|A0A087M1S9|A0A087M1S9_9RHIZ GTP cyclohydrolase 1; OS = Devosia riboflavina OX=46914 GN=folE PE=3 SV=1
MDATVKLPFPAPATSTSLPRPSREEAEAAVRTLIAWAGDDPTREGLLETPARVAKAYEELFAGYGQDAKEVLSKMFREVGGYDDIVFVRDIPFYAHCEHHMVPFFGKAHIAYLPHDGVVGLSKLARLVEVFARRLQTQETMTAQIIDAINENLGPRGAAVMLEAEHMCMTMRGVRAHDVKTITHRFTGVFAEDRVEQDRFFAMISRR

SEQ ID NO: 7593 - protein, 207 aa, Devosia soli
  REGION 1..207: note = tr|A0A0F5LBN3|A0A0F5LBN3_9RHIZ GTP cyclohydrolase 1; OS = Devosia soli OX=361041 GN=folE PE=3 SV=1
MDASIKSVFPAPLSSTALPRPTREEAEAAVRTLIAWAGDDPNREGLLETPSRVAKAYGELFAGYGQDAKEILSKTFREVGGYDDIVFVRDIPFYAHCEHHMVPFYGKAHIAYLPHDGVVGLSKLARLVEVFARRLQTQETMTAQIIDAINENLNPRGAAVMLEAEHMCMTMRGVRAHDVKTITHRFTGVFAEDRIEQDRFFVMINRR

SEQ ID NO: 7594 - protein, 207 aa, Devosia sp.
  REGION 1..207: note = tr|A0A087LVM2|A0A087LVM2_9RHIZ GTP cyclohydrolase 1; OS = Devosia sp. 17-2-E-8 OX=1535287 GN=folE PE=3 SV=1
MDATAKSGTVTALDKVTRHKPSQEEVENAVRTLIAWAGDDPTREGLIETPGRVARAYSELFAGYEQSASDALSKIFREVGGYDDIVLLKDIPFHSHCEHHMVPFFGKAHIAYLPHEGVVGLSKLARLVDVFARRLQTQETMTQQIIDALNENLNPRGAAVMLEAEHMCMTMRGVHSHGVTTITHRFTGVFAEEREERERFFAFVGKR

SEQ ID NO: 7595 - protein, 206 aa, Devosia sp.
  REGION 1..206: note = tr|A0A1H9C4P2|A0A1H9C4P2_9RHIZ GTP cyclohydrolase 1; OS = Devosia sp. YR412 OX=1881030 GN=folE PE=3 SV=1
MDATTKPFGAVATSTAPYPRPTREEAEAAVRTLLAWAGDDPTREGLLETPARVTKAYGEFFAGYGQNAGEILSKTFKEVGGYDDIVLVKDIPFSSHCEHHMVPFVGKAHIAYLPHDGVVGLSKLARLVEVFARRLQTQENLTAQIIDAINEHLGPRGAAVMLEAEHMCMSMRGVRAHGASTVTHRFTGVFAEDRNEQDRFFSMTRR

SEQ ID NO: 7596 - protein, 187 aa, Dialister invisus
  REGION 1..187: note = tr|C9LPX0|C9LPX0_9FIRM GTP cyclohydrolase 1; OS = Dialister invisus DSM 15470 OX=592028 GN=folE PE=3 SV=1
MDQKKLEQAARLIIEAVGEDPEREGLVETPRRFAEMVAEQLAYAAVPNEEIARTFEKTFSSPESDMVVVKDISLFSHCEHHIALMYNMKAAVGYIPRGRVIGLSKIARIADAVSKRLQIQERIGADIRDVMERITGAGDVIVLLEGEHSCMTARGIRKPGTLTRTISASGRFRTDGDLRKEFLSLAK

SEQ ID NO: 7597 - protein, 187 aa, Dialister invisus
  REGION 1..187: note = tr|R5TE03|R5TE03_9FIRM GTP cyclohydrolase 1; OS = Dialister invisus CAG:218 OX=1263072 GN=folE PE=3 SV=1
MDQRKLEQAARLIIEAVGEDPEREGLLETPRRFAEMVAEQLAYAAVPNEEIARAFDKTFSSPESDMVVVKDISLFSHCEHHIALMYNMKAAVGYIPRGRVIGLSKIARIADAVSKRLQIQERIGADIRDIMERITGAGDVIVLLEGEHSCMTARGIRKPGTLTRTISASGRFRTDGDLRKEFLSLAK

SEQ ID NO: 7598 - protein, 196 aa, Dialister micraerophilus
  REGION 1..196: note = tr|F2BWC5|F2BWC5_9FIRM GTP cyclohydrolase 1; OS = Dialister micraerophilus DSM 19965 OX=888062 GN=folE; PE = 3 SV=1
MESGGKRSMNKEKLEQAAKLLIEAIGDDPKREGLFETPKRFAEMIQEQFAYVGITNDEIAKKFDKTFETTENDIVIVKQIPIFSHCEHHIAIMYNMKVSIGYKPKGRVIGLSKMARIADAVGKRFQIQERIGTDIREIMKKITKSEDVIVHISGEHSCMTARGIQKPGAVTETIASSGIFKENYETRAEFLKMVKN

SEQ ID NO: 7599 - protein, 188 aa, unidentified
  source 1..188: note = Dialister microaerophilus
  REGION 1..188: note = tr|E4L7B2|E4L7B2_9FIRM GTP cyclohydrolase 1; OS = Dialister microaerophilus UPII 345-E OX=910314 GN=folE; PE = 3 SV=1
MNKEKLEQAAKLLIEAIGDDPKREGLFETPKRFAEMIQEQFAYVGITNDEIAKKFDKTFETTENDIVIVKQIPIFSHCEHHIAIMYNMKVSIGYKPKGRVIGLSKMARIADAVGKRFQIQERIGTDIREIMKKITKSEDVIVHISGEHSCMTARGIQKPGAVTETIASSGIFKENYETRAEFLKMVKN

SEQ ID NO: 7600 - protein, 188 aa, Dialister pneumosintes
  REGION 1..188: note = tr|A0A1B3WEV7|A0A1B3WEV7_9FIRM GTP cyclohydrolase 1; OS = Dialister pneumosintes OX=39950 GN=folE PE=3 SV=1
MVDLKKLEKAARLILEAVGENPMREGLLETPRRFAEMIEEQLAYTNISNEEIAKNFGKTFTSSEEGLVVVKDIPIFSYCEHHIALMYNMKVSVGYIPCGRVIGLSKVARIADAVSKRLQIQERIGQDIREIIEEVTDSSDVIVHIEGEHSCMTARGIKKVTSVTRTLSAGGKCKEPAWQSLFLKLCKE

SEQ ID NO: 7601 - protein, 187 aa, Dialister sp.; identical to SEQ ID NO: 7597
  REGION 1..187: note = tr|A0A3D5K8S7|A0A3D5K8S7_9FIRM GTP cyclohydrolase 1; OS = Dialister sp. OX=1955814 GN=folE PE=3 SV=1

SEQ ID NO: 7602 - protein, 188 aa, Dialister sp.
  REGION 1..188: note = tr|R6BA56|R6BA56_9FIRM GTP cyclohydrolase 1; OS = Dialister sp. CAG:486 OX=1262870 GN=folE PE=3 SV=1
MVDLKKLEEAARLIIEAVGDDPTREGLVETPKRFADMMAEQFAYNAVSNEDIAREFEKTFETPESDMVVVKDIDIFSHCEHHIALMYNMKVAVGYIPRGRVIGLSKIARIADAVSKRFQLQERIGTDIRDIMRLVTHADDVIVFIEGEHSCMTARGIKKPGTKTRTLASSGAFKTDSALRKEFLEMVK

SEQ ID NO: 7603 - protein, 190 aa, Dialister succinatiphilus
  REGION 1..190: note = tr|H1D0W6|H1D0W6_9FIRM GTP cyclohydrolase 1; OS = Dialister succinatiphilus YIT 11850 OX=742743 GN=folE; PE = 3 SV=1
MDLKKLEQAARLIIEAVGDDPDREGLRETPKRFADMMAEQFAYTAVSNEDIAREFEKTFATPENDMVVVKDIPIFSHCEHHIALMYNMKAAVGYIPHGRVIGLSKIARIADAVSKRFQIQERIGTDIRDVMEMVTDSPDVIVYIEGEHSCMTARGIKKPGTRTRTIASSGAFKTDSALRGEFMKLALGKE

SEQ ID NO: 7604 - protein, 196 aa, unidentified
  source 1..196: note = Diaminobutyricimonas aerilata
  REGION 1..196: note = tr|A0A2M9CNE1|A0A2M9CNE1_9MICO GTP cyclohydrolase 1; OS = Diaminobutyricimonas aerilata OX=1162967 GN=folE PE=3; SV = 1
MAIDTRRIEAAVVELLTAIGEDPTRSGLATTPQRIAEAYGEFFSGLDADPLDHLRETIDVGDRTGEAVVLRDIEFRSMCEHHLLPFTGVAHLAYLPDRRVVGLGRLPRVVETLSSRPQVQERLTDEIADALETGLEPRGVLVVLDAKHGCVNARGVRQAHSSTVTMASRGLLTDPVARADVMALIGGRGDAGSRDG

SEQ ID NO: 7605 - protein, 262 aa, Dichelobacter nodosus
  REGION 1..262: note = sp|A5EXB0|GCH4_DICNV GTP cyclohydrolase FolE2; OS = Dichelobacter nodosus (strain VCS1703A) OX=246195; GN = folE2 PE=3 SV=1
MTETAIPDVQSSPDKRHIAINRVGIRDLRLPLFIENAAGEAMPTVARAALMVALPHTQKGTHMSRFIRLLDLKTPISVSALPTLHQKMLDTLHAEEGTISLSFPFFIEKSAPVSGEKALLDYEVVLAVDGNRKHVEVSVEVTVPVTSLCPCSKEISQYGAHNQRSHIVIYAQYNPNQPFSIEDLIHIAEEGASCPIWSLLKRPDEKYITERAYEHPKFVEDIVRDIAMVLNDDPRISFYRISSENFESIHNHSAFALIEHQK

SEQ ID NO: 7606 - protein, 262 aa, Dichelobacter nodosus; identical to SEQ ID NO: 7605
  REGION 1..262: note = tr|A0A5F1AA58|A0A5F1AA58_DICNO GTP cyclohydrolase FolE2 OS=Dichelobacter nodosus OX=870 GN=folE2 PE=3 SV=1

SEQ ID NO: 7607 - protein, 225 aa, Dichotomicrobium thermohalophilum
  REGION 1..225: note = tr|A0A397Q502|A0A397Q502_9RHIZ GTP cyclohydrolase 1; OS = Dichotomicrobium thermohalophilum OX=933063 GN=folE; PE = 3 SV=1
MKAALNTSTGDLEAPTRNNGAGDGGADSHLEPAPTREEAETAVRTLIRWAGDDPAREGLRDTPRRVVDAYREYFAGYHEDPFEVLSRTFEEVHGYDDLVMLRDIRLESHCEHHIAPILGVAHVAYLPRDRVVGISKLARVVEIFSKRLQTQETMTAQIAEAIEQALKPRGVAVLVDALHQCMTTRGVHKTDVSTITTRFTGVFKEDGDYRDRFLNMVHGRRPSVG

SEQ ID NO: 7608 - protein, 223 aa, unidentified
  source 1..223: note = Dickeya aquatica
  REGION 1..223: note = tr|A0A375AA66|A0A375AA66_9GAMM GTP cyclohydrolase 1; OS = Dickeya aquatica OX=1401087 GN=folE PE=3 SV=1
MSAVLSKEAALVHEALLARGLETPLRGEMLDSETRKRLIAEHMTEIMNLLNLDLDDDSLAETPRRIAKMYVEEIFSGLDYANFPKITIIENKMKVDEMVTVRDITLTSTCEHHFVTIDGKATVAYIPKEGVIGLSKINRIVQFFSQRPQVQERLTQQILVALQTLLGTNNVAVSIDAVHYCVKARGIRDATSATTTTSLGGLFKSSQNTRQEFLRAVRHHSHG

SEQ ID NO: 7609 - protein, 222 aa, Dickeya chrysanthemi
  REGION 1..222: note = tr|C6CKD1|C6CKD1_DICC1 GTP cyclohydrolase 1; OS = Dickeya chrysanthemi (strain Ech1591) OX=561229 GN=folE; PE = 3 SV=1
MSAVLTKEAAMVHEALLARGLETPLRGEMLESETRKRLIAQHMTEIMNLLNLDLEDDSLAETPHRIAKMYVEEIFSGLDYANFPKITIIENKMKVDEMVTVRDITLTSTCEHHFVTIDGKATVAYIPKDGVIGLSKINRIVQFFSQRPQVQERLTQQILVALQTLLGTNNVAVSIDAVHYCVKARGIRDATSATTTTSLGGLFKSSQNTRQEFLRAVRHHHN

SEQ ID NO: 7610 - protein, 222 aa, Dickeya dadantii
  REGION 1..222: note = tr|E0SMS6|E0SMS6_DICD3 GTP cyclohydrolase 1; OS = Dickeya dadantii (strain 3937) OX=198628 GN=folE PE=3; SV = 1
MSAVLTKEAALVHEALLARGLETPLRGKMLESETRKRLIAEHMTEIMNLLNLDLADDSLAETPHRIAKMYVEEIFSGLDYANFPKITIIENKMKVDEMVTVRDITLTSTCEHHFVTIDGKATVAYIPKEGVIGLSKINRIVQFFSQRPQVQERLTQQILVALQTLLGTNNVAVSIDAVHYCVKARGIRDATSATTTTSLGGLFKSSQNTRQEFLRAVRHHHN

SEQ ID NO: 7611 - protein, 234 aa, Dickeya dianthicola
  REGION 1..234: note = tr|A0A3A4CUP7|A0A3A4CUP7_9GAMM GTP cyclohydrolase 1; OS = Dickeya dianthicola OX=204039 GN=folE PE=3 SV=1
MSAVLTKSAVLTRSAILTKEATQVHEALLARGLETPLRGKMLESETRKRLIAEHMTEIMNLLNLDLADDSLAETPHRIAKMYVEEIFSGLDYANFPKITIIENKMKVDEMVTVRDITLTSTCEHHFVTIDGKATVAYIPKEGVIGLSKINRIVQFFSQRPQVQERLTQQILVALQTLLGTNNVAVSIDAVHYCVKARGIRDATSATTTTSLGGLFKSSQNTRQEFLRAVRHHQN

SEQ ID NO: 7612 - protein, 222 aa, unidentified
  source 1..222: note = Dickeya fangzhongdai
  REGION 1..222: note = tr|A0A2K8QL34|A0A2K8QL34_9GAMM GTP cyclohydrolase 1; OS = Dickeya fangzhongdai OX=1778540 GN=folE PE=3 SV=1
MSAVLTKEAALVHEALLARGLETPLRGKMLESETRKRLIAEHMTEIMNLLNLDLEDDSLAETPHRIAKMYVEEIFSGLDYANFPKITIIENKMKVDEMVTVRDITLTSTCEHHFVTIDGKATVAYIPKEGVIGLSKINRIVQFFSQRPQVQERLTQQILVALQTLLGTNNVAVSIDAVHYCVKARGIRDATSATTTTSLGGLFKSSQNTRQEFLRAVRHHHN

SEQ ID NO: 7613 - protein, 222 aa, Dickeya paradisiaca
  REGION 1..222: note = tr|C6C8C4|C6C8C4_DICP7 GTP cyclohydrolase 1; OS = Dickeya paradisiaca (strain Ech703) OX=579405 GN=folE; PE = 3 SV=1
MSSILSKEAAQVHEALLARGLETPLRGELQDAETRKRLIAQHMTEIMNLLSLDLSDDSLAETPHRIAKMYVDEIFSGLDYANFPKITIIENKMKVDEMVTVRDITLTSTCEHHFVTIDGKATVAYIPKEGVIGLSKINRIVQFFSQRPQVQERLTQQILVALQTLLGTNNVAVSIDAVHYCVKARGIRDATSATTTTSLGGLFKSSQNTRQEFLRAVRHHSY

SEQ ID NO: 7614 - protein, 247 aa, unidentified
  source 1..247: note = Dickeya solani
  REGION 1..247: note = tr|A0A2K8VSY6|A0A2K8VSY6_9GAMM GTP cyclohydrolase 1; OS = Dickeya solani RNS 08.23.3.1.A OX=1240086 GN=folE PE=3; SV = 1
MAGVGSGQRQTERHLLEKKMSAVLTKSAVLTKEAALVHEALLARGLETPLRGKMLESETRKRLIAEHMTEIMNLLNLDLADDSLAETPHRIAKMYVEEIFSGLDYANFPKITIIENKMKVDEMVTVRDITLTSTCEHHFVTIDGKATVAYIPKEGVIGLSKINRIVQFFSQRPQVQERLTQQILVALQTLLGTSNVAVSIDAVHYCVKARGIRDATSATTTTSLGGLFKSSQNTRQEFLRAVRHHQN

SEQ ID NO: 7615 - protein, 222 aa, Dickeya sp.
  REGION 1..222: note = tr|A0A3N0G3U5|A0A3N0G3U5_9GAMM GTP cyclohydrolase 1; OS = Dickeya sp. FVG1-MFV-O17 OX=2487136 GN=folE PE=3 SV=1
MSVVLTKEAAMVHEALLARGLETPLRGKMLESETRKRLIAEHMTEIMNLLNLDLEDDSLAETPHRIAKMYVEEIFSGLDYANFPKITIIENKMNVDEMVTVRDITLTSTCEHHFVTIDGKATVAYIPKEGVIGLSKINRIVQFFSQRPQVQERLTQQILVALQTLLGTTNVAVSIDAVHYCVKARGIRDATSATTTTSLGGLFKSSQNTRQEFLRAVRHHQH

SEQ ID NO: 7616 - protein, 222 aa, Dickeya sp.; identical to SEQ ID NO: 7615
  REGION 1..222: note = tr|A0A454UNP3|A0A454UNP3_9GAMM GTP cyclohydrolase 1; OS = Dickeya sp. FVG10-MFV-A16 OX=2487135 GN=folE PE=3 SV=1

SEQ ID NO: 7617 - protein, 222 aa, Dickeya zeae
  REGION 1..222: note = tr|A0A2K9QEA0|A0A2K9QEA0_9GAMM GTP cyclohydrolase 1; OS = Dickeya zeae OX=204042 GN=folE PE=3 SV=1
MSAVLTKEAALVHEALLARGLETPLRGEMLERETCKRLIAEHMTEIMNLLNLDLEDDSLAETPHRIAKMYVEEIFSGLDYANFPKITIIENKMKVDEMVTVRDITLTSTCEHHFVTIDGKATVAYIPKDGVIGLSKINRIVQFFSQRPQVQERLTQQILVALQTLLGTNNVAVSIDAVHYCVKARGIRDATSATTTTSLGGLFKSSQNTRQEFLRAVRHHHN

SEQ ID NO: 7618 - protein, 222 aa, Dickeya zeae
  REGION 1..222: note = tr|D2C1P7|D2C1P7_DICZ5 GTP cyclohydrolase 1; OS = Dickeya zeae (strain Ech586) OX=590409 GN=folE PE=3 SV=1
MSAVLTKEAALVHEALLARGLETPLRGEMLERETRKRLIAEHMTEIMNLLNLDLEDDSLAETPHRIAKMYVEEIFSGLDYANFPKITIIENKMKVDEMVTVRDITLTSTCEHHFVTIDGKATVAYIPKDGVIGLSKINRIVQFFSQRPQVQERLTQQILVALQTLLGTNNVAVSIDAVHYCVKARGIRDATSATTTTSLGGLFKSSQNTRQEFLRAVRHHHN

SEQ ID NO: 7619 - protein, 229 aa, unidentified
  source 1..229: note = Dictyobacter alpinus
  REGION 1..229: note = tr|A0A402BID7|A0A402BID7_9CHLR GTP cyclohydrolase 1; OS = Dictyobacter alpinus OX=2014873 GN=folE PE=3 SV=1
MVLHLDRDHSMNNGHAQNNGHRKDVPLLEQEQEQVVVAEKQAATATPKVDYPRLLELGRELLVALGEDPDREGLAGTPRRWADWWREFVEYDPGTTDTTFSSVSTDQIVCVSGMRVFSLCEHHLLPMWCDVAIGYIPGDKVLGLSKFARIAHQFAHQLQIQERLGQQIADEVSRITGTNHVAVIVKGEHLCMSARGIRTPGVMTSSVMRGAFRNDRDLRMEFMQMVQPQ

SEQ ID NO: 7620 - protein, 220 aa, unidentified
  source 1..220: note = Dictyobacter aurantiacus
  REGION 1..220: note = tr|A0A401ZM48|A0A401ZM48_9CHLR GTP cyclohydrolase 1; OS = Dictyobacter aurantiacus OX=1936993 GN=folE_1 PE=3 SV=1
MALEYDIDEEQIQHALHLYPRHVSEEQMQTFERYMAEIFTAFGLDLNTPATRETPRRYIRALFDSTEGYEGDPKLLTVFETECRGGPDCRLSQVIEGPIHFYSLCEHHALPFHGHAYVGYIAHEHIIGISKLTRLVRLFARRFSVQERIGQQIADTLEEMLSPHGVAVYLEAHHLCTEMRGVRAVSPITRTTFWRGNYDTDASLRAEFFVACGLPRGGQT

SEQ ID NO: 7621 - protein, 227 aa, unidentified
  source 1..227: note = Dictyobacter aurantiacus
  REGION 1..227: note = tr|A0A401ZQB4|A0A401ZQB4_9CHLR GTP cyclohydrolase 1; OS = Dictyobacter aurantiacus OX=1936993 GN=folE_2 PE=3 SV=1
MVLHLDRDHSMNNGHAQHNGHKEDTHMLNREQEQVIVAGEQRPAAAQVDYPRLLELGRELLVALGENPDREGLAGTPRRWADWWREFIEYDPGTTETTFSSVSTDQIVCVSGMRVFSLCEHHLLPMWCDVAIGYIPGDKVLGLSKFARIAHQFAHQLQIQERLGQQIADEVSRITGTNHVAVIVKGEHLCMSARGIRTPGVMTSSVMRGSFRTDRDLRAEFMQMIQP

SEQ ID NO: 7622 - protein, 227 aa, unidentified
  source 1..227: note = Dictyobacter sp.
  REGION 1..227: note = tr|A0A5A5T7P8|A0A5A5T7P8_9CHLR GTP cyclohydrolase 1; OS = Dictyobacter sp. Uno17 OX=2014874 GN=folE PE=3 SV=1
MVLHLDQDHARNNGHARSNGHSEETPVLEREHEQAEIAEEQHPAVKTVDYSRLLELGHELLVALGENPDREGLQDTPRRWADWWREFIEYNPGTTETTFSAVSTDQIVCVSGMRVFSLCEHHLLPMWCDVAIGYIPQEKVLGLSKFARIAHQFAHQLQIQERLGQQIADEVCRITGSSHVAVVVKGEHLCMSARGIRTPGVMTSSVMRGTFRTDRDLRMEFMQMIKE

SEQ ID NO: 7623 - protein, 262 aa, Dictyoglomus sp.
  REGION 1..262: note = tr|A0A2J6XVE6|A0A2J6XVE6_9BACT GTP cyclohydrolase FolE2 OS=Dictyoglomus sp. NZ13-RE01 OX=2010949 GN=folE2; PE = 3 SV=1
MRDVQNDIDLRNIPLERVGIKDLEWPIKVLDKERGHQQTVAKIEIAVDLKHYIRGIHMSRFIEIMNELEELKPKSLEEMLRKIKEKLQAERSYLKMSFPYFIYKSAPISKIESPNKIEAIIDAELFKVFNMIIGVKVPIHTLCPCSKEISDYSAHNQRAIAEIYVKSKSMIWFEDLVEIAEKNASSPIFALLKRPDEKYITEHAYDNPKFVEDVVRDIAIELEKNNSIEWYKIEVTSMESIHNHNAFACLEKGWLDHVIRNQ

SEQ ID NO: 7624 - protein, 257 aa, Dictyoglomus thermophilum
  REGION 1..257: note = sp|B5YCT4|GCH4_DICT6 GTP cyclohydrolase FolE2; OS = Dictyoglomus thermophilum (strain ATCC 35947 / DSM 3960 / H-6-12) OX=309799 GN=folE2 PE=3 SV=1
MRDVQNEKDYRGIYLRKVGIKNIHWPIKIVTKSGDYQSTVASIDISVDLREDLRGTHMSRFVEVLNGIDSLHPENLGKILQEVREKLRADSSHIKISFPYFIFKKAPVSQISSPNMVECVIDAELSKKLDMIIGVKVPIHTLCPCSKEISEYGAHNQRGVAEIYVRSKKLIWFEDLVEISEKSASAPIYSLLKRPDEKYITEMAYNNPKFVEDVVRDIVSELEKEPKISWYRVEVTSFESIHNHNAFACVEKGWVKK

SEQ ID NO: 7625 - protein, 257 aa, Dictyoglomus thermophilum; identical to SEQ ID NO: 7624
  REGION 1..257: note = tr|A0A5D4XKD1|A0A5D4XKD1_DICTH GTP cyclohydrolase FolE2 OS=Dictyoglomus thermophilum OX=14 GN=folE2 PE=3 SV=1

SEQ ID NO: 7626 - protein, 257 aa, Dictyoglomus turgidum
  REGION 1..257: note = sp|B8DZH0|GCH4_DICTD GTP cyclohydrolase FolE2; OS = Dictyoglomus turgidum (strain Z-1310 / DSM 6724); OX = 515635 GN=folE2 PE=3 SV=1
MKDVQNERDYRGIYLRKVGIKNIHWPIKIITKSGEYQSTVANIDISVDLREDLRGTHMSRFVEVLNGIDFLHPENLGKILQEVREKLKADSSHIKITFPYFIFKKTPVSQIASPNMIECVIEAELSKKLYMIIGVKVPIHTLCPCSKEISEYGAHNQRAIAEIYIKSKKLIWFEDLVEIAERSASAPIYSLLKRPDEKYITETAYNNPKFVEDVVRDIVSELEKEPKISWYRVEVTSFESIHNHNAFACVEKGWIKK

SEQ ID NO: 7627 - protein, 207 aa, Dietzia alimentaria
  REGION 1..207: note = tr|A0A1E3R419|A0A1E3R419_9ACTN GTP cyclohydrolase 1; OS = Dietzia alimentaria OX=665550 GN=folE PE=3 SV=1
MTTPDHIPAADARSLPTGRVFDAERAEAAVRELLIAVGEDPEREGLQDTPARVARAYREVFSGLYTDPSEVLSRTFDEDHRELVLVRDIPIYSTCEHHLVPFHGVAHIGYIPGQSGAVTGLSKLARLVDLYAKRPQVQERLTSQVADALVDRLAPSGVLVVIECEHLCMSMRGIRKAGAVTTTSAVRGNMRTNASTRAEALGLLRGT

SEQ ID NO: 7628 - protein, 207 aa, Dietzia cinnamea
  REGION 1..207: note = tr|A0A4V2W813|A0A4V2W813_9ACTN GTP cyclohydrolase 1; OS = Dietzia cinnamea OX=321318 GN=folE PE=3 SV=1
MTTPDHLPPADARSMPTGEVFDAPRAEAAVRELLIAVGEDPDREGLQDTPARVARAYREVFAGLYTDPSEVLSRTFDEDHRELVLVRDIPVYSTCEHHLVPFHGVAHIGYIPGQSGAVTGLSKLARLVDLYAKRPQVQERLTSQVADALVDKLDPSGVLVVIECEHLCMSMRGIRKAGAVTTTSAVRGIMRSNASTRAEALGLLRGT

SEQ ID NO: 7629 - protein, 207 aa, Dietzia cinnamea
  REGION 1..207: note = tr|A0A177L2Z7|A0A177L2Z7_9ACTN GTP cyclohydrolase 1; OS = Dietzia cinnamea OX=321318 GN=folE PE=3 SV=1
MTTPDHIPPADVRSMHTGEVFDAARAEAAVRELLIAVGEDPDREGLQDTPARVARAYREVFAGLYTDPSEVLARTFDEDHRELVLVRDIPIYSTCEHHLVPFHGVAHIGYIPGQSGAVTGLSKLARLVDLYAKRPQVQERLTSQVADALVDKLDPSGVLVVIECEHLCMSMRGIRKAGAVTTTSAVRGIMRSNASTRAEALGLLRGT

SEQ ID NO: 7630 - protein, 207 aa, Dietzia kunjamensis; identical to SEQ ID NO: 7627
  REGION 1..207: note = tr|A0A420C8M5|A0A420C8M5_9ACTN GTP cyclohydrolase 1; OS = Dietzia kunjamensis OX=322509 GN=folE PE=3 SV=1

SEQ ID NO: 7631 - protein, 207 aa, Dietzia lutea
  REGION 1..207: note = tr|A0A2S1R4S9|A0A2S1R4S9_9ACTN GTP cyclohydrolase 1; OS = Dietzia lutea OX=546160 GN=folE PE=3 SV=1
MTTPDHIPPADARSRHTGEVFDAARAEAAVRDLLIAVGEDPDREGLQDTPARVARAYREVFAGLYTDPSEVLSRTFDEDHRELVLVRDIPIYSTCEHHLVPFHGVAHIGYIPGQSGAVTGLSKLARLVDLYAKRPQVQERLTSQVADALVDKLDPSGVLVVIECEHLCMSMRGIRKAGAVTTTSAVRGIMRSNASTRAEALGLLRGT

SEQ ID NO: 7632 - protein, 207 aa, Dietzia maris
  REGION 1..207: note = tr|A0A2U2AWE7|A0A2U2AWE7_9ACTN GTP cyclohydrolase 1; OS = Dietzia maris OX=37915 GN=folE PE=3 SV=1
MTTPDHIPPADARSMPTGEVFDAARAEAAVRELLIAVGEDPDREGLQDTPARVARAYREVFAGLYTDPSEVLSRTFDEDHRELVLVRDIPIYSTCEHHLVPFHGVAHIGYIPGQSGAVTGLSKLARLVDLYAKRPQVQERLTSQVADALVDKLDPSGVLVVIECEHLCMSMRGIRKAGAVTTTSAVRGIMRSNASTRAEALGLLRGT

SEQ ID NO: 7633 - protein, 207 aa, Dietzia maris; identical to SEQ ID NO: 7627
  REGION 1..207: note = tr|A0A365P8P8|A0A365P8P8_9ACTN GTP cyclohydrolase 1; OS = Dietzia maris OX=37915 GN=folE PE=3 SV=1

SEQ ID NO: 7634 - protein, 207 aa, Dietzia natronolimnaea
  REGION 1..207: note = tr|A0A2A2WQL9|A0A2A2WQL9_9ACTN GTP cyclohydrolase 1; OS = Dietzia natronolimnaea OX=161920 GN=folE PE=3 SV=1
MTTPDHIPAANARSVSAGRVFDAERAEAAVRELLIAVGEDPEREGLQDTPARVARAYREVFAGLYTDPADVLSKTFNEDHRELVLVRDIPIYSTCEHHLVPFHGVAHIGYIPGRSGAVTGLSKLARLVDLYAKRPQVQERLTSQVADALVDKLQPTGVLVVIECEHLCMSMRGIRKPGSVTTTSAVRGSMRSNASTRAEALGLLRGT

SEQ ID NO: 7635 - protein, 207 aa, Dietzia psychralcaliphila
  REGION 1..207: note = tr|A0A2T5AHC3|A0A2T5AHC3_9ACTN GTP cyclohydrolase 1; OS = Dietzia psychralcaliphila OX=139021 GN=folE PE=3 SV=1
MTNPDHIPAADARSESTGRVFDAERAESAVRELLIAVGEDPEREGLRDTPARVARAYREVFAGMYTDPADVLSKTFDEDHRELVLVRDIPIYSTCEHHLVPFHGVAHIGYIPGRSGAVTGLSKLARLVDLYAKRPQVQERLTSQVADALVNKLAPSGVLVVIECEHLCMSMRGIRKPGSVTTTSAVRGSMRTNASTRAEALGLLRGT

SEQ ID NO: 7636 - protein, 207 aa, Dietzia schimae
  REGION 1..207: note = tr|A0A521C214|A0A521C214_9ACTN GTP cyclohydrolase 1; OS = Dietzia schimae OX=498198 GN=folE PE=3 SV=1
MTTPDHIPAADARSLPTGRVFDAERAEAAVRELLIAVGEDPEREGLQDTPARVARAYREVFSGLYTDPSEVLSRTFDENHRELVLVRDIPIYSTCEHHLVPFHGVAHIGYIPGQSGAVTGLSKLARLVDLYAKRPQVQERLTSQVADALVDRLAPSGVLVVIECEHLCMSMRGIQKAGAVTTTSAVRGSMRTNASTRAEALGLLRGT

SEQ ID NO: 7637 - protein, 207 aa, Dietzia sp.
  REGION 1..207: note = tr|A0A199AYE1|A0A199AYE1_9ACTN GTP cyclohydrolase 1; OS = Dietzia sp. 111N12-1 OX=1785156 GN=folE PE=3 SV=1
MTTPDHIPAADARSLPTGRVFDAERAEAAVRELLIAVGEDPEREGLQDTPARVARAYREVFSGLYTDPSEVLSRTFDEDHRELVLVRDIPIYSTCEHHLVPFHGVAHIGYIPGQSGAVTGLSKLARLVDLYAKRPQVQERLTSQVADALVDRLAPSGVLVVIECEHLCMSMRGIQKAGAVTTTSAVRGNMRTNASTRAEALGLLRGT

SEQ ID NO: 7638 - protein, 188 aa, Dietzia sp.
  REGION 1..188: note = tr|A0A022LFK1|A0A022LFK1_9ACTN GTP cyclohydrolase 1; OS = Dietzia sp. UCD-THP OX=1292020 GN=folE PE=3 SV=1
MFDAERAEAAVRELLIAVGEDPEREGLQDTPARVARAYREVFAGLYTDPADVLSKTFNEDHRELVLVRDIPIYSTCEHHLVPFHGVAHIGYIPGRSGAVTGLSKLARLVDLYAKRPQVQERLTSQVADALVDKLQPTGVLVVIECEHLCMSMRGIRKPGSVTTTSAVRGSMRSNASTRAEALGLLRGT

SEQ ID NO: 7639 - protein, 204 aa, Dietzia timorensis
  REGION 1..204: note = tr|A0A173LHP7|A0A173LHP7_9ACTN GTP cyclohydrolase 1; OS = Dietzia timorensis OX=499555 GN=folE PE=3 SV=1
MGGIDPIAAADPAERPPFDHERAEAAVRELLIAVGEDPDREGLRDTPGRVARAYSETFAGLYVDPSEVLGRTFNEEHRELVLVRDIPIYSTCEHHLVPFHGVAHIGYIPGESGTVTGLSKLARLVDLYAKRPQVQERLTSQVADALRDKLQPTGVIVVIECEHLCMAMRGIRKPGAITTTSAVRGSFRANASTRAEAMRLIRGS

SEQ ID NO: 7640 - protein, 198 aa, unidentified
  source 1..198: note = Dinghuibacter silviterrae
  REGION 1..198: note = tr|A0A4R8DDY6|A0A4R8DDY6_9BACT GTP cyclohydrolase 1; OS = Dinghuibacter silviterrae OX=1539049 GN=folE PE=3 SV=1
MAYKKIEQYDEAVTEGLKENYKECLHMLGEDPDREGLLKTPERLAKAMQFLTQGYEQDAHQILESAKFRESISEMVVVKDIELYSLCEHHILPFFGKAHIAYIPNGYITGLSKIARVVDVYARRLQVQERLTTQILDAIKETLNPLGVAVVIEAQHLCMMMRGVQKQNSVTTTSAFWGEFERAETRSEFTKLITADLI

SEQ ID NO: 7641 - protein, 367 aa, Dinoroseobacter shibae
  REGION 1..367: note = sp|A8LS52|GCH4_DINSH GTP cyclohydrolase FolE2; OS = Dinoroseobacter shibae (strain DSM 16493 / NCIMB 14021 / DFL 12) OX=398580 GN=folE2 PE=3 SV=1
MNVYTPDIDKLPNRDEAATALATLRAWAQTASAAEIETLDPSVARLLPGDPSDYPSLARAYPEEFSVDAAYKDSLPDLQNGPSSLIRGAKAQIQHVGISNFRLPIRFHTRDNGDVTLETSVTGSVSLEAEKKGINMSRIMRTFYGHADETFSFEVIERTLDAYKSDLESFDARIQMRFSFPMKVESLRSGLSGYQYYDIALEVVDVNGQRRKFMHLDYVYSSTCPCSLELSEHARQFRGQLATPHSQRSVARVSVELTCGADDCLWFEDLVELCREAIPTETQVMVKREDEQAFAELNAANPIFVEDAARSFCLALQRDDRIGDFRVVASHQESLHSHDAVSVLTEGPTFASDSLDPRLFQTLFHVG

SEQ ID NO: 7642 - protein, 265 aa, unidentified
  source 1..265: note = Dissulfuribacter thermophilus
  REGION 1..265: note = tr|A0A1B9F3K6|A0A1B9F3K6_9DELT GTP cyclohydrolase FolE2 OS=Dissulfuribacter thermophilus OX=1156395 GN=folE2; PE = 3 SV=1
MEDKFLELKDVQSLPDFRNIPLNRVGIKNIRYPITVLDKQKGRQQTVANINMYVNLPHQFKGTHMSRFVEILNEYRGNISVKTFHKILNEMKRRLSSDEAHLEVEFPYFIEKRAPVTGTPGLMEYWCGLHGTLTEHLDMVLVAKVPVTTVCPCSKEISEFGAHNQRGEVRVWVRFNEFLWLEDLIQCVEKSASCQVFSILKRPDEKYVTEYAYTNPMFVEDVVRNVYIGLKELNGVSWFHIEAENFESIHNHSAYACTTYSSTED

SEQ ID NO: 7643 - protein, 314 aa, Dokdonella fugitiva
  REGION 1..314: note = tr|A0A4R2ICF5|A0A4R2ICF5_9GAMM GTP cyclohydrolase FolE2 OS=Dokdonella fugitiva OX=328517 GN=folE2 PE=3 SV=1
MSAPTSPQRLLPDIASEAQAGHAGALDGVGMQRIEMPVLLLGADGHAQRVSARVDAFVNLAREDARGIHMSRLYLHLDRHLSAEPLTPASLRRLLRDFLDSHAALADRAWVRVRYDHLARRAALASAHSGWRAYPVELRASLHGGEFMLELGLEVQYSSTCPASAALARQLIQDRFAADFDGHGPLQRDAVLAWLGRADGIVATPHSQRSAATLRLRLAPGFELPVEDLIDRVERALQTPVQTAVKREDEQAFALANGQNLMFCEDAARRIRGVLAADERIADFWLRAEHYESLHPHDAVAIATKGVPGGYAAS

SEQ ID NO: 7644 - protein, 204 aa, Dokdonella fugitiva
  REGION 1..204: note = tr|A0A4R2IEN6|A0A4R2IEN6_9GAMM GTP cyclohydrolase 1; OS = Dokdonella fugitiva OX=328517 GN=folE PE=3 SV=1
MKKTARTKKTLPPTVTQAQAEEAVRVLLRWAGEDPLREGLVDTPKRVADAYRDWFSGYAIDPAEYLGRTFEEVAGYDEMIVLRDIHFESFCEHHMAPIIGRAHVGYLPTDKVVGISKLARVVDAYARRFQVQEKLTAQIAHCIGMVLKPRGVGVVIDATHQCMTTRGVHKTGVSMITSQMLGTFREDARTRAEFLRFIDIDGHG

SEQ ID NO: 7645 - protein, 203 aa, unidentified
  source 1..203: note = Dokdonella immobilis
  REGION 1..203: note = tr|A0A1I5B6H9|A0A1I5B6H9_9GAMM GTP cyclohydrolase 1; OS = Dokdonella immobilis OX=578942 GN=folE PE=3 SV=1
MPRHGKKITIVPTVSVAQAEEAVRVLLRWAGEDPNREGLLDTPKRVVNAYRDWFSGYAIDPAEYLRRTFEEVAGYDEMIVLRDIEFESYCEHHMAPIIGRAHIGYLPTNKVVGISKLARVVDAYSRRFQVQEKLTAEIARCIEDVLKPRGVGVVVDAVHQCMTTRGVHKRGVSMITSKMLGDFRDDARTRAEFLRFINIQSKS

SEQ ID NO: 7646 - protein, 291 aa, unidentified
  source 1..291: note = Dokdonella immobilis
  REGION 1..291: note = tr|A0A1I4ZVL3|A0A1I4ZVL3_9GAMM GTP cyclohydrolase FolE2 OS=Dokdonella immobilis OX=578942 GN=folE2 PE=3 SV=1
MNVFTPTQLLPDVQAQADFREQGIDAVGIKGVRYPVVVQSGPRAVHTIASLSMTVALPAEVKGTHMSRFIELLEARAGHLDQATFRTMVLEMLERLGARSGRIAMRFPWFVSKAAPISGVSSLLDHDVEWIGSVAQDGRYSFRMRVQVAATSLCPCSKQISEYGAHNQRSHINIEAALCGAMPMEELIAIAEASASCEVYGLLKRADEKFVTERAYDNPKFVEDLVRDVAHALDQDPRITSYVVEAENFESIHNHSAFARIERDKPAGDAVRAARRLLAATDRTCRARGVS

SEQ ID NO: 7647 - protein, 197 aa, Dokdonella koreensis
  REGION 1..197: note = tr|A0A161HRQ0|A0A161HRQ0_9GAMM GTP cyclohydrolase 1; OS = Dokdonella koreensis DS-123 OX=1300342 GN=folE PE=3 SV=1
MTPSDPAVTRSAAEEAVRTLLRWAGEDPSREGLADTPKRVVDAYADWFSGYAVDPAAYLRRTFEEVAGYDEMIVLRDIEFESYCEHHMAPIIGRAHIGYLPTSKVVGISKLARVVDGFARRFQVQEKLTAQIAHCIEDVLRPRGVGVVVDAIHQCMTTRGVHKRGVSMVTSQMLGDFREDARTRAEFLRFIDGNGRR

SEQ ID NO: 7648 - protein, 316 aa, Dokdonella koreensis
  REGION 1..316: note = tr|A0A160DTP6|A0A160DTP6_9GAMM GTP cyclohydrolase FolE2 OS=Dokdonella koreensis DS-123 OX=1300342 GN=folE2; PE = 3 SV=1
MTVNESSALRAMPDIATEPQAATAGVLDWVGMDDIAAPVRLATADGGIVQSPARVAAFVNLKRQDARGIHMSRLYLHVDRHLSSEPLTPCSLRRLLRDFLDSHADLSDRAQVRIRFDHMVRRPALRSDNSGWKSYPITVTATMDEGQFALELGCDIAYSSTCPCSAALARQLIQQQFAADFAADQPLAREAVLAWLGREQGIVATPHSQRSSAQVRVRLAPGFDFPILDIIDRVEDALQTPVQTAVKREDEQAFALLNGQNLMFCEDAARRIRHALDGDERISDFWVRASHFESLHPHDAVAVATKGVRNGYGPDA

SEQ ID NO: 7649 - protein, 206 aa, Dokdonella sp.
  REGION 1..206: note = tr|A0A5C7ZTB3|A0A5C7ZTB3_9GAMM GTP cyclohydrolase 1; OS = Dokdonella sp. OX=2291710 GN=folE PE=3 SV=1
MATSRKPSPRNNKTPRVSRSQAEDAVRVLLRWAGEDPAREGLLDTPKRVVEAYADWFSGYAIDPSEYLRRTFEEVAGYDEMIVLRDIEFESYCEHHMAPIIGRAHIGYLPTDKVVGISKLARVVDAYSRRFQVQEKLTAQIAHCIENVLKPRGVGVVIDAVHQCMTTRGVHKRGVSMITSQMLGEFREDARTRSEFLRFINIHANA

SEQ ID NO: 7650 - protein, 317 aa, Dokdonella sp.
  REGION 1..317: note = tr|A0A5C7ZQ07|A0A5C7ZQ07_9GAMM GTP cyclohydrolase FolE2 OS=Dokdonella sp. OX=2291710 GN=folE2 PE=3 SV=1
MPSLPSNARLMPDIAAATALEAAGRLDWVGMDEIAVPVCLPGEDGGNVQVPARVTAQVNLKDASARGIHMSRLYLHLDRHLPSEALSPCTLRRLLRDFLDSHAELSDRARIDIRFEQMIRRPALASDNSGWRSYPVRITATLHESAFAFELETEALYSSTCPCSAALARQLIQEQFAADFVPGQALERDKVLAWLGSEQGIRATPHSQRSSARVRVRLAAGFEFPIVELIDLIEGALRTSVQTAVKREDEQAFALLNGQNLMFCEDAARRLKQTLEGDERIVDFWLRAAHLESLHAHDAVAIATKGIEGGFVPNSFR

SEQ ID NO: 7651 - protein, 216 aa, Dokdonia donghaensis
  REGION 1..216: note = tr|A0A0A2GXI1|A0A0A2GXI1_9FLAO GTP cyclohydrolase 1; OS = Dokdonia donghaensis DSW-1 OX=1300343 GN=folE PE=3 SV=1
MEAIGDDHIGTSAVTPLRADAFEMSNADKLVSIQKDVAHIMETLGLDMTDDSLKGTPKRVAKMFVNEIFSGLHPDNKPNVSVFDNNYKYGEMLVEKNITVYSTCEHHLLPIVGRAHVAYISNGTVVGLSKMNRIVDYYAKRPQVQERLTMQIVQELQRAMGTEDVACVIDAKHLCVNSRGIRDIESSTVTSEFGGKFKEEATRREFLDYIKLDTDF

SEQ ID NO: 7652 - protein, 198 aa, Dokdonia donghaensis
  REGION 1..198: note = tr|A0A0A2GTF3|A0A0A2GTF3_9FLAO GTP cyclohydrolase 1; OS = Dokdonia donghaensis DSW-1 OX=1300343 GN=folE PE=3 SV=1
MPYRKFEEYNIEVTEDVKSNFTSIIKSLGEDTSREGIVKTPERAAKAMQYLTSGYEMDAAAILKGAMFKEDYDDMVIVKNIELYSLCEHHMLPFFGKAHIAYIPNGHIVGLSKLPRIVDVFSRRLQVQERLTHDILECINTTLQPKGVAVVIEASHMCMMMRGVQKQNSTTTTSGFRGQFERQETRNEFLKLISSNLD

SEQ ID NO: 7653 - protein, 198 aa, unidentified
  source 1..198: note = Dokdonia pacifica
  REGION 1..198: note = tr|A0A239CKC1|A0A239CKC1_9FLAO GTP cyclohydrolase 1; OS = Dokdonia pacifica OX=1627892 GN=folE PE=3 SV=1
MPYKKFEEYNIEVTESIKKNFESIIDDLGEDTAREGIVKTPERAAKAMQFLTSGYEMDAAEILKGAMFKEDYDDMVIVKDIELYSLCEHHILPFFGKAHIAYIPNGHIVGLSKLPRIVDVFSRRLQVQERLTHDILECINDTLKPKGVAVVIEASHMCMMMRGVQKQNSTTTTSGFRGQFEKIETRTEFLKLISSDLS

SEQ ID NO: 7654 - protein, 231 aa, unidentified
  source 1..231: note = Dokdonia pacifica
  REGION 1..231: note = tr|A0A238ZM61|A0A238ZM61_9FLAO GTP cyclohydrolase 1; OS = Dokdonia pacifica OX=1627892 GN=folE PE=3 SV=1
MKTEIEKNTDRYQEQIEAMGNDHIGSSAITPLRDDAFELSDIEKIASIKKDVAHIMETLGLDMTDDSLKGTPTRVAKMFVNEIFGGLHPDRKPKASTFDNNYKYGEMLVEKNIVVYSTCEHHLLPIVGRAHVAYISNGTVVGLSKMNRIVDYYAKRPQVQERLTMQIVQELQEALGTKDVACVIDAKHLCVNSRGIRDIESSTVTSEFGGKFKEIATRREFLDYIKLDTDF

SEQ ID NO: 7655 - protein, 198 aa, Dokdonia sp.
  REGION 1..198: note = tr|A0A559RMX5|A0A559RMX5_9FLAO GTP cyclohydrolase 1; OS = Dokdonia sp. Hel1_53 OX=1566287 GN=folE PE=3 SV=1
MPYRTFEEYNIEVTDEVKSNFSSIIESLGEDTSRDGILKTPERAAKAMQFLTSGYDMDPAAILKGAMFKEDYDDMVIVKNIELYSLCEHHMLPFFGKAHIAYIPNGHIVGLSKLPRIVDVYARRLQVQERLTHDILECINTTLMPKGVAVVIEASHMCMMMRGVQKQNSTTTTSGFRGQFEKIETRNEFLKLISSSLD

SEQ ID NO: 7656 - protein, 198 aa, Dokdonia sp.
  REGION 1..198: note = tr|A0A2S1QFE3|A0A2S1QFE3_9FLAO GTP cyclohydrolase 1; OS = Dokdonia sp. Dokd-P16 OX=2173169 GN=folE PE=3 SV=1
MPYRSFEEYNIEVTDEIKDNFTSIIKNLGEDTGREGIVKTPERAAKAMQFLTSGYDMDPAAILKGAMFKEDYDDMVIVKNIELYSLCEHHMLPFFGKAHIAYIPNGHIVGLSKLPRIVDVFSRRLQVQERLTHDILECINSTLNPKGVAVVIEASHMCMMMRGVQKQNSTTTTSGFRGQFEKQETRNEFLKLISSSLD

SEQ ID NO: 7657 - protein, 215 aa, unidentified
  source 1..215: note = Dolichospermum compactum
  REGION 1..215: note = tr|A0A1Z4UYK3|A0A1Z4UYK3_9CYAN GTP cyclohydrolase 1; OS = Dolichospermum compactum NIES-806 OX=1973481 GN=folE; PE = 3 SV=1
MTLSIRPELTAADVISSLSHQQQPTVTEADMMQAVRTLLIGLGENPDREGLKDTPKRVVKALKFLTNGYDQSVDELLNGAVFTEDANEMVLVRDIDIFSSCEHHILPIIGRAHVAYIPNGKVIGLSKIARICEMYARRLQVQERLTLQIANALQGLLKPQGVAVVIEATHMCMVMRGVQKPGSWTVTSTMRGVFSEDERTREEFMNLIRHNANFK

SEQ ID NO: 7658 - protein, 235 aa, unidentified
  source 1..235: note = Dolichospermum compactum
  REGION 1..235: note = tr|A0A1Z4V893|A0A1Z4V893_9CYAN GTP cyclohydrolase 1; OS = Dolichospermum compactum NIES-806 OX=1973481 GN=folE; PE = 3 SV=1
MTIVGSNGANTSQSPLIPDLAEAINVRPDRNTHNGREPEIHPPSEETMDEMMQAVRTMLVGLGEDPEREGLLKTPKRVAKAMKFLTSGYNESLEDLINGAIFDEGHDEMVLVRDINFFSLCEHHMLPFMGRAHVAYIPNQKVVGLSKLARIVEMYSRRLQVQERLTRQIAEALQAVLEPKGVAVVMEATHMCMVMRGVQKPGSWTVTSSMVGIFRDEHKTREEFFNLIRHQASLF

SEQ ID NO: 7659 - protein, 215 aa, unidentified
  source 1..215: note = Dolichospermum planctonicum
  REGION 1..215: note = tr|A0A480ACZ5|A0A480ACZ5_9CYAN GTP cyclohydrolase 1; OS = Dolichospermum planctonicum OX=136072 GN=folE PE=3 SV=1
MTLSIRPELNSTADISSLYRQELPTVTEADMRQAVRTLLIGLGENPDREGLKDTPKRVVKALKFLTNGYHESLDELLNGAVFTEDANEMVLVRDIDLFSSCEHHILPIIGRAHVAYIPNGKVIGLSKIARICEMYARRLQVQERLTLQIADAVQGLLKPKGVAVVIEATHMCMVMRGVQKPGSWTVTSAMRGVFSEDASTREEFMNLIRHNPNFY

SEQ ID NO: 7660 - protein, 235 aa, unidentified
  source 1..235: note = Dolichospermum planctonicum
  REGION 1..235: note = tr|A0A480A9H1|A0A480A9H1_9CYAN GTP cyclohydrolase 1; OS = Dolichospermum planctonicum OX=136072 GN=folE PE=3 SV=1
MTIAGSNGSNRFQSPLIPDLAETINVRPDRNTHGGKAAEIHPPSEETMDEMMAAVRTMLVGVGEDPEREGLLKTPKRVAKAMKFLTSGYNESLEDLINGAIFDEGHDEMVLVRDINFFSLCEHHMLPFMGRAHVAYIPNQKVVGLSKLARIVEMYSRRLQVQERLTRQIAEALQTVLEPKGVAVVMEASHMCMVMRGVQKPGSWTVTSSMVGVFQEEQKTREEFFNLIRHQASFF

SEQ ID NO: 7661 - protein, 216 aa, unidentified
  source 1..216: note = Dolichospermum sp.
  REGION 1..216: note = tr|A0A5C0DRG1|A0A5C0DRG1_9CYAN GTP cyclohydrolase 1; OS = Dolichospermum sp. UHCC 0315A OX=1914871 GN=folE_1 PE=3; SV = 1
MTLSIRPELTSAADIISSLSNQQQPTVTEADMMQAVRTLLIGLGENPDREGLKDTPKRVVKALKFLTSGYDQSIDELLNGAVFTEDANEMVLVRDIDLFSSCEHHILPIIGRAHIAYIPNGKVIGLSKIARICEMYARRLQVQERLTLQIADALQGLLKPQGVAVVIEATHMCMVMRGVQKPGSWTVTSAMRGVFSEDARTREEFMNLIRHSANFK

SEQ ID NO: 7662 - protein, 235 aa, unidentified
  source 1..235: note = Dolichospermum sp.
  REGION 1..235: note = tr|A0A5C0DUG6|A0A5C0DUG6_9CYAN GTP cyclohydrolase 1; OS = Dolichospermum sp. UHCC 0315A OX=1914871 GN=folE_2 PE=3; SV = 1
MTIASSNGSNRTQSPLIPDLAEAITVRPDRNTHDGKEPQIHPPSEEIMDEMMAAVRTMIVGVGEDPEREGLLKTPKRVAKAMKFLTSGYNQSLEDLINGAIFDEGHDEMVLVRDINFFSLCEHHMLPFMGRAHVAYIPNQKVVGLSKLARIVEMYSRRLQVQERLTRQIAEALQTVLEPKGVAVVMEASHMCMVMRGVQKPGSWTVTSSMVGVFQEEQKTREEFFSLIRHQPSFF

SEQ ID NO: 7663 - protein, 357 aa, Dolosicoccus paucivorans
  REGION 1..357: note = tr|A0A2N6SM10|A0A2N6SM10_9LACT GTP cyclohydrolase 1; OS = Dolosicoccus paucivorans OX=84521 GN=folE PE=3 SV=1
MYQVYLSIGSNLGDRKKHLEKALNSLNELPTIELLDVSSLYETAPYGPVEQDNFYNAAVRLNTSLDPEELLTVLQAQEIAAKRTKEVKWGPRTLDLDIIWFDGQTIETDRLTIPHKEAKKRRFVIEPLLDIWQEDHLFDSKQPDYQLEEGLQEVTDQELTLVESNWYPAKGLLPAQLHQIEEATRMILTAIGEDVHRPGLKDTPKRVARMYAEVFSGLINAPFDDYKMFDTKNKEGMVLVKDIQFYSMCEHHLLPFFGKAHIAYIPKENQVLGLSKLARLVEDAAARPSVQEDLTIMIAERLFENAPVAGVAVAISAEHMCMTMRGVKTPHSYTKTYAFEGIFKEKDYQQLFLDDVQ

SEQ ID NO: 7664 - protein, 187 aa, Dolosigranulum pigrum
  REGION 1..187: note = tr|H3NCY3|H3NCY3_9LACT GTP cyclohydrolase 1; OS = Dolosigranulum pigrum ATCC 51524 OX=883103 GN=folE PE=3; SV = 1
MVDKQRIEKAVKEILIAVGEDPNREGLQETPARVARMYEERFAGLERDPSVHTKKYFHESSSELVLVKDIDFNSTCEHHLLPIYGKGHIAYIPRDGKVIGLSKLARILEDISQRPQMQERITNHVADVLSDNLNPEGVFVILEAEHMCMSIRGIKKFGAKTITKAMRGTFADSRELRQEVLDMIKFN

SEQ ID NO: 7665 - protein, 187 aa, Dolosigranulum pigrum
  REGION 1..187: note = tr|A0A1S8KPR4|A0A1S8KPR4_9LACT GTP cyclohydrolase 1; OS = Dolosigranulum pigrum OX=29394 GN=folE PE=3 SV=1
MVDKQRIEKAVKEILIAVGEDPNREGLQETPARVARMYEERFAGLERDPSVHTKKYFHESSSELVLVKDIDFNSTCEHHLLPIYGKGHIAYIPRDGKVIGLSKLARILEDISQRPQMQERITNHVADVLSDNLNPEGVFVILEAEHMCMSIRGIKKFGAKTITKAMRGTFADSRELRQEVLDMIRFN

SEQ ID NO: 7666 - protein, 189 aa, unidentified
  source 1..189: note = Domibacillus aminovorans
  REGION 1..189: note = tr|A0A177KRB5|A0A177KRB5_9BACI GTP cyclohydrolase 1; OS = Domibacillus aminovorans OX=29332 GN=folE PE=3 SV=1
MDRVDHAKIQEAVRLILEAVGENPDREGLQDTPKRVAKMYEEAFSGLHTDPKEYFETVFEEQYEELVLVKDIPFYSMCEHHLVPFFGHAHVAYLPKGGKVTGLSKLARAVETVARRPQLQERITNEVANAIMEMLEPHGAMVIVEAEHMCMAMRGVKKPGAKTVTTAARGRYENDSQLRTELLALIRSS

SEQ ID NO: 7667 - protein, 309 aa, unidentified
  source 1..309: note = Domibacillus aminovorans
  REGION 1..309: note = tr|A0A177L1I8|A0A177L1I8_9BACI GTP cyclohydrolase FolE2 OS=Domibacillus aminovorans OX=29332 GN=folE2 PE=3; SV = 1
MNLKGVYYMENFKIPPKNERLKLFGSIEPGIKTKPSEKEKMPDLQNVREDFLFEIDAVGITNVKMPVSITSALNPLTQTTIASFTLTSTIPRDVKGTNMSRFTEQLELYRRQGFTLDFSQLSDFVKELAERLGQRDASLEVKFPWFYEQTAPASSLAGLNHADAKMSVSYQHGKIAERMVELTCAVTTLCPCSKEISEYSAHNQRGYIKMTALLLDEYKESIDWKAVLLDAAQSNASALIYPILKRPDEKIVTEKAYENPRFVEDMVRLVAADLYEIPFIQSFTVECRNEESIHLHDAYASVTFNKRHK

SEQ ID NO: 7668 - protein, 189 aa, unidentified
  source 1..189: note = Domibacillus antri
  REGION 1..189: note = tr|A0A1Q8Q7H9|A0A1Q8Q7H9_9BACI GTP cyclohydrolase 1; OS = Domibacillus antri OX=1714264 GN=folE PE=3 SV=1
MAGVDHAKIEEAVRLILEAVGENPDREGLRETPKRVAKMYEEAFSGLHTDPKDYFKTVFEEQYEELVLVKDIPFYSMCEHHLVPFFGRAHVAYMPKSGKVTGLSKLARAVETVARRPQLQERITNEVADAIMDMLEPHGAMVIVEAEHMCMAMRGVKKPGAKTVTTAARGRYENDAQLRTELLSLIRSS

SEQ ID NO: 7669 - protein, 190 aa, unidentified
  source 1..190: note = Domibacillus antri
  REGION 1..190: note = tr|A0A1Q8Q5J9|A0A1Q8Q5J9_9BACI GTP cyclohydrolase 1; OS = Domibacillus antri OX=1714264 GN=folE PE=3 SV=1
MTIELEKGLLEGHIRSILELIGEDPNREGLKETPKRVMKMLEEVFSGVGIAPEQALTTTFEEQYEGMVVVKDITYYTFCEHHLVPFFGKAHIAYIPNGRVVGLSKFARLVELTSKRPQVQERMTQQIANAVMNVLQPDGVMVTVEGQHLCMCARGVKKPGSSTVTTIKKGVFKEDISLVREFEQALLRGE

SEQ ID NO: 7670 - protein, 301 aa, unidentified
  source 1..301: note = Domibacillus enclensis
  REGION 1..301: note = tr|A0A1N6V868|A0A1N6V868_9BACI GTP cyclohydrolase FolE2 OS=Domibacillus enclensis OX=1017273 GN=folE2 PE=3; SV = 1
MNNLKLPSKRERLKLFGSSEPGIKLKPSEKEKIPDLQNKKENFLFEIDAVGITNVKMPVSITSVLNPYTQTTIASFTLTSAISHEVKGTNMSRFTEQLELYRRQGFTLSFSQLSDFLKELAGRLEQKDASLEVTFPWFYEQAAPVSSLAGLNHADARISVSYRQGKIVERRVELSCAVTTLCPCSKEISEYSAHNQRGYIRMMASLSVEYQESTDWKAVLLEAAQSNASAWIYPILKRPDEKAVTEKAYENPRFVEDMVRLVAADLYEVPFIESFTVECRNEESIHLHDAYASLTIQKNGN

SEQ ID NO: 7671 - protein, 189 aa, unidentified
  source 1..189: note = Domibacillus enclensis
  REGION 1..189: note = tr|A0A1N6P948|A0A1N6P948_9BACI GTP cyclohydrolase 1; OS = Domibacillus enclensis OX=1017273 GN=folE PE=3 SV=1
MSEVDHAKIQQAVRLILEAVGENPDREGLVDTPKRVAKMYEEAFSGLHVDPKHYFATVFEEQYEELVLVKDIPFYSMCEHHLVPFFGHAHVAYLPKGGKVTGLSKLARAVESVARRPQLQERITSDVANAIMEMLEPHGAMVIVEAEHMCMAMRGVKKPGAKTVTTAARGLYENDAQLRTELLSLIRSS

SEQ ID NO: 7672 - protein, 189 aa, unidentified
  source 1..189: note = Domibacillus epiphyticus
  REGION 1..189: note = tr|A0A1V2A4E2|A0A1V2A4E2_9BACI GTP cyclohydrolase 1; OS = Domibacillus epiphyticus OX=1714355 GN=folE PE=3 SV=1
MAGIDHAKIQEAVRLILEAVGENPDREGLQDTPKRVAKMYEEAFSGLHTDPKDYFETVFEEQYEELVLVKDIPFYSMCEHHLVPFFGRAHVAYMPKGGKVTGLSKLARAVETVSRRPQLQERITSEVAEAIMEMLQPHGAMVIVEAEHMCMAMRGVKKPGAKTVTTAARGCYENDAQLRTELLSLIRSS

SEQ ID NO: 7673 - protein, 189 aa, unidentified
  source 1..189: note = Domibacillus epiphyticus
  REGION 1..189: note = tr|A0A1V2A9H3|A0A1V2A9H3_9BACI GTP cyclohydrolase 1; OS = Domibacillus epiphyticus OX=1714355 GN=folE PE=3 SV=1
MSIELKKGLDYHIESILELIGEDPAREGLKETPKRVKKMLEEVFSGVGIAPEQALTTTFEEQYEGMVVVKDITYYTFCEHHLVPFFGKAHIAYIPNGRVVGLSKFARLVELTSKRPQVQERMTQQIADAITNVLQPDGVMVTVEGQHLCMCARGVKKPGSSTVTTIKKGAFKEDISLVREFEQALLRGE

SEQ ID NO: 7674 - protein, 189 aa, unidentified
  source 1..189: note = Domibacillus iocasae
  REGION 1..189: note = tr|A0A1E7DN29|A0A1E7DN29_9BACI GTP cyclohydrolase 1; OS = Domibacillus iocasae OX=1714016 GN=folE PE=3 SV=1
MAGVDHAKIQQAVRLILEAVGENPDREGLQDTPKRVAKMYEEAFSGLHIDPRHYFETVFEEQYEELVLVKDIPFYSMCEHHLVPFFGRAHVAYLPKGGKVTGLSKLARAVESVARRPQLQERITSEVADSIMEMLQPHGVMVIVEAEHMCMAMRGVKKPGAKTVTTAARGMYENDSQLRTELLSLIRSS

SEQ ID NO: 7675 - protein, 309 aa, unidentified
  source 1..309: note = Domibacillus mangrovi
  REGION 1..309: note = tr|A0A1Q5P3C9|A0A1Q5P3C9_9BACI GTP cyclohydrolase FolE2 OS=Domibacillus mangrovi OX=1714354 GN=folE2 PE=3; SV = 1
MNLKGVYYMENFKLPPKKERLMLFGSIEPGIKTKPSEKEKMPDLQNVREDFLFEIDAVGITNVKMPVSITSVLHPLTQTTIASFTLTSTIPRDVKGTNMSRFTEQLELYRRQGFTLDFSQLSDFVKELAERLGQRDASLEVTFPWFYEQTAPASSLAGLNHADAKISVSYQHGKIAERMVELTCAVTTLCPCSKEISEYSAHNQRGYIKMTALLLDEYKESSDWKALLLHAAESNASALIYPILKRPDEKTVTEQAYENPRFVEDMVRLVAADLYEIPFIQSFTVECRNEESIHLHDAYASVTFNKRHK

SEQ ID NO: 7676 - protein, 189 aa, unidentified
  source 1..189: note = Domibacillus mangrovi
  REGION 1..189: note = tr|A0A1Q5P702|A0A1Q5P702_9BACI GTP cyclohydrolase 1; OS = Domibacillus mangrovi OX=1714354 GN=folE PE=3 SV=1
MAGVDHAKIQEAVRLILEAVGENPDREGLQETPKRVAKMYEEVFSGLHTDPKEYFKTVFEEQYEELVLVKDIPFYSMCEHHLVPFFGHAHVAYLPKGGKVTGLSKLARAVETVARRPQLQERITNEVANAIMEMLEPHGAMVIVEAEHMCMAMRGVKKPGAKTVTTAARGRYENDSQLRTELLALIRSS

SEQ ID NO: 7677 - protein, 367 aa, Donghicola sp.
  REGION 1..367: note = tr|A0A1M4N2I8|A0A1M4N2I8_9RHOB GTP cyclohydrolase FolE2 OS=Donghicola sp. KarMa OX=1779855 GN=folE2 PE=3 SV=1
MNIHTPELDQQPTERQAEEALAVLRRWAVHASDTEIAALDPELRALLPEARPVDYPVLSRVYPQDFAVDAEYRADLPDLQNGPSSLIRGARKQIQHVGISNFRLPIRYHTRDNGDLMLETSVTGTVSLDAEKKGINMSRIMRSFYKHADETFSFEVIEAALDDYKSDLQSFDARIQMRLSYPVKVESLRSGLSGYQYYDIALELIEQNGVRRKIVHLDYVYSSTCPCSLELSEHARMMRGQLATPHSQRSVARVSVVLEPGQECLWFEDLIGLCRNAVPTETQVMVKREDEQAFAELNAANPIFVEDAARLFCEQMQNDPRIGDFRVIASHQESLHSHDAVSVLTEGETFASASIDPKMFASLFHVG

SEQ ID NO: 7678 - protein, 366 aa, Donghicola sp.
  REGION 1..366: note = tr|A0A1B7Z0E6|A0A1B7Z0E6_9RHOB GTP cyclohydrolase FolE2 OS=Donghicola sp. JL3646 OX=1836468 GN=folE2 PE=3; SV = 1
MNIHSSDMDREPSREEAEAALALLRRWAGDATPEEVATLDPLVSRLIPGQEVSNYPALARAYPEDFVVDEDYKASMPDLQNGPSSLIKGAKQQIQHVGISNFRLPIRFHTRDNGDVTLETSVTGTVSLEAEKKGINMSRIMRSFYKHSEQTFSFEVMENALDAYMADLESFDARIQMRFRFPMKVRSLRSGLEGFQYYDIALELVERAGVRKKIIHLDYVYSSTCPCSLELSEHARQFRGQLATPHSQRSVARMSAVMEDGPMLWFEDLIDMARVAVPTETQVMVKREDEQAFAELNAANPIFVEDAARLFCEQLQQDPRVGDFRVVASHQESLHSHDAVSVLVEGETFDSDSIDPRLFTTLFHVG

SEQ ID NO: 7679 - protein, 365 aa, unidentified
  source 1..365: note = Donghicola tyrosinivorans
  REGION 1..365: note = tr|A0A2T0WX85|A0A2T0WX85_9RHOB GTP cyclohydrolase FolE2 OS=Donghicola tyrosinivorans OX=1652492 GN=folE2; PE = 3 SV=1
MNVHISDLEQQPTEAEAAEALELLRRFMRGASSEDAAGLVPELKEIAGAEAGYPVLSREYPEGLKVDAAYKAALPDLQNGPSSLIRGAHEQIQHVGISNFRLPIRYHTRDNGDLTLETSVTGTVSLDADKKGINMSRIMRSFYKHAEKTFSFEVIEAALDDYKADLESFDARIQMRLSYPVKVPSLRSGLSGYQYYDIALELVEKGGVRRKVVHLDFVYSSTCPCSLELSEHARMTRGQLATPHSQRSVARVSVELRPEQECLWFEDLIELCRAAVPTETQVMVKREDEQAFAELNAANPIFVEDAARLFCEQLQKDWRVGDFRVIASHQESLHSHDAVSILTQGPLFEQDSLDPRLFSTLFHVG

SEQ ID NO: 7680 - protein, 210 aa, Dongia mobilis
  REGION 1..210: note = tr|A0A4R6WJN3|A0A4R6WJN3_9PROT GTP cyclohydrolase 1; OS = Dongia mobilis OX=578943 GN=folE PE=3 SV=1
MNMHRHLTLAENLTAERSQAAARRPSKAAAEAAIRTLIAYAGDDPDREGLKGTPERVARSFDEFYGGYFEDPVAILQRTFEEIEGYDELVLLKDIPFVSHCEHHLAPIIGRAHVGYLPRSRVVGISKLARVVEVYARRMQIQEKMTAQIANTIQQVLDPLGVGVVIEAEHHCMTTRGVNKPGVAMTTSTLLGSFRDNPETRREFQRLIGR

SEQ ID NO: 7681 - protein, 214 aa, Dongia mobilis
  REGION 1..214: note = tr|A0A4R6WSH1|A0A4R6WSH1_9PROT GTP cyclohydrolase 1; OS = Dongia mobilis OX=578943 GN=folE PE=3 SV=1
MAKSTSKPRRAPTRSRSARPSQAEAEEAVRTLLRWAGDNPAREGLLDTPRRVVKAYREYFSGYDLDPSQILKRTFEETDGYDEMIVLKDIRFESHCEHHMAPIIGRAHIAYLPRKRVVGISKLARLLECYAKRLQIQEKMTAQIANTLNDELQPRGVAVVIDASHHCMTTRGIHKPGSSMITSRMLGAFRTDASTRREFLAFIGLPPSSIGTGS

SEQ ID NO: 7682 - protein, 185 aa, Dorea formicigenerans
  REGION 1..185: note = tr|B0G6Q7|B0G6Q7_9FIRM GTP cyclohydrolase 1 OS=Dorea formicigenerans ATCC 27755 OX=411461 GN=folE PE=3 SV=1
MIDHEKVEQAVRLLLEGIGEDVNREGLIDTPDRIARMYEEIYGGMEEDAATHLSKTFTVDSSEMVVEKDITFYSTCEHHLLPFYGKVHIGYIPDGKVVGLSKLARTVEVFARRLQLQEQLTGQIADALMEHMQAKGAIVMIEAEHMCMTMRGIKKPGSQTVTLARRGVFETDPALEERFFRMLER

SEQ ID NO: 7683 - protein, 185 aa, Dorea formicigenerans
  REGION 1..185: note = tr|A0A414AQ90|A0A414AQ90_9FIRM GTP cyclohydrolase 1; OS = Dorea formicigenerans OX=39486 GN=folE PE=3 SV=1
MIDHEKVEQAVRLLLEGIGEDVNREGLIDTPDRIARMYEEIYGGMEEDAATHLSRTFTVDSSEMVVEKDITFYSTCEHHLLPFYGKVHIGYIPDGKVVGLSKLARTVEVFARRLQLQEQLTGQIADALMEHMQAKGAIVMIEAEHMCMTMRGIKKPGSQTVTLARRGVFETAPALEERFFRMLER

SEQ ID NO: 7684 - protein, 185 aa, Dorea longicatena
  REGION 1..185: note = tr|A6BJ36|A6BJ36_9FIRM GTP cyclohydrolase 1 OS=Dorea longicatena DSM 13814 OX=411462 GN=folE PE=3 SV=1
MIDHEKIEQAVRLLLEGMGEDVNREGLIDTPDRIARMYEEIYGGMDEDAGKHLSKTFTVDSHEMVIEKDITFYSTCEHHLLPFYGKAHIAYIPDGKVVGLSKLARTVEVFARRLQLQEQLTGQIADALMEHMQPEGAIVMIEAEHMCMTMRGIKKPGSQTVTIARRGVFETDPVLEERFFRMLGR

SEQ ID NO: 7685 - protein, 196 aa, Dorea longicatena
  REGION 1..196: note = tr|A0A174H6J0|A0A174H6J0_9FIRM GTP cyclohydrolase 1; OS = Dorea longicatena OX=88431 GN=folE PE=3 SV=1
MRTESAEKGKNMIDHEKIEQAVRLLLEGMGEDVNREGLIDTPDRIARMYEEIYGGMDEDAGKHLSKTFTVDSHEMVIEKDITFYSTCEHHLLPFYGKAHIAYIPDGKVVGLSKLARTVEVFARRLQLQEQLTGQIADALMEHMQPKGAIVMIEAEHMCMTMRGIKKPGSQTVTIARRGVFETDPVLEERFFRMLGR

SEQ ID NO: 7686 - protein, 189 aa, Dorea sp.
  REGION 1..189: note = tr|A0A374X452|A0A374X452_9FIRM GTP cyclohydrolase 1; OS = Dorea sp. OM02-2LB OX=2292347 GN=folE PE=3 SV=1
MRIKKKMDQEKIKQGVRLILEGVGEDLNREGLVETPDRVARMYEELLAGLTMDGSEHLQKTFSVENNEMVLEKDITFYSLCEHHLLPFYGKVHIAYVPDGKVAGLSKLARTVEIFARRLQLQEQMTGQIADALMDYLKPKGVMVMVEAEHMCMTMRGIKKPGSKTVTVVKRGIFQEEKERSELFFQMLR

SEQ ID NO: 7687 - protein, 185 aa, Dorea sp.
  REGION 1..185: note = tr|A0A1Q6Q6M6|A0A1Q6Q6M6_9FIRM GTP cyclohydrolase 1; OS = Dorea sp. 42_8 OX=1896999 GN=folE PE=3 SV=1
MIDHEKIEQAVRLLLEGMGEDVNREGLIDTPDRIARMYEEIYGGMDEDAGKHLSKTFTVDSHEMVIEKDITFYSTCEHHLLPFYGKAHIAYIPDGKVVGLSKLARTVEVFARRLQLQEQLTGQIADALMEYMQPKGAIVMIEAEHMCMTMRGIKKPGSQTVTIARRGVFETDLVLEERFFRMLGR

SEQ ID NO: 7688 - protein, 237 aa, unidentified
  source 1..237: note = Draconibacterium orientale
  REGION 1..237: note = tr|X5E247|X5E247_9BACT GTP cyclohydrolase 1; OS = Draconibacterium orientale OX=1168034 GN=folE PE=3 SV=1
MSYREEIIFTNTGTGKNGKTNGHNKHETIGDNHIATSIDTPMRDDAFELSDEQKMEIIEDKFRDIMETMGLDLNDDSLSGTPHRVAKMFVKEIFSGLNPANKPKVSVFDNKFKYGEMLVEKNINMNSTCEHHFLPIVGKAHVAYISSGEVIGLSKINRIVDYFARRPQVQERLTVQIANELKSILKTDDVAVVIDAKHMCVSSRGIQDESSSTVTAEYSGKFKDKSVREEFLKYVEL

SEQ ID NO: 7689 - protein, 207 aa, unidentified
  source 1..207: note = Draconibacterium orientale
  REGION 1..207: note = tr|X5DU17|X5DU17_9BACT GTP cyclohydrolase 1; OS = Draconibacterium orientale OX=1168034 GN=folE PE=3 SV=1
MCSLKNNNSNGYLRTDLYNEEATEQLSGHYKEILQIIGEDPSREGLDKTPERVAKAMQFLLQGYQMDPVEILTSAMFKEDYRQMVIVKDIEIYSMCEHHMLPFIGKAHVAYIPNGTITGLSKIARVVDVFARRLQVQERLTTQIKDCIQDTLKPLGVAVVIEAQHLCMQMRGVQKQHSITTTSDFTGAFEKVATREEFIKLISTKLS

SEQ ID NO: 7690 - protein, 207 aa, unidentified
  source 1..207: note = Draconibacterium sediminis
  REGION 1..207: note = tr|A0A0D8JEY3|A0A0D8JEY3_9BACT GTP cyclohydrolase 1; OS = Draconibacterium sediminis OX=1544798 GN=folE PE=3 SV=1
MCSLKNNNSNGYQRTDLYNEEATEQLSEHYKEILQIVGEDPSREGLDKTPDRVAKAMQFLLQGYQIDPVEILQSAMFKEDYRQMVIVKDIEIYSMCEHHMLPFIGKAHVAYIPNGTITGLSKIARVVDVFARRLQVQERLTTQIKDCIQDTLKPLGVAVVIEAQHLCMQMRGVQKQHSITTTSDFTGAFEKVATREEFIKLISTKLS

SEQ ID NO: 7691 - protein, 209 aa, unidentified
  source 1..209: note = Draconibacterium sediminis
  REGION 1..209: note = tr|A0A0D8J4D6|A0A0D8J4D6_9BACT GTP cyclohydrolase 1; OS = Draconibacterium sediminis OX=1544798 GN=folE PE=3 SV=1
MGDNHIATSIDTPMRDDAFELSDERKMEIIEEKFRDIMETMGLDLNDDSLSGTPHRVAKMFVKEIFNGLNPANKPKISVFENKFKYGEMLVEKNINMNSTCEHHFLPIVGKAHVAYISSGEVIGLSKINRIVDYFARRPQVQERLTVQIANELKTILKTDDVAVVIDAKHMCVSSRGIQDESSSTVTVEYSGKFKDKNVREEFLKYVEL

SEQ ID NO: 7692 - protein, 207 aa, unidentified
  source 1..207: note = Draconibacterium sp.
  REGION 1..207: note = tr|A0A2G6RBE3|A0A2G6RBE3_9BACT GTP cyclohydrolase 1; OS = Draconibacterium sp. OX=1965318 GN=folE PE=3 SV=1
MSSPKIITTGSYEKLEIYDDKATAELSGNYSEILRILGEDPQREGLGKTPERVARAMQFLLQGYKTDPVKILESAIFKEEYRQMVIVKDIEIYSMCEHHLLPFFGKAHVAYIPNGVITGLSKIARIVDVFARRLQVQERLTTQIKECIQNTLNPLGVAVVIEAQHLCMQMRGIQKQHSITTTSDFTGAFQKTATRDEFIKLISTKLN

SEQ ID NO: 7693 - protein, 235 aa, unidentified
  source 1..235: note = Duganella phyllosphaerae
  REGION 1..235: note = tr|A0A1E7WRK6|A0A1E7WRK6_9BURK GTP cyclohydrolase 1; OS = Duganella phyllosphaerae OX=762836 GN=folE PE=4 SV=1
MTTEPQPAYLPVTTTASERIRARLVASNTRFHANDNIAAYIEPGELDQLLDEVSGHMQKVLESLVIDTVSDHNTQDTARRVAKMYMTEVFGGRYVDMPPVTEFPNAANLNELMIIGPITVRSACSHHLCPVIGKVWIGVMPNQHSNLIGLSKYARLASWIMSRPQIQEEAVVQLADLLQEKMQPDGLAVIMEADHFCMQWRGVKDMDARMINSVMHGSFLKDPALRREFLSLIKR

SEQ ID NO: 7694 - protein, 187 aa, unidentified
  source 1..187: note = Duganella sacchari
  REGION 1..187: note = tr|A0A1M7N3X6|A0A1M7N3X6_9BURK GTP cyclohydrolase 1; OS = Duganella sacchari OX=551987 GN=folE PE=3 SV=1
MSQEEFSENDWRRLLASFGEDPDRPGLQETPARVAKAWKHWTSGYEQDPVKLLKAFEDGAEQYNEFIIVRNIPVYSHCEHHLAPFFGKATVGYIPNGKIVGLSKLTRLVDCFSKRLQVQERMTMQIANALMDVLEPKAVGVIIKCRHLCMESRGIRTPGEETVTSAMLGELQPNLAMRTEFLALAKD

SEQ ID NO: 7695 - protein, 188 aa, Duganella sp.
  REGION 1..188: note = tr|A0A3E1S2E0|A0A3E1S2E0_9BURK GTP cyclohydrolase 1; OS = Duganella sp. BJB480 OX=1871181 GN=folE PE=3 SV=1
MSQKEFSEGDWRRLIASFGEDPDRPGLLETPARVSKAWKHWTSGYAQDPVELLKAFEDGAEQYNELIVVRGIPVYSHCEHHLAPFFGKATVGYVPNGKIVGLSKLTRLVDCFAKRLQVQERMTMQIANALMEVLEPKAVGVVVKCRHLCMESRGIRTPGEETVTSAMLGELQPNLAMRTEFLALARES

SEQ ID NO: 7696 - protein, 188 aa, Duganella sp.
  REGION 1..188: note = tr|A0A0Q7WAQ5|A0A0Q7WAQ5_9BURK GTP cyclohydrolase 1; OS = Duganella sp. Root1480D1 OX=1736471 GN=folE PE=3 SV=1
MTKEVFTEDDWRRLLEHLGEDPNRPGLIETPHRVHKAWKHWVSGYGQDPAEVLKAFEDGAEQYNELIVVKNIPVYSHCEHHLAPFFGKATVGYVPNGKIVGLSKLTRLVDVFSKRLQVQERMTMQIAEALMTVLEPKAVGVVVKCRHLCMESRGIRTAGEETVTSAMLGELQPNLAMRTEFLALARES

SEQ ID NO: 7697 - protein, 192 aa, unidentified
  source 1..192: note = Duncaniella muris
  REGION 1..192: note = tr|A0A2V1INH7|A0A2V1INH7_9BACT GTP cyclohydrolase 1; OS = Duncaniella muris OX=2094150 GN=folE PE=3 SV=1
MAAEISDETIREIASHYEAILKLLGEDTTREGLVKTPMRAAKAMVYATRGYRQDPDVIINDAVFSYEGSRMVIVKDIEFYSLCEHHILPFFGKVSVGYIPDGKTIGLSKLARLVDFYARRLQVQERMTAQICNIIMEKLNAKGVIVVCSGEHLCMKMRGVEKQDSTTTTIETAGVFSDSSTLRDDFFHALSH

SEQ ID NO: 7698 - protein, 196 aa, unidentified
  source 1..196: note = Duncaniella sp.
  REGION 1..196: note = tr|A0A4Z0V0W7|A0A4Z0V0W7_9BACT GTP cyclohydrolase 1; OS = Duncaniella sp. TLL-A3 OX=2530391 GN=folE PE=3 SV=1
MSSTTGLSEETIEEIARHYAAIISLLGEDITREGLVRTPMRAAKAMAFATRGYRQDPDVIINDAIFTHEGSNMVIVRDIEFYSLCEHHILPFFGKVSIGYIPDGRTIGLSKLARLVDFYARRLQVQERLTAQICDIVMKKLGAKGVIVACTADHLCMKMRGVEKQLPATTTVETAGAFTESTTLREEFFNAIASGK

SEQ ID NO: 7699 - protein, 192 aa, unidentified; identical to SEQ ID NO: 7697
  source 1..192: note = Duncaniella sp.
  REGION 1..192: note = tr|A0A4P7VWU7|A0A4P7VWU7_9BACT GTP cyclohydrolase 1; OS = Duncaniella sp. C9 OX=2530392 GN=folE PE=3 SV=1

SEQ ID NO: 7700 - protein, 214 aa, Dyadobacter fermentans
  REGION 1..214: note = tr|C6VZC5|C6VZC5_DYAFD GTP cyclohydrolase 1; OS = Dyadobacter fermentans (strain ATCC 700827 / DSM 18053 / NS114) OX=471854 GN=folE PE=3 SV=1
MDVEEIGDDHLFSGIETPLRPDAFAMEDELKMELIEKHFRHIMEIMGLDMTDDSLKGTPKRVAKMYIKEVFSGLDPKNKPAVALFDNKYKYNQMLVEKDISVFSNCEHHFVPIYGKAHVAYISSGKVIGLSKLNRIVEYFSKRPQVQERLTVQIANELKQALQTEDVAVVIDAQHMCVQSRGIRDSGSSTVTAFYGGKFEEEATKKEFLAYLGM

SEQ ID NO: 7701 - protein, 228 aa, unidentified
  source 1..228: note = Dyadobacter jejuensis
  REGION 1..228: note = tr|A0A316AP32|A0A316AP32_9BACT GTP cyclohydrolase 1; OS = Dyadobacter jejuensis OX=1082580 GN=folE PE=3 SV=1
MKQNGTLLNILPTDEMIEHMGEDHSMSSLETPLRKDAFAMEDSEKIDLIEKHFRHIMEIMGLDLTDDSLNGTPRRVAKMYIEEVFSGLNPINKPSVTLFENRYKYNQMLVEKDITVFSNCEHHFVPIYGKAHVAYISSGKVIGLSKLNRIVDFYSKRPQVQERLTMQIANELKQALSTEDVAVVIDAQHMCVHSRGIKDTGSSTITSAYSGKFENEDTRNEFLRYLNL

SEQ ID NO: 7702 - protein, 229 aa, unidentified
  source 1..229: note = Dyadobacter jiangsuensis
  REGION 1..229: note = tr|A0A2P8G950|A0A2P8G950_9BACT GTP cyclohydrolase 1; OS = Dyadobacter jiangsuensis OX=1591085 GN=folE PE=3 SV=1
MKQNGILSSIQSSEALDIEEVGDDHLFSGIDTPLRADAFAMEDELKMELIEKHFRHIMEIMGLDLTDDSLKGTPKRVAKMYIKEVFSGLDPKNKPAIALFDNKYKYNQMLVEKDISVFSNCEHHFVPIYGKAHVAYISSGKVIGLSKLNRIVEYYSKRPQVQERLTVQIANELKEALQTEDVAVVIDAQHMCVQSRGIRDSGSSTVTAFYGGKFEDEATKKEFLAYLGM

SEQ ID NO: 7703 - protein, 226 aa, Dyadobacter koreensis
  REGION 1..226: note = tr|A0A1H6Q1X1|A0A1H6Q1X1_9BACT GTP cyclohydrolase 1; OS = Dyadobacter koreensis OX=408657 GN=folE PE=3 SV=1
MLNNKIIFEPKIDKNVLEYEKGHHRWSYDTPLRADAFELDDNAKIELIAEHFAGIMQVLGLDLEDDSLQDTPKRVAKMYVKEIFSGLNPANKPEPTLFKNAYHYNQMLVERNISVFSNCEHHFVPIVGKAHVAYISNGQVIGLSKLNRIVQYCSQRPQVQERLTVQIANLMKEALGTEDVAVVIDAYHHCVSSRGVKDSGSTTLTAEYCGQFLNAETKNEFLKYIG

SEQ ID NO: 7704 - protein, 229 aa, Dyadobacter koreensis
  REGION 1..229: note = tr|A0A1H6XZN6|A0A1H6XZN6_9BACT GTP cyclohydrolase 1; OS = Dyadobacter koreensis OX=408657 GN=folE PE=3 SV=1
MKQNGTLLNTQSIENFDIEEIGDEHLFSSIETPMRPDAFALEDEVKIELIEKHFRHIMEIMGLDLTDDSLKGTPKRVAKMYIKEVFSGLDPKNKPSVALFENKYKYNQMLVEKDISVFSNCEHHFVPIYGKAHIAYISSGKVIGLSKLNRIVEYFSKRPQVQERLTVQIANELKQALQTDDIAVVVDAKHMCVQSRGVRDAGSSTVTAYYGGKFEEEATKKEFLTYLGM

SEQ ID NO: 7705 - protein, 229 aa, Dyadobacter psychrophilus
  REGION 1..229: note = tr|A0A1T5GFF2|A0A1T5GFF2_9BACT GTP cyclohydrolase 1; OS = Dyadobacter psychrophilus OX=651661 GN=folE PE=3 SV=1
MKQNGTSSNIQSTEMVEVEEIGNDHVFSSIETPMRKDAFAMEDDLKMELIEKHFRHIMEIMGLDLTDDSLKGTPKRVAKMFITEVFSGLDPKNKPAVTLFENKYKYDQMLVEKDISVFSNCEHHFVPIYGKAHVAYISSGKVIGLSKLNRIVEYFAKRPQVQERLTVQIANELKEALQTEDVAVVIDAQHMCVQSRGIRDSGSSTVTAFYGGKFQEEITKKEFLSYLGM

SEQ ID NO: 7706 - protein, 229 aa, Dyadobacter soli
  REGION 1..229: note = tr|A0A1G8A841|A0A1G8A841_9BACT GTP cyclohydrolase 1; OS = Dyadobacter soli OX=659014 GN=folE PE=3 SV=1
MKQNGILSSIQSSEALDIEEVGDDHLFSGIETPLRKDAFAMEDELKMELIEKHFRHIMEIMGLDLTDDSLKGTPKRVAKMYIKEVFSGLDPKNKPAIALFDNKYKYNQMLVEKDISVFSNCEHHFVPIYGKAHVAYISSGKVIGLSKLNRIVEYYSKRPQVQERLTVQIANELKEALQTEDVAVVIDAQHMCVQSRGIRDSGSSTVTAFYGGKFEEEGTKKEFLSYLGM

SEQ ID NO: 7707 - protein, 229 aa, Dyadobacter sp.
  REGION 1..229: note = tr|A0A1H6XGI0|A0A1H6XGI0_9BACT GTP cyclohydrolase 1; OS = Dyadobacter sp. SG02 OX=1855291 GN=folE PE=3 SV=1
MKQNGILSSIQSSEALDIEEVGDDHLFSGIETPLRKDAFAMEDELKMELIEKHFRHIMEIMGLDMTDDSLKGTPKRVAKMYIKEVFSGLDPKNKPAIALFDNKYKYNQMLVEKDISVFSNCEHHFVPIYGKAHVAYISSGKVIGLSKLNRIVEYYSKRPQVQERLTVQIANELKQALQTEDVAVVIDAQHMCVQSRGIRDSGSSTVTAYYGGKFEEEMTKKEFLSYLGM

SEQ ID NO: 7708 - protein, 231 aa, Dyadobacter sp.
  REGION 1..231: note = tr|A0A3D8Y9T5|A0A3D8Y9T5_9BACT GTP cyclohydrolase 1; OS = Dyadobacter sp. RS19 OX=2259619 GN=folE PE=3 SV=1
MKQNGTLSNIPSIDMLEAEEVGDNHLLTSIETPMRPDAFALDDDTKIELIEKHFRHIMEIMGLDLTDDSLKGTPKRVAKMYIKEVFSGLDPKNKPAVALFENRYKYDQMLVEKDITVFSNCEHHFVPIYGKAHVAYISSGKVIGLSKLNRIVEYYSKRPQVQERLTVQIANELKEALNTEDIAVVIDARHMCVQSRGVRDSGSSTVTAYYGGKFEEETTKKEFLSYLTLGS

SEQ ID NO: 7709 - protein, 299 aa, Dyella japonica
  REGION 1..299: note = tr|A0A075JZL1|A0A075JZL1_9GAMM GTP cyclohydrolase FolE2 OS=Dyella japonica A8 OX=1217721 GN=folE2 PE=3 SV=1
MPDVAVDPALGGQLAWVGMERIATPVRIDAGGSTTLQVIASVDAFVNLVRTDRRGIHMSRLYRLIDEHLGAEPISTVMLERLLRAFLQSQHGLADRARLRLRFEQPVRRMALRSGQDGWRVYPVTIEATMEHGDMDVSLAIEVTYSSTCPASAALARQVITEHFARRFPSPDPVPRDAALAWLDSEQGIAATPHAQRSMAYVWTRLAHGSAWDAPALIDRVEASLGTPVQAMVKREDEQAFALANGSNLMFCEDAARRIQQALETDDGIADFHIRVEHQESLHAHNAVAQARKALTPRA

SEQ ID NO: 7710 - protein, 200 aa, Dyella japonica
  REGION 1..200: note = tr|A0A075JVB3|A0A075JVB3_9GAMM GTP cyclohydrolase 1; OS = Dyella japonica A8 OX=1217721 GN=folE PE=3 SV=1
MSERQDPTEVTREQAEEAVRTLLRWSGEDPSREGLLDTPKRVVKAYKDWFSGYDIDPGDYLRRTFEEVAGYDEMVVLRDIEFESHCEHHMAPIIGRAHVGYLPTNRVVGISKLARVVDAYARRFQVQEKLTAQIAQCIQENLQPAGVAVVIDASHECMTTRGVHKRGVSMITSQMLGAFRDDARTRSEFLQFIGIHGAGR

SEQ ID NO: 7711 - protein, 317 aa, unidentified
  source 1..317: note = Dyella jiangningensis
  REGION 1..317: note = tr|A0A328P3S6|A0A328P3S6_9GAMM GTP cyclohydrolase FolE2 OS=Dyella jiangningensis OX=1379159 GN=folE2 PE=3; SV = 1
MYTEENTARLMPDVAVHAQPHLAGELDWVGMDGIEVPVRFDAGDGDVQRASARVGAFVNLRRPDKRGIHMSRLYLQVEQALSTQTLSASSLRELLQGFLDSHKDLSDRACLSIRFEHLVRRPALRSGNSGWRAYPVSIEASLVGDQFLLELGTEVVYSSTCPASAALSRQLIQEQFSKDFDAAEPVDHAAVLAWLGSEKGIVATPHAQRSVARLRVRPTEGAKFDLISLIDRTEHALGTPVQTAVKREDEQAFALANGGNLMFCEDAARRIQKALDVDATLSDFHIRVEHQESLHPHDAVAYASKGVEGGYAGKGCA

SEQ ID NO: 7712 - protein, 317 aa, unidentified
  source 1..317: note = Dyella jiangningensis
  REGION 1..317: note = tr|A0A023NNZ6|A0A023NNZ6_9GAMM GTP cyclohydrolase FolE2 OS=Dyella jiangningensis OX=1379159 GN=folE2 PE=3; SV = 1
MYTEENTARLMPDVAVHAQPHLAGELDWVGMDGIEVPVRFDAGDGDVQRASARVGAFVNLRRPDKRGIHMSRLYLQVEQALSTQTLSAASLQELLRGFLDSHKDLSDRACLSVRFEHLVRRPALRSGNSGWRAYPVSIEASIVGDQFLLELGTEVVYSSTCPASAALSRQLIQEQFTKDFDATQPIDHAAVVAWLGSEKGIVATPHAQRSVARLRVRPAEGAKFDLINLIDRTEHALGTPVQTAVKREDEQAFALANGGNLMFCEDAARRIQKALDADSTLSDFHIRVEHQESLHPHDAVAYASKGVDGGYAGKGCV

SEQ ID NO: 7713 - protein, 317 aa, Dyella marensis
  REGION 1..317: note = tr|A0A1I2DH98|A0A1I2DH98_9GAMM GTP cyclohydrolase FolE2 OS=Dyella marensis OX=500610 GN=folE2 PE=3 SV=1
MYTQEQTARLLPDVAHHAQPHLAGALDWVGMDGIEVPVRFDAGDGEPQRASARVGAFVNLHRPDKRGIHMSRLYLLVEHALSAGQLTAGALRDLLHAFLESHKDLSDRACLSIRFEQLVRRPALRSGNSGWRAYPVCIEASMVGEDFLLEYGTEVVYSSTCPASAALSRQLIQDQFARDFDVSHPLEHAAVLAWLGSERGIVATPHAQRSVARLRVRVAAGGAFHLIKLIDRVEQALGTPVQTAVKREDEQAFALANGSNLMFCEDAARRIQKALDADANLADFHIRVEHQESLHPHDAVAYASKGVAGGLGGAARA

SEQ ID NO: 7714 - protein, 199 aa, Dyella marensis
  REGION 1..199: note = tr|A0A1I2HUU3|A0A1I2HUU3_9GAMM GTP cyclohydrolase 1; OS = Dyella marensis OX=500610 GN=folE PE=3 SV=1
MSDQHPTDVTPEQAEEAVRVLLRWAGEDPSREGLLDTPKRVVKAYRDWFSGYLTDPGEYLRRTFEEVAGYDEMVVLRDIEFESHCEHHMAPIVGRAHVGYLPTNRVVGISKLARVVEAYARRFQVQEKLTAQIAQCIQENLHPAGVAVVIDASHECMTTRGVHKRGVSMVTSQMLGSFRDDARTRAEFLQFIGIRGGVR

SEQ ID NO: 7715 - protein, 200 aa, Dyella soli
  REGION 1..200: note = tr|A0A4R0YK01|A0A4R0YK01_9GAMM GTP cyclohydrolase 1; OS = Dyella soli OX=522319 GN=folE PE=3 SV=1
MSDRHEPTDVTREQAEEAVRVLLRWSGEDPSREGLLDTPKRVVKAYRDWFSGYEIDPGEYLRRTFKEVHGYDEMVVLRDIEFESHCEHHMAPIIGRAHVGYLPTNRVVGISKLARVVDAYARRFQVQEKLTAQIAQCIQENLQPAGVAVVIDASHECMTTRGVHKRGVSMITSQMLGAFRDDARTRSEFLQFIGIHGAGR

SEQ ID NO: 7716 - protein, 316 aa, Dyella soli
  REGION 1..316: note = tr|A0A4R0YYN2|A0A4R0YYN2_9GAMM GTP cyclohydrolase FolE2 OS=Dyella soli OX=522319 GN=folE2 PE=3 SV=1
MYTQENTARLLPDVAVHAQPHLAGALDWVGMDGIEVPVRFDGGDGEVVRASARVGAFVNLNRPDKRGIHMSRLYLQVEEALSSQTLSAQSLHDLLRGFLGSHKDLSDRACLSIRFEHLVRRPALRSANSGWRAYPVCIEASLTGDEFLLEFGTEVIYSSTCPASAALSRQLIQDQFGKDFAPGEPLDHAAVLAWLGSERGIVATPHAQRSVARLRVRMNTGAPFNLIHLIDSVEHALGTPVQTAVKREDEQAFALANGGNLMFCEDAARRIQKALDADAALADFHVRVEHQESLHPHDAVAYASKGVEGGFGSEKR

SEQ ID NO: 7717 - protein, 300 aa, Dyella sp.
  REGION 1..300: note = tr|A0A370X0X3|A0A370X0X3_9GAMM GTP cyclohydrolase FolE2 OS=Dyella sp. 4MSK11 OX=1927960 GN=folE2 PE=3 SV=1
MPDVAIQSQLHVAGALDWVGMDGIEVPVRFDAGDGDVQRASAQVGAFVNLTRPDRRGIHMSRLYLLVDQYLSTRTVDGAMLESLLRAFLESHKDLADRARISIRFDQLVRRAALRSDNSGWRAYPVSIEASLCADGFRMELGTEVVYSSTCPASAALSRQLIQEQFAKDFDAGKPVDHAAVLAWLGSEKGIVATPHAQRSVARLLVRFVDGAPLNLIGLLDRVEHALGTPVQTAVKREDEQAFALANGSNLMFCEDAARRIQRALDADSGIADFHVRLEHQESLHPHDAVAYTSKGDSAR

SEQ ID NO: 7718 - protein, 198 aa, Dyella sp.
  REGION 1..198: note = tr|A0A1G7VTZ2|A0A1G7VTZ2_9GAMM GTP cyclohydrolase 1; OS = Dyella sp. 333MFSha OX=1798240 GN=folE PE=3 SV=1
MSDDAKSRPVSREQAEEAVRTLLLWAGEDPNREGLLDTPKRVVKAYGDWFKGYDEDPAEYLRRTFEEVAGYDEMIVLRDIEFESHCEHHMAPIIGRAHVGYVPTDRVVGISKLARVVDGFARRFQVQEKLTAQIAHCIEDTLRPRGVGVVIDASHECMTTRGVHKRGVSMITSQMLGSFREDPRTRGEFLRFVGVDRR

SEQ ID NO: 7719 - protein, 317 aa, Dyella thiooxydans
  REGION 1..317: note = tr|A0A160N0W0|A0A160N0W0_9GAMM GTP cyclohydrolase FolE2 OS=Dyella thiooxydans OX=445710 GN=folE2 PE=3 SV=1
MHSHENTARLMPDVAHQAQPHLAGALDWVGMDGIEVPVRFDVGDGEVQRASAQVGAFVNLTRPDQRGIHMSRLYLLVDRHLGGSEPLSAKGLEGLLQAFLESHKDLSDRARLSIRFDALVRRAALRSGNSGWRSYPVSVEASLGPDGFALELGTEVVYSSTCPASAALSRQLIQERFTQDFAADQPIDHAAVVAWLGSEQGIVATPHAQRSVARLLVRLNDGVSFDLLDTLDRVEGALGTPVQTAVKREDEQAFALANGGNLMFCEDAARRIQRALETDDRLADFHVRVEHQESLHPHDAVAYASKGVPGGFGSGPR

SEQ ID NO: 7720 - protein, 199 aa, Dyella thiooxydans
  REGION 1..199: note = tr|A0A160N572|A0A160N572_9GAMM GTP cyclohydrolase 1; OS = Dyella thiooxydans OX=445710 GN=folE PE=3 SV=1
MSDQSTRHDVTREQAEEAVRTLLRWAGDDPSREGLLDTPKRVVKAYGDWFSGYVEDPADYLKRTFEEVEGYDEMVVLRDIEFESHCEHHMAPIIGRAHVGYLPTNRVVGISKLARVVDGYARRFQVQEKMTAQIAQCINETLQPRGVAVVIEASHECMTTRGVHKRGVSMVTSQMLGVFREDPRTRAEILQFLGIQRTC

SEQ ID NO: 7721 - protein, 192 aa, unidentified
  source 1..192: note = Dysgonamonadaceae bacterium
  REGION 1..192: note = tr|A0A2N4SB00|A0A2N4SB00_9BACT GTP cyclohydrolase 1; OS = Dysgonamonadaceae bacterium OX=2065189 GN=folE PE=3 SV=1
MSLEETAEKRKEAISHFISEIIPMIGEDVNREGLIKTPDRVAKALLYLTKGYHQNPEEILRSALFKENYRQMVIVKDIDLFSLCEHHMLPFFGKAHVAYIPNGYVTGLSKIARVVDVFARRLQVQERLTTQIKECIQNTLNPLGVMVVIEAQHMCMQMRGVEKQNSITTTSDFTGVFKEQKTREEFIALIRK

SEQ ID NO: 7722 - protein, 191 aa, unidentified
  source 1..191: note = Dysgonomonas alginatilytica
  REGION 1..191: note = tr|A0A2V3PPC8|A0A2V3PPC8_9BACT GTP cyclohydrolase 1; OS = Dysgonomonas alginatilytica OX=1605892 GN=folE PE=3 SV=1
MSSINNEENNITSLANHYKAVIDLLGEDAGREGLLDTPKRVAKAMTFLTKGYNENPEEILRKALFKEDYSQMVIVKDIDFYSLCEHHMLPFWGKAHVAYIPNGYITGLSKIPRVVEVFARRLQVQERLTTQIKDCIQKTLNPMGVMVVIEAQHMCMQMRGVEKQNSTTTTSDFTGVFNTAKTREEFINLIR

SEQ ID NO: 7723 - protein, 191 aa, Dysgonomonas capnocytophagoides
  REGION 1..191: note = tr|A0A4Y8L6B5|A0A4Y8L6B5_9BACT GTP cyclohydrolase 1; OS = Dysgonomonas capnocytophagoides OX=45254 GN=folE PE=3; SV = 1
MPSTDSKDQKTSILAENYKGIISLLGEDVSREGLLDTPERVAKAMQFLTSGYTEDPQEVLRKALFKEDYKQMVIVKDIDFYSLCEHHMLPFWGKAHVAYIPNGYITGLSKIPRIVDIFSRRLQVQERLTTQIKDCLQETLNPLGVMVVIEAQHMCMQMRGVQKQNSTTTTSDFTGAFNQAKTREEFINLIK

SEQ ID NO: 7724 - protein, 187 aa, Dysgonomonas gadei
  REGION 1..187: note = tr|F5J429|F5J429_9BACT GTP cyclohydrolase 1; OS = Dysgonomonas gadei ATCC BAA-286 OX=742766 GN=folE PE=3; SV = 1
MQEEQNIELLAKHYKEIISLLGENADREGLLSTPVRVAKAMQFLTKGYHEDPEEILRKAFFKEDYRQMVIVKDIDFYSMCEHHMLPFWGKAHVAYIPNGYITGLSKIARVVDVFARRLQVQERMTLQIKECIQKTLNPLGVMVVIEAQHMCMQMRGVEKQNSTTTTSDFTGVFNQAKTREEFINLIR

SEQ ID NO: 7725 - protein, 195 aa, unidentified
  source 1..195: note = Dysgonomonas macrotermitis
  REGION 1..195: note = tr|A0A1M5CBK7|A0A1M5CBK7_9BACT GTP cyclohydrolase 1; OS = Dysgonomonas macrotermitis OX=1346286 GN=folE PE=3 SV=1
MPSTDSTIANQTTSILADNYKNIIRLLGEDTDREGLLDTPERVAKAMQFLTSGYSQNPEEILQKALFKEDYKQMVIVKDIDFYSLCEHHMLPFWGKAHVAYIPNGYITGLSKIPRIVDVFSRRLQVQERLTTQIKDCLQNTLNPLGVMVVIEAQHMCMQMRGVQKQNSTTTTSDFTGAFNQAKTREEFINLIRQR

SEQ ID NO: 7726 - protein, 187 aa, Dysgonomonas mossii
  REGION 1..187: note = tr|F8WWV8|F8WWV8_9BACT GTP cyclohydrolase 1; OS = Dysgonomonas mossii DSM 22836 OX=742767 GN=folE PE=3; SV = 1
MQEENKMNLLEEHYKNVISLLGEDPEREGLLMTPHRVAKAMRFLTKGYSESPEAILNKALFKEDYRQMVIVKDIDFYSLCEHHMLPFWGKAHVAYIPNGYITGLSKIARVVDVFARRLQVQERMTLQIKECIQQTLNPLGVMVVIEAQHMCMQMRGVEKQNSTTTTSDFTGVFNQAKTREEFINLIR

SEQ ID NO: 7727 - protein, 187 aa, Dysgonomonas mossii
  REGION 1..187: note = tr|A0A4Y9IJ89|A0A4Y9IJ89_9BACT GTP cyclohydrolase 1; OS = Dysgonomonas mossii OX=163665 GN=folE PE=3 SV=1
MQEENKMNLLEEHYKNIISLLGEDPEREGLLMTPHRVAKAMRFLTKGYSESPEAILNKALFKEDYRQMVIVKDIDFYSLCEHHMLPFWGKAHVAYIPNGYITGLSKIARVVDVFARRLQVQERMTLQIKECIQQTLNPLGVMVVIEAQHMCMQMRGVEKQNSTTTTSDFTGVFNQAKTREEFINLIR

SEQ ID NO: 7728 - protein, 187 aa, Dysgonomonas sp.; identical to SEQ ID NO: 7727
  REGION 1..187: note = tr|A0A1M3L066|A0A1M3L066_9BACT GTP cyclohydrolase 1; OS = Dysgonomonas sp. 37-18 OX=1895907 GN=folE PE=3 SV=1

SEQ ID NO: 7729 - protein, 192 aa, Dysgonomonas sp.
  REGION 1..192: note = tr|A0A3D3TEP3|A0A3D3TEP3_9BACT GTP cyclohydrolase 1; OS = Dysgonomonas sp. OX=1891233 GN=folE PE=3 SV=1
MSSIQNEEKKLPQLITHYKEIIELLGEDSGREGLLDTPMRVAKAMQFLTKGYNEDPEEILRKALFKEDYRQMVIVKDIDFYSLCEHHMLPFWGKAHVAYIPNGYITGLSKIPRVVDVFARRLQVQERMTTEIKKCIQKTLNPLGVMVVLEAQHMCMQMRGVQKQNSVTTTSDFTGVFNQAKTREEFISLIQK

SEQ ID NO: 7730 - protein, 232 aa, Echinicola sp.
  REGION 1..232: note = tr|A0A514CHU3|A0A514CHU3_9BACT GTP cyclohydrolase 1; OS = Echinicola sp. LN3S3 OX=2591634 GN=folE PE=3 SV=1
MKQKGIMLNTTGIDIDRSIDEIGDEHIGTSHETPLREDAFEMDDELKMELIEKHFKDIMHVLGLDLTDDSLKGTPRRVAKMFVQEVFSGLDPKNKPEVKLFENKYKYSEMLVEKDITFFSHCEHHFVPIYGKAHVAYISNGNVIGLSKINRIVQYFAKRPQVQERLTVQIGNELKEILGTEDVAVVIDAHHMCVSSRGVKDVNSKTVTSFYSGKFDKEKATRKEFMQYVTMK

SEQ ID NO: 7731 - protein, 232 aa, unidentified
  source 1..232: note = Echinicola strongylocentroti
  REGION 1..232: note = tr|A0A2Z4ILH2|A0A2Z4ILH2_9BACT GTP cyclohydrolase 1; OS = Echinicola strongylocentroti OX=1795355 GN=folE PE=3; SV = 1
MKQKGIMLNTTGIKIDSSIDEMGDEHIGTSHETPLREDAFEMDDELKMELIEKHFKDIMHVLGLDLTDDSLSGTPRRVAKMFVQEVFSGLDPKNKPEVKLFENKYKYSEMLVEKDITFFSHCEHHFVPIYGKAHVAYISNGNVIGLSKINRIVQYFAKRPQVQERLTMQIGNELKEILGTEDVAVVIDAHHMCVSSRGVQDVNSKTVTSFYSGKFDKDDTTRKEFMQYIALK

SEQ ID NO: 7732 - protein, 232 aa, Echinicola vietnamensis
  REGION 1..232: note = tr|L0FYL1|L0FYL1_ECHVK GTP cyclohydrolase 1; OS = Echinicola vietnamensis (strain DSM 17526 / LMG 23754 / KMM 6221) OX=926556 GN=folE PE=3 SV=1
MKQKGIMLNTTGIDIDRSIDEIGDEHIGTSHETPLREDAFEMDDELKMELIEKHFKDIMHVLGLDLTDDSLKGTPRRVAKMFVQEVFSGLDPKNKPEIKLFENKYKYSEMLVEKDITFFSHCEHHFVPIYGKAHVAYISNGNVIGLSKINRIVQYFAKRPQVQERLTMQIGNELKEILGTDDVAVVIDAHHMCVSSRGVKDVNSKTVTSFYSGKFDKDDSTRKEFMQYVTMQ

SEQ ID NO: 7733 - protein, 270 aa, Ectothiorhodosinus mongolicus
  REGION 1..270: note = tr|A0A1R3W077|A0A1R3W077_9GAMM GTP cyclohydrolase FolE2 OS=Ectothiorhodosinus mongolicus OX=233100 GN=folE2; PE = 3 SV=1
MNSTAATVVTNMPDVQSSADTRQIPINKVGIKDILHPVRVKDRSGGEQHTVARFSMYVNLPQDFKGTHMSRFVDILNSHEREITVETFKLMLQEVAERLEAESGHIEMCFPYFINKAAPVSGVCSLLDYEVSFIGEVKDGEAVMRIKVLVPVTTLCPCSKGISQYGAHNQRSHVTVDARIADFIWVEEIIDMVEAEASCELYGLLKRPDEKFVTERAYDNPKFVEDLVRDVALRLNNEERIRAYTVTSENFESIHNHSAYALIETDKDLA

SEQ ID NO: 7734 - protein, 207 aa, Ectothiorhodospira haloalkaliphila
  REGION 1..207: note = tr|W8L4M8|W8L4M8_9GAMM GTP cyclohydrolase 1; OS = Ectothiorhodospira haloalkaliphila OX=421628 GN=folE; PE = 3 SV=1
MTKTVTKIAGGKEPVEAHEPMSADELAEHYRLMLEGLGEDPGREGLQGTPLRAAKAMQYLTSGYHQSLEELVNGALFASDSDEMVLVKDIELYSLCEHHLLPIIGKCHVAYIPDGKVIGLSKIARIVDMFARRLQIQESLTREIAQAVMDVTGARGVGVVAEARHMCMMMRGVEKQNSAMLTSVMLGNFRDDARTRSEFLELIRRSH

SEQ ID NO: 7735 - protein, 278 aa, Ectothiorhodospira haloalkaliphila
  REGION 1..278: note = tr|W8KMV7|W8KMV7_9GAMM GTP cyclohydrolase FolE2; OS = Ectothiorhodospira haloalkaliphila OX=421628 GN=folE2; PE = 3 SV=1
MSTIVPKLITPAIPDVQASADTREIPINKVGIKDIRHPVRVTDRTGADQHTVAHFSMYVNLPHDFKGTHMSRFVDILNAHEREITVETFKLMLHEMAERLEAAAGHIEMNFPYFVNKPAPVTGVCSLMDYDVTFIGVIQDGKPQMNIQVLVPVTSLCPCSKGISEYGAHNQRSHVTVNVRIKDFMWVEELIDLVEKEASCELYGLLKRPDEKYVTERAYDNPKFVEDLVRDIAVRLNRDERVSAYSVSSENFESIHNHSAYALIERDKELEALALAKV

SEQ ID NO: 7736 - protein, 205 aa, Ectothiorhodospira magna
  REGION 1..205: note = tr|A0A1H8Z1H0|A0A1H8Z1H0_9GAMM GTP cyclohydrolase 1; OS = Ectothiorhodospira magna OX=867345 GN=folE PE=3 SV=1
MKPLGQITRDGAANASPRLMSVEALAEHYRAMLTGLGENPEREGLKGTPLRAAKAMQYLTQGYHQSLDELVNGALFASSSDEMVLVKDIELYSLCEHHLLPIIGKCHVAYLPNGKVLGLSKVARIVDMFARRLQIQESMTREIAQAIMDVTQARGVAVVAEARHMCMMMRGVEKQNSSMVTSVMLGAFREDARTRSEFMELIRRG

SEQ ID NO: 7737 - protein, 272 aa, Ectothiorhodospira magna
  REGION 1..272: note = tr|A0A1H9FFD1|A0A1H9FFD1_9GAMM GTP cyclohydrolase FolE2 OS=Ectothiorhodospira magna OX=867345 GN=folE2 PE=3; SV = 1
MSTTVSPARTLAIPDVQSSADTRRIPINKVGIKDIRHPVRVRDRTGKDQHTVASFNMYVNLPQDFKGTHMSRFVEILNTHEYEITVDSFKTMLHEMAERLEAATGHIEMRFPFFVNKAAPVSGVQSLMDYEVTFIGKISDGRPSMNIQVVVPVTSLCPCSKGISEYGAHNQRSHVTVNAQVEQFVWVEELIDLVESQASCELYGLLKRPDEKYVTERAYDNPKFVEDLVRDIAICLNDDARISAYSVSSENFESIHNHSAYALIERDKTAER

SEQ ID NO: 7738 - protein, 278 aa, Ectothiorhodospira marina
  REGION 1..278: note = tr|A0A1H7NLH2|A0A1H7NLH2_9GAMM GTP cyclohydrolase FolE2 OS=Ectothiorhodospira marina OX=1396821 GN=folE2; PE = 3 SV=1
MSTIVPKLITPAIPDVQASADTREIPINKVGIKDIRHPVRVTDRTGNDQHTVARFSMYVNLPHNFKGTHMSRFVDILNAHEREITVETFKLMLHEMAERLEAAAGHLEMNFPYFVNKPAPVTGVCSLMDYDVSFIGVIQDGKPQMNIQVLVPVTSLCPCSKGISEYGAHNQRSHVTVNVRIKDFMWVEELIDLVEKEASCELYGLLKRPDEKYVTERAYDNPKFVEDLVRDIAVRLNQDERISAYSVSSENFESIHNHSAYALIERDKELEALALAGA

SEQ ID NO: 7739 - protein, 207 aa, Ectothiorhodospira marina
  REGION 1..207: note = tr|A0A1H7F3Y6|A0A1H7F3Y6_9GAMM GTP cyclohydrolase 1; OS = Ectothiorhodospira marina OX=1396821 GN=folE PE=3 SV=1
MTKTVAKIAGGEDPVEADASLSADELAEHYRLILAGLGEDPGREGLKGTPLRAAKAMQYLTSGYHQSLDELVNGALFTSDSDEMVLVKDIELYSICEHHLLPIIGKCHVAYIPDGKVIGLSKIARIVDMFARRLQIQESLTREIAQAVMDVTGARGVGVVAEARHMCMMMRGVEKQNSAMLTSVMLGNFRDDARTRAEFLDLIRRDR

SEQ ID NO: 7740 - protein, 275 aa, Ectothiorhodospira mobilis
  REGION 1..275: note = tr|A0A1I4SKY7|A0A1I4SKY7_ECTMO GTP cyclohydrolase FolE2 OS=Ectothiorhodospira mobilis OX=195064 GN=folE2; PE = 3 SV=1
MSTLVPKVIQSAIPDVQSSADTRRIPINKVGIKDIRHPVRVRDRSGGEQHTVARFAMYVNLPHDFKGTHMSRFVEILNAHEREITVETFKLMLHEVARRLEAQAGHIEMSFPYFVNKPAPVSGVCSLMDYDVTFIGEIRDGQPQLIIRVLVPVTSLCPCSKGISDYGAHNQRSHVTVEARVRDFVWVEELIDLVEEEASCELWGLLKRPDEKYVTEHAYDNPKFVEDLVRDIAVRLNADDRIAAYSVASENFESIHNHSAYALIERDKESDPPAA

SEQ ID NO: 7741 - protein, 206 aa, Ectothiorhodospira mobilis
  REGION 1..206: note = tr|A0A1I4Q4N0|A0A1I4Q4N0_ECTMO GTP cyclohydrolase 1; OS = Ectothiorhodospira mobilis OX=195064 GN=folE PE=3 SV=1
MINSAARIAGDEDAAAGDGALMPTEELAGLYRRVLEGLGEDPQREGLQGTPLRAARAMQFLTGGYHQSLETLVNGALFTTDSDEMVLVKDIELYSLCEHHLLPIIGKCHVAYIPDGRVLGLSKIARIVDMFARRLQIQESLTRQIAEAVMQVTGARGVGVVAEARHMCMMMRGVEKQGSAMITSVMLGNFREDARTRAEFMDLVRG

SEQ ID NO: 7742 - protein, 278 aa, Ectothiorhodospira sp.
  REGION 1..278: note = tr|A0A161HF76|A0A161HF76_9GAMM GTP cyclohydrolase FolE2 OS=Ectothiorhodospira sp. BSL-9 OX=1442136 GN=folE2; PE = 3 SV=1
MSTIVPKLITPAIPDVQASADTREIPINKVGIKDIRHPVRVTDRTGADQHTVARFSMYVNLPHDFKGTHMSRFVDILNAHEREITVETFKLMLHEMAERLEAAAGHIEMNFPYFVNKPAPVTGVCSLMDYDVTFIGVIQDGKPQMNIQVLVPVTSLCPCSKGISEYGAHNQRSHVTVNVRIKDFMWVEELIDLVEKEASCELYGLLKRPDEKYVTERAYDNPKFVEDLVRDIAVRLNRDERVSAYSVSSENFESIHNHSAYALIERDKELEALALAKV

SEQ ID NO: 7743 - protein, 187 aa, Ectothiorhodospira sp.
  REGION 1..187: note = tr|A0A167BJM9|A0A167BJM9_9GAMM GTP cyclohydrolase 1; OS = Ectothiorhodospira sp. BSL-9 OX=1442136 GN=folE PE=3; SV = 1
MSADELAEHYRLMLEGLGEDPGREGLQGTPLRAAKAMQYLTSGYHQSLEELVNGALFASDSDEMVLVKDIELYSLCEHHLLPIIGKCHVAYIPDGKVIGLSKIARIVDMFARRLQIQESLTREIAQAVMDVTGARGVGVVAEARHMCMMMRGVEKQNSAMLTSVMLGNFRDDARTRSEFLELIRRSH

SEQ ID NO: 7744 - protein, 269 aa, unidentified
  source 1..269: note = Ectothiorhodospiraceae bacterium
  REGION 1..269: note = tr|A0A2A4X473|A0A2A4X473_9GAMM GTP cyclohydrolase FolE2 OS=Ectothiorhodospiraceae bacterium OX=2026737; GN = folE2 PE=3 SV=1
MTTTTNTTTNDIADVQNTEDTRKIAINKVGIKDIRHPVRVRDRTGGDQHTIANFNMYVNLPHNFKGTHMSRFVEILNQHEREISVQSFKDMLVEMTDRLEAESGHVEMSFPYFVNKAAPVSGVKSLLDYDVTFIGAIEKGNHETILKVVVPVTSLCPCSKKISERGAHNQRSHVTLTVKTQEFVWIEDLIDIVENIASCELYGLLKRPDEKYVTERAYDNPKFVEDMVRDIATALNDDQRISAYIVESENFESIHNHSAYALIEKNMGT

SEQ ID NO: 7745 - protein, 208 aa, unidentified
  source 1..208: note = Ectothiorhodospiraceae bacterium
  REGION 1..208: note = tr|A0A2E0UIX4|A0A2E0UIX4_9GAMM GTP cyclohydrolase 1; OS = Ectothiorhodospiraceae bacterium OX=2026737 GN=folE; PE = 3 SV=1
MSRIAEDFELLERMKNNGQAERMEAYVRGILEEVGEDPERSGLLRTPKRVAAAYAFLTQGYHTDLEKVINDAIFDEDYNEMVIVKDIDFYSLCEHHMLPFFGRCHVAYIPNGKIIGLSKLPRVVDVFARRLQVQERMTQQIAETLMEYLSPLGVAVVCEGHHMCMMMRGVEKQNSITTTSAMLGEFSTNPNSRDEFLRLINTSYTSRG

SEQ ID NO: 7746 - protein, 189 aa, unidentified
  source 1..189: note = Edaphobacillus lindanitolerans
  REGION 1..189: note = tr|A0A1U7PL29|A0A1U7PL29_9BACI GTP cyclohydrolase 1; OS = Edaphobacillus lindanitolerans OX=550447 GN=folE PE=3; SV = 1
MANVDHAKIREAVTMILEAIGEDPSREGLIDTPKRVANMYGEVFSGIDQDPREYFKTVFNEEHDELVIVKDIHFQSMCEHHLLPFYGKAHVAYIPRDGAIAGLSKLARAVESVSRRPQLQERITATVADALVDMLNPVGVYVVVEAEHMCMTMRGIRKPGSKTVTSVARGIFEDDAAKRAEIISLVKMS

SEQ ID NO: 7747 - protein, 201 aa, Edaphobacter aggregans
  REGION 1..201: note = tr|A0A428ME91|A0A428ME91_9BACT GTP cyclohydrolase 1; OS = Edaphobacter aggregans OX=570835 GN=folE PE=3 SV=1
MASTQATIETSLEAVSTQDLYREMLTRIGEDPTRDGLLRTPERMEKSMAFLTRGYTMNVTDVLHDALFDVDYDEMVIVKDIEFFSMCEHHLLPFFGKAHIAYVPNGKVIGLSKIPRLVDVFARRLQVQERLTTQVGEAITEAINPQGVAVILEAQHLCMMMRGVEKQHSSTVTSAMLGVFKTQLQTRNEFLSLVRRQGSSF

SEQ ID NO: 7748 - protein, 202 aa, unidentified
  source 1..202: note = Edaphobacter dinghuensis
  REGION 1..202: note = tr|A0A495BQ13|A0A495BQ13_9BACT GTP cyclohydrolase 1; OS = Edaphobacter dinghuensis OX=1560005 GN=folE PE=3 SV=1
MASTSATLDPASLETVSTQELYRELLRRTGEDPERDGLLKTPERMEKSMAFLTKGYTMDITEVLHDALFDVDYDEMVIVKDIEFFSQCEHHLLPFFGKAHIAYVPNGKVIGLSKIPRLVDVFARRLQVQERLTKQVSEAIQEAINPQGVAVILEAQHLCMMMRGVEKQHSSTVTSAMLGVFKTQLQTRNEFLSLVRRQGSGF

SEQ ID NO: 7749 - protein, 202 aa, Edaphobacter modestus
  REGION 1..202: note = tr|A0A4Q7YRJ5|A0A4Q7YRJ5_9BACT GTP cyclohydrolase 1; OS = Edaphobacter modestus OX=388466 GN=folE PE=3 SV=1
MARTNNVLETTSLSEFSTQDLYREILTRIGEDPNRDGLLRTPERMEKAMAFLTRGYKMDITEVLHAALFDVDYDEMVIVKDVEFFSMCEHHLLPFFGKAHVAYVPNGKVIGLSKIPRLVDVFARRLQVQERLTRQIGEAITDAIDPQGVAVILEAQHLCMMMRGVEKQHSLTVTSAMLGVFKTQLQTRNEFLSLVRRNGGSF

SEQ ID NO: 7750 - protein, 220 aa, unidentified
  source 1..220: note = Edwardsiella anguillarum
  REGION 1..220: note = tr|A0A076LVJ4|A0A076LVJ4_9GAMM GTP cyclohydrolase 1; OS = Edwardsiella anguillarum ET080813 OX=667120 GN=folE; PE = 3 SV=1
MSSLSKEAALVHEALLAHGLETPLRGEPLARDTRKAQIEAHMTEVMRLLNLDLSDDSLTETPSRIAKMYVDEIFSGLDYANFPKITIIENKMHVDEMVTVRDITLTSTCEHHFVTIDGKATVAYIPKEGVIGLSKINRIVRFFAQRPQVQERLTQQILVALQTLLGTKNVAVSIDAVHYCVKARGVRDATSATTTTSLGGLFKTSQNSRQEFLRAVRHHV

SEQ ID NO: 7751 - protein, 220 aa, Edwardsiella hoshinae
  REGION 1..220: note = tr|A0A376DI32|A0A376DI32_9GAMM GTP cyclohydrolase 1; OS = Edwardsiella hoshinae OX=93378 GN=folE PE=3 SV=1
MSSLSKEAALVHEALVARGLETPLRGELLARDTRKTQIEAHMTEVMKLLNLDLSDDSLAETPQRIAKMYVDEIFSGLDYANFPKITIIENKMHVDEMVTVRDITLTSTCEHHFVTIDGKATVAYIPKDGVIGLSKINRIVRFFAQRPQVQERLTQQILVALQTLLGTKNVAVSIDAVHYCVKARGVRDATSATTTTSLGGLFKTSQNTRQEFLRAVRHHA

SEQ ID NO: 7752 - protein, 220 aa, Edwardsiella ictaluri
  REGION 1..220: note = sp|C5BCL9|GCH1_EDWI9 GTP cyclohydrolase 1; OS = Edwardsiella ictaluri (strain 93-146) OX=634503 GN=folE; PE = 3 SV=1
MSSLSKEAALVHEALLARGLETPLRGEPLARDTRKAQIEAHMTEVMRLLNLDLSDDSLVETPSRIAKMYVDEIFSGLDYANFPKITIIENKMDVDEMVTVRDITLTSTCEHHFVTIDGKATVAYIPKERVIGLSKINRIVRFFAQRPQVQERLTQQILVALQTLLGTKNVAVSIDAVHYCVKARGVRDATSATTTTSLGGLFKTSQNTRQEFLRAVRHHV

SEQ ID NO: 7753 - protein, 220 aa, unidentified
  source 1..220: note = Edwardsiella piscicida
  REGION 1..220: note = tr|A0A411GZ97|A0A411GZ97_9GAMM GTP cyclohydrolase 1; OS = Edwardsiella piscicida OX=1263550 GN=folE PE=3 SV=1
MSSLSKEAALVHEALLARGLETPLRGEPLARDTRKAQIEAHMTEVMRLLNLDLSDDSLAETPSRIAKMYVDEIFSGLDYANFPKITIIENKMHVDEMVTVRDITLTSTCEHHFVTIDGKATVAYIPKEGVIGLSKINRIVRFFAQRPQVQERLTQQILVALQTLLGTKNVAVSIDAVHYCVKARGVRDATSATTTTSLGGLFKTSQNTRQEFLRAVRHHV

SEQ ID NO: 7754 - protein, 220 aa, unidentified
  source 1..220: note = Edwardsiella piscicida
  REGION 1..220: note = tr|A0A034T1S3|A0A034T1S3_9GAMM GTP cyclohydrolase 1; OS = Edwardsiella piscicida OX=1263550 GN=folE PE=3 SV=1
MSSLSKEAALVHEALLAHGLETPLRGEPLARDTRKAQIEAHMTEVMRLLNLDLSDDSLTETPSRIAKMYVDEIFSGLDYANFPKITIIENKMHVDEMVTVRDITLTSTCEHHFVTIDGKATVAYIPKEGVIGLSKINRIVRFFAQRPQVQERLTQQILVALQTLLGTKNVAVSIDAVHYCVKARGVRDATSATTTTSLGGLFKTSQNTRQEFLRAVRHHV

SEQ ID NO: 7755 - protein, 220 aa, Edwardsiella tarda
  REGION 1..220: note = tr|D4F3H6|D4F3H6_EDWTA GTP cyclohydrolase 1; OS = Edwardsiella tarda ATCC 23685 OX=500638 GN=folE PE=3; SV = 1
MSSLSKEAALVHEALVARGLETPLRGELLARDTRKTQIEAHMTEVMKLLNLDLSDDSLAETPQRIAKMYVDEIFSGLDYANFPKITIIENKMHVDEMVTVRDITLTSTCEHHFVTIDGKATVAYIPKEGVIGLSKINRIVRFFAQRPQVQERLTQQILVALQTLLGTKNVAVSIDAVHYCVKARGVRDATSATTTTSLGGLFKTSQNTRQEFLRAVRHHA

SEQ ID NO: 7756 - protein, 220 aa, Edwardsiella tarda; identical to SEQ ID NO: 7753
  REGION 1..220: note = tr|D0ZFG8|D0ZFG8_EDWTE GTP cyclohydrolase 1; OS = Edwardsiella tarda (strain EIB202) OX=498217 GN=folE; PE = 3 SV=1

SEQ ID NO: 7757 - protein, 189 aa, unidentified
  source 1..189: note = Effusibacillus lacus
  REGION 1..189: note = tr|A0A292YNW2|A0A292YNW2_9BACL GTP cyclohydrolase 1; OS = Effusibacillus lacus OX=1348429 GN=folE PE=3 SV=1
MSFDREKLEEAVRMILVAIGEDPDREGLLDTPKRVARMYEEVFSGLHKNPEDELSAIFNELHEEVVLVRDIPFYSMCEHHLVPFFGKAHVAYLPKNGRVTGLSKLARLVETVARRPQLQERITSTVADTLINQLDAHGVIVMIEAEHMCMSMRGVNKPGSRTITTAVRGIYQKDKDAREEVFSLIRQCQ

SEQ ID NO: 7758 - protein, 189 aa, Eggerthella lenta
  REGION 1..189: note = tr|C8WJB3|C8WJB3_EGGLE GTP cyclohydrolase 1; OS = Eggerthella lenta (strain ATCC 25559 / DSM 2243 / JCM 9979 / NCTC 11813 / VPI 0255) OX=479437 GN=folE PE=3 SV=1
MDRAKIEEGVRLILEGVGEDPGREGLVKTPERVAKMYEEVFAGLTEDPAQHFETTFDEHHEEMVLVRDIPFYSMCEHHLAPFFGVAHVAYIPASDGRICGLSKLARLVDAFAKRPQVQERLTSQIADTLIEQLHPQGVIVVLEAEHMCMSMRGVKKPGTTTTTSAVRGAFEKSQATRAEALSLIFARRN

SEQ ID NO: 7759 - protein, 189 aa, Eggerthella lenta; identical to SEQ ID NO: 7758
  REGION 1..189: note = tr|A0A369MZ25|A0A369MZ25_EGGLN GTP cyclohydrolase 1; OS = Eggerthella lenta OX=84112 GN=folE PE=3 SV=1

SEQ ID NO: 7760 - protein, 189 aa, Eggerthella sinensis
  REGION 1..189: note = tr|A0A3N0IWS7|A0A3N0IWS7_9ACTN GTP cyclohydrolase 1; OS = Eggerthella sinensis OX=242230 GN=folE PE=3 SV=1
MDRAKIEQGVRLILEGVGEDPEREGLVKTPERVAKMYEEVFAGLTENPAEHFETTFDEHHEEMVLVRDIPFYSMCEHHLVPFFGVAHIAYIPAANGRICGLSKLARLVDAFAKRPQVQERLTSQIADTLIEQLHPQGVIVVLEAEHMCMSMRGVKKPGTTTTTSAVRGAFEKSQATRAEALSLIFARRK

SEQ ID NO: 7761 - protein, 188 aa, Eggerthella sp.
  REGION 1..188: note = tr|R7B1H0|R7B1H0_9ACTN GTP cyclohydrolase 1; OS = Eggerthella sp. CAG:298 OX=1262876 GN=folE PE=3 SV=1
MAMDMDKIEEGVKLILEGIGEDPQREGLQKTPERVARMYAECFAGLEEDPAVHFETTFDEHSQELILLRDIPFFSMCEHHLAPFYGTANIAYIPAADGRICGLSKLARLVEVFARRPQVQERLTSQIADTLMRELAPQGVVVVIKAEHMCMNMRGVKKPGSKTVTRAVRGLFEQDATARADALALMGE

SEQ ID NO: 7762 - protein, 201 aa, Eggerthella sp.
  REGION 1..201: note = tr|R5FN03|R5FN03_9ACTN GTP cyclohydrolase 1; OS = Eggerthella sp. CAG:1427 OX=1262874 GN=folE PE=3 SV=1
MSEHISEPLQGSMDLEKIEAGVRMILEGIGEDPDREGLQKTPSRVARMYEEVFAGLYEDPAVHFETTFDEHHEELVIVHDIPFYSMCEHHLVPFFGKAHVAYIPAKSGRICGISKLARLVDAYARRPQVQERLTSQVADTLMEQLNPQGVIVIMEAEHLCMSMRGVKKPGSKTTTSAVRGIFKSSASAATRAEALSLLMGR

SEQ ID NO: 7763 - protein, 193 aa, unidentified
  source 1..193: note = Eggerthellaceae bacterium
  REGION 1..193: note = tr|A0A3C1DDQ5|A0A3C1DDQ5_9ACTN GTP cyclohydrolase 1; OS = Eggerthellaceae bacterium OX=1972561 GN=folE PE=3 SV=1
MSESGYGKLDKARAEAAIREFLIAIGEDPEREGLLETPARVARACEEIFAGLQEDPAKHLRKQFHEAEHEEMVIVRDIPFTSMCEHHLLPFTGRAHVAYIPRKGRITGLSKLARCVEGYARRPQVQERMTSQIADAIMTALEPLGAFVVVEAEHMCMTARGIRKPGSVTVTSALRGSFQDDEKTRAEALSLFR

SEQ ID NO: 7764 - protein, 231 aa, unidentified
  source 1..231: note = Egibacter rhizosphaerae
  REGION 1..231: note = tr|A0A411YDQ4|A0A411YDQ4_9ACTN GTP cyclohydrolase 1; OS = Egibacter rhizosphaerae OX=1670831 GN=folE PE=3 SV=1
MSDVTTGGAPEGNGAGADGPGSSHEPVRTLTGVPPGRPFDHERIARGVREIFAGLGLDDDDPRLAETPERVARMYDEIFAGLLVEPAEVLDVVFEEGHDELVLIKDIPFASTCEHHLVPFVGRAHVGYIPNERGQVTGLSKLGRLVDLVAKRPSLQERITTTVADTLDRVLEPRGVLVIVEAEHLCMSMRGIRKPGAMTVTSAVRGIIREDAATRAEAMSLALGSNNRSMH

SEQ ID NO: 7765 - protein, 190 aa, Ehrlichia canis
  REGION 1..190: note = tr|Q3YS73|Q3YS73_EHRCJ GTP cyclohydrolase 1; OS = Ehrlichia canis (strain Jake) OX=269484 GN=folE PE=3; SV = 1
MENGKPSDSQAEEAINLLIRWIGDDPDRVGLTGTAKRVLNIYKKFFSGYQVDMLSMQDSVLLGENYDGMIIVKNTEFTSYCEHHIVPIKGKIDIGYIPDKLIFGLGKVIKLINCFTKRLQLQERLTMEIANALDYYLSPKGVIVSIEAVHDCVACCEEIDKNNLDLQTTCVIGIFKDNIDLRKEFFTNIG

SEQ ID NO: 7766 - protein, 190 aa, unidentified
  source 1..190: note = Ehrlichia cf.
  REGION 1..190: note = tr|A0A0F3ND41|A0A0F3ND41_9RICK GTP cyclohydrolase 1; OS = Ehrlichia cf. muris str. EmCRT OX=1359167 GN=folE PE=3; SV = 1
MKSNKPSDSEAEEAINLLIRWIGDDPNREGLVDTAKRVLNVYKGFFSGYKVDMLSIRGSVLFNEGYNDMVILKDTEFTSYCEHHILPMKGKISIGYIPDKLIFGVGKIVKLINCFTKRLQLQERLTMEIARAFNDYLLPKGAIVNVEAVHDCVACCKEKDKNNLKLQTMYAIGVFQDNMELRREFFANID

SEQ ID NO: 7767 - protein, 190 aa, Ehrlichia chaffeensis
  REGION 1..190: note = tr|Q2GGH3|Q2GGH3_EHRCR GTP cyclohydrolase 1; OS = Ehrlichia chaffeensis (strain ATCC CRL-10679 / Arkansas) OX=205920 GN=folE PE=3 SV=1
MRNGKPSDSEAEEAVNLLIRWIGDDPNREGLVNTAKRVLDVYKRFFSGYQVDIYSMQDLVLLNENYNDMVIFKNTEFTSYCEHHIVPMRGKISIGYVPDKLVFGVGKIVKLINCFTKRLQLQEKLTVEIANALDHCLAPKGIIVAVEAVHDCIVCCEEEDKHNLELQTTCAIGVFQDNMELRREFFSSIG

SEQ ID NO: 7768 - protein, 190 aa, unidentified
  source 1..190: note = Ehrlichia minasensis
  REGION 1..190: note = tr|A0A4Q6I6R2|A0A4Q6I6R2_9RICK GTP cyclohydrolase I FolE OS=Ehrlichia minasensis OX=1242993 GN=DRF75_00710; PE = 4 SV=1
MKNGKPSDSQAEEAINLLIRWIGDDPTRMELTGTAKRVLNIYKKFFSGYQVDVLSMQDTVLLAENYNGMIIVKNTEFTSYCEHHIVPIRGKIDIGYIPDKLIFGLGKVIKLINCFTKRLQLQERLTMEIANALDCYLSPKGVIVSIEAVHDCIACCEEIDKNNLDLQTTCVIGVFKDNMDLRKEFFTNIG

SEQ ID NO: 7769 - protein, 190 aa, Ehrlichia muris
  REGION 1..190: note = tr|V9R8N5|V9R8N5_9RICK GTP cyclohydrolase 1; OS = Ehrlichia muris AS145 OX=1423892 GN=folE PE=3 SV=1
MRSNKPSDSEAEEAINLLIRWIGDDPNRAGLVDTAKRVLNVYKGFFSGYKVDMLSIRGSVLFNEGYNDMVILKDTEFTSYCEHHIVPMKGKISIGYIPDKLIFGVGKIVKLINCFTKRLQLQERLTMEIAKALNDYLLPKGTIVNIEAVHDCVACYNEQDKNNLKLQTIYAIGVFQDNMELRREFFANID

SEQ ID NO: 7770 - protein, 94 aa, Ehrlichia ruminantium
  REGION 1..94: note = tr|A0A170STY5|A0A170STY5_EHRRU GTP cyclohydrolase 1 (Fragment) OS=Ehrlichia ruminantium OX=779 GN=folE PE=3; SV = 1
YVPDKVMFTIGQIIRLVNYFSKRLQVQERLTVNIAESINSYLVSKGVIVVINATHECVLCYEENSSDLLLQTSCALGIFQNNAELRREFFSSIN

SEQ ID NO: 7771 - protein, 190 aa, Ehrlichia ruminantium
  REGION 1..190: note = tr|Q5FH33|Q5FH33_EHRRG GTP cyclohydrolase 1; OS = Ehrlichia ruminantium (strain Gardel) OX=302409 GN=folE; PE = 3 SV=1
MKNNRKPSENEVEDAISLLIRWIGDDVDRPGLVGTPRRMLNAYKKFFIGYQDISLVIGGSVLPNEGYDSMITFKDIGFVSYCEHHIIPMRGKVNIGYVPDKVIFTIGQVIRLVNYFSKRLQVQERLTVDIAESINSYLVSKGVIVVINATHECVLCYEENNSDLLLQTSCALGIFQNNVELRREFFNSIN

SEQ ID NO: 7772 - protein, 190 aa, Ehrlichia sp.
  REGION 1..190: note = tr|X5GJ16|X5GJ16_9RICK GTP cyclohydrolase 1; OS = Ehrlichia sp. HF OX=391036 GN=folE PE=3 SV=1
MGSSKPSDSEAEEAVNLLIRWIGDDPNREGLVNTAKRVLDVYKGFFSGYKVDTLSIRDSVLLNEGYNDMVILKNTEFTSYCEHHIVPMKGKISIGYIPDKLIFGIGKIIKLINCFTKRLQLQERLTMEIAKALNDYLLPKGAIVTIEAVHDCVACCEEKDKNNLKLQTIYAIGIFQDNVELRREFFANIS

SEQ ID NO: 7773 - protein, 260 aa, Eikenella corrodens
  REGION 1..260: note = tr|A0A1A9RNX3|A0A1A9RNX3_EIKCO GTP cyclohydrolase FolE2 OS=Eikenella corrodens OX=539 GN=folE2 PE=3 SV=1
MNAIADVQSSPDQRNMPINQVGIKDLHFPLQIQSAEGVQHTIARIGMTVALPASQKGTHMSRFVALMEERQHLVLDFTSLHQLTLDMLERLDAQAGRIHISFPFFRKKAAPVSGITSFLDYAVTWQGEVSASGEYSHQIKVLAPVTSLCPCSKEISQYGAHNQRSHVAVTLTCHKQEVSIEEIIDLVENKASCQLYGLLKRPDEKYVTEHAYENPKFVEDMVRDIAVALKNDPRIDRFSVESENFESIHNHSAYALIEYP

SEQ ID NO: 7774 - protein, 260 aa, Eikenella corrodens
  REGION 1..260: note = tr|A0A1A9RCR5|A0A1A9RCR5_EIKCO GTP cyclohydrolase FolE2 OS=Eikenella corrodens OX=539 GN=folE2 PE=3 SV=1
MNAIADVQSSPDQRNMPINQVGIKDLHFPLQIQSAEGVQHTIARIGMTVALPASQKGTHMSRFVALMEERQHLVLDFTSLHQLTLDMLERLDAQAGRIHISFPFFRKKAAPVSGITSFLDYAVTWQGEVPASGEYSHQIKVLAPVTSLCPCSKEISQYGAHNQRSHVTVTLTCHKQEVSIEEIIDLVENKASCQLYGLLKRPDEKYVTEHAYENPKFVEDMVRDIAVALKNDPRIDRFSVESENFESIHNHSAYALIEYP

SEQ ID NO: 7775 - protein, 260 aa, unidentified
  source 1..260: note = Eikenella exigua
  REGION 1..260: note = tr|A0A5B9BVL9|A0A5B9BVL9_9NEIS GTP cyclohydrolase FolE2 OS=Eikenella exigua OX=2528037 GN=folE2 PE=3 SV=1
MNAIADVQSSPDQRNMPINQVGIKDLHFPLQIQGAEGVQHTIARIGMTVALPASQKGTHMSRFVALMEERQHLVLDFTSLYQLTLDMLERLDAQAGRINISFPFFRKKAAPVSGITSFLDYAVTWQGEVSASREYSHQIKVLAPVTSLCPCSKEISQYGAHNQRSHVTVTLTCHKQEVSIEEIIDLVENKASCQLYGLLKRPDEKYVTEHAYENPKFVEDMVRDIAVALKNDPRIDRFSVESENFESIHNHSAYALIEYP

SEQ ID NO: 7776 - protein, 260 aa, Eikenella sp.
  REGION 1..260: note = tr|A0A1A9S6J2|A0A1A9S6J2_9NEIS GTP cyclohydrolase FolE2 OS=Eikenella sp. NML03-A-027 OX=1795828 GN=folE2; PE = 3 SV=1
MNAIADVQSSPDQRNMPINQVGIKDLHFPLQIQGAEGVQHTIARIGMTVALPASQKGTHMSRFVALMEERQHLVLDFTSLHQLTLDMLERLDAQAGRINISFPFFRKKAAPVSGITSFLDYAVTWQGEVSASGEYSHRIKVLAPVTSLCPCSKEISQYGAHNQRSHVTVTLTCHKQEVSIEEIIDLVENKASCQLYGLLKRPDEKYVTEHAYENPKFVEDMVRDIAVALKNDPRIDRFSVESENFESIHNHSAYALIEYP

SEQ ID NO: 7777 - protein, 260 aa, Eikenella sp.
  REGION 1..260: note = tr|A0A1F0F8Y3|A0A1F0F8Y3_9NEIS GTP cyclohydrolase FolE2 OS=Eikenella sp. HMSC073A11 OX=1739535 GN=folE2 PE=3; SV = 1
MNAIADVQSSPDQRNMPINQVGIKDLHFPLQIQSAEGVQHTIARIGMTVALPASQKGTHMSRFVALMEERQHLVLDFTSLHQLTLDMLERLDAQAGRINISFPFFRKKAAPVSGITSFLDYAVTWQGEVSASGEYSHQIKVLAPVTSLCPCSKEISQYGAHNQRSHVTVTLTCHKQEVSIEEIIDLVENKASCQLYGLLKRPDEKYVTEHAYENPKFVEDMVRDIAVALKNDPRIDRFSVESENFESIHNHSAYALIEYP

SEQ ID NO: 7778 - protein, 210 aa, unidentified
  source 1..210: note = Eilatimonas milleporae
  REGION 1..210: note = tr|A0A3M0C6B9|A0A3M0C6B9_9PROT GTP cyclohydrolase 1; OS = Eilatimonas milleporae OX=911205 GN=folE PE=3 SV=1
MDAVLEKVHDNDLELKVSRQNADDRPSRAEAEAAVRTLIRWAGDNPSREGLLDTPKRVAKAYEEFFAGYGQDPAEILAKTFEDVNGYDDMVVMRGIQVQSHCEHHMVPISGLAHVAYMPKDRVVGISKLARITETYAKRLQTQETMTAQIADAIETYLKPKGVAVVIDATHACMGCRGVRHPDVYTITRQFRGVFKDTTVEQKFWTLVRG

SEQ ID NO: 7779 - protein, 185 aa, unidentified
  source 1..185: note = Eisenbergiella massiliensis
  REGION 1..185: note = tr|A0A3E3IKA8|A0A3E3IKA8_9FIRM GTP cyclohydrolase 1; OS = Eisenbergiella massiliensis OX=1720294 GN=folE PE=3 SV=1
MVDKAKIEEAVKLLLEGIGEDVNREGLVETPQRIARMYEEIFGGMDEDPAVPLSKQFQVEGAGIVLEKDITFYSTCEHHLMPFFGKAHVAYLPDGKVVGLSKLARTVEIFARRPQLQEKLTAQVADALMDYLKPKGVMILIEAEHMCMTMRGVKKPGSKTVTVATRGAFEENAALQETFYHMLER

SEQ ID NO: 7780 - protein, 185 aa, unidentified
  source 1..185: note = Eisenbergiella massiliensis
  REGION 1..185: note = tr|A0A3E3HYE5|A0A3E3HYE5_9FIRM GTP cyclohydrolase 1; OS = Eisenbergiella massiliensis OX=1720294 GN=folE PE=3 SV=1
MVDKAKIEEAVKLLLEGIGEDVNREGLVETPQRIARMYEEIFGGMDEDPAVPLSKQFQAEGAGIVLEKDITFYSTCEHHLMPFFGKAHVAYLPDGKVVGLSKLARTVEIFARRPQLQEKLTAQVADALMDYLKPKGVMILIEAEHMCMTMRGVKKPGSKTVTVATRGAFEENAALQETFYHMLEC

SEQ ID NO: 7781 - protein, 193 aa, unidentified
  source 1..193: note = Eisenbergiella sp.
  REGION 1..193: note = tr|A0A416HX61|A0A416HX61_9FIRM GTP cyclohydrolase 1; OS = Eisenbergiella sp. OF01-20 OX=2292348 GN=folE PE=3 SV=1
MVQSGETRMVDKSKIEEGVRLLLEGIGENADREGLRETPRRIARMYEEIFGGMDEDPMVPLSKQFQAEGAGIVLEKDITFYSTCEHHLMPFFGKAHVAYLPDGKVVGLSKLARTVEIFARRPQLQEKLTAQVADAMMDYLRPKGVMVMLEAEHMCMTMRGVKKPGSKTVTVAVRGAFEENSGLQDTFYHMLGR

SEQ ID NO: 7782 - protein, 185 aa, unidentified
  source 1..185: note = Eisenbergiella tayi
  REGION 1..185: note = tr|A0A1E3A605|A0A1E3A605_9FIRM GTP cyclohydrolase 1; OS = Eisenbergiella tayi OX=1432052 GN=folE PE=3 SV=1
MVDKSKIEEAVKLLLEGIGEDVDRDGLRETPVRIARMYEEIFGGMDEDPAVPLSKQFQAENAGIVLEKDITFYSTCEHHLMPFFGKAHVAYLPAGKVVGLSKLARTVEIFARRPQLQEKLTAQVADAMMDYLQPRGVMIMLEAEHMCMTMRGVKKPGSKTVTVAVRGAFEENSGLQETFYHMLGR

SEQ ID NO: 7783 - protein, 185 aa, unidentified
  source 1..185: note = Eisenbergiella tayi
  REGION 1..185: note = tr|A0A1E3AMZ2|A0A1E3AMZ2_9FIRM GTP cyclohydrolase 1; OS = Eisenbergiella tayi OX=1432052 GN=folE PE=3 SV=1
MVDKSKIEEAVKLLLEGIGEDVDREGLRETPVRIARMYEEIFGGMDEDPAVPLSKQFQAENAGIVLEKDITFYSTCEHHLMPFFGKAHVAYLPAGKVVGLSKLARTVEIFARRPQLQEKLTAQVADAMMDYLQPRGVMIMLEAEHMCMTMRGVKKPGSKTVTVAVRGAFEENSGLQETFYHMLGR

SEQ ID NO: 7784 - protein, 230 aa, Ekhidna lutea
  REGION 1..230: note = tr|A0A239L7L9|A0A239L7L9_9BACT GTP cyclohydrolase 1; OS = Ekhidna lutea OX=447679 GN=folE PE=3 SV=1
MKQKETSLNTQVEVDEFGDDHVGTSYDTPLRPDAFEQDDDLKIELISKHFKEIMQILGLDLEDDSLAGTPKRVAKMYVEEVFSGLNPKNKPKIRLFDNKYNYDQMLVEKDITFYSHCEHHFVPIYGKAHVAYFSSGKVIGLSKINRIVQYFAKRPQVQERLTVQIGKELKAILKTEDVAVVMDASHMCVSSRGVNDTNSRTGTAFFDGKFKDQNIKNEFLNYINTDSSDL

SEQ ID NO: 7785 - protein, 215 aa, Elioraea sp.
  REGION 1..215: note = tr|A0A541BVL7|A0A541BVL7_9PROT GTP cyclohydrolase 1; OS = Elioraea sp. Yellowstone OX=2592070 GN=folE PE=3 SV=1
MNVKSPASPSAPQLTRQRPTRDEAEAAVRTLLLWAGDDPDREGLIDTPARVVRSFREFFCGYETDPEELLARTFEETDGYDEMVLLRDIRLESYCEHHMVPIIGRAHVAYLPHKRVVGISKLARVVEAYAKRLQIQEKLTAQIANTIDTVLQPKGVAVVIEAAHQCMTTRGVHKPGVSMVTSRMLGAFRDDPTTRREFLAMISMGGTSARIGDEA

SEQ ID NO: 7786 - protein, 221 aa, Elizabethkingia anophelis
  REGION 1..221: note = tr|A0A290MZF4|A0A290MZF4_9FLAO GTP cyclohydrolase 1; OS = Elizabethkingia anophelis R26 OX=1246994 GN=folE PE=3; SV = 1
MNDFFDNDDDIYDGNQHTPLRKDAFKLSADEKVQKIEGLFSEIMETLGLDMTDDSLKDSPKRVAKMYVNEIFGGLLPENKPGISTFKNQYKYRQMLVEKDITVYSFCEHHFLPIIGRAHVAYISNGKVIGLSKINRIVDYYAKRPQVQERLTMQIVEAMKEALGTKDVACIIDARHLCVNCRGIKDTASSTITAELSGIFRTNPITRQEFLHYVGSHAKLD

SEQ ID NO: 7787 - protein, 221 aa, Elizabethkingia anophelis; identical to SEQ ID NO: 7786
  REGION 1..221: note = tr|X5KLB1|X5KLB1_9FLAO GTP cyclohydrolase 1; OS = Elizabethkingia anophelis OX=1117645 GN=folE PE=3 SV=1

SEQ ID NO: 7788 - protein, 221 aa, unidentified
  source 1..221: note = Elizabethkingia bruuniana
  REGION 1..221: note = tr|A0A5E8D2N2|A0A5E8D2N2_9FLAO GTP cyclohydrolase 1; OS = Elizabethkingia bruuniana OX=1756149 GN=folE PE=3 SV=1
MNDFFDNDDDIYDGNQHTPLRKDAFKLSTDEKVQKIEGLFSEIMETLGLDMTDDSLKDSPKRVAKMYVNEIFGGLLPENKPGISTFKNQYKYRQMLVEKDITVYSFCEHHFLPIIGKAHVAYISNGKVIGLSKINRIVDYYAKRPQVQERLTMQIVGAMKEALGTKDVACIIDARHLCVNCRGIKDTASSTITAELSGIFRTNPITRQEFLHYVGSHAKLD

SEQ ID NO: 7789 - protein, 221 aa, Elizabethkingia meningoseptica
  REGION 1..221: note = tr|A0A1V3U457|A0A1V3U457_ELIME GTP cyclohydrolase 1; OS = Elizabethkingia meningoseptica OX=238 GN=folE PE=3 SV=1
MNDFFDNDDDIYDGNQHTPLRKDAFKLSPEEKVQKIEHLFSEIMETLGLDMTDDSLKDSPKRVAKMYVNEVFGGLLPENKPGISTFKNQYKYRQMLVEKDITVYSFCEHHFLPIIGRAHVAYISNGKVIGLSKINRIVDYYAKRPQVQERLTMQIVEAMKEALGTKDVACIIDARHLCVNCRGIKDTASSTITAELSGIFRTNPITRQEFLHYVGSHAKLD

SEQ ID NO: 7790 - protein, 221 aa, Elizabethkingia meningoseptica; identical to SEQ ID NO: 7786
  REGION 1..221: note = tr|A0A2X1JLJ7|A0A2X1JLJ7_ELIME GTP cyclohydrolase 1; OS = Elizabethkingia meningoseptica OX=238 GN=folE PE=3 SV=1

SEQ ID NO: 7791 - protein, 221 aa, Elizabethkingia miricola; identical to SEQ ID NO: 7786
  REGION 1..221: note = tr|A0A0W8ENC2|A0A0W8ENC2_ELIMR GTP cyclohydrolase 1; OS = Elizabethkingia miricola OX=172045 GN=folE PE=3 SV=1

SEQ ID NO: 7792 - protein, 221 aa, Elizabethkingia miricola; identical to SEQ ID NO: 7788
  REGION 1..221: note = tr|A0A0A2H6A8|A0A0A2H6A8_ELIMR GTP cyclohydrolase 1; OS = Elizabethkingia miricola OX=172045 GN=folE PE=3 SV=1

SEQ ID NO: 7793 - protein, 221 aa, unidentified
  source 1..221: note = Elizabethkingia occulta
  REGION 1..221: note = tr|A0A1T3MLL6|A0A1T3MLL6_9FLAO GTP cyclohydrolase 1; OS = Elizabethkingia occulta OX=1867263 GN=folE PE=3 SV=1
MNDFFDNDDDIYDGNQHTPLRKDAFKLSADEKVQKIEGLFSEIMETLGLDMTDDSLKDSPKRVAKMYVNEIFGGLLPENKPGISTFKNQYKYRQMLVEKDITVYSFCEHHFLPIIGRAHVAYISNGKVIGLSKINRIVDYYAKRPQVQERLTMQIVGAMKEALGTKDVACIIDARHLCVNCRGIKDTASSTITAELSGIFRTNPITRQEFLHYVGSHAKLD

SEQ ID NO: 7794 - protein, 221 aa, Elizabethkingia sp.
  REGION 1..221: note = tr|A0A2T5RW59|A0A2T5RW59_9FLAO GTP cyclohydrolase 1; OS = Elizabethkingia sp. YR191 OX=2135666 GN=folE PE=3 SV=1
MNDFFDNDDDIYDGNQHTPLRKDAFRLSADEKVQKIEGLFSEIMETLGLDMTDDSLKDSPKRVAKMYVNEIFGGLLPENKPGISTFKNQYKYRQMLVEKDITVYSFCEHHFLPIIGRAHVAYISNGKVIGLSKINRIVDYYAKRPQVQERLTMQIVEAMKEALGTKDVACIIDARHLCVNCRGIKDTASSTITAELSGIFRTNPITRQEFLHYVGSHAKLD

SEQ ID NO: 7795 - protein, 221 aa, Elizabethkingia sp.
  REGION 1..221: note = tr|A0A5B7UG44|A0A5B7UG44_9FLAO GTP cyclohydrolase 1; OS = Elizabethkingia sp. JS20170427COW OX=2583851 GN=folE; PE = 3 SV=1
MNDFFDNDDDIYDGNQQTPLKKDAFSLTPTQKVEKIEGLFKEIMDTLGLDLTDDSLKDSPKRVAKMYVNEIFGGLLPENKPGISTFKNQYKYRQMLVEKDITVYSFCEHHFLPIIGKAHVAYISNGQVIGLSKINRIVDYYAKRPQVQERLTMQIVEAMKEALGTKDVACIIDARHLCVNCRGIKDTASSTITAELSGLFRTNPITRQEFLHYVGSHAKID

SEQ ID NO: 7796 - protein, 221 aa, unidentified; identical to SEQ ID NO: 7794
  source 1..221: note = Elizabethkingia ursingii
  REGION 1..221: note = tr|A0A1T3F993|A0A1T3F993_9FLAO GTP cyclohydrolase 1; OS = Elizabethkingia ursingii OX=1756150 GN=folE PE=3 SV=1

SEQ ID NO: 7797 - protein, 229 aa, unidentified
  source 1..229: note = Elstera cyanobacteriorum
  REGION 1..229: note = tr|A0A255XSM2|A0A255XSM2_9PROT GTP cyclohydrolase 1; OS = Elstera cyanobacteriorum OX=2022747 GN=folE PE=3 SV=1
MGFRPARRTKGLIVNAFITPKTDLVSSEAVTEAPRPSREEAEAAVRTLLRWAGDDPSREGLVDTPARVVRAYEEWFAGYAVDPKDMLQRTFEETDGYDEMVLLRDIRFESYCEHHVAPIIGKAHIAYLPKNRVVGISKLARVVEVFAKRLQIQEKMTAQIANVLDEVLQPLGVAVVIEAQHQCMTTRGVHKPGVAMVTSRMLGAFRSNIETRREFLALISQPGLSSSAV

SEQ ID NO: 7798 - protein, 208 aa, unidentified
  source 1..208: note = Elstera litoralis
  REGION 1..208: note = tr|A0A0F3IVQ8|A0A0F3IVQ8_9PROT GTP cyclohydrolase 1; OS = Elstera litoralis OX=552518 GN=folE PE=3 SV=1
MAATSATAPAATPRPSREDAEAAVRTLLQWAGDDPTREGLIDTPARVTRAFEEWFAGYGIDPREMLQRTFEETDGYDEMVLLRDIRFESYCEHHMAPIIGKAHIAYLPKSRVVGISKLARVVEVFAKRLQIQEKMTAQIANVLDEVLQPLGVAVVIEAQHQCMTTRGVHKTGVAMVTSRMLGAFRSNVETRREFLALIGQPGLGSSAV

SEQ ID NO: 7799 - protein, 194 aa, unidentified
  source 1..194: note = Elusimicrobia bacterium
  REGION 1..194: note = tr|A0A2M7S2E7|A0A2M7S2E7_9BACT GTP cyclohydrolase 1; OS = Elusimicrobia bacterium CG_4_10_14_0_8_um_filter_37_32; OX = 2014301 GN=folE PE=3 SV=1
MKPQIDKKRIQKAVREILVAVGENPEREGLKDTPRRVSDFYAEALSGQFIEPEDILTVYYEEEKYNEMVIVRDIPFYSLCEHHLLPFYGKVHIAYMPNKKRLLGISKLARIVDAYTKRLQLQERITKHIVDAIMKIVKPMGGLVIVEAEHLCMNMRGVKKTGTKVITSAVRGLFLKDARTRAEALALINKKPTD

SEQ ID NO: 7800 - protein, 197 aa, unidentified
  source 1..197: note = Elusimicrobia bacterium
  REGION 1..197: note = tr|A0A5C7MJR0|A0A5C7MJR0_9BACT GTP cyclohydrolase 1; OS = Elusimicrobia bacterium OX=2030800 GN=folE PE=3 SV=1
MNPSAPIINPDVRAKNIAGLTEELLLQVGEDPKREGLLRTPERVAKAWQELTAGYRVDVDKLINGALFDEPYSEMVVVRDIQFFSLCEHHLLPFFGVCHVAYLPQGKILGLSKIPKLVKAFARRLQVQERLTNEIAETLMAKVNPLGAGVVMEARHMCMEMRGAESCNSPTVTSAMVGLFRSNARTRDEFLSLIRRR

SEQ ID NO: 7801 - protein, 172 aa, Elusimicrobium minutum
  REGION 1..172: note = tr|B2KC62|B2KC62_ELUMP GTP cyclohydrolase 1; OS = Elusimicrobium minutum (strain Pei191) OX=445932; GN = folE PE=3 SV=1
MLAYIGDNPNREGLQETPHRIVKSWEKIFGGYKQKPESVLKTFVEGSCDEMVILKDIEFYSTCEHHFQPFFGTISIGYLPNKRVLGVSKLARLVEVFSRRLQIQEKLSADIADSLMQHLNPLGVMVVCKARHMCVCSRGVEKHNAVMITSAIRGVFKKPEVRGEFLDFIQAN

SEQ ID NO: 7802 - protein, 206 aa, Elusimicrobium sp.
  REGION 1..206: note = tr|A0A1Y4DM67|A0A1Y4DM67_9BACT GTP cyclohydrolase 1; OS = Elusimicrobium sp. An273 OX=1965617 GN=folE PE=3 SV=1
MRKTAKKSSLRTAKPANAQAGKHPLSEEKILNNLREILAYIGDDPTREGLLETPARIVRSWKKLFGGYQMKPQDVLKTFTEGSCEEMVVLKDIEFYSTCEHHLQPFFGTISIGYLPKGRVLGISKLARLVEVFARRLQIQEKLVAQIADSLMDTLQPHGVMVVCKAKHMCISSRGIEKHNAVMVTSAIRGAFKKMEVRNEFLEMIK

SEQ ID NO: 7803 - protein, 204 aa, unidentified
  source 1..204: note = Emcibacter congregatus
  REGION 1..204: note = tr|A0A2G4YUD8|A0A2G4YUD8_9PROT GTP cyclohydrolase 1; OS = Emcibacter congregatus OX=2043170 GN=folE PE=3 SV=1
MKDNVKHQGIIKPTQKEAEDAVRTLLRWAGDDPEREGLLDTPKRVAKSYKEFFRGYEEDPRQTLSRTFEEVCGYDEMIVLRDIPFESHCEHHMAPIIGRAHVGYLPDQRVVGISKLARVVETYAKRLQVQEKMTAQIADCIQEVLEPLGVGVIIQATHECMSTRGVHTHGVSMVTSRMVGAFRKDDKTRREFLAVVGTFDSHKG

SEQ ID NO: 7804 - protein, 203 aa, unidentified
  source 1..203: note = Emcibacter nanhaiensis
  REGION 1..203: note = tr|A0A501PAJ4|A0A501PAJ4_9PROT GTP cyclohydrolase 1; OS = Emcibacter nanhaiensis OX=1505037 GN=folE PE=3 SV=1
MSSDKSKETDKPSRKDAEEAVRTLLRWAGDDPTREGLLDTPKRVVKAYQEFFQGYDQDPHEILSRTFEEVAGYDEMVVLRDIPFESHCEHHMAAIIGRAHVGYLPKNKVVGISKLARVVETYAKRLQVQEKMTAQIADCIQDVLEPHGVGVIIQATHQCMTTRGVHKHGVSMVTSRMVGSFRKDEKTRKEFLSVVGNFEPYRA

SEQ ID NO: 7805 - protein, 186 aa, unidentified
  source 1..186: note = Emergencia timonensis
  REGION 1..186: note = tr|A0A415E523|A0A415E523_9FIRM GTP cyclohydrolase 1; OS = Emergencia timonensis OX=1776384 GN=folE PE=3 SV=1
MDKDKIKEGVRLILEGIGEDINREGLLETPDRIAKMYDELAAGYHDSAAAHLAKRFHVEDSDMIIEKDITFYSFCEHHMLPFYGHAAVAYIPDGEVVGLSKIARTVEVFAKRFQLQERLAAQVADAFMEELRPKGVMVLIEAEHMCMTMRGIKKPGAKTVTVVTRGAFEDDEKLQNRFFQMLGQRT

SEQ ID NO: 7806 - protein, 225 aa, Empedobacter brevis; identical to SEQ ID NO: 4277
  REGION 1..225: note = tr|A0A3P6MSJ0|A0A3P6MSJ0_9FLAO GTP cyclohydrolase 1; OS = Empedobacter brevis OX=247 GN=folE PE=3 SV=1

SEQ ID NO: 7807 - protein, 225 aa, Empedobacter brevis
  REGION 1..225: note = tr|A0A511NF92|A0A511NF92_9FLAO GTP cyclohydrolase 1; OS = Empedobacter brevis NBRC 14943 = ATCC 43319 OX=1218108; GN = folE2 PE=3 SV=1
MCDKHLHDEIGDDHMSANLETPLRGDAFELSAEEKVEKIEADFRNIMETLGLDLTDDSLKGTPKRVAKMFVKEIFGGLLPERKPGMSTFDNKYNYNQMLVEKDIVVYSTCEHHFLPIVGRAHVGYISKGRVIGLSKMNRIVEYYAKRPQVQERLTMQIVKAMQEALGTDDVACIIDAKHLCVNSRGIKDIESSTVTAEFGGAFKENEQLRKEFISYIGMKTPFNV

SEQ ID NO: 7808 - protein, 225 aa, unidentified
  source 1..225: note = Empedobacter falsenii
  REGION 1..225: note = tr|A0A376G072|A0A376G072_9FLAO GTP cyclohydrolase 1; OS = Empedobacter falsenii OX=343874 GN=folE PE=3 SV=1
MCDKHLHDEMGDDHISANLETPLRADAFELSAEEKVEKIEADFRNIMETLGLDLTDDSLKGTPKRVAKMFVKEIFGGLLPERKPGMSTFENKYNYNQMLVEKDIVVYSTCEHHFLPIVGRAHVGYISKGKVIGLSKMNRIVEYYAKRPQVQERLTMQIVKAMQEALGTDDVACIIDAKHLCVNSRGIKDIESSTVTAEYGGAFKDNEQLRKEFISYIGMKTTFNV

SEQ ID NO: 7809 - protein, 225 aa, unidentified
  source 1..225: note = Empedobacter falsenii
  REGION 1..225: note = tr|A0A427BHK9|A0A427BHK9_9FLAO GTP cyclohydrolase 1; OS = Empedobacter falsenii OX=343874 GN=folE PE=3 SV=1
MCDKHLHDEMGDDHISANLETPLRADAFELSAEEKVEKIEADFRNIMETLGLDLTDDSLKGTPKRVAKMFVKEIFGGLLPERKPGMSTFENKYNYNQMLVEKDIVVYSTCEHHFLPIVGRAHVGYISKGKVIGLSKMNRIVEYYAKRPQVQERLTMQIVKAMQEALGTDDVACIIDAKHLCVNSRGIKDIESSTVTAEFGGAFKESEQLRKEFISYIGMKTPFNV

SEQ ID NO: 7810 - protein, 187 aa, unidentified
  source 1..187: note = Empedobacter haloabium
  REGION 1..187: note = tr|A0A5C7BN59|A0A5C7BN59_9FLAO GTP cyclohydrolase 1; OS = Empedobacter haloabium OX=592317 GN=folE PE=3 SV=1
MSKEAFSENDWRRLLSTLGEDPDRPGLAETPHRVAKAWKHWTSGYDQDPVELLKAFEDGAEAYNELIVVRNIPVYSHCEHHLAPFFGMATVGYLPNGKIVGLSKLTRLVDCFAKRLQVQERLTVQIANTLMEVLEPKAVGVVIKCRHMCMESRGIRTPGEETITSSMLGELQSNLGLRTEFLSLARD

SEQ ID NO: 7811 - protein, 225 aa, Empedobacter sp.; identical to SEQ ID NO: 7808
  REGION 1..225: note = tr|A0A4Z1C1B1|A0A4Z1C1B1_9FLAO GTP cyclohydrolase 1; OS = Empedobacter sp. MRS2 OX=2491114 GN=folE PE=3 SV=1

SEQ ID NO: 7812 - protein, 233 aa, Emticicia sp.
  REGION 1..233: note = tr|A0A4Q5LZZ5|A0A4Q5LZZ5_9BACT GTP cyclohydrolase 1; OS = Emticicia sp. 17J42-9 OX=2492393 GN=folE PE=3 SV=1
MKPNETLLNTLLFEDDTKIALTDEEIGDDHLNTSVDTPMRADAFEMKDEEKIAQIEYYFRQIMDTLGLDLTDDSLKGTPKRVAKMYVKEIFSGLNPENKPSVTLFDNKYQYNEMLVEKDISFYSNCEHHFVPIFGKAHVAYIANGKVIGLSKLNRIVQYFAKRPQVQERLTMQIAKELQKVLGTEDVAVVMDAKHLCVASRGVQDDTSTTITSFYGGKFQQEATKAEFLKYIA

SEQ ID NO: 7813 - protein, 233 aa, Emticicia sp.
  REGION 1..233: note = tr|A0A2N4XGZ2|A0A2N4XGZ2_9BACT GTP cyclohydrolase 1; OS = Emticicia sp. TH156 OX=2067454 GN=folE PE=3 SV=1
MKPNETLLNTLLFEQDTNATLMEDELGDDHRGTAEDTPLRADAFDLSDEEKIARIEFYFRQIMDTLGLDLTDDSLNGTPKRVAKMYVKELFQGLNPENKPSVTLFDNKYQYNEMLVEKDISFYSNCEHHFVPIFGKAHVAYIANGKVIGLSKLNRIVQYFSKRPQVQERLTVQIAKELQRILNTEDVAVVMDAKHLCVASRGVQDDTSSTVTSFYGGKFQQEATKAEFLKYII

SEQ ID NO: 7814 - protein, 190 aa, unidentified
  source 1..190: note = Endomicrobium proavitum
  REGION 1..190: note = tr|A0A0G3WHU5|A0A0G3WHU5_9BACT GTP cyclohydrolase 1; OS = Endomicrobium proavitum OX=1408281 GN=folE PE=3 SV=1
MKKFNFDEKKAAKAVKLLLESFGEDLNREGVKRTPERVAEFYKEALSGNAVDPLKVAGVHYSTENHEEIILVKDISFYSLCEHHLLPFFGTAHIAYIPKKDKIIGVSKLIRLVEVFANRLQLQERLTKQIADTVMKSISPRGVMVVLEAEHLCMTMRGVKKPGSKMVTSAMRGIFLKDARTRTEAMSLLK

SEQ ID NO: 7815 - protein, 265 aa, unidentified
  source 1..265: note = Bathymodiolus septemdierum
  REGION 1..265: note = tr|A0A0P0UST4|A0A0P0UST4_9GAMM GTP cyclohydrolase FolE2 OS=endosymbiont of Bathymodiolus septemdierum str. Myojin knoll OX=1303921 GN=folE2 PE=3 SV=1
MTTTCNLPDTQNNADTRQIVIDKVGIKDISHPIIYIDRDGNKNPTVGNFTMTVTLPKQVKGTHMSRFIEILNAGPCEFNVGNFGRIIDKVHAKLDTDRVHVAVDFPFFRNKKAPSSGVESLMDYQVTLYGVLSEGKTEVMVKVVVPVTSLCPCSKSISKYGAHNQRSHITIKARIAEGKSLHIEDLIDLAEEKASCELYAILKREDEKVVTERAYDNPAFVEDLVRDIAVGLNVNDNIDYYRLESENFESIHNHSAYAVIENEKC

SEQ ID NO: 7816 - protein, 194 aa, Acanthamoeba sp.
  REGION 1..194: note = tr|A0A075MK81|A0A075MK81_9PROT GTP cyclohydrolase 1; OS = endosymbiont of Acanthamoeba sp. UWC8 OX=86106 GN=folE; PE = 3 SV=1
MSKILKKDRAINQKAINAIRSLIECIGDDPGRPELKKSPYKILEVLQSSLSGYVVNPDEILAETIEEVEGYDDIIMLKDINFTSYCEHHFLPFSGKCHIGYIPNKKIAGIGKFAEVLEAFAGRLQIQERLTVLIAEAIYNNLQPKGVGVVIEAKHNCLSFKHSGCKDAKMRTVKMLGNFYEDSNIRNEFLYALK

SEQ ID NO: 7817 - protein, 212 aa, unidentified
  source 1..212: note = Endozoicomonadaceae bacterium
  REGION 1..212: note = tr|A0A444H140|A0A444H140_9GAMM GTP cyclohydrolase 1; OS = Endozoicomonadaceae bacterium GTF-13 OX=2506149 GN=folE; PE = 3 SV=1
MISAEATRVREMLIEKGLETPLLETGLSREQKYERIKGLMTEVVSTLGLDLSDDSLQETPHRIARMYLDDLFVGLDYQHFPSISVIDNKMGVDEMVKVSEIRMTSTCEHHFITIDGAAKVAYLPDQKIIGLSKLNRIVRFFAQRPQVQERLTQQILVALQTLLETDDVAVSINATHYCVKARGIMDANSFTETTALGGSFKSNPQTRAEFLR

SEQ ID NO: 7818 - protein, 180 aa, unidentified
  source 1..180: note = Endozoicomonadaceae bacterium
  REGION 1..180: note = tr|A0A3S3RHR3|A0A3S3RHR3_9GAMM GTP cyclohydrolase 1; OS = Endozoicomonadaceae bacterium GTF-13 OX=2506149 GN=folE; PE = 3 SV=1
MEKSFANIISSIGEDLSRPGLVDTPARAAKAFAFLNRGYQQSLDEVVNDALFPSDNDEMVIVKDIELYSLCEHHLLPFIGRCHVAYLPSGKVLGLSKVARIVDMFARRLQIQENLTKQIADTIQQVTGASGVGVIIEAQHMCMMMRGVEKQNSSMKTSVMLGHFRSKAHTRAEFLSLIRD

SEQ ID NO: 7819 - protein, 183 aa, Endozoicomonas elysicola
  REGION 1..183: note = tr|A0A081KFT9|A0A081KFT9_9GAMM GTP cyclohydrolase 1; OS = Endozoicomonas elysicola OX=305900 GN=folE PE=3 SV=1
MSQRISEHYKAIIESVGEDIHREGLRDTPLRAAKAMQYLTKGYTQTLDEIVNGAVFESDISEMVVIKDIELYSMCEHHMLPFIGKCHIGYVPRGKVLGLSKFARIVDMYARRLQIQENMTKQIADAIMEVTDAKGVAVVIEAQHMCMMMRGVEKQNSSMTSSVMRGLMKDNQPTREEFLRFIR

SEQ ID NO: 7820 - protein, 183 aa, Endozoicomonas montiporae
  REGION 1..183: note = tr|A0A081N2S9|A0A081N2S9_9GAMM GTP cyclohydrolase 1; OS = Endozoicomonas montiporae OX=1027273 GN=folE PE=3 SV=1
MTDNLSEHYKAIIESLGEDIHRNGLVDTPARAAKAMQYLTRGYQQSLEDIVNGAIFDSDISEMVVIKDIELYSLCEHHMLPFIGKCHIGYIPNGKVLGLSKFARIVDMFARRLQIQENMTKQIADAIVEATGAKGVGVVIEAQHMCMMMRGVEKQNSSMTSSVMLGLMRDNLPSREEFLQFIR

SEQ ID NO: 7821 - protein, 274 aa, Endozoicomonas montiporae
  REGION 1..274: note = tr|A0A142BGZ3|A0A142BGZ3_9GAMM GTP cyclohydrolase 1; OS = Endozoicomonas montiporae CL-33 OX=570277 GN=gch1 PE=3; SV = 1
MVSMRLSPNSCLEDGIGITQDFTLSIKCTAGKLSCDFTETQCNQKYAATITQQLLRHAYSRAPRIKSKKAPNAIVCVKIQLFAYSLSDSYEMTDNLSEHYKAIIESLGEDIHRNGLVDTPARAAKAMQYLTRGYQQSLEDIVNGAIFDSDISEMVVIKDIELYSLCEHHMLPFIGKCHIGYIPNGKVLGLSKFARIVDMFARRLQIQENMTKQIADAIVEATGAKGVGVVIEAQHMCMMMRGVEKQNSSMTSSVMLGLMRDNLPSREEFLQFIR

SEQ ID NO: 7822 - protein, 185 aa, unidentified
  source 1..185: note = Endozoicomonas numazuensis
  REGION 1..185: note = tr|A0A081NKP1|A0A081NKP1_9GAMM GTP cyclohydrolase 1; OS = Endozoicomonas numazuensis OX=1137799 GN=folE PE=3 SV=1
MTEQLSEHYKAILESLGEDIHRDGLRDTPKRAAKAMQFLTRGYEQSLEDIVNNAVFESDISEMVVIKDIELYSMCEHHMLPFIGKCHIGYIPDGKVLGLSKFARIVDMFARRLQIQENMTKQIADAIVEATGAKGVGVVIEAQHMCMMMRGVQKQNSSMTSSVMLGLMRENQPTREEFLQFIRHR

SEQ ID NO: 7823 - protein, 184 aa, Endozoicomonas sp.
  REGION 1..184: note = tr|A0A1D2XDA0|A0A1D2XDA0_9GAMM GTP cyclohydrolase 1; OS = Endozoicomonas sp. (ex Bugula neritina AB1) OX=1868284; GN = folE PE=3 SV=1
MSQILSEHYKAIIESVGEDIHRDGLAGTPDRAAKAMQYLTRGYTQDLKDIVNGAVFKSDISEMVVIKDIELYSLCEHHMLPFIGKCHIGYLPDGKVLGLSKFARIVDMFARRLQIQENMTKQIADAVMEVTGAKGVAVVIEAKHMCMMMRGVEKQNSSMTSSVMRGLMRDRQSTREEFLQFIRG

SEQ ID NO: 7824 - protein, 180 aa, Endozoicomonas sp.; identical to SEQ ID NO: 7818
  REGION 1..180: note = tr|A0A3P3VQD1|A0A3P3VQD1_9GAMM GTP cyclohydrolase 1; OS = Endozoicomonas sp. GTF13 OX=2528527 GN=folE PE=3 SV=1

SEQ ID NO: 7825 - protein, 208 aa, Enhydrobacter aerosaccus
  REGION 1..208: note = tr|A0A1T4SWC0|A0A1T4SWC0_9PROT GTP cyclohydrolase 1; OS = Enhydrobacter aerosaccus OX=225324 GN=folE PE=3 SV=1
MNRILKKSAMVSMATGVSRPSREEAEAAVRTLILWAGDDPDREGLVGTPDRVVRSYEEFFAGYDEDPREMLQRTFEEVEGYDEVVMLRDIRLESHCEHHMVPIIGKVHIGYLPDRRVVGISKLARVVDAYARRLQIQEKLTAQIANTLQDVLQPRGVAVVIEAAHQCMTTRGVHKSDVAMVTSRMLGAFRNNGETRREFLTMIGRSSL

SEQ ID NO: 7826 - protein, 192 aa, Enhydrobacter sp.
  REGION 1..192: note = tr|A0A1V2GNF5|A0A1V2GNF5_9PROT GTP cyclohydrolase 1; OS = Enhydrobacter sp. H5 OX=1907940 GN=folE PE=3 SV=1
MPANFDEIIQQNSDAYRTLIASTGEDLTREGLLNTPERAAKAFSFLTQGYHQDLVEITNNAIFPTDNNELVMVKNIEFYSMCEHHMLPFYGVAHVAYLPDGKVIGLSKMARIVDMYARRLQIQENLTRQIAQAVMDMTGAKGAAVVMDAAHMCMMMRGVMKQKSDTRSMSLLGEFKHNTEARQALLMAIPSA

SEQ ID NO: 7827 - protein, 214 aa, Enhydrobacter sp.
  REGION 1..214: note = tr|A0A5C8PJX1|A0A5C8PJX1_9PROT GTP cyclohydrolase 1; OS = Enhydrobacter sp. CC-CFT640 OX=2586908 GN=folE PE=3 SV=1
MNKVLKRPSLGSVAAASSQVKPTRAEAEEAVRTLIRWAGDDPDREGLVGTPDRVVRSYEEFFAGYAEDPREILARTFEETDGYDEMVVLRDIRLESYCEHHIVPIIGKAHVGYLPAHRVVGISKLARIVEAYAKRLQIQEKMTAQIANCIQEVLEPRGVAVVIEAAHQCMTTRGIRKPGVAMVTSRMLGAFRDDPSTRREFLAMIGKNGAGGYA

SEQ ID NO: 7828 - protein, 191 aa, Enhygromyxa salina
  REGION 1..191: note = tr|A0A2S9XFD7|A0A2S9XFD7_9DELT GTP cyclohydrolase 1; OS = Enhygromyxa salina OX=215803 GN=folE PE=3 SV=1
MTDSSSVSPREQALAAAVQALLRACDLDLEHSDLIGTPKRVARLWDTLVLSGYDADPAAILGDLVLGEGDTELVVVRDIPCHGMCPHHLMPWVGQATVGYLPADKLVGFGRLSDLVHCFTRRLTLQERVCNDIADALMQHLSARGAACVITGQHNCLNVPDDKHGARVVTASYRGELKTRPDLQAQLISRG

SEQ ID NO: 7829 - protein, 267 aa, Enhygromyxa salina
  REGION 1..267: note = tr|A0A2S9XUG5|A0A2S9XUG5_9DELT GTP cyclohydrolase FolE2 OS=Enhygromyxa salina OX=215803 GN=folE2 PE=3 SV=1
MQDVQGLPDDREIALDRVGVAGLCHPIVVLDRRSEKQRTVGTFEMSVSLPREQKGTHMSRFVEVLNEHHGEVTMRTVPKILRDLQTRLDASSARVEVEFPYFLERTAPVSGATALMDYSCAFIGELSEDEDDFVLRVRVPVTSLCPCSKAISERGAHNQRGYITISVRTQTDLDGDPQLVWIEELIEVAEQSASAPVYPLLKRPDEAHVTVQAYDNPVFVEDMVRNVARRLQDEPRVHWFEVHAENHESIHNHSAFAQVTWSRSEPQ

SEQ ID NO: 7830 - protein, 188 aa, unidentified
  source 1..188: note = Enorma massiliensis
  REGION 1..188: note = tr|A0A1Y3U8U3|A0A1Y3U8U3_9ACTN GTP cyclohydrolase 1; OS = Enorma massiliensis OX=1472761 GN=folE PE=3 SV=1
MAVDKARAEAAIREFLIAVGEDPDRPGLLETPDRVARAAQEVLGGYDEDPSLHLRKQFHENDNEEMVIVRDIPFSSLCEHHILPFTGKAHVAYIPHEGRITGLSKIARCVNGYARRLQLQERLTAQIADAMMAELRPRGVLVVLEAEHMCMTMRGVRAAGALTTTSAVRGTFRSDIRTREEALRLLGL

SEQ ID NO: 7831 - protein, 205 aa, Ensifer adhaerens
  REGION 1..205: note = tr|A0A0L8C629|A0A0L8C629_ENSAD GTP cyclohydrolase 1; OS = Ensifer adhaerens OX=106592 GN=folE PE=3 SV=1
MDAIVKNFPVLDNASDRPTQKEAEDAVRVLLRWAGDDPSREGLADTPARVAKAYRELFSGYDLAAEDVLGRTFEEVAGYDDMVLVKDIPFYSHCEHHMVPIIGKAHVAYLPNGRVLGLSKIARVVDIYGRRLQTQESMTAQIARAIDESLAPRGVAVMIEAEHMCMAMRGVQKQGSTTLTTTFTGTFQTEPAEQARFMTMLRGFK

SEQ ID NO: 7832 - protein, 205 aa, Ensifer adhaerens
  REGION 1..205: note = tr|A0A2V4XZR9|A0A2V4XZR9_ENSAD GTP cyclohydrolase 1; OS = Ensifer adhaerens OX=106592 GN=folE PE=3 SV=1
MDAIVKNFPVLDDASGRPTQKEAEEAVRVLLRWAGEDPQREGLLDTPARVAKSYRELFSGYDLAAEDVLGRTFEEVAGYDDMVLVKDIPFYSHCEHHMVPIIGKAHVAYLPNGRVLGLSKIARVVDIYGRRLQTQESMTAQIARAIDESLAPRGVAVMIEAEHMCMAMRGVQKQGSTTLTTTFTGTFQTEPAEQARFMTMIRGFK

SEQ ID NO: 7833 - protein, 205 aa, unidentified
  source 1..205: note = Ensifer alkalisoli
  REGION 1..205: note = tr|A0A1E3VEB2|A0A1E3VEB2_9RHIZ GTP cyclohydrolase 1; OS = Ensifer alkalisoli OX=1752398 GN=folE PE=3 SV=1
MDAIVKNFPVLDDTSGRPSQKEAEEAVRVLLRWAGEDPTREGLRDTPQRVVKSYREIFGGYDLVAEDVLGRTFEEVSGYDDIVLEKDIPFYSHCEHHMVPIIGKAHVAYLPNGRVLGLSKIARAVDIYARRLQTQEAMTAQIARAIDETLAPRGVAVMVEAEHLCMAMRGVKKHGATTLTTTFTGAFKTDPAEQARFMTLLRGFK

SEQ ID NO: 7834 - protein, 205 aa, unidentified
  source 1..205: note = Ensifer glycinis
  REGION 1..205: note = tr|A0A178XGN9|A0A178XGN9_9RHIZ GTP cyclohydrolase 1; OS = Ensifer glycinis OX=1472378 GN=folE PE=3 SV=1
MDAIVKNFPVLDDTSGRPTQKEAEEAVRVLLRWAGEDPTREGLKDTPARVVKSYREIFGGYDLIAEDVLGRTFEEVSGYDDIVLEKDIPFYSHCEHHMVPIIGKAHVAYLPNGRVLGLSKIARVVDIYARRLQTQESMTAQIARAIDETLAPRGVAVMIEAEHLCMAMRGVKKQGSTTLTTTLTGAFKTDPAEQARFMTMLRGFK

SEQ ID NO: 7835 - protein, 205 aa, Ensifer sojae
  REGION 1..205: note = tr|A0A249PA32|A0A249PA32_9RHIZ GTP cyclohydrolase 1; OS = Ensifer sojae CCBAU 05684 OX=716928 GN=folE PE=3 SV=1
MDAIVKNFPVLDDTSDRPTQKEAEEAVRVLLRWAGEDPTREGLRDTPQRVVKSYREIFGGYDLVAEDVLGRTFEEVSGYDDIVLEKDIPFYSHCEHHMVPIIGKAHVAYLPNGRVLGLSKIARAVDIYARRLQTQEAMTAQIARAIDETLAPRGVAVMIEAEHLCMAMRGVKKHGATTLTTTFTGAFKTEPAEQARFMTLLRGFK

SEQ ID NO: 7836 - protein, 205 aa, Ensifer sp.
  REGION 1..205: note = tr|A0A0Q9D9V7|A0A0Q9D9V7_9RHIZ GTP cyclohydrolase 1; OS = Ensifer sp. Root278 OX=1736509 GN=folE PE=3 SV=1
MDAIVKNFPVLDDASGRPTQKEAEEAVRVLLRWAGEDPEREGLLDTPARVAKSYRELFSGYDLAAEDVLGRTFEEVAGYDDMVLVKDIPFYSHCEHHMVPIIGKAHVAYLPNGRVLGLSKIARVVDIYGRRLQTQESMTAQIAKAIDETLAPRGVAVMIEAEHMCMAMRGVQKQGSTTLTTTFTGTFQTEPAEQARFMTMLRGFK

SEQ ID NO: 7837 - protein, 205 aa, Ensifer sp.; identical to SEQ ID NO: 7831
  REGION 1..205: note = tr|A0A1C0T3D4|A0A1C0T3D4_9RHIZ GTP cyclohydrolase 1; OS = Ensifer sp. LC54 OX=1873715 GN=folE PE=3 SV=1

SEQ ID NO: 7838 - protein, 190 aa, unidentified
  source 1..190: note = Enteractinococcus coprophilus
  REGION 1..190: note = tr|A0A543APK5|A0A543APK5_9MICC GTP cyclohydrolase 1; OS = Enteractinococcus coprophilus OX=1027633 GN=folE PE=3; SV = 1
MMDQPRIEAAVREILLAVGEDPDRDGLVDTPARVARAYGEFFAGLHRDPAEILGTTFDISHDEMVLVKDIEFYSMCEHHLVPFHGHAHIGYIPSAEGKVTGLSKLARLVDLYARRPQVQERLTTQIVEALVEHLNPQGAIVVLSAEHMCMSMRGVQKPHAKTVTSAVRGQLRESSTRNEAMSLIMNSGVH

SEQ ID NO: 7839 - protein, 190 aa, unidentified
  source 1..190: note = Enteractinococcus helveticum
  REGION 1..190: note = tr|A0A1B7LZ01|A0A1B7LZ01_9MICC GTP cyclohydrolase 1; OS = Enteractinococcus helveticum OX=1837282 GN=folE PE=3; SV = 1
MMDQPRIEAAVREILLAVGEDPDREGLVETPARVARAYGEFFAGLHRDPAEILGTTFDISHDEMVLVKDIEFYSMCEHHLVPFHGHAHIGYIPSVEGKVTGLSKLARLVDLYARRPQVQERLTTQIVEALVEHLNPQGAIVVLSAEHMCMSMRGVQKPHAKTVTSAVRGQLREPSTRNEAMSLIMNAGVH

SEQ ID NO: 7840 - protein, 220 aa, unidentified
  source 1..220: note = Enterobacillus tribolii
  REGION 1..220: note = tr|A0A370QRN0|A0A370QRN0_9ENTR GTP cyclohydrolase 1; OS = Enterobacillus tribolii OX=1487935 GN=folE PE=3 SV=1
MSTLSKEAAMVHAALEARGLETPLRGVMLDRETRKQRIEGHMTEIMQLLNLDLSDDSLAETPHRIAKMYVDEIFSGLDYANFPKITLIENKMKVDEMVTVRDITLTSTCEHHFVTIDGKATVAYIPKDSVIGLSKINRIVQFFAQRPQVQERLTQQILIALQTLLGTNNVAVSIDAVHYCVKARGVRDATSATTTTSLGGLFKSSQNTRHEFLRAVRHQS

SEQ ID NO: 7841 - protein, 221 aa, unidentified; identical to SEQ ID NO: 7257
  source 1..221: note = Enterobacter agglomerans
  REGION 1..221: note = tr|A0A379AEA6|A0A379AEA6_ENTAG GTP cyclohydrolase 1; OS = Enterobacter agglomerans OX=549 GN=folE PE=3 SV=1

SEQ ID NO: 7842 - protein, 221 aa, unidentified
  source 1..221: note = Enterobacter agglomerans
  REGION 1..221: note = tr|A0A2A7VAJ1|A0A2A7VAJ1_ENTAG GTP cyclohydrolase 1; OS = Enterobacter agglomerans OX=549 GN=folE PE=3 SV=1
MSTLSQEAALVHEALLARGLETPLRAPTRDIDNETRKSLIAGHMTEIMQLLNLDLEDDSLMETPHRIAKMYVDEVFSGLDYANFPKITVIENKMKVDEMVTVRDITLTSTCEHHFVIIDGKATVAYIPKEKVIGLSKINRIVQFFAQRPQVQERLTQQVLVALQTLLGTNNVAVSIDAVHYCVKARGVKDATSATTTTSLGGLFKSSQNTRQEFLRAVRHS

SEQ ID NO: 7843 - protein, 222 aa, Enterobacter asburiae
  REGION 1..222: note = tr|A0A263VY49|A0A263VY49_ENTAS GTP cyclohydrolase 1; OS = Enterobacter asburiae OX=61645 GN=folE PE=3 SV=1
MSSLSKEAALVHEALVARGLETPLRPPVQDLDNETRKRLIAGHMTEIMELLNLDLSDDSLMETPHRIAKMYVDEIFSGLDYANFPKITVIENKMKVDEMVTVRDITLTSTCEHHFVTIDGKATVAYIPKDTVIGLSKINRIVQFFAQRPQVQERLTQQILTALQTLLGTNNVAVSIDAVHYCVKARGVRDATSATTTTSLGGLFKSSQNTRQEFLRAVRHHN

SEQ ID NO: 7844 - protein, 222 aa, Enterobacter asburiae
  REGION 1..222: note = tr|A0A376FMG6|A0A376FMG6_ENTAS GTP cyclohydrolase 1; OS = Enterobacter asburiae OX=61645 GN=folE PE=3 SV=1
MSSLSKEAALVHEALVARGLETPLRPPVQDLDNETRKRLIAGHMTDIMELLNLDLSDDSLMETPHRIAKMYVDEIFSGLDYANFPKITVIENKMKVDEMVTVRDITLTSTCEHHFVTIDGKATVAYIPKDTVIGLSKINRIVQFFAQRPQVQERLTQQILTALQTLLGTNNVAVSIDAVHYCVKARGVRDATSATTTTSLGGLFKSSQNTRQEFLRAVRHHN

SEQ ID NO: 7845 - protein, 222 aa, unidentified
  source 1..222: note = Enterobacter bugandensis
  REGION 1..222: note = tr|A0A2J7SVL6|A0A2J7SVL6_9ENTR GTP cyclohydrolase 1; OS = Enterobacter bugandensis OX=881260 GN=folE PE=3 SV=1
MSSLSKEAALVHEALLARGLETPLRPPVQDMDNETRKSLISGHMTEIMQLLNLDLSDDSLMETPKRIAKMYVDEIFSGLDYANFPKITVIENKMKVDEMVTVRDITLTSTCEHHFVTIDGKATVAYIPKDTVIGLSKINRIVQFFAQRPQVQERLTQQILIALQTLLGTNNVAVSIDAVHYCVKARGVRDATSATTTTSLGGLFKSSQNTRQEFLRAVRHHN

SEQ ID NO: 7846 - protein, 242 aa, Enterobacter cancerogenus
  REGION 1..242: note = tr|D2ZEP0|D2ZEP0_9ENTR GTP cyclohydrolase 1; OS = Enterobacter cancerogenus ATCC 35316 OX=500639 GN=folE; PE = 3 SV=1
MSAHFCHNEGRRKPHLQEKKMSSLSKEAALVHEALVARGLETPLRPPVQELDNETRKRLISGHMTEIMQLLNLDLSDDSLMETPHRIAKMYVDEIFSGLDYANFPKITVIENKMKVDEMVTVRDITLTSTCEHHFVTIDGKATVAYIPKDTVIGLSKINRIVQFFSQRPQVQERLTQQILTALQTLLGTNNVAVSIDAVHYCVKARGVRDATSATTTTSLGGLFKSSQNTRQEFLRAVRHHN

SEQ ID NO: 7847 - protein, 222 aa, Enterobacter cancerogenus
  REGION 1..222: note = tr|A0A2J7P1F1|A0A2J7P1F1_9ENTR GTP cyclohydrolase 1; OS = Enterobacter cancerogenus OX=69218 GN=folE PE=3 SV=1
MSSLSKEAALVHEALVARGLETPLRPPVQELDNETRKRLISGHMTEIMQLLNLDLSDDSLMETPHRIAKMYVDEIFSGLDYANFPKITVIENKMKVDEMVTVRDITLTSTCEHHFVTIDGKATVAYIPKDTVIGLSKINRIVQFFSQRPQVQERLTQQILTALQTLLGTNNVAVSIDAVHYCVKARGVRDATSATTTTSLGGLFKSSQNTRQEFLRAVRHHN

SEQ ID NO: 7848 - protein, 222 aa, unidentified
  source 1..222: note = Enterobacter chengduensis
  REGION 1..222: note = tr|A0A0F4BG98|A0A0F4BG98_9ENTR GTP cyclohydrolase 1; OS = Enterobacter chengduensis OX=2494701 GN=folE PE=3 SV=1
MSSLSKEAALVHEALVARGLETPLRPPVQDMDNETRKRLIAGHMTDIMELLNLDLSDDSLMETPHRIAKMYVDEIFSGLDYANFPKITVIENKMKVDEMVTVRDITLTSTCEHHFVTIDGKATVAYIPKDTVIGLSKINRIVQFFAQRPQVQERLTQQILTALQTLLGTNNVAVSIDAVHYCVKARGVRDATSATTTTSLGGLFKSSQNTRQEFLRAVRHHN

SEQ ID NO: 7849 - protein, 222 aa, unidentified; identical to SEQ ID NO: 7845
  source 1..222: note = Enterobacter chuandaensis
  REGION 1..222: note = tr|A0A3A3ZEN0|A0A3A3ZEN0_9ENTR GTP cyclohydrolase 1; OS = Enterobacter chuandaensis OX=2497875 GN=folE PE=3 SV=1

SEQ ID NO: 7850 - protein, 222 aa, Enterobacter cloacae; identical to SEQ ID NO: 6754
  REGION 1..222: note = tr|A0A155VQY3|A0A155VQY3_ENTCL GTP cyclohydrolase 1; OS = Enterobacter cloacae OX=550 GN=folE PE=3 SV=1

SEQ ID NO: 7851 - protein, 222 aa, Enterobacter cloacae
  REGION 1..222: note = tr|A0A145F1T5|A0A145F1T5_ENTCL GTP cyclohydrolase 1; OS = Enterobacter cloacae OX=550 GN=folE PE=3 SV=1
MSSLSKEAALVHEALVARGLETPLRPPVQELDNDTRKSLIAGHMTEIMQLLNLDLSDDSLMETPHRIAKMYVDEIFSGLDYANFPKITVIENKMKVDEMVTVRDITLTSTCEHHFVTIDGKATVAYIPKDTVIGLSKINRIVQFFAQRPQVQERLTQQILTALQTLLGTNNVAVSIDAVHYCVKARGVRDATSATTTTSLGGLFKSSQNTRQEFLRAVRHHN

SEQ ID NO: 7852 - protein, 222 aa, unidentified; identical to SEQ ID NO: 7843
  source 1..222: note = Enterobacter genomosp.
  REGION 1..222: note = tr|A0A0X4ENS8|A0A0X4ENS8_9ENTR GTP cyclohydrolase 1; OS = Enterobacter genomosp. O OX=2364150 GN=folE PE=3 SV=1

SEQ ID NO: 7853 - protein, 222 aa, Enterobacter hormaechei
  REGION 1..222: note = tr|A0A3S0PF56|A0A3S0PF56_9ENTR GTP cyclohydrolase 1; OS = Enterobacter hormaechei OX=158836 GN=folE PE=3 SV=1
MSSLSKEAALVHEALVARGLETPLRPPVQELDNVTRKSLIAGHMTEIMQLLNLDLSDDSLMETPHRIAKMYVDEIFSGLDYANFPKITVIENKMKVDEMVTVRDITLTSTCEHHFVTIDGKATVAYIPKDTVIGLSKINRIVQFFAQRPQVQERLTQQILTALQTLLGTNNVAVSIDAVHYCVKARGVRDATSATTTTSLGGLFKSSQNTRQEFLRAVRHHN

SEQ ID NO: 7854 - protein, 222 aa, Enterobacter hormaechei; identical to SEQ ID NO: 7851
  REGION 1..222: note = tr|A0A2J0Q5D1|A0A2J0Q5D1_9ENTR GTP cyclohydrolase 1; OS = Enterobacter hormaechei OX=158836 GN=folE PE=3 SV=1

SEQ ID NO: 7855 - protein, 222 aa, unidentified
  source 1..222: note = Enterobacter huaxiensis
  REGION 1..222: note = tr|A0A3R9NB08|A0A3R9NB08_9ENTR GTP cyclohydrolase 1; OS = Enterobacter huaxiensis OX=2494702 GN=folE PE=3 SV=1
MPSLSKEAALVHEALVAHGLETPLRPPVQELDNETRKNLISGHMTEIMQLLNLDLSDDSLMETPHRIAKMYVDEIFSGLDYANFPKITVIENKMKVDEMVTVRDITLTSTCEHHFVTIDGKATVAYIPKDTVIGLSKINRIVRFFSQRPQVQERLTQQILIALQTLLGTNNVAVSIDAVHYCVKARGVRDATSATTTTSLGGLFKSSQNTRQEFLRAVRHHN

SEQ ID NO: 7856 - protein, 222 aa, Enterobacter kobei
  REGION 1..222: note = tr|A0A5E1ACV3|A0A5E1ACV3_9ENTR GTP cyclohydrolase 1; OS = Enterobacter kobei OX=208224 GN=folE PE=3 SV=1
MSSLSKEAALVHEALVARGLETPLRPPVQEVDNETRKRLIAGHMTEIMQLLNLDLSDDSLMETPHRIAKMYVDEIFSGLDYANFPKITVIENKMKVDEMVTVRDITLTSTCEHHFVTIDGKATVAYIPKDTVIGLSKINRIVQFFAQRPQVQERLTQQILTALQTLLGTNNVAVSIDAVHYCVKARGVRDATSATTTTSLGGLFKSSQNTRQEFLRAVRHHN

SEQ ID NO: 7857 - protein, 222 aa, Enterobacter kobei
  REGION 1..222: note = tr|A0A155A4U2|A0A155A4U2_9ENTR GTP cyclohydrolase 1; OS = Enterobacter kobei OX=208224 GN=folE PE=3 SV=1
MSSLSKEAALVHEALLARGLETPLRPPVEDMDNETRKSLISGHMTEIMQLLNLDLSDDSLMETPKRIAKMYVDEIFSGLDYANFPKITVIENKMKVDEMVTVRDITLTSTCEHHFVTIDGKATVAYIPKDTVIGLSKINRIVQFFAQRPQVQERLTQQILIALQTLLGTNNVAVSIDAVHYCVKARGVRDATSATTTTSLGGLFKSSQNTRQEFLRAVRHHN

SEQ ID NO: 7858 - protein, 222 aa, unidentified
  source 1..222: note = Enterobacter lignolyticus
  REGION 1..222: note = tr|E3GC16|E3GC16_ENTLS GTP cyclohydrolase 1; OS = Enterobacter lignolyticus (strain SCF1) OX=701347; GN = folE PE=3 SV=1
MSSLSKEAALVHEALVARGLETPLRPSAIEADNETRKRLIAGHMTEIMQLLNLDLSDDSLMETPHRIAKMYVDEIFSGLDYANFPKITVIENKMKVDEMVTVRDITLTSTCEHHFVTIDGKATVAYIPKESVIGLSKINRIVQFFAQRPQVQERLTQQILVALQTLLGTNNVAVSIDAVHYCVKARGIRDATSATTTTSLGGLFKSSQNTRQEFLRAVRHHN

SEQ ID NO: 7859 - protein, 248 aa, Enterobacter ludwigii
  REGION 1..248: note = tr|G8LJU7|G8LJU7_9ENTR GTP cyclohydrolase 1; OS = Enterobacter ludwigii OX=299767 GN=folE PE=3 SV=1
MRRLTHNERTLLPQRGQKTPHLQEKRMPSLSKEAALVHEALVARGLETPLRPPVQELDNETRKHLIAGHMTEIMQLLNLDLSDDSLMETPHRIAKMYVDEIFSGLDYANFPKITVIENKMKVDEMVTVRDITLTSTCEHHFVTIDGKATVAYIPKDTVIGLSKINRIVQFFAQRPQVQERLTQQILTALQTLLGTNNVAVSIDAVHYCVKARGVRDATSATTTTSLGGLFKSSQNTRQEFLRAVRHHN

SEQ ID NO: 7860 - protein, 222 aa, Enterobacter ludwigii
  REGION 1..222: note = tr|W0BNG5|W0BNG5_9ENTR GTP cyclohydrolase 1; OS = Enterobacter ludwigii OX=299767 GN=folE PE=3 SV=1
MPSLSKEAALVHEALVARGLETPLRPPVQELDNETRKHLIAGHMTEIMQLLNLDLSDDSLMETPHRIAKMYVDEIFSGLDYANFPKITVIENKMKVDEMVTVRDITLTSTCEHHFVTIDGKATVAYIPKDTVIGLSKINRIVQFFAQRPQVQERLTQQILTALQTLLGTNNVAVSIDAVHYCVKARGVRDATSATTTTSLGGLFKSSQNTRQEFLRAVRHHN

SEQ ID NO: 7861 - protein, 222 aa, Enterobacter mori
  REGION 1..222: note = tr|A0A2J0NJG8|A0A2J0NJG8_9ENTR GTP cyclohydrolase 1; OS = Enterobacter mori OX=539813 GN=folE PE=3 SV=1
MSSLSKEAALVHEALVARGLETPLRPPVQELDNETRKRLISGHMTEIMQLLNLDLSDDSLMETPQRIAKMYVDEIFSGLDYANFPKITVIENKMKVDEMVTVRDITLTSTCEHHFVTIDGKATVAYIPKDTVIGLSKINRIVRFFSQRPQVQERLTQQILTALQTLLGTSNVAVSIDAVHYCVKARGVRDATSATTTTSLGGLFKSSQNTRQEFLRAVRHHN

SEQ ID NO: 7862 - protein, 222 aa, unidentified; identical to SEQ ID NO: 7844
  source 1..222: note = Enterobacter roggenkampii
  REGION 1..222: note = tr|A0A1C7ZN77|A0A1C7ZN77_9ENTR GTP cyclohydrolase 1; OS = Enterobacter roggenkampii OX=1812935 GN=folE PE=3 SV=1

SEQ ID NO: 7863 - protein, 222 aa, unidentified; identical to SEQ ID NO: 7848
  source 1..222: note = Enterobacter sichuanensis
  REGION 1..222: note = tr|A0A0F1B4N5|A0A0F1B4N5_9ENTR GTP cyclohydrolase 1; OS = Enterobacter sichuanensis OX=2071710 GN=folE PE=3 SV=1

SEQ ID NO: 7864 - protein, 222 aa, Enterobacter soli
  REGION 1..222: note = tr|A0A198GER2|A0A198GER2_9ENTR GTP cyclohydrolase 1; OS = Enterobacter soli ATCC BAA-2102 OX=1354262 GN=folE PE=3; SV = 1
MSSLSKEAALVHEALLARGLETPLRPPVQEMDNETRKRLISGHMTEIMQLLNLDLSDDSLMETPHRIAKMYVDEIFSGLDYANFPKITVIENKMKVDEMVTVRDITLTSTCEHHFVTIDGKATVAYIPKDTVIGLSKINRIVRFFAQRPQVQERLTQQILTALQTLLGTNNVAVSIDAVHYCVKARGVRDATSATTTTSLGGLFKSSQNTRQEFLRAVRHHN

SEQ ID NO: 7865 - protein, 222 aa, Enterobacter sp.
  REGION 1..222: note = sp|A4WCI8|GCH1_ENT38 GTP cyclohydrolase 1; OS = Enterobacter sp. (strain 638) OX=399742 GN=folE PE=3; SV = 1
MPSLSKEAALVHEALVARGLETPLRPPVNELDNETRKRLIAGHMTEIMQLLNLDLSDDSLMETPQRIAKMYVDEIFSGLDYANFPKITVIENKMNVDEMVTVRDITLTSTCEHHFVTIDGKATVAYIPKDTVIGLSKINRIVQFFAQRPQVQERLTQQILTALQTLLGTNNVAVSIDAVHYCVKARGVRDATSATTTTSLGGLFKSSQNTRQEFLRAVRHHN

SEQ ID NO: 7866 - protein, 222 aa, Enterobacter sp.; identical to SEQ ID NO: 7848
  REGION 1..222: note = tr|A0A0J1VMV3|A0A0J1VMV3_9ENTR GTP cyclohydrolase 1; OS = Enterobacter sp. BIDMC92 OX=1594172 GN=folE PE=3 SV=1

SEQ ID NO: 7867 - protein, 221 aa, unidentified
  source 1..221: note = Enterobacterales bacterium
  REGION 1..221: note = tr|A0A389MEQ9|A0A389MEQ9_9GAMM GTP cyclohydrolase 1; OS = Enterobacterales bacterium OX=1993870 GN=folE PE=3 SV=1
MSTLSKEAILVHEALMARGLETPLREPLPIDNETRKQRIQEHMTGIMQLLNLDLADDSLTETPRRIAKMYVDEIFSGLDYANFPKITVIENKMKVDEMVTVRDITLTSTCEHHFVTIDGKATVAYIPKDKVIGLSKINRIVQFFSQRPQVQERLTQQILLALQTLLGTTNVAVSIDAVHYCVKARGIRDATSATTTTSLGGLFKSSQNTRQEFLRTVRHPS

SEQ ID NO: 7868 - protein, 221 aa, unidentified
  source 1..221: note = Enterobacterales bacterium
  REGION 1..221: note = tr|A0A2I0FX86|A0A2I0FX86_9GAMM GTP cyclohydrolase 1; OS = Enterobacterales bacterium CwR94 OX=2025587 GN=folE; PE = 3 SV=1
MATLSQEATLVHEALLARGLETPLRTPVREMDDEQRKSLIAGHMTEIMQLLNLDLTDDSLAETPKRIAKMYVNEVFSGLDYANFPKITVIENKMKVDEMVTVRDITLTSTCEHHFVIIDGKATVAYIPKDKVIGLSKINRIVQFFAQRPQVQERLTQQVLVALQTLLGTNNVAVSIDAVHYCVKARGVKDATSATTTTSLGGLFKSSQNTRQEFLRAVRHN

SEQ ID NO: 7869 - protein, 48 aa, unidentified
  source 1..48: note = Enterobacteriaceae bacterium
  REGION 1..48: note = tr|A0A3C2BPB0|A0A3C2BPB0_9ENTR GTP cyclohydrolase I FolE (Fragment) OS=Enterobacteriaceae bacterium OX=1849603; GN = folE PE=4 SV=1
MSSLSKEAALVHEALVARGLETPLRPPLRELDNETRKRLISEHMSEIM

SEQ ID NO: 7870 - protein, 221 aa, unidentified
  source 1..221: note = Enterobacteriaceae bacterium
  REGION 1..221: note = tr|A0A427BZK9|A0A427BZK9_9ENTR GTP cyclohydrolase 1; OS = Enterobacteriaceae bacterium CCUG 66741 OX=1851514; GN = folE PE=3 SV=1
MPSLSKEAALVHEALLARGLETPLRPPVDMDNESRKRLIAGHMTEIMQLLNLDLSDDSLMETPHRIAKMYVDEIFSGLDYANFPKITVIENKMKVDEMVTVRDITLTSTCEHHFVTIDGKATVAYIPKESVIGLSKINRIVQFFAQRPQVQERLTQQILTALQTLLGTNNVAVSIDAVHYCVKARGIRDATSATTTTSLGGLFKSSQNTRQEFLRAVRHHN

SEQ ID NO: 7871 - protein, 219 aa, Enterococcus aquimarinus
  REGION 1..219: note = tr|A0A1L8QTD9|A0A1L8QTD9_9ENTE GTP cyclohydrolase 1; OS = Enterococcus aquimarinus OX=328396 GN=folE PE=3 SV=1
MAEMIDEKNEIREKQLLMNNFPELASNPALLTPKLEEMMMLEDAMKRLIDFCGDDSDREGVRETPYRFLKAFLEYTQGYREDPKAHLHKIFDVPYQELVLVKEIEFYSMCEHHFAPFFGVVHVGYIPNEKVTGLSKIARMVEGYARRFQVQERLTMQIAEALEEILEPIGTMVVVEAKHTCMCSRGVKNTSAMTTTSAVRGIFAEKAEARAEFLTLIKG

SEQ ID NO: 7872 - protein, 187 aa, Enterococcus asini
  REGION 1..187: note = tr|A0A413AK44|A0A413AK44_9ENTE GTP cyclohydrolase 1; OS = Enterococcus asini OX=57732 GN=folE PE=3 SV=1
MEENKQRMIENAIRDILTAVGEDPNRPGLVETPARVARMYAEVFSGLNTTFDDYKLFESASQTEMVVVKDIHFYSMCEHHLLPFFGLVHIAYIPAEDKVIGLSKLPRLVEHCARRPSVQENLTEMIGQELAAHIPLKGVAVVIEAEHLCMAMRGVRSPQSRTKTFYYSGCFQSVRDLKTDFLQAIQG

SEQ ID NO: 7873 - protein, 187 aa, Enterococcus asini
  REGION 1..187: note = tr|R2S1P6|R2S1P6_9ENTE GTP cyclohydrolase 1; OS = Enterococcus asini ATCC 700915 OX=1158606 GN=folE PE=3; SV = 1
MEENKQRMIENAVRDILTAVGEDPNRPGLVETPARVARMYAEVFSGLNTIFDDYKLFESTSQTEMVVVKDIHFYSMCEHHLLPFFGLVHIAYIPAEDKVIGLSKLPRLVEHCARRPSVQENLTEMIGQELAAHIPLKGVAVVIEAEHLCMAMRGVRSPQSRTKTFYYSGCFQSDRDLKTDFLQAIQG

SEQ ID NO: 7874 - protein, 188 aa, Enterococcus caccae
  REGION 1..188: note = tr|R3WGL9|R3WGL9_9ENTE GTP cyclohydrolase 1; OS = Enterococcus caccae ATCC BAA-1240 OX=1158612 GN=folE; PE = 3 SV=1
MDEKQLAAIEQAVKQILNAIGEDPDRAGVKDTPKRVAKMYNEVFSSLRAPEFDDYALFDSLNEDDMVLVKDIQFYSMCEHHLLPFYGKAHIAYIPDESKVLGLSKLPRLVEYCAKRPSVQEDLTIMIANKLVEHVPVKGVAVAIEAEHMCMTMRGVRSPHSLTKTFHYQGVFKTNRECKDDFLRAIEA

SEQ ID NO: 7875 - protein, 182 aa, Enterococcus casseliflavus
  REGION 1..182: note = tr|A0A377KRR6|A0A377KRR6_ENTCA GTP cyclohydrolase 1; OS = Enterococcus casseliflavus OX=37734 GN=folE PE=3 SV=1
MDKERIKNAVKEILIAVGEDPTREGLVDTPERVAKMYMETCSGMIQDPKEVTKSFESNSQGIVIVKDIAFSSTCEHHLLPFVGKATVAYIPGNNRVLGLSKLARVVDVVSSKLQIQERLCNEVALVIAEAISPKGVAVLLEAEHTCMTIRGVKKEAALTKTIVYKGIFEEDLNRRNELLQLL

SEQ ID NO: 7876 - protein, 219 aa, Enterococcus durans
  REGION 1..219: note = tr|A0A5B9A610|A0A5B9A610_9ENTE GTP cyclohydrolase 1; OS = Enterococcus durans OX=53345 GN=folE PE=3 SV=1
MMMNEDYNEDRYSEENLLESNFPNLNKNSSQFQEKLEDVHEIENALKTLMTLCGQDEKNPDLDKTPFRVVKAFLEYTTGYREDPASHLEKTFDITQNDPIIVKDIEFYSMCEHHFAPFFGVAHVAYIPNKKVTGLSKIARVVEGYARRFQVQERLTNQIADAIESVLEPRGVMVAIEAKHLCVSSRGAKKEEAKTFTLVSRGVYRDNPALRSEFMMAIK

SEQ ID NO: 7877 - protein, 186 aa, Enterococcus faecalis
  REGION 1..186: note = sp|Q82Z12|GCH1_ENTFA GTP cyclohydrolase 1; OS = Enterococcus faecalis (strain ATCC 700802 / V583); OX = 226185 GN=folE PE=3 SV=1
MEQEKQAQIEQAVTTILEAVGEDTQRAGLIDTPKRVAKMYAEVFSGLTEPEFDDYKLFDSLNEGEMVLVKDIAFYSMCEHHLLPFYGKVHVAYLPEGGKVLGLSKLPRLVEHCAKRPTVQEDLTVTIARKLQENIPVKGIAVAIEAEHMCMTMRGVKTPQSSTKTFQFTGLFKEQEWKNQFLMEIR

SEQ ID NO: 7878 - protein, 189 aa, Enterococcus faecalis
  REGION 1..189: note = tr|J6EGQ6|J6EGQ6_ENTFL GTP cyclohydrolase 1; OS = Enterococcus faecalis ERV65 OX=1134794 GN=folE PE=3 SV=1
MVEMEQEKQAQIEQAVTTILEAVGEDTQRAGLIDTPKRVAKMYAEVFSGLTEPEFDDYKLFDSLNEGEMVLVKDIAFYSMCEHHLLPFYGKVHVAYLPEGGKVLGLSKLPRLVEHCAKRPTVQEDLTVTIARKLQENIPVKGIAVAIEAEHMCMTMRGVKTPQSSTKTFQFTGLFKEQEWKNQFLMEIR

SEQ ID NO: 7879 - protein, 79 aa, Enterococcus faecium
  REGION 1..79: note = tr|A0A2V2KZF6|A0A2V2KZF6_ENTFC GTP cyclohydrolase 1 (Fragment) OS=Enterococcus faecium OX=1352 GN=DKX15_21230; PE = 3 SV=1
ARAYQEIFSGLYEDPTEVLSKTFSEDHREMVMVRDIQFYSTCEHHLVPFFGTAHIGYIPGKDGKVTGLSKLARLVDGMA

SEQ ID NO: 7880 - protein, 219 aa, Enterococcus faecium; identical to SEQ ID NO: 7876
  REGION 1..219: note = tr|A0A3F3NJZ2|A0A3F3NJZ2_ENTFC GTP cyclohydrolase 1; OS = Enterococcus faecium OX=1352 GN=folE PE=3 SV=1

SEQ ID NO: 7881 - protein, 188 aa, Enterococcus haemoperoxidus
  REGION 1..188: note = tr|R2SJ12|R2SJ12_9ENTE GTP cyclohydrolase 1; OS = Enterococcus haemoperoxidus ATCC BAA-382 OX=1158608; GN = folE PE=3 SV=1
MNEEQLVTIEQAVKQILTAIGEDPDRAGVQDTPKRVAKMYNEVFSSLREPEFNDYALFDSLNEEDMVLVKDIQFYSMCEHHLLPFYGKVHVAYIPDKRKVLGLSKLPRLVEYCAKRPSVQEDLTIMIANKLVEHVPVKGVAVAIEAEHMCMTMRGVKSPSSLTKTFHYQGIFKTNKECKDDFLRGIKA

SEQ ID NO: 7882 - protein, 219 aa, Enterococcus hirae; identical to SEQ ID NO: 7876
  REGION 1..219: note = tr|A0A4S3PAP6|A0A4S3PAP6_ENTHR GTP cyclohydrolase 1; OS = Enterococcus hirae OX=1354 GN=folE PE=3 SV=1

SEQ ID NO: 7883 - protein, 187 aa, Enterococcus pallens
  REGION 1..187: note = tr|R2PVR5|R2PVR5_9ENTE GTP cyclohydrolase 1; OS = Enterococcus pallens ATCC BAA-351 OX=1158607 GN=folE; PE = 3 SV=1
MAFQQQKIEAAVKQILEAIGEDPEREGLIDTPKRVAKMYGEVFSSLNEPEFDDYTLFASGNDDDMVVVKDIQFYSMCEHHLLPFFGKVHIAYVPEGDKVLGLSKLPRLVDYCTKRPSVQENLTVLIADQLVKHVPVKGVAVSIEAEHMCMTMRGVKTPHSSTKTFHYTGIFKEDREWKRDFLAAINN

SEQ ID NO: 7884 - protein, 187 aa, Enterococcus pseudoavium
  REGION 1..187: note = tr|A0A3D8ZXU5|A0A3D8ZXU5_9ENTE GTP cyclohydrolase 1; OS = Enterococcus pseudoavium OX=44007 GN=folE PE=3 SV=1
MDLQQEKIEAAVTQILEALGEDPKREGLINTPRRVAKMYQEIFSSLNEPEFNDYPLFDSGNDNDMVLVKEIQFYSMCEHHLLPFFGKVHVAYVPEGNKVVGLSKLPRLVEYCAKRPSVQENLTVMIADQLVKHVPVKGVAVAIEAEHMCMTMRGVKTPNSLTKTFHYRGIFKEDREWKKDFLAAINN

SEQ ID NO: 7885 - protein, 188 aa, unidentified
  source 1..188: note = Enterococcus rivorum
  REGION 1..188: note = tr|A0A1E5KYT4|A0A1E5KYT4_9ENTE GTP cyclohydrolase 1; OS = Enterococcus rivorum OX=762845 GN=folE PE=3 SV=1
MEAEKKVIIENAVREILLAIGEDPERSGLIDTPKRVAKMYGEVFSSLNEPEFNDYALFDSSNSEDLVVVKDIQFYSMCEHHLLPFFGKAHIAYIPEGNQVLGLSKLPRLVEYCAKRPSVQEDLTIMIANKLAEHVAVKGVAVALEAEHMCMTMRGVKTPVSKTKTFHYQGVFKTDREWKRDFLSAINS

SEQ ID NO: 7886 - protein, 188 aa, Enterococcus sp.
  REGION 1..188: note = tr|A0A242AXG5|A0A242AXG5_9ENTE GTP cyclohydrolase 1; OS = Enterococcus sp. 7F3_DIV0205 OX=1834189 GN=folE PE=3; SV = 1
MDEKQLEAIEQAVKQILNAIGEDPDRAGVKDTPRRVSKMYNEVFSSLRAPEFDDYALFDSLNEDDMVLVKDIQFYSMCEHHLLPFYGKVHIAYIPDESKVLGLSKLPRLVEYCAKRPSVQEDLTIMIANKLVEHVPVKGVAVAIEAEHMCMTMRGVKSPHSLTKTFHYQGVFKTNRECKDDFLRAIEA

SEQ ID NO: 7887 - protein, 210 aa, Enterococcus sp.
  REGION 1..210: note = tr|A0A242CJB2|A0A242CJB2_9ENTE GTP cyclohydrolase 1; OS = Enterococcus sp. 4G2_DIV0659 OX=1834181 GN=folE PE=3; SV = 1
MSGLQVQEIKQKFGSIGKVGKKMDEKQLVVIEEAVKQILEAIGEDPNRAGVKNTPTRVAKMYKEVFASLREPEFNDYALFDSLNEDDMVLVKDIQFYSMCEHHLLPFYGKVHVAYVPDEKKVLGLSKLPRLVEYCAKRPSVQEDLTIMIANKLVEHVPVKGVAVAIEAEHMCMTMRGVKSPNSLTKTFHYQGIFKTDREQKEDFLRAIEA

SEQ ID NO: 7888 - protein, 188 aa, unidentified
  source 1..188: note = Enterococcus ureilyticus
  REGION 1..188: note = tr|A0A1E5HBN8|A0A1E5HBN8_9ENTE GTP cyclohydrolase 1; OS = Enterococcus ureilyticus OX=1131292 GN=folE PE=3 SV=1
MDEKQLAMIEQAVKQILRAIGEDPERAGVKDTPTRVAKMYNEVFSSLRAPEFDDYALFDSLNEEDMVLVKDIQFYSMCEHHLLPFYGKAHVAYIPDERKVLGLSKLPRLVEYCAKRPSVQEDLTIMIANKLVEHVPVKGVAVAIEAEHMCMTMRGVKSPNSLTKTFHYQGVFKTDRECKDDFLRAIEA

SEQ ID NO: 7889 - protein, 186 aa, Enterorhabdus caecimuris
  REGION 1..186: note = tr|A0A4S4FYV3|A0A4S4FYV3_9ACTN GTP cyclohydrolase 1; OS = Enterorhabdus caecimuris OX=671266 GN=folE PE=3 SV=1
MDTAKIEAGVRLILEGIGEDPNREGLLETPARVARMYGEVLGGLEEDPSRHFDVTFDEGHSEIVLVGDIPFYSMCEHHLAPFFGRAHVAYIPGEDGRICGISKLARLVDGFAKRPQVQERLTGQIADTLVEALNPAGVIVVIEAEHLCMSMRGVKKPGAKTTTRAVRGCFATDADARSEALALIFR

SEQ ID NO: 7890 - protein, 186 aa, Enterorhabdus caecimuris
  REGION 1..186: note = tr|R9KU24|R9KU24_9ACTN GTP cyclohydrolase 1; OS = Enterorhabdus caecimuris B7 OX=1235794 GN=folE PE=3 SV=1
MDTAKIEAGVRLILEGIGEDPNREGLLETPARVARMYEEVLGGLEEDPSRHFDVTFDEGHSEIVLVGDIPFYSMCEHHLAPFFGRAHVAYIPGEDGRICGISKLARLVDGFAKRPQVQERLTGQIADTLVEALNPAGVIVVIEAEHLCMSMRGVKKPGAKTTTRAVRGCFTTDADARSEALALIFR

SEQ ID NO: 7891 - protein, 186 aa, Enterorhabdus sp.
  REGION 1..186: note = tr|A0A4S2FWC9|A0A4S2FWC9_9ACTN GTP cyclohydrolase 1; OS = Enterorhabdus sp. NM05_H27 OX=2516956 GN=folE PE=3 SV=1
MDTAKIEAGVRLILEGIGEDPNREGLLETPARVARMYEEVLGGLEEDPSRHFDVTFDEGHSEIVLVGDIPFYSMCEHHLAPFFGRAHVAYIPGEDGRICGISKLARLVDGFAKRPQVQERLTGQIADTLVEALNPAGVIVVIEAEHLCMSMRGVKKPGAKTTTRAVRGCFATDADARSEALALIFR

SEQ ID NO: 7892 - protein, 189 aa, unidentified
  source 1..189: note = Enteroscipio rubneri
  REGION 1..189: note = tr|A0A2K2UAX2|A0A2K2UAX2_9ACTN GTP cyclohydrolase 1; OS = Enteroscipio rubneri OX=2070686 GN=folE PE=3 SV=1
MDREKIEAGVRLILEGVGEDPEREGLRETPARVARMYEEVFAGLKQDPAEHFATTFDEHHEEMVLVRDIPFYSMCEHHLVPFFGMAHVAYIPAADGRICGLSKLARLVDVFAKRPQVQERLTSQIADTLIEQLHPQGVIVVLEAEHLCMSMRGVKKAGAKTTTSAVRGAFERSQATRAEALSLIFARRD

SEQ ID NO: 7893 - protein, 219 aa, Enterovibrio coralii
  REGION 1..219: note = tr|A0A135I8H2|A0A135I8H2_9GAMM GTP cyclohydrolase 1; OS = Enterovibrio coralii OX=294935 GN=folE PE=3 SV=1
MTALSDSAKRVRDALIARGIETPMQSGSSMTAEEKKEKIEYHMREILTVIDLDLEDDSLMETPARIAKMYVDEVFSGLDYSNFPKITVIDNKMGCDEMVRVKDITLTSTCEHHLVTIDGSCTVAYLPKDKIIGLSKINRIVRFFAQRPQVQERLTRQILVALQTLLETDNVAVHMNATHYCVKARGVMDATSATTTTALGGVFKKNAATRAEFLHGIGM

SEQ ID NO: 7894 - protein, 217 aa, Enterovibrio nigricans
  REGION 1..217: note = tr|A0A1T4VKR0|A0A1T4VKR0_9GAMM GTP cyclohydrolase 1; OS = Enterovibrio nigricans DSM 22720 OX=1121868 GN=folE; PE = 3 SV=1
MTALSDSAKRVREALVARGIETPMQSGSSMTAEEKKEKIEYHMREILSVIDLDLKDDSLIETPARIAKMYVDEVFSGLDYSNFPKITVIDNKMGCDEMVRVKNITLTSTCEHHLVTIDGTCTVAYLPKDKIIGLSKINRIVRFFAQRPQVQERLTRQILVALQTLLETDNVAVHMNATHYCVKARGVMDATSATTTTALGGVFKKNAATRAEFLHGI

SEQ ID NO: 7895 - protein, 219 aa, Enterovibrio norvegicus
  REGION 1..219: note = tr|A0A2N7LAS3|A0A2N7LAS3_9GAMM GTP cyclohydrolase 1; OS = Enterovibrio norvegicus OX=188144 GN=folE PE=3 SV=1
MTALSDSAIRVREALVARGIETPMTPGSSMTATEKKERIEYHMREILSVIDLDLTDDSLIETPARIAKMYVDEVFSGLDYSNFPKITVIDNKMGCDEMVRVKNITLTSTCEHHLVTIDGACTVAYLPKDKIIGLSKINRIVRFFAQRPQVQERLTRQVLVALQTLLETDNVAVHVNATHYCVKSRGVMDATSETTTTALGGVFKKNAATRAEFLHGIGM

SEQ ID NO: 7896 - protein, 219 aa, Enterovibrio norvegicus
  REGION 1..219: note = tr|A0A4U1ZM27|A0A4U1ZM27_9GAMM GTP cyclohydrolase 1; OS = Enterovibrio norvegicus OX=188144 GN=folE PE=3 SV=1
MTALSDSAIRVREALVARGIETPMTPGSSMTATEKKERIEYHMREILSVIDLDLTDDSLTETPARIAKMYVDEVFSGLDYSNFPKITVIDNKMGCDEMVRVKNITLTSTCEHHLVTIDGACTVAYLPKEKIIGLSKINRIVRFFAQRPQVQERLTRQVLVALQTLLETDNVAVHVNATHYCVKSRGVMDATSETTTTALGGVFKKNAATRAEFLHGIGM

SEQ ID NO: 7897 - protein, 217 aa, unidentified
  source 1..217: note = Enterovibrio pacificus
  REGION 1..217: note = tr|A0A1C3EPV0|A0A1C3EPV0_9GAMM GTP cyclohydrolase 1; OS = Enterovibrio pacificus OX=1080227 GN=folE PE=3 SV=1
MTSLSDSAQKVREALIAQGIETPMRNDNNMSSLEKKEKISFHMREILNVLDLDLEDDSLTDTPSRIAKMYVDEVFCGLDYHKFPKITVIDNKMGCDEMVKVKDISVTSTCEHHLVTIDGRCAVAYVPDDKIIGLSKINRIVRFFAQRPQVQERLTKQILVALQALLETDNVAVHMTAVHYCVKSRGVMDSTSDTTTTALGGIFKSNPSTRAEFLHGV

SEQ ID NO: 7898 - protein, 205 aa, unidentified
  source 1..205: note = Enterovirga rhinocerotis
  REGION 1..205: note = tr|A0A4R7C654|A0A4R7C654_9RHIZ GTP cyclohydrolase 1; OS = Enterovirga rhinocerotis OX=1339210 GN=folE PE=3 SV=1
MNEHALPAGRAGNDEGAGRPTREEAEEAVRTLIRWAGDDPRREGLADTPSRVVRAYEDWFAGYRQDPASVLARTFSEIAKYDEMVILKDIPFSSHCEHHMAPIQGKVHVGYLPRKRVVGISKLARLVQAFARRLQIQERLTAEIADALQAELQPLGVAVMIEATHACMTTRGVHAREAVMTTSRMLGIFRENAKTRAEFLAAIGK

SEQ ID NO: 7899 - protein, 267 aa, unidentified
  source 1..267: note = Eoetvoesia caeni
  REGION 1..267: note = tr|A0A366H7H9|A0A366H7H9_9BURK GTP cyclohydrolase FolE2 OS=Eoetvoesia caeni OX=645616 GN=folE2 PE=3 SV=1
MNSLIDSVAVMPDVQSSADTRHMPIQRVGVRGVRHPMLIAAAGGPALPTVATWELTVALPAHEKGTHMSRFVALLEQYRVQAMTPALFCDMAQAMLPLLNAQQGDMSASFPYFVNKAAPVSGVQSLMDYEVKWTARANADATEFELGLLVPVTSLCPCSKAISNYGAHNQRSHVTVNVVFNDVAGIDVDALIGMIEQQASCELWGLLKRPDEKYVTERAYENPKFVEDLVRDVAVRVKAVAGVQRFRVEAENFESIHNHSAYAVVEG

SEQ ID NO: 7900 - protein, 367 aa, unidentified
  source 1..367: note = Epibacterium mobile
  REGION 1..367: note = tr|A0A1B1A090|A0A1B1A090_9RHOB GTP cyclohydrolase FolE2 OS=Epibacterium mobile F1926 OX=1265309 GN=folE2; PE = 3 SV=1
MNIHSRDVNDTPDRSDAEEALAVLRRWADEASETEVAQLDPAIARLLPGREVQNYPDLKRQYPEEFDASETYRATLPDLQNGPSSLIRGAKEQIQHVGISNFRLPIRFHTRDNGDLTLETSVTGTVSLDAEKKGINMSRIMRSFYKHAEKVFSFDVMEAALEDYLSDLESGDARLQMRFSFPVKVESLRSGLSGYQYYDVALELVQMGGQRHRIVHLDYVYSSTCPCSLELSEHARQARGQLATPHSQRSVARISVQMEQDSGCLWFEDLIDHCRRAVPTETQVMVKREDEQAFAELNAANPIFVEDAARLFCEALQSDARVGDFRVVASHQESLHSHDAVSVLTQGTMFAAPSLDPQLFSTLIHRG

SEQ ID NO: 7901 - protein, 367 aa, unidentified
  source 1..367: note = Epibacterium mobile
  REGION 1..367: note = tr|A0A1H2VKS1|A0A1H2VKS1_9RHOB GTP cyclohydrolase FolE2 OS=Epibacterium mobile OX=379347 GN=folE2 PE=3 SV=1
MNIHSRDVNDTPDRSDAEEALAVLRRWADEASEAEVAQLDPAIARLLPGREVQNYPDLKRQYPEEFDASETYRATLPDLQNGPSSLIRGAKEQIQHVGISNFRLPIRFHTRDNGDLTLETSVTGTVSLDAEKKGINMSRIMRSFYKHAEKVFSFDVMEAALEDYLSDLESGDARLQMRFSFPVKVESLRSGLSGYQYYDVALELVQMGGQRHRIVHLDYVYSSTCPCSLELSEHARQARGQLATPHSQRSVARISVQMEQDSGCLWFEDLIDHCRRAVPTETQVMVKREDEQAFAELNAANPIFVEDAARLFCEALQSDARVGDFRVVASHQESLHSHDAVSVLTQGVMFAAPSLDPQLFSTLIHRG

SEQ ID NO: 7902 - protein, 367 aa, unidentified
  source 1..367: note = Epibacterium multivorans
  REGION 1..367: note = tr|A0A0P1G8S2|A0A0P1G8S2_9RHOB GTP cyclohydrolase FolE2 OS=Epibacterium multivorans OX=928856 GN=folE2 PE=3; SV = 1
MNIYSRNRESAPDRETAAEALEVLRDWAATATETEIAQMDPAIARLLPGREVTNYPELSRHYDEDFKADENYRATLPDLQNGPTSLIRGAQEQIQHVGISNFRLPIRFHTRDAGDLLLETSVTGSVSLQAEKKGINMSRIMRSFYKHAEKTFSFEVMEHALEDYLTDLDSGDARLQMRFSFPAKIESLRSGLSGYQYYDIALELVQTGGERHEIIHLDYVYSSTCPCSLELSEHARQSRGQLATPHSQRSVARISVQVERDQPILWFEDLIDHCRRAVPTETQVMVKREDEQAFAELNAANPIFVEDAARLFCEALQSDGRIADFRIVASHQESLHSHDAVSVLTQGPMFASASLDPQLFSTLIHRG

SEQ ID NO: 7903 - protein, 367 aa, unidentified
  source 1..367: note = Epibacterium scottomollicae
  REGION 1..367: note = tr|A0A2T1AK12|A0A2T1AK12_9RHOB GTP cyclohydrolase FolE2 OS=Epibacterium scottomollicae OX=483013 GN=folE2; PE = 3 SV=1
MNVHSGDLRDTPDQSDAAEALAVLRRWASKASATEVAQLDPAIARLLPERQVQNYPDLKRQYPDEFEADAGYRATLPDLQNGPSSLIRGAQEQIQHVGISNFRLPIRFHTRAGGDLTLETSVTGTVSLDAEKKGINMSRIMRSFYRHAEKTFSFEVMEAALEDYLSDLESGDARLQMRFSFPVKVESLRSGLSGYQYYDVALELVQTGGQRHSIVHLDYVYSSTCPCSLELSEHARQSRGQLATPHSQRSVARISVQMEPGTGCLWFEDLIDHCRRAVPTETQVMVKREDEQAFAELNAANPIFVEDAARLFCEALQSDARVGDFRVVASHQESLHSHDAVSVLTQGKTFASQSLDPKLFSTLIHQG

SEQ ID NO: 7904 - protein, 368 aa, unidentified
  source 1..368: note = Epibacterium ulvae
  REGION 1..368: note = tr|A0A1G5PVN8|A0A1G5PVN8_9RHOB GTP cyclohydrolase FolE2 OS=Epibacterium ulvae OX=1156985 GN=folE2 PE=3 SV=1
MNMHSRSSSEESPDRDAATAALETLRAWAHKASATEIAELDPAVARLLPGQDVSNYPDLSRHYPEAFEVTPTYRETLPDLQNGPSSLIKGAKEQIQHVGISNFRLPIRFAGRDGGMQTLETSVTGTVSLDAEKKGINMSRIMRSFYKHAEKTFSFEVMEAAIEDYLTDLESLDARLQMRFSFPMRVESLRSGLSGYQYYDIALELIEREGQRQKIIHLDYVYSSTCPCSLELSEHARQARGQLATPHSQRSVARISIVIDPDADCLWFEDLIDHCRKAVPTETQVMVKREDEQAFAELNAANPIFVEDAARLFCEVLQNDSRIGDFRVMASHQESLHSHDAISLLVQGDTFAAQSVDPWHFGTLIHRG

SEQ ID NO: 7905 - protein, 178 aa, unidentified
  source 1..178: note = Epsilonproteobacteria bacterium
  REGION 1..178: note = tr|A0A496XUX8|A0A496XUX8_9PROT GTP cyclohydrolase 1; OS = Epsilonproteobacteria bacterium OX=2026809 GN=folE PE=3; SV = 1
MKKAVEEILKHVGEDISRDGLKDTPQRVQNAWEFLCSGYDIDPKKILNKALFDTTNQQMVVLKNIKFYSMCEHHMLPIIGKASIAYIPNGKVVGLSKIPRIVDIYARRLQIQEQLTKQIADTIYDVIKPKGVAVMIKARHMCMEMRGVQKQSNTITSSLNGLFQTNDKTRAEFFKIIT

SEQ ID NO: 7906 - protein, 192 aa, unidentified
  source 1..192: note = Epsilonproteobacteria bacterium
  REGION 1..192: note = tr|A0A426W1Y1|A0A426W1Y1_9PROT GTP cyclohydrolase 1; OS = Epsilonproteobacteria bacterium (ex Lamellibrachia satsuma) OX=2496635 GN=folE PE=3 SV=1
MNKEEEFEQAVTKILELLGEDPKREGLLKTPSRVAKALKFLTEGYDQNPEEILNQALFSTSNDEMVLVRDIEFYSMCEHHMLPIIGRAHVAYIPDGKVVGLSKIPRIVNVYARRLQIQEQMTEQIADAILGTIKPKGVAVVVHARHMCMEMRGVQKINSTTVSSALRGLFKSDERTRNEFYNLINTPTPSNF

SEQ ID NO: 7907 - protein, 189 aa, unidentified
  source 1..189: note = Epulopiscium sp.
  REGION 1..189: note = tr|A0A1V2YHP8|A0A1V2YHP8_9FIRM GTP cyclohydrolase 1; OS = Epulopiscium sp. Nuni2H_MBin001 OX=1884656 GN=folE PE=3; SV = 1
MDKEKIEYHIREIIIALGDDPEREGLKETPKRVAQMYEEVFEGMKYTNDEIANMFDKTFSEPHNGDLVVVRDIPAYSYCEHHMALIYNMNISIIYRPVDKVIGLSKLARIADMVSKRLQLQERIGADIASIVAKITGSDDVGVLIEAEHSCMSSRGINKIGTVTRTTTLRGAFEHDKMLRQEVLLLLMK

SEQ ID NO: 7908 - protein, 195 aa, unidentified
  source 1..195: note = Epulopiscium sp.
  REGION 1..195: note = tr|A0A1S9CTD7|A0A1S9CTD7_9FIRM GTP cyclohydrolase 1; OS = Epulopiscium sp. Nele67-Bin004 OX=1764962 GN=folE PE=3; SV = 1
MTLDKEKIAYHIREIIAELGDDPEREGLKDTPMRVAKMYEEVFEGMNYTNEQIATMFDKTFAEEDMLADETGNLVVVRDIPIHSFCEHHLALMYNMKVAVVYKPTNKVIGLSKIARIADMVGKRLQLQERIGHDIAEIMQMITGSEDIGVLIEGEHSCMTARGISKVGTITRTTTFTGSFKHDQALRQEALILMK

SEQ ID NO: 7909 - protein, 221 aa, Erwinia amylovora
  REGION 1..221: note = tr|D4HWS7|D4HWS7_ERWAC GTP cyclohydrolase 1; OS = Erwinia amylovora (strain CFBP1430) OX=665029 GN=folE; PE = 3 SV=1
MATLSQEATLVHQALVARGLETPLRSPGREMDDETRKQLIAGHMTEIMQLLNLDLEDDSLAETPQRIAKMYVNEVFSGLDYANFPKITVIENKMKVDEMVTVRDITLTSTCEHHFVIIDGQATVAYIPKDKVIGLSKINRIVQFFSSRPQVQERLTQQILVALQTLLDTSNVAVSIDAVHYCVKARGIRDATSATTTTSLGGLFKSSQNTRQEFLRSVRHR

SEQ ID NO: 7910 - protein, 221 aa, Erwinia amylovora
  REGION 1..221: note = tr|E5B5S6|E5B5S6_ERWAM GTP cyclohydrolase 1; OS = Erwinia amylovora ATCC BAA-2158 OX=889211 GN=folE PE=3; SV = 1
MATLSQEATLVHQALVARGLETPLRSPGREMDDDTRKQLIAGHMTEIMQLLNLDLEDDSLAETPQRIAKMYVNEVFSGLDYANFPKITVIENKMKVDEMVTVRDITLTSTCEHHFVIIDGQATVAYIPKDKVIGLSKINRIVQFFSSRPQVQERLTQQILVALQTLLDTSNVAVSIDAVHYCVKARGIRDATSATTTTSLGGLFKSSQNTRQEFLRSVRHR

SEQ ID NO: 7911 - protein, 221 aa, Erwinia aphidicola; identical to SEQ ID NO: 5173
  REGION 1..221: note = tr|A0A4R6PAR8|A0A4R6PAR8_ERWAP GTP cyclohydrolase 1; OS = Erwinia aphidicola OX=68334 GN=folE PE=3 SV=1

SEQ ID NO: 7912 - protein, 221 aa, Erwinia billingiae
  REGION 1..221: note = tr|D8MUL1|D8MUL1_ERWBE GTP cyclohydrolase 1; OS = Erwinia billingiae (strain Eb661) OX=634500 GN=folE; PE = 3 SV=1
MAALSQEAALVHQALLARGLETPLRPPAREMDDESRKRLIAGHMTEIMQLLNLDLEDDSLAETPHRIAKMYVDEVFSGLDYGNFPKITVIQNKMKVDEMVTVRDITLTSTCEHHFVIIDGKATVAYIPKDTVIGLSKINRIVQFFSSRPQVQERLTQQILVALQTLLGTNNVAVSIDAVHYCVKARGIRDATSATTTTSLGGLFKSSQNTRQEFLRAVRHS

SEQ ID NO: 7913 - protein, 221 aa, Erwinia billingiae; identical to SEQ ID NO: 7912
  REGION 1..221: note = tr|A0A5J6LVY2|A0A5J6LVY2_9GAMM GTP cyclohydrolase I FolE OS=Erwinia billingiae OX=182337 GN=folE PE=4 SV=1

SEQ ID NO: 7914 - protein, 221 aa, unidentified
  source 1..221: note = Erwinia citreus
  REGION 1..221: note = tr|A0A358L877|A0A358L877_ERWCI GTP cyclohydrolase 1; OS = Erwinia citreus OX=558 GN=folE PE=3 SV=1
MATLSQEATLVHETLLARGLETPLRSPAREMDDETRRRLIAGHMTEVMQLLNLDLEDDSLMETPHRIAKMYVNEVFSGLDYANFPKITLIENKMKVDEMVTVRDITLTSTCEHHFVIIDGKATVAYIPKDKVIGLSKINRIVQFFSSRPQVQERLTQQILVALQTLLGTNNVAVSIDAVHYCVKARGIRDATSATTTTSLGGLFKSSQNTRQEFLRAVRHN

SEQ ID NO: 7915 - protein, 221 aa, unidentified
  source 1..221: note = Erwinia gerundensis
  REGION 1..221: note = tr|A0A0U5L676|A0A0U5L676_9GAMM GTP cyclohydrolase 1; OS = Erwinia gerundensis OX=1619313 GN=folE PE=3 SV=1
MTILSREAALVHETLLARGLETPLRAPARDMHDETRKQLIAGHMTEIMQLLNLDLEDDSLMETPHRIAKMYVDEVFSGLDYANFPKITLIENKMKVDEMVTVRDITLTSTCEHHFVIIDGKATVAYIPKDKVIGLSKINRIVQFFAQRPQVQERLTQQVLIALQTLLGTNNVAVSIDAVHYCVKARGVKDATSATTTTSLGGLFKSSQNTRQEFLRAVRHS

SEQ ID NO: 7916 - protein, 221 aa, unidentified
  source 1..221: note = Erwinia iniecta
  REGION 1..221: note = tr|A0A0L7TA44|A0A0L7TA44_9GAMM GTP cyclohydrolase 1; OS = Erwinia iniecta OX=1560201 GN=folE PE=3 SV=1
MATLSQEAALVHEALLARGLETPLRSPAREMDDETRKNLITGHMTEIMKLLNLDLEDDSLAETPHRIAKMYVDEVFSGLDYANFPKITVIENKMKVDEMVTVRDITLTSTCEHHFVIIDGKATVAYIPKEKVIGLSKINRIVQFFSSRPQVQERLTQQILVALQTLLGTSNVAVSIDAVHYCVKARGIRDATSATTTTSLGGLFKSSQNTRQEFLRAVRHS

SEQ ID NO: 7917 - protein, 221 aa, Erwinia mallotivora
  REGION 1..221: note = tr|A0A014N7C3|A0A014N7C3_9GAMM GTP cyclohydrolase 1; OS = Erwinia mallotivora OX=69222 GN=folE PE=3 SV=1
MATLSQEATLVHEALLARGLETPLRSPAREMDDESRRQLIAGHMTEVMQLLNLDLQDDSLAETPHRIAKMYVNEIFSGLDYANFPKITLIENKMKVDEMVTVRDITLTSTCEHHFVMIDGKATVAYIPKDKVIGLSKINRIVQFFSSRPQVQERLTQQILLALQTLLGTNNVAVCIDAVHYCVKARGIRDATSATTTTSLGGLFKSSQNTRQEFLRTIRHG

SEQ ID NO: 7918 - protein, 221 aa, Erwinia persicina
  REGION 1..221: note = tr|A0A3S7S154|A0A3S7S154_9GAMM GTP cyclohydrolase 1; OS = Erwinia persicina OX=55211 GN=folE PE=3 SV=1
MATLSQEATQVHEALVARGLETPLRAPAREMDDDTRRQLIAGHMTEIMQLLNLDLEDDSLAETPQRIAKMYVNEVFSGLDYANFPKITLIENKMKVDEMVTVRDITLTSTCEHHFVIIDGRATVAYIPKDKVIGLSKINRIVQFFSSRPQVQERLTQQILLALQTLLGTNNVAVSIDAVHYCVKARGIRDATSATTTTSLGGLFKSSQNTRQEFLRSVRHR

SEQ ID NO: 7919 - protein, 221 aa, Erwinia piriflorinigrans
  REGION 1..221: note = tr|V5Z920|V5Z920_9GAMM GTP cyclohydrolase 1; OS = Erwinia piriflorinigrans CFBP 5888 OX=1161919 GN=folE; PE = 3 SV=1
MATLSQEATLVHQALVARGLETPLRAPVREMDDDTRKQLIAGHMTEIMQLLNLDLEDDSLAETPQRIAKMYVNEVFSGLDYANFPKITVIENKMKVDEMVTVRDITLTSTCEHHFVIIDGQATVAYIPKDKVIGLSKINRIVQFFSSRPQVQERLTQQILVALQTLLGTSNVAVSIDAVHYCVKARGIRDATSATTTTSLGGLFKSSQNTRQEFLRSVRHR

SEQ ID NO: 7920 - protein, 221 aa, Erwinia psidii
  REGION 1..221: note = tr|A0A3N6SEF8|A0A3N6SEF8_9GAMM GTP cyclohydrolase 1; OS = Erwinia psidii OX=69224 GN=folE PE=3 SV=1
MATLSQEATLVHDALLARGLETPLRAPVREMDDESRKNLIAGHMTEIMQLLNLDLEDDSLAETPHRIAKMYVNEIFSGLNYANFPKITLIENKMKVDEMVTVRDITLTSTCEHHFVMIDGKATVAYIPKDKVIGLSKINRIVQFFSSRPQVQERLTQQVLVALQTLLGTNNVAVSIDAVHYCVKARGIRDATSATTTTSLGGLFKSSQNTRQEFLRAVRHG

SEQ ID NO: 7921 - protein, 221 aa, Erwinia pyrifoliae
  REGION 1..221: note = tr|D2T8C6|D2T8C6_ERWP6 GTP cyclohydrolase 1; OS = Erwinia pyrifoliae (strain DSM 12163 / CIP 106111 / Ep16/96) OX=644651 GN=folE PE=3 SV=1
MATLSQEATLVHQALVARGLETPLRSPAREMDDDTRKRLIAGHMTEIMQLLNLDLEDDSLAETPQRIAKMYVNEVFSGLNYANFPKITVIENKMKVDEMVTVRDITLTSTCEHHFVIIDGQATVAYIPKDKVIGLSKINRIVQFFSSRPQVQERLTQQILVALQTLLGTSNVAVSIDAVHYCVKARGIRDATSATTTTSLGGLFKSSQNTRQEFLRSVRHR

SEQ ID NO: 7922 - protein, 221 aa, Erwinia rhapontici
  REGION 1..221: note = tr|A0A4R7GY95|A0A4R7GY95_ERWRD GTP cyclohydrolase 1; OS = Erwinia rhapontici OX=55212 GN=folE PE=3 SV=1
MATLSQEATLVHEALVARGLETPLRSPVREMDDDTRKQLIAGHMTEIMQLLNLDLEDDSLAETPQRIAKMYVNEVFSGLDYANFPKITVIENKMKVDEMVTVRDITLTSTCEHHFVIIDGQATVAYIPKEKVIGLSKINRIVQFFSSRPQVQERLTQQILVALQTLLGTSNVAVSIDAVHYCVKARGIRDATSATTTTSLGGLFKSSQNTRQEFLRSVRHR

SEQ ID NO: 7923 - protein, 221 aa, Erwinia sp.
  REGION 1..221: note = tr|A0A3R9AXX0|A0A3R9AXX0_9GAMM GTP cyclohydrolase 1; OS = Erwinia sp. 198 OX=2022746 GN=folE PE=3 SV=1
MATLSQEATLVHEALLARGLETPLRSPARDMDDETRRRLIAGHMTEVMQLLNLDLEDDSLMETPHRIAKMYVNEVFSGLDYANFPKITLIENKMKVDEMVTVRDITLTSTCEHHFVIIDGKATVAYIPKDKVIGLSKINRIVQFFSSRPQVQERLTQQILVALQTLLGTNNVAVSIDAVHYCVKARGIRDATSATTTTSLGGLFKSSQNTRQEFLRAVRHS

SEQ ID NO: 7924 - protein, 221 aa, Erwinia sp.
  REGION 1..221: note = tr|A0A3N1W036|A0A3N1W036_9GAMM GTP cyclohydrolase 1; OS = Erwinia sp. JUb26 OX=2485126 GN=folE PE=3 SV=1
MATLSQEAALVHEALLARGLETPLRAPVREMDDDTRRQLIAGHMTEIMQLLNLDLEDDSLRETPQRIAKMYVNEVFSGLDYANFPKITVIENKMKVDEMVTVRDITLTSTCEHHFVIIDGKATVAYIPKDKVIGLSKINRIVQFFSSRPQVQERLTQQILVALQTLLGTNNVAVSIDAVHYCVKARGIRDATSATTTTSLGGLFKSSQNTRQEFLRAVRHS

SEQ ID NO: 7925 - protein, 221 aa, Erwinia tasmaniensis
  REGION 1..221: note = sp|B2VII2|GCH1_ERWT9 GTP cyclohydrolase 1 OS=Erwinia tasmaniensis (strain DSM 17950 / CIP 109463 / Et1/99); OX = 465817 GN=folE PE=3 SV=1
MATLSQEATLVHQALVARGLETPLRSPVREMDDDARKQLIAGHMTEIMQLLNLDLEDDSLAETPQRIAKMYVNEVFSGLDYANFPKITVIENKMKVDEMVTVRDITLTSTCEHHFVIIDGQATVAYIPKDKVIGLSKINRIVQFFSSRPQVQERLTQQILVALQTLLGTSNVAVSIDAVHYCVKARGIRDATSATTTTSLGGLFKSSQNTRQEFLRSVRHR

SEQ ID NO: 7926 - protein, 221 aa, Erwinia tracheiphila
  REGION 1..221: note = tr|A0A0M2K6Z0|A0A0M2K6Z0_9GAMM GTP cyclohydrolase 1; OS = Erwinia tracheiphila OX=65700 GN=folE PE=3 SV=1
MATLSQEAKLVHNALLARGLETPLRSPSREMDDESRKNLIAGHMNEIMQLLNLDLDDDSLAETPHRVAKMYVNEIFSGLNYANFPKITMIENKMKVDEMVTVRDITLTSTCEHHFVMIDGKATVAYIPKDKVIGLSKINRIVQFFSSRPQVQERLTQQVLVALQTLLGTNNVAVSIDAVHYCVKSRGIRDATSATTTTSLGGLFKSSQNTRQEFLRAVRHG

SEQ ID NO: 7927 - protein, 221 aa, Erwinia tracheiphila
  REGION 1..221: note = tr|A0A345CSK5|A0A345CSK5_9GAMM GTP cyclohydrolase 1; OS = Erwinia tracheiphila OX=65700 GN=folE PE=3 SV=1
MATLSQEAKLVHNALLARGLETPLRSPSREMDDESRKNLIAGHMNEIMQLLNLDLDDDSLAETPHRVAKMYVNEIFSGLNYANFPKITLIENKMKVDEMVTVRDITLTSTCEHHFVMIDGKATVAYIPKDKVIGLSKINRIVQFFSSRPQVQERLTQQVLVALQTLLGTNNVAVSIDAVHYCVKARGIRDATSATTTTSLGGLFKSSQNTRQEFLRAVRHG

SEQ ID NO: 7928 - protein, 221 aa, Erwinia typographi
  REGION 1..221: note = tr|A0A0A3Z9I7|A0A0A3Z9I7_9GAMM GTP cyclohydrolase 1; OS = Erwinia typographi OX=371042 GN=folE PE=3 SV=1
MAALSQEAALVHEALLARGLETPLRSPVREMDDETRKRLIAGHMTEIMQLLNLDLEDDSLAETPHRIAKMYVNEVFSGLDYANFPKITVIENKMKVDEMVTVRDITLTSTCEHHFVIIDGKATVAYIPKEKVIGLSKINRIVQFFSSRPQVQERLTQQILLALQTLLGTNNVAVSIDAVHYCVKARGIRDATSATTTTSLGGLFKSSQNTRQEFLRAVRHS

SEQ ID NO: 7929 - protein, 196 aa, unidentified
  source 1..196: note = Erysipelatoclostridium ramosum
  REGION 1..196: note = tr|B0N7Y0|B0N7Y0_9FIRM GTP cyclohydrolase 1; OS = Erysipelatoclostridium ramosum DSM 1402 OX=445974; GN = folE PE=3 SV=1
MLIKEVSKMIDTKKIEEHIYGILKALGDDPEREGLKDTPKRVAKMYGEVFAGMNYSNLEIATMFDKTFIDDLDFDNQEVVVIKDIDIFSYCEHHLALMYDMKVTVAYIPCGKVIGLSKIARIADMAARRLQLQERIGTDIAEIISLVTNSKDIAVIIEGKHSCMSSRGIKKVNSTTVTSTLTGRFKTDSKLQIYLH

SEQ ID NO: 7930 - protein, 188 aa, unidentified; identical to SEQ ID NO: 6993
  source 1..188: note = Erysipelatoclostridium ramosum
  REGION 1..188: note = tr|A0A3E3EHA3|A0A3E3EHA3_9FIRM GTP cyclohydrolase 1; OS = Erysipelatoclostridium ramosum OX=1547 GN=folE PE=3 SV=1

SEQ ID NO: 7931 - protein, 188 aa, unidentified
  source 1..188: note = Erysipelatoclostridium sp.
  REGION 1..188: note = tr|A0A1Y4N1K4|A0A1Y4N1K4_9FIRM GTP cyclohydrolase 1; OS = Erysipelatoclostridium sp. An173 OX=1965571 GN=folE; PE = 3 SV=1
MIDLKKIEECIYQIIEALGEDPNREGLKETPKRVAKMYEEVFAGIQYTNQEIAEMFNKTFADDLDFANQEIVVVKDIDIFSYCEHHLALMYDMKVTVAYIPNGKVIGLSKIARIADMVARRLQLQERIGSDIAEIISLITDSKDIAVIINGKHSCMSARGIKKANTSTTTSTLTGRFKNDPSLQIYLQ

SEQ ID NO: 7932 - protein, 188 aa, unidentified; identical to SEQ ID NO: 7931
  source 1..188: note = Erysipelatoclostridium sp.
  REGION 1..188: note = tr|A0A1Y4QQG0|A0A1Y4QQG0_9FIRM GTP cyclohydrolase 1; OS = Erysipelatoclostridium sp. An15 OX=1965566 GN=folE PE=3; SV = 1

SEQ ID NO: 7933 - protein, 186 aa, unidentified
  source 1..186: note = Erysipelotrichaceae bacterium
  REGION 1..186: note = tr|A0A3C1MZP8|A0A3C1MZP8_9FIRM GTP cyclohydrolase 1; OS = Erysipelotrichaceae bacterium OX=2049044 GN=folE PE=3; SV = 1
MIDTKAIEEHVLGILEALGEDVTREGLVETPKRVAKMYAEVFAGINYSNEEIAQMFDKTFTQQGRDLVFVKDIETFSFCEHHMALMYDMKISVAYYPQGKVIGLSKIARICDLVCRRLQIQERIGSDIAEIMTMITGSEDVAVLIEAHHSCMSARGIKKTQAKTYTHTLRGVFAKHPEQLGGFYHG

SEQ ID NO: 7934 - protein, 188 aa, unidentified
  source 1..188: note = Erysipelotrichaceae bacterium
  REGION 1..188: note = tr|A0A3D4VPA0|A0A3D4VPA0_9FIRM GTP cyclohydrolase 1; OS = Erysipelotrichaceae bacterium OX=2049044 GN=folE PE=3; SV = 1
MDKEKIEKAVREIIIAIGEDPDREGLLDTPKRIANMYEEIFSGLNEDPKKHLEIYFQEEKYEELVLVKNIPFYSMCEHHLVPFFGNVHVGYLPKDGKLTGLSKLARVVETISKRPQLQERLTANIADSILEKLEPYGVIVVIEAEHVCMTMRGVKKPGSKTITSVVRGVFAKDLKARAEVMSIINNGR

SEQ ID NO: 7935 - protein, 202 aa, unidentified
  source 1..202: note = Erythrobacter aquimixticola
  REGION 1..202: note = tr|A0A419RS88|A0A419RS88_9SPHN GTP cyclohydrolase 1; OS = Erythrobacter aquimixticola OX=1958945 GN=folE PE=3 SV=1
MSSLVGPDEDDPRGKPPVPDDVQDAIRTLIRWAGDDPGREGLVDTPARVARAWKEYCLGYEEDPSTHLSRMFEEVGGYDEIVLLKDIPFQSHCEHHMAPIIGKAAIAYLPNDRVVGISKLARVLHGFARRLQIQERLTAEVANCIDKHLQPRGVAVVIEASHACMTARGVRTPGVQMVTSRVMGCFRDDHRSREEVLKLMGY

SEQ ID NO: 7936 - protein, 203 aa, unidentified
  source 1..203: note = Erythrobacter atlanticus
  REGION 1..203: note = tr|A0A0H4VYB8|A0A0H4VYB8_9SPHN GTP cyclohydrolase 1; OS = Erythrobacter atlanticus OX=1648404 GN=folE PE=3 SV=1
MVETTGSLDDDDARGKAHVPEEVEDAVRTILKWAGEDPEREGLLDTPKRVARAWLEYCEGYREDPSVHLSRVFHEVGGYDEIVLLKDIPFHSHCEHHMAPITGKAAIAYLPDKKVVGISKLARVLHGYARRLQIQERLTAEVAQCIWQHLQPQGVAVVIEARHGCMTGRGVRTPGVGMITSRMLGCFLNDDRSRKEVLSLMGY

SEQ ID NO: 7937 - protein, 203 aa, Erythrobacter citreus
  REGION 1..203: note = tr|A0A0L1KF44|A0A0L1KF44_9SPHN GTP cyclohydrolase 1; OS = Erythrobacter citreus LAMA 915 OX=1306953 GN=folE PE=3; SV = 1
MSSLVGPDEDDPRGKLPVPEHVQDAIRTLIEWTGDDPAREGLLDTPKRVARAWKEYCIGYTEDPAVHLDRVFEEVGGYNEIVLLKDIPFQSHCEHHMAPIIGKAAIAYLPHDRVVGISKLARVLHGFARRLQVQERLTAEVADCIWENLQPQGVAVVIEASHACMTARGVRTPGVGMVTSRMMGTFLDDHRSREEVLKLMGYG

SEQ ID NO: 7938 - protein, 203 aa, Erythrobacter flavus
  REGION 1..203: note = tr|A0A222EV90|A0A222EV90_9SPHN GTP cyclohydrolase 1; OS = Erythrobacter flavus OX=192812 GN=folE PE=3 SV=1
MSSLVGPDEDDPRGKPPVPEHVQDAIRTLIEWTGDDPEREGLLDTPKRVARAWKEYCIGYTEDPAVHLDRVFEEVGGYNEIVLLKDIPFQSHCEHHMAPIIGKAAIAYLPNDRVVGISKLARVLHGFARRLQVQERLTAEVADCIWENLQPQGVAVVIEASHSCMTARGVRTPGVGMITSRMMGTFLDDQRSRKEVLSLMGYG

SEQ ID NO: 7939 - protein, 203 aa, Erythrobacter gangjinensis
  REGION 1..203: note = tr|A0A0G9MQP0|A0A0G9MQP0_9SPHN GTP cyclohydrolase 1; OS = Erythrobacter gangjinensis OX=502682 GN=folE PE=3 SV=1
MSSLEGPDEDDPRGKPPVPDDVQDAIRTLIRWAGDDPEREGLLDTPARVARAWKEYCIGYEEDPAIHLSRVFEEVGGYDEIVLLKDIPFQSHCEHHMAPIIGKAHIAYLPTNRVVGISKLARVLHGFARRLQIQERLTAEVAQCIEDHLEPRGVAVVIEASHACMTARGVRTPGVSMTTSRVTGCFREDARSRKEVLSLMGFA

SEQ ID NO: 7940 - protein, 203 aa, Erythrobacter litoralis
  REGION 1..203: note = tr|Q2NB45|Q2NB45_ERYLH GTP cyclohydrolase 1; OS = Erythrobacter litoralis (strain HTCC2594) OX=314225; GN = folE PE=3 SV=1
MACEADYVEDPAIKKPDVPEHVQDAIRTLIEWSGDDPAREGLLDTPKRVGRAWLEYCQGYKEDPAIHLSRVFEEVGGYDEIVLLKDIPFQSHCEHHMAPITGKAAIAYLPRDKVVGISKLARVLHGFARRLQIQERLTAEVANCIWDNLEPEGVAVVIEAQHGCMTGRGVRTPGVSMVTSKLCGCFLDDERSRKEVLSLMGYG

SEQ ID NO: 7941 - protein, 206 aa, Erythrobacter litoralis
  REGION 1..206: note = tr|A0A074MUS7|A0A074MUS7_9SPHN GTP cyclohydrolase 1; OS = Erythrobacter litoralis OX=39960 GN=folE PE=3 SV=1
MNCLDHDSDDFDPDNPLNKPDVPEDVQDAIRTLIRWAGDDPEREGLLDTPKRVGRAWLEYCRGYGEDPAIHLSRVFEEVGGYDEIVLLKDIPFQSACEHHMAPITGKAHIAYLPDRRVVGISKLARVLHGFASRLQVQERLTAEVAQCIWDNLEPQGVAVVIEAQHGCMTGRGVKTHGVEMVTSRMLGCFLEDPRSRKEVMSLMGY

SEQ ID NO: 7942 - protein, 207 aa, Erythrobacter longus
  REGION 1..207: note = tr|A0A074MCM1|A0A074MCM1_ERYLO GTP cyclohydrolase 1; OS = Erythrobacter longus OX=1044 GN=folE PE=3 SV=1
MNNMCSHSHGEFDPDNPLNKPDVPDDVQDAIRTLLRWAGDDPDREGLIDTPKRVGRAWLEYCRGNQEDPAIHLARIFEEVGGYEEIVLLKGIPFQSHCEHHMAPITGKAHIAYLPAKKVVGISKLARVLHGYANRLQVQERLTAEVADCIWNNLEPRGVAVVIEAEHGCMTGRGVKVHEVEMLTSRMMGCFLEDAASRKEVLSLMGF

SEQ ID NO: 7943 - protein, 207 aa, unidentified
  source 1..207: note = Erythrobacter luteus
  REGION 1..207: note = tr|A0A0G9MXS8|A0A0G9MXS8_9SPHN GTP cyclohydrolase 1; OS = Erythrobacter luteus OX=1581420 GN=folE PE=3 SV=1
MSSLVGPDEDDPRRPDGSAKPPVPEHVQDAIRTLIEWAGDDPSREGLLDTPARVARAWKEYCLGYTEDPASHLSRVFEEVGGYDEIVLLKDIPFQSHCEHHMAPIIGKAAIAYLPTDHVVGISKLARVLHGFARRLQIQERLTAEVAQCIWDNLHPRGVAVVIEASHACMTARGVRTPGVGMVTSRVMGTFRSDSKSREEVLRLMGY

SEQ ID NO: 7944 - protein, 202 aa, unidentified
  source 1..202: note = Erythrobacter lutimaris
  REGION 1..202: note = tr|A0A395LTH2|A0A395LTH2_9SPHN GTP cyclohydrolase 1; OS = Erythrobacter lutimaris OX=1538146 GN=folE PE=3 SV=1
MSSLVGPDEDRENGKPAVPEHVQDAIRTLIEWTGDDPAREGLLDTPKRVARAWKEYCQGYGEDPSVHLSRVFEEVGGYDDIVLLKDIPFQSHCEHHMAPIIGVAHIAYLPTDFVVGISKLARVLHGYARRLQVQERLTAEVARCIWDNLKPEGVAVVIEATHACMTARGVRTPGVTMVTSRMMGVFRDDPRSREEVLSLMGH

SEQ ID NO: 7945 - protein, 202 aa, unidentified
  source 1..202: note = Erythrobacter marinus
  REGION 1..202: note = tr|A0A0H0XJP8|A0A0H0XJP8_9SPHN GTP cyclohydrolase 1; OS = Erythrobacter marinus OX=874156 GN=folE PE=3 SV=1
MTNVVDPNSDEARGKSPVPEHVQDAIRTLISWSGDDPEREGLIDTPKRVARAWLEYCQGYQEDPAVHLSRVFNEVGGYDEVVLLKDIPFQSHCEHHMAPITGKAAIAYLPKDKVVGISKLARVLNGYARRLQIQERLTAEVAQCIWDNLQPHGVAVVIEAQHGCMTGRGVRTPGVGMITSRLHGCFLEDHRSRKEVLSLMGY

SEQ ID NO: 7946 - protein, 203 aa, Erythrobacter nanhaisediminis
  REGION 1..203: note = tr|A0A1I5MDS3|A0A1I5MDS3_9SPHN GTP cyclohydrolase 1; OS = Erythrobacter nanhaisediminis OX=604088 GN=folE PE=3; SV = 1
MSSLVGPDEDDPRAKPPVPEHVQDAIRTLIEWTGDDPTREGLVDTPARVARAWKEYCLGYTEDPSYHLSRVFEEVGGYNEIVLLKDIPFQSHCEHHMAPIIGKAAIAYLPNDRVVGISKLARVLHGFARRLQVQERLTAEVADCIWEHLQPQGVAVVIEASHSCMTARGVRTPGVGMITSRMMGTFLEDQRSRKEVLSLMGYG

SEQ ID NO: 7947 - protein, 207 aa, Erythrobacter sp.
  REGION 1..207: note = tr|A0A1E4B410|A0A1E4B410_9SPHN GTP cyclohydrolase 1; OS = Erythrobacter sp. SCN 62-14 OX=1660099 GN=folE PE=3 SV=1
MNYICTHDHDEFDPENPLGKPEVPEDVQEAIRTLLRWAGDDPAREGLLDTPKRVGRAWLEYCEGYKEDPAIHLSRQFEEVGGYDEIVLLKDIPFQSHCEHHMAPITGKASIAYLPKNKVVGISKLARVLHGYAHRLQIQERLTAEVAQCIWDNLEPHGVAVVVEAQHGCMTGRGVKTHGVEMVTSRMLGCFMDDHRSRKEVLSLMGY

SEQ ID NO: 7948 - protein, 207 aa, Erythrobacter sp.
  REGION 1..207: note = tr|A0A2Z4K2K5|A0A2Z4K2K5_9SPHN GTP cyclohydrolase 1; OS = Erythrobacter sp. KY5 OX=2011159 GN=folE PE=3 SV=1
MNYVNVHDHAEFDPENPLNKPDVPEDVQEAIRTLIRWTGDDPTREGLLDTPKRVGRAWLEYCAGNKEDPAVHLSRIFEEVGGYDEIVLLKGIPFQSHCEHHMAPITGKAHIAYLPDKKVVGISKLARVLHGFAHRLQVQERLTAEVAECIWDNLEPRGVAVVIEAEHGCMTGRGVKVHEVEMLTSRMMGCFLEDPRSRKEVLSLMGF

SEQ ID NO: 7949 - protein, 201 aa, unidentified
  source 1..201: note = Erythrobacter xanthus
  REGION 1..201: note = tr|A0A3A1PB66|A0A3A1PB66_9SPHN GTP cyclohydrolase 1; OS = Erythrobacter xanthus OX=1784712 GN=folE PE=3 SV=1
MSCKHEEETVGNGKMPVPEDVQEAIRTLIRWAGDDPTREGLTDTPARVARAWKEYCQGYEEDPRVHLSRVFHEVGGYDEIVLLKDIPFQSHCEHHMAPIIGKAAIAYLPTDKVVGISKLARVLHGYARRLQIQERLTAEVAQCIWEELHPRGVAVVIEASHACMSARGVRTQGVGMVTSRVMGLFRSDHRSREEVLKLMGY

SEQ ID NO: 7950 - protein, 202 aa, unidentified
  source 1..202: note = Erythrobacter zhengii
  REGION 1..202: note = tr|A0A418NNW6|A0A418NNW6_9SPHN GTP cyclohydrolase 1; OS = Erythrobacter zhengii OX=2307003 GN=folE PE=3 SV=1
MSSLVGPDEDDPRGKPPVPEDVQEAIRTLIKWAGDDPTREGLLDTPKRVARAWKEYCVGYAEDPSHHLARVFEEVGGYDEIVLLKDIPFQSHCEHHMAPIIGKAAIAYLPTDRVVGISKLARVLHGFARRLQVQERLTAEVAQCIQDHLNPRGVAVVIEASHACMTARGVRTPGVSMVTSQVMGTFRSDPRSREEVLKLMGY

SEQ ID NO: 7951 - protein, 203 aa, unidentified
  source 1..203: note = Erythrobacteraceae bacterium
  REGION 1..203: note = tr|A0A2D9PD13|A0A2D9PD13_9SPHN GTP cyclohydrolase 1; OS = Erythrobacteraceae bacterium OX=2026738 GN=folE PE=3; SV = 1
  VARIANT 30: note = Xaa can be any naturally occurring amino acid
  VARIANT 127: note = Xaa can be any naturally occurring amino acid
  VARIANT 159: note = Xaa can be any naturally occurring amino acid
  VARIANT 163: note = Xaa can be any naturally occurring amino acid
  VARIANT 186: note = Xaa can be any naturally occurring amino acid
MSSLVGPDEDDPRAKPPVPEHVQDAIRTLXEWTGDDPSREGLLDTPKRVARAWKEYCVGYEEDPAQHLGRVFEEVGGYNEIVLLKDIPFQSHCEHHMAPIIGKAAIAYLPNDRVVGISKLARVLHGXARRLQVQERLTAEVADCIWDNLQPQGVAVVIXAQHXCMTARGVRTPGVGMVTSRMMGTXLDDHRSREEVLKLMGYG

SEQ ID NO: 7952 - protein, 206 aa, unidentified
  source 1..206: note = Erythrobacteraceae bacterium
  REGION 1..206: note = tr|A0A0P7YIC0|A0A0P7YIC0_9SPHN GTP cyclohydrolase 1; OS = Erythrobacteraceae bacterium HL-111 OX=1666908 GN=folE; PE = 3 SV=1
MNCLDHDSDDFDPDNPLNKPEVPEDVQEAIRTLIRWAGDDPAREGLLDTPKRVGRAWLEYCRGYGEDPAIHLARVFEEVGGYDEIVLLKDIPFQSACEHHMAPITGKAHIAYLPDRRVVGISKLARVLHGFANRLQVQERLTAEVAQCIWDNLEPQGVAVVIEAQHGCMTGRGVRTHGVEMVTSRMLGCFLEDPRSRKEVMSLMGY

SEQ ID NO: 7953 - protein, 222 aa, Escherichia albertii
  REGION 1..222: note = tr|A0A1X3JY16|A0A1X3JY16_9ESCH GTP cyclohydrolase 1; OS = Escherichia albertii B156 OX=550693 GN=folE PE=3 SV=1
MPSLSKEAAQVHEALVARGLETPLRPPVHEMDNETRKSLIAGHMTEIMQLLNLDLADDSLMETPHRIAKMYVDEIFSGLDYANFPKITLIENKMKVDEMVTVRDITLTSTCEHHFVTIDGKATVAYIPKDSVIGLSKINRIVQFFAQRPQVQERLTQQILIALQTLLGTNNVAVSIDAVHYCVKARGIRDATSATTTTSLGGLFKSSQNTRHEFLRAVRHHN

SEQ ID NO: 7954 - protein, 222 aa, Escherichia albertii; identical to SEQ ID NO: 7953
  REGION 1..222: note = tr|B1EJZ8|B1EJZ8_ESCAT GTP cyclohydrolase 1; OS = Escherichia albertii (strain TW07627) OX=502347 GN=folE; PE = 3 SV=1

SEQ ID NO: 7955 - protein, 222 aa, Escherichia fergusonii
  REGION 1..222: note = tr|F0JWK0|F0JWK0_ESCFE GTP cyclohydrolase 1; OS = Escherichia fergusonii ECD227 OX=981367 GN=folE PE=3; SV = 1
MPSLSKEAALVHEALVARGLETPLRPPVHEMDNETRKSLIAGHMTEIMQLLNLDLADDSLMETPHRIAKMYVDEIFSGLDYANFPKITLIENKMKVDEMVTVRDITLTSTCEHHFVTIDGKATVAYIPKDSVIGLSKINRIVQFFAQRPQVQERLTQQILIALQTLLGTNNVAVSIDAVHYCVKARGIRDATSATTTTSLGGLFKSSQNTRHEFLRAVRHHN

SEQ ID NO: 7956 - protein, 247 aa, Escherichia fergusonii
  REGION 1..247: note = tr|A0A564UWC1|A0A564UWC1_ESCFE GTP cyclohydrolase 1 type 2 OS=Escherichia fergusonii OX=564 GN=ybgI PE=4 SV=1
MKNTELEQLINEKLNSAAISDYAPNGLQVEGKETVQKIVTGVTASQALLDEAVRLGADAVIVHHGYFWKGESPVIRGMKRNRLKTLLANDINLYGWHLPLDAHPALGNNAQLAALLGITVMGEIEPLVPWGELTMPVPGLELASWIEARLGRKPLWCGDTGPEVVQRVAWCTGGGQSFIDSAARFGVDAFITGEVSEQTIHSAREQGLHFYAAGHHATERGGIRALSEWLNENTDLDVTFIDIPNPA

SEQ ID NO: 7957 - protein, 247 aa, unidentified
  source 1..247: note = Escherichia marmotae
  REGION 1..247: note = tr|A0A2B7LL59|A0A2B7LL59_9ESCH Putative GTP cyclohydrolase 1 type 2 OS=Escherichia marmotae OX=1499973; GN = ybgI PE=4 SV=1
MKNTELEQLINEKLNSAAISDYAPNGLQVEGQETVQKIVTGVTASQALLDEAVRLEADAVIVHHGYFWKGESPVIRGMKRNRLKTLLANDINLYGWHLPLDAHPELGNNAQLAALLGITVMGEIEPLVPWGELTMPVPGLELASWIEARLGRKPLWCGDNGPEVVQRVAWCTGGGQSFIDSAARFGVDAFITGEVSEQTIHSAREQGLHFYAAGHHATERGGIRALSEWLNENTDLDVTFIDIPNPA

SEQ ID NO: 7958 - protein, 222 aa, unidentified; identical to SEQ ID NO: 7955
  source 1..222: note = Escherichia marmotae
  REGION 1..222: note = tr|A0A370V8S8|A0A370V8S8_9ESCH GTP cyclohydrolase 1; OS = Escherichia marmotae OX=1499973 GN=folE PE=3 SV=1

SEQ ID NO: 7959 - protein, 222 aa, Escherichia sp.; identical to SEQ ID NO: 7955
  REGION 1..222: note = tr|A0A4U6CJN0|A0A4U6CJN0_9ESCH GTP cyclohydrolase 1; OS = Escherichia sp. MR OX=2575922 GN=folE PE=3 SV=1

SEQ ID NO: 7960 - protein, 222 aa, Escherichia sp.; identical to SEQ ID NO: 7955
  REGION 1..222: note = tr|A0A4Q9JJF8|A0A4Q9JJF8_9ESCH GTP cyclohydrolase 1; OS = Escherichia sp. E10V4 OX=2478971 GN=folE PE=3 SV=1

SEQ ID NO: 7961 - protein, 224 aa, unidentified
  source 1..224: note = Estrella lausannensis
  REGION 1..224: note = tr|A0A0H5E5S8|A0A0H5E5S8_9BACT GTP cyclohydrolase 1; OS = Estrella lausannensis OX=483423 GN=folE PE=3 SV=1
MDKEKIPTKAIKTRYPTPVSSTKDILSKEEKIAFISDRFREIMECLGLDVENESLARTPYRVAKMYVNEIFSGLDEESFPEVRFVNDDYSHSKNGNAIFIKVNFTSFCEHHFVPMMGVVYVSYIPNKKVVGLSKIPRIIRFFSQRPQMQERLGAQIADSLSAILETEHIAVCIVAKHFCMIVRGIEDAASHTVTHVLLGDFEKNPERRNEFFEAMKRQNVEIGV

SEQ ID NO: 7962 - protein, 189 aa, Ethanoligenens harbinense
  REGION 1..189: note = tr|A0A386XHT7|A0A386XHT7_9FIRM GTP cyclohydrolase 1; OS = Ethanoligenens harbinense OX=253239 GN=folE PE=3 SV=1
MVDKERAARAIRELLAAVGENPDRPGLQETPERVARMYEELFAGLERDPLEDVKLFGEGLPDELVVVRDIPFYSMCEHHLLPFYGQAHIAYLPRDGRILGLSKLARIVDTLARKPQLQERLTTEIADAVERAATTRGVAVVVVAEHLCMTMRGIKKPGAKTVTSRSIGELKTDAALRAEAAALLKPYTR

SEQ ID NO: 7963 - protein, 189 aa, Ethanoligenens harbinense; identical to SEQ ID NO: 7962
  REGION 1..189: note = tr|E6U3L9|E6U3L9_ETHHY GTP cyclohydrolase 1; OS = Ethanoligenens harbinense (strain DSM 18485 / JCM 12961 / CGMCC 1.5033 / YUAN-3) OX=663278 GN=folE PE=3 SV=1

SEQ ID NO: 7964 - protein, 197 aa, unidentified
  source 1..197: note = Eubacteriaceae bacterium
  REGION 1..197: note = tr|A0A143XZL2|A0A143XZL2_9FIRM GTP cyclohydrolase 1; OS = Eubacteriaceae bacterium CHKCI004 OX=1780380 GN=folE; PE = 3 SV=1
MAIDKEAIREHIRGILIALGDDPDREGLKETPDRVARMYEEVFEGMNYSNHEIAEMFNKSFQDDLSVEPDRKDIVLVRDIPIFSYCEHHIALMYDMHISVAYIPNGRVLGLSKIARICDMAAKRLQLQERIGSDVAEIMTEAAGTADVAVIIHGTHSCMSARGIKKDAASTVTTTLRGRFETDAVLQNQLYMMLAAK

SEQ ID NO: 7965 - protein, 191 aa, unidentified
  source 1..191: note = Eubacteriaceae bacterium
  REGION 1..191: note = tr|A0A143ZT02|A0A143ZT02_9FIRM GTP cyclohydrolase 1; OS = Eubacteriaceae bacterium CHKCI005 OX=1780381 GN=folE; PE = 3 SV=1
MDGWRMIDKPRIEAAVREILAAIGEDVDREGLQETPSRVARMYEEIFSGLHDDARRHVKIFTDTNHDEMVLVRDIPLYSVCEHHLLPFVGKAHIAYIPREGRVLGLSKLARIVDCYARRPQLQERLTASVADFIMKELKPWGVAVVIEAEHLCMTMRGARAAGSKTQTSALRGGMRTDARTRAEAMALLTR

SEQ ID NO: 7966 - protein, 185 aa, Eubacterium aggregans
  REGION 1..185: note = tr|A0A1H3YCK4|A0A1H3YCK4_9FIRM GTP cyclohydrolase 1; OS = Eubacterium aggregans OX=81409 GN=folE PE=3 SV=1
MMDSVKIKEGVRLMLEGIGEDINREGLLQTPDRIARMCEQIYGGLTEDPAVHLSTQFQATNNNMVIEKDITFYSVCEHHLLPFYGKAHVAYIPDGKVAGLSKLARTVEVFARRPQIQENMTAQIAEALETHLHPKGVMVVLEAEHLCMTMRGVQKPGAQTVTTMVRGVFAEDYSLQQTFLQMVRG

SEQ ID NO: 7967 - protein, 185 aa, Eubacterium barkeri
  REGION 1..185: note = tr|A0A1H3DY21|A0A1H3DY21_EUBBA GTP cyclohydrolase 1; OS = Eubacterium barkeri OX=1528 GN=folE PE=3 SV=1
MMDSVKIKEGVRLMLEGIGEDINREGLLQTPDRIARMCEQIYGGLTEDPAVHLNTQFQAINNNMVLEKDITFYSVCEHHLLPFYGKAHVAYIPDGKVAGLSKLARTVEVFARRPQIQENMTAQIAEALETHLHPKGVMVVLEAEHLCMTMRGVQKPGAQTVTTMVRGVFAEDYALQQTFLQIVRG

SEQ ID NO: 7968 - protein, 215 aa, Eubacterium callanderi
  REGION 1..215: note = tr|E3GFJ2|E3GFJ2_9FIRM GTP cyclohydrolase 1; OS = Eubacterium callanderi OX=53442 GN=folE PE=3 SV=1
MRKHCSFYRAVLFVFIFNNLIAFNIGGIQMNKEKIMEAVTMLIEAIGEDPQREGLVDTPDRIARMYEEIFAGIGQTAEEHLSKSFTIESNDLVIERDIPFYSMCEHHFLPFYGKAHIAYVPNGKVAGLSKLVRTVDVYARKPQLQEKLTSEIGSAIMEYLDAQGVMVIIEAEHLCMNMRGVKRPGTKTVTAMSDGILKTDASLKNDVYNLLGIRA

SEQ ID NO: 7969 - protein, 186 aa, Eubacterium callanderi
  REGION 1..186: note = tr|A0A1I5PP68|A0A1I5PP68_9FIRM GTP cyclohydrolase 1; OS = Eubacterium callanderi OX=53442 GN=folE PE=3 SV=1
MNKEKIMEAVTMLIEAIGEDPQREGLVDTPDRIARMYEEIFAGIGQTAEEHLSKSFTIESNDLVIERDIPFYSMCEHHFLPFYGKAHIAYVPNGKVAGLSKLVRTVDVYARKPQLQEKLTSEIGSAIMEYLDAQGVMVIIEAEHLCMNMRGVKRPGTKTITAMSDGILKTDASLKNDVYNLLGIRA

SEQ ID NO: 7970 - protein, 226 aa, unidentified
  source 1..226: note = [Eubacterium] cellulosolvens
  REGION 1..226: note = tr|I5AU66|I5AU66_EUBCE GTP cyclohydrolase 1; OS = [Eubacterium] cellulosolvens 6 OX=633697 GN=folE PE=3; SV = 1
MIDQKAIEEHIRGILVALGDDPEREGLKDTPKRVAKMYAEVFAGMNYSNHEIAEMFDKTFEEGIADEEDHVSLTIPEDDSERADLTAVVGKNGPMASASSPEDSKPARVVVMKDIDFFSYCEHHMALMYDMKACVAYVPNGKVIGLSKIARVCDMVGRRLQLQEKIGKDIADIISEITGSKDVAVTIEGHHSCVSARGIKKQNTKTFTAELRGRFRTDAELQFHLR

SEQ ID NO: 7971 - protein, 189 aa, Eubacterium coprostanoligenes
  REGION 1..189: note = tr|A0A1T4M724|A0A1T4M724_9FIRM GTP cyclohydrolase 1; OS = Eubacterium coprostanoligenes OX=290054 GN=folE PE=3; SV = 1
MITEENKQKIMNAVRDILEAVGEDVNRPGLIETPKRVANMYEEMFAGLDSDAKQHLKLFDERSNDEMVIVRDIPFSSMCEHHLLPFVGKAHIAYIPSDNKIIGLSKFARIVDNFAKRPQVQERLTSDIADFLEENLSPKGVAVIVEAEHTCMNIRGAKASGSSTMTSALRGIMKKDARTRAEVLSLLQR

SEQ ID NO: 7972 - protein, 207 aa, unidentified
  source 1..207: note = [Eubacterium] eligens
  REGION 1..207: note = tr|A0A174YWP8|A0A174YWP8_9FIRM GTP cyclohydrolase 1; OS = [Eubacterium] eligens OX=39485 GN=folE_2 PE=3 SV=1
MEKHKKIDTKAIEYHIAGILKALGDNPEREGLKDTPKRVAKMYEEVFDGMNYTNEEIADMFNKTFALDMDEEESGQIECNGQSGTSNMVVVKDIDIFSYCEHHLALMYDMKVTVAYIPNGRVIGLSKIARIADMVSKRLQLQERIGSDIADIMHMVTGAKDIAVFIEGCHSCMTARGIKKANTKTYTQTLRGRFNNESNGFVQWWNR

SEQ ID NO: 7973 - protein, 189 aa, unidentified
  source 1..189: note = [Eubacterium] eligens
  REGION 1..189: note = tr|A0A174YSF3|A0A174YSF3_9FIRM GTP cyclohydrolase 1; OS = [Eubacterium] eligens OX=39485 GN=folE_1 PE=3 SV=1
MIDTKAIEEHIRGILVALGDDPEREGLKDTPKRVAKMYEEVFLGMNYSNHEIAQMFDKTFEDGIEELDTSKVVVMKDIDLFSYCEHHMALMYDMKATVAYIPNGKVIGLSKIARICDMVGRRLQLQERIGQDIADIMTEITGSEDVAVVLEGYHSCVSARGIKKNNTRTMTVELRGSFKDDAALQMYLR

SEQ ID NO: 7974 - protein, 205 aa, Eubacterium eligens
  REGION 1..205: note = tr|C4Z7K5|C4Z7K5_EUBE2 GTP cyclohydrolase 1; OS = Eubacterium eligens (strain ATCC 27750 / VPI C15-48); OX = 515620 GN=folE PE=3 SV=1
MLSAQSLRGEARMEIMMIDTKAIEEHIRGILVALGDDPEREGLKDTPKRVAKMYEEVFLGMNYSNHEIAQMFDKTFEDEIEELDTSKVVVMKDIDLFSYCEHHMALMYDMKATVAYIPNGKVIGLSKIARICDMVGRRLQLQERIGQDIADIMAEITGSEDVAVVLEGYHSCVSARGIKKNNTRTMTVELRGSFKDDAALQMYLR

SEQ ID NO: 7975 - protein, 189 aa, Eubacterium eligens; identical to SEQ ID NO: 7973
  REGION 1..189: note = tr|R5ZJL4|R5ZJL4_9FIRM GTP cyclohydrolase 1; OS = Eubacterium eligens CAG:72 OX=1263077 GN=folE PE=3 SV=1

SEQ ID NO: 7976 - protein, 196 aa, Eubacterium hallii; identical to SEQ ID NO: 4566
  REGION 1..196: note = tr|R6FZ93|R6FZ93_9FIRM GTP cyclohydrolase 1; OS = Eubacterium hallii CAG:12 OX=1263078 GN=folE PE=3 SV=1

SEQ ID NO: 7977 - protein, 186 aa, Eubacterium limosum
  REGION 1..186: note = tr|A0A0U3EF01|A0A0U3EF01_EUBLI GTP cyclohydrolase 1; OS = Eubacterium limosum OX=1736 GN=folE PE=3 SV=1
MNKEKIMEAVTMLIEAIGEDPQREGLIDTPDRIARMYEEIFAGIGQTAEEHLSKSFTIESNDLVIERDIPFYSMCEHHFLPFYGKVHIAYVPNGKVAGLSKLVRTVDVYAKKPQLQEKLTSEIGSAIMEYLNAQGVMVIIEAEHLCMNMRGVKRPGTKTVTAMSDGILKTDASLKNDVYNLLGIRA

SEQ ID NO: 7978 - protein, 186 aa, Eubacterium limosum
  REGION 1..186: note = tr|A0A317RTP1|A0A317RTP1_EUBLI GTP cyclohydrolase 1; OS = Eubacterium limosum OX=1736 GN=folE PE=3 SV=1
MNKEKIMKAVTMLIEAIGEDPQREGLVDTPDRIARMYEEIFAGIGKTAEEHLSKSFTIESNDLVIERDIPFYSMCEHHFLPFYGKAHIAYVPNGKVAGLSKLVRTVDVYAKKPQLQEKLTSEIGNAIMEYLDAQGVMVIIEAEHLCMNMRGVKRPGTKTVTAMSDGILKTDASLKNDVYNLLGIRA

SEQ ID NO: 7979 - protein, 186 aa, unidentified
  source 1..186: note = Eubacterium maltosivorans
  REGION 1..186: note = tr|A0A4P9C6U5|A0A4P9C6U5_9FIRM GTP cyclohydrolase 1; OS = Eubacterium maltosivorans OX=2041044 GN=folE PE=3 SV=1
MNKEKIMEAVTMLIEAIGEDPQREGLVDTPDRIARMYEEIFAGIGQTAEEHLSKSFTIESNDLVIERDIPFYSMCEHHFLPFYGKVHIAYVPNGKVAGLSKLVRTVDVYAKKPQLQEKLTSEIGSAIMEYLNAQGVMVIIEAEHLCMNMRGVKRPGTKTVTAMSDGILKTDASLKNDVYNLLGIRA

SEQ ID NO: 7980 - protein, 253 aa, Eubacterium minutum
  REGION 1..253: note = tr|A0A223B147|A0A223B147_9FIRM GTP cyclohydrolase FolE2 OS=Eubacterium minutum ATCC 700079 OX=888721; GN = folE2 PE=3 SV=1
MKDVQKQIDGRDIYLNQVGIKGFVVPMEFRNKNGDWISTAATVSLFVGLDAKQKGTHMSRFVGIIQENRRMDLNHVKKILQETKEKLEADSAFVMMNFEYFIEKTAPVSGMASFFNVGIEYSASLTGDEFEFDMKVTTPVTTLCPCSKEISEYGAHNQRADVSIKIKMKKFLWIEDLVEIAEDSASAPVYSLLKRPDEKYVTEHAYDNPRFVEDVCREVKLRVSKLKEVENFCIEVESQESIHNHSAYAMVVG

SEQ ID NO: 7981 - protein, 253 aa, Eubacterium nodatum
  REGION 1..253: note = tr|W2C1W0|W2C1W0_9FIRM GTP cyclohydrolase FolE2; OS = Eubacterium nodatum ATCC 33099 OX=1161902 GN=folE2 PE=3; SV = 1
MKDVQKQIDGRDVYLNQVGIKDFVVPMEFKTKEGQWISTAATVSLFVGLDARQKGTHMSRFVDIIQHNRRMDLQHVRKILEATKEKLDSEASFVRMNFEYFIEKESPVTGIPSFFNIGVEYRGSLVSDDFEFDMKVTTPVTTLCPCSKEISDYGAHNQRADVSIKVRMKKFLWIEDLVNIAESSASSPVYSLLKRPDEKYVTELAYDNPRFVEDVCREAKLRVDKLEGVEEFCIEVESQESIHNHGAYAMVVG

SEQ ID NO: 7982 - protein, 194 aa, Eubacterium oxidoreducens
  REGION 1..194: note = tr|A0A1G6A5C7|A0A1G6A5C7_EUBOX GTP cyclohydrolase 1; OS = Eubacterium oxidoreducens OX=1732 GN=folE PE=3 SV=1
MKEVCNVIDTKAIEEHIKGILIALGEDPNREGLRETPQRVAKMYEEVFAGMNYTNHEIAKMFDKTFEDDFETEDSRVVVMKDIDLFSYCEHHMALMYDMKATVAYIPKGKVIGLSKIARICDMVGRRLQLQERIGRDIADIMTEATGSEDVAVCIEGCHSCVSARGIKKNNAKTFTAELRGAFKNDSSLQLYLK

SEQ ID NO: 7983 - protein, 186 aa, Eubacterium plexicaudatum
  REGION 1..186: note = tr|N2A6T2|N2A6T2_9FIRM GTP cyclohydrolase 1; OS = Eubacterium plexicaudatum ASF492 OX=1235802 GN=folE; PE = 3 SV=1
MIDENKIMEGVRLLLEGIGEDPSREGLLETPQRIARMYEEIFAGMTQSAGEPLAKTFHAKQTDMVLEKDIMFYSTCEHHLLPFYGKAHVAYIPNGKVAGLSKLARTVEIFARRPQLQEQMTAQIADAVMEYLNPLGAMVMIEAEHMCMTMRGIKKPGSKTMTYAARGVFREQDGLQNRFFQMVKDK

SEQ ID NO: 7984 - protein, 200 aa, Eubacterium pyruvativorans
  REGION 1..200: note = tr|A0A1I7FDL6|A0A1I7FDL6_9FIRM GTP cyclohydrolase 1; OS = Eubacterium pyruvativorans OX=155865 GN=folE PE=3 SV=1
MNMERKMDHEKIKQAVRLFLEAVGEDPEREGLRETPSRVARMCEEVLAGEKFTNEEIAKKYGKTFPRETGRDPASDMVLVKDIDVFSYCEHHLALMYDMKVSVAYLPRGRVLGLSKIARIADMAAKRLQLQERLGADIAEIIGMAAGTEDVAVVIHGCHSCMTARGIRKPGSETVTTTFRGRFESDPGLQSRLLMQMQIG

SEQ ID NO: 7985 - protein, 192 aa, Eubacterium ramulus
  REGION 1..192: note = tr|A0A2V1JX80|A0A2V1JX80_EUBRA GTP cyclohydrolase 1; OS = Eubacterium ramulus OX=39490 GN=folE PE=3 SV=1
MAIDKDAVREHVRGLLIALGDDPDREGLKDTPDRVARMYEEVFEGMNYTNHEIAQMFDKTFEEDLTFSSENSDFVIVKDIDIFSYCEHHMALMYDMKVTVAYVPNGKVIGLSKIARIADMVSKRLQLQERIGTDIAEIMQEITGSEDVAVLIEGCHSCMTARGIKKTDAKTYTTTLRGRFQTDMLLQMRLNR

SEQ ID NO: 7986 - protein, 192 aa, Eubacterium ramulus
  REGION 1..192: note = tr|U2P9Q6|U2P9Q6_EUBRA GTP cyclohydrolase 1; OS = Eubacterium ramulus ATCC 29099 OX=1256908 GN=folE PE=3; SV = 1
MAIDKDAVREHIRGLLIALGDDPDREGLKDTPDRVARMYEEVFEGMNYTNHEIAQMFDKTFEEDLTFSSENSDFVIVKDIDIFSYCEHHMALMYDMKVTVAYVPNGKVIGLSKIARIADMVSKRLQLQERIGTDIAEIMQEITGSDDVAVLIEGCHSCMTARGIKKTAAKTYTTTLRGRFQTDLQLQMRLNR

SEQ ID NO: 7987 - protein, 193 aa, Eubacterium ruminantium
  REGION 1..193: note = tr|A0A1T4Q7U3|A0A1T4Q7U3_9FIRM GTP cyclohydrolase 1; OS = Eubacterium ruminantium OX=42322 GN=folE PE=3 SV=1
MAIDKEKIKLHVRGILEALGEDPDREGLSETPDRVARMYEEVFEGIGYTNDEIAEMFSKTFEAPVKRSKNDIVLIKDIEAFSYCEHHMALMYDMKISVAYIPKDRVIGLSKIVRIADMVTKRLQLQERIGSDIADVMMKATGSEDVAVIIEAKHSCLTARGIKNRASSTLTTTYRGLFDTDAETRDRLIAMLK

SEQ ID NO: 7988 - protein, 193 aa, Eubacterium ruminantium
  REGION 1..193: note = tr|A0A1H5Y930|A0A1H5Y930_9FIRM GTP cyclohydrolase 1; OS = Eubacterium ruminantium OX=42322 GN=folE PE=3 SV=1
MAVDKEKIKEHIRGILLAIGEDPDREGLRETPDRVARMYEEVFAGISYTNDEIAAMFNKTFEAPKDRNKNDIVLVKDIEAFSYCEHHMAIMYDMNISVAYIPRDRVIGLSKIVRIADMVTRRLQLQERIGADIADVMEKATGSPDIAVIIEAKHSCVTARGIKNRESSTFTTTFKGVFNEEKMQEKLLMMMKK

SEQ ID NO: 7989 - protein, 185 aa, Eubacterium sp.
  REGION 1..185: note = tr|A0A416W5N0|A0A416W5N0_9FIRM GTP cyclohydrolase 1; OS = Eubacterium sp. AF15-50 OX=2293103 GN=folE PE=3 SV=1
MFDKKKIEEAVRLFLEGIGEDADREGLKDTPERVARMYEELCTGMGKTPAEHLSRTFSCDNENVVIEKNITFYSTCEHHLMPFYGKVHIAYIPNGKVVGISKLARTVEVYARRLQIQEQMTEQIAEALEEYLEAKGVYVMVEAEHMCMSARGIKKPGSKTVSFALKGKFKEDDALRRDVTLLINK

SEQ ID NO: 7990 - protein, 185 aa, Eubacterium sp.
  REGION 1..185: note = tr|R5KWH6|R5KWH6_9FIRM GTP cyclohydrolase 1; OS = Eubacterium sp. CAG:161 OX=1262881 GN=folE PE=3 SV=1
MFDKKKIEEAVRLFLEGIGEDADREGLKDTPERVARMYEELCAGMGKTPAEHLSRTFSCDNENVVIEKNITFYSTCEHHLMPFYGKVHIAYIPNGKVVGISKLARTVEVYARRLQIQEQMTEQIAEALEEYLEAKGVYVMVEAEHMCMSARGIKKPGSKTVSFALKGKFKEDDALRRDVTLLINK

SEQ ID NO: 7991 - protein, 194 aa, Eubacterium uniforme
  REGION 1..194: note = tr|A0A1T4VNY7|A0A1T4VNY7_9FIRM GTP cyclohydrolase 1; OS = Eubacterium uniforme OX=39495 GN=folE PE=3 SV=1
MYVSKNVTTGKIDKEKVEEAIRMLLEAIGENPDREGLKATPSRIARMYEEIYTGSDEMAYDHLSRTFTCENSDMVIEKDITFYSTCEHHMMPFYGKAHIAYIPDGKVVGISKLARTVEEFAKRLQIQENLTSQIADAIMDNLDPKGVMVMLEAEHMCMTMRGVKKPGTKTVTFAYRGLFEEDKELRDDFLAIVK

SEQ ID NO: 7992 - protein, 151 aa, Eubacterium ventriosum
  REGION 1..151: note = tr|A5Z385|A5Z385_9FIRM GTP cyclohydrolase 1; OS = Eubacterium ventriosum ATCC 27560 OX=411463 GN=folE; PE = 3 SV=1
MYEELCSGMNRSPKEHLSKTFTCDNENVVIEKDITFYSTCEHHLMPFYGKVHIAYIPNGKVVGISKLARTVEVYARRLQIQEQMTNQIAKALEKYLGAKGVLVMAQAEHMCMSARGIKKPGSKTVTFASTGVFEEDRNLRSDVLSIFRDGQ

SEQ ID NO: 7993 - protein, 187 aa, Eubacterium ventriosum
  REGION 1..187: note = tr|A0A413RV20|A0A413RV20_9FIRM GTP cyclohydrolase 1; OS = Eubacterium ventriosum OX=39496 GN=folE PE=3 SV=1
MFDKKKIEEGIRLLLEGIGENPDREGLKDTPDRVARMYEELCSGMNRSPKEHLSKTFTCDNENVVIEKDITFYSTCEHHLMPFYGKVHIAYIPNGKVVGISKLARTVEVYARRLQIQEQMTNQIAKALEKYLGAKGVLVMAQAEHMCMSARGIKKPGSKTVTFASTGVFEEDRNLRSDVLSIFRDGQ

SEQ ID NO: 7994 - protein, 226 aa, unidentified
  source 1..226: note = Euhalothece natronophila
  REGION 1..226: note = tr|A0A5B8NP79|A0A5B8NP79_9CHRO GTP cyclohydrolase 1; OS = Euhalothece natronophila Z-M001 OX=522448 GN=folE PE=3; SV = 1
MTTASSNSSMSNGSGKVNTQVSLNSASSVEAAVTQDSNTEEMMQAVRSILQGVGEDPDREGLKKTPKRVAEAMQFLTQGYEQSLEELVNGAIFDEGHNEMVLVRDIDVFSLCEHHMLPFMGKAHVAYIPNQKVVGLSKLARIVEMYSRRLQVQERLTRQIAEAIQSILDPQGVAVVMEATHMCMVMRGVQKPSSWTVTSAMLGVFQEEQKTREEFLNLIRHQPSFH

SEQ ID NO: 7995 - protein, 233 aa, unidentified
  source 1..233: note = Euhalothece sp.
  REGION 1..233: note = tr|A0A2K3AFW1|A0A2K3AFW1_9CHRO GTP cyclohydrolase 1; OS = Euhalothece sp. KZN 001 OX=1884791 GN=folE PE=3 SV=1
MTIASSNSSMSNGSAKVTKTVSLDSASSVEAAVSQNGSEEFSRPEIGEMMEAVKTILEGVGEDPEREGLLKTPKRVAEAMQFLTQGYEQSLDDLVNGAIFDEGHNEMVLVRDIDVFSLCEHHMLPFMGKAHVAYIPNQKVVGLSKLARIVEMYSRRLQVQERLTRQVAEAIQTILEPQGVAVVMEASHMCMVMRGVQKPGSWTVTSAMLGVFQEDQKTREEFLNLIRHQPSFH

SEQ ID NO: 7996 - protein, 246 aa, Euzebya sp.
  REGION 1..246: note = tr|A0A346Y2T1|A0A346Y2T1_9ACTN GTP cyclohydrolase 1; OS = Euzebya sp. DY32-46 OX=1608957 GN=folE PE=3 SV=1
MSTEPTVDPDGIGGRSRAEVPAEAIEVRTDDVSGQASDDRVRVLTTAEPQRRFDHDKIRAGVRMLFEGIGLDPDSPTIRDTPDRVARMYDEVFAGLLIDPEDVVSTTFDEGHDEIVIVRDIPFASICEHHLVPFVGRAHVGYLPGHDGLITGLSKLARLVDVVAKRPNLQERITAEVADTLERVLKPRGVIVQIEAEHFCMTMRGVRKPGAMTVTSAVRGTIREDARTRAEVMSLIGGPRVSSYGP

SEQ ID NO: 7997 - protein, 438 aa, Euzebya sp.
  REGION 1..438: note = tr|A0A346XS57|A0A346XS57_9ACTN GTP cyclohydrolase FolE2 OS=Euzebya sp. DY32-46 OX=1608957 GN=folE2 PE=3 SV=1
MSQDTTTTSVLLDLERSLPTGTTLIAKRFTFDSAHMLPNVPEGHKCGRVHGHTYQVKIFLRGPVDEHAAWIVDFGDLKARWKPIEERLDHHMLNELPGLENPTAERLAAWIAAEIDAGGPLADDVQVAAVEVAETPDSSAIFLPGSARTGNTLSSASRAAAPVAREAVVGAAIEDVQGRPDSRGVRLDEVGVSDVRFPITVLDRERERQATVGTLSMGVDVPAEVKGTHMSRFLEALNAHDGAFTLFTMAHLASDLRRRLGATDVRARVRFPYFVMKAAPVTGAGGIVDHDCEFDIRDHDGDVRFRLTVEAPVTTVCPCSRDISDYGAHNQRGTVRMTIDLAVDLSGQPELVWIEELIELADAKSSSPVYSVIKRPDERHVTMAGYDNPRFVEDLARDVAIAMEEDPRIAGYEVCVVNDESIHSHNAYATVRSEGWQA

SEQ ID NO: 7998 - protein, 226 aa, unidentified
  source 1..226: note = Euzebyella marina
  REGION 1..226: note = tr|A0A3G2L9C8|A0A3G2L9C8_9FLAO GTP cyclohydrolase 1; OS = Euzebyella marina OX=1761453 GN=folE PE=3 SV=1
MKIDSTLEKQFEEMGNDHVSAAEDTPMRKDAFVLSDEEKIERIQANIREVMLTLGLDLDDDSLKGTPNRVAKMYVKEIFGGLHPDRKPKSSTFSNKYKYGEMLVEKNITLYSTCEHHLLPIVGKAHIAYISSGNVVGLSKMNRIVDYFAKRPQVQERLNIQIVRELQKVLETEDVACVIDAKHLCVNSRGIRDIDSSTVTAEYGGKFKDESVRREFLDYINLDTNF

SEQ ID NO: 7999 - protein, 199 aa, unidentified
  source 1..199: note = Euzebyella marina
  REGION 1..199: note = tr|A0A3G2L720|A0A3G2L720_9FLAO GTP cyclohydrolase 1; OS = Euzebyella marina OX=1761453 GN=folE PE=3 SV=1
MAPYRNLEEYNLEVTGEVKDRYSKIISEIGEDISREGLLKTPERAAKAMLFLTQGYKQDAVEILKSAMFQEDYDDMVIIKDIELYSLCEHHMLPFFGKAHVAYIPNGHIVGLSKIPRVVDVFARRLQVQERLTHDILECINNTLKPKGVAVVIEASHMCMMMRGVQKQNSVTTTSGFRGQFEKIETRNEFLKLISSDLS

SEQ ID NO: 8000 - protein, 221 aa, Ewingella americana
  REGION 1..221: note = tr|A0A085GJA4|A0A085GJA4_9GAMM GTP cyclohydrolase 1; OS = Ewingella americana ATCC 33852 OX=910964 GN=folE PE=3; SV = 1
MSTLSKEAILVHEALLARGLETPLREPLPIDNETRKQRIKEHMTGIMQLLNLDLADDSLAETPHRIAKMYVDEIFSGLDYANFPKITVIENKMKVDEMVTVRDITLTSTCEHHFVTIDGKATVAYIPKDKVIGLSKINRIVQFFSQRPQVQERLTQQVLLALQTLLGTNNVAVSIDAVHYCVKARGIRDATSATTTTSLGGLFKSSQNTRQEFLRTVRHAS

SEQ ID NO: 8001 - protein, 221 aa, Ewingella americana
  REGION 1..221: note = tr|A0A2N0N5A6|A0A2N0N5A6_9GAMM GTP cyclohydrolase 1; OS = Ewingella americana OX=41202 GN=folE PE=3 SV=1
MPTLSKEAILVHEALLARGLETPLREALPIDNETRKQRIQEHMTGIMQLLNLDLSDDSLAETPHRIAKMYVDEIFSGLDYANFPKITVIENKMKVDEMVTVRDITLTSTCEHHFVTIDGKATVAYIPKDTVIGLSKINRIVQFFSQRPQVQERLTQQILVALQTLLGTTNVAVSIDAVHYCVKARGVRDATSATTTTSLGGLFKSSQNTRQEFLRTVRHPS

SEQ ID NO: 8002 - protein, 301 aa, Exiguobacterium antarcticum
  REGION 1..301: note = tr|K0A9K6|K0A9K6_EXIAB GTP cyclohydrolase FolE2; OS = Exiguobacterium antarcticum (strain B7) OX=1087448; GN = folE2 PE=3 SV=1
MSTYPITLPTKEERHKLFGSVPPIKGTKPTEKEKMIDLQNTPKNFLFALDAVGISNVKHPVVIQDGETTQATIATFELSTSLVQDRKGINMSRLTEQLDQYHHEGWVVTNESLIQFARDLAERMEQAEGQLTIRYPWFFSRKAPATGLSGLMNAEVWQTVSVNTETDEATLSVGLTINVTTLCPCSKEISEYSAHNQRGYVTMEASLRDEAEEFNWKQELLDAAESNASAPLHPVLKRPDEKRVTEMAYENPRFVEDMVRLIAADLYEMDPIASFFVECRNEETIHQHDAIARITFDKDAQ

SEQ ID NO: 8003 - protein, 302 aa, Exiguobacterium aurantiacum
  REGION 1..302: note = tr|A0A377FQ95|A0A377FQ95_9BACL GTP cyclohydrolase FolE2 OS=Exiguobacterium aurantiacum OX=33987 GN=folE2; PE = 3 SV=1
MSTSHVALPTKAERHKLFGSVPPIKGTKPTEKDKMIDLQNTPKNFLFALDSVGISNVKHPVNIETPDGIQATVATFELTTSLVQDRKGINMSRLTEQLDAYHNQGWTVSNASLIEFAQELAERMEQTEGQLTIRYPWFFSRKAPATGLSGLMNADVMHRVSYNLETGTASVTVGLVINVTTLCPCSKEISEYSAHNQRGYITIEAGLDETSLDGFDWRLALLDAAESNASAPLHPVLKRPDEKRATEIAYENPRFVEDMVRLIAADLYEMKQVVNFFVECRNEESIHQHDAIASITFDKREN

SEQ ID NO: 8004 - protein, 302 aa, unidentified
  source 1..302: note = Exiguobacterium chiriqhucha
  REGION 1..302: note = tr|U1N095|U1N095_9BACL GTP cyclohydrolase FolE2; OS = Exiguobacterium chiriqhucha RW-2 OX=1345023 GN=folE2; PE = 3 SV=1
MSTSHVALPTKAERHKLFGSVPPIKGTKPTEKDKMVDLQNTPKNFLFALDSVGISNVKHPVNIETPDGIQATVATFELTTSLVQDRKGINMSRLTEQLDAYHTQGWTLSNRSLIEFAQELAERMEQTEGQLTVRYPWFFSRKAPATGLSGLMNADVMHNVTYNLETGMASVTVGLVINVTTLCPCSKEISEYSAHNQRGYITIEAGLDEASLDGFDWRLALLEAAESNASAPLHPVLKRPDEKRATEIAYENPRFVEDMVRLIAADLYEMKQVVNFFVECRNEESIHQHDAIASITFDKRDN

SEQ ID NO: 8005 - protein, 301 aa, unidentified
  source 1..301: note = Exiguobacterium enclense
  REGION 1..301: note = tr|A0A0V8GEQ6|A0A0V8GEQ6_9BACL GTP cyclohydrolase FolE2 OS=Exiguobacterium enclense OX=1017277 GN=folE2 PE=3; SV = 1
MSTYPITLPTKEERHKLFGSVPPIKGTKPTEKDKMVDLQNTPKNFLFALDAVGISNVKHPVVIQDGDNTQATVATFELSTSLVQDRKGINMSRLTEQLDQYHNEGWTVTNESLIQFARDLADRMEQTEGQLTIRYPWFFTRKAPATGLSGLMNAEVWQTVSVNTETDEATLSVGLTINVTTLCPCSKEISEYSAHNQRGYVTMEASLRDEAEDFDWKQSLLDAAESNASAPLHPVLKRPDEKRVTEMAYENPRFVEDMVRLIAADLYEMDPIASFYVECRNEETIHQHDAIARITFDKDAQ

SEQ ID NO: 8006 - protein, 302 aa, Exiguobacterium mexicanum; identical to SEQ ID NO: 8004
  REGION 1..302: note = tr|A0A099DKF3|A0A099DKF3_9BACL GTP cyclohydrolase FolE2 OS=Exiguobacterium mexicanum OX=340146 GN=folE2 PE=3; SV = 1

SEQ ID NO: 8007 - protein, 301 aa, Exiguobacterium sibiricum
  REGION 1..301: note = sp|B1YHT1|GCH4_EXIS2 GTP cyclohydrolase FolE2; OS = Exiguobacterium sibiricum (strain DSM 17290 / JCM 13490 / 255-15) OX=262543 GN=folE2 PE=3 SV=1
MSTYPVTLPTKEERHKLFGSVPPIKGTKPTEKDKMIDLQNTPKNFLFALDAVGISNVKHPVVIQDGETTQATIATFELSTSLVQDRKGINMSRLTEQLDQYHNEGWVVTNESLIQFARELAERMEQSEGQLTIRYPWFFTRKAPATGLSGLMNAEVWQTVSVNTETNEATLSVGLTINVTTLCPCSKEISEYSAHNQRGYVTMEASLRDEADDFNWKQELLDAAESNASAPLHPVLKRPDEKRVTEMAYENPRFVEDMVRLIAADLYEMDPIASFFVECRNEETIHQHDAIARITFDKDAQ

SEQ ID NO: 8008 - protein, 303 aa, Exiguobacterium sp.
  REGION 1..303: note = sp|C4KZ55|GCH4_EXISA GTP cyclohydrolase FolE2; OS = Exiguobacterium sp. (strain ATCC BAA-1283 / AT1b); OX = 360911 GN=folE2 PE=3 SV=1
MSTSHVALPTKAERHKLFGSVPPIKGTKPTEKEQMVDLQNTPKNFLFALDSVGISNVKHPVNVETPEGVQSTVATFELTTSLVQDRKGINMSRLTEQLDAYHQQGWTVSNRSLIEFAQELAERMEQTEGQLTIRYPWFFTRKAPATGLSGLMNADVMHRVTYNLETGVANVTVGLVINVTTLCPCSKEISEYSAHNQRGYITIEAGLDETSMDGFDWRAALLDAAESNASAPLHPVLKRPDEKRATEIAYENPRFVEDMVRLIAADLYEMKQVVNFFVECRNEESIHQHDAIASITFDKRQDA

SEQ ID NO: 8009 - protein, 301 aa, Exiguobacterium sp.
  REGION 1..301: note = tr|A0A177SAX6|A0A177SAX6_9BACL GTP cyclohydrolase FolE2 OS=Exiguobacterium sp. KKBO11 OX=1805000 GN=folE2; PE = 3 SV=1
MSTYPITLPTKEERHKLFGSVPPIKGTKPTEKDKMVDLQNTPKNFLFALDAVGISNVKHPVVIQDGDKTQATVATFELSTSLVQDRKGINMSRLTEQLDQYHNEGWTVTNESLIQFARDLADRMEQTEGQLTIRYPWFFTRKAPATGLSGLMNAEVWQTVSVNTETDEATLSVGLTINVTTLCPCSKEISEYSAHNQRGYVTMEASLRDEAEDFDWKQSLLDAAESNASAPLHPVLKRPDEKRVTEMAYENPRFVEDMVRLIAADLYEMDPIASFYVECRNEETIHQHDAIARITFDKDAQ

SEQ ID NO: 8010 - protein, 230 aa, unidentified
  source 1..230: note = Fabibacter misakiensis
  REGION 1..230: note = tr|A0A1E5SY77|A0A1E5SY77_9BACT GTP cyclohydrolase 1; OS = Fabibacter misakiensis OX=1563681 GN=folE PE=3 SV=1
MSDKTNKTSEEVLRELEEMGDAHIMSSIATPLRSDAFDLSDDEKIEQIQGYFEKIMHTLGLDLTDDSLKGTPKRVAKLFVNDLFKGLNEKNKPSMSTFENKYQYAEMLVEKDITLYSNCEHHFLPIVGKAHVAYIPTDKVIGLSKINRIVDYFSRRPQVQERLAIQILNELKTALDTEDVAVYIDAEHMCVSSRGASDQSSSTVTVEYSGKFKEEQTKNEFLAYINNKLK

SEQ ID NO: 8011 - protein, 225 aa, unidentified
  source 1..225: note = Fabibacter misakiensis
  REGION 1..225: note = tr|A0A1E5SYC6|A0A1E5SYC6_9BACT GTP cyclohydrolase 1; OS = Fabibacter misakiensis OX=1563681 GN=folE PE=3 SV=1
MLNTQPNTLTIDEIGDEHIGTSYDTPLKEDAFNIDDDLKMSLIEDKFRDIMDIMGLDLTDDSLKGTPKRVAKMYIKEVFSGLNPENKPKIALFENKYQYNEMLVEKDITFYSNCEHHFVPIIGKAHVAYISSGKVIGLSKINRIVNYYAKRPQVQERLTVQIANELKEILETEDVAVVIDAEHLCVSSRGVEDVNSSTVTAQFSGKFKEEGTKSEFFSYVNNKIK

SEQ ID NO: 8012 - protein, 235 aa, unidentified
  source 1..235: note = Fabibacter pacificus
  REGION 1..235: note = tr|A0A4D7JNF8|A0A4D7JNF8_9BACT GTP cyclohydrolase 1; OS = Fabibacter pacificus OX=1267423 GN=folE PE=3 SV=1
MKHRETSLNTRVDEKIEKRIDDLGDEHVGTSLETPMRADAFDKDDELKIELIEKHFKEIMTILGLDLSDDSLQGTPRRVAKMYVKEIFSGLNPENKPDITLFENKFRYHEMLVEKNITFHSNCEHHFVPIYGHAHVAYISNGNIIGLSKLNRIVQYYAKRPQVQERMTVQIANELKEVLKTEDVAVVIDADHMCISSRGVNDTNSSTVTTHYSGKFLNEDKKKEFLNHIYKDSTR

SEQ ID NO: 8013 - protein, 230 aa, unidentified
  source 1..230: note = Fabibacter pacificus
  REGION 1..230: note = tr|A0A1I0QY15|A0A1I0QY15_9BACT GTP cyclohydrolase 1; OS = Fabibacter pacificus OX=1267423 GN=folE PE=3 SV=1
MEDKSTKISEELLKEVDEIGDNHIMTSIETPMRPDAFEMSNEEKIEKIESYFEKIMHTLGLDLTDDSLKGTPKRVAKLYIKDLFKGLDPANKPSMSTFENKYNYNQMLVEKNITLYSNCEHHFLPIVGKAHVAYIPNGRVIGLSKINRIVDYYARRPQVQERLALQVLNDLKQALNTEDVAVYVDAEHMCISSRGVSDQHSSTVTVEYSGKFKEENTKNEFLTYINAPLK

SEQ ID NO: 8014 - protein, 231 aa, Fabibacter sp.
  REGION 1..231: note = tr|A0A1E5SQU9|A0A1E5SQU9_9BACT GTP cyclohydrolase 1; OS = Fabibacter sp. 4D4 OX=1889784 GN=folE PE=3 SV=1
MRQNETMLNTQLNGLTVEEIGDEHIGTSYDTPLKEGAFDMDDNLKMNLIEDKFRDIMEIMGLDLTDDSLSGTPKRVAKMYIQEIFSGLNPANKPKVALFENKYQYNEMLVEKDITFYSNCEHHFVPIIGKAHVAYISSGKVIGLSKINRIVNYYAKRPQVQERLTVQIANELKSILETEDVAVIIDAEHLCVSSRGVQDVNSSTVTAQFDGKFKEDSTKNELLTYIGNKLK

SEQ ID NO: 8015 - protein, 229 aa, Fabibacter sp.
  REGION 1..229: note = tr|A0A1E5SMW0|A0A1E5SMW0_9BACT GTP cyclohydrolase 1; OS = Fabibacter sp. 4D4 OX=1889784 GN=folE PE=3 SV=1
MDNKNKTSEELLREIEAMGDAHIMSSIATPLRDDAFDLSDAEKIELIQGYFEKIMHTLGLDLTDDSLQGTPKRVAKLYVNELFKGLNEKNKPSMSTFENKYQYKEMLVEKDITLYSNCEHHFLPIVGKAHVAYIPNGKVIGLSKINRIVDYFARRPQVQERLALQILNELKDALNTEHVAVFIDAEHMCVSSRGASDQSSSTVTVEYSGKFKEEKTRNEFLAYINNKLK

SEQ ID NO: 8016 - protein, 192 aa, Facklamia hominis
  REGION 1..192: note = tr|K1MJT1|K1MJT1_9LACT GTP cyclohydrolase 1; OS = Facklamia hominis CCUG 36813 OX=883111 GN=folE PE=3 SV=1
MKEMNLSRVEELVREILIEIGEDPDRDGLIETPKRVAKALAETTASTRLTEFSEGKMFPTEHEDDDQFVSVNNIPFYSMCEHHMLPFFGQVSVAYLPQGGKIIGLSKIPRLVDYVSKKLNVQENITREVANILMEVTNARGVAVIVDARHMCVEMRGVKKMNSITRTCYYVGEFKENIQLRNEFLQSLPKVN

SEQ ID NO: 8017 - protein, 193 aa, Facklamia ignava
  REGION 1..193: note = tr|K1LSD2|K1LSD2_9LACT GTP cyclohydrolase 1; OS = Facklamia ignava CCUG 37419 OX=883112 GN=folE PE=3 SV=1
MTEMNLTKIEELVREILIEIGEDPGREGLVETPKRVAKALDFITGSTRLSEFTEGKMFPTEFCEDNEMVSVNNIPFYSMCEHHMLPFFGTVSVAYLPAEGQIIGLSKIPRLVDYVSRKLNVQENITRDVGQILMDITKARGVAVIVDARHMCVEMRGVQKVNSTTRTTFYAGEFKNNAQLRNEFLQSIPRVGQ

SEQ ID NO: 8018 - protein, 193 aa, Facklamia ignava
  REGION 1..193: note = tr|A0A2I1K4C5|A0A2I1K4C5_9LACT GTP cyclohydrolase 1; OS = Facklamia ignava OX=137730 GN=folE PE=3 SV=1
MTEMNLTKIEELVREILIEIGEDPDREGLVETPKRVAKALDFITGSTRLSEFTEGKMFPTEFCEDNEMVSVNNIPFYSMCEHHMLPFFGTVSVAYLPAEGQIIGLSKIPRLVDYVSRKLNVQENITRDVGQILMDITKARGVAVIVDARHMCVEMRGVQKVNSTTRTTFYAGEFKNNAQLRNEFLQSIPRVGQ

SEQ ID NO: 8019 - protein, 194 aa, Facklamia languida
  REGION 1..194: note = tr|H3NGT5|H3NGT5_9LACT GTP cyclohydrolase 1; OS = Facklamia languida CCUG 37842 OX=883113 GN=folE PE=3; SV = 1
MTEINIDRLAELVREILVEIGEDPDRDGLRETPKRVAKALQEMTASTRLASFTEGKMFPTATGSGDQVVSVNHIPFYSMCEHHMLPFFGHVHVGYLPQGGQIIGLSKIPRLVNYVSRKLNVQENITREVAEILMEVTQAKGVAVVVDARHMCVEMRGVQKLNSITRTTFFLGEFSQNDSLRKEFLQSLPKVGQW

SEQ ID NO: 8020 - protein, 195 aa, Facklamia miroungae
  REGION 1..195: note = tr|A0A1G7PSK4|A0A1G7PSK4_9LACT GTP cyclohydrolase 1; OS = Facklamia miroungae OX=120956 GN=folE PE=3 SV=1
MMKEINLDRIEELVRQLLIEIGEDPDRDGLVETPRRVAKSLMETTASTRLDEFTEGKMFPTESSLNQQMVSVNNIPFYSMCEHHMLPFFGNVHVGYLPQDGQIIGLSKIPRLVNYASRKLNVQENITREVADILMTITNAKGVAVVVDARHMCVEMRGVQKVNSITRTNYYLGAFNEDVQLRNEFLQSLPKVNSL

SEQ ID NO: 8021 - protein, 258 aa, Faecalibacterium prausnitzii
  REGION 1..258: note = tr|A0A564U990|A0A564U990_9FIRM GTP cyclohydrolase 1 type 2 OS=Faecalibacterium prausnitzii OX=853; GN = FPSSTS7063_02800 PE=4 SV=1
MTTVQQIYEEMQRIAPLALAESWDNPGLLVDCGGEVSRVLVTLDITPEVVEEAARKGCGLIVSHHPVIFSPLKKLSGQDVAFQLVKSGISAICMHTNLDAAEGGVNEVLAGIFGMREMEVFAEGCGRVGSIEPVTVPELAKKAQKELAFRCNQPFNGPAVQVKFADTGKTVRRLAVISGAGGSLFEDAIARGADCLLTGEANHHHAIDAKRLGLSLIAAGHYATEFPVTAAVAEKLRTAFPELEVLVSEDARDPYTYL

SEQ ID NO: 8022 - protein, 184 aa, unidentified
  source 1..184: note = Faecalicatena contorta
  REGION 1..184: note = tr|A0A174KH82|A0A174KH82_9FIRM GTP cyclohydrolase 1; OS = Faecalicatena contorta OX=39482 GN=folE PE=3 SV=1
MIDQEKIKQAVKLLLEGIGEDTGREGLKETPERIARMYEEIYGGMDEDAAEHLKKTFHVENNEIVMEKDITFYSTCEHHLLPFYGKAHIAYIPDGKVVGLSKLARTVEAFARRLQIQEQLTGQIADALMEHLKPKGVLVMIEAEHMCMTMRGIKKPGSQTVTVVKRGVFLEDPELTNLFFQMIR

SEQ ID NO: 8023 - protein, 183 aa, unidentified
  source 1..183: note = Faecalicatena contorta
  REGION 1..183: note = tr|A0A316AQ33|A0A316AQ33_9FIRM GTP cyclohydrolase 1; OS = Faecalicatena contorta OX=39482 GN=folE PE=3 SV=1
MMNQEKIMQGIKLLLEGIGEDVNREGLLETPDRIARMYEEICGGMEEDAAKHLGKTFSVSTNEIVVEKDITFYSTCEHHLLPFYGKAHIAYIPDGKVVGLSKLAKTVEVFAKRLQLQEQLTVQIADALVENLNPKGVLVMLEAEHMCMTMRGIKKPGSKTVTVAKRGEFQNNPELVNLFFQMV

SEQ ID NO: 8024 - protein, 184 aa, unidentified
  source 1..184: note = Faecalicatena orotica
  REGION 1..184: note = tr|A0A2Y9C6R0|A0A2Y9C6R0_9FIRM GTP cyclohydrolase 1; OS = Faecalicatena orotica OX=1544 GN=folE PE=3 SV=1
MIDQEKVKQAVKLLLEGIGEDITREGLKDTPDRIARMYEEIYGGMEENAAQHLKKTFHVDDNEMVIEKDITFYSTCEHHLLPFYGKAHIAYIPDGKVVGLSKLARTVEVFAKRLQLQEQLTGQIADALMENLNPKGVLVMIEAEHMCMTMRGIKKPGSQTVTIVKRGEFLENTELTNQFFQMLR

SEQ ID NO: 8025 - protein, 189 aa, Falsibacillus pallidus
  REGION 1..189: note = tr|A0A370GIF3|A0A370GIF3_9BACI GTP cyclohydrolase 1; OS = Falsibacillus pallidus OX=493781 GN=folE PE=3 SV=1
MGEVNRAQIEEAVRLILEAIGEDPNREGLLDTPKRVAKMYEEVFSGLNKDPKEYFETVFGEDHEELVLVKDIPFYSMCEHHLVPFYGKAHVAYIPKNGKVTGLSKLARAVETVARRPQLQERITSTVAEAIMEKLEPHGAMVVVEAEHMCMTMRGVQKPGSSTVTTAVRGSFAEDRTARAEVLSLIHKS

SEQ ID NO: 8026 - protein, 188 aa, Falsibacillus sp.
  REGION 1..188: note = tr|A0A3L7JWI5|A0A3L7JWI5_9BACI GTP cyclohydrolase 1; OS = Falsibacillus sp. GY 10110 OX=2478915 GN=folE PE=3 SV=1
MAEVNRAQIEEAVRLILDAIGEDPQREGLEDTPKRVAKMYEEVFSGLNQDPKEYFDTIFGEDHEELVLVKDIPFYSMCEHHLVPFYGKAHVAYIPKNGKVTGLSKLARAVEAVAKRPQLQERITATVVEAIMEKLEPHGAMVVVEAEHMCMTMRGVKKPGSKTITTAVRGSFAEDRQARSEVLSLIKQ

SEQ ID NO: 8027 - protein, 205 aa, unidentified
  source 1..205: note = Falsochrobactrum ovis
  REGION 1..205: note = tr|A0A364JTU0|A0A364JTU0_9RHIZ GTP cyclohydrolase 1; OS = Falsochrobactrum ovis OX=1293442 GN=folE PE=3 SV=1
MDARILKPVENSDQPVQSLRPTQAEAEAAVRTLLLWAGEDPAREGLLETPKRVVKSYSELFGGYAESPEDVLGTTFEEVSGYNDLVLVKDIPFFSHCEHHMVPIIGKAHVAYLPDGKVVGLSKIARVVDIFARRLQTQESITAQVGDSIQRILKPLGVAVMIEAEHMCMAMRGIRKQGSSTITTTFTGAFKERVDEQVRFMQLVR

SEQ ID NO: 8028 - protein, 206 aa, unidentified
  source 1..206: note = Falsochrobactrum sp.
  REGION 1..206: note = tr|A0A316J8P7|A0A316J8P7_9RHIZ GTP cyclohydrolase 1; OS = Falsochrobactrum sp. HN4 OX=2201899 GN=folE PE=3 SV=1
MDARILKKDDESNVLVKMHKPTQAEAEAAVRTLLLWAGEDPTREGLLETPKRVVKSYSELFGGYDQSPEDVLGTTFEEVSGYDDTVLVKDISFFSHCEHHMVPIIGKAHVAYLPDGKVLGLSKIARVVDIFARRLQTQESITAQIAGSIQRILKPRGVAVMIDAEHMCMAMRGIRKQGSSTITTTFTGAFKEEVDQQVRFMNLIRQ

SEQ ID NO: 8029 - protein, 192 aa, unidentified
  source 1..192: note = Fermentimonas caenicola
  REGION 1..192: note = tr|A0A098BZA8|A0A098BZA8_9PORP GTP cyclohydrolase 1; OS = Fermentimonas caenicola OX=1562970 GN=folE PE=3 SV=1
MSSEELEKNKSIISDHMREILSLLGEDVSREGLIKTPDRVAKAMQYLTKGYWQSPEEILRSAQFKENYRQMVIVKDIDFFSMCEHHMLPFFGKAHVAYIPNGYVTGLSKIARVVDVFSRRLQVQERLTTQIKDCIQNTLNPMGVMVVIEAKHMCMQMRGVEKQNSITTTSDFTGIFREQKTREEFVNLINRK

SEQ ID NO: 8030 - protein, 176 aa, Ferrimicrobium acidiphilum
  REGION 1..176: note = tr|A0A0D8FV45|A0A0D8FV45_9ACTN GTP cyclohydrolase 1; OS = Ferrimicrobium acidiphilum DSM 19497 OX=1121877 GN=folE; PE = 3 SV=1
MTSRDEAVTAVETLLTYLGERNDTRFGDEVYSRTPDRWITFLEAATQGMSEPEPSAVRFELERSGLVSIDEVAFYSLCEHHLLPFFGVVSVDYQPVDYVVGLSALVHVIERHARRLQLQERMTRDIAADVAAITGAKDVRVCVVAEHMCMSMRGVGKPGAQVTTRVVLSGSDSGNP

SEQ ID NO: 8031 - protein, 315 aa, Ferrimonas balearica
  REGION 1..315: note = tr|E1SRA6|E1SRA6_FERBD GTP cyclohydrolase FolE2; OS = Ferrimonas balearica (strain DSM 9799 / CCM 4581 / PAT); OX = 550540 GN=folE2 PE=3 SV=1
MTENLNMPTKMPDVATSAKAQVTGTLDWVGMSNIEMPMTIKADDGQARQISTRIEAFVNLAEPQAKGIHMSRLYLALDKLSLEQELTLQSLKALLDTFISSHDALSDRAHVSFAFDYHLRRPALLSGNHGWRNYPVVLTGRLDKGQLDLELKVDVAYSSTCPCSAALARQLIQDAFEAKFHGQQQIDLDTVHQWLGTTSGIVATPHSQRSIAEVKVKLNDALNELPILALVEAIENALKTPVQAAVKREDEQEFARLNGQNLMFVEDAARRLKHTLDQSESFNDFWLRVNHLESLHAHDAVAVDTKGVEGGYQPY

SEQ ID NO: 8032 - protein, 211 aa, Ferrimonas balearica
  REGION 1..211: note = tr|E1SP88|E1SP88_FERBD GTP cyclohydrolase 1; OS = Ferrimonas balearica (strain DSM 9799 / CCM 4581 / PAT); OX = 550540 GN=folE PE=3 SV=1
MNEEAKLVRDTLIARGLETPLVDSELNNEQKYARIKGLMAEVMGTLGLDLSDDSLRETPHRIAKMYVEEIFAGLDYEQFPKLCVIDNKMGVDEMVKVKEISLVSTCEHHFVTIDGTATVAYIPDKKVIGLSKINRIVQFFARRPQVQERLTQQVLVALQTLLGTNNVAVSIQATHYCVKARGVADASSYTETTALGGVFKTKAATRAEFLR

SEQ ID NO: 8033 - protein, 315 aa, Ferrimonas marina
  REGION 1..315: note = tr|A0A1M5ZFJ5|A0A1M5ZFJ5_9GAMM GTP cyclohydrolase FolE2 OS=Ferrimonas marina OX=299255 GN=folE2 PE=3 SV=1
MTENPSMPAHMPDVASSAKAAVSGTLDWVGMSEIEMPLTVVADNDTPRQVSARVEAFVNLPKAHAKGIHMSRLYLALDKLSLEQPLSLQSVKGLLEEFIRSHDDLSDRAHVRFQFDYHLRRPALLSGNEGWRNYPIALTGRLEQGKLELELEVEVAYSSTCPCSAALARQLIQEAFEHHFHGEEQVDSEVVRRWLGTTAGVVATPHSQRSLAQVKVRLSEQLDALPIVSLVDAIEDALKTPVQAAVKREDEQEFARLNGQNLMFVEDAARRLKFALEEQPELLDFWLRVNHLESLHAHDAVAVATKGLEDGYQPR

SEQ ID NO: 8034 - protein, 214 aa, Ferrimonas marina
  REGION 1..214: note = tr|A0A1M5NZ68|A0A1M5NZ68_9GAMM GTP cyclohydrolase 1; OS = Ferrimonas marina OX=299255 GN=folE PE=3 SV=1
MLSEHAITVRSALEAAGLETPMVQNGLDRDQKYQRIEALMSEVMDTLGLDREDDSLNRTPHRIAKMYVDEVFAGLDYSQFPKMSVIENKMGVDEMVTVGDIDLTSTCEHHFVTIDGSAKVSYIPKDKVIGLSKINRIVRFFAQRPQVQERLTRQVLVSLQALLGTENVAVSIRATHYCVKARGIMDSNSHTTTTALGGNFRTDPRTRAEFLAMR

SEQ ID NO: 8035 - protein, 308 aa, unidentified
  source 1..308: note = Ferrimonas sediminum
  REGION 1..308: note = tr|A0A1G8M440|A0A1G8M440_9GAMM GTP cyclohydrolase FolE2 OS=Ferrimonas sediminum OX=718193 GN=folE2 PE=3 SV=1
MATTMPDVASSAKAQIGGTLDWVGMSNIELPLTVTADDGKSRAVTAKVEAFVNLPNPQAKGIHMSRLYLALDQLSLNGELNLASMKALLDNFISSHEALSDRAKIKISFDYHLRRPSLLSDNSGWRAYPVTLVGSLNQGKLTLEMNVDVSYSSTCPCSAALARQLIQESFNRDFGDKQSLSAEEIHHWLGTTQGVVATPHSQRSVAEVWVKLDNNLTELPIVQLVDRIESALATPVQAAVKREDEQEFARLNGQNLMFVEDAARRLKMALNDTSDFFDFWLRVNHLESLHAHDAVSVTCKGVENGYQP

SEQ ID NO: 8036 - protein, 308 aa, Ferrimonas sp.
  REGION 1..308: note = tr|A0A4U1BJY1|A0A4U1BJY1_9GAMM GTP cyclohydrolase FolE2 OS=Ferrimonas sp. IMCC35001 OX=2569538 GN=folE2 PE=3; SV = 1
MATTMPDVASSAKAQVGGTLDWVGMSNIELPLTVKADDGQTRPVSAKVEAFVNLPNPQAKGIHMSRLYLALDQLSLNGELTLASLKSLLDGFISSHEALSDQAKVKISFDYHLRRGSLLSDNSGWRAYPVTLVGSLNQGKLTLEMSVEVAYSSTCPCSAALARQLIQEAFNNQFADRQTMTAEEVHQWLGTTQGVVATPHSQRSLAQVWVKMDDTLEQLPLVNLVDRIEGALATPVQAAVKREDEQEFARLNGQNLMFVEDAARRLKTALNEESRFHDFWLRVNHLESLHAHDAVSVTCKGVENGYQP

SEQ ID NO: 8037 - protein, 308 aa, Ferrimonas sp.
  REGION 1..308: note = tr|A0A4U1BMK7|A0A4U1BMK7_9GAMM GTP cyclohydrolase FolE2 OS=Ferrimonas sp. IMCC35002 OX=2569539 GN=folE2 PE=3; SV = 1
MATIMPDVASSAKAQIGGTLDWVGMSNIELPLTIRADDGQPRAVSAKVEAFVNLPNPQAKGIHMSRLYLALDQMSLAGELNLNSLKSLLDDFISSHEALSDRARVKISFDYHLRRSSLLSDNSGWRSYPVTLVGSLNQGKLSMEMNVDVSYSSTCPCSAALARQLIQDAFNTQFGQEQSLTPEQVQQWLGTTQGVVATPHSQRSIAEVWVKLDPEMEELPIVSLVDRIESALQTPVQAAVKREDEQEFARLNGQNLMFVEDAARRLKLALNDDTQILDFWLRVNHLESLHAHDAVSVTCKGLADGYQP

SEQ ID NO: 8038 - protein, 266 aa, unidentified
  source 1..266: note = Ferriphaselus amnicola
  REGION 1..266: note = tr|A0A2Z6GD03|A0A2Z6GD03_9PROT GTP cyclohydrolase FolE2 OS=Ferriphaselus amnicola OX=1188319 GN=folE2 PE=3; SV = 1
MNSASTSAIPDVQNSADTRQLAINKVGIKGIRHPVVVRDKSVGVQHTVATFNMYVHLPHNFKGTHMSRFVEILNQHGREISVESFESILREMVEKLEAQSGYIEMSFPYFVNKAAPVSEVQSLLDYDVTFIGEIIEGEYRFTMKVLVPVTSLCPCSKKISERGAHNQRSHVTLTVRTGSPVWIEELVRYAEEQASCELFGLLKRPDEKYVTERAYDNPKFVEDMVRDVAAVLNADDRITAYVVESENFESIHNHSAYALIEKDKRA

SEQ ID NO: 8039 - protein, 191 aa, Ferrithrix thermotolerans
  REGION 1..191: note = tr|A0A1M4TI37|A0A1M4TI37_9ACTN GTP cyclohydrolase 1; OS = Ferrithrix thermotolerans DSM 19514 OX=1121881 GN=folE; PE = 3 SV=1
MEIDREHALIVLTQYLEAIGLDLSDETLRDTPRRVLESHLEMLEGRNEDPQAILAETFPAGHEEMVIVKGVQFSSLCEHHLLPFTGVAHIAYLPNSQGRIVGLSKLARLVEVLSQRLQVQERLTSEIANNVEWALAPKGVLVVIEAEHLCMTVRGVKKPGTSAVTSAVRGVFKKNAATRSEAMDLLLSARA

SEQ ID NO: 8040 - protein, 232 aa, unidentified
  source 1..232: note = Ferrovibrio sp.
  REGION 1..232: note = tr|A0A2M8U399|A0A2M8U399_9PROT GTP cyclohydrolase 1; OS = Ferrovibrio sp. OX=1917215 GN=folE PE=3 SV=1
MTAPNTVSKSGLRYIRPAHQKDFPEEVAVSDANKIQRPSRAEAEEAVRTLIRWAGDDPTREGLRGTPDRVVRSYNEFFAGYEEDPVAMLERTFEEIEGYDEMVVLRDIRMESHCEHHMVPIIGKAHVAYLPGKRVVGISKLARVVEVYAKRLQIQEKLTAQVANTLQEVLQPRGVAVVMEAGHQCMTTRGVHKHGVTMVTSRMLGAFRDDPRTRHEFLTMIASSGGARGLDD

SEQ ID NO: 8041 - protein, 203 aa, unidentified
  source 1..203: note = Ferrovibrio sp.
  REGION 1..203: note = tr|A0A2M8U5D7|A0A2M8U5D7_9PROT GTP cyclohydrolase 1; OS = Ferrovibrio sp. OX=1917215 GN=folE PE=3 SV=1
MMPEMMPDMDTARPTPSEAEAAVRTLIRFAGDDPSREGLADTPARVVRAYAEWFGGYQLDPIALLSRTFGESGGYDEPVELRNIPVHSVCEHHMAPIQGLAHVAYIPTDRVVGISKLARVVDACARRLQIQERLTDDIASAIDKALKPRGVAVVIEADHACMTSRGVSAAGTRMVTRRMLGLFGADAALRREFLSSLTLTSER

SEQ ID NO: 8042 - protein, 273 aa, unidentified
  source 1..273: note = Ferrovum sp.
  REGION 1..273: note = tr|A0A0R0LJP0|A0A0R0LJP0_9PROT GTP cyclohydrolase FolE2 OS=Ferrovum sp. JA12 OX=1356299 GN=folE2 PE=3 SV=1
MNAPDNHLIPDIQSTADTRQIAIDRVGIKGIRHPIRVSDRELGDAQNTIASFNMYVHLPQHFKGTHMSRFVEILNREGREISVTSFGAMLQEMVERLDAQAGHIEMQFPYFVNKTAPVSGVRSLIDYDVTFIGEIHEGQVTFTMKVLVPVTSLCPCSKEISDYGAHNQRSHVTITARLNRFMWIEEVIRVAEESASCELFGLLKRPDEKWVTERAYDNPKFVEDMVRDIAHRLNQEPRIDHYIVESENFESIHNHSAYALIERDKIKHPVTSL

SEQ ID NO: 8043 - protein, 277 aa, unidentified
  source 1..277: note = Ferrovum sp.
  REGION 1..277: note = tr|A0A149W074|A0A149W074_9PROT GTP cyclohydrolase FolE2 OS=Ferrovum sp. Z-31 OX=1789004 GN=folE2 PE=3 SV=1
MNAFDPDLIPDIQSTPDTREIAIDRVGIKGIRHPVKVSDRALGDVQHTIATFNMYVHLPKHFKGTHMSRFVEILNREEREISVESFGKILQDMVQRLEAPAGLIEMSFPYFVSKAAPVSGVKSLIDYEVTFIGELTAGKFSFAMKVVIPVTSLCPCSKEISAYGAHNQRSHVTITAHTQTFVWIEEIIRIAEESASCELFGLLKRADEKWVTERAYDNPKFVEDMVRDVARKLDEDPRIDAYVVESENFESIHNHSAYALIERIKNAPTHPAGSLHD

SEQ ID NO: 8044 - protein, 201 aa, Ferruginibacter sp.
  REGION 1..201: note = tr|A0A3M9NRL0|A0A3M9NRL0_9BACT GTP cyclohydrolase 1; OS = Ferruginibacter sp. BO-59 OX=2294116 GN=folE PE=3 SV=1
MAYKRIEHYDEDVTNDLIKNYRETIRLIGEDPDREGLIKTPKRIAKAMQYCTQGYGQDAGAVLNSAKFHEDISEMIVVKNIELYSMCEHHMLPFFGKAHIAYIPNGWITGLSKIARVVDIFSKRLQVQERLTTQILDAIKDALNPLGVGVVIEAEHLCMMMRGVQKQNSVTTTSAFFGEFEKQTTRHEFISLISADLIKRK

SEQ ID NO: 8045 - protein, 229 aa, Ferruginibacter sp.
  REGION 1..229: note = tr|A0A3M9N4S6|A0A3M9N4S6_9BACT GTP cyclohydrolase 1; OS = Ferruginibacter sp. BO-59 OX=2294116 GN=folE PE=3 SV=1
MKTEIEIDNEVESEIDSIYLEDIDKDFIKYPGKSSVDNNEKLNDEEKIEIIASHFGAIMKTLGLDLNDDSLKDTPHRVAKMFVKESFSGLNPANEPSVTLFENKYQYNKMLVEKGITLYSYCEHHFVPIIGKAHVAYISKGKVIGLSKINRLVQYYAKRPQVQERLTNQIGEALKKAIGTEDVGVVIEADHLCVASRGIKDTGSSTVTTFYSGKFLNEEMKREFLSLIK

SEQ ID NO: 8046 - protein, 256 aa, Fervidicella metallireducens
  REGION 1..256: note = tr|A0A017RXF4|A0A017RXF4_9CLOT GTP cyclohydrolase FolE2 OS=Fervidicella metallireducens AeB OX=1403537; GN = folE2 PE=3 SV=1
MKDVQNEKDIRNVQLKKVGIKNLKWPIVAKDRTDGVQHTVAELALSVELPHDVRGTHMSRFVEIMSKHNVVSPKDLEVMLDELKEKLEAEVAHCTVVFDYFVKKPSPVTGIVSPYDVKCTFDAEKGEKFKFTMEVAVPVSTLCPCSKEISEFGAHNQRATVYIKVEMNKMIWIEDIVKIAEDSASTPVFSLLKRKDEKWITEQAYLNPRFVEDVAREAAIRLEQNEKISWYSVYVESMESIHNHNAFAYTEKGCML

SEQ ID NO: 8047 - protein, 272 aa, Fervidicola ferrireducens
  REGION 1..272: note = tr|A0A140LAE4|A0A140LAE4_9THEO GTP cyclohydrolase FolE2 OS=Fervidicola ferrireducens OX=520764 GN=folE2 PE=3; SV = 1
MESSTGVKALKDVQSERDERRVPLKKVGVKNIEWPLKVLDKARGHQYTVAKISLSVDLRHDVRGTHMSRFVEVLNNLEMLSPAALLEILSEIKEKLQAEKSYLKMCFPYFLWKESPVSRLSSPLKIQALVEAESGIKSTITMGVKVPVHTLCPCSKEISENGAHNQRAVVEIYVRSKKMIWFEDLSEIAEKSASCPIYTLLKRPDEKFVTEMAYSNAKFVEDVTRDAALELEKDERIEWYKVQVTSFESIHNHDAFACVEKGWLHGADGDFA

SEQ ID NO: 8048 - protein, 263 aa, Fervidobacterium changbaicum
  REGION 1..263: note = tr|A0A1G8FT60|A0A1G8FT60_9BACT GTP cyclohydrolase FolE2 OS=Fervidobacterium changbaicum OX=310769 GN=folE2; PE = 3 SV=1
MVLKDVQNERDARNIYLKRVGVKGVRYPVVVLDRAQGTQATIATINMYVDLPKDYRGTHMSRFIEVLNEFHLEINPKRVKDILNRLKDVLNAKRAVIEVEFPYFVKKQAPVTKSESYLEYTCSFEAEIFDGKFDFLTSVLVPIHTLCPCSKEISERGAHNQRALCKVSFESKEMIWIEDIIEVVEKSASAPIFTLLKRPDEKYVTELAYDNPKFVEDVARDVAIELKKYDKIKWYKVEVESYESIHAHNAYACVTSDELEEQI

SEQ ID NO: 8049 - protein, 260 aa, Fervidobacterium gondwanense
  REGION 1..260: note = tr|A0A1M7S7M8|A0A1M7S7M8_FERGO GTP cyclohydrolase FolE2 OS=Fervidobacterium gondwanense DSM 13020 OX=1121883; GN = folE2 PE=3 SV=1
MLKDVQSQHDSRNVYLRRVGVKGVRYPVVVLDKTNGSQSTVATVNMYVDLPKRYRGTHMSRFIEVLNEYHLEINPRRIREILSRLKEVLHAKRSFIEISFPYFLRKQAPVSRSESYLEYECSFEAEMYDESFNFLSSVRVPIHTLCPCSKEISERGAHNQRAFCTVTFESKEMVWFEEIIEIVERNASSPLYTLLKRPDEKYVTEHAYDNPKFVEDVARDVALELKRYDKIRWYKVEVESFESIHLHNAYACVMSDEIHI

SEQ ID NO: 8050 - protein, 263 aa, Fervidobacterium islandicum
  REGION 1..263: note = tr|A0A1B0VIZ2|A0A1B0VIZ2_FERIS GTP cyclohydrolase FolE2 OS=Fervidobacterium islandicum OX=2423 GN=folE2 PE=3; SV = 1
MVLRDVQNERDARNIYLKRVGVKGVRYPVVVLDRAQGTQATIATINMYVDLPKDYRGTHMSRFIEVLNEFHLEINPKRVKDILNRLKDVLNAKRAVIEVEFPYFVKKQAPVTKSESYLEYICSFEAEIFDGKFDFLISVSVPIHTLCPCSKEISERGAHNQRALCKVSFESKEMIWIEDIIEVVEKSASAPIFTLLKRPDEKYVTELAYDNPKFVEDVARDVAIELKKYDKIKWYKVEVESYESIHAHNAYACVTSDELEEQI

SEQ ID NO: 8051 - protein, 261 aa, Fervidobacterium nodosum
  REGION 1..261: note = sp|A7HKP2|GCH4_FERNB GTP cyclohydrolase FolE2; OS = Fervidobacterium nodosum (strain ATCC 35602 / DSM 5306 / Rt17-B1) OX=381764 GN=folE2 PE=3 SV=1
MLKDVQNERDNRNIYLKRVGVKDLRYPIVVLDRTNVTQNTIATLNMFVDLPKDYRGTHMSRFIEVLNEYHLEINPKRIKEILRSLKKVLNAKRSVIEITFPFFLLKKAPVTGSESYLEYTCSFEAEMNGDHLDFSTTVTAPIHTLCPCSKEISEYGAHNQRAKCSVTFKSKEMVWIEDIIEIIEESASAPIFTLLKRADEKYVTEHAYDNPKFVEDVARDVALRLKKYDKIEWYKVEVESFESIHAHNAYACLTSDEIEKI

SEQ ID NO: 8052 - protein, 261 aa, Fervidobacterium pennivorans
  REGION 1..261: note = tr|A0A172T1Z6|A0A172T1Z6_FERPE GTP cyclohydrolase FolE2 OS=Fervidobacterium pennivorans OX=93466 GN=folE2; PE = 3 SV=1
MVLRDVQSEYDLRNVYLKRVGVKGVRYPIVVLDKTNGSQSTIATINMYVDLPQNYRGTHMSRFIEVLNEYHLEINPKRVKDILYKLKSVLNAKRAVIEVEFPYFIKKQAPVTKSESYLEYSCTFEAEIFDSRFDFLTSVVVPIHTLCPCSKEISERGAHNQRAICKVSYESKEMIWIEDIVEIVEKSASAPIFTLLKRPDEKYVTELAYDNPKFVEDVARDVALELKKYDKIKWYRVEVESFESIHAHNAYACVTSDELQG

SEQ ID NO: 8053 - protein, 261 aa, Fervidobacterium pennivorans
  REGION 1..261: note = tr|H9UBW7|H9UBW7_FERPD GTP cyclohydrolase FolE2; OS = Fervidobacterium pennivorans (strain DSM 9078 / Ven5); OX = 771875 GN=folE2 PE=3 SV=1
MVLRDVQSEYDLRNVYLKRVGVKGVRYPIVVLDKTNGVQSTIATINMYVDLPQNYRGTHMSRFIEVLNEYHLEINPKRVRDILHKLKDVLNAKRAVIEVEFPYFIKKQAPVTKSESYLEYICTFEAEIFDSRFDFLTSVVVPIHTLCPCSKEISDRGAHNQRAICKVSYESREMIWIEDIIEIVEKSASAPIFTLLKRPDEKYVTELAYDHPKFVEDVARDVALELKKYDKIKWYRVEVESFESIHAHNAYACVTSDELQG

SEQ ID NO: 8054 - protein, 263 aa, Fervidobacterium sp.
  REGION 1..263: note = tr|A0A3D2GE84|A0A3D2GE84_9BACT GTP cyclohydrolase FolE2 OS=Fervidobacterium sp. OX=1871331 GN=folE2 PE=3 SV=1
MEVDALKDVQNQYDYRNVYLHRVGVKGVKYPIVVLDKRNGTQSTIASVNMYVDLPRDYRGTHMSRFIEVLNEFHLEVHPKRIKEILERLKSVLNASRGVIEVDFPYFISKKAPVTGIESYLEYQCAFNAEMYESIFKFEVSVTTPIHILCPCSKEISERSAHNQRALCKVTFHSHEMVWIEDIISIVESSASAPIYTLLKRPDEKFITELAYDNPRFVEDVARDVALKLRNYGKINWYKIEVESFESIHLHNAYTCVLSDEVL

SEQ ID NO: 8055 - protein, 258 aa, unidentified
  source 1..258: note = Fervidobacterium thailandense
  REGION 1..258: note = tr|A0A1E3G575|A0A1E3G575_9BACT GTP cyclohydrolase FolE2 OS=Fervidobacterium thailandense OX=1008305 GN=folE2; PE = 3 SV=1
MRDVQSEPDHRNVYLHRVGVKGVSYPIVVLDRTNGVQRTVASVNMYVDLPENFRGTHMSRFIEVLNEYHLEVNPKKIKDMLGRLKEVLNAKRAVLEVSFPYFILKKAPVSQTESFLKYDCAFEAEIFDSQFHFETIVEVPIHTLCPCSKEISERGAHNQRAVCKVTYVSSEMVWIEEIIEIVESSASAPIFTLLKRVDEKFVTEHAYDNPKFVEDVARDVALRLKEHGKIKWYRVEVESFESIHLHNAYACVVSDEVF

SEQ ID NO: 8056 - protein, 255 aa, Fibrella aestuarina
  REGION 1..255: note = tr|I0K9X6|I0K9X6_9BACT GTP cyclohydrolase 1; OS = Fibrella aestuarina BUZ 2 OX=1166018 GN=folE PE=3 SV=1
MKPNGTSLNTPSNGAASNGIHLNGHKNGHATHGLSDELVDEMGDNHALANLETPLRPDAFDLDDDLKIDLIEAHFREIMTILGLDLTDDSLKGTPRRVAKMYVNETFKGLNPANKPSTTLFDNKYQYNQMLVERDITVQSYCEHHFVPIIGKAHVAYISSGKVIGLSKLNRIVQYYAKRPQVQERLTMQIADELKRALQTDDVAVIIDAAHLCVSTRGVNDTASSTLTAAYSGKFEDEATKQEFLKYVGMAKPTM

SEQ ID NO: 8057 - protein, 247 aa, Fibrella sp.
  REGION 1..247: note = tr|A0A1W6EB81|A0A1W6EB81_9BACT GTP cyclohydrolase 1; OS = Fibrella sp. ES10-3-2-2 OX=1834519 GN=folE PE=3 SV=1
MKPNGTSLNTLSTNGIHLNGNGHKHDLTDELVDDMGDNHASANLDTPLRDDAFDLDDNLKIDLIEEHFREIMTILGLDLTDDSLKGTPRRVAKMYVNETFKGLNPANKPSTTLFENKYQYNQMLVERDITVQSYCEHHFVPIIGKAHVAYISSGKVIGLSKLNRIVQHFAKRPQVQERLTMQIADELKKALQTEDVAVIIDAAHLCVSTRGVNDTASSTLTAAYSGKFDDEATRQEFLKYVGMKPTM

SEQ ID NO: 8058 - protein, 249 aa, Fibrisoma limi
  REGION 1..249: note = tr|I2GF47|I2GF47_9BACT GTP cyclohydrolase 1; OS = Fibrisoma limi BUZ 3 OX=1185876 GN=folE PE=3 SV=1
MKLNGTSSNTPSILTESLNGKHHNGSSVDAVLAEEMGDAHAAASLETPLRDDAFDLDDDLKIDLIEEHFREIMQIMGLDLTDDSLKGTPRRVAKMYIKEAFSGLNPANKPSTTLFDNKYQYNQMLVEKDITVHTYCEHHFVPIIGKAHVAYISSGKVIGLSKLNRIVQYFSKRPQVQERLTMQIADELKKALNTEDVAVIIDAKHLCVSTRGVNDTASSTITSAYSGKFEDEATRQELLRYISVSTATI

SEQ ID NO: 8059 - protein, 244 aa, Fibrisoma sp.
  REGION 1..244: note = tr|A0A418M6N3|A0A418M6N3_9BACT GTP cyclohydrolase 1; OS = Fibrisoma sp. HYT19 OX=2305895 GN=folE PE=3 SV=1
MKLNGTSSNTPLLNGKHHNGSSVDAVLAEEMGDAHAAASLETPLRDDAFDLDDDLKIDLIEEHFREIMQIMGLDLTDDSLKGTPRRVAKMYIKEAFSGLNPANKPGTTLFDNKYQYNQMLVEKDITVHTYCEHHFVPIIGKAHVAYISSGKVIGLSKLNRIVQYFSKRPQVQERLTMQIADELKKALDTEDVAVIIDAKHLCVSTRGVNDTASSTITSAYSGKFEEEATRQELLRYISVSTATI

SEQ ID NO: 8060 - protein, 184 aa, Fibrobacter intestinalis
  REGION 1..184: note = tr|A0A1T4LKX2|A0A1T4LKX2_9BACT GTP cyclohydrolase 1; OS = Fibrobacter intestinalis OX=28122 GN=folE PE=3 SV=1
MENGFRMILEGMGEDPSREGLLDTPKRVAKMYAELMTSLRSESNPSEILKTRFHEKYDEMIVVPNIEFASMCEHHFLPFTGRAFVAYIPGDCVVGLSKIPRVVEYFARMPQIQERMTRQIAELIQKELNPRGVAVLLEASHMCMTMRGVKKPGATMVTTQLLGRFKTDEKTRAEFMTYIHREGC

SEQ ID NO: 8061 - protein, 188 aa, Fibrobacter sp.
  REGION 1..188: note = tr|A0A1M6J4R8|A0A1M6J4R8_9BACT GTP cyclohydrolase 1; OS = Fibrobacter sp. UWP2 OX=1896216 GN=folE PE=3 SV=1
MNLKMMEDGFRMILTGMGENPNREGLLDTPKRVAKMYAELMTGLSGEMRAEDILKTRFHEKYDEMIIVPDIEFASMCEHHFLPFTGKAHVAYIPGDCVVGLSKIPRVVEFYARFPQIQERMTRQIAELIQKELNPKGVAVVLEASHMCMTMRGVKKPGATMVTTQLLGRFKTDEKTRAEFMSRIYAPR

SEQ ID NO: 8062 - protein, 187 aa, Fibrobacter sp.
  REGION 1..187: note = tr|A0A254SVW4|A0A254SVW4_9BACT GTP cyclohydrolase 1; OS = Fibrobacter sp. UWB1 OX=1964355 GN=B7988_02925 PE=3 SV=1
MIKTKKIEQLVRQLLEALNDNPDREGLRDTPRRVAKYYAEMFEGQNYTNAQLAKKFGKCFKQDADGQIVSVDDITIFSHCEHHLALMYDMKVSIRYIPHGKVLGLSKFARISEMVGKRLQLQEKIGSDIAEVIMLATGSKDVEVRIEAKHACVTARGAKNCNMVTRTLFSSGAFKTHLTSNVTESIS

SEQ ID NO: 8063 - protein, 189 aa, Fibrobacter succinogenes
  REGION 1..189: note = tr|A0A380S790|A0A380S790_FIBSU GTP cyclohydrolase 1; OS = Fibrobacter succinogenes OX=833 GN=folE PE=3 SV=1
MMDFKKMEDGFRMILEGMGEDPNREGLIDTPKRVAKMYAELMTGLSGEMKAEDILKTRFHEKYDEMIIVPDIEFASMCEHHFLPFTGKAHVAYIPGDCVVGLSKIPRVVEFYARFPQIQERMTRQIAELIQKVLQPKGVAVVLEASHMCMTMRGVKKPGATMVTTQLLGRFKTDEKTRAEFMSRIYAPR

SEQ ID NO: 8064 - protein, 188 aa, Fibrobacter succinogenes
  REGION 1..188: note = tr|D9SBL8|D9SBL8_FIBSS GTP cyclohydrolase 1; OS = Fibrobacter succinogenes (strain ATCC 19169 / S85); OX = 59374 GN=folE PE=3 SV=1
MDFKKMEDGFRMILEGMGEDPNREGLIDTPKRVAKMYAELMTGLSGEMKAEDILKTRFHEKYDEMIIVPDIEFASMCEHHFLPFTGKAHVAYIPGDCVVGLSKIPRVVEFYARFPQIQERMTRQIAELIQKVLQPKGVAVVLEASHMCMTMRGVKKPGATMVTTQLLGRFKTDEKTRAEFMSRIYAPR

SEQ ID NO: 8065 - protein, 183 aa, unidentified
  source 1..183: note = Fibrobacteres bacterium
  REGION 1..183: note = tr|A0A3C0PG07|A0A3C0PG07_9BACT GTP cyclohydrolase 1; OS = Fibrobacteres bacterium OX=2052160 GN=folE PE=3 SV=1
MEDAIKKILSFIGENPDREGLRDTPMRVAKSMKFLMQGYTMNPDEIIKKAIFTEECNHMIIVRDIELYSMCEHHMLPFFGKCHIGYIADNKVYGVSKLARLVDCFARRLQVQERLTQQIAYSLMEPIKAQGVGVVIEAHHLCMMMRGVSKQNSKMITSAMLGCFRNETATRNEFLKLISLERD

SEQ ID NO: 8066 - protein, 187 aa, unidentified
  source 1..187: note = Fibrobacteres bacterium
  REGION 1..187: note = tr|A0A1J5EXQ7|A0A1J5EXQ7_9BACT GTP cyclohydrolase 1; OS = Fibrobacteres bacterium CG2_30_45_31 OX=1805149 GN=folE; PE = 3 SV=1
MMDLAKMEDGFRLILEGMGEDIHREGLIDTPRRVAKMYQELLAGLTDGVNEDDLLSTQFTEAYDEMILLKDIPFVSMCEHHFLPFIGKAHVAYIPNDRIVGLSKLARTVDYYAKRPQVQERMTRQIAELIQKQLNPKGVAVVVEATHSCMTVRGVKKQGSVMFTSQLLGLFKRSEKTRAEFMALIHG

SEQ ID NO: 8067 - protein, 188 aa, unidentified
  source 1..188: note = Fictibacillus aquaticus
  REGION 1..188: note = tr|A0A235FB38|A0A235FB38_9BACI GTP cyclohydrolase 1; OS = Fictibacillus aquaticus OX=2021314 GN=folE PE=3 SV=1
MIEFDREKIETAIRMILEAVGEDPDREGLLDTPKRVARMYEEVFQGLNQDPKEHFATVFGEDHEELVLVKDIPFYSMCEHHLVPFFGVAHIGYIPKGGKVTGLSKLARAVEAVTKRPQLQERITSTVADSLVETLEPHGVIVVVEAEHMCMTMRGVKKPGSKTVTSAVRGVFAEDAAARAEVLSFIKS

SEQ ID NO: 8068 - protein, 188 aa, unidentified
  source 1..188: note = Fictibacillus arsenicus
  REGION 1..188: note = tr|A0A1B1Z5I8|A0A1B1Z5I8_9BACI GTP cyclohydrolase 1; OS = Fictibacillus arsenicus OX=255247 GN=folE PE=3 SV=1
MAEVQREKIETAVKMILEAIGEDPEREGLIDTPKRVAKMYEEVFQGLNQDPKEHFATIFGEDHEELVLVKDIPFYSMCEHHLVPFFGKAHIGYIPKGGKVTGLSKLARAVEAVTKRPQLQERITSTIANSLLETLEPHGVIVVIEAEHMCMTMRGVKKPGSMTVTSAVRGVFEKDAAARAEVLSLIKN

SEQ ID NO: 8069 - protein, 188 aa, unidentified
  source 1..188: note = Fictibacillus enclensis
  REGION 1..188: note = tr|A0A0V8JES6|A0A0V8JES6_9BACI GTP cyclohydrolase 1; OS = Fictibacillus enclensis OX=1017270 GN=folE PE=3 SV=1
MKEFDQAKIEQAVTMILEAIGEDPSREGLVDTPKRVAKMYQEVFQGLNQDPKEHFATIFGEDHEELVLVKDIPFYSMCEHHLVPFFGKAHIGYIPKGGKVTGLSKLARAVEAVTRRPQLQERITSTVADSLVETLNPHGVIVVVEAEHMCMTMRGVKKPGSKTVTSAVRGVFVDDAAARAEVLTFIRS

SEQ ID NO: 8070 - protein, 188 aa, unidentified
  source 1..188: note = Fictibacillus macauensis
  REGION 1..188: note = tr|I8ALT0|I8ALT0_9BACI GTP cyclohydrolase 1; OS = Fictibacillus macauensis ZFHKF-1 OX=1196324 GN=folE; PE = 3 SV=1
MKEFDKDKIQQAVTMILEAIGEDPTREGLLDTPKRVAKMYEEVFQGLNQDPKDHFATIFGEDHEELVLVKDIPFYSMCEHHLVPFFGVAHIGYIPRGGKVTGLSKLARAVEAVTRRPQLQERITSHVANSLVETLDPHGVIVVVEAEHMCMTMRGVKKPGSKTVTSAVRGVFANDAAARSEVLGLIRS

SEQ ID NO: 8071 - protein, 185 aa, unidentified
  source 1..185: note = Fictibacillus macauensis
  REGION 1..185: note = tr|I8AIJ5|I8AIJ5_9BACI GTP cyclohydrolase 1; OS = Fictibacillus macauensis ZFHKF-1 OX=1196324 GN=folE; PE = 3 SV=1
MIDKQKIEQCIREILIALGEDPDRDGIKDTPRRVAKMYEEVFQGIQYTNDEIADQFGTCFEEDMDFLSKDGIILVKDIECTSYCEHHMALIYDMHITVAYKPKDKVIGLSKIARIADMVCRRLQIQERITSDIFYIIEKVTDSDDIYVKVDGKHGCMTARGIKKHQAVTFTEQKSGIFQQQPPTF

SEQ ID NO: 8072 - protein, 188 aa, unidentified
  source 1..188: note = Fictibacillus phosphorivorans
  REGION 1..188: note = tr|A0A168W379|A0A168W379_9BACI GTP cyclohydrolase 1; OS = Fictibacillus phosphorivorans OX=1221500 GN=folE PE=3; SV = 1
MAEVQKEKIELAVKMILEAIGEDPEREGLIDTPKRVAKMYEEVFQGLNQDPKEHFATIFGEDHEELVLVKDIPFYSMCEHHLVPFFGKAHIGYIPKGGKVTGLSKLARAVEAVTKRPQLQERITSTIANSLLETLEPHGVIVVIEAEHMCMTMRGVKKPGSMTVTSAVRGVFEKDPAARAEVLSLIKN

SEQ ID NO: 8073 - protein, 188 aa, unidentified
  source 1..188: note = Fictibacillus phosphorivorans
  REGION 1..188: note = tr|A0A161RR97|A0A161RR97_9BACI GTP cyclohydrolase 1; OS = Fictibacillus phosphorivorans OX=1221500 GN=folE PE=3; SV = 1
MAEVQKEKIEAAVKMILEAIGEDPEREGLIDTPKRVAKMYEEVFQGLNQDPKEHFATIFGEDHEELVLVKDIPFYSMCEHHLVPFFGKAHIGYIPKGGKVTGLSKLARAVEAVTKRPQLQERITSTIANSLLETLEPHGVIVVIEAEHMCMTMRGVKKPGSMTVTSAVRGVFEKDPAARAEVLSLIRN

SEQ ID NO: 8074 - protein, 188 aa, unidentified
  source 1..188: note = Fictibacillus solisalsi
  REGION 1..188: note = tr|A0A1G9VZX4|A0A1G9VZX4_9BACI GTP cyclohydrolase 1; OS = Fictibacillus solisalsi OX=459525 GN=folE PE=3 SV=1
MKEFDQAKIEKAVTMILEAIGEDPAREGLVDTPKRVAKMYQEVFQGLNQDPKEHFATIFGEDHEELVLVKDIPFYSMCEHHLVPFFGKAHIGYIPKGGKVTGLSKLARAVEAVTRRPQLQERITSTVADSLVETLNPHGVIVVVEAEHMCMTMRGVKKPGSKTVTSAVRGVFVDDAAARAEVLTFIRS

SEQ ID NO: 8075 - protein, 188 aa, unidentified; identical to SEQ ID NO: 8069
  source 1..188: note = Fictibacillus sp.
  REGION 1..188: note = tr|A0A4Q2HSU0|A0A4Q2HSU0_9BACI GTP cyclohydrolase 1; OS = Fictibacillus sp. S7 OX=2212476 GN=folE PE=3 SV=1

SEQ ID NO: 8076 - protein, 188 aa, unidentified; identical to SEQ ID NO: 8068
  source 1..188: note = Fictibacillus sp.
  REGION 1..188: note = tr|A0A4Q7QQV0|A0A4Q7QQV0_9BACI GTP cyclohydrolase 1; OS = Fictibacillus sp. BK138 OX=2512121 GN=folE PE=3 SV=1

SEQ ID NO: 8077 - protein, 248 aa, unidentified
  source 1..248: note = Unknown
  REGION 1..248: note = tr|A0A2T1CN12|A0A2T1CN12_9CYAN GTP cyclohydrolase 1; OS = filamentous cyanobacterium CCP2 OX=2107700 GN=folE PE=3; SV = 1
MTIASSNGLNGSNTTPSNAAMTSNEMLPTEQSQQNRVQSRPDRSTAHGRESQLHPPAESSSEEMMDAVRTMLLGVGEDPEREGLLKTPKRVAEAMRFLTSGYDQSLEELVNGAIFDEGHNEMVLVRDIDVFSLCEHHMLPFMGKAHVAYIPNQKVVGLSKLARIVEMYSRRLQVQERLTRQIAEAIQEILDPQGVAVVIEATHMCMVMRGVQKPGSWTVTSAMIGGFQEDQRTREEFLSLIRHQPSFR

SEQ ID NO: 8078 - protein, 235 aa, unidentified
  source 1..235: note = Unknown
  REGION 1..235: note = tr|A0A2P8W878|A0A2P8W878_9CYAN GTP cyclohydrolase 1; OS = filamentous cyanobacterium CCT1 OX=2107702 GN=folE PE=3; SV = 1
MTIASSNSLNDKIAANGGPKIVQPEVRPDRTRSYRDDADQYPIPETSHEDMADAVRTMLLSVGEDPEREGLLKTPKRVAEAMRFLTSGYQQSLEELVNGAIFDEGHNEMVLVRDINLFSLCEHHMLPFMGRAHVAYIPNQRVVGLSKLARIVEMYSRRLQVQERLNRQIAEAVQEILDPKGVAVVVEASHMCMVMRGVQKPGSWTVTSAMLGVFQEDSKTREEFLSLIRHQPAFF

SEQ ID NO: 8079 - protein, 189 aa, Filibacter sp.
  REGION 1..189: note = tr|A0A3P5XD34|A0A3P5XD34_9BACL GTP cyclohydrolase 1; OS = Filibacter sp. TB-66 OX=2483811 GN=folE PE=3 SV=1
MEKIDYEKIEKAVTMILEAVGEDPDREGLIETPKRVAKMYAEMFEGIGKDPKDYFKTVFNENHDEVVIVKDIAFHSMCEHHLVPFFGHAHVAYIPRDGVVAGLSKLARAVETTARRPQLQERITSTVADSIMEMLNPLGVYVIIEAEHMCMTMRGIKKPGAKTVTAVARGIYEHDDVKRSEILSLIKMS

SEQ ID NO: 8080 - protein, 236 aa, unidentified
  source 1..236: note = Filimonas endophytica
  REGION 1..236: note = tr|A0A561IPI9|A0A561IPI9_9BACT GTP cyclohydrolase 1; OS = Filimonas endophytica OX=1500311 GN=folE PE=3 SV=1
MKQNGNVAHVLEAVPDAVWDIAECGDQHWTNAAGTPLRADAALLSDAEKIDRISGLFREIMDTLGLDLTDDSLKGTPKRVARMYVEEIFRGLNPEQKPDMTLFENKYRYNQMLVEKNITVHSNCEHHFVPISGFAHVGYISSGKVIGLSKLNRLVDYYARRPQVQERLTVQIGKELQQVLETEDVAVMIDAKHFCVSSRGIKDNSSSTVTAFWGGRFAEERCKNEFLSYMQLPAVR

SEQ ID NO: 8081 - protein, 199 aa, unidentified
  source 1..199: note = Filimonas endophytica
  REGION 1..199: note = tr|A0A561I9K9|A0A561I9K9_9BACT GTP cyclohydrolase 1; OS = Filimonas endophytica OX=1500311 GN=folE PE=3 SV=1
MAYRKTEEYDERVTEGLMKSYKDALQLLGEDAEREGLLKTPERMAKAMQYLTQGYGLSAVEILNSARFKEDVSEMIIVKDIELYSMCEHHMLPFFGKAHIAYIPNGYITGLSKLGRVVDVFARRLQVQERLTTQILDAIKEALNPLGVAVVIEAKHLCMMMRGVQKQNSVTTTSAFDGEFLHNHITRNEFLKLISADLS

SEQ ID NO: 8082 - protein, 199 aa, Filimonas lacunae
  REGION 1..199: note = tr|A0A173M9H0|A0A173M9H0_9BACT GTP cyclohydrolase 1; OS = Filimonas lacunae OX=477680 GN=folE PE=3 SV=1
MAYKKTEEYDEQVTEGLMKSYKDALTLLGEDAEREGLLKTPERMAKAMQYLTQGYDLNAIDILNSAKFKEEVSEMVIVKDIELYSMCEHHMLPFFGKAHIAYIPNGYITGLSKLGRVVDVYARRLQVQERLTTQILEAIKEALNPLGVAVVIEAKHLCMMMRGVQKQNSVTTTSAFDGEFLHNHITRNEFLKLISSDLS

SEQ ID NO: 8083 - protein, 199 aa, Filimonas sp.
  REGION 1..199: note = tr|A0A2U0ZR07|A0A2U0ZR07_9BACT GTP cyclohydrolase 1; OS = Filimonas sp. YR581 OX=2135469 GN=folE PE=3 SV=1
MAYRKTEEYDERVTEGLMKSYKEALQLLGEDAEREGLLKTPERMAKAMQYLTQGYELNAVDILNSAKFKEDVSEMVIVKDIELYSMCEHHMLPFFGKAHIAYIPNGHITGLSKLGRVVDVYARRLQVQERLTTQILDAIKEALNPLGVAVVIEAKHLCMMMRGVQKQNSVTTTSAFDGEFLHNHITRNEFLKLIASDLS

SEQ ID NO: 8084 - protein, 199 aa, Filimonas sp.
  REGION 1..199: note = tr|A0A4Q1D2T3|A0A4Q1D2T3_9BACT GTP cyclohydrolase 1; OS = Filimonas sp. TTM-71 OX=2508721 GN=folE PE=3 SV=1
MAYRKIDQYDEEITSGLMAHYRSALQLLGEDAEREGLQKTPERMAKAMQYLTQGYEMDAKEILLSAKFKEDVSEMVIVKDIELYSMCEHHMLPFFGKAHIAYIPNGYITGLSKLGRVVDVFARRLQVQERLTTQILEAIKEALNPLGVAVVIEAKHLCMMMRGVQKQNSTTTTSAFDGEFLHNHITRNEFLKLIASDLS

SEQ ID NO: 8085 - protein, 306 aa, Filobacillus milosensis
  REGION 1..306: note = tr|A0A4Y8INQ1|A0A4Y8INQ1_9BACI GTP cyclohydrolase FolE2 OS=Filobacillus milosensis OX=94137 GN=folE2 PE=3; SV = 1
MDNIQSKKKLPNKKERHRLFGSVDPGPRTKPHKKSEMADLQNTKKDFLFELDAVGISNVKHPIVVPSTLKPKEQTTIGKFYFASTISQDSKGTNMSRFTEQLQTYYEDGFKVNIETMKEFAKELQGRLKQKDADLSVEFPWFFERLAPYTDKPGMNHADAWIKVNYHYENGFDIKVGLTAKITTLCPCSKEISEYSAHNQRGNVTIEVTLDSMFDDETHDWKEILLEAAESNASARIHPVLKRPDEKMVTEQAYENPRFVEDMVRLVSSDLYEMDMVKQFHVKCVNEESIHLHDAIASITYDKRNE

SEQ ID NO: 8086 - protein, 206 aa, Filomicrobium sp.
  REGION 1..206: note = tr|A0A2D7FII8|A0A2D7FII8_9RHIZ GTP cyclohydrolase 1; OS = Filomicrobium sp. OX=2024831 GN=folE PE=3 SV=1
MSITNHIKDLPRSARAPAKRPTRAEAEAAVRVLLAWTGENPSREGLRQTPARVVEAYEEFFSGYNSDPISWLDDAESDMSGGYDDIILLKGIRVQSFCEHHLTPFEGSAHLAYLPDKKVVGLSRLVRVVETCARRLQTQEALTEQIIQSINTGLAPRGCALIIEAEHQCMSFRGIKQSGIKTVTSKYCGEFDTDAALRQRFAALTS

SEQ ID NO: 8087 - protein, 233 aa, unidentified
  source 1..233: note = Fimbriiglobus ruber
  REGION 1..233: note = tr|A0A225DLX2|A0A225DLX2_9BACT GTP cyclohydrolase 1; OS = Fimbriiglobus ruber OX=1908690 GN=folE PE=3 SV=1
MNTHRDGQPENGYHNLEHHEIAARRAEAFCHCEDDEAPAALAAPTGVVDLGRIERAVREILAAVGEDPNREGLLETPARVARMYAEIFGGLHADPAAFLKKTFTQKHDEMVLVKDIEFASCCEHHLLPFLGKAHIAYLPDGKVVGLSKLARVVEAVARRPQVQERMTEDLADLITTELAPRGVGVILEASHSCMTIRGVRKPGAMTITSAMRGLFKTNPMTRGELMSLVFGAR

SEQ ID NO: 8088 - protein, 265 aa, unidentified
  source 1..265: note = Fimbriimonas ginsengisoli
  REGION 1..265: note = tr|A0A068NNH5|A0A068NNH5_9BACT GTP cyclohydrolase FolE2 OS=Fimbriimonas ginsengisoli Gsoil 348 OX=661478; GN = folE2 PE=3 SV=1
MSETIRPLVDVQNTKDVRNIPIDKVGVRKVKYPVFIRERDNGLQQTVGEFSLMVGLPRHFKGTHMSRFLEVLAEHNHDVSAETIPDILEGLRDRLNAVTAHLEVRFIYFREKAAPVTGKVGMMGYECAFLASGGEVNDSVLEVIVPVTTLCPCSKEISSFGAHNQRGYVTARIRTSGLVWIEEIVDLVEAAGSAPLYPVLKRPDEKFVTEQAYENPRFVEDMVREVSVAFDAHPLITSYEIEVENHESIHDHNAYAYVKRDRVTP

SEQ ID NO: 8089 - protein, 184 aa, Finegoldia magna
  REGION 1..184: note = sp|B0S1R1|GCH1_FINM2 GTP cyclohydrolase 1; OS = Finegoldia magna (strain ATCC 29328) OX=334413 GN=folE; PE = 3 SV=1
MDKEKIEQAVSMIIEAIGEDPNREGLLETPQRVARMYEEIFSGLNQDAKTHLSKSFEIVDDNMVIEKDIPFYSMCEHHLLPFWGKVNIAYIPNKRVAGLSKLARTVDVYSKKPQLQERLNIEIADALMEYLNCKGCLVTIEAEHMCMNMRGVKKPGTSTMTSVARGAFEEDLDLKNEAYRLMGL

SEQ ID NO: 8090 - protein, 184 aa, Finegoldia magna; identical to SEQ ID NO: 8089
  REGION 1..184: note = tr|A0A010NK48|A0A010NK48_FINMA GTP cyclohydrolase 1; OS = Finegoldia magna ALB8 OX=1459804 GN=folE PE=3 SV=1

SEQ ID NO: 8091 - protein, 192 aa, unidentified
  source 1..192: note = Firmicutes bacterium
  REGION 1..192: note = tr|A0A373PSH6|A0A373PSH6_9FIRM GTP cyclohydrolase 1; OS = Firmicutes bacterium AM55-24TS OX=2292896 GN=folE PE=3; SV = 1
MKKEFNHEKIKEAIRTILTELGDDPDREGLKDTPDRVARMYDEIFEGMRYTNDEIAEMFNKCFEVDSNDLVIVKDIEVFSHCEHHLALMYNMHCHVGYIPNGKVIGLSKIARICDMVSKRLQLQERICSDIAEVIQKVCDTEDVIVVVEGEHSCMTARGIKARGAKTRTSAIRGLFDTDHELRNEFYQLIKD

SEQ ID NO: 8092 - protein, 185 aa, unidentified
  source 1..185: note = Firmicutes bacterium
  REGION 1..185: note = tr|R6BMG3|R6BMG3_9FIRM GTP cyclohydrolase 1; OS = Firmicutes bacterium CAG:56 OX=1263031 GN=folE PE=3 SV=1
MVDQEKVREGVRLILEGIGEDINREGLIETPDRIARMYCELAGGMDQNAATHLEKRFHVDNADMVVEKDITFYSMCEHHMLPFFGKAHVAYIPNGEVVGLSKIARTVEVFARRLQLQEQLTAQIADAFMDNLHPQGVMVMIEAEHLCMTMRGIKKPGAQTVTTVTRGVFDNNKELQDTFYQMVRL

SEQ ID NO: 8093 - protein, 235 aa, Fischerella major
  REGION 1..235: note = tr|A0A1U7H3A9|A0A1U7H3A9_9CYAN GTP cyclohydrolase 1; OS = Fischerella major NIES-592 OX=210994 GN=folE PE=3 SV=1
MTIVSSNGSNRFQSPLVPDLTEAITTRPDRNTHDGRKPDLHPPQEEQIDEMVEAVRTLLLGIGEDPEREGLLKTPKRVAEALRFLTSGYNQSLEELVNGAIFDEGHSEMVLVRDINVFSLCEHHMLPFMGKAHVAYIPNQKVVGLSKLARIVEMYSRRLQVQERLTRQIAEAVQTILEPQGVAVVIEATHMCMVMRGVQKPGSWTVTSAMVGVFQEEHKTREEFFNLIRHQAAIF

SEQ ID NO: 8094 - protein, 216 aa, Fischerella major
  REGION 1..216: note = tr|A0A1U7H4T1|A0A1U7H4T1_9CYAN GTP cyclohydrolase 1; OS = Fischerella major NIES-592 OX=210994 GN=folE PE=3 SV=1
MTLSIRPDLTCADQIVSSLSTQQQPQVTELEMMQAVRTLLIGLGEYPDREGLKDTPKRVVKALQFLTKGYHESLDELLNGAVFKEDADEMVLVRDIDIFSSCEHHILPIIGRAHVAYIPNGKVIGLSKIARICEMYARRLQVQERLTLQIADALQGLLKPQGVAVVVKATHMCMVMRGVQKPGSWTVTSAMRGVFADDARTREEFMNLIQHNAKFQ

SEQ ID NO: 8095 - protein, 235 aa, unidentified
  source 1..235: note = Fischerella muscicola
  REGION 1..235: note = tr|A0A2N6JVY7|A0A2N6JVY7_FISMU GTP cyclohydrolase 1; OS = Fischerella muscicola CCMEE 5323 OX=2019572 GN=folE; PE = 3 SV=1
MTIVSSNGSNRFQSPLVPDLTEAITTRPDRNTHDGREPDLHLPQEEQMDEMVEAVRTLLLGIGEDPEREGLLKTPKRVAEAMRFLTSGYNQSLEELVNGAIFDEGHSEMVLVRDINVFSLCEHHMLPFMGKAHVAYIPNQKVVGLSKLARIVEMYSRRLQVQERLTRQIAEAVQTILEPQGVAVVIEATHMCMVMRGVQKPGSWTVTSAMVGVFQEEHKTREEFFNLIRHQAAIF

SEQ ID NO: 8096 - protein, 193 aa, Fischerella sp.
  REGION 1..193: note = tr|A0A1Z4TQY6|A0A1Z4TQY6_9CYAN GTP cyclohydrolase 1; OS = Fischerella sp. NIES-4106 OX=2005456 GN=folE PE=3 SV=1
MTLSIRPDLTCADQIVSSLSTQQQPQVTESEMIQAVRTLLIGLGENPDREGLKDTPKRVVKALQFLTKGYHESLDELLNGAVFTEDADEMVLVRDIDIFSSCEHHILPIIGRAHVAYIPNGKVIGLSKIARICEMYTRRLQVQERLTLQIADALQGLLKPQGVAVVVEATHMCMVMRGVQKPGSWTVTKMALS

SEQ ID NO: 8097 - protein, 235 aa, Fischerella sp.; identical to SEQ ID NO: 8093
  REGION 1..235: note = tr|A0A0S3TI73|A0A0S3TI73_9CYAN GTP cyclohydrolase 1; OS = Fischerella sp. NIES-3754 OX=1752063 GN=folE PE=3 SV=1

SEQ ID NO: 8098 - protein, 228 aa, Fischerella thermalis
  REGION 1..228: note = tr|A0A2N6LCU8|A0A2N6LCU8_9CYAN GTP cyclohydrolase 1; OS = Fischerella thermalis CCMEE 5319 OX=2019665 GN=folE; PE = 3 SV=1
MELKPLKDQREDYFGDTHTASSPENPLRPDAFSIPNEVKIQKIQDHFRAIMETLGLDLTDDSLRGTPLRVAEMMVNELFAGLDPANMPTLSTFENKYKYGEMLVEKNIVVYSTCEHHFLPIVGRAHIGYISAGSVIGLSKMNRIVDYYARRPQVQERMTKQIVRTLQHALGTPDVACVIDAKHLCVNSRGIRDIDSSTVTAEYGGRFQQEAVKKEFLDLIGLNTQFGV

SEQ ID NO: 8099 - protein, 235 aa, Fischerella thermalis
  REGION 1..235: note = tr|A0A2N6MWC9|A0A2N6MWC9_9CYAN GTP cyclohydrolase 1; OS = Fischerella thermalis CCMEE 5205 OX=2019671 GN=folE; PE = 3 SV=1
MTIVSSNGSNRFQSPLVPDLTEAITTRPDRNTHDGRKPDLHPPQEEQMDEMVEAVRTLLLGIGEDPEREGLLKTPKRVAEALRFLTSGYNQSLEELVNGAIFDEGHSEMVLVRDINVFSLCEHHMLPFMGKAHVAYIPNQKVVGLSKLARIVEMYSRRLQVQERLTRQIAEAVQTILEPQGVAVVIEATHMCMVMRGVQKPGSWTVTSAMVGVFQEEHKTREEFFNLIRHQAAIF

SEQ ID NO: 8100 - protein, 199 aa, unidentified
  source 1..199: note = Flagellimonas aquimarina
  REGION 1..199: note = tr|A0A316KYT9|A0A316KYT9_9FLAO GTP cyclohydrolase 1; OS = Flagellimonas aquimarina OX=2201895 GN=folE PE=3 SV=1
MSPYQNLEEYNISITNEVKERFSKIIDEIGEDVEREGLLKTPERAAKAMLFLTQGYKQDAAEILKGAMFKEDYDDMVIIKDIEVYSLCEHHMLPFFGKAHIAYIPNGHIVGLSKIPRIVDVFARRLQVQERLTHDILECLNNTLKPKGVAVVIEASHMCMMMRGVQKQNSVTTTSGFRGQFEKIETRSEFLKLISSDLS

SEQ ID NO: 8101 - protein, 226 aa, unidentified
  source 1..226: note = Flagellimonas aquimarina
  REGION 1..226: note = tr|A0A316L1U2|A0A316L1U2_9FLAO GTP cyclohydrolase 1; OS = Flagellimonas aquimarina OX=2201895 GN=folE PE=3 SV=1
MKLEQALEEQYEERGNDHVGSSTETPIREDAFVLSEDEKIERIQKSVREIMLTLGLDLDDDSLNGTPKRVAKMYVKEIFGGLHPDRKPKSSTFKNKYKYGEMLVEKNIVLYSTCEHHLLPIIGRAHIAYISNGTVVGLSKMNRVVDYYAKRPQVQERLNIQVVKELQKVLGTEDVACVIDAKHLCVNSRGIRDIESSTVTAEYGGKFKDEAVRREFLDYINLDTDF

SEQ ID NO: 8102 - protein, 199 aa, Flagellimonas eckloniae
  REGION 1..199: note = tr|A0A0Q0XDJ0|A0A0Q0XDJ0_9FLAO GTP cyclohydrolase 1; OS = Flagellimonas eckloniae OX=346185 GN=folE PE=3 SV=1
MAPYQSMEEYNISITNEVKERFSKIIDEIGEDVEREGLLKTPERAAKAMLFLTQGYKQDAAEILKGAMFKEDYDDMVIIKDIEVYSLCEHHMLPFFGKAHVAYIPNGHIVGLSKIPRIVDVFARRLQVQERLTHDILECLNDTLKPKGVAVVIEASHMCMMMRGVQKQNSVTTTSGFRGQFEKIETRSEFLKLISSDLS

SEQ ID NO: 8103 - protein, 226 aa, Flagellimonas eckloniae
  REGION 1..226: note = tr|A0A0Q0X197|A0A0Q0X197_9FLAO GTP cyclohydrolase 1; OS = Flagellimonas eckloniae OX=346185 GN=folE PE=3 SV=1
MKLKQALEEQYEERGDDHVGSSTETPLREDAFVLSDEEKIERIQNSVREIMLTLGLDLDDDSLSGTPHRVAKMYVKEIFGGLHPKRKPKSSTFENKYKYGEMLVEKNIVLYSTCEHHLLPIIGRAHIAYISNGTVVGLSKMNRVVDYFARRPQVQERLNIQIVKELQKVLNTEDVACVIDAKHLCVNSRGIRDIESSTVTAEYGGKFKDETVKREFLDYINLDTDF

SEQ ID NO: 8104 - protein, 223 aa, unidentified
  source 1..223: note = Flagellimonas flava
  REGION 1..223: note = tr|A0A1M5LWN6|A0A1M5LWN6_9FLAO GTP cyclohydrolase 1; OS = Flagellimonas flava OX=570519 GN=folE PE=3 SV=1
MDKTEIEVLGDNHIATSIETPLRADAFQRTDSEKMEHIQHYFSKIMEELGLDLTDESLSGTPYRFAKMYVKELFYGLDPKNRPKVSTFPNTYGYKRMLVEQDITIDSSCEHHFLPIVGKAHIGYIPNDRVVGLSKINRLVDYYSHRPQVQERLCLQILKDLQETLETEDVIVVVHAKHLCVSSRGIKDKESATTTVEYGGAFTDESRRSEFFDLLKNGSDLNR

SEQ ID NO: 8105 - protein, 237 aa, unidentified
  source 1..237: note = Flagellimonas flava
  REGION 1..237: note = tr|A0A1M5NGS2|A0A1M5NGS2_9FLAO GTP cyclohydrolase 1; OS = Flagellimonas flava OX=570519 GN=folE PE=3 SV=1
MYIFAVLKKKQMKLEQALEEQYEERGNDHVGSSTETPIREDAFVLSDDEKIERIQKSVHEIMLTLGLDLDDDSLKGTPKRVAKMYVNEIFGGLHPDRKPKSSTFKNKYKYGEMLVEKNIVVYSTCEHHLLPIIGRAHIAYISNGTVVGLSKMNRIVDYFAKRPQVQERMNIQIVKELQKVLGTDDVACVIDAKHLCVNSRGIRDIESSTVTAEYGGKFKDEAVRREFLDYINLDTDF

SEQ ID NO: 8106 - protein, 199 aa, unidentified
  source 1..199: note = Flagellimonas maritima
  REGION 1..199: note = tr|A0A2Z4LW85|A0A2Z4LW85_9FLAO GTP cyclohydrolase 1; OS = Flagellimonas maritima OX=1383885 GN=folE PE=3 SV=1
MAPYQNMEEYNITITNDIKERFSKIIGEIGEDVSRDGLLKTPERAAKAMLFLTQGYQQDAAEILKGAMFEEEYDDMVIIKNIELYSLCEHHMLPFFGKAHVAYIPNGHIVGLSKIPRIVDVFARRLQVQERLTHDILECLNNTLKPKGVAVVIEASHMCMMMRGVQKQNSVTTTSGFRGQFEKIETRNEFLKLIGSDLS

SEQ ID NO: 8107 - protein, 251 aa, unidentified
  source 1..251: note = Flagellimonas maritima
  REGION 1..251: note = tr|A0A2Z4LP44|A0A2Z4LP44_9FLAO GTP cyclohydrolase 1; OS = Flagellimonas maritima OX=1383885 GN=gch1 PE=3 SV=1
MLSNQMYQMLNKVLMYIFAFLKNSVMKLKQTLEEQYEERGNDHVGSSTETPIREDAFVLSDDEKIERIQESVREIMLTLGLDLDDDSLSGTPKRVAKMFVKEIFGGLHPDRKPNSSTFKNKYKYGEMLVEKNIVLYSTCEHHLLPIVGRAHIAYISNGTVVGLSKMNRVVDYYAKRPQVQERLNIQVVKELQKVLGTEDVACVIDAKHLCVNSRGIRDIESSTVTAEYGGKFKDEAVRREFLDYINLDTDF

SEQ ID NO: 8108 - protein, 237 aa, unidentified
  source 1..237: note = Flagellimonas pacifica
  REGION 1..237: note = tr|A0A285N1F2|A0A285N1F2_9FLAO GTP cyclohydrolase 1; OS = Flagellimonas pacifica OX=1247520 GN=folE PE=3 SV=1
MYIFAFLKKKEMKLEQALEEQYEERGNDHIGSASETPIREDAFILSDEEKIERIQKSVREIMLTLGLDLDDDSLNGTPKRVAKMYVQEVFGGLHPKRKPKSSTFKNKYKYGEMLVEKNIVLYSTCEHHLLPIIGRAHIAYISNGTVVGLSKMNRVVDYFAKRPQVQERLNIQIVKELQNVLGTEDVACVIDAKHLCVNSRGIRDIESSTVTAEYGGKFKDEAIRREFLDYINLDTDF

SEQ ID NO: 8109 - protein, 199 aa, unidentified
  source 1..199: note = Flagellimonas pacifica
  REGION 1..199: note = tr|A0A285MRL0|A0A285MRL0_9FLAO GTP cyclohydrolase 1; OS = Flagellimonas pacifica OX=1247520 GN=folE PE=3 SV=1
MAPYQNLEEYNINVTNEVKDRFSKIIDEIGEDVNREGLQKTPERAAKAMLFLTQGYRQDAEEILKSAMFKEDYDDMVIIKDIEVYSLCEHHMLPFFGKAHIAYIPNGHIVGLSKIPRIVDVFARRLQVQERLTHDILECINDTLKPQGVAVVIEASHMCMMMRGVQKQNSVTTTSGFRGQFEKIETRNEFLKLISSDLS

SEQ ID NO: 8110 - protein, 226 aa, Flagellimonas sp.
  REGION 1..226: note = tr|A0A5C8V0Q2|A0A5C8V0Q2_9FLAO GTP cyclohydrolase 1; OS = Flagellimonas sp. 176CP5-101 OX=2603628 GN=folE PE=3; SV = 1
MKLEQALEEQHEERGNDHVGSSTETPIREDAFVLSDEDKIERIQKSVREIMLTLGLDLDDDSLNGTPKRVAKMYVKEIFGGLHPKRKPKSSTFKNKYKYGEMLVEKNIVLYSTCEHHLLPIIGRAHIAYISNGTVVGLSKMNRIVDYYAKRPQVQERLNIQIVKELQKVLGTEDVACVIDAKHLCVNSRGIRDIESSTVTAEYGGKFKNEAIRREFLDYINLDTDF

SEQ ID NO: 8111 - protein, 199 aa, Flagellimonas sp.
  REGION 1..199: note = tr|A0A5C8V3C7|A0A5C8V3C7_9FLAO GTP cyclohydrolase 1; OS = Flagellimonas sp. 176CP5-101 OX=2603628 GN=folE PE=3; SV = 1
MAPYQSMEEYNISVTNEVKDRFSKIIDEIGEDVKRDGLLKTPERAAKAMLFLTQGYKQDAAEILKGAMFKEDYDDMVIIKDIEVYSLCEHHMLPFFGKAHVAYIPNGHIVGLSKIPRIVDVFARRLQVQERLTHDILECLNNTLKPKGVAVVIEASHMCMMMRGVQKQNSVTTTSGFRGQFEKIETRNEFLKLISSDLS

SEQ ID NO: 8112 - protein, 244 aa, Flammeovirga kamogawensis
  REGION 1..244: note = tr|A0A553GCW9|A0A553GCW9_9BACT GTP cyclohydrolase 1; OS = Flammeovirga kamogawensis OX=373891 GN=folE PE=3 SV=1
MKQNETSWNTLQSKVVHQSNGVKVHIEEDIDEIGDNHVGTSYDTPMREGAFDLSDDEKVEKISGHFKEIMDILGLDLNDDSLKGTPKRVAKMYVKEIFSGLNPENRPDIKLFDNKYKYDEMLIEKNIHFYSNCEHHFVPIIGMAHVAYISNGQVIGLSKINRIVQHYAKRPQVQERLTVQIAEDLKKTLGTEDVAVLIDAKHLCVSMRGIEDTYSATVTSHFSGKFKEEATRKEFLSLVPKSSD

SEQ ID NO: 8113 - protein, 223 aa, Flammeovirga pacifica
  REGION 1..223: note = tr|A0A1S1Z5M9|A0A1S1Z5M9_9BACT GTP cyclohydrolase 1; OS = Flammeovirga pacifica OX=915059 GN=folE PE=3 SV=1
MEVYRDTDIDEIGDNHIGTSYDTPMKEDAFELSDEEKIKKISSHFREIMDTLGLDLKDDSLRGTPDRVAKMYVKEIFSGLNPENRPDIKLFDNKYKYDEMLIEKNIHFFSNCEHHFVPIIGFAHVAYISNGKVIGLSKINRIVQHYAKRPQVQERLTVQIAEDLKKTLGTEDVAVLIDAKHLCVSMRGIEDTYSATVTSHFSGKFKDEATRREFLSLVPKPTE

SEQ ID NO: 8114 - protein, 218 aa, Flammeovirga sp.
  REGION 1..218: note = tr|A0A1B1FYG1|A0A1B1FYG1_9BACT GTP cyclohydrolase 1; OS = Flammeovirga sp. MY04 OX=1191459 GN=folE PE=3 SV=1
MKKEEKLRIESEGDNHIMTSVDTPMLPDAFDKSEEEKIEIIQEYFAGIMKTLGLDLSDNSLKGTPYRFAKMYVKELFAGLDPKNKPNLSVFDNKYQYNKMLVEKNITFSSACEHHFLPIVGKAHVGYISSGKVIGISKINRIVEYYGKRPQVQERMTLQVYNELKNALQTDSVIVVVDAEHLCVSSRGVKDKTSSTVTLEYGGEFNDLSLRNEFLKLI

SEQ ID NO: 8115 - protein, 238 aa, Flammeovirga sp.
  REGION 1..238: note = tr|A0A150AJF1|A0A150AJF1_9BACT GTP cyclohydrolase 1; OS = Flammeovirga sp. SJP92 OX=1775430 GN=folE PE=3 SV=1
MKQNGISWNTLQPKEVEIHNDTIIDEIGDNHIGTSHDTPMKKDAFELSDEEKMKKISSHFREIMDTLGLDLTDDSLSGTPDRVAKMYVKEIFSGLNPKNRPDIKLFDNKYKYDEMLIEKNIHFYSNCEHHFVPIIGFAHVAYISNGKVIGLSKINRIVQHYAKRPQVQERLTVQIAEDLKKTLGTEDVAVLIDAKHLCVSMRGIEDTYSATVTSHFSGKFKEEATRKEFLELIPKSSE

SEQ ID NO: 8116 - protein, 220 aa, unidentified
  source 1..220: note = Flammeovirgaceae bacterium
  REGION 1..220: note = tr|A0A2E0BBN1|A0A2E0BBN1_9BACT GTP cyclohydrolase 1; OS = Flammeovirgaceae bacterium OX=2026740 GN=folE PE=3 SV=1
MDTKKIELIGDNHEFFSLKTPLRKDAFQKSNDEKIKNIQKHFAKIIDELGLDLNDDSISGTPYRVAKMYVKEIFRGLDPENKPKISLFDNKYNYNKMLIEKNINLNSTCEHHFLPISGKAHISYISTGKVIGLSKLNRIVQYYSHRPQVQERLTKQIYDELKNVLDTDSVMVVVEAKHHCISSRGIKDHSSSTVTEMYGGDFNIYNKRDEFYKLLNSVSI

SEQ ID NO: 8117 - protein, 220 aa, unidentified
  source 1..220: note = Flammeovirgaceae bacterium
  REGION 1..220: note = tr|A0A1Z9SEG6|A0A1Z9SEG6_9BACT GTP cyclohydrolase 1; OS = Flammeovirgaceae bacterium TMED262 OX=1986699 GN=folE; PE = 3 SV=1
MDTKKIELIGDNHEFFSLNTPLRKDAFDKSDDVKIKNIQKHFRKIVDELGLDLKDDSISGTPYRVAKMFVKEIFSGLNPQNKPKISLFDNKYNYNKMLIEKNINLNSTCEHHFLPITGKAHVSYISSGKVIGLSKLNRIVKYYSQRPQVQERLTTQIYNELKDILDTDSVMVVLEAKHLCVSSRGIKDYSSSTITEMYGGDFNIYNKRDEFYKLLNSVNI

SEQ ID NO: 8118 - protein, 199 aa, unidentified
  source 1..199: note = Flaviaesturariibacter sp.
  REGION 1..199: note = tr|A0A4R4DVP8|A0A4R4DVP8_9BACT GTP cyclohydrolase 1; OS = Flaviaesturariibacter sp. 17J68-15 OX=2545761 GN=folE; PE = 3 SV=1
MAYHKKEYYDQDVTEGMMDAYRRIIELAGEDTGREGLVKTPERAAKAMQFNTQGYTLDAVAILNSARFREDVSEMVIVKDIELYSMCEHHLHPFYGKAHIAYIPNGYITGLSKLARVVDVFARRLQVQERLTTQVLDALRESLNPLGVAVVIEAKHLCMMMRGVQKQNSVTTTSAFYGEFLDNHVTRNEFLKLIGSSLS

SEQ ID NO: 8119 - protein, 219 aa, unidentified
  source 1..219: note = Flaviaesturariibacter sp.
  REGION 1..219: note = tr|A0A4R1BC48|A0A4R1BC48_9BACT GTP cyclohydrolase 1; OS = Flaviaesturariibacter sp. 17J68-12 OX=2502780 GN=folE; PE = 3 SV=1
MKSNGEALVLNGVGKSILPERLQAIAGLDEEARIRLIGDHFRQIMLLLGLDLDDDSLRGTPNRVAKMYVRETFSGLNPLNKPAVTLFDNSYQYSEMLVEKNITVYSTCEHHFVPIIGKAHVAYYSGGRVIGLSKINRLVQYYSKRPQVQERLTEQVAAALKEALHTEDVAVLIDAAHLCVAARGVGDVNSSTLTAHYSGRFANEATRKEFLACLNLGGR

SEQ ID NO: 8120 - protein, 188 aa, unidentified
  source 1..188: note = Flaviflexus salsibiostraticola
  REGION 1..188: note = tr|A0A3Q8WTM0|A0A3Q8WTM0_9ACTO GTP cyclohydrolase 1; OS = Flaviflexus salsibiostraticola OX=1282737 GN=folE PE=3; SV = 1
MTFNFQGVETAIRDLLVAIGEDPDRDGLRDTPARMARAYREIFSGLHEDPREVLSASFEVDHQEMILVKDISVYSMCEHHLLPFYGVAHVGYIPSEDGTVTGLSKLARLVDGYARRPQIQERLTSSVADALMDPLGARGAIVVVEAEHMCMSLRGARKPGARTVTSAVRGVMRSAATRAEAMSLIMSR

SEQ ID NO: 8121 - protein, 188 aa, unidentified
  source 1..188: note = Flaviflexus sp.
  REGION 1..188: note = tr|A0A3Q9G807|A0A3Q9G807_9ACTO GTP cyclohydrolase 1; OS = Flaviflexus sp. H23T48 OX=2496867 GN=folE PE=3 SV=1
MTFDANGVERAIRDLLIAIGEDPDRDGLKETPARMARAYEEMFSGLHSDPTEVLSASFDLDYQEMILVKDITVYSVCEHHLLPFYGKAHIGYIPGADGKVTGLSKLARLVDGYAKRPQIQERLTSEVADALMDPLGASGAIVVVEAEHMCMSLRGARKPGSHTVTSAVRGTMRNAATRAEAMSLIMSR

SEQ ID NO: 8122 - protein, 198 aa, Flavihumibacter petaseus
  REGION 1..198: note = tr|A0A0E9N6K5|A0A0E9N6K5_9BACT GTP cyclohydrolase 1; OS = Flavihumibacter petaseus NBRC 106054 OX=1220578 GN=folE; PE = 3 SV=1
MAYKKVEQFEDRITSGLIDHYRDALELLGENPAREGLLKTPERMAKAMQYLTQGYQMDARAILDSAKFHEEVSEMIIVKDIELYSMCEHHMLPFFGKAHIAYIPNGYITGLSKIARVVDVFSRRLQVQERLTTQILGAIKESLQPMGVAVVIEASHLCMMMRGVQKQNSVTTTSAFWGEFEKAETRSEFTKLISSKLS

SEQ ID NO: 8123 - protein, 198 aa, unidentified
  source 1..198: note = Flavihumibacter solisilvae
  REGION 1..198: note = tr|A0A0C1IS30|A0A0C1IS30_9BACT GTP cyclohydrolase 1; OS = Flavihumibacter solisilvae OX=1349421 GN=folE PE=3 SV=1
MAYKKVEHYEDRITSGLIENYRESLELLGENPMREGLQKTPERIAKAMQYLTQGYQMDARAILNSAKFHENVSEMIIVKDIELYSMCEHHMLPFFGKAHIAYIPNGYITGLSKVARVVDVYSRRLQVQERLTTQILNAIKDSLDPLGVAVVIEAKHLCMMMRGVQKQNSVTTTSAFWGEFEKAETRSEFTKLISSKLS

SEQ ID NO: 8124 - protein, 198 aa, Flavihumibacter sp.
  REGION 1..198: note = tr|A0A0C1I5C1|A0A0C1I5C1_9BACT GTP cyclohydrolase 1; OS = Flavihumibacter sp. ZG627 OX=1463156 GN=folE PE=3 SV=1
MAYHKVEQYEDKITSGLIENYRESLELLGENPDREGLQKTPERVAKAMQYLTQGYQMDAKAILESAKFHEDVSEMIIVKDIELFSMCEHHMLPFFGKAHIAYIPNGYITGLSKIARVVDVYSRRLQVQERLTQQILTAIKESLNPIGVAVVIEAKHLCMMMRGVQKQNSVTTTSAFWGEFEKNETRSEFTKLISSRLS

SEQ ID NO: 8125 - protein, 198 aa, Flavihumibacter sp.
  REGION 1..198: note = tr|A0A162P025|A0A162P025_9BACT GTP cyclohydrolase 1; OS = Flavihumibacter sp. CACIAM 22H1 OX=1812911 GN=folE PE=3; SV = 1
MAYNKVEQYDENITSGLMENYRNSLTLLGEDPDREGLLKTPERMAKAMQYLTQGYQLDAKAILESAKFHEDVSEMIIVKDIELFSMCEHHMLPFFGKAHIAYIPNGYITGLSKIARVVDVYSRRLQVQERLTSQILHAIKESLNPIGVAVVVEAKHLCMMMRGVQKQNSVTTTSAFWGEFEKSETRSEFTKLISSKLS

SEQ ID NO: 8126 - protein, 367 aa, unidentified
  source 1..367: note = Flavimaricola marinus
  REGION 1..367: note = tr|A0A238LGJ8|A0A238LGJ8_9RHOB GTP cyclohydrolase FolE2 OS=Flavimaricola marinus OX=1819565 GN=folE2 PE=3; SV = 1
MNIHSPDMDRDPTRAEAEAALALLRRWAIDVTPEEVATLDPVVSRLIPGQDVSNYPAMARAYPEDFTVDEAYKASMPDLQNGPSSLIKGARQQIQHVGISNFRLPIRFHTRDNGDLTLETSVTGTVSLEAEKKGINMSRIMRSFYKHAEETFSFAVIERALDAYKADLESFDARIQMRFSFPMKVASLRSGLSGFQYYDIALELIERDGVRKKIVHLDYVYSSTCPCSLELSEHARQFRGQLATPHSQRSVARLSMVLDDTAPCLWFEDVIDMARAAVPTETQVMVKREDEQAFAELNAANPIFVEDAARLFCEQLQKDPRIGDFRVLASHQESLHSHDAVSLLTEGPTFAAESLDPRLFNSLYHVG

SEQ ID NO: 8127 - protein, 233 aa, unidentified
  source 1..233: note = Flavipsychrobacter stenotrophus
  REGION 1..233: note = tr|A0A2S7SYN6|A0A2S7SYN6_9BACT GTP cyclohydrolase 1; OS = Flavipsychrobacter stenotrophus OX=2077091 GN=folE PE=3; SV = 1
MKQNETLLSIPRKELDEDDEANYDQMGDDHIYTTVATPMRADAFEMSEQEKISTIAYHFREIMHTLGLDLTDDSLKGTPHRVAKMYIKEIFSGLDPANKPAIALFDNKYGYNQMLIEKDITFFSNCEHHFVPIYGQAHVAYFSSGKVVGLSKLNRIVQYFAKRPQVQERLTMQIGMELQEMLGTEDVAVIIDAKHMCVSSRGIKDAASATITSFYGGQFNEEKVRNEFLHHLK

SEQ ID NO: 8128 - protein, 198 aa, unidentified
  source 1..198: note = Flavipsychrobacter stenotrophus
  REGION 1..198: note = tr|A0A2S7SYK3|A0A2S7SYK3_9BACT GTP cyclohydrolase 1; OS = Flavipsychrobacter stenotrophus OX=2077091 GN=folE PE=3; SV = 1
MSYKKIEAYDEQATEQLKGSYKGIIQAIGEDPEREGLLKTPERMAKAMQFLTQGYQLDAHEILNSAKFAEDYSEMVIVKNIELYSMCEHHLLPFFGKAHIAYIPNGYITGLSKLARVVDTFARRLQVQERLTHQILDAIQDTLQPLGVGVVIEAQHLCMMMRGVQKQNSNTTTSAFSGQFMKNETRSEFLRLIAADLS

SEQ ID NO: 8129 - protein, 225 aa, Flaviramulus basaltis
  REGION 1..225: note = tr|A0A1K2IJ66|A0A1K2IJ66_9FLAO GTP cyclohydrolase 1; OS = Flaviramulus basaltis OX=369401 GN=folE PE=3 SV=1
MKIDNNIEGYDPLGEDHVGTSSNTPLRLDAFKLSNEEKIDIIKDDVRHIMETLGLDLTDDSLNGTPNRVAKMFVKEIFGGLDPNKKPSASTFDNKYKYGEMLVEKNITLYSTCEHHLLPIVGKAHIAYISNGTVVGLSKMNRIVDYFAKRPQVQERLTIQIVKELQEVLNTQDVACVIDAKHLCVNSRGIRDIESSTVTSEFGGKFKDKAVRREFLDYIKLETKF

SEQ ID NO: 8130 - protein, 231 aa, Flaviramulus basaltis
  REGION 1..231: note = tr|A0A1K2IG71|A0A1K2IG71_9FLAO GTP cyclohydrolase 1; OS = Flaviramulus basaltis OX=369401 GN=folE PE=3 SV=1
MSIETLKSNKNNHKLNGFSIDDIGDDHLFTGLETPMKKDAFKLNDTEKKERIAILFEEIMDVMGLDLTDDSLKGTPQRVAKMYIDEIFSGLNPQNKPKIALFDNKYQYNQMLVEKNITFYSNCEHHFVPIIGKAHVAYISSGKVIGLSKLNRIVQYYAKRPQVQERLTNQIANELKNILETDDVAIIIDAKHLCVSSRGIKDDTSATVTSYYGGQFNTPEKIRELQNYLNN

SEQ ID NO: 8131 - protein, 199 aa, Flavisolibacter ginsengisoli
  REGION 1..199: note = tr|A0A1M5FD01|A0A1M5FD01_9BACT GTP cyclohydrolase 1; OS = Flavisolibacter ginsengisoli DSM 18119 OX=1121884; GN = folE PE=3 SV=1
MAFHKTESFDTDITEGLMTNYSSIIELLGEDPQREGLIKTPERMAKAMQYMTQGYSQDAVSILNGARFREEVSEMVIVKDIELFSMCEHHLLPFFGKAHIAYIPNGYITGLSKLARVVDVYSRRLQVQERLTTQILKAIKESLNPLGVAVVIEAKHLCMMMRGVQKQNSVTTTSSFDGEFLNNHITRNEFLKLITADLD

SEQ ID NO: 8132 - protein, 199 aa, unidentified
  source 1..199: note = Flavisolibacter ginsenosidimutans
  REGION 1..199: note = tr|A0A5B8UGS2|A0A5B8UGS2_9BACT GTP cyclohydrolase 1; OS = Flavisolibacter ginsenosidimutans OX=661481 GN=folE; PE = 3 SV=1
MAYRKIEQYDDNVTKQLSECYKTIIASTGEDPQREGLLKTPERAAKAFQFATQGYEQDAVAILNSARFKEDISEMVIVKDIELYSMCEHHLHPFYGKAHVAYIPNGYITGLSKIARVVDVYARRLQVQERLTTQILGAIKESLNPLGVAVVIEAKHLCMMVRGVQKQNSVTTTSSFDGEFLNNHITRNEFLKLISANLD

SEQ ID NO: 8133 - protein, 217 aa, unidentified
  source 1..217: note = Flavisolibacter ginsenosidimutans
  REGION 1..217: note = tr|A0A5B8UCT6|A0A5B8UCT6_9BACT GTP cyclohydrolase 1; OS = Flavisolibacter ginsenosidimutans OX=661481 GN=folE; PE = 3 SV=1
MQNGKTITLNGNNHRPLLIDELISPATQALNGEEKIKLIENHFRQIMLLLGLDLNDDSLKGTPSRVAKMYVNEMFSGLNPATKPEATLFENNYGYNEMLVEKNITVYSCCEHHFVPIIGKAHVAYYPNGKVIGQSKINRLVHYYCKRPQVQERLTVQIAGALKEALHTEDVAVVVDAAHLCVASRGVGDVGSTTLTSHYSGRFKREEVKKEFLSFLK

SEQ ID NO: 8134 - protein, 199 aa, unidentified
  source 1..199: note = Flavisolibacter tropicus
  REGION 1..199: note = tr|A0A172TTQ7|A0A172TTQ7_9BACT GTP cyclohydrolase 1; OS = Flavisolibacter tropicus OX=1492898 GN=folE PE=3 SV=1
MAYHKSEHYDLEITEELTGKYKDIITLLGENAQREGLLKTPERMAKAMQFMTQGYHQDAVTILNSARFEEHVSEMVIVKDIELYSMCEHHLVPFYGKAHIAYIPNGYITGLSKLARVVDVFARRLQVQERLTTQILEAIKESLNPMGIAVVIEAKHLCMMMRGVQKQNSVTTTSAFDGELLNNSITRSEFLKLISADLS

SEQ ID NO: 8135 - protein, 224 aa, unidentified
  source 1..224: note = Flavisolibacter tropicus
  REGION 1..224: note = tr|A0A172U2J1|A0A172U2J1_9BACT GTP cyclohydrolase 1; OS = Flavisolibacter tropicus OX=1492898 GN=folE PE=3 SV=1
MQNGTLVTVNGKHAAETNGYHLESTSEGGIHKNGHLIDDETKIKMISHHFRQIMQILGLDLNDDSLKDTPDRVAKMYVKEAFSGLNPNNKPDISLFENSYHYNEMLVEKNITLYSYCEHHFVPIIGKAHVAYLSSGRVIGLSKINRIVQYYGRRPQVQERLTEQIATALKKALNTDDVAVVIDAAHLCVASRGICDVNSTTVTSHYSGKFKDVEVKKEFLSYIK

SEQ ID NO: 8136 - protein, 228 aa, unidentified
  source 1..228: note = Flavivirga eckloniae
  REGION 1..228: note = tr|A0A2K9PLN8|A0A2K9PLN8_9FLAO GTP cyclohydrolase 1; OS = Flavivirga eckloniae OX=1803846 GN=folE PE=3 SV=1
MNIETKTNGYKLNGFSTEDIGDDHLYTGLETPMKVDAFKLNDSEKKARIAILFEEIMDVMGLDLTDDSLKGTPQRVAKMYIDEIFSGLNPKNKPKVALFDNKYKYNQMLVEKNMTFYSNCEHHFVPIIGKAHVAYISSGKVIGLSKLNRIVQYYSKRPQVQERLTNQIANELKNILNTEDIAVIIDAKHLCVSSRGIKDDTSATVTAYYGGQFDTPEKIRELQNYLNN

SEQ ID NO: 8137 - protein, 195 aa, unidentified
  source 1..195: note = Flavivirga eckloniae
  REGION 1..195: note = tr|A0A2K9PMK6|A0A2K9PMK6_9FLAO GTP cyclohydrolase 1; OS = Flavivirga eckloniae OX=1803846 GN=folE PE=3 SV=1
MPYKKFEEYNIQVTDDVKDRYKKIIEDLGEDTERDGLLKTPERAAKAMQFLTQGYHQDPVEILKSAMFKESYNEMVIVKDIELYSLCEHHILPFFGKVHIAYIPNGQIVGLSKLPRIVDVFARRLQVQERLTEQILDCINDTLRPQGAAVVVEASHMCMMMRGVQKQNSITTTSGFRGQFEKIETRNEFLKLIGK

SEQ ID NO: 8138 - protein, 195 aa, Flavivirga sp.
  REGION 1..195: note = tr|A0A4S1E218|A0A4S1E218_9FLAO GTP cyclohydrolase 1; OS = Flavivirga sp. RZ03 OX=2559571 GN=folE PE=3 SV=1
MPYKKFEEYNMQVTDDVKERYENIIKDLGEDTNRDGLLKTPERAAKAMQFLTQGYHQDPVEILKSAMFKESYNEMVIVKDIELYSLCEHHILPFFGKVHIAYIPNGQIVGLSKLPRIVDVFARRLQVQERLTEQILDCINHTLKPQGVAVVIEASHMCMMMRGVQKQNSITTTSGFRGQFEKIETRNEFLKLIGK

SEQ ID NO: 8139 - protein, 225 aa, Flavivirga sp.
  REGION 1..225: note = tr|A0A4V6R491|A0A4V6R491_9FLAO GTP cyclohydrolase 1; OS = Flavivirga sp. RZ03 OX=2559571 GN=folE PE=3 SV=1
MKIENNIEEFESLGDDHIGTSSNTPLRNDAFKLSNEEKIDIIKDDVRHIMETLGLDLTDDSLNGTPNRVAKMFVKEIFGGLNPKKKPNASTFENKYKYGEMLVEKNITVYSTCEHHLLPIVGKAHIAYISNGTVVGLSKMNRIVDYFAKRPQVQERLTIQVVKELQEVLKTQDVACVIDAKHLCVNSRGIRDIESSTVTSEFGGKFKEEATRREFLDYIKLDTKF

SEQ ID NO: 8140 - protein, 249 aa, unidentified
  source 1..249: note = Flavobacteria bacterium
  REGION 1..249: note = tr|A3J0S0|A3J0S0_9FLAO GTP cyclohydrolase 1; OS = Flavobacteria bacterium BAL38 OX=391598 GN=folE PE=3; SV = 1
MSNGYCTKIRETKKVLQNKIKIEEKIAMNTTIEKEIFDIIGDNHQMTSVETPLRSDAFVRSDAQKMEVIEHHFEIIMKELGLDLTDDSLQGTPHRVAKMFVQEIFSGLNPANKPKISVFDNSYQYDKMLVEANISFNSTCEHHFLPIVGKAHIGYVSSGKVIGLSKLNRIVDYYARRPQVQERMIMQIFNELKTVLETDNVMVVMEATHLCVSSRGIKDESSYTSTLQYGGVFNQKEFRDDFYKMIHKE

SEQ ID NO: 8141 - protein, 228 aa, unidentified
  source 1..228: note = Flavobacteria bacterium
  REGION 1..228: note = tr|A0A1G0B285|A0A1G0B285_9BACT GTP cyclohydrolase 1; OS = Flavobacteria bacterium RIFCSPLOWO2_12_FULL_31_7; OX = 1798015 GN=folE PE=3 SV=1
MKSENNFQIDTLSNLSVDDIGNDHLFTSLETPMVKDAFTKSDSEKKEIIAFHFSEIMKALDLDLTDDSLKGTPERVAKMYIEEIFSGLNPKNKPKIALFENKYQYNQMLVEKNITFYSNCEHHFVPIFGKAHVAYISSGKVIGLSKLNRIVQYYAKRPQVQERLTMQIAEDLKAALETEDVAVIIDAKHLCVSSRGVQDESSATVTTSFNGAFNTPQKINELLQLIHS

SEQ ID NO: 8142 - protein, 195 aa, unidentified
  source 1..195: note = Flavobacteriaceae bacterium
  REGION 1..195: note = tr|A0A2M8AQ38|A0A2M8AQ38_9FLAO GTP cyclohydrolase 1; OS = Flavobacteriaceae bacterium CG_4_9_14_3_um_filter_33_16; OX = 1973993 GN=folE PE=3 SV=1
MSNKAFEEYNIKVTEDIKNRYKNIIIDLGEDISRDGLQKTPERAAKAMQFLTQGYHQDPVKILKSAMFKESYNEMVLVKDIELYSLCEHHMLPFFGKAHIAYIPNGYIVGLSKLPRIVDVFARRLQVQERLTEQILDCINDTLKPQGVAVVIEAAHMCMMMRGVQKQNSITTTSGFRGQFEKSETRNEFLKLIGK

SEQ ID NO: 8143 - protein, 225 aa, unidentified
  source 1..225: note = Flavobacteriaceae bacterium
  REGION 1..225: note = tr|A0A397LI78|A0A397LI78_9FLAO GTP cyclohydrolase 1; OS = Flavobacteriaceae bacterium MAR_2010_72 OX=1250029; GN = folE PE=3 SV=1
MKIEKDIEDFESLGDNHIGTSTDTPMRSDAFRLTNEEKIDIIKDDVRHIMETLGLDLTDDSLNGTPLRVAKMFVKELFGGLNPNKKPSASTFENKYKYGEMLVEKNITVYSTCEHHFLPIVGKAHVAYISNGTVVGLSKMNRIVDYFAKRPQVQERLTIQIVKELQTVLNTQDVACVIDAKHLCVNSRGIRDIDCSTVTSEFGGKFKEKETRREFLDYIKLETQF

SEQ ID NO: 8144 - protein, 212 aa, unidentified
  source 1..212: note = Flavobacteriales bacterium
  REGION 1..212: note = tr|A0A2H0GCJ6|A0A2H0GCJ6_9FLAO GTP cyclohydrolase 1; OS = Flavobacteriales bacterium CG18_big_fil_WC_8_21_14_2_50_32_9 OX=1974008 GN=folE PE=3; SV = 1
MSKYNDNMSTQNNMDGYERIEQYNEEKINSLSASYKDIIINLGEDVTREGLEKTPERVAKAMQYLTHGYDLNPTEILKSALFAEKHNHMVIVKDIELYSLCEHHMLPFFGKAHVAYIPNGHIVGLSKIPRIVDAFARRLQVQERLTDEIKNCINEGLKPLGVAVVIEAQHMCMQMRGIQKQNSLTTTSSFTGAFEKESTRQEFISLISNKLS

SEQ ID NO: 8145 - protein, 229 aa, unidentified
  source 1..229: note = Flavobacteriales bacterium
  REGION 1..229: note = tr|A0A3D0QPJ1|A0A3D0QPJ1_9FLAO GTP cyclohydrolase 1; OS = Flavobacteriales bacterium OX=2021391 GN=folE PE=3 SV=1
MKLNGTVLNTAENNLLVYEEEGNEHFLTGIETPLRDDAFELSDEEKITAITHHFRAIMETLGLDLRDDSLKGTPHRVAKMYVQEVFSGLNPANKPKIALFENKYRYREMLVEKDITLHSFCEHHFVPIIGKAHVAYKSNGNVIGLSKINRVVQYFAKRPQVQERLTIQIAEELKRVLQTEDVAVIIDARHMCVSIRGIEDTNSSTVTGSYHGAFLDESVRKEFLHHISH

SEQ ID NO: 8146 - protein, 226 aa, unidentified
  source 1..226: note = Flavobacteriia bacterium
  REGION 1..226: note = tr|A0A432IW83|A0A432IW83_9BACT GTP cyclohydrolase 1; OS = Flavobacteriia bacterium OX=2044941 GN=folE PE=3 SV=1
MKLEQALEEQYEERGNDHVGSSSDTPMRKDAFVLSDEEKIERIQKNVREIMLTLGLDLEDDSLKGTPKRVAKMYVKEIFGGLHPDRRPTSSTFDNKYKYGEMLVEKNIVVYSTCEHHLLPIVGRAHIAYISNGTVVGLSKMNRIVDYYAKRPQVQERLNIQIVKEMQRVLGTEDVACVIDAKHLCVNSRGIRDIESSTVTAEYGGKFKDEAVRREFLDYINLDTEF

SEQ ID NO: 8147 - protein, 194 aa, unidentified
  source 1..194: note = Flavobacteriia bacterium
  REGION 1..194: note = tr|A0A1Q3ZNY1|A0A1Q3ZNY1_9BACT GTP cyclohydrolase 1; OS = Flavobacteriia bacterium 40-80 OX=1895763 GN=folE PE=3; SV = 1
MSDKHPDKILKIASVYKDVIAELGENPEREGLQKTPERVAKALQFLTHGYDLDPAEILKGALFHEDYSEMVIVKDIEVYSLCEHHMLPFFGKAHIAYIPNGRIVGLSKIPRIVDAFARRLQVQERLTLEIRDCIQDTLAPQGVAVVLECAHMCMQMRGVQKQNSFTTTSAFTGVFLENEPTRKEFINLVNANLH

SEQ ID NO: 8148 - protein, 228 aa, unidentified
  source 1..228: note = Flavobacterium aciduliphilum
  REGION 1..228: note = tr|A0A328YM07|A0A328YM07_9FLAO GTP cyclohydrolase 1; OS = Flavobacterium aciduliphilum OX=1101402 GN=folE PE=3; SV = 1
MTKNPTLDTSKLVSFSIDEIGDNHLYTSVQTPMKPDAFMMSDAEKKEKIAHHFKEIMEVLGLDLTDDSLKGTPQRVAKMYVDEIFCGLNPANKPQVALFENKYQYNQMLVEKNITFYSNCEHHFVPIFGKIHVAYISKGKVIGLSKINRIVQYFAQRPQVQERLTMQIALELQEILETEDIAVVVDAKHLCVSSRGIKDDTSATVTNYFGGAFQEAQVVHTLWNHIKN

SEQ ID NO: 8149 - protein, 223 aa, unidentified
  source 1..223: note = Flavobacterium aciduliphilum
  REGION 1..223: note = tr|A0A328Y8B9|A0A328Y8B9_9FLAO GTP cyclohydrolase 1; OS = Flavobacterium aciduliphilum OX=1101402 GN=folE PE=3; SV = 1
MTHNNDFNEEVGNNHIAFSDQTPLRKDAFDKSDEEKIEIIKKDIENILITLGMDLSDDSLKGTPNRVAKMFVKEIFGGLNPSKKPSSSTFDNKYKYNEMLVEKNITVYSTCEHHLLPIVGRAHVAYISKGTVVGLSKMNRIVEYYAKRPQVQERLTIQIVKELQNVLNTEDVACIIDAKHLCVNSRGIKDIESSTVTAEFGGKFKDEATRKEFLEYIKLDTNF

SEQ ID NO: 8150 - protein, 223 aa, unidentified
  source 1..223: note = Flavobacterium akiainvivens
  REGION 1..223: note = tr|A0A0M9VGX9|A0A0M9VGX9_9FLAO GTP cyclohydrolase 1; OS = Flavobacterium akiainvivens OX=1202724 GN=folE PE=3 SV=1
MINSDNSRDEIGDDHIATSAKNPLRDDAFDISDDEKINLIKKDVESILLTLGMDLTDDSLKGTPNRVAKMFVKEIFGGLNPTRKPGSSTFENHYKYGEMLVEKNITIYSTCEHHLLPIVGRAHVAYISNGSVIGLSKMNRIVDYYAKRPQVQERLTMQIVQELQQVLGTQDVACVIDAKHLCVNSRGIRDIESSTVTSEFGGKFKEEAVRREFLDYIKLDTQF

SEQ ID NO: 8151 - protein, 223 aa, unidentified
  source 1..223: note = Flavobacterium album
  REGION 1..223: note = tr|A0A2S1QYB1|A0A2S1QYB1_9FLAO GTP cyclohydrolase 1; OS = Flavobacterium album OX=2175091 GN=folE PE=3 SV=1
MIHNDDSKDEIGDNHIASGAKTPVRPDAFDMTDDEKIASIKKDVENILVTLGMDLTDDSIKGTPNRVAKMFVKEIFGGLNPAKKPGSSTFENKYKYGEMLVEKNITVYSTCEHHLLPIVGRAHVAYISNGTVVGLSKMNRIVDYFAKRPQVQERLTMQIVQELKKVLGTEDVACVIDAKHLCVNSRGIRDIESSTVTSEFGGRFKEESVRREFLDYIKLDTQF

SEQ ID NO: 8152 - protein, 204 aa, unidentified
  source 1..204: note = Flavobacterium alvei
  REGION 1..204: note = tr|A0A2S5A1Q4|A0A2S5A1Q4_9FLAO GTP cyclohydrolase 1; OS = Flavobacterium alvei OX=2080416 GN=folE PE=3 SV=1
MIANKVKSYEKIEEYDTEITAILAENYRSIIENLGEDINREGLLKTPERAAKAMQYLTHGYGLNPLEILKSALFTEDHKQMIVVKDIEVYSMCEHHMLPFFGKAHIAYIPNGKIVGLSKIPRIVDAFARRMQVQERLTDEIKNCIQSALNPLGVAVVIEAQHMCMCMRGIQKQNSVTTTSSFNGAFEKNKTRKEFISLITNKLS

SEQ ID NO: 8153 - protein, 223 aa, unidentified
  source 1..223: note = Flavobacterium alvei
  REGION 1..223: note = tr|A0A2S5AEY0|A0A2S5AEY0_9FLAO GTP cyclohydrolase 1; OS = Flavobacterium alvei OX=2080416 GN=folE PE=3 SV=1
MINNEEFQDEIGNNHIGSSATNPVRKDAFDVSDDEKIERIKKDVENMLLTLGMDMTDDSLKGTPNRVAKMFVKEIFGGLNPSKKPSASTFENSYKYGEMLVEKNITVYSTCEHHLLPIIGRAHVAYISNGRVIGLSKINRIVEFYAKRPQVQERLTMQIVQELQNALGTEDVACIIDAKHLCVNSRGIKDIESSTVTSEFGGKFKNEQTRRELLEYIKLETKF

SEQ ID NO: 8154 - protein, 223 aa, Flavobacterium anhuiense
  REGION 1..223: note = tr|A0A444VYB8|A0A444VYB8_9FLAO GTP cyclohydrolase 1; OS = Flavobacterium anhuiense OX=459526 GN=folE PE=3 SV=1
MINNEEFLDEIGDSHFSSNAKNPLRADAFDITDEEKIEKIKKDVENILQTLGMDLTDDSIKGTPNRVAKMFVKEIFGGLNPAKQPKASTFDNNYKYGEMLVEKNITVYSTCEHHLLPIIGRAHVAYISSGRVIGLSKMNRIVEYYAKRPQVQERLTMQIVQELQKALGTEDVACVIDAKHLCVNSRGIKDIESSTVTSEFGGKFKDAQTKREFLDYIKLDTQF

SEQ ID NO: 8155 - protein, 223 aa, Flavobacterium anhuiense
  REGION 1..223: note = tr|A0A1G5EH65|A0A1G5EH65_9FLAO GTP cyclohydrolase 1; OS = Flavobacterium anhuiense OX=459526 GN=folE PE=3 SV=1
MINNEEFLDEIGDSHFSSNAKNPLRADAFDITDEEKIEKIKKDVENILQTLGMDLTDDSIKGTPNRVAKMFVKEIFGGLNPAKQPKASTFDNNYKYGEMLVEKNITVYSTCEHHLLPIIGRAHVAYISSGRVIGLSKMNRIVEYYAKRPQVQERLTMQIVQELQKALGTEDVACVIDAKHLCVNSRGIKDIESSTVTSEFGGKFKEPQTKREFLDYIKLDTQF

SEQ ID NO: 8156 - protein, 222 aa, unidentified
  source 1..222: note = Flavobacterium aquaticum
  REGION 1..222: note = tr|A0A327Z3X5|A0A327Z3X5_9FLAO GTP cyclohydrolase 1; OS = Flavobacterium aquaticum OX=1236486 GN=folE PE=3 SV=1
MNTTIEKEIFDIIGDNHQMTSVETPLRPDAFYKSDAEKMEVIEHHFEIIMKELGLDLTDDSLQGTPHRVAKMFVQEIFSGLNPANKPKISVFDNSYQYDKMLVEANISFNSTCEHHFLPIVGKAHIGYVSSGKVIGLSKLNRIVDYYAKRPQVQERMIMQIFNELKSVLETDNVIVVMEATHLCVSSRGIKDESSYTSTLQYGGVFNQKEFRDDFYKMIHKE

SEQ ID NO: 8157 - protein, 223 aa, unidentified
  source 1..223: note = Flavobacterium aquaticum
  REGION 1..223: note = tr|A0A327YPJ8|A0A327YPJ8_9FLAO GTP cyclohydrolase 1; OS = Flavobacterium aquaticum OX=1236486 GN=folE PE=3 SV=1
MIQNEDFQDEIGNDHIATSAQTPLREDAFAISDDEKIELIKKDVEHILNTLGLDLTDDSLKGTPNRVAKMFVKEIFGGLNPNKKPGSSTFDNKYKYGEMLVEKNIVVYSTCEHHLLPIVGRAHVAYISNGTVVGLSKMNRIVDYYAKRPQVQERLTIQIVQELQKVLGTDDVACVIDAKHLCVNSRGIRDIESSTVTAEFGGKFKEDKVRREFLDYIKLDTQF

SEQ ID NO: 8158 - protein, 223 aa, Flavobacterium aquatile
  REGION 1..223: note = tr|A0A095U130|A0A095U130_9FLAO GTP cyclohydrolase 1; OS = Flavobacterium aquatile LMG 4008 = ATCC 11947; OX = 1453498 GN=folE PE=3 SV=1
MNTLTEKELQELIGDNHQMTSAETPLRADAFEKTDAEKMQTIEKHFHIIMEEMGLDMTDDSLSGTPHRVAKMFIQEIFSGLNPANKPKMSVFENSYNYDKMLVEANISFNSTCEHHFLPIVGKAHIGYVSSGKVIGLSKLNRIVDYYSRRPQVQERLIMQIFNELKTVLETDNVIVVMEATHLCVSSRGIKDESSYTSTIQYGGVFNEKENRNDFFNLMKQEK

SEQ ID NO: 8159 - protein, 223 aa, Flavobacterium aquatile
  REGION 1..223: note = tr|A0A095TXA9|A0A095TXA9_9FLAO GTP cyclohydrolase 1; OS = Flavobacterium aquatile LMG 4008 = ATCC 11947; OX = 1453498 GN=folE PE=3 SV=1
MINNQDLSDEIGNNHIATSSNNPLREDAFDLNDDQKIELIKKDVESILKTLGMDLTDDSLKGTPNRVAKMFVKEIFGGLNPNKKPSSSTFENKYKYNEMLVEKNITVYSTCEHHLLPIVGRAHVAYISNGTVVGLSKMNRIVDYFAKRPQVQERLTMQIVEELQKVLNTKDVACVIDAKHLCVNSRGIRDIESSTVTSEFGGRFKEENVRREFLDYIKLDTSF

SEQ ID NO: 8160 - protein, 223 aa, unidentified
  source 1..223: note = Flavobacterium aquicola
  REGION 1..223: note = tr|A0A3E0EJS2|A0A3E0EJS2_9FLAO GTP cyclohydrolase 1; OS = Flavobacterium aquicola OX=1682742 GN=folE PE=3 SV=1
MINNEEFQDEIGNNHISTNAKNPVRDDAFAITDDEKIEKIKKDVESILLTLGMDLTDDSMKGTPNRVAKMFVKEIFGGLNPDKKPKASTFENNYKYGEMLVEKNITLYSTCEHHLLPIIGRAHVAYISSGRVIGLSKMNRIVEHFAKRPQVQERLTMQIVQELQEALGTEDVACVIDAKHLCVNSRGIKDIESSTVTSEFGGKFKDAQIKREFLDYIKLETKF

SEQ ID NO: 8161 - protein, 223 aa, Flavobacterium aquidurense
  REGION 1..223: note = tr|A0A0Q1BBA7|A0A0Q1BBA7_9FLAO GTP cyclohydrolase 1; OS = Flavobacterium aquidurense OX=362413 GN=folE PE=3 SV=1
MINNEDFLDETGDNHFSSNAQNPVRQDAFDLSDDEKIERIKKDVENILQTLGMDLTDDSIKGTPNRVAKMFVKEIFGGLNPSKQPKASTFDNNYKYGEMLVEKNITVYSTCEHHLLPIIGRAHVAYISSGRVIGLSKMNRIVEYYAKRPQVQERLTMQIVQELQKALGTEDVACVIDAKHLCVNSRGIKDIESSTVTSEFGGKFKDPQTKREFLDYIKLDTQF

SEQ ID NO: 8162 - protein, 223 aa, Flavobacterium aquidurense
  REGION 1..223: note = tr|A0A1H3IDQ7|A0A1H3IDQ7_9FLAO GTP cyclohydrolase 1; OS = Flavobacterium aquidurense OX=362413 GN=folE PE=3 SV=1
MINNEDFLDEIGDNHFSSNAKNPVRQDAFDLTDDEKIEKIKKDVENILQTLGMDLTDDSIKGTPNRVAKMFVKEIFGGLNPSKQPKASTFDNNYKYGEMLVEKNITVYSTCEHHLLPIIGRAHVAYISSGRVIGLSKMNRIVEYYAKRPQVQERLTMQIVQELQKALGTEDVACVIDAKHLCVNSRGIKDIESSTVTSEFGGKFKDPQTKREFLDYIKLDTQF

SEQ ID NO: 8163 - protein, 223 aa, Flavobacterium araucananum
  REGION 1..223: note = tr|A0A227P8I9|A0A227P8I9_9FLAO GTP cyclohydrolase 1; OS = Flavobacterium araucananum OX=946678 GN=folE PE=3 SV=1
MINNEDFLDEIGDNHFSSNAQNPVRQDAFDLSDEEKIEKIKKDVENILQTLGMDLNDDSIKGTPNRVAKMFVKEIFGGLNPTRKPKASTFDNNYKYGEMLVEKNITVYSTCEHHLLPIIGRAHVAYISSGRVIGLSKMNRIVEYYAKRPQVQERLTMQIVQELQKALGTEDVACVIDAKHLCVNSRGIKDIESSTVTSEFGGKFKDPQTKREFLDYIKLDTQF

SEQ ID NO: 8164 - protein, 223 aa, unidentified
  source 1..223: note = Flavobacterium arcticum
  REGION 1..223: note = tr|A0A345HEA9|A0A345HEA9_9FLAO GTP cyclohydrolase 1; OS = Flavobacterium arcticum OX=1784713 GN=folE PE=3 SV=1
MSHTDDIKDGIGENHIATSAETPLRKDAFELSDEQKIEAIKKDVENILQTLGMDLTDDSIKGTPNRVAKMFVKEIFGGLNPEKKPNSSTFENKYKYNEMLVEKNITVYSTCEHHLLPIVGRAHVAYISNGTVVGLSKMNRIVDYFAKRPQVQERLTIQIVQELKKVLNTEDVACVIDAKHLCVNSRGIRDIESSTVTAEFGGTFKEEKVRREFLDYIKLDTQF

SEQ ID NO: 8165 - protein, 217 aa, unidentified
  source 1..217: note = Flavobacterium aurantiibacter
  REGION 1..217: note = tr|A0A255ZRW5|A0A255ZRW5_9FLAO GTP cyclohydrolase 1; OS = Flavobacterium aurantiibacter OX=2023067 GN=folE PE=3; SV = 1
MIDEIGENHIATSAQNPVRIDAFEISDEEKIESIKKDVANILHTLGMDLTDDSIKGTPNRVAKMFVKELFGGLNPDKRPSASTFENNYKYGEMLVEKNITVYSTCEHHLLPIIGRAHVAYISNGRVIGLSKMNRIVDFYAKRPQVQERLTMQIVQELQLALGTDDVACVIDAKHLCVNSRGIRDIESSTVTSEFGGRFKEEAMRKEFLNYISLETKF

SEQ ID NO: 8166 - protein, 223 aa, Flavobacterium beibuense
  REGION 1..223: note = tr|A0A444W7X3|A0A444W7X3_9FLAO GTP cyclohydrolase 1; OS = Flavobacterium beibuense OX=657326 GN=folE PE=3 SV=1
MIANEDLKDDIGDNHIATSAATPLRPDAFEMSDDQKIEAIKKDVESILNTLGMDLTDDSLKGTPNRVAKMFVKEIFGGLNPTRKPGSSTFENKYKYGEMLVEKNITIYSTCEHHLLPIVGRAHVAYISNGTVVGLSKMNRIVDYFAKRPQVQERLTIQIVEELKKVLKTEDVACVIDAKHLCVNSRGIRDIESSTVTSEFGGRFKEEHVRREFLDYIKLDTQF

SEQ ID NO: 8167 - protein, 223 aa, Flavobacterium beibuense
  REGION 1..223: note = tr|A0A0A2LRW5|A0A0A2LRW5_9FLAO GTP cyclohydrolase 1; OS = Flavobacterium beibuense F44-8 OX=1406840 GN=folE PE=3; SV = 1
MIANEDLKDDIGENHIATSAETPLRADAFEMSDDQKIEAIKKDVENILHTLGMDLTDDSLKGTPNRVAKMFVKEVFGGLNPSKKPGSSTFENKYKYGEMLVEKNITIYSTCEHHLLPIVGRAHVAYISNGTVVGLSKMNRIVDYFAKRPQVQERLTIQIVEELKKVLNTEDVACVIDAKHLCVNSRGIRDIESSTVTSEFGGKFKEENVRREFLDYIKLDTQF

SEQ ID NO: 8168 - protein, 223 aa, Flavobacterium branchiophilum
  REGION 1..223: note = tr|A0A2H3KSM6|A0A2H3KSM6_9FLAO GTP cyclohydrolase 1; OS = Flavobacterium branchiophilum OX=55197 GN=folE PE=3 SV=1
MKNAENFNDEIGNNHIATNAQNPIRPDAFVLSDEEKIESIKKDVTNILQTLGMDLTDDSLKGTPNRVAKMFVNEIFGGLNPNKKPSASTFENNYKYGEMLVEKNIVVYSTCEHHLLPIIGRAHVAYISNGTVVGLSKMNRIVEYYAKRPQVQERLTMQIVQELQKVLNTDDVACVIDAKHLCVNSRGIKDIESSTVTSEFGGKFKNEQTKREFLDYIKFDTKF

SEQ ID NO: 8169 - protein, 223 aa, Flavobacterium branchiophilum; identical to SEQ ID NO: 8168
  REGION 1..223: note = tr|G2Z1C9|G2Z1C9_FLABF GTP cyclohydrolase 1; OS = Flavobacterium branchiophilum (strain FL-15) OX=1034807; GN = folE2 PE=3 SV=1

SEQ ID NO: 8170 - protein, 223 aa, Flavobacterium caeni
  REGION 1..223: note = tr|A0A1G5CL11|A0A1G5CL11_9FLAO GTP cyclohydrolase 1; OS = Flavobacterium caeni OX=490189 GN=folE PE=3 SV=1
MMNSDAFQDDFGDDHFSSNASNPLRADAFDLPDDKKIELIKKDVESILTTLGMDLTDDSLKGTPNRVAKMFVKELFGGLHPNKRPNPSTFENHYQYGEMLVEKNITVYSTCEHHLLPIIGRAHVGYISNGRVIGLSKMNRIVDYYAKRPQVQERLTMQIVQELQRALGTEDVACVIDAKHLCVNSRGIRDIESSTVTSEFGGKFKEEQVRKEFLQYIRLETKF

SEQ ID NO: 8171 - protein, 223 aa, Flavobacterium cauense
  REGION 1..223: note = tr|V6S2L0|V6S2L0_9FLAO GTP cyclohydrolase 1; OS = Flavobacterium cauense R2A-7 OX=1341154 GN=folE PE=3; SV = 1
MIHNDDLNDPLGENHIGTNAQTPLRSDAFNITDDEKINLIKKDVENILNTLGLDLTDDSLKGTPNRVAKMFVKEIFGGLHPHKKPSSSTFENKYKYGEMLVEKNITVYSTCEHHLLPIVGRAHVAYISNGTVVGLSKMNRIVDYFAKRPQVQERLTIQIVQELQKVLNTDDVACVIDAKHLCVNSRGIRDIESSTVTAEFGGKFKDDKVRREFLDYIKLDTSF

SEQ ID NO: 8172 - protein, 223 aa, Flavobacterium cauense
  REGION 1..223: note = tr|V6RWW3|V6RWW3_9FLAO GTP cyclohydrolase 1; OS = Flavobacterium cauense R2A-7 OX=1341154 GN=folE PE=3; SV = 1
MENVTEKELFEIIGDDHQMTSIETPLRPDAFLKSDEEKMVVIEQHFKAIMEELGLDLTDDSLKGTPHRVAKMYVQEIFSGLHPDNRPKISVFENSYNYDKMLVEANINFNSTCEHHFLPIIGKAHIAYVSGGKVIGLSKLNRIVDYFARRPQVQERMTVQIYNELCDVLNTEDVIVVLEATHLCVSSRGIKDASSYTTTLQYGGVFEEKEMRNDFFNLLKKEQ

SEQ ID NO: 8173 - protein, 222 aa, Flavobacterium cheniae
  REGION 1..222: note = tr|A0A562KEQ6|A0A562KEQ6_9FLAO GTP cyclohydrolase 1; OS = Flavobacterium cheniae OX=295428 GN=folE PE=3 SV=1
MNTTIEKEIFDIIGDNHQMTSVETPLRPDAFVRSDAQKMEVIEHHFEIIMKELGLDLTDDSLQGTPHRVAKMFVQEIFSGLNPANKPKISVFDNSYQYDKMLVEANISFNSTCEHHFLPIVGKAHIGYVSSGKVIGLSKLNRIVDYYAKRPQVQERMIMQIFNELKTVLETDNVIVVMEATHLCVSSRGIKDESSFTSTLQYGGVFNQKEFRDDFYKMIHKE

SEQ ID NO: 8174 - protein, 223 aa, Flavobacterium cheniae
  REGION 1..223: note = tr|A0A562KNP6|A0A562KNP6_9FLAO GTP cyclohydrolase 1; OS = Flavobacterium cheniae OX=295428 GN=folE PE=3 SV=1
MTQNEDFQDEIGNDHIATSAQTPMRDDAFVISDEEKIELIKKDVEHILNTLGLDLTDDSLKGTPNRVAKMFVKEIFGGLNPNKKPGSSTFDNKYKYGEMLVEKNIVVYSTCEHHLLPIVGRAHVAYISNGTVVGLSKMNRIVDYYAKRPQVQERLTIQVVQELQKVLGTDDVACVIDAKHLCVNSRGIRDIESSTVTAEFGGKFKEDKVRREFLDYIKLDTQF

SEQ ID NO: 8175 - protein, 223 aa, Flavobacterium chilense
  REGION 1..223: note = tr|A0A1M6Y181|A0A1M6Y181_9FLAO GTP cyclohydrolase 1; OS = Flavobacterium chilense OX=946677 GN=folE PE=3 SV=1
MINNEDFLDEIGDNHFSSNAKNPVRQDAFDLSDDEKIEKIKKDVENILQTLGMDLTDDSIKGTPNRVAKMFVKEIFGGLNPSKQPKASTFDNNYKYGEMLVEKNITVYSTCEHHLLPIIGRAHVAYISSGRVIGLSKMNRIVEYYAKRPQVQERLTMQIVQELQKALGTEDVACVIDAKHLCVNSRGIKDIESSTVTSEFGGKFKDPQTKREFLDYIKLDTQF

SEQ ID NO: 8176 - protein, 223 aa, unidentified
  source 1..223: note = Flavobacterium circumlabens
  REGION 1..223: note = tr|A0A4Y7UD48|A0A4Y7UD48_9FLAO GTP cyclohydrolase 1; OS = Flavobacterium circumlabens OX=2133765 GN=folE PE=3 SV=1
MINNEDFLDEIGDNHFSSNAQNPVRQDAFDLTDDEKIEKIKKDVENILQTLGMDLTDDSLKGTPNRVAKMFVKEIFGGLNPSKKPKASTFDNNYKYGEMLVEKNITLYSTCEHHLLPIIGRAHVAYISSGRVIGLSKMNRIVEYYAKRPQVQERLTMQIVQELQKALGTEDVACVIDAKHLCVNSRGIKDIESSTVTSEFGGKFKDPQTRREFLDYIKLETQF

SEQ ID NO: 8177 - protein, 223 aa, Flavobacterium columnare
  REGION 1..223: note = tr|A0A2N9PDT9|A0A2N9PDT9_9FLAO GTP cyclohydrolase 1; OS = Flavobacterium columnare OX=996 GN=folE PE=3 SV=1
MAHNEEFNEELGHSHIATSATTPLRSDAFDLSDEEKIASIRKDVESILNTLGMDLTDDSLSGTPNRVAKMFVKDIFGGLNPDKKPGSSTFQNHYKYNEMLVEKNIVVYSTCEHHLLPIIGRAHVAYISDGTVIGLSKMNRIVDYYSKRPQVQERLTMQIVQELQNVLGTDDVACVIDAKHLCVNSRGIKDIESSTVTAEFGGKFKNEATRKEFLDYIKLETKF

SEQ ID NO: 8178 - protein, 223 aa, Flavobacterium columnare
  REGION 1..223: note = tr|A0A437U8X2|A0A437U8X2_9FLAO GTP cyclohydrolase 1; OS = Flavobacterium columnare OX=996 GN=folE PE=3 SV=1
MAHNEEFNEELGHSHIATSATTPLRSDAFDLSDEEKIASIRKDVESILNTLGMDLTDDSLSGTPNRVAKMFVKDIFGGLNPDKKPGSSTFQNHYKYNEMLVEKNIVVYSTCEHHLLPIIGRAHVAYISDGTVIGLSKMNRIVDYYAKRPQVQERLTMQIVQELQNVLGTDDVACVIDAKHLCVNSRGIKDIESSTVTAEFGGKFKNEATRKEFLDYIKLETKF

SEQ ID NO: 8179 - protein, 199 aa, unidentified
  source 1..199: note = Flavobacterium commune
  REGION 1..199: note = tr|A0A1D9PE32|A0A1D9PE32_9FLAO GTP cyclohydrolase 1; OS = Flavobacterium commune OX=1306519 GN=folE PE=3 SV=1
MKSYEKIEQYDTEITESLADNYRIIIDNLGEDVTREGLEKTPERVAKAMQYLTHGYGLDPLEILKSALFTEEHQQMIVVKDIEVYSMCEHHMLPFFGKAHVAYIPNGKIVGLSKIPRVVDAYARRMQVQERLTDQIKNCIQEALNPLGVAVVIEAQHMCMQMRGIQKQNSVTTTSSFTGAFEKDKTRKEFISLVSNKLS

SEQ ID NO: 8180 - protein, 223 aa, unidentified
  source 1..223: note = Flavobacterium commune
  REGION 1..223: note = tr|A0A1D9P7E0|A0A1D9P7E0_9FLAO GTP cyclohydrolase 1; OS = Flavobacterium commune OX=1306519 GN=folE PE=3 SV=1
MIQNEELHDEIGDNHISSSAKNPMREDAFAISDDEKIDKIKKDVENILLTLGMDLNDDSLKGTPNRVAKMFVKEIFGGLNPNKKPKASTFDNNYKYGEMLVEKNIIVYSTCEHHLLPIIGRAHVAYISNGRVIGLSKMNRIVEYYSKRPQVQERLTMQIVQELQKALGTEDVACVIDAKHLCVNSRGISDIESSTVTSEFGGKFKEVQCKREFLDYIKLETRF

SEQ ID NO: 8181 - protein, 223 aa, unidentified
  source 1..223: note = Flavobacterium crassostreae
  REGION 1..223: note = tr|A0A1B9E8W7|A0A1B9E8W7_9FLAO GTP cyclohydrolase 1; OS = Flavobacterium crassostreae OX=1763534 GN=folE PE=3 SV=1
MINKDEIHDEIGDNHIASCAKNPVRDDAFDITDEEKIEKIKKDVENILLTLGMDLTDDSMQGTPNRVAKMFVKEIFGGLNPAKKPKASTFDNNYKYGEMLVEKNITLYSTCEHHLLPIIGRAHVAYISNGRVIGLSKMNRIVEYYAKRPQVQERLTMQIVQELQEALGTQDVACVIDAKHLCVNSRGINDIESSTVTSEFGGKFKDPQARREFLDYIKMETKF

SEQ ID NO: 8182 - protein, 199 aa, unidentified
  source 1..199: note = Flavobacterium crassostreae
  REGION 1..199: note = tr|A0A1B9E7G3|A0A1B9E7G3_9FLAO GTP cyclohydrolase 1; OS = Flavobacterium crassostreae OX=1763534 GN=folE PE=3 SV=1
MKNYERKEIYSTEKTTDLAQNYKTIIAGLGEDVTREGLEKTPERAAKAMQFLTHGYAIDPLEILKSALFTEDHSQMIVVKNIEVYSMCEHHMLPFFGKAHIAYIPNGKIVGLSKIPRIVDAYARRMQVQERLTDQIKDCIQEALEPLGVAVVIEAQHMCMQMRGIEKQNSFTTTSSFTGAFEKNKTRKEFISLISNKLS

SEQ ID NO: 8183 - protein, 223 aa, Flavobacterium croceum
  REGION 1..223: note = tr|A0A2S4NB27|A0A2S4NB27_9FLAO GTP cyclohydrolase 1; OS = Flavobacterium croceum DSM 17960 OX=1121886 GN=folE; PE = 3 SV=1
MINNDDFNDEIGNNHIATNEETPLRGDAFEKSDEEKIELIKKDVENILNTLGLDLTDDSLKGTPNRVAKMFVKDIFGGLNPEKKPSSSTFDNKYKYNEMLVEKNITVYSTCEHHLLPIIGRAHVAYISNGTVVGLSKMNRIVDYYAKRPQVQERLTIQIVRELQRVLNTNDVACIIDAKHLCVNSRGIKDIESSTVTAEFGGKFKDENVRKEFLQYVQLETSF

SEQ ID NO: 8184 - protein, 228 aa, Flavobacterium croceum
  REGION 1..228: note = tr|A0A2S4NAS4|A0A2S4NAS4_9FLAO GTP cyclohydrolase 1; OS = Flavobacterium croceum DSM 17960 OX=1121886 GN=folE; PE = 3 SV=1
MTKNPTVDTSNLVSFSIDEIGDNHLFTSVETPMKADAFLLSDEDKKEKIAFHFKEIMEVLGLDLTDDSLKGTPQRVAKMYIDEIFCGLNPANKPQIALFENKYQYNQMLVEKNITFYSNCEHHFVPIFGKIHVAYISKGKVIGLSKINRIVQYFAQRPQVQERLTMQIGLELQQILETEDIAVIVDAKHLCVSSRGVKDESSATVTSYYGGVFKNEQKVIELHNYIKS

SEQ ID NO: 8185 - protein, 223 aa, unidentified
  source 1..223: note = Flavobacterium crocinum
  REGION 1..223: note = tr|A0A2S1YLN5|A0A2S1YLN5_9FLAO GTP cyclohydrolase 1; OS = Flavobacterium crocinum OX=2183896 GN=folE PE=3 SV=1
MINNEDFLDEIGDSHFSSNAKNPLRADAFDITDEEKIEKIKKDVENILQTLGMDLTDDSIKGTPNRVAKMFVKEIFGGLNPAKQPKASTFDNNYKYGEMLVEKNITVYSTCEHHLLPIIGRAHVAYISSGRVIGLSKMNRIVEYYAKRPQVQERLTMQIVQELQKALGTEDVACVIDAKHLCVNSRGIKDIESSTVTSEFGGKFKDPQTKREFLDYIKLDTQF

SEQ ID NO: 8186 - protein, 223 aa, Flavobacterium cucumis
  REGION 1..223: note = tr|A0A1M7ZXZ3|A0A1M7ZXZ3_9FLAO GTP cyclohydrolase 1; OS = Flavobacterium cucumis OX=416016 GN=folE PE=3 SV=1
MIQNEDFQDEIGNDHIATSAQTPLREDAFSISDDEKIELIKKDVEHILNTLGLDLTDDSLKGTPNRVAKMFVKEIFGGLNPSKKPSSSTFDNKYKYGEMLVEKNIVVYSTCEHHLLPIVGRAHVAYISNGTVVGLSKMNRIVDYYAKRPQVQERLTIQIVQELQKVLGTADVACVIDAKHLCVNSRGIRDIESSTVTAEFGGKFKEDKVRREFLDYIKLDTQF

SEQ ID NO: 8187 - protein, 222 aa, Flavobacterium cucumis
  REGION 1..222: note = tr|A0A1M7ZXY2|A0A1M7ZXY2_9FLAO GTP cyclohydrolase 1; OS = Flavobacterium cucumis OX=416016 GN=folE PE=3 SV=1
MNTTIEKEIFDIIGDNHQMTSVETPLRSDAFDRSDAQKMEVIEHHFEIIMKELGLDLTDDSLQGTPHRVAKMFVQEIFSGLNPANKPKISVFDNSYQYDKMLVEANISFNSTCEHHFLPIVGKAHIGYVSSGKVIGLSKLNRIVDYYAKRPQVQERMIMQIFMELKTVLETDNVIVVMEATHLCVSSRGIKDESSYTSTLQYGGVFNQKEFRDDFYKMIHKE

SEQ ID NO: 8188 - protein, 223 aa, unidentified
  source 1..223: note = Flavobacterium cupreum
  REGION 1..223: note = tr|A0A434ABE9|A0A434ABE9_9FLAO GTP cyclohydrolase 1; OS = Flavobacterium cupreum OX=2133766 GN=folE PE=3 SV=1
MINNEDFLDETGDNHFSSNAQNPLRQDAFDLSDDEKIEQIKKDVENILQTLGMDLTDDSIKGTPNRVAKMFVKEIFGGLNPSKKPKASTFDNNYKYGEMLVEKNITLYSTCEHHLLPIIGRAHVAYISSGRVIGLSKMNRIVEYYAKRPQVQERLTMQIVQELQKALGTEDVACVIDAKHLCVNSRGIKDIESSTVTSEFGGKFKDPQTRREFLDYIKLETQF

SEQ ID NO: 8189 - protein, 223 aa, unidentified
  source 1..223: note = Flavobacterium cutihirudinis
  REGION 1..223: note = tr|A0A3D9FZG5|A0A3D9FZG5_9FLAO GTP cyclohydrolase 1; OS = Flavobacterium cutihirudinis OX=1265740 GN=folE PE=3; SV = 1
MINNEDFLDEIGDSHFSSNAKNPLRADAFDLTDDEKIEKIKKDVENILQTLGMDLTDDSIKGTPNRVAKMFVKEIFGGLNPSKQPKASTFDNNYKYGEMLVEKNITVYSTCEHHLLPIIGRAHVAYISSGRVIGLSKMNRIVEYYAKRPQVQERLTMQIVQELQKALGTEDVACVIDAKHLCVNSRGIKDIESSTVTSEFGGKFKDPQTKREFLDYIKLETQF

SEQ ID NO: 8190 - protein, 223 aa, unidentified
  source 1..223: note = Flavobacterium cyanobacteriorum
  REGION 1..223: note = tr|A0A255ZTP1|A0A255ZTP1_9FLAO GTP cyclohydrolase 1; OS = Flavobacterium cyanobacteriorum OX=2022802 GN=folE PE=3; SV = 1
MAFNEDYKDDIGDNHISASAKTPLREDAFAINDEEKIELIKKDVENILRVLGLDLTDDSLKGTPNRVAKMFVKEIFGGLNPAKKPGSSTFQNHYKYGEMLVEKNITVYSTCEHHLLPIVGRAHVAYISNGTVVGLSKMNRIVDYYAKRPQVQERLTMQIVQELKKVLNTEDVACVIDAKHLCVNSRGIRDIESSTVTSEFGGRFKEEGVRREFLDYIKLDTQF

SEQ ID NO: 8191 - protein, 225 aa, unidentified
  source 1..225: note = Flavobacterium cyanobacteriorum
  REGION 1..225: note = tr|A0A255ZQ50|A0A255ZQ50_9FLAO GTP cyclohydrolase 1; OS = Flavobacterium cyanobacteriorum OX=2022802 GN=folE PE=3; SV = 1
MINTFTGSLPILTDTEIGDEHICTGLDTPLKNDAFIMPDEEKKERITLLFAEIMDVLGLDLTDDSLKGTPGRVAKMYVDEIFSGLNPANKPKIALFDNKYKYNQMLVEKNITFYSNCEHHFVPIIGKAHVAYISSGKVIGLSKLNRIVQYYAKRPQVQERLTNQIGEELKSVLDTEDIAVIIDAKHLCVSSRGIKDDTSSTVTSFFSGAFTDAAKIAELQNYLAV

SEQ ID NO: 8192 - protein, 223 aa, Flavobacterium daejeonense
  REGION 1..223: note = tr|A0A0Q0WAP1|A0A0Q0WAP1_9FLAO GTP cyclohydrolase 1; OS = Flavobacterium daejeonense OX=350893 GN=folE PE=3 SV=1
MIHNEEMHDEIGDNHISTSAKNPMREDAFAISDDEKIEKIKKDVENILVTLGMDLTDDSLKGTPNRVAKMFVKEIFGGLNPSRKPKASTFNNNYKYGEMLVEKNIIVYSTCEHHLLPIIGRAHVAYISNGTVIGLSKMNRIVEYFSKRPQVQERLTMQIVQELQRALGTEDVACVIDAKHLCVNSRGVSDIESSTVTSEFGGKFKEAQCRREFLDYIKLETKF

SEQ ID NO: 8193 - protein, 223 aa, unidentified
  source 1..223: note = Flavobacterium dankookense
  REGION 1..223: note = tr|A0A4R6QFY6|A0A4R6QFY6_9FLAO GTP cyclohydrolase 1; OS = Flavobacterium dankookense OX=706186 GN=folE PE=3 SV=1
MINHNDSQDEIGENHIATSANNPVRKDAFDITDDKKIELIKKDVENILLTLGMDLSDDSLKGTPNRVAKMFVKEIFGGLNPNKKPSSSTFANNYKYGEMLVEKNITLYSTCEHHLLPIVGRAHVAYISNGTVVGLSKMNRIVDYFAKRPQVQERLTMQIVQELQKVLNTEDVACVIDAKHLCVNSRGIRDIESSTVTSEFGGKFKDEQTRREFLDYIKLDTSF

SEQ ID NO: 8194 - protein, 222 aa, unidentified
  source 1..222: note = Flavobacterium dankookense
  REGION 1..222: note = tr|A0A4R6QDY1|A0A4R6QDY1_9FLAO GTP cyclohydrolase 1; OS = Flavobacterium dankookense OX=706186 GN=folE PE=3 SV=1
MNTTIEKELFELIGDNHQMTSAETPMRPDAFIKSDEQKMIAIEKHFHAIMDEMGMDMSDDSLQGTPHRVAKMFIQEIFSGLNPANKPKISVFENSYNYDKMLVEANISFNSTCEHHFLPIIGKAHIGYVSSGKVIGLSKLNRIVDYYSRRPQVQERLIMQIFNELKTVLETDNVIVVMEAKHLCVSSRGIKDESSYTSTIQYGGIFNEKENRNDFFNLINQE

SEQ ID NO: 8195 - protein, 223 aa, Flavobacterium defluvii
  REGION 1..223: note = tr|A0A1M5R249|A0A1M5R249_9FLAO GTP cyclohydrolase 1; OS = Flavobacterium defluvii OX=370979 GN=folE PE=3 SV=1
MINNEDFLDEIGDSHFSSNAKNPLRADAFDITDEEKIEKIKKDVENILQTLGMDLTDDSIKGTPNRVAKMFVKEIFGGLNPAKQPKASTFDNNYKYGEMLVEKNITVYSTCEHHLLPIIGRAHVAYISSGRVIGLSKMNRIVEYYAKRPQVQERLTMQIVQELQKALGTEDVACVIDAKHLCVNSRGIKDIESSTVTSEFGGKFKEPQTKREFLDYIKLDTHF

SEQ ID NO: 8196 - protein, 223 aa, Flavobacterium degerlachei
  REGION 1..223: note = tr|A0A1H2XCU8|A0A1H2XCU8_9FLAO GTP cyclohydrolase 1; OS = Flavobacterium degerlachei OX=229203 GN=folE PE=3 SV=1
MKHNEEIHDEIGENHIGSCATNPVRDDAFAISDDEKIEKIKKDVENILLTLGMDLTDDSMKGTPNRVAKMFVKEIFGGLNPARKPKASTFDNNYKYGEMLVEKNIIVYSTCEHHLLPIIGRAHVAYISNGRVIGLSKMNRIVEYYSKRPQVQERLTMQIVQELQEALGTEDVACVIDAKHLCVNSRGISDIESSTVTSEFGGKFKDPQARREFLDYIKLETKF

SEQ ID NO: 8197 - protein, 204 aa, Flavobacterium degerlachei
  REGION 1..204: note = tr|A0A1H3C7L4|A0A1H3C7L4_9FLAO GTP cyclohydrolase 1; OS = Flavobacterium degerlachei OX=229203 GN=folE PE=3 SV=1
MIVKEIKSYEKVERYDTEITDAIAENYKSIIDNLGEDVNREGIVSTPVRAAKAMQYLTHGYGLDPLEILKSALFTEDHRQMIVVKDIEVYSMCEHHMLPFFGKAHVAYIPNGKIVGLSKIPRIVDAFARRMQVQERLTDQIKDCIQEALNPLGVAVVIEAQHMCMQMRGIQKQNSVTTTSSFTGAFEKDKTRKEFISLISNKFS

SEQ ID NO: 8198 - protein, 223 aa, unidentified
  source 1..223: note = Flavobacterium endophyticum
  REGION 1..223: note = tr|A0A495LWE9|A0A495LWE9_9FLAO GTP cyclohydrolase 1; OS = Flavobacterium endophyticum OX=1540163 GN=folE PE=3 SV=1
MTNNEDFLDEIGDNHIATNAKNPLRSDAFDISDDQKIELIKKDVESILKTLGMDLTDDSLKGTPNRVAKMFVKEIFGGLNPAKKPSASTFENNYKYGEMLVEKNITLYSTCEHHLLPIIGRAHVAYISNGKVVGLSKMNRIVEYFAKRPQVQERLTMQIVQELQKVLNTEDVACVIDAKHLCVNSRGIKDIESSTITSEFGGKFKNEATRREFLDYIKFDTQF

SEQ ID NO: 8199 - protein, 223 aa, unidentified
  source 1..223: note = Flavobacterium enshiense
  REGION 1..223: note = tr|V6S876|V6S876_9FLAO GTP cyclohydrolase 1; OS = Flavobacterium enshiense DK69 OX=1107311 GN=folE PE=3; SV = 1
MIHNDDLNDPLGENHVGTSAQNPLRSDAFDKTDEEKIALIKKDVESILVTLGMDLTDDSLKGTPNRVAKMFVKEIFGGLHPNKKPNSSTFENHYKYGEMLVEKNITIYSTCEHHLLPIVGRAHVAYISSGTVVGLSKMNRLVDYFAKRPQVQERLTMQIVQELQKVLKTEDVACVIDAKHLCVNSRGIRDIESSTVTAEFGGKFKEEKTRREFLDYIKLDTTF

SEQ ID NO: 8200 - protein, 214 aa, unidentified
  source 1..214: note = Flavobacterium enshiense
  REGION 1..214: note = tr|V6SF46|V6SF46_9FLAO GTP cyclohydrolase 1; OS = Flavobacterium enshiense DK69 OX=1107311 GN=folE PE=3; SV = 1
MNIIDIIGEEHIGTSLETPLREDAFVMSDETKIEHIQHHFKEIMHILGLDLTDDSLRGTPHRVAKMYVKEVFNGLNPANKPDVKLFENKYQYNEMLIEKDITLYSYCEHHFVPIIGKVHVAYISNGQVVGLSKINRLVNYYAKRPQVQERLTNQIANGLKEVLQSDDVAVVIDAVHLCVASRGIKDTNSSTITASYSGKFKEEKTKMEFINLIK

SEQ ID NO: 8201 - protein, 218 aa, unidentified
  source 1..218: note = Flavobacterium faecale
  REGION 1..218: note = tr|A0A2S1LAE4|A0A2S1LAE4_9FLAO GTP cyclohydrolase 1; OS = Flavobacterium faecale OX=1355330 GN=folE PE=3 SV=1
MEDLNKLHQEQIGDHHIGTSAETPLRADAFLMPDNQKIEAIAEHYHKIMEILGLDLTDDSLSGTPYRVGKMYVKELFSGLDPKNKPKISVFDNKYEYNKMLVESQITFNSSCEHHFLPIVGVAHIGYISSGKVIGLSKMNRIVDYYGRRPQVQERMTIQIFNELKAALQTDDVIVVVEAEHLCVSSRGVNDKSSKTTTLEYGGKFEDDQIRNDFFKMI

SEQ ID NO: 8202 - protein, 223 aa, unidentified
  source 1..223: note = Flavobacterium faecale
  REGION 1..223: note = tr|A0A2S1LEA9|A0A2S1LEA9_9FLAO GTP cyclohydrolase 1; OS = Flavobacterium faecale OX=1355330 GN=folE PE=3 SV=1
MIQNNELQDEIGENHIATSAQNPVRDDAFDVSDDDKIELIKKDVENILRTLGMDLTDDSIKGTPNRVAKMFVKEIFGGLNPNKKPKASTFDNNYKYGEMLVEKNITLYSTCEHHLLPIIGRAHVAYISKGSVIGLSKMNRIVEHYAKRPQVQERLTMQIVQELQIALGTEDVACVIDAKHLCVNSRGIQDIESSTVTSEFGGKFKEESTRREFLDYIKMETKF

SEQ ID NO: 8203 - protein, 223 aa, Flavobacterium flevense
  REGION 1..223: note = tr|A0A4Y4AZI4|A0A4Y4AZI4_9FLAO GTP cyclohydrolase 1; OS = Flavobacterium flevense OX=983 GN=folE2 PE=3 SV=1
MIQNEEMHDPIGDNHIGSSAQNPMREDAFAISDDEKIEKIKKDVENILLTLGMDLTDDSLKGTPNRVAKMFVKEIFGGLNPARKPKASTFDNNYKYGEMLVEKNIIVYSTCEHHLLPIIGRAHVAYISNGTVIGLSKMNRIVEYYSKRPQVQERLTMQIVQELQQALGTEDVACVIDAKHLCVNSRGISDIESSTVTSEFGGKFKEAQCRREFLDYIKLETKF

SEQ ID NO: 8204 - protein, 223 aa, Flavobacterium fluvii
  REGION 1..223: note = tr|A0A1M5J7D4|A0A1M5J7D4_9FLAO GTP cyclohydrolase 1; OS = Flavobacterium fluvii OX=468056 GN=folE PE=3 SV=1
MINNEEFHDEIGDNHISSSAKNPVRKDAFDITDDQKIEKIKKDVENILLTLGMDLTDDSLKGTPNRVAKMFVKEIFGGLNPSKKPNASTFENGYKYGEMLVEKNITVYSTCEHHLLPIIGRAHVAYISKGRVIGLSKINRIVEFYAKRPQVQERLTMQIVQELQIALGTEDVACIIDAKHLCVNSRGIKDIESSTVTSEFGGQFKNEQTRRELLDYIKLETKF

SEQ ID NO: 8205 - protein, 223 aa, unidentified
  source 1..223: note = Flavobacterium fontis
  REGION 1..223: note = tr|A0A1M5C8G8|A0A1M5C8G8_9FLAO GTP cyclohydrolase 1; OS = Flavobacterium fontis OX=1124188 GN=folE PE=3 SV=1
MISEDQLHDDIGNNHIATNASTPLRTDAFELTEDQKIELIKKDVQNILHTLGMDLSDDSLKGTPNRVAKMFVKEIFGGLNPQKKPSSSTFENKYKYNEMLVEKNITVYSTCEHHLLPIVGRAHVAYISNGKVVGLSKMNRIVDYYAKRPQVQERLTIQIVHELQQVLNTEDVACIIDAKHLCVNSRGIRDIESSTVTAEFGGKFKEEAVRREFLEYIKLDTQF

SEQ ID NO: 8206 - protein, 224 aa, unidentified
  source 1..224: note = Flavobacterium fontis
  REGION 1..224: note = tr|A0A1M5C0M4|A0A1M5C0M4_9FLAO GTP cyclohydrolase 1; OS = Flavobacterium fontis OX=1124188 GN=folE PE=3 SV=1
MNTVTEKELYEILGDDHQMTAADTPLRPDAFVKTDAEKMTVIEHHFEQIMEALGLDLTDDSLRGTPHRVAKMYVQEIFSGLHPDNKPKISVFDNSYHYDKMLVEANINFNSTCEHHFLPIIGKAHIGYVSNGKVIGLSKLNRIVDYFARRPQVQERMVMQVFNELKTVLDTEDVMVVMEAKHLCVSSRGIKDETSFTSTLQYGGIFEKKEYRDDFFRLLGEKNS

SEQ ID NO: 8207 - protein, 223 aa, Flavobacterium frigidimaris
  REGION 1..223: note = tr|A0A1M5IQF6|A0A1M5IQF6_FLAFR GTP cyclohydrolase 1; OS = Flavobacterium frigidimaris OX=262320 GN=folE PE=3 SV=1
MINNEDFLDEIGDNHFSSNAQNPVRQDAFDLSDEEKIEKIKKDVENILQTLGMDLTDDSIKGTPNRVAKMFVKEIFGGLNPTKKPKASTFDNNYKYGEMLVEKNITVYSTCEHHLLPIIGRAHVAYISSGRVIGLSKMNRIVEYYAKRPQVQERLTMQIVQELQIALGTEDVACVIDAKHLCVNSRGIKDIESSTVTSEFGGKFKDPQTKREFLDYIKLDTQF

SEQ ID NO: 8208 - protein, 223 aa, Flavobacterium frigoris
  REGION 1..223: note = tr|H7FRL6|H7FRL6_FLAFP GTP cyclohydrolase 1; OS = Flavobacterium frigoris (strain PS1) OX=1086011 GN=folE; PE = 3 SV=1
MKHNEEIHDEIGENHIGSCAKNPVRDDAFAISDDEKIEKIKKDVENILLTLGMDLTDDSMKGTPNRVAKMFVKEIFGGLNPEKKPKASTFDNNYKYGEMLVEKNIIVYSTCEHHLLPIIGRAHVAYISNGRVIGLSKMNRIVEYYAKRPQVQERLTMQIVQELQEALGTEDVACVIDAKHLCVNSRGISDIESSTVTSEFGGKFKDPQARREFLDYIKLETKF

SEQ ID NO: 8209 - protein, 223 aa, Flavobacterium frigoris
  REGION 1..223: note = tr|A0A1H9JBW0|A0A1H9JBW0_FLAFI GTP cyclohydrolase 1; OS = Flavobacterium frigoris OX=229204 GN=folE PE=3 SV=1
MKHNEEIHDEIGDNHIGSCATNPLREDAFDITDDEKIESIKKDVESILRTLGMDLTDDSIKGTPNRVAKMFVKEIFGGLNPARKPKASTFDNNYKYGEMLVEKNIIVYSTCEHHLLPIIGRAHVAYISNGRVIGLSKMNRIVEYYSKRPQVQERLTMQIVQELQNALGTKDVACVIDAKHLCVNSRGISDIESSTVTSEFGGKFKDPQARREFLDYIKLETKF

SEQ ID NO: 8210 - protein, 223 aa, Flavobacterium fryxellicola
  REGION 1..223: note = tr|A0A167ULP7|A0A167ULP7_9FLAO GTP cyclohydrolase 1; OS = Flavobacterium fryxellicola OX=249352 GN=folE PE=3 SV=1
MINKEEFQDEIGDNHISLSAKNPIRDDAFSISDDDKIEKIKKDVENILLTLGMDLTDDSLKGTPNRVAKMFVKEIFGGLNPAKKPKASTFDNNYKYGEMLVEKNIIVYSTCEHHLLPIIGRAHVGYISNGRVIGLSKMNRIVAYYAKRPQVQERLTMQIVQELQIALGTEDVACVIDAKHLCVNSRGISDIESSTVTSEFGGKFKDSVTRREFLDYIKLETKF

SEQ ID NO: 8211 - protein, 203 aa, Flavobacterium fryxellicola
  REGION 1..203: note = tr|A0A162P655|A0A162P655_9FLAO GTP cyclohydrolase 1; OS = Flavobacterium fryxellicola OX=249352 GN=folE PE=3 SV=1
MIKELKSYEKIEQYDTEVTASLADNYKTIIDNLGEDVTREGLEKTPERVAKAMQYLTHGYGLDPLEILQSAMFTEDHKQMIVVKDIEVYSMCEHHMLPFFGKAHVAYIPNGKIVGLSKIPRIVDAFARRMQVQERLTDQIKDCIQEALNPLGVAVVIEAQHMCMQMRGIQKQNSVTTTSSFTGAFEKDKTRKEFISLISNKFS

SEQ ID NO: 8212 - protein, 223 aa, Flavobacterium gillisiae
  REGION 1..223: note = tr|A0A1H3XV47|A0A1H3XV47_9FLAO GTP cyclohydrolase 1; OS = Flavobacterium gillisiae OX=150146 GN=folE PE=3 SV=1
MKHNEEIHDEIGDNHIGSCATNPLREDAFDITDDEKIESIKKDVESILLTLGMDLTDDSIKGTPNRVAKMFVKEIFGGLNPARKPKASTFDNNYKYGEMLVEKNIIVYSTCEHHLLPIIGRAHVAYISNGTVIGLSKMNRIVEYYSKRPQVQERLTMQIVQELQNALGTKDVACVIDAKHLCVNSRGISDIESSTVTSEFGGKFKEPQARREFLDYIKLETKF

SEQ ID NO: 8213 - protein, 204 aa, Flavobacterium gillisiae
  REGION 1..204: note = tr|A0A1H4FFD6|A0A1H4FFD6_9FLAO GTP cyclohydrolase 1; OS = Flavobacterium gillisiae OX=150146 GN=folE PE=3 SV=1
MIAKEMKSYEKVERYDTEMTDAIAENYKEIINNLGEDVNREGIVSTPVRAAKAMQYLTHGYGLDPLQILKSALFTEDHRQMIVVKDIEVYSMCEHHMLPFFGKAHVAYIPNGQIVGLSKIPRIVDAFARRMQVQERLTDQIKDCIQEALNPLGVAVVIEAQHMCMQMRGIQKQNSVTTTSSFTGAFEKDKTRKEFISLISNKFS

SEQ ID NO: 8214 - protein, 223 aa, unidentified
  source 1..223: note = Flavobacterium gilvum
  REGION 1..223: note = tr|A0A085EGX4|A0A085EGX4_9FLAO GTP cyclohydrolase 1; OS = Flavobacterium gilvum OX=1492737 GN=folE PE=3 SV=1
MINNEEFQDEIGNNHISTNAKNPLRNDAFAITDEEKIDKIKKDVENILLTLGMDLTDDSLKGTPNRVAKMFVKEIFGGLNPEKKPKASTFENNYKYGEMLVEKNITVYSTCEHHLLPIIGRAHVAYISSGRVIGLSKMNRIVEHYAKRPQVQERLTMQIVQELQQALETEDVACVIDAKHLCVNSRGIKDIESSTVTSEFGGKFKDPQIKREFLDYIKLDTNF

SEQ ID NO: 8215 - protein, 223 aa, Flavobacterium glaciei
  REGION 1..223: note = tr|A0A562PRB0|A0A562PRB0_9FLAO GTP cyclohydrolase 1; OS = Flavobacterium glaciei OX=386300 GN=folE PE=3 SV=1
MIKNEEFQDEIGDNHVSLSANNPVRHDAFNLTDEEKVEKIKKDVENILQTLGMDLTDDSLKGTPNRVAKMFVKEIFGGLNPSRKPKASTFDNNYKYGEMLVEKNIIVYSTCEHHLLPIIGRAHVAYISNGRVIGLSKMNRIVEYYAKRPQVQERLTMQIVQELQIALGTEDVACVIDAKHLCVNSRGISDIESSTVTSEFGGKFKDAVTRREFLDYIKLETKF

SEQ ID NO: 8216 - protein, 199 aa, Flavobacterium glaciei
  REGION 1..199: note = tr|A0A562Q5C1|A0A562Q5C1_9FLAO GTP cyclohydrolase 1; OS = Flavobacterium glaciei OX=386300 GN=folE PE=3 SV=1
MKSYEKIEQYDTEITEILADNYKVIIENLGEDVTREGLEKTPERVAKAMQYLTHGYGLDPLEILKSAMFTEDHQQMIVVKDIEVYSMCEHHMLPFFGKAHVAYIPNGKIVGLSKIPRVVDAFARRMQVQERLTDQIKNCIQDALNPLGVAVVIEAQHMCMQMRGIQKQNSVTTTSSFTGAFEKDKTRKEFISLVSNKLS

SEQ ID NO: 8217 - protein, 223 aa, Flavobacterium glycines
  REGION 1..223: note = tr|A0A1B9DH41|A0A1B9DH41_9FLAO GTP cyclohydrolase 1; OS = Flavobacterium glycines OX=551990 GN=folE2 PE=3 SV=1
MIQNEEMHDEIGDNHIGSSAKNPLRSDAFAITDDEKIEKIKKDVHNILETLGMDLTDDSLKGTPNRVAKMFVKEIFGGLNPSRKPKASTFENNYKYGEMLVEKNIIVYSTCEHHLLPIIGRAHVAYISNGTVIGLSKMNRIVEYYAKRPQVQERLTMQIVQELQQALGTEDVACVIDAKHLCVNSRGVSDIESSTVTSEFGGKFKEEQCRREFLDYIKLDTKF

SEQ ID NO: 8218 - protein, 203 aa, Flavobacterium glycines
  REGION 1..203: note = tr|A0A1B9DX04|A0A1B9DX04_9FLAO GTP cyclohydrolase 1; OS = Flavobacterium glycines OX=551990 GN=folE PE=3 SV=1
MIKEMKSYEKIEQYDTEITESLADNYRIIIDNLGEDVTREGLEKTPERIAKAIQYLTHGYGLDPLQILKSALFTEDHQQMIVVKDIEVYSMCEHHMLPFFGKAHVAYIPNGKIVGLSKIPRVVDAYARRMQVQERLTDQIKNCIQEALNPLGVAVVIEAQHMCMQMRGIQKQNSVTTTSSFTGAFEKDKTRKEFISLVANKLS

SEQ ID NO: 8219 - protein, 223 aa, Flavobacterium granuli
  REGION 1..223: note = tr|A0A1M5IID9|A0A1M5IID9_9FLAO GTP cyclohydrolase 1; OS = Flavobacterium granuli OX=280093 GN=folE PE=3 SV=1
MINREESHDEIGDNHIGSCAQNPLRKDAFDLSDDEKIESIKKDVKNILLTLGMDLTDDSMKGTPNRVAKMFVKEIFGGLNPDRKPKASTFDNNYKYGEMLVEKNIIVYSTCEHHLLPIIGRAHVAYISNGTVIGLSKMNRIVEYYSKRPQVQERLTMQIVQELQNALGTQDVACVIDAKHLCVNSRGISDIESSTVTSEFGGKFKEAQARREFLDYIKLETKF

SEQ ID NO: 8220 - protein, 204 aa, Flavobacterium granuli
  REGION 1..204: note = tr|A0A1M5J155|A0A1M5J155_9FLAO GTP cyclohydrolase 1; OS = Flavobacterium granuli OX=280093 GN=folE PE=3 SV=1
MILNKTKNYEKTEQYDSETTDILAANYRNIIENLGEDVNREGLEKTPERVAKAMQFLTHGYDLDPLEILKSALFTENHSQMIVVKDIEIYSMCEHHMLPFFGKAHVAYIPNGKIVGLSKIPRIVDAYARRMQVQERLTDQIKNCIQEALEPLGVAVVIEAQHMCMQMRGIQKQNSFTTTSSFTGAFEKNKTRKEFISLISNKLS

SEQ ID NO: 8221 - protein, 223 aa, Flavobacterium haoranii
  REGION 1..223: note = tr|A0A1M6JQL1|A0A1M6JQL1_9FLAO GTP cyclohydrolase 1; OS = Flavobacterium haoranii OX=683124 GN=folE PE=3 SV=1
MNHNEELNEELGHNHIATSAETPLRKDAFDKTDEEKIESIKKDVENILITLGMDLTDDSLKGTPNRVAKMFVKDIFGGLNPTKKPSSSTFENKYKYGEMLVEKNIVVYSTCEHHLLPIVGRAHVAYISNGTVVGLSKMNRIVDYYAKRPQVQERLTIQIVQELQKVLGTDDVACVIDAKHLCVNSRGIRDIESSTVTAEFGGKFKEDKVRREFLDYIKLETKF

SEQ ID NO: 8222 - protein, 228 aa, Flavobacterium haoranii
  REGION 1..228: note = tr|A0A1M6DE90|A0A1M6DE90_9FLAO GTP cyclohydrolase 1; OS = Flavobacterium haoranii OX=683124 GN=folE PE=3 SV=1
MTKNPNTKNLNLVQFSSDEIGDNHMFTTIETPLKKDAFLMSDDEKKEKISFHFKEIMEILGLDLTDDSLKGTPDRVAKMYVEEIFSGLKPENKPKVALFENKYQYNQMLVEKDITFYSNCEHHFVPIYGKVHVAYISNGTVIGLSKINRIVQYFAKRPQVQERLTMQIANELKSILNTEDIAVIIDAKHLCVSSRGIQDDTSATVTNYFGGAFEEQHKVDTLLKFIKN

SEQ ID NO: 8223 - protein, 223 aa, Flavobacterium hercynium
  REGION 1..223: note = tr|A0A226HQ75|A0A226HQ75_9FLAO GTP cyclohydrolase 1; OS = Flavobacterium hercynium OX=387094 GN=folE PE=3 SV=1
MINNEDFLDEIGDNHFSSNAKNPVREDAFDLSDEEKIEKIKKDVESILQTLGMDLTDDSIKGTPNRVAKMFVKEIFGGLNPAKQPKASTFDNNYKYGEMLVEKNITVYSTCEHHLLPIIGRAHVAYISSGRVIGLSKMNRIVEYYAKRPQVQERLTMQIVQELQKALGTEDVACVIDAKHLCVNSRGIKDIESSTVTSEFGGKFKDPQTKREFLDYIKLETQF

SEQ ID NO: 8224 - protein, 223 aa, Flavobacterium hibernum
  REGION 1..223: note = tr|A0A0D0ESJ3|A0A0D0ESJ3_9FLAO GTP cyclohydrolase 1; OS = Flavobacterium hibernum OX=37752 GN=folE PE=3 SV=1
MINNEDFLDEIGDSHFSNNAQNPVREDAFVLSDEEKIEKIKKDVENILQTLGMDLTDDSLKGTPNRVAKMFVKEIFGGLNPTKKPKASTFDNNYKYGEMLVEKNITLYSTCEHHLLPIIGRAHVAYISSGRVIGLSKMNRIVEYYAKRPQVQERLTMQIVQELQKALGTEDVACVIDAKHLCVNSRGIKDIESSTVTSEFGGKFKDPQTRREFLDYIKLETQF

SEQ ID NO: 8225 - protein, 223 aa, Flavobacterium hydatis
  REGION 1..223: note = tr|A0A086AQY4|A0A086AQY4_FLAHY GTP cyclohydrolase 1; OS = Flavobacterium hydatis OX=991 GN=folE PE=3 SV=1
MINNEEFLDEIGDNHIGSSAQNPIREDAFAITDDEKIEKIKKDVENILLTLGMDLTDDSLKGTPNRVAKMFVKEIFGGLNPVRKPKASTFDNNYKYGEMLVEKNITLYSTCEHHLLPIIGRAHVAYISNGRVIGLSKMNRIVEYYSKRPQVQERLTMQIVQELQKALGTEDVACVIDAKHLCVNSRGIKDIESSTVTSEFGGKFKDPQTRREFLDYIKLETQF

SEQ ID NO: 8226 - protein, 223 aa, Flavobacterium indicum
  REGION 1..223: note = tr|H8XTI1|H8XTI1_FLAIG GTP cyclohydrolase 1; OS = Flavobacterium indicum (strain DSM 17447 / CIP 109464 / GPTSA100-9) OX=1094466 GN=folE PE=3 SV=1
MSINNEILDEMGDNHIATNAETPLRADAFNISDEEKIESIKKDVENILTTLGMDLTDDSLKGTPNRVAKMFVKEIFGGLNPNKKPSSSTFDNKYKYGEMLVEKNIVVYSTCEHHLLPIVGRAHVAYISNGSVVGLSKMNRIVDYYAKRPQVQERLTIQIVKELQSVLNTEDVACVIDAKHLCVNSRGIRDIESSTVTSEFGGKFKDEKVRREFLDYIKLDTQF

SEQ ID NO: 8227 - protein, 228 aa, Flavobacterium indicum
  REGION 1..228: note = tr|H8XSB0|H8XSB0_FLAIG GTP cyclohydrolase 1; OS = Flavobacterium indicum (strain DSM 17447 / CIP 109464 / GPTSA100-9) OX=1094466 GN=folE PE=3 SV=1
MTKYPTVDTSKLVSFSIDEIGDNHLFTSVETPMKADAFLLSDDEKKDKIAFHFKEIMEVLGLDLTDDSLKGTPQRVAKMYIDEIFCGLNPANKPHVALFENKYQYNQMLVEKNITFYSNCEHHFVPIFGKIHVAYISKGKVIGLSKINRIVQYFAQRPQVQERLTIQIGIELQQILETEDIAVIVDAKHLCVSSRGIKDESSATVTSYYGGIFQNEQKMMELHNYLKM

SEQ ID NO: 8228 - protein, 223 aa, Flavobacterium johnsoniae
  REGION 1..223: note = sp|A5FHM7|GCH1_FLAJ1 GTP cyclohydrolase 1; OS = Flavobacterium johnsoniae (strain ATCC 17061 / DSM 2064 / UW101) OX=376686 GN=folE PE=3 SV=1
MINNEDFLDEIGDSHFSSNAKNPLREDAFDITDEEKIEKIKKDVENILQTLGMDLTDDSIKGTPNRVAKMFVKEIFGGLNPAKQPKASTFDNNYKYGEMLVEKNITVYSTCEHHLLPIIGRAHVAYISSGRVIGLSKMNRIVEYYAKRPQVQERLTMQIVQELQKALGTEDVACVIDAKHLCVNSRGIKDIESSTVTSEFGGKFKDPQTKREFLDYIKLDTQF

SEQ ID NO: 8229 - protein, 223 aa, Flavobacterium johnsoniae
  REGION 1..223: note = tr|A0A4R1IRF0|A0A4R1IRF0_FLAJO GTP cyclohydrolase 1; OS = Flavobacterium johnsoniae OX=986 GN=folE PE=3 SV=1
MINNEDFLDEIGDSHFSSNAKNPLRADAFDITDEEKIEKIKKDVESILQTLGMDLTDDSIKGTPNRVAKMFVKEIFGGLNPAKQPKASTFDNNYKYGEMLVEKNITVYSTCEHHLLPIIGRAHVAYISSGRVIGLSKMNRIVEYYAKRPQVQERLTMQIVQELQKALGTEDVACVIDAKHLCVNSRGIKDIESSTVTSEFGGKFKDPQTKREFLDYIKLDTQF

SEQ ID NO: 8230 - protein, 223 aa, unidentified
  source 1..223: note = Flavobacterium kingsejongi
  REGION 1..223: note = tr|A0A2S1LT17|A0A2S1LT17_9FLAO GTP cyclohydrolase 1; OS = Flavobacterium kingsejongi OX=1678728 GN=folE PE=3 SV=1
MIHNEDFSDEIGDNHIATNAVNPLRKDAFDISDDQKIERIKKDVENILNTLGMDLTDDSMKGTPNRVAKMFVKEIFGGLNPAKKPSASTFDNNYKYGEMLVEKNITLYSTCEHHLLPIIGRAHIGYISNGTVVGLSKMNRIVDYFAKRPQVQERLTMQIVQELQKVLGTDSVACVIDAKHLCVNSRGIRDIESSTVTSEFGGKFKEEQTRREFLNYIQLDTKF

SEQ ID NO: 8231 - protein, 223 aa, unidentified
  source 1..223: note = Flavobacterium lacus
  REGION 1..223: note = tr|A0A328WJC4|A0A328WJC4_9FLAO GTP cyclohydrolase 1; OS = Flavobacterium lacus OX=1353778 GN=folE PE=3 SV=1
MNNNDTFSDDLGDNHIGTSVENPVRKDAFELTDDQKIELIKKDVTNILTTLGMDLTDDSMKGTPNRVAKMFVKEIFGGLNPSKKPSSSTFENGYKYGEMLVEKNITLYSTCEHHLLPIVGRAHVAYISSGKVIGLSKMNRIVDYFAKRPQVQERLTMQIVQELQKALNTEDVACVIDAKHLCVNSRGIRDIESSTVTSEFGGKFKEDKVRREFLDYIKLETKF

SEQ ID NO: 8232 - protein, 223 aa, unidentified
  source 1..223: note = Flavobacterium lacus
  REGION 1..223: note = tr|A0A328WQ95|A0A328WQ95_9FLAO GTP cyclohydrolase 1; OS = Flavobacterium lacus OX=1353778 GN=folE PE=3 SV=1
MNNQIEKELFELLGDEHQMTSAETPLRPDAFDKSDKDKMATIEKHFHIIMEEMGLDMTDDSLRGTPHRVAKMFIQEIFSGLNPANKPKISVFENSYHYDKMLVEANISFNSTCEHHFLPIIGKAHIAYVSNGKVIGLSKLNRIVDYYARRPQVQERMIMQIFNELKTVLNTEDVIVVVEAEHLCVSSRGIKDSSSYTSTIQYGGIFKEKENRNDFFNLLKKEK

SEQ ID NO: 8233 - protein, 223 aa, Flavobacterium limicola
  REGION 1..223: note = tr|A0A495S6W4|A0A495S6W4_9FLAO GTP cyclohydrolase 1; OS = Flavobacterium limicola OX=180441 GN=folE PE=3 SV=1
MIKNEEFQDEIGDNHVSLSAKNPVRDDAFDISDDDKIEKIKKDVESILITLGMDLTDDSLKGTPNRVAKMFVKEIFGGLNPAKKPKASTFDNNYKYGEMLVEKNIIVYSTCEHHLLPIIGRAHVAYISNGTVIGLSKMNRIVEYYAKRPQVQERLTMQIVQELQIALGTEDVACVIDAKHLCVNSRGISDIESSTVTSEFGGKFKDAVTRREFLDYIKLETKF

SEQ ID NO: 8234 - protein, 199 aa, Flavobacterium limicola
  REGION 1..199: note = tr|A0A495RS18|A0A495RS18_9FLAO GTP cyclohydrolase 1; OS = Flavobacterium limicola OX=180441 GN=folE PE=3 SV=1
MKSYEKIEQYDTEITEALADNYKVIIENLGEDVTREGLEKTPERVAKAMQYLTHGYGLDPLEILKSAMFTEDHQQMIVVKDIEVYSMCEHHMLPFFGKAHVAYIPNGKIVGLSKIPRVVDAFARRMQVQERLTDQIKNCIQDALNPLGVAVVIEAQHMCMQMRGIQKQNSVTTTSSFTGAFEKDKTRKEFISLVSNKLS

SEQ ID NO: 8235 - protein, 223 aa, unidentified
  source 1..223: note = Flavobacterium limnosediminis
  REGION 1..223: note = tr|V6SHC5|V6SHC5_9FLAO GTP cyclohydrolase 1; OS = Flavobacterium limnosediminis JC2902 OX=1341181 GN=folE; PE = 3 SV=1
MIHNDDLNDQLGENHIGTSARTPLRSDAFDKSDDEKIALIKKDVESILTTLGLDLTDDSLKGTPNRVAKMFVKEIFGGLHPHKKPSSSTFDNKYKYGEMLVEKNITIYSTCEHHLLPIVGRAHVAYISNGTVVGLSKMNRIVDYFAKRPQVQERLTIQIVQELQKVLNTDDVACVIDAKHLCVNSRGIRDIESSTVTAEFGGKFKEDKVRREFLDYIKLDTTF

SEQ ID NO: 8236 - protein, 223 aa, Flavobacterium lindanitolerans
  REGION 1..223: note = tr|A0A497TVC9|A0A497TVC9_9FLAO GTP cyclohydrolase 1; OS = Flavobacterium lindanitolerans OX=428988 GN=folE PE=3; SV = 1
MTNNEDFLDEIGDNHIATNAKNPLRSDAFDITDDQKIELIKKDVENILLTLGMDLTDDSLKGTPNRVAKMFVKEIFGGLNPAKKPNASTFINNYKYGEMLVEKNITVYSTCEHHLLPIIGRAHVAYISNGKVVGLSKMNRIVEYFAKRPQVQERLTMQIVQELQKVLNTEDVACVIDAKHLCVNSRGIKDIESSTVTSEFGGKFKNEATRREFLDYIKFDTQF

SEQ ID NO: 8237 - protein, 223 aa, unidentified
  source 1..223: note = Flavobacterium macacae
  REGION 1..223: note = tr|A0A3P3W4H4|A0A3P3W4H4_9FLAO GTP cyclohydrolase 1; OS = Flavobacterium macacae OX=2488993 GN=folE PE=3 SV=1
MVNKEEFLDEIGDNHIATTAQNPVRSDAFEIGDDEKIELIKKDVENILLTLGMDLTDDSMKGTPNRVAKMFVKELFGGLNPGKKPNASTFENNYKYGEMLVEKNITLYSTCEHHLLPIIGRAHVAYISNGRVVGLSKMNRIVEYFAKRPQVQERLTMQIVQELQQVLNTQDVACVIDAKHLCVNSRGIKDIESSTVTSEFGGKFKEEATRREFLDYIKFDTKF

SEQ ID NO: 8238 - protein, 223 aa, unidentified
  source 1..223: note = Flavobacterium magnum
  REGION 1..223: note = tr|A0A2S0RH01|A0A2S0RH01_9FLAO GTP cyclohydrolase 1; OS = Flavobacterium magnum OX=2162713 GN=folE PE=3 SV=1
MSKTDDSHDEIGNNHIATSAVNPIRTDAFDLSDDQKIESIKKDVERILTTLGMDLTDDSLKGTPNRVAKMFVKEIFGGLNPVKKPGASTFKNHYKYGEMLVEKNITLYSTCEHHLLPIIGRAHIAYISNGTVVGLSKMNRIVDYYAKRPQVQERLTMQIVQELQKVLNTEDVACVIDAKHLCVNSRGIRDIESSTITSEFCGKFKEAHVRREFLDYIKLDTKF

SEQ ID NO: 8239 - protein, 199 aa, unidentified
  source 1..199: note = Flavobacterium magnum
  REGION 1..199: note = tr|A0A2S0RI64|A0A2S0RI64_9FLAO GTP cyclohydrolase 1; OS = Flavobacterium magnum OX=2162713 GN=folE PE=3 SV=1
MSNYRKIEQYDEEKTVQLAVHLKGVLSILGEDVTREGLEKTPERAGKAYQFLTQGYEIDPLEILKAALFAEDHKQMVVVKNIEVYSMCEHHLLPFFGKVHVAYIPNGKIVGLSKIPRVVEAFARRLQVQERLTDQIKDCIQAALDPLGVAVVMECQHMCMQMRGIQKQNSVTTTSSFNGAFEKDKTRKEFISLISNRLH

SEQ ID NO: 8240 - protein, 223 aa, unidentified
  source 1..223: note = Flavobacterium marinum
  REGION 1..223: note = tr|A0A1H6MG72|A0A1H6MG72_9FLAO GTP cyclohydrolase 1; OS = Flavobacterium marinum OX=1159016 GN=folE PE=3 SV=1
MCKSDALHDEIGNNHIGTSDYTPLKANAFDISDDEKIELIKKDVENILNTLGMDLTDDSLKGTPNRVAKMFVKEIFGGLNPAKKPSSSTFDNKYKYGEMLVEKNIVVYSTCEHHLLPIVGRAHVAYISNGKVVGLSKMNRIVDYYAKRPQVQERLTIQIVEELKRVLNTQDVACVIDAKHLCVNSRGIRDIESSTVTAEYSGAFKNENTRKEFLNYIQLETKF

SEQ ID NO: 8241 - protein, 223 aa, Flavobacterium micromati
  REGION 1..223: note = tr|A0A1M5P6L8|A0A1M5P6L8_9FLAO GTP cyclohydrolase 1; OS = Flavobacterium micromati OX=229205 GN=folE PE=3 SV=1
MIKKEEFQDEIGDNHFSLSAKNPIRDDAFAISDDEKIEKIKKDVENILLTLGMDLTDDSLKGTPNRVAKMFVKEIFGGLNPNKKPKASTFDNNYKYGEMLVEKNIIVYSTCEHHLLPIIGRAHVAYISNGRVIGLSKMNRIVEYYAKRPQVQERLTMQIVQELQIALGTEDVACVIDAKHLCVNSRGISDIESSTVTSEFGGKFKDPQSRREFLDYIKMETKF

SEQ ID NO: 8242 - protein, 217 aa, Flavobacterium micromati
  REGION 1..217: note = tr|A0A1M5KQF5|A0A1M5KQF5_9FLAO GTP cyclohydrolase 1; OS = Flavobacterium micromati OX=229205 GN=folE PE=3 SV=1
MNNINEKYDAVGDNHIGTSAETPLRADAFDKSDDQKIEEISFHFKKIMEVLGLDLTDDSLSGTPHRVGKMYVKEIFSGLDPKNKAKMSIFDNKYEYSKMLIESDITFNSSCEHHFLPIVGKAHIAYISSGKVIGLSKLNRIVQYYGRRPQVQERMTMQIFNELKNALQTDDVIVVVEAEHLCVSSRGVNDKSSKTTTIEYGGKFTDKDTQNNFFKML

SEQ ID NO: 8243 - protein, 223 aa, unidentified
  source 1..223: note = Flavobacterium nitrogenifigens
  REGION 1..223: note = tr|A0A521AKL6|A0A521AKL6_9FLAO GTP cyclohydrolase 1; OS = Flavobacterium nitrogenifigens OX=1617283 GN=folE PE=3; SV = 1
MINNEEFLDEIGDNHFSSNAKNPLRADAFDITDEEKIEKIKKDVENILQTLGMDLTDDSIKGTPNRVAKMFVKEIFGGLNPAKQPKASTFDNNYKYGEMLVEKNITVYSTCEHHLLPIIGRAHVAYISSGRVIGLSKMNRIVEYYAKRPQVQERLTMQIVQELQKALGTEDVACVIDAKHLCVNSRGIKDIESSTVTSEFGGKFKDAQTKREFLDYIKLDTQF

SEQ ID NO: 8244 - protein, 223 aa, unidentified
  source 1..223: note = Flavobacterium noncentrifugens
  REGION 1..223: note = tr|A0A1G9BN69|A0A1G9BN69_9FLAO GTP cyclohydrolase 1; OS = Flavobacterium noncentrifugens OX=1128970 GN=folE PE=3; SV = 1
MTTNEDFHDEIGDDHISSNATNPLRDDAFDIPDDQKIELIKKDVESILRTLGMDLTDDSIKGTPNRVAKMFVKEIFGGLNPAKKPSSSTFDNNYKYGEMLVEKNIVVYSTCEHHLLPIIGRAHVGYISNGKVIGLSKMNRVVDYFSKRPQVQERLTMQIVQELQRALGTQDVACVIDAKHLCVNSRGIRDIESSTVTSEFGGKFKDEKTRREFLDYIKLETKF

SEQ ID NO: 8245 - protein, 203 aa, Flavobacterium omnivorum
  REGION 1..203: note = tr|A0A1G7X687|A0A1G7X687_9FLAO GTP cyclohydrolase 1; OS = Flavobacterium omnivorum OX=178355 GN=folE PE=3 SV=1
MIKELKSYEKIEQYDAEITASLADNYKTIIYNLGEDVTREGLEKTPERVAKAMQYLTHGYGLDPLEILQSAMFTEDHKQMIVVKDIEVYSMCEHHMLPFFGKAHVAYIPNGKIVGLSKIPRIVDAFARRMQVQERLTDQIKDCIQEALNPLGVAVVIEAQHMCMQMRGIQKQNSVTTTSSFTGAFEKDKTRKEFISLISNKFS

SEQ ID NO: 8246 - protein, 223 aa, Flavobacterium omnivorum
  REGION 1..223: note = tr|A0A1G8BMA8|A0A1G8BMA8_9FLAO GTP cyclohydrolase 1; OS = Flavobacterium omnivorum OX=178355 GN=folE PE=3 SV=1
MINKEEFQDEIGDNHISLSAKNPIRDDAFTISDDDKIEKIKKDVENILLTLGMDLTDDSLKGTPNRVAKMFVKEIFGGLNPAKKPKASTFDNNYKYGEMLVEKNIIVYSTCEHHLLPIIGRAHVGYISNGRVIGLSKMNRIVEYYAKRPQVQERLTMQIVQELQIALGTEDVACVIDAKHLCVNSRGISDIESSTVTSEFGGKFKDSVTRREFLDYIKLETKF

SEQ ID NO: 8247 - protein, 223 aa, Flavobacterium oncorhynchi
  REGION 1..223: note = tr|A0A226HWT9|A0A226HWT9_9FLAO GTP cyclohydrolase 1; OS = Flavobacterium oncorhynchi OX=728056 GN=folE PE=3 SV=1
MINNEDFLDEIGDSHFSSNAKNPLREDAFDLSDDEKIEKIKKDVENILQTLGMDLTDDSIKGTPNRVAKMFVKEIFGGLNPSKQPKASTFDNNYKYGEMLVEKNITVYSTCEHHLLPIIGRAHVAYISNGRVIGLSKMNRIVEYYAKRPQVQERLTMQIVQELQKALGTEDVACVIDAKHLCVNSRGIKDIESSTVTSEFGGKFKDPQTKREFLDYIKLETQF

SEQ ID NO: 8248 - protein, 223 aa, unidentified
  source 1..223: note = Flavobacterium pallidum
  REGION 1..223: note = tr|A0A2S1SKT8|A0A2S1SKT8_9FLAO GTP cyclohydrolase 1; OS = Flavobacterium pallidum OX=2172098 GN=folE PE=3 SV=1
MSRTEDSHDEIGNNHIATSATNPVRKDAFDLTDDQKIEAIKKDVESILLTLGIDLTDDSLKGTPNRVAKMFVKEVFGGLNPNKKPGASTFQNHYKYGEMLVEKNITLYSTCEHHLLPIIGRAHIAYISKGTVVGLSKMNRIVDYFAKRPQVQERLTMQIVQELQKVLNTEDVACVIDAKHLCVNSRGIRDIESSTVTSEFGGKFKEAQARREFLDYIKLDTKF

SEQ ID NO: 8249 - protein, 199 aa, unidentified
  source 1..199: note = Flavobacterium pallidum
  REGION 1..199: note = tr|A0A2S1SK62|A0A2S1SK62_9FLAO GTP cyclohydrolase 1; OS = Flavobacterium pallidum OX=2172098 GN=folE PE=3 SV=1
MSGYKKVDQYDEKATEELAGNVKSVLEILGEDINREGLQKTPERAAKAYQFLTQGYDVNPLEILKAALFEEDHKQMVVVKNIEVYSMCEHHLLPFFGKVHVAYIPNGKIVGLSKIPRIVEAFARRFQVQERLTDQIKECIQTALEPHGVAVVMECQHMCMQMRGIQKQNSVTTTSSFNGAFEEDRTRKEFISLISNKLN

SEQ ID NO: 8250 - protein, 223 aa, Flavobacterium pectinovorum
  REGION 1..223: note = tr|A0A1M6ZJB7|A0A1M6ZJB7_9FLAO GTP cyclohydrolase 1; OS = Flavobacterium pectinovorum OX=29533 GN=folE PE=3 SV=1
MTNNEDFLDEIGDNHFSSNAKNPVRQDAFDLTDDEKIEKIKKDVENILQTLGMDLTDDSIKGTPNRVAKMFVKEIFGGLNPAKQPKASTFDNNYKYGEMLVEKNITVYSTCEHHLLPIIGRAHVAYISSGRVIGLSKMNRIVEYYAKRPQVQERLTMQIVQELQKALGTEDVACVIDAKHLCVNSRGIKDIESSTVTSEFGGKFKDPQTKREFLDYIKLETQF

SEQ ID NO: 8251 - protein, 223 aa, Flavobacterium pectinovorum
  REGION 1..223: note = tr|A0A502EVU4|A0A502EVU4_9FLAO GTP cyclohydrolase 1; OS = Flavobacterium pectinovorum OX=29533 GN=folE PE=3 SV=1
MINNEDFLDEIGDNHFSSNAKNPVRPDAFDLSDDEKIERIKKDVENILQTLGMDLTDDSIKGTPNRVAKMFVKEIFGGLNPSKQPKASTFDNNYKYGEMLVEKNITVYSTCEHHLLPIIGRAHVAYISSGRVIGLSKMNRIVEYYAKRPQVQERLTMQIVQELQKALGTEDVACIIDAKHLCVNSRGIKDIESSTVTSEFGGKFKDPQTKRELLDYIKLDTQF

SEQ ID NO: 8252 - protein, 223 aa, Flavobacterium phragmitis; identical to SEQ ID NO: 8185
  REGION 1..223: note = tr|A0A1I1TWA7|A0A1I1TWA7_9FLAO GTP cyclohydrolase 1; OS = Flavobacterium phragmitis OX=739143 GN=folE PE=3 SV=1

SEQ ID NO: 8253 - protein, 223 aa, Flavobacterium psychrolimnae
  REGION 1..223: note = tr|A0A366B488|A0A366B488_9FLAO GTP cyclohydrolase 1; OS = Flavobacterium psychrolimnae OX=249351 GN=folE PE=3 SV=1
MIKNEEFQDEIGDNHISLSAKNPVRDDAFDISDDEKIEKIKKDVESILITLGMDLTDDSLKGTPNRVAKMFVKEIFGGLNPAKKPKASTFDNNYKYGEMLVEKNIIVYSTCEHHLLPIIGRAHVAYISNGTVIGLSKMNRIVEYYAKRPQVQERLTMQIVQELQIALGTEDVACVIDAKHLCVNSRGISDIESSTVTSEFGGKFRDAVTRREFLDYIKLETKF

SEQ ID NO: 8254 - protein, 199 aa, Flavobacterium psychrolimnae
  REGION 1..199: note = tr|A0A366B768|A0A366B768_9FLAO GTP cyclohydrolase 1; OS = Flavobacterium psychrolimnae OX=249351 GN=folE PE=3 SV=1
MKSYEKIEQYDTEITDALADNYKVIIENLGEDVTREGLEKTPERVAKAMQYLTHGYGLDPLEILKSAMFTEDHQQMIVVKDIEVYSMCEHHMLPFFGKAHVAYIPNGKIVGLSKIPRVVDAFARRMQVQERLTDQIKNCIQDALNPLGVAVVIEAQHMCMQMRGIQKQNSVTTTSSFTGAFEKDKTRKEFISLVSNKLS

SEQ ID NO: 8255 - protein, 223 aa, Flavobacterium psychrophilum
  REGION 1..223: note = tr|A0A076P3C2|A0A076P3C2_FLAPS GTP cyclohydrolase 1; OS = Flavobacterium psychrophilum OX=96345 GN=folE PE=3 SV=1
MSILTDKEITEILGDNHQMTSANSPIRSDAFVKTDDQKMQNIEKHFYDIMQELGLDMTDDSLQGTPHRVAKMFIQEIFSGLDPKNKPTISTFDNEYHYDKMLVEANISFNSTCEHHFLPIFGKAHIGYISSGKVIGLSKLNRIVDYFSRRPQVQERLIMQIFNDLKIALNTENVIVVMEAKHLCVSSRGIKHESSFTSTIQYGGIFNEKENRNDFFNMINSEK

SEQ ID NO: 8256 - protein, 223 aa, Flavobacterium psychrophilum
  REGION 1..223: note = tr|A6GX79|A6GX79_FLAPJ GTP cyclohydrolase 1; OS = Flavobacterium psychrophilum (strain JIP02/86 / ATCC 49511) OX=402612 GN=folE2 PE=3 SV=1
MAHNDDFQDEIGNNHIATNAKNPVREDAFLLTDDQKIDSIKKDVENILQTLGMDLTDDSLSGTPNRVAKMFVKEIFGGLNPERKPKPSTFDNNYKYGEMLVEKNIVVYSTCEHHLLPIIGRAHVAYISKGTVIGLSKMNRIVEYYSKRPQVQERLTMQIVQELQIALGTDDVACVIDAKHLCVNSRGIKDIESSTVTSEFGGKFKNLDTKREFLDYIKLETKF

SEQ ID NO: 8257 - protein, 223 aa, Flavobacterium reichenbachii
  REGION 1..223: note = tr|A0A085ZNY5|A0A085ZNY5_9FLAO GTP cyclohydrolase 1; OS = Flavobacterium reichenbachii OX=362418 GN=folE PE=3 SV=1
MINNEEFLDEIGDNHFSSNAQNPVRQDAFDLSDDEKIERIKKDVENILQTLGMDLTDDSIKGTPNRVAKMFVKEIFGGLNPSKQPKASTFDNNYKYGEMLVEKNITVYSTCEHHLLPIIGRAHVAYISSGRVIGLSKMNRIVEYYAKRPQVQERLTMQIVQELQKALGTEDVACVIDAKHLCVNSRGIKDIESSTVTSEFGGKFKDPQTKREFLDYIKLDTQF

SEQ ID NO: 8258 - protein, 223 aa, Flavobacterium resistens
  REGION 1..223: note = tr|A0A521BJC3|A0A521BJC3_9FLAO GTP cyclohydrolase 1; OS = Flavobacterium resistens OX=443612 GN=folE PE=3 SV=1
MINNEDFLDEIGDSHFSSNAKNPLRADAFDITDEEKIEKIKKDVENILQTLGMDLTDDSIKGTPNRVAKMFVKEIFGGLNPSKQPKASTFDNNYKYGEMLVEKNITVYSTCEHHLLPIIGRAHVAYISSGRVIGLSKMNRIVEYYAKRPQVQERLTMQIVQELQKALGTEDVACVIDAKHLCVNSRGIKDIESSTVTSEFGGKFKDAQTKREFLDYIKLDTQF

SEQ ID NO: 8259 - protein, 223 aa, Flavobacterium rivuli
  REGION 1..223: note = tr|A0A0A2M010|A0A0A2M010_9FLAO GTP cyclohydrolase 1; OS = Flavobacterium rivuli WB 3.3-2 = DSM 21788 OX=1121895; GN = folE PE=3 SV=1
MIHNDDSLDEIGESHIGTSAQTPLRSDAFAIDDDQKIALIKKDVENILLTLGMDLTDDSLKGTPNRVAKMFVKEIFGGLNPAKKPSSSTFDNKYKYGEMLVEKNITVYSTCEHHLLPIVGRAHVAYISNGTVVGLSKMNRIVDYFSKRPQVQERLTIQIVDELKKVLGTDDVACVIDAKHLCVNSRGIRDIESSTVTSEFGGKFKNETVRREFLDYIKLDTQF

SEQ ID NO: 8260 - protein, 223 aa, Flavobacterium saccharophilum; identical to SEQ ID NO: 8162
  REGION 1..223: note = tr|A0A1M7M2E5|A0A1M7M2E5_9FLAO GTP cyclohydrolase 1; OS = Flavobacterium saccharophilum OX=29534 GN=folE PE=3 SV=1

SEQ ID NO: 8261 - protein, 223 aa, Flavobacterium saliperosum
  REGION 1..223: note = tr|A0A1G4W0M7|A0A1G4W0M7_9FLAO GTP cyclohydrolase 1; OS = Flavobacterium saliperosum OX=329186 GN=folE PE=3 SV=1
MENQTEKELFEIIGDDHQMTSIETPLRPDAFLKSDEEKMVVIEQHFKAIMEALGLDLTDDSLMGTPHRVAKMYVQEIFSGLHPDNRPKMSVFDNSYNYDKMLVEANIHFNSTCEHHFLPIIGKAHIAYVSGGKVIGLSKLNRIVDYFARRPQVQERMTIQIYNELCEVLHTEDVIVVLEASHLCVSSRGIKDISSYTTTLQYGGVFEEKEMRNDFFNLLKKEQ

SEQ ID NO: 8262 - protein, 223 aa, Flavobacterium saliperosum
  REGION 1..223: note = tr|A0A1G4VUE2|A0A1G4VUE2_9FLAO GTP cyclohydrolase 1; OS = Flavobacterium saliperosum OX=329186 GN=folE PE=3 SV=1
MIHNDDLNDPLGENHVGTNAQTPLRSNAFDITDDEKISLIKKDVENILNTLGLDLTDDSLKGTPNRVAKMFVKEIFGGLHPNKKPSSSTFENKYKYGEMLVEKNITVYSTCEHHLLPIVGRAHVAYISNGTVVGLSKMNRIVDYFAKRPQVQERLTIQIVQELQRVLNTDDVACVIDAKHLCVNSRGIRDIESSTVTAEFGGKFKEDKVRREFLDYIKLDTTF

SEQ ID NO: 8263 - protein, 224 aa, unidentified
  source 1..224: note = Flavobacterium sediminis
  REGION 1..224: note = tr|A0A2U8QRY6|A0A2U8QRY6_9FLAO GTP cyclohydrolase 1; OS = Flavobacterium sediminis OX=2201181 GN=folE PE=3 SV=1
MIQNEDLQDEIGNNHIATSAQTPLREDAFDLSDDQKIELIKKDVENILHTLGMDLTDDSLKGTPNRVAKMFVREIFSGLNPNKKPSSSTFENKYKYGEMLVEKNIVVYSTCEHHLLPIVGRAHVAYISNGTVVGLSKMNRIVDYFAKRPQVQERLTIQIVQELQKVLNTEDVACVIDAKHLCVNSRGIRDIESSTVTAEFGGQFKDKNVRKEFLDYIKLETKFH

SEQ ID NO: 8264 - protein, 203 aa, Flavobacterium segetis
  REGION 1..203: note = tr|A0A1M5EFC3|A0A1M5EFC3_9FLAO GTP cyclohydrolase 1; OS = Flavobacterium segetis OX=271157 GN=folE PE=3 SV=1
MIKEMKSYEKIEQYDPEITEALAGNYKIIIDGLGEDVTREGLEKTPERVAKAMQYLTHGYGLDPLEILKSAMFTEDHRQMIVVKDIEVYSMCEHHMLPFFGKAHVAYIPNGKIVGLSKIPRVVDAFARRMQVQERLTDQIKDCIQEALNPLGVAVVIEAQHMCMQMRGIQKQNSVTTTSSFTGAFEKNKTRKEFISLLSNKLS

SEQ ID NO: 8265 - protein, 223 aa, Flavobacterium segetis
  REGION 1..223: note = tr|A0A1M5GNY6|A0A1M5GNY6_9FLAO GTP cyclohydrolase 1; OS = Flavobacterium segetis OX=271157 GN=folE PE=3 SV=1
MINKEEFQDEIGDNHVSLSAKNPLRDDAFDISDEEKIEKIKKDFESILQTLGMDLTDDSLKGTPNRVAKMFVKEIFAGLNPKNKPKASTFENNYKYGEMLVEKNIIVYSTCEHHLLPIIGRAHVAYISNGRVIGLSKMNRIVQYYSKRPQVQERLTMQIVQELQIALGTDDVACVIDAKHLCVNSRGISDIESSTVTSEFGGKFKDPQARLEFLDYIKMDTKF

SEQ ID NO: 8266 - protein, 223 aa, unidentified
  source 1..223: note = Flavobacterium seoulense
  REGION 1..223: note = tr|A0A066WZB1|A0A066WZB1_9FLAO GTP cyclohydrolase 1; OS = Flavobacterium seoulense OX=1492738 GN=folE PE=3 SV=1
MIHNEDLHDEIGDNHIGSSAKNPLRDDAFAISDDEKIEKIKKDVENILLTLGMDLTDDSLKGTPNRVAKMFVKEIFGGLNPVKKPKASTFDNNYKYGEMLVEKNIIVYSTCEHHLLPIIGRAHVAYISNGTVIGLSKMNRIVEYYSKRPQVQERLTMQIVQELQKALGTEDVACVIDAKHLCVNSRGISDIESSTVTSEFGGKFKEDKVRREFLDYIKLETKF

SEQ ID NO: 8267 - protein, 223 aa, Flavobacterium sinopsychrotolerans
  REGION 1..223: note = tr|A0A1H8HJV3|A0A1H8HJV3_9FLAO GTP cyclohydrolase 1; OS = Flavobacterium sinopsychrotolerans OX=604089 GN=folE; PE = 3 SV=1
MIKNEEFQDEIGDNHISLSAKNPVRDDAFDISEDEKIEKIKKDVESILITLGMDLTDDSLKGTPNRVAKMFVKEIFGGLNPAKKPKASTFDNNYKYGEMLVEKNIIVYSTCEHHLLPIIGRAHVAYISSGTVIGLSKMNRIVEYYAKRPQVQERLTMQIVQELQIALGTEDVACVIDAKHLCVNSRGISDIESSTVTSEFGGKFKDSVTRREFLDYIKLETKF

SEQ ID NO: 8268 - protein, 203 aa, Flavobacterium sinopsychrotolerans
  REGION 1..203: note = tr|A0A1H8NMZ1|A0A1H8NMZ1_9FLAO GTP cyclohydrolase 1; OS = Flavobacterium sinopsychrotolerans OX=604089 GN=folE; PE = 3 SV=1
MIKEMKSYEKIEQYDTEITEALADNYKVIIENLGEDVTREGLEKTPERVAKAMQYLTHGYGLDPLEILKSAMFTEDHQQMIVVKDIEVYSMCEHHMLPFFGKAHVAYIPNGKIVGLSKIPRVVDAFARRMQVQERLTDQIKNCIQDALNPLGVAVVIEAQHMCMQMRGIQKQNSVTTTSSFTGAFEKDKTRKEFISLVSNKLS

SEQ ID NO: 8269 - protein, 223 aa, Flavobacterium sp.
  REGION 1..223: note = tr|A0A344LSY0|A0A344LSY0_9FLAO GTP cyclohydrolase 1; OS = Flavobacterium sp. HYN0086 OX=2249356 GN=folE PE=3 SV=1
MINNEDFLDEIGDSHFSSNAKNPLREDAFDLTDDEKIEKIKKDVENILQTLGMDLTDDSIKGTPNRVAKMFVKEIFGGLNPAKQPKASTFDNNYKYGEMLVEKNITVYSTCEHHLLPIIGRAHVAYISSGRVIGLSKMNRIVEYYAKRPQVQERLTMQIVQELQKALGTEDVACVIDAKHLCVNSRGIKDIESSTVTSEFGGKFKDPQTKREFLDYIKLETQF

SEQ ID NO: 8270 - protein, 223 aa, Flavobacterium sp.
  REGION 1..223: note = tr|A0A244D3I7|A0A244D3I7_9FLAO GTP cyclohydrolase 1; OS = Flavobacterium sp. AJR OX=1979369 GN=folE PE=3 SV=1
MINNEDFLDEIGDNHIGSSAQNPIREDAFAITDDEKIEKIKKDVENILLTLGMDLTDDSLKGTPNRVAKMFVKEIFGGLNPIRKPKASTFDNNYKYGEMLVEKNITLYSTCEHHLLPIIGRAHVAYISNGRVIGLSKMNRIVEYYSKRPQVQERLTMQIVQELQKALGTEDVACVIDAKHLCVNSRGIKDIESSTVTSEFGGKFKDPQTRREFLDYIKLETQF

SEQ ID NO: 8271 - protein, 223 aa, unidentified
  source 1..223: note = Flavobacterium spartansii
  REGION 1..223: note = tr|A0A1S1J968|A0A1S1J968_9FLAO GTP cyclohydrolase 1; OS = Flavobacterium spartansii OX=1278819 GN=folE PE=3 SV=1
MINNEDFLDEIGDNHFSSNAKNPLRPDAFDLSDDEKIEKIKKDVENILQTLGMDLTDDSIKGTPNRVAKMFVKEIFGGLNPSKQPKASTFDNNYKYGEMLVEKNITVYSTCEHHLLPIIGRAHVAYISNGRVIGLSKMNRIVEYYAKRPQVQERLTMQIVQELQKALGTEDVACVIDAKHLCVNSRGIKDIESSTVTSEFGGRFKDPQIKRELLDYIKLDTQF

SEQ ID NO: 8272 - protein, 223 aa, Flavobacterium subsaxonicum
  REGION 1..223: note = tr|A0A0A2MWK2|A0A0A2MWK2_9FLAO GTP cyclohydrolase 1; OS = Flavobacterium subsaxonicum WB 4.1-42 = DSM 21790; OX = 1121898 GN=folE PE=3 SV=1
MIHSDDNRDEIGENHIATSAKTPLREDAFEKSDDDKIASIKKDVENILLTLGMDLTDDSLKGTPNRVAKMFVKEIFGGLNPAKKPSSSTFDNKYKYGEMLVEKNITVYSTCEHHLLPIVGRAHVAYISNGTVVGLSKMNRIVDYFAKRPQVQERLTIQIVQELKNVLGTEDVACVIDAKHLCVNSRGIRDIESSTVTSEFGGKFKNENVRREFLDYIKLDTQF

SEQ ID NO: 8273 - protein, 222 aa, Flavobacterium succinicans
  REGION 1..222: note = tr|A0A1I4UDD0|A0A1I4UDD0_9FLAO GTP cyclohydrolase 1; OS = Flavobacterium succinicans OX=29536 GN=folE PE=3 SV=1
MNTVLDRELIEILGDNHQATSADTPLRADAFVKSDAQKMERIEHHFHAIMEEMGLDMTDDSLSGTPFRVAKMYIQEIFSGLDPKNKPKISVFENTYHYDKMLVEANINFNSTCEHHFLPIVGKAHIGYVSSGKVIGLSKLNRIVDYYSRRPQVQERLIMQIFNELKTVLETDNVIIVMEAKHLCVSSRGIKDETSFTSTIQYGGIFNEKENRNDFFNMIKQE

SEQ ID NO: 8274 - protein, 223 aa, Flavobacterium succinicans
  REGION 1..223: note = tr|A0A1I4TI56|A0A1I4TI56_9FLAO GTP cyclohydrolase 1; OS = Flavobacterium succinicans OX=29536 GN=folE PE=3 SV=1
MINNEEFHDEIGNNHISTSAKNPVRDDAFSISDEEKIERIKKDVENMLLTLGMDLTDDSLKGTPNRVAKMFVKEIFGGLNPNKKPKASTFDNNYKYGEMLVEKNITLYSTCEHHLLPIIGRAHVAYISNGTVIGLSKMNRIVEYYAKRPQVQERLTMQIVQELQNALGTEDVACVIDAKHLCVNSRGIKDIESSTVTSEFGGKFKEAQTRREFLDYIKLETKF

SEQ ID NO: 8275 - protein, 223 aa, Flavobacterium suncheonense
  REGION 1..223: note = tr|A0A0A2MEM4|A0A0A2MEM4_9FLAO GTP cyclohydrolase 1; OS = Flavobacterium suncheonense GH29-5 = DSM 17707; OX = 1121899 GN=folE PE=3 SV=1
MIHNDDLNDQLGDDHIATSAETPLRSDAFEMSDEEKINSIKKDVENILNTLGLDLTDDSLKGTPNRVAKMFVKEIFGGLHPHKKPGSSTFENKYKYGEMLVEKNITVYSTCEHHLLPIVGRAHVAYISNGTVVGLSKMNRIVDYYAKRPQVQERLTIQIVQELQRVLNTEDVACVIDAKHLCVNSRGIRDIESSTVTAEFGGKFKEDKVRREFLDYIKLDTTF

SEQ ID NO: 8276 - protein, 223 aa, Flavobacterium swingsii
  REGION 1..223: note = tr|A0A1I0WAR5|A0A1I0WAR5_9FLAO GTP cyclohydrolase 1; OS = Flavobacterium swingsii OX=498292 GN=folE PE=3 SV=1
MAHNDDFQDEIGNNHIATSAKNPVRKDAFVLTDDQKIESIKKDVENILQTLGMDLTDDSLSGTPNRVAKMFVKEIFGGLNPNKKPKPSTFDNNYKYGEMLVEKNIVVYSTCEHHLLPIIGRAHVAYISNGTVIGLSKMNRIVEYYSKRPQVQERLTMQIVQELQIALGTDDVACVIDAKHLCVNSRGIKDIESSTVTSEFGGKFKNLETRREFLDYIKLDTKF

SEQ ID NO: 8277 - protein, 223 aa, Flavobacterium terrae
  REGION 1..223: note = tr|A0A1M6H4M0|A0A1M6H4M0_9FLAO GTP cyclohydrolase 1; OS = Flavobacterium terrae OX=415425 GN=folE PE=3 SV=1
MTQNDEFQEEIGNNHIATSATNPLRKDAFELTDDEKIASIKKDVENILNTLGMDLTDDSLSGTPNRVAKMFVKEIFGGLHPNKKPGSSTFANNYKYGEMLVEKNITVYSTCEHHLLPIIGRAHVAYISNGKVIGLSKMNRIVDYYAKRPQVQERLTMQIVQELQAALGTQDVACVIDAKHLCVNSRGIKDIESSTVTAEFGGKFKEDKTRREFLDYIKLDTKF

SEQ ID NO: 8278 - protein, 228 aa, Flavobacterium terrae
  REGION 1..228: note = tr|A0A1M6BQS5|A0A1M6BQS5_9FLAO GTP cyclohydrolase 1; OS = Flavobacterium terrae OX=415425 GN=folE PE=3 SV=1
MTKNPEIDKSKLVSFSIDEIGDNHLFTSVETPIKPDAFVMADEEKKEKIAFHFREIMEVLGLDLNDDSLKGTPQRVAKMYVDEIFCGLNPANKPQVALFENKYQYNQMLLEKNITFYSNCEHHFVPIYGKIHVAYVSKGKVIGLSKINRIVQYFAQRPQVQERLTMQIGLELQKILETEDIAVIVDAKHLCVSSRGIKDESSATVTSYYGGEFQNEQKVIELHNYLKI

SEQ ID NO: 8279 - protein, 223 aa, Flavobacterium terrigena
  REGION 1..223: note = tr|A0A1H6RVW4|A0A1H6RVW4_9FLAO GTP cyclohydrolase 1; OS = Flavobacterium terrigena OX=402734 GN=folE PE=3 SV=1
MINNEEHNDEIGNNHIATNTHNPIREDAFDISDEEKITRIKKDVENILLTLGMDLTDDSLKGTPNRVAKMFVKEIFGGLHPNKKPSASTFDNKYKYGEMLVEKNIVVYSTCEHHLLPIYGRAHIAYISNGTVVGLSKMNRIVEYYAKRPQVQERLTIQIVKELQSVLNTEDVACVIDAKHMCVNSRGIKDIESSTVTSEFGGKFKDEKTKREFLDYIKLDTRF

SEQ ID NO: 8280 - protein, 188 aa, unidentified
  source 1..188: note = [Flavobacterium] thermophilum
  REGION 1..188: note = tr|A0A377G2X6|A0A377G2X6_9BACL GTP cyclohydrolase 1; OS = [Flavobacterium] thermophilum OX=1414643 GN=folE PE=3; SV = 1
MPEINFAQIEYAVRLILEAIGEDPNREGLVDTPKRVAKMYAEVFSGLHKDPREYFQTVFSEEHEELVLVKDIPFYSMCEHHLVPFFGVAHVAYIPREGKVTGLSKLARAVEAVARRPQLQERITATVADSIVEALEPHGVMVVVEAEHMCMTMRGVKKPGAKTVTTAVRGVFETDVAARSEVLSLIKA

SEQ ID NO: 8281 - protein, 203 aa, Flavobacterium tiangeerense
  REGION 1..203: note = tr|A0A562L605|A0A562L605_9FLAO GTP cyclohydrolase 1; OS = Flavobacterium tiangeerense OX=459471 GN=folE PE=3 SV=1
MIKEMKSYEKIEQYDTEITNALADNYKVIIDNLGEDVTREGLEKTPERVAKAMQYLTHGYGLDPLEILKSAMFTEDHQQMIVVKDIEVYSMCEHHMLPFFGKAHVAYIPNGKIVGLSKIPRVVDAFARRMQVQERLTDQIKNCIQEALNPLGVAVVIEAQHMCMQMRGIQKQNSVTTTSSFTGAFEKDKTRKEFISLVSNKLS

SEQ ID NO: 8282 - protein, 223 aa, unidentified
  source 1..223: note = Flavobacterium tibetense
  REGION 1..223: note = tr|A0A365P0G6|A0A365P0G6_9FLAO GTP cyclohydrolase 1; OS = Flavobacterium tibetense OX=2233533 GN=folE PE=3 SV=1
MNTNEDLHDEIGNNHVATSAETPLRKDAFQLTDDQKIELIKKDVESILNTLGMDLTDDSLKGTPNRVAKMFVKEIFGGLNPNKKPGSSTFDNKYKYNEMLVEKNIVVYSTCEHHLLPIVGRAHVAYISNGTVVGLSKMNRIVDYYAKRPQVQERLNIQIVQELQKVLGTEDVACVIDAKHLCVNSRGIRDIESSTVTAEFGGRFKEEKVRREFLDYIKLDTQF

SEQ ID NO: 8283 - protein, 222 aa, unidentified
  source 1..222: note = Flavobacterium tibetense
  REGION 1..222: note = tr|A0A365P2V0|A0A365P2V0_9FLAO GTP cyclohydrolase 1; OS = Flavobacterium tibetense OX=2233533 GN=folE PE=3 SV=1
MNTTIEKEIFDIIGDNHQMTSAETPLRADAFDRTDNQKMEVIEHHFEIIMKELGLDLTDDSLKGTPHRVAKMFVKEIFSGLNPANKPKVSVFDNSYHYDKMLVEANISFNSTCEHHFLPIVGKAHVGYVSSGKVIGLSKLNRIVDYYARRPQVQERMVMQIFNELKTVLETENVMIVMEAEHLCVSSRGIKDESSFTSTLQYGGVFNQKEFRDDFYKLIQRT

SEQ ID NO: 8284 - protein, 223 aa, unidentified
  source 1..223: note = Flavobacterium ummariense
  REGION 1..223: note = tr|A0A1I4W0T9|A0A1I4W0T9_9FLAO GTP cyclohydrolase 1; OS = Flavobacterium ummariense OX=913024 GN=folE PE=3 SV=1
MCKSDALHEDIGDNHIGTSDYTPLKADAFSISDDEKIELIKKDVENILNTLGMDLTDDSLKGTPNRVAKMFVKEIFGGLNPAKKPSSSTFDNKYKYNEMLVEKNIVVYSTCEHHLLPIVGRAHVAYISNGKVVGLSKMNRIVDYYAKRPQVQERLTIQIVEELKRVLGTEDVACVVDAKHLCVNSRGIRDIESSTVTAEFSGAFKNDVTRREFLDYIKLDTQF

SEQ ID NO: 8285 - protein, 236 aa, unidentified
  source 1..236: note = Flavobacterium urocaniciphilum
  REGION 1..236: note = tr|A0A1H9B8E8|A0A1H9B8E8_9FLAO GTP cyclohydrolase 1; OS = Flavobacterium urocaniciphilum OX=1299341 GN=folE PE=3; SV = 1
MYIFAVICKSHFIMIHNEENTDEIGNNHIATSANTPLRNDAFDITDDEKINLIKKDVEHILTTLGMDLTDDSLKGTPNRVAKMFVKEIFGGLHPNKKPSASTFENKYKYGEMLVEKNIVVYSTCEHHLLPIYGRAHIAYISNGTVVGLSKMNRIVEYYAKRPQVQERLTIQIVKELQSVLNTEDVACIIDAKHMCVNSRGIKDIDSSTVTAEYGGKFQDENVKREFLEFIKLDTRF

SEQ ID NO: 8286 - protein, 203 aa, Flavobacterium urumqiense
  REGION 1..203: note = tr|A0A1H5V2H4|A0A1H5V2H4_9FLAO GTP cyclohydrolase 1; OS = Flavobacterium urumqiense OX=935224 GN=folE PE=3 SV=1
MIKEIKSYEKIEQYDTEITEALADNYKVIIENLGEDVTREGLQKTPERAAKAMQYLTHGYGLDPLEILKSAMFTEDHKQMIVVKDIEVYSMCEHHMLPFFGKAHVAYIPNGKIVGLSKIPRVVDAFARRMQVQERLTDQIKNCIQEALNPFGVAVVIEAQHMCMQMRGIQKQNSVTTTSSFTGAFEKDKTRKEFISLVSNKLS

SEQ ID NO: 8287 - protein, 223 aa, Flavobacterium urumqiense
  REGION 1..223: note = tr|A0A1H6AQI5|A0A1H6AQI5_9FLAO GTP cyclohydrolase 1; OS = Flavobacterium urumqiense OX=935224 GN=folE PE=3 SV=1
MINNEEFQDEIGDNHIGLSAKNPVRKDAFAISDEEKIEKIKKDVENILLTLGMDLTDDSMKGTPNRVAKMFVKEIFGGLNPARKPAASTFDNNYKYGEMLVEKNIIVYSTCEHHLLPIIGRAHVAYISNGRVIGLSKMNRIVEYYAKRPQVQERLTMQIVQELQSALGTEDVACIIDAKHLCVNSRGISDIESSTVTSEFGGKFKNDQTRREFLDYIKLETKF

SEQ ID NO: 8288 - protein, 199 aa, Flavobacterium weaverense
  REGION 1..199: note = tr|A0A3L9ZX84|A0A3L9ZX84_9FLAO GTP cyclohydrolase 1; OS = Flavobacterium weaverense OX=271156 GN=folE PE=3 SV=1
MKSYEKIEQYDTEVTAALAGNYKTIIGTLGEDVDREGLEKTPERVAKAMQYLTHGYGLDPLEILKSAMFTEDHRQMIVVKDIEVYSMCEHHMLPFFGKAHVAYIPNGKIVGLSKIPRVVDAFARRMQVQERLTDQIKDCIQEALQPLGVAVVIEAQHMCMQMRGIQKQNSVTTTSSFTGAFEKNKTRKEFISLVSNKLS

SEQ ID NO: 8289 - protein, 223 aa, Flavobacterium weaverense
  REGION 1..223: note = tr|A0A3M0A147|A0A3M0A147_9FLAO GTP cyclohydrolase 1; OS = Flavobacterium weaverense OX=271156 GN=folE PE=3 SV=1
MINKEEFQDEIGDNHVSLSAKNPVRDDAFAISDDEKIEKIKKDVESILLTLGMDLTDDSLKGTPNRVAKMFVKEIFGGLNPEKKPKASTFDNNYKYGEMLVEKNIIVYSTCEHHLLPIIGRAHVAYISNGRVIGLSKMNRIVEYYAKRPQVQERLTMQIVQELQLALGTEDVACVIDAKHLCVNSRGISDIESSTVTSEFGGKFKDSVTRREFLDYIKLETKF

SEQ ID NO: 8290 - protein, 203 aa, Flavobacterium xanthum
  REGION 1..203: note = tr|A0A1M6X4W5|A0A1M6X4W5_9FLAO GTP cyclohydrolase 1; OS = Flavobacterium xanthum OX=69322 GN=folE PE=3 SV=1
MIKELKSYEKIEQYDAEITASLADNYKTIIDNLGEDVTREGLEKTPERVAKAMQYLTHGYGLDPLEILQSAMFTEDHKQMIVVKDIEVYSMCEHHMLPFFGKAHVAYIPNGKIVGLSKIPRIVDAFARRMQVQERLTDQIKDCIQEALNPLGVAVVIEAQHMCMQMRGIQKQNSVTTTSSFTGAFEKDKTRKEFISLISNKFS

SEQ ID NO: 8291 - protein, 223 aa, Flavobacterium xanthum; identical to SEQ ID NO: 8246
  REGION 1..223: note = tr|A0A1M7G6D2|A0A1M7G6D2_9FLAO GTP cyclohydrolase 1; OS = Flavobacterium xanthum OX=69322 GN=folE PE=3 SV=1

SEQ ID NO: 8292 - protein, 204 aa, Flavobacterium xinjiangense
  REGION 1..204: note = tr|A0A1M7PCY4|A0A1M7PCY4_9FLAO GTP cyclohydrolase 1; OS = Flavobacterium xinjiangense OX=178356 GN=folE PE=3 SV=1
MILSKMKSYEKIEQYDTELTESLAENYKTIIENLGEDVNREGLEKTPERVAKAMQYLTHGYELNPLEILKSALFTEDHQQMIVVKDIEVYSMCEHHMLPFFGKAHVAYIPNGKIVGLSKIPRIVDAFARRMQVQERLTDQIKNCIQEALNPLGVAVVIEAQHMCMQMRGIQKQNSVTTTSSFTGAFEKDKTRKEFISLVSNKLS

SEQ ID NO: 8293 - protein, 223 aa, Flavobacterium xinjiangense
  REGION 1..223: note = tr|A0A1M7P0Z0|A0A1M7P0Z0_9FLAO GTP cyclohydrolase 1; OS = Flavobacterium xinjiangense OX=178356 GN=folE PE=3 SV=1
MINNEEFQDEIGDNHIGLSAKNPVREDAFAISDEEKIEKIKKDVENILLTLGMDLTDDSLKGTPNRVAKMFVKEIFGGLNPSKKPKASTFDNNYKYGEMLVEKNIIVYSTCEHHLLPIIGRAHVAYISNGRVIGLSKMNRIVEYYAKRPQVQERLTMQIVQELQIALGTEDVACVIDAKHLCVNSRGISDIESSTVTSEFGGKFKNDQTRREFLDYIKLETKF

SEQ ID NO: 8294 - protein, 199 aa, Flavobacterium xueshanense
  REGION 1..199: note = tr|A0A1I2HC84|A0A1I2HC84_9FLAO GTP cyclohydrolase 1; OS = Flavobacterium xueshanense OX=935223 GN=folE PE=3 SV=1
MKSYEKIEQYDTEITQALADNYKVIIENLGEDVTREGLEKTPERVAKAMQYLTHGYGLDPLEILKSAMFTEDHKQMIVVKDIEVYSMCEHHMLPFFGKAHVAYIPNGKIVGLSKIPRVVDAFARRMQVQERLTDQIKNCIQDALNPLGVAVVIEAQHMCMQMRGIQKQNSVTTTSSFTGAFEKDKTRKEFISLLSNKLS

SEQ ID NO: 8295 - protein, 223 aa, Flavobacterium xueshanense
  REGION 1..223: note = tr|A0A1I2DIA2|A0A1I2DIA2_9FLAO GTP cyclohydrolase 1; OS = Flavobacterium xueshanense OX=935223 GN=folE PE=3 SV=1
MIKNEEFQDELGDNHVSLSANNPVRDDAFDITDDEKIEKIKKDVESILITLGMDLTDDSLKGTPNRVAKMFVTEIFGGLNPAKKPKASTFDNNYKYGEMLVEKNIIVYSTCEHHLLPIIGRAHVAYISNGRVIGLSKMNRIVEYYSKRPQVQERLTMQIVQELQIALGTENVACVIDAKHLCVNSRGISDIESSTVTSEFGGKFKDSVTRREFLDYIKLETKF

SEQ ID NO: 8296 - protein, 233 aa, Flectobacillus sp.
  REGION 1..233: note = tr|A0A267T6C3|A0A267T6C3_9BACT GTP cyclohydrolase 1; OS = Flectobacillus sp. BAB-3569 OX=1509483 GN=folE PE=3 SV=1
MRQNETLLNTLLDNNGKLLLTDEEIGDDHISTSVDTPMRADAFELSDDEKIAQIEYHFRQIMETLGLDLTDDSLKGTPKRVAKMYVKEIFSGLDPKNKPSIALFENKYQYNEMLVEKNISFYSNCEHHFVPIFGKAHVAYIAEGKVVGLSKLNRIVQHYAKRPQVQERLTVQIAKDLQEILGTENVAVMIDAKHLCVASRGVKDDTSSTVTSYYGGKFQEESVRQEFLKYIGI

SEQ ID NO: 8297 - protein, 231 aa, Flexibacter flexilis
  REGION 1..231: note = tr|A0A1I1NK05|A0A1I1NK05_9BACT GTP cyclohydrolase 1; OS = Flexibacter flexilis DSM 6793 OX=927664 GN=folE PE=3; SV = 1
MSNIPPIKDITDLSQFSIDEIGDEHLFSSYETPLRSDAFALDDETKIQLIEERFRDIMDILGLDLTDDSLKGTPHRVAKMYVKEIFSGLNPANKPKVALFENKYRYDQMLVEKDITLFSNCEHHFVPIIGKAHVAYISNGQVIGLSKINRVVQYFAKRPQVQERLTVQIAKELQTMLKTEDVAVLIDAKHLCVSSRGVEDNSSATVTAHYSGKFRDEKTRAEFLAYVYNGK

SEQ ID NO: 8298 - protein, 223 aa, unidentified; identical to SEQ ID NO: 8161
  source 1..223: note = [Flexibacter] sp.
  REGION 1..223: note = tr|A0A1V2C4I9|A0A1V2C4I9_9FLAO GTP cyclohydrolase 1; OS = [Flexibacter] sp. ATCC 35103 OX=1937528 GN=folE PE=3; SV = 1

SEQ ID NO: 8299 - protein, 197 aa, unidentified
  source 1..197: note = [Flexibacter] sp.
  REGION 1..197: note = tr|A0A1V2B280|A0A1V2B280_9BACT GTP cyclohydrolase 1; OS = [Flexibacter] sp. ATCC 35208 OX=1936242 GN=folE PE=3; SV = 1
MAYKKVESYDEKVTSDLIEHYKNSISLLGEDVEREGLQKTPERVAKAMQYLTTGYQLDAREILNSAKFTESYSEMVIVKDIELYSLCEHHMLPFFGKAHIAYIPNGYITGLSKLARVVDVYARRLQVQERMTHQILDAIQDTLQPLGVAVVIEAQHLCMMMRGVQKQNSVTTTSAFSGQFEDGRTRSEFMRLLGHSI

SEQ ID NO: 8300 - protein, 195 aa, unidentified
  source 1..195: note = Flexilinea flocculi
  REGION 1..195: note = tr|A0A0S7BLY6|A0A0S7BLY6_9CHLR GTP cyclohydrolase 1; OS = Flexilinea flocculi OX=1678840 GN=folE PE=3 SV=1
MIQNTTDKNNTIRDAVGIILAAIGEDSTREGLIGTPDRVEKMFQEICSGYQADLVKIVNGAVFHEAAEGMILIRDIEFYSLCEHHLMPFFGKVHVAYIPDGKIIGLSKIPRIVDMYARRLQVQERMTHQIMEAIQSVLAPKGIAVVVEASHLCARMRGVKKEQAKLVTSLFTGVFDSNNTLRNEFFERLKMDVLL

SEQ ID NO: 8301 - protein, 260 aa, Flexistipes sinusarabici
  REGION 1..260: note = tr|A0A5D0ML68|A0A5D0ML68_FLESI GTP cyclohydrolase FolE2 OS=Flexistipes sinusarabici OX=2352 GN=folE2 PE=3; SV = 1
MLKDVQSLNDDRNLSIDKVGIKDILYPIVVKDKNKGKQHTVARIDMFVRLPHSFKGTHMSRFVEILNNYKADIDIRSFGDILDDMMGVLDSEVAGVEVRFPYFIEKKAPVSNLPSLMDYECEYTGYATKSEKDFVTTVKVPVVSVCPCSREISSAGAHNQRSYVKIKVRYNKMVWIEDLVNIAESSASAPIYSLLKREDEKYITETSYANPVFVEDIVRNIAEKLLKDDRITWFEVSSDNMESIHNHSAYALISRDKRKN

SEQ ID NO: 8302 - protein, 260 aa, Flexistipes sinusarabici
  REGION 1..260: note = tr|A0A5D0MLK7|A0A5D0MLK7_FLESI GTP cyclohydrolase FolE2 OS=Flexistipes sinusarabici OX=2352 GN=folE2 PE=3; SV = 1
MLKDVQSLNDDRNLSIDKVGIKDILYPIVVKDKNKGKQHTVARIDMFVKLPHSFKGTHMSRFVEILNNYKADIDIRSFGNILDDMMGVLDSEVAGVEVRFPYFIEKKAPASGLPSLMDYECEYTGYATKNEKDFVTTVKVPVVSVCPCSKEISSAGAHNQRSYVKIKVRYNKMVWIEDLVNIAESSASAPIYSLLKREDEKYITETSYANPVFVEDIVRNIAEKLLKDDRITWFEVSSDNMESIHNHSAYALISRDKRKN

SEQ ID NO: 8303 - protein, 195 aa, Flexivirga sp.
  REGION 1..195: note = tr|A0A3M9M940|A0A3M9M940_9MICO GTP cyclohydrolase 1; OS = Flexivirga sp. BO-16 OX=2294115 GN=folE PE=3 SV=1
MSTRPTVDLERAATAVRELLLALGEDPDREGLRDTPARVARAYAETFAGMWQTPEDALSRTFDVDHSELVIVRDIEVYSTCEHHLVPFHGVAHVGYIPAPDGRVTGLSKIARLVDVFAKRPQVQERLTTQIADALVDHLHARGVLVVVECEHLCMSMRGVRKPGALTITSAVRGQLTNAATRAEAMSLINAQSRR

SEQ ID NO: 8304 - protein, 181 aa, Fluoribacter bozemanae
  REGION 1..181: note = tr|A0A0W0RUA0|A0A0W0RUA0_FLUBO GTP cyclohydrolase 1; OS = Fluoribacter bozemanae OX=447 GN=folE PE=3 SV=1
MEKLYKELLIQLGEDVTREGLVDTPLRAANAMRYLTKGYNESLEEIINGALFDSDMSEMVIVKDIEMYSMCEHHLLPFLGKCHVGYIPNGKVIGLSKVARIVDYFARRLQIQERLTSEIASCLESITGARGVAVVIEAKHLCMMMRGVEKQNSIMTTSVMLGDMRNNPTSRAEFLTLTHNN

SEQ ID NO: 8305 - protein, 181 aa, Fluoribacter dumoffii
  REGION 1..181: note = tr|A0A377G5W2|A0A377G5W2_9GAMM GTP cyclohydrolase 1; OS = Fluoribacter dumoffii OX=463 GN=folE PE=3 SV=1
MEKLYKELLTQLGEDVTREGLIDTPARAANALRYLTKGYNENLEDIINDALFDSDMSEMVIVKDIEMYSMCEHHLLPFLGKCHVGYIPNGKVIGLSKIARVVDYFARRLQIQERLTTEIANCLESITGARGVAVVIEAKHLCMMMRGVEKQNSVMTTSVMLGDMRNNPTSRAEFLTLTQGK

SEQ ID NO: 8306 - protein, 181 aa, Fluoribacter gormanii
  REGION 1..181: note = tr|A0A377GFX0|A0A377GFX0_9GAMM GTP cyclohydrolase 1; OS = Fluoribacter gormanii OX=464 GN=folE PE=3 SV=1
MEKLYKELLIQLGEDISRQGLIDTPARAANAMRYLTKGYNESLDDIINGALFDSDMNEMVIVKDIEMYSMCEHHLLPFLGKCHVGYIPNGKVIGLSKVARIVDYFARRLQIQERLTSEIANCLESITGARGVAVVIEAKHLCMMMRGVEKQNSVMTTSVMLGDMRNSSTSRAEFLTLTQNK

SEQ ID NO: 8307 - protein, 368 aa, unidentified
  source 1..368: note = Fluviibacterium aquatile
  REGION 1..368: note = tr|A0A4R6B1Z3|A0A4R6B1Z3_9RHOB GTP cyclohydrolase FolE2 OS=Fluviibacterium aquatile OX=2552766 GN=folE2 PE=3; SV = 1
MNIHSPVLDRDPTPQDAAEALLLLKKWVGQASEAELDGLDPALRKLTVGRAADAAYPDLSRQYPEDFLVTPQYKDALPDLQNGPASLIKGARQQIQHVGISNFRLPIRFQTRDNGDLTLETSVTGTVSLEAEKKGINMSRIMRTFYGHAEKTFSFGVIEAALDDYKTDLESFDARIQMRFSFPVKIDSLRSGLSGYQYYDIALEVVEHGGVRRRMVHLDYVYSSTCPCSLELSEHARRTRGQLATPHSQRSVARVSVELAADAATLWFEDLIDMCRSAVPTETQVMVKREDEQAFAELNAANPIFVEDAARLFCAELLKDPRVGDFRVMASHQESLHSHDAVSILTEGDTFAADSLDPRTFSTLFHVG

SEQ ID NO: 8308 - protein, 180 aa, unidentified
  source 1..180: note = Fluviicoccus keumensis
  REGION 1..180: note = tr|A0A4Q7Z987|A0A4Q7Z987_9GAMM GTP cyclohydrolase 1; OS = Fluviicoccus keumensis OX=1435465 GN=folE PE=3 SV=1
MEKAYASIISAIGEDLTRPGLADTPKRAAKAFQYLCKGYDEDLDTLVNNAIFPSDNDEMVIVKDIELYSLCEHHLLPFIGKCHVAYLPDGKVLGLSKFARIVDMFARRLQIQENLTKQIADAVLQVTGAKGVAVTIEAKHMCMMMRGVEKQNSVMKSSVMLGRFRENPQTRNEYLSLIAG

SEQ ID NO: 8309 - protein, 198 aa, Fluviicola sp.
  REGION 1..198: note = tr|A0A1G0C623|A0A1G0C623_9FLAO GTP cyclohydrolase 1; OS = Fluviicola sp. RIFCSPHIGHO2_12_FULL_43_24 OX=1798019; GN = folE PE=3 SV=1
MSHSHDIYNDEITERLAGVYKTVLSDIGEDPEREGLLKTPERVAKALQFLTHGYDIFPEDILKSALFHEEYSEMVIVKDIEVYSMCEHHMLPFFGKAHVAYIPNGTIVGLSKIPRVVDAYSRRLQVQERLTIEIRDCIQKTLNPKGVAVVLECAHMCMQMRGVQKQNAYTTSSAFTGLFLSNDSTRKEFINLVQAKLH

SEQ ID NO: 8310 - protein, 196 aa, Fluviicola sp.
  REGION 1..196: note = tr|A0A556MP50|A0A556MP50_9FLAO GTP cyclohydrolase 1; OS = Fluviicola sp. MAH-3 OX=2597671 GN=folE PE=3 SV=1
MSEFHYNDDTTEQISNIYRTVLSQIGENPDREGLIKTPERVAKALQFLTQGYDIKPEDILKSALFSEEYSEMVIVKDIEVYSMCEHHMLPFFGKAHIAYIPNGTIVGLSKLPRVVDAFSRRLQVQERLTIEIRDCIQETLKPKGVAVVLECQHMCMQMRGVQKQNSVTTSSAFTGLFLSNDSTRKEFINLVQAKLH

SEQ ID NO: 8311 - protein, 196 aa, Fluviicola taffensis
  REGION 1..196: note = tr|F2I9N6|F2I9N6_FLUTR GTP cyclohydrolase 1; OS = Fluviicola taffensis (strain DSM 16823 / NCIMB 13979 / RW262) OX=755732 GN=folE PE=3 SV=1
MSDFHYNDDTTENISTIYKSILSQIGENPEREGLLKTPERVAKALQFLTQGYDIKPADILKSALFHEEYSEMVIVKDIEVYSMCEHHMLPFFGKAHIAYIPNGTIVGLSKIPRVVDAFSRRLQVQERLTIEIRDCIQETLKPKGVAVVLECQHMCMQMRGVQKQNSVTTSSAFTGLFLSNDSTRKEFINLVQAKLH

SEQ ID NO: 8312 - protein, 197 aa, Fontibacillus panacisegetis
  REGION 1..197: note = tr|A0A1G7QN90|A0A1G7QN90_9BACL GTP cyclohydrolase 1; OS = Fontibacillus panacisegetis OX=670482 GN=folE PE=3 SV=1
MSGVKDYVNKQVGDNRERIEHHVREILKLIGEDVEREGLIETPARVTRMYEEIFAGYEVDPHDVLGVTFEENHEELVIVKDIVYYSQCEHHMAPFFGKVHIGYIPSGRIAGLSKLARLVEAVTRRLQVQERITSQIADIMDEVLKPQGVMVVVEGEHLCMCARGVKKPGSKTITSAVRGNFRTDAASRAEFMSLIKG

SEQ ID NO: 8313 - protein, 197 aa, unidentified
  source 1..197: note = Fontibacillus phaseoli
  REGION 1..197: note = tr|A0A369B970|A0A369B970_9BACL GTP cyclohydrolase 1; OS = Fontibacillus phaseoli OX=1416533 GN=folE PE=3 SV=1
MAGVKDYVNTRVGDNREQIEHHVREILKLIGEDVEREGLLDTPARVTRMYEEIFGGYEVDPRDVLGVTFEENHEELVIVKDIVYYSQCEHHMAPFFGKVHIGYIPSGRIAGLSKLARLVEAVTRRLQVQERITSQIADIMDEVLKPQGVMVVVEGEHLCMCARGVKKPGSKTVTSAVRGTFRKDAASRAEFLSLIKE

SEQ ID NO: 8314 - protein, 256 aa, unidentified
  source 1..256: note = Fonticella tunisiensis
  REGION 1..256: note = tr|A0A4R7KD17|A0A4R7KD17_9CLOT GTP cyclohydrolase FolE2 OS=Fonticella tunisiensis OX=1096341 GN=folE2 PE=3; SV = 1
MRDLQSEKDLRNIPLKKVGIKNLKWPVTVMNKYDEVQHTVAEMELSVDLPHDVRGVHMSRFVEAVKEMKGLSLGDIETMLENLRQRLEAKVAHCRIDFDYFIKRKAPVTEIPSLYDVRCSFDCEKGEDFKFVMGIVVPVSTLCPCSKEISDYGAHNQRATIHINVEVDRDIWIEDIVRIAEESASTPIFSLLKRPDEKWITERAYMNPKFVEDAARDVAIRLENYQGVKWYSVHVESQESIHNHNAFAYTEKKVEI

SEQ ID NO: 8315 - protein, 182 aa, unidentified
  source 1..182: note = Fontimonas thermophila
  REGION 1..182: note = tr|A0A1I2JTB1|A0A1I2JTB1_9GAMM GTP cyclohydrolase 1; OS = Fontimonas thermophila OX=1076937 GN=folE PE=3 SV=1
MEEHFRAIIEAIGENPDREGLLRTPYRAARALEFLTQGYEQDLDEIVNGAVFESSNDEMVIVKDIELYSLCEHHLLPFIGKAHVAYLPAGRVIGLSKIPRIVDMYARRLQIQENLTQQIGQSIQRVTGAHGVGVVIEAQHLCAMMRGVQKQGSSMITSMMLGRFRDDPRTRQEFLDLIRTGR

SEQ ID NO: 8316 - protein, 269 aa, Formivibrio citricus
  REGION 1..269: note = tr|A0A1I5AT48|A0A1I5AT48_9NEIS GTP cyclohydrolase FolE2 OS=Formivibrio citricus OX=83765 GN=folE2 PE=3 SV=1
MSAAIADVQNSPDNRNIAINKVGIKSIRHPVRVSDRADGEQYTVAVFDMYVFLPQHFKGTHMSRFVEILNSHEKAISVDSFETILRQMCERLEAESGYLEMRFPFFINKRAPVSEVQSLMDYEVTLVGEIKKGQFEMRLKVQVPVTSLCPCSKKISEYGAHNQRSHVTVTATLAEHVWIEEIVELVEKEASCELFGLLKRPDEKYVTERAYDNPKFVEDMVRDVASRLNADSRIAAYVVESENFESIHNHSAYALIEQDKRVNNCCEGA

SEQ ID NO: 8317 - protein, 198 aa, Formosa agariphila
  REGION 1..198: note = tr|T2KKY6|T2KKY6_FORAG GTP cyclohydrolase 1; OS = Formosa agariphila (strain DSM 15362 / KCTC 12365 / LMG 23005 / KMM 3901) OX=1347342 GN=folE PE=3 SV=1
MPYKHYEEYNLEITDEIKSQYQNIITNIGEDVSRDGLQKTPERASKAMQFLTQGYELDAAEILKSAMFKESYNEMVIVKNIELYSLCEHHLLPFFGKAHIAYIPNGHIVGLSKIPRIVDVFARRLQVQERLTKQILDCINDTLKPQGVAVVIEASHMCMMMRGVQKQNSVTTTSGFRGQFEKIETRNEFLKLISEDLS

SEQ ID NO: 8318 - protein, 225 aa, Formosa agariphila
  REGION 1..225: note = tr|T2KPS0|T2KPS0_FORAG GTP cyclohydrolase 1; OS = Formosa agariphila (strain DSM 15362 / KCTC 12365 / LMG 23005 / KMM 3901) OX=1347342 GN=folE PE=3 SV=1
MKFDNNLEEFDAYGDDHIGSATDTPMRADAFKLSNEEKVELIKDDVRHIMETLGLDLTDDSLKGTPNRVAKMFVKEIFSGLDPSKKPNASTFENKYKYGEMLVEKNITVYSTCEHHLLPIVGRAHVAYISKGNVVGLSKMNRIVDYYAKRPQVQERLTIQIVKELQSVLGTEDVACIIDAKHLCVNSRGIRDIESSTVTAEFGGKFKDNETRRELLDYIKLETQF

SEQ ID NO: 8319 - protein, 198 aa, Formosa algae
  REGION 1..198: note = tr|A0A2K2ZB19|A0A2K2ZB19_9FLAO GTP cyclohydrolase 1; OS = Formosa algae OX=225843 GN=folE PE=3 SV=1
MSYKHYEEYNIEITDEIKSQYKHIIDNIGEDVTREGLQKTPERASKAMQFLTQGYDLDAAEILKGAMFEESYNEMVIVKNIELYSLCEHHMLPFFGKAHIAYIPNGHIVGLSKLPRIVDVFARRLQVQERLTKQILDCINDTLKPQGVAVVIEASHMCMMMRGVQKQNSVTTTSGFRGQFEKIETRNEFLKLISQDLS

SEQ ID NO: 8320 - protein, 225 aa, Formosa algae
  REGION 1..225: note = tr|A0A2K2Z884|A0A2K2Z884_9FLAO GTP cyclohydrolase 1; OS = Formosa algae OX=225843 GN=folE PE=3 SV=1
MKFDNNMEELDAIGDNHVGTSTDTPMRADAFDISDDQKIETIKADVRHIMETLGLDLTDDSLKGTPNRVAKMFVKEIFGGLNPNKKPTASTFDNKYKYGEMLVEKNITVYSTCEHHLLPIVGRAHVAYISKGNVVGLSKMNRIVDFYAKRPQVQERLTIQIVKELQAVLGTEDVACIIDAKHLCVNSRGIRDIESSTVTAEFGGKFKEKDTRREFIEYIKLETQF

SEQ ID NO: 8321 - protein, 228 aa, Formosa sp.
  REGION 1..228: note = tr|A0A2D4WX84|A0A2D4WX84_9FLAO GTP cyclohydrolase 1; OS = Formosa sp. OX=2018467 GN=folE PE=3 SV=1
MSTNITKQKTRRINGFNHHEIGDDHLYTGLNTPLKKDAFAISDAEKKNKISMLFEEIMDVIGLDLTDDSLKGTPDRVAKMYIDEIFSGLNPKNKPKVALFDNKYHYNQMLVEKNITFYSNCEHHFVPIIGKAHVAYISSGKVIGLSKLNRIVQYYAKRPQVQERLTNQIGEDLKAILKTDDVAVIIDAKHLCVSSRGIKDESSATVTSFYSGAFNSPAKVNEFNNYLK

SEQ ID NO: 8322 - protein, 225 aa, Formosa sp.
  REGION 1..225: note = tr|A0A1D7XZU7|A0A1D7XZU7_9FLAO GTP cyclohydrolase 1; OS = Formosa sp. Hel1_33_131 OX=1336794 GN=folE PE=3 SV=1
MGLKNNTEKFDTIGDNHIGTSTETPMRSDAFKLSSDEKIDIIKDDVQHIMETLGLDLSDDSLKGTPNRVAKMFVNEIFGGLDPTKKPKASTFDNKYQYGEMLVEKNITLYSTCEHHFLPIVGRAHVAYISNGTVVGLSKMNRIVDHFSKRPQVQERLTIQIVEELQKVLNTKDVACVIDAKHLCVNSRGIRDIESSTVTSEFGGKFKEKDTKREFLDYIQLETKF

SEQ ID NO: 8323 - protein, 225 aa, Formosa spongicola
  REGION 1..225: note = tr|A0A316DNL6|A0A316DNL6_9FLAO GTP cyclohydrolase 1; OS = Formosa spongicola OX=570520 GN=folE PE=3 SV=1
MKFDEKLEEFESLGDNHVGTSSNTPMRQDAFKLTNEEKIDIIKDDVQHIMETLGLDLTDDSLKGTPNRVAKMFVKELFGGLNPEKKPNASTFENKYQYGEMLVEKNITVYSTCEHHLLPIVGKAHVAYISNGTVVGLSKMNRIVDYFAKRPQVQERLTIQIVKELQEVLNTQDVACVIDAKHLCVNSRGIRDTESSTITSEFGGKFKEKETKREFLDYIKLDTSF

SEQ ID NO: 8324 - protein, 218 aa, unidentified
  source 1..218: note = Francisella adeliensis
  REGION 1..218: note = tr|A0A2Z4XWE6|A0A2Z4XWE6_9GAMM GTP cyclohydrolase 1; OS = Francisella adeliensis OX=2007306 GN=folE PE=3 SV=1
MDSDKELGLRVRELLISKKLETPLREGFELNNSNKIEIEKNFESILYNLGLDLENDSLKKSPKRIADMYINELFKGLDYNNFPKCSAIENNVEYNDIVIEKDITTSSTCEHHFVMIDGFTHIGYIPNKKIIGLSKFNRITDFFATRPQVQERLTRQIFETLKYILETEDVAVVMEAKHNCVRARGIKDYNSTTITSAMGGAFMDDSACRKEFMDLVRK

SEQ ID NO: 8325 - protein, 204 aa, unidentified
  source 1..204: note = Francisella endosymbiont
  REGION 1..204: note = tr|A0A1E7UBA0|A0A1E7UBA0_9GAMM GTP cyclohydrolase 1; OS = Francisella endosymbiont of Amblyomma maculatum; OX = 255919 GN=AS144_04260 PE=3 SV=1
MKDRYCSKLGKNVQQHLIKLGLEQPREFNLDNDSKIATIAKAYRQILDALGLHTHEFEKTPFRVARMFSQEIFNGLDYANFPVCVLYENKFNYTGVLTQKNITIMSFCEHHFVPFEGTAEVSFIPKDNNIIGLCRINSICDFFARRPQIQERMTTQIFETLKFILATDNVSVKIKAKHTCVSFRGVNNQDSQTYTQMIGGVFAK

SEQ ID NO: 8326 - protein, 204 aa, unidentified
  source 1..204: note = Francisella endosymbiont
  REGION 1..204: note = tr|A0A1X1BEU9|A0A1X1BEU9_9GAMM GTP cyclohydrolase 1; OS = Francisella endosymbiont of Ornithodoros moubata; OX = 1981171 GN=A2G94_04420 PE=3 SV=1
MKGRYCSKLGKNVQQHLIKLGLEQPREFNLDNDSKIATIAKAYRQILDALGLHTHEFEKTPFRVARMFSQEIFNGLDYANFPACALYENEFNYTGVLTQKNITIMSFCEHHFVPFEGTAEVSFIPKDNNIIGLCHINSICDFFARRPQIQERMTTQIFETLKFILATDNVSVKIEAKHTCVSFRGVNNQDSQTYTQMVGGVFAK

SEQ ID NO: 8327 - protein, 204 aa, Francisella halioticida
  REGION 1..204: note = tr|A0A2Z2L1V3|A0A2Z2L1V3_9GAMM GTP cyclohydrolase 1; OS = Francisella halioticida OX=549298 GN=CDV26_08005 PE=3; SV = 1
MSNKYCSELGKNVRDHLIKLGLEQPRDFKFDNDIKIQKISKAYREILDTLGLETHEFDKTPFRIARMFSQEIFNGLDYNNFPACALYENEFKYDGVLTQKNITIMSFCEHHFVPFEGVAEVSFIPKDNNIIGLCRINSICDFFARRPQIQERMTAQIFESLKFILGTEDVSIKITAKHTCVSFRGCNNRDSKTYTQMFGGFFAK

SEQ ID NO: 8328 - protein, 204 aa, Francisella hispaniensis
  REGION 1..204: note = tr|F4BFL4|F4BFL4_9GAMM GTP cyclohydrolase 1; OS = Francisella hispaniensis OX=622488 GN=FN3523_0955 PE=3; SV = 1
MKDKYCSKLGKSVQQHLIKLGLEQPREFNSDSDNKIAIIAKAYRQILDALGLHTHEFEKTPFRVARMFSQEIFNGLDYANFPACALYENEFNYTGILTQKDITIMSFCEHHFVPFEGTAEVSFIPNNNNIIGLCRINSICDFFSRRPQIQERMTAQIFETLKFILATEDVSVKIKAKHTCVSFRGVNNQSSETYTEMLGGSFAK

SEQ ID NO: 8329 - protein, 204 aa, Francisella hispaniensis
  REGION 1..204: note = tr|A0A153JB17|A0A153JB17_9GAMM GTP cyclohydrolase 1; OS = Francisella hispaniensis FSC454 OX=1088883; GN = AUF42_07360 PE=3 SV=1
MKDKYCSKLGKSVQQHLIKLGLEQPREFNSDSDNKIAIIAKAYRQILDALGLHTHEFEKTPFRVARMFSQEIFNGLDYANFPACALYENEFNYTGILTQKDITIMSFCEHHFVPFEGTAEVSFIPNNNNIIGLCRINSICNFFARRPQIQERMTAQIFETLKFILATEDVSVKIKAKHTCVSFRGVNNQSSETYTEMLGGSFAK

SEQ ID NO: 8330 - protein, 206 aa, unidentified
  source 1..206: note = Francisella marina
  REGION 1..206: note = tr|A0A5C2BY71|A0A5C2BY71_9GAMM GTP cyclohydrolase 1; OS = Francisella marina OX=2249302 GN=folE PE=3 SV=1
MNDKYCSKLGRDVQQHLIKLGLEQARNFELDNDAKIAKISKAYREILDALGLQTHEFEKTPFRIARMFTQEIFNGLDYANFPACALYENEFKYEGILTQKNITIMSFCEHHFVPFEGIAEVSFIPKNNNIIGLCRINSICNFFARRPQIQERMTAQIFETLKFILSTDDVSVKIKAKHTCVSFRGTNNQNSETYTEMLGGLFAKKE

SEQ ID NO: 8331 - protein, 206 aa, Francisella noatunensis
  REGION 1..206: note = tr|I2B0F5|I2B0F5_FRANT GTP cyclohydrolase 1; OS = Francisella noatunensis subsp. orientalis (strain Toba 04) OX=1163389 GN=OOM_1510 PE=3 SV=1
MNDKYYSKLGKDVQQHLIKLGLEQARNFELDNDAKIAKILKAYREILDTLGLQTHEFEKTPYRIARMFTQEIFNGLDYANFPACALYENEFRYEGVLTQKNITIMSFCEHHFMPFEGVAEVSFIPKNNNIIGLCRINSICNFFARRPQIQERMTAQIFETLKFILSTDNVSVKIKAKHTCVSFRGTNNQNSETYTEMLGGVFAKKE

SEQ ID NO: 8332 - protein, 206 aa, Francisella noatunensis; identical to SEQ ID NO: 8331
  REGION 1..206: note = tr|A0A5C1SR19|A0A5C1SR19_9GAMM GTP cyclohydrolase 1; OS = Francisella noatunensis subsp. orientalis OX=299583; GN = FNO111_0940 PE=3 SV=1

SEQ ID NO: 8333 - protein, 206 aa, unidentified
  source 1..206: note = Francisella novicida
  REGION 1..206: note = tr|A0A2L1CIZ7|A0A2L1CIZ7_FRANO GTP cyclohydrolase 1; OS = Francisella novicida OX=264 GN=B4919_06145 PE=3 SV=1
MMMKDKYCSKLGKSVQEHLIKLGLEQPREFNLDNDNKIAIITKAYRQILDALGLYTDEFEKTPFRVARMFTQEIFNGLDYANFPACALYENEFNYTGVLTQKNITIMSFCEHHFVPFEGTAEVSFIPKNNNIIGLCRINSICDFFSRRPQIQERMTAQIFETLKFILSTEDVSVKIKAKHACVSLRGVNNQNSQTYTQMVGGVFAK

SEQ ID NO: 8334 - protein, 204 aa, unidentified
  source 1..204: note = Francisella persica
  REGION 1..204: note = tr|A0A0K2JR90|A0A0K2JR90_9GAMM GTP cyclohydrolase 1; OS = Francisella persica ATCC VR-331 OX=1086726; GN = FSC845_06105 PE=3 SV=1
MKDKYCSKLGKNVQQHLIKLGLEQPREFNLDNDSKIAIIAKAYRQILDALGLHTHEFEKTPFRVARMFSQEIFNGLDYANFPACALYENEFNYTGVLTQKNITIMSFCEHHFVPFEGIAEVSFIPKDNNIIGLCRINSICDFFARRPQIQERMTTQIFETLKFILATDDVSVEIKAKHACVSLRGVNNQDSQTYTQMVGGAFAK

SEQ ID NO: 8335 - protein, 205 aa, Francisella philomiragia
  REGION 1..205: note = tr|A0A0E2ZKA4|A0A0E2ZKA4_9GAMM GTP cyclohydrolase 1; OS = Francisella philomiragia OX=28110 GN=folE PE=3 SV=1
MNDKYCSKLGRDVQQHLIKLGLEQARNFELDNDAKIAKISKAYREILDALGLQTHEFEKTPFRVARMFTQEIFNGLDYANFPACALYENEFKYEGILTQKNITIMSFCEHHFVPFEGIAEVSFIPKNNNIIGLCRINSICNFFSRRPQIQERMTAQIFETLKFILSTDDVSVKIKAKHTCVSFRGTNNQDSETYTEMLGGVFAKK

SEQ ID NO: 8336 - protein, 206 aa, Francisella philomiragia
  REGION 1..206: note = tr|B0U0Q8|B0U0Q8_FRAP2 GTP cyclohydrolase 1; OS = Francisella philomiragia subsp. philomiragia (strain ATCC 25017) OX=484022 GN=Fphi_1784 PE=3 SV=1
MNDKYCSKLGRDVQQHLIKLGLEQARNFELDNNAKIAKISKAYREILDALGLQTHEFEKTPFRVARMFTQEIFNGLEYANFPACALYENEFKYEGILTQKNITIMSFCEHHFVPFEGIAEVSFIPKNNNIIGLCRINSICNFFSRRPQIQERMTAQIFETLKFILSTDDVSVKIKAKHTCVSFRGTNNQNSETYTEMLGGVFAKKE

SEQ ID NO: 8337 - protein, 204 aa, Francisella sp.
  REGION 1..204: note = tr|A0A1L4BSC0|A0A1L4BSC0_9GAMM GTP cyclohydrolase 1; OS = Francisella sp. TX077310 OX=573570 GN=F7310_04850 PE=3; SV = 1
MSNTYCSELGKNVRDHLIKLGLEQPRQFNIDNDTKIQKISKAYREILDTLGLETHEFDKTPFRIARMFSQEIFNGLDYNNFPACALYENEFKYNGVLTQKNITIMSFCEHHFVPFEGTAEVSFIPKNNNIIGLCRINSICDFFSRRPQIQERMTAQIFESLKFILGTQDVSVKITAKHTCVSFRGCNNKDTETYTQMLGGFFAK

SEQ ID NO: 8338 - protein, 204 aa, Francisella sp.
  REGION 1..204: note = tr|A0A097EMD6|A0A097EMD6_9GAMM GTP cyclohydrolase 1; OS = Francisella sp. FSC1006 OX=1547445 GN=LO80_01235 PE=3; SV = 1
MSNTNCPTIGKKVRDHLIKLGLEQPREFNLDNDVKIEKISKAYGEILDALGLQSHEFEKTPFRVARMFSQEIFNGLNYDNFPACALYENEFKYDGILTQKNIPIMSICEHHFVPFEGTAEVSFIPKNNNIIGLSRINDICDFFSRRPQIQERMTAQIFESLKFILGTTDVSIKITAKHTCVSFRGCNNKDSETYTQMIGGFFAK

SEQ ID NO: 8339 - protein, 206 aa, Francisella tularensis
  REGION 1..206: note = tr|Q5NGA1|Q5NGA1_FRATT GTP cyclohydrolase 1; OS = Francisella tularensis subsp. tularensis (strain SCHU S4 / Schu 4) OX=177416 GN=folE PE=3 SV=1
MMMKDKYCSKLGKSVQEHLIKLGLEQPREFNLDNDNKITIITKAYRQILDALGLYTDEFEKTPFRVARMFTQEIFNGLDYANFPACALYENEFNYTGVLTQKNITIMSFCEHHFVPFEGTAEVSFIPKNNNIIGLCRINSICDFFSRRPQIQERMTAQIFEALKFILSTEDVSVKIKAKHACVSLRGVNNQNSQTYTQMVGGVFAK

SEQ ID NO: 8340 - protein, 206 aa, Francisella tularensis; identical to SEQ ID NO: 8339
  REGION 1..206: note = tr|A0A3N4AJL4|A0A3N4AJL4_FRATU GTP cyclohydrolase 1; OS = Francisella tularensis OX=263 GN=folE PE=3 SV=1

SEQ ID NO: 8341 - protein, 222 aa, unidentified
  source 1..222: note = Franconibacter pulveris
  REGION 1..222: note = tr|A0A0J8VLL7|A0A0J8VLL7_9ENTR GTP cyclohydrolase 1; OS = Franconibacter pulveris OX=435910 GN=folE PE=3 SV=1
MSLLSKEAALVHEALVARGLETPLRPPLHELDNETRKRLIAGHMTEIMQLLNLDLSDDSLMETPHRIAKMYVDEIFSGLDYANFPKITVIENKMKVDEMVTVRDITLTSTCEHHFVTIDGKATVAYIPKDSVIGLSKINRIVQFFAQRPQVQERLTQQILVALQTLLGTSNVAVSIDAVHYCVKARGIRDATSATTTTSLGGLFKSSQNTRQEFLRAVRHPS

SEQ ID NO: 8342 - protein, 188 aa, Frankia alni
  REGION 1..188: note = tr|Q0RM61|Q0RM61_FRAAA Putative GTP cyclohydrolase I (Mycobacteriophage protein Gp6) OS=Frankia alni (strain ACN14a) OX=326424 GN=FRAAL2747 PE=4 SV=1
MDTTRAVAAVEELLAALEVNEADHTADTPRRVVRAWQETLAGYQADPRRHLARTFTAPDDPGLVVVAGLHLVTTCAHHLLPIVGRATVAYRPAPGAPVVGLSKLSRVVADYAARLQVQERLGWQIASAVQDCLAPVGAGCVITAVHGCMTVRGVRQPTAVTTTAVWTGTWTPEHPDVEMVVAEHRAAG

SEQ ID NO: 8343 - protein, 183 aa, Frankia alni
  REGION 1..183: note = tr|Q0RBH4|Q0RBH4_FRAAA GTP cyclohydrolase 1; OS = Frankia alni (strain ACN14a) OX=326424 GN=folE2 PE=3; SV = 1
MARAVRELLIGIGEDPDREGLRKTPDRVARAYREAVEGLGREPSEVLTTVFDEGHDEMVLVRDIDFSSLCEHHLVVFSGRAHVAYIPNNRGQITGLSKLARLVDLYARRPQVQERLTSQIADALVDVLEPRGVMVVVEAEHLCMSMRGVRKPGATTVTSAVRGQFLSTATRSEGMSLILGSRR

SEQ ID NO: 8344 - protein, 239 aa, unidentified
  source 1..239: note = Frankia asymbiotica
  REGION 1..239: note = tr|A0A1V2I678|A0A1V2I678_9ACTN GTP cyclohydrolase 1; OS = Frankia asymbiotica OX=1834516 GN=folE PE=3 SV=1
MTSETDQAVLSAHLDASAELADEVDGSETETRSGSGAAVAAFRTGNGRVRPFDHDRVAAAVRELLIGIGEDPDREGLRKTPDRVARAYAEAVEGLGRDPADVLTTVFDEGHDEMVLVRDIDFSSLCEHHLVVFSGKAHVAYIPNENGQITGLSKLARLVDLYARRPQVQERLTSQVADALVDVLKPRGVMVIIEAEHLCMSMRGVRKPGASTVTSAVRGQFLSPATRSEGMSLILGHRR

SEQ ID NO: 8345 - protein, 246 aa, unidentified
  source 1..246: note = Frankia canadensis
  REGION 1..246: note = tr|A0A2I2KMN6|A0A2I2KMN6_9ACTN GTP cyclohydrolase 1; OS = Frankia canadensis OX=1836972 GN=folE PE=3 SV=1
MTSDSQIGFTSTEEGVREVGATGSNGFDVPSPLAGNGTGTSTAVPARDRGRPSQVRPFDHDRVARAVRELLIGIGEDPDREGLRKTPDRVARAYREAVEGLGREPSEVLTTVFDEGHDEMVLVRDIDFSSLCEHHLVVFSGQAHVAYIPNNKGQITGLSKLARLVDLYARRPQVQERLTSQIADALVDVLDPRGVMVVVEAEHLCMSMRGVRKPGATTVTSAVRGQFLSTATRNEGMSLILRGGRH

SEQ ID NO: 8346 - protein, 192 aa, unidentified
  source 1..192: note = Frankia casuarinae
  REGION 1..192: note = tr|Q2JC68|Q2JC68_FRACC GTP cyclohydrolase 1; OS = Frankia casuarinae (strain DSM 45818 / CECT 9043 / CcI3) OX=106370 GN=Francci3_1748 PE=3 SV=1
MSLTYPDGRAGLADEVADGTDPLEGLARQLLVEIGEDPGRDGLRETPARYARWWREFVGFDPGNTETAFEQVNHGQLVQVNDIRVWSLCEHHLLPFWCDISIAYLAKDKLLGLSKFARIAHHHAHRLQVQERLTGAIADAIEALCGVPDVAVRAKGEHLCMTMRGIRSPATMSTLVLRGVFKDDPHMRNLLS

SEQ ID NO: 8347 - protein, 244 aa, unidentified
  source 1..244: note = Frankia casuarinae
  REGION 1..244: note = tr|A0A1X1PX26|A0A1X1PX26_FRACC GTP cyclohydrolase 1; OS = Frankia casuarinae (strain DSM 45818 / CECT 9043 / CcI3) OX=106370 GN=folE PE=3 SV=1
MTSYSDEASTAAGERRSESSPAAEAPGMDGFGIPDPDGDGPAASTLAPGNGRPRQVRPFDHDRVARAVRELLIGIGEDPDREGLRKTPDRVARAYREAVEGLGRDPSEVLTTVFDEGHDEMVLVRDIDFSSLCEHHLVVFSGKAHVAYIPNSKGQITGLSKLARLVDLYSRRPQVQERLTSQIADALVEVLDPRGVMVVIEAEHLCMSMRGVRKPGATTVTSAVRGQFLSTATRNEGMSLILHR

SEQ ID NO: 8348 - protein, 234 aa, unidentified
  source 1..234: note = Frankia inefficax
  REGION 1..234: note = tr|E3J7B8|E3J7B8_FRAIE GTP cyclohydrolase 1; OS = Frankia inefficax (strain DSM 45817 / CECT 9037 / EuI1c) OX=298654 GN=folE PE=3 SV=1
MTSETDLLSADLDHLDDEGGSAAETGSGSGAAVAEFRPGNGRIRPFDHDRVAAAVRELLIGIGEDPDREGLRKTPDRVARAYAEAVEGLGRDPADVLTTVFDEGHDEMVLVRDIDFSSLCEHHLVVFSGKAHVAYIPNENGQITGLSKLARLVDLYARRPQVQERLTSQVADALVDVLQPRGVMVVVEAEHLCMSMRGVRKPGACTVTSAVRGQFLSPATRNEGMSLILSSHRR

SEQ ID NO: 8349 - protein, 252 aa, unidentified
  source 1..252: note = Frankia irregularis
  REGION 1..252: note = tr|A0A0S4QRY3|A0A0S4QRY3_9ACTN GTP cyclohydrolase 1; OS = Frankia irregularis OX=795642 GN=folE PE=3 SV=1
MTADSEQARTVSQQASDPASGLVGVDQRTALSEGTDANNGGGNGSSASSASTERKRPKRPDMVRPFDHDRVARAVRELLIGIGEDPDREGLRKTPDRVARAYQEAVEGLGRDPAEVLTTVFDEGHDEMVLVRDIDFSSLCEHHLVVFAGKAHVAYIPNEKGQITGLSKLARLVDLYARRPQVQERLTSQVADALVDVLDPRGVMVVVEAEHLCMSMRGVRKPGATTVTSAVRGQFLSPATRSEGMSLIMRGR

SEQ ID NO: 8350 - protein, 251 aa, Frankia sp.
  REGION 1..251: note = tr|I8QS57|I8QS57_9ACTN GTP cyclohydrolase 1; OS = Frankia sp. QA3 OX=710111 GN=folE PE=3 SV=1
MTSDSHEAFTDERVHSAAVSEMDATGSNGLGGPGPGTDGNGSAAAASPVSLVRDRGKPQQVRPFDHDRVARAVRELLIGIGEDPDREGLRKTPDRVARAYREAVEGLGRNPSDVLTTVFDEGHDEMVLVRDIDFSSLCEHHLVVFSGRAHVAYIPNNRGQITGLSKLARLVDLYARRPQVQERLTSQIADALVDVLEPRGVMVVVEAEHLCMSMRGVRKPGATTVTSAVRGQFLSTATRSEGMSLILGSRR

SEQ ID NO: 8351 - protein, 217 aa, Frankia sp.
  REGION 1..217: note = tr|A0A062WXH3|A0A062WXH3_9ACTN GTP cyclohydrolase 1; OS = Frankia sp. BMG5.23 OX=683305 GN=folE PE=3 SV=1
MDGFGIPDPDGDGPAASTLAPGNGRPRQVRPFDHDRVARAVRELLIGIGEDPDREGLRKTPDRVARAYREAVEGLGRDPSEVLTTVFDEGHDEMVLVRDIDFSSLCEHHLVVFSGKAHVAYIPNSKGQITGLSKLARLVDLYSRRPQVQERLTSQIADALVEVLDPRGVMVVIEAEHLCMSMRGVRKPGATTVTSAVRGQFLSTATRNEGMSLILHR

SEQ ID NO: 8352 - protein, 224 aa, unidentified
  source 1..224: note = Frankia symbiont
  REGION 1..224: note = tr|F8AVA6|F8AVA6_FRADG GTP cyclohydrolase 1; OS = Frankia symbiont subsp. Datisca glomerata OX=656024; GN = folE PE=3 SV=1
MDTVDAATQNVNAGTVPASDVARQRRGPDLGPQAVRPFDHERVARAVRELLIGIGEDPDREGLRKTPERVARAYREAVEGLGRDPSEVLTTVFDEGHEEMVLVRDIDFTSLCEHHLVAFAGKAHVAYIPNESGQITGLSKLARLVDLYSRRPQVQERLTTQIADALEQALSPRGVMVVVEAEHLCMSMRGVRKPGARTMTSAVRGQFLSTATRNEGMSLILSHR

SEQ ID NO: 8353 - protein, 253 aa, unidentified
  source 1..253: note = Frankia torreyi
  REGION 1..253: note = tr|A0A0D8BJL6|A0A0D8BJL6_9ACTN GTP cyclohydrolase 1; OS = Frankia torreyi OX=1856 GN=folE PE=3 SV=1
MTSDSPEVFTDERVGSGASPEVNGTASDGFGVPDPSALGISTTTATAAPPASPIRDRRRPQQVRPFDHDRVARAVRELLIGIGEDPDREGLRKTPDRVARAYREAVEGLGREPSEVLTTVFDEGHDEMVLVRDIDFSSLCEHHLVVFSGRAHVAYIPNDRGQITGLSKLARLVDLYARRPQVQERLTSQVADALVDVLEPRGVMVVVEAEHLCMSMRGVRKPGATTVTSAVRGQFLSTATRSEGMSLILGSRR

SEQ ID NO: 8354 - protein, 204 aa, unidentified
  source 1..204: note = Frankiales bacterium
  REGION 1..204: note = tr|A0A3A3ZK20|A0A3A3ZK20_9ACTN GTP cyclohydrolase 1; OS = Frankiales bacterium YIM 75000 OX=2339232 GN=folE PE=3; SV = 1
MVDPVTLPPAEGTPAPRPFDAARVERAVREILLGIGEDPDRDGLRDTPARVARAYREVFAGLAMEPESVLATTFDLGHDEMVLVKDIELYSTCEHHLVPFHGVAHVGYVPSADGRITGLSKLARLVDLYARRPQVQERLTTQVADAMVRVLQPRGVIVVLECEHLCMSMRGIRKPGSRTVTSAVRGGLRDPATRAEAMSLIMGR

SEQ ID NO: 8355 - protein, 191 aa, unidentified
  source 1..191: note = Frankiales bacterium
  REGION 1..191: note = tr|A0A522B9F2|A0A522B9F2_9ACTN GTP cyclohydrolase 1; OS = Frankiales bacterium OX=1909291 GN=folE PE=3 SV=1
MPTPYDAARVEAAVRELLAAVGDDPDREGLVDTPARVARMYAEVFAGLHMAPEDLALPLFDERHDELIIVKDIPLSSFCEHHLIPWTGTAAVGYLPGKDGRITGLSKLARLVDLYAKRPSVQERVTSQVADALMERLEPRGAIVVVEAEHLCMSMRGVQKPGARTVTSAVRGVLKSSAVTRAEAMSLILGR

SEQ ID NO: 8356 - protein, 217 aa, unidentified
  source 1..217: note = Frankineae bacterium
  REGION 1..217: note = tr|A0A1G8PSK8|A0A1G8PSK8_9ACTN GTP cyclohydrolase 1; OS = Frankineae bacterium MT45 OX=1882833 GN=folE PE=3 SV=1
MTAQQGNAGGSPDGASKPSTGASKPSPGGGIDVPRAEAAVREILIAIGEDPDRPGLERTPERVARSFSELFGGLHLNPDDVLETQFDEHHDELVLVKDIPLYSTCEHHLVPWHGTAAVGYIPGSSGRITGLSKLARVVDLYAKRPQVQERLTSQVADAVMSRLQPRGVIVVIEAEHLCMAMRGVRKPGAKTLTSAVRGGFQSDPRTRAEAMSLILGR

SEQ ID NO: 8357 - protein, 194 aa, unidentified
  source 1..194: note = Fraserbacteria sp.
  REGION 1..194: note = tr|A0A1F5UYD2|A0A1F5UYD2_FRAXR GTP cyclohydrolase 1; OS = Fraserbacteria sp. (strain RBG_16_55_9) OX=1817864; GN = folE PE=3 SV=1
MGKHPNGKKDIKELVRELLLGLGEDPKREGLRETPRRVAELYNELTQGYREDPQGIVGDAVFTVDYDSMVVLKDIEFYSLCEHHLIPFFGHVHVGYIPKGQVIGASKIPRVVDSFAKRLQLQERMTEEIACFLEEAIQPLGLGVVVEGMHLCMAMRGVEKRDAWMVTSAMKGSFRKDAKTRAEFLQFIAPRLER

SEQ ID NO: 8358 - protein, 313 aa, Frateuria aurantia
  REGION 1..313: note = tr|H8KYU3|H8KYU3_FRAAD GTP cyclohydrolase FolE2; OS = Frateuria aurantia (strain ATCC 33424 / DSM 6220 / NBRC 3245 / NCIMB 13370) OX=767434 GN=folE2 PE=3 SV=1
MDMQTASTRALPDVALNPHPHRSGPLDWVGMGRIQMPVRFDAGDGQVREGVARVDAFVNLTRNDKRGIHMSRLYLLVEQALSRDVITPVRLQALLQAFLASHEDLSDHARIRIEFEQLIRRPALRSANSGWRAYPVVIEAELKGEHFSYELATEVVYSSTCPASAALARQLIQDRFEQDFGSGQPLDRTALLAWLGSEQGIVATPHAQRSVAELKVRPVAGAAVSLLSLLDRCEHALATPVQTAVKREDEQAFAAANGGNLMFCEDAARRLRAALNEDGALADFRIRIEHQESLHPHDAVAYAFKGIVGGYDR

SEQ ID NO: 8359 - protein, 200 aa, Frateuria aurantia
  REGION 1..200: note = tr|H8L2U7|H8L2U7_FRAAD GTP cyclohydrolase 1; OS = Frateuria aurantia (strain ATCC 33424 / DSM 6220 / NBRC 3245 / NCIMB 13370) OX=767434 GN=folE PE=3 SV=1
MSDEANRPDVSREQAEEAIRTLLLWAGEDPAREGLIDTPKRVVKAYSDWFAGYASDPADYLLRTFEEVGGYDEMVVLRDIEFESHCEHHMAAIIGKAHIAYLPDNRVVGISKLARVVDGFARRLQVQEKMTAQIAQCIQETLQPKGVAVVIEAAHECMTTRGVHKRGVSMVTSQMLGVFREDARTRSEFLSYIGIARGVR

SEQ ID NO: 8360 - protein, 200 aa, Frateuria sp.
  REGION 1..200: note = tr|A0A0Q9Q8B0|A0A0Q9Q8B0_9GAMM GTP cyclohydrolase 1; OS = Frateuria sp. Soil773 OX=1736407 GN=folE PE=3 SV=1
MSDPRNPNDVSQEQAEEAVRTLLRWSGEDPSREGLLDTPRRVVKAYRDWFSGYLEDPGEYLRRTFKEVAGYDEMVVLRDIEFESHCEHHMAPIVGRAHVGYLPTNRVVGISKLARVVEGYARRFQVQEKLTAQIAQCIQDNLQPAGVAVVVDASHECMTTRGVHKRGVSMVTSQMLGAFRDDARTRAEFLQFIGIHGGVR

SEQ ID NO: 8361 - protein, 315 aa, Frateuria sp.
  REGION 1..315: note = tr|A0A0Q9PNE3|A0A0Q9PNE3_9GAMM GTP cyclohydrolase FolE2 OS=Frateuria sp. Soil773 OX=1736407 GN=folE2 PE=3; SV = 1
MHSHENTARLMPDVATQAQPHLAGALDWVGMDGIEVPVRFDAGDGEAQRASAQVGAFVNLGRSDKRGIHMSRLYLLVDRYLSAQTLGADMLRALLGEFLSSHEGLADRARISIRFEHLVRRAALRSANSGWRAYPVSIEASLGADGFRLELGTEVVYSSTCPASAALSRQLIQEQFAKDFSADGPVDHAAVLAWLGSEQGIVATPHAQRSVARLLVRLADGAAFDLIGTLDRVEQALGTPVQTAVKREDEQAFALANGGNLMFCEDAARRIQKALDADPRIADFHVRLEHQESLHPHDAVAYASKGVPGGYGVPV

SEQ ID NO: 8362 - protein, 199 aa, Frateuria terrea
  REGION 1..199: note = tr|A0A1H6WPR0|A0A1H6WPR0_9GAMM GTP cyclohydrolase 1; OS = Frateuria terrea OX=529704 GN=folE PE=3 SV=1
MSDPSTPNDVTQAQAEEAVRTLLRWAGDDPSREGLLDTPRRVAKAYRDWFSGYADDPSEFLKRTFKEVEGYDEMVVLRDIEFESHCEHHMAPIIGRAHVGYLPTNRVVGISKLARVVEGYARRFQVQEKLTAQIAHCIQEHLRPAGVAVVIDASHECMTTRGVHKRGVSMVTSQMLGAFRDDARTRAEFLQFIGIHGAR

SEQ ID NO: 8363 - protein, 315 aa, Frateuria terrea
  REGION 1..315: note = tr|A0A1H6QJJ2|A0A1H6QJJ2_9GAMM GTP cyclohydrolase FolE2 OS=Frateuria terrea OX=529704 GN=folE2 PE=3 SV=1
MHSHENTARLLPDVAVQAQPHLAGALDWVGMDGIEVPVRFDAGDGSIERASAQVGAFVNLTRPDKRGIHMSRLYLLVDRHLSANPLDAATIEALLRAFLESHHDLSDRARLSIRFDHLVRRSALRSANSGWRAYPVSIEASLGADGFQLELGTEVVYSSTCPASAALSRQLIQEQFARDFDAGKPVDHAAVMAWLGSEQGIVATPHAQRSVARLLVRLADGVGFNLISTLDRVEGALGTPVQTAVKREDEQAFALANGGNLMFCEDAARRIQKALDADPRIADFHVRLEHQESLHPHDAVAYASKGVPGGYGSAG

SEQ ID NO: 8364 - protein, 218 aa, unidentified
  source 1..218: note = Frederiksenia canicola
  REGION 1..218: note = tr|A0A3N4WSM8|A0A3N4WSM8_9PAST GTP cyclohydrolase 1; OS = Frederiksenia canicola OX=123824 GN=folE PE=3 SV=1
MSNISPEAQSVRAALLEKGIETPTVAHTKDKAVRRSEIQQHMRSVLELLGLDLRDDSLEETPHRLAKMYVDEIFSGLDYETFPKITKIKNQMKVSEMVLVDDITLTSTCEHHFVTIDGKVAVAYYPKDWVIGLSKINRVVQFFAQRPQVQERFTEQILTAFQTILETEDVAVYVKATHFCVKCRGVKDTNSQTLTSAFGGVFLQDRETRKEFLSLLSK

SEQ ID NO: 8365 - protein, 211 aa, unidentified
  source 1..211: note = Fremyella diplosiphon
  REGION 1..211: note = tr|A0A1Z4MAB5|A0A1Z4MAB5_MICDP GTP cyclohydrolase 1; OS = Fremyella diplosiphon NIES-3275 OX=1973485 GN=folE PE=3; SV = 1
MTLSIPPQLISATALPNQQLPHVTESDMIQAVRTLLIGLGENPDREGLKDTPKRVVKALQFITKGYDESLDELLNGAVFTEDTNEMVLVRDIDIFSSCEHHILPIIGRAHVAYIPNGKVIGLSKIARICEMYARRLQVQERLTIQIADALQGLLKPRGVAVVLEATHMCMVMRGVQKPGSWTVTSAMRGVFAEDVRTRQEFMNLIRHNASF

SEQ ID NO: 8366 - protein, 235 aa, unidentified
  source 1..235: note = Fremyella diplosiphon
  REGION 1..235: note = tr|A0A1Z4ML08|A0A1Z4ML08_MICDP GTP cyclohydrolase 1; OS = Fremyella diplosiphon NIES-3275 OX=1973485 GN=folE PE=3; SV = 1
MTIASPNGSNRSQSPLIPDLAEAITLRPDRNTHDGHEPNLHSPQEEEMEQMTAAVRQILLGVGEDPEREGLLKTPKRVAEAMRFLTSGYNQSLEELVNGAIFNEGHNEMVLVRDINFFSLCEHHMLPFMGKAHIAYIPNQKVVGLSKLARIVEMYSRRLQVQERLTRQIAEAVQTILNPQGVAVVMEATHMCMVMRGVQKPGSWTVTSAMLGVFQDEQKTREEFLNLIRHQASFF

SEQ ID NO: 8367 - protein, 269 aa, unidentified
  source 1..269: note = Fretibacterium fastidiosum
  REGION 1..269: note = tr|D4MAK4|D4MAK4_9BACT GTP cyclohydrolase FolE2; OS = Fretibacterium fastidiosum OX=651822 GN=folE2 PE=3 SV=1
MKDVQMEADLREIQIDRVGVSNVSYPIVVMSRQDKTQDTVASVSMSVLLPHQYRGTHMSRFIEALEDCCGRISPVTLEAVTKRLCDRLDAPEASIRFEFPYFIRRRAPVSGIESFMRYEANLEGIFSVGKFDMVTGVGVHVQTLCPCSRAISKYGAHNQRAFVAIKVRCTHFMWFEELIAMAEEAASSPLYTLLKREDEKHVTERAYENPRFVEDVVRDLAVALNREPRVSWYSVSITSAESIHNHDAFAEVTRDKGKPAPPDGERGQR

SEQ ID NO: 8368 - protein, 228 aa, unidentified
  source 1..228: note = Friedmanniella flava
  REGION 1..228: note = tr|A0A1H8Z9K7|A0A1H8Z9K7_9ACTN GTP cyclohydrolase 1; OS = Friedmanniella flava OX=1036181 GN=folE PE=3 SV=1
MWRPEGDGNILTRLGQDVVVSSLDTPDLDQEVDETPPDERPGVDEPRIAAAVREILAAIGEDPDRDGLQKTPERVARAYTEMFAGLRQDPQDVLATTFDLGHDELVLVKDIEVWSCCEHHLVPFTGKAHVGYLPNPDGRITGLSKLARLVDVYAKRPQVQERMTTQIADALERYLKPRGVIVVLECEHLCMTMRGVRKPGSKTITSAVRGHLRTSATTRAEAMNLIRG

SEQ ID NO: 8369 - protein, 217 aa, Friedmanniella luteola
  REGION 1..217: note = tr|A0A1H1LRS7|A0A1H1LRS7_9ACTN GTP cyclohydrolase 1; OS = Friedmanniella luteola OX=546871 GN=folE PE=3 SV=1
MSADRIVDVDGVGQRGVSPAEAPATVPQSIAPFDHARVSAAVREILIGIGEDPDRDGLRETPDRVARAYAEMFAGLHQAPDEVLAKRFDLGFDELVLVKDIEVWSCCEHHLVPFTGVAHIGYIPSKDGTITGLSKLARLVDLYAKRPQVQERLTTQVADALERILQPRGVIVVFECEHLCMTMRGVRKPGSKTVTSAVRGHLRNSATRAEAMGLIRS

SEQ ID NO: 8370 - protein, 209 aa, Friedmanniella sagamiharensis
  REGION 1..209: note = tr|A0A1H2NGM9|A0A1H2NGM9_9ACTN GTP cyclohydrolase 1; OS = Friedmanniella sagamiharensis OX=546874 GN=folE PE=3; SV = 1
MSSLDTPEFDREVDETPPDERPGVDEPRVAAAVREILAAIGEDPERDGLLKTPERVARAYAEMFAGLRQDPQDVLATTFDLGHDELVLVKDIEVWSCCEHHLVPFTGVAHIGYLPNLDGRITGLSKLARLVDVYAKRPQVQERMTTQIADALERYLKPRGVIVVVECEHLCMTMRGVRKPGSKTVTSAVRGHLRTSATTRAEAMHLIRS

SEQ ID NO: 8371 - protein, 195 aa, Frigoribacterium faeni
  REGION 1..195: note = tr|A0A511A7U1|A0A511A7U1_9MICO GTP cyclohydrolase 1; OS = Frigoribacterium faeni OX=145483 GN=folE PE=3 SV=1
MTQQPIDLPRIEAAVLELLAAIGEDPIRPGLVDTPRRVADAYGEFFSGLRVDAVALVRGSAVPAEAAELGELVIVRDIAFRSVCEHHLLPFLGVAHIAYVPGRTILGLGSLPRVVDAVASRPQLQERLGEEIAEALDVGASPDGVLVVLDAAHGCVTARGPRQTESTTVTLASRGVLSETAARAEAIALIGASRG

SEQ ID NO: 8372 - protein, 195 aa, Frigoribacterium sp.
  REGION 1..195: note = tr|A0A3N2I5U1|A0A3N2I5U1_9MICO GTP cyclohydrolase 1; OS = Frigoribacterium sp. PhB118 OX=2485175 GN=folE PE=3 SV=1
MTPPPIDGPRIEAAVLELLAAIGEDVDRPGLESTPRRVADAYAEFFSGLTVDAAELVRQATVPAEAHQLGEVVIVRDISFRSVCEHHLLPFVGVAHVAYVPGETIVGLGALPRVVDAVASRPQLQERLGEEIAEAVETGARPDGVLVVLDASHGCVTTRGPRQTGSTTVTLASRGVLSTPSARAEAVALIGTSRG

SEQ ID NO: 8373 - protein, 195 aa, Frigoribacterium sp.
  REGION 1..195: note = tr|A0A1S2IKA2|A0A1S2IKA2_9MICO GTP cyclohydrolase 1; OS = Frigoribacterium sp. MCBA15_019 OX=1898745 GN=folE PE=3; SV = 1
MTPPPIDRPRIEAAVLELLAAIGEDVDRPGLESTPRRVADAYAEFFSGLSVDASDLVRQATVPAEAHQLGEVVIVRDISFRSVCEHHLLPFVGVAHVAYVPGETIVGLGALPRVVDAVASRPQLQERLGEEIAEAVQAGARPDGVLVVLDASHGCVTTRGPRQTGSTTVTLASRGVLSEPSARAEAVALIGAPRV

SEQ ID NO: 8374 - protein, 219 aa, unidentified
  source 1..219: note = Frischella perrara
  REGION 1..219: note = tr|A0A0A7S5E0|A0A0A7S5E0_FRIPE GTP cyclohydrolase 1; OS = Frischella perrara OX=1267021 GN=folE PE=3 SV=1
MNELSVEAQKVKAALEERNLETPMCSNMMDNHERKVKIEAHFREIMQLMALDLSDDSLIETPRRVAKMYVDEIFSGLDYRNFPKITLIENKMQVDEMITVRDITLTSVCEHHFVTIDGKATVSYIPKSSVIGLSKINRIVQFFSQRPQVQERLTQQILVALQTLLGTVNVAVSIDATHYCVKARGIKDATSTTTTTSLGGGFKTNSSTRQEFLRALKHD

SEQ ID NO: 8375 - protein, 219 aa, unidentified
  source 1..219: note = Frischella perrara
  REGION 1..219: note = tr|A0A318MYN7|A0A318MYN7_FRIPE GTP cyclohydrolase 1; OS = Frischella perrara OX=1267021 GN=folE PE=3 SV=1
MNELSVEAQKVKAALEERNLETPMCSNMMDNHERKVKIEAHFREIMQLMALDLSDDSLIETPRRVAKMYVDEIFSGLDYRNFPKITLIENKMQVDEMITVRDITLTSVCEHHFVTIDGKATVSYIPKSSVIGLSKINRIVQFFSQRPQVQERLTQQILVALQTLLGTVNVAVSIDATHYCVKARGIKDATSTTTTTSLGGGFKTNPSTRQEFLRALKHD

SEQ ID NO: 8376 - protein, 185 aa, unidentified
  source 1..185: note = Frisingicoccus caecimuris
  REGION 1..185: note = tr|A0A4V2SDF4|A0A4V2SDF4_9FIRM GTP cyclohydrolase 1; OS = Frisingicoccus caecimuris OX=1796636 GN=folE PE=3 SV=1
MIDEKKIEAGIRLLLEGIGEDLERPGLKDTPHRIANMYKEIYGGLGADASVHLGKTFPAINNELVLEKDITFYSTCEHHLLPFYGKAHIAYIPDDKVVGLSKLARTVDVFARRPQIQEQMTAQIGDAIMEHLKPKGVMVILQAEHMCMTMRGIKKPGSQTMTYICRGAFENNPELQQMVFQMVKS

SEQ ID NO: 8377 - protein, 217 aa, Frondihabitans australicus
  REGION 1..217: note = tr|A0A495IJN3|A0A495IJN3_9MICO GTP cyclohydrolase 1; OS = Frondihabitans australicus OX=386892 GN=folE PE=3 SV=1
MATDFDRPRLEAAVLEILKAIGDDPSRAGLADTPRRVADAYEEFFAGLRVDVPALLGGSVVAASEGELGELVIVRDIEFRSVCEHHLLPFLGVAHVAYVPGTQIVGLGKIPGLVDALASRPQLQERLGEEIADALSSGVGAAGVLVVLDAVHGCVTSRGARQTHSSTVTIASRGVLADAAGRAEAIALIGSGQTPSTYASAVATADVAGAVAGAGRS

SEQ ID NO: 8378 - protein, 194 aa, Frondihabitans sp.
  REGION 1..194: note = tr|A0A0Q5CGQ5|A0A0Q5CGQ5_9MICO GTP cyclohydrolase 1; OS = Frondihabitans sp. Leaf304 OX=1736329 GN=folE PE=3 SV=1
MTTRFDRPRIEAAVAEILAAIGDDPARPGLVDTPRRVADAYEEFFSGLDVDVSALMGTSVVPAESGELGELVIVRDIEFRSVCEHHLLPFVGVAHVAYVPGAQIVGLGRIPGLVDALASRPLLQERLGEDIVRALDDAVAPAGVLVVLDAVHGCVTTRGARQTHSSTVTVASRGTLSDPAGRAEAIALIGGPAA

SEQ ID NO: 8379 - protein, 218 aa, Frondihabitans sp.
  REGION 1..218: note = tr|A0A2R2WC32|A0A2R2WC32_9MICO GTP cyclohydrolase 1; OS = Frondihabitans sp. 762G35 OX=1446794 GN=folE PE=3 SV=1
MSDPVEKPAAFDRPRVEAAVAEILRAIGDDPSRSGLVDTPRRVADAYAEFFGGLATDPLDLLRGAVVPAEPGELGELVIVRDVEFRSVCEHHLLPFLGVAHVAYVPGEKIVGLGRIPGLVDALASRPQLQERLGEEIADALQQGVEPRGVLVVLDAAHGCVTSRGSRQSHSTTVTVASRGSLAEPAGRAEAIALIGAGRGAASRGGDAARAETGAERG

SEQ ID NO: 8380 - protein, 262 aa, Fructobacillus sp.
  REGION 1..262: note = tr|A0A0J5PE62|A0A0J5PE62_9LACT Putative GTP cyclohydrolase 1 type 2 OS=Fructobacillus sp. EFB-N1; OX = 1658766 GN=FEFB_02600 PE=4 SV=1
MVKASELIEQIEGFAPKSLAEPGDPTGLQIGQPEQKIHRVLTTLDVRPEVVQEAIDLGADFIWAHHEAMFRPAKNLDLSNPQNAMYALAIKNNIVIYASHTNLDAATGGLNDWLCQAFGIENQIPLLPGEGDQPGMGRIGELKVAMTMADFAKQVKAVCQVDAVRLIANDANKVVKRVAVLGGDGGKFWKKAQEAGADLYLTADLYYHVGHDILAADFAVLDPDHHMEALAKEPMAKKVQEWFAWQLPVTASQKNTDPYTYF

SEQ ID NO: 8381 - protein, 188 aa, Fructobacillus sp.
  REGION 1..188: note = tr|A0A0J5S796|A0A0J5S796_9LACT GTP cyclohydrolase 1; OS = Fructobacillus sp. EFB-N1 OX=1658766 GN=folE PE=3 SV=1
MDSKNQKIIEDAVRTILTAVGEDVNREGLLETPERVAKMYAEVFGAVNTDFTNFTVFDSTEDDVDQEVITVKKIPFYSMCEHHLLPFFGEVSLAYIPNDGKIVGLSKVPRLIGHVAKKPNVQERLTSEVAQKLDELIHPKGIAIVVRARHMCMEMRGVRSVGNITETTYYMGEFKGDLAKQSLFLQQA

SEQ ID NO: 8382 - protein, 192 aa, Fructobacillus tropaeoli
  REGION 1..192: note = tr|A0A3F3GZW0|A0A3F3GZW0_9LACT GTP cyclohydrolase 1; OS = Fructobacillus tropaeoli OX=709323 GN=folE PE=3 SV=1
MEKTMDSKNQKIIEDAVRTILTAVGEDVNREGLLETPERVAKMYAEVFGAVNTDFTNFTVFDSTEDDVDQEVITVKKIPFYSMCEHHLLPFFGEVSLAYIPNDGKIVGLSKVPRLIGHVAKKPNVQERLTSEVAQKLDELIHPKGIAIVVRARHMCMEMRGVRSVGNITETTYYMGEFKGDLAKQSLFLQQA

SEQ ID NO: 8383 - protein, 205 aa, unidentified
  source 1..205: note = Fuerstia marisgermanicae
  REGION 1..205: note = tr|A0A1P8WMQ5|A0A1P8WMQ5_9PLAN GTP cyclohydrolase 1; OS = Fuerstia marisgermanicae OX=1891926 GN=folE PE=3 SV=1
MTDPKDTLASGATPPEARHIDKPRIEAAVREILMAVGEDPDRDGLQETPARVARMYAEMFGGLHMDPGRHLHKVFEEQYDEMVLVRDISFHSMCEHHLLPFIGTAHVGYIPRGKVTGLSKLARVVDEVSRRPQVQERMTHMVADLVESELDAKGVIVVLEAEHTCMTIRGVKKPGAITITSAVRGLLKKDASSRAEAMSLINKHS

SEQ ID NO: 8384 - protein, 206 aa, unidentified
  source 1..206: note = Fulvimarina manganoxydans
  REGION 1..206: note = tr|A0A1W1ZXF2|A0A1W1ZXF2_9RHIZ GTP cyclohydrolase 1; OS = Fulvimarina manganoxydans OX=937218 GN=folE PE=3 SV=1
MEAVVKKFPEPASTDQERPSREEAEEAVRTLLRWMGEDPHREGLLETPARVVKAYSELFGGYKMEAGDVLGRTFEDVSGYEDMVLVKDIDFHSHCEHHMVPIIGKAHVAYVPNGRVLGLSKIARLVDIYARRLQTQESMTAQIATAMESLLKPKGVAVMIDASHLCMSMRGIRSKDATTITSAFHGQFRDDKDLAQRFMRLVGQAS

SEQ ID NO: 8385 - protein, 245 aa, Fulvimarina pelagi
  REGION 1..245: note = tr|Q0G2H2|Q0G2H2_9RHIZ GTP cyclohydrolase 1; OS = Fulvimarina pelagi HTCC2506 OX=314231 GN=folE PE=3 SV=1
MTKDTETNLPVPTRSHEAPDVHSVWVAARIPHFREKAAMEAVVKQFPDRSKIENADRPDRVEAEEAVRTLLRWMGEDPSREGLLETPARVVKAYEELFGGYKQDAADILGRTFEDVSGYEDMVLVKDIDFHSHCEHHMVPIIGKAHVAYVPNGRVLGLSKIARLVDIYGRRLQTQESMTAQIADAMQRLLQPSGVAVMIDAEHLCMSMRGIRSKDATTITTAFNGEFKSDKELSRRFMKLVGQTA

SEQ ID NO: 8386 - protein, 207 aa, Fulvimarina sp.
  REGION 1..207: note = tr|A0A2E1H877|A0A2E1H877_9RHIZ GTP cyclohydrolase 1; OS = Fulvimarina sp. OX=1969479 GN=folE PE=3 SV=1
MDAVVKKFPEKPEDGEFQRPSRAEAEAAVATLLRWIGENPKREGLKETPKRVVKAYEELFGGYGHEPSEVLGRVFEEVAGYNDIVLVKDISFHTHCEHHMVPVLGKAHIAYLPDGKVLGLSKIARLVDMFGRRLQTQEAMTAQIADALDRTLKPRGVAVILEAEHLCMSMRGIRSHGSSTYTGTYRGVFADDQAQQDRILRLIGLSA

SEQ ID NO: 8387 - protein, 207 aa, Fulvimarina sp.
  REGION 1..207: note = tr|A0A371WYF0|A0A371WYF0_9RHIZ GTP cyclohydrolase 1; OS = Fulvimarina sp. 85 OX=2293836 GN=folE PE=3 SV=1
MEAVVKPFPASAGTEAAGRPDRAEAEEAVRTLLRWMGEDPTREGLLETPARVVKAYGELFGGYKQEAGDVLGRTFEDVSGYEDMVLVKDIDFHSHCEHHMVPIIGKAHVAYVPHGRVLGLSKIARLVDIYGRRLQTQESMTAQIADAMQRLLQPAGVAVMIEAEHLCMSMRGIRSRGATTITTAFNGAFKTDAELTRRFMKLSGQST

SEQ ID NO: 8388 - protein, 313 aa, Fulvimonas soli
  REGION 1..313: note = tr|A0A316I4Q3|A0A316I4Q3_9GAMM GTP cyclohydrolase FolE2 OS=Fulvimonas soli OX=155197 GN=folE2 PE=3 SV=1
MHSHENTARLLPDVAVQAQPHLAGALDWVGMDGIEAPVSFDAGDGQVQRASAQVGAFVNLVRPDRRGIHMSRLYLLVDEYLSKRALDATTLEALLRAFLESHKDLADRARISIRFEHLVRRAALRSANSGWRAYPVSIEACLGAEGFRLELGTEVVYSSTCPASAALSRQLIQEQFARDFEAGRPLDREAVLAWLGSDKGIVATPHAQRSVARLLVRFVPGAKLDLIGLLDRVEAALGTPVQTAVKREDEQAFALANGGNLMFCEDAARRIQRALDADAAIADFHVRLEHQESLHPHDAVAYASKGVAGGYGG

SEQ ID NO: 8389 - protein, 200 aa, Fulvimonas soli
  REGION 1..200: note = tr|A0A316I8H3|A0A316I8H3_9GAMM GTP cyclohydrolase 1; OS = Fulvimonas soli OX=155197 GN=folE PE=3 SV=1
MSEPANPPSVTREQAEEAVRTLLRWAGEDPSREGLLDTPKRVVKAYRDWFSGYAEDPAEFLKRTFKEVEGYDEMVVLRDIEFESHCEHHMAPIIGRAHVGYLPTHRVVGISKLARVVEGYARRFQVQEKLTAQIANCISETLMPRGVAVVIDASHECMTTRGVHKRGVSMITSQMLGVFRDDARTRAEFLQFIGIDRGHR

SEQ ID NO: 8390 - protein, 229 aa, unidentified
  source 1..229: note = Fulvivirga imtechensis
  REGION 1..229: note = tr|L8JM64|L8JM64_9BACT GTP cyclohydrolase 1; OS = Fulvivirga imtechensis AK7 OX=1237149 GN=folE PE=3 SV=1
MKPKEILLNTRHEDDITDDLGDDHVASSYDTPLRPDAFAMSDEEKMKKIEGHFREIMNIMGLDLKDDSLSGTPKRVAKMFVKEIFSGLNPANKPHARLFENKYKYDQMLVEKDITFYSHCEHHFVPIFGKVHVAYISSGKVIGLSKINRIVQYYAKRPQVQERLTVQISKDLQKALKTEDVGVVVDATHLCVASRGVGDTNSKTGTAYFSGKFKENQTKNEFLNYINSK

SEQ ID NO: 8391 - protein, 229 aa, Fulvivirga sp.
  REGION 1..229: note = tr|A0A553FUB3|A0A553FUB3_9BACT GTP cyclohydrolase 1; OS = Fulvivirga sp. M361 OX=2594266 GN=folE PE=3 SV=1
MKPNEILLNTPFKRDYGDDIGDDHVASSYNTPLRPDAFDLSESEKIEKIEQHFEEIMNILGLDLSDDSLKGTPRRVAKMYVQEVFSGLDPENQPEMTLFENKYKYNQMLVEKDITFYSHCEHHFVPIYGKAHVAYISSGKVIGLSKINRIVQYFSKRPQVQERLTVQIGNELKKALQTEDVAVVVDATHLCVASRGVGDTNSKTGTAFFSGKFEETQIKNEFLNYINSH

SEQ ID NO: 8392 - protein, 193 aa, Fusibacter sp.
  REGION 1..193: note = tr|A0A1B6BAF4|A0A1B6BAF4_9FIRM GTP cyclohydrolase 1; OS = Fusibacter sp. 3D3 OX=1048380 GN=folE PE=3 SV=1
MIDQKRLESAFKEILEALGENPDREGLVDTPERFAKMCMENFAGIAYSNAEIAKLYDVTFEDETYYEAGTDDFVLMKDIEIFSYCEHHFALMYNMKVAVAYMPKQKVIGLSKITRVADLVGKRLQLQERIGKDIAEIIQLISESEDVAVIIEGEHSCMTTRGIRKPGAKTITKTFRGRFKSEPYLANQIIGLL

SEQ ID NO: 8393 - protein, 189 aa, Fusibacter sp.
  REGION 1..189: note = tr|A0A4Q2A3D7|A0A4Q2A3D7_9FIRM GTP cyclohydrolase 1; OS = Fusibacter sp. A1 OX=2283630 GN=folE PE=3 SV=1
MDKPRIERAVREILEAMGEDPDREGLVDTPKRIAKMYEEIFAGLNEDPGKHLEVFFQEEQHSELVLVKDIPFYSTCEHHFAPFFGKAHVGYIPKDGRLTGLSKLARVVETVARRPQLQERLTSTIADTLVDKLDPYGVIVVVEAEHMCMTMRGVKKAGSQTITSAVRGTLEKDAKSRAEAMSLIQFRSR

SEQ ID NO: 8394 - protein, 185 aa, unidentified
  source 1..185: note = Fusicatenibacter saccharivorans
  REGION 1..185: note = tr|A0A174SH39|A0A174SH39_9FIRM GTP cyclohydrolase 1; OS = Fusicatenibacter saccharivorans OX=1150298 GN=folE PE=3; SV = 1
MNKEKIQEGVKLILEGIGEDINREGLLETPDRIARMYEELAAGYTDCAAEHLRKRFHVDNNDMVMEKEIPFYSFCEHHMLPFYGTAAIAYIPDGEVVGLSKMARTLEVFAKRLQLQERLTAQIADVFMEELKPHGVMVLIEAEHMCMTMRGIKKPGTKTVTVVTRGVFDGDEKLQNQFYRMLERR

SEQ ID NO: 8395 - protein, 185 aa, unidentified; identical to SEQ ID NO: 7783
  source 1..185: note = Fusicatenibacter sp.
  REGION 1..185: note = tr|A0A174XSY5|A0A174XSY5_9FIRM GTP cyclohydrolase 1; OS = Fusicatenibacter sp. 2789STDY5834925 OX=1806509 GN=folE; PE = 3 SV=1

SEQ ID NO: 8396 - protein, 186 aa, unidentified
  source 1..186: note = Fusobacteria bacterium
  REGION 1..186: note = tr|A0A432I830|A0A432I830_9BACT GTP cyclohydrolase 1; OS = Fusobacteria bacterium OX=2060921 GN=folE PE=3 SV=1
MDKKMIMDGVKLILQGMGEDISREGLVGTPDRVARMFEEICGGLHKDPAEEISVFFHVNNNDMVIVKDIQFYSLCEHHLLPFYGKVHIAYIPEEGKVTGLSKLARVVDVASKKPQLQERLNNEIVVALMNKLKAKGVLVVIEAEHMCMTMRGIQKPGSKTITSGIRGIFKENLATREEALSLIKHM

SEQ ID NO: 8397 - protein, 115 aa, unidentified
  source 1..115: note = Fusobacteriia bacterium
  REGION 1..115: note = tr|A0A1W9VX68|A0A1W9VX68_9BACT GTP cyclohydrolase 1; OS = Fusobacteriia bacterium 4572_74 OX=1972457; GN = B6227_06060 PE=3 SV=1
MDKNKIMDGVKLILEGMGEDINREGLIGTPDRVARMFGEICGGLHKDPADEISIFFHVDHNDMVIVKDIQFYSLCEHHLLPFYGKVHIAYIPENGKVTGLSKLIKDNYIWGKRNI

SEQ ID NO: 8398 - protein, 186 aa, unidentified
  source 1..186: note = Fusobacteriia bacterium
  REGION 1..186: note = tr|A0A1W9TF36|A0A1W9TF36_9BACT GTP cyclohydrolase 1; OS = Fusobacteriia bacterium 4572_132 OX=1971640 GN=folE; PE = 3 SV=1
MDIAKLEKATRMILEAIGEDPDREGLVDTPKRVARMYEEIFAGIKKDPSDEVSVFFTEEHNEMILVKDIPLYSMCEHHLIPFIGKAHVAYLPGESGKVTGLSKIARVVDVVSKRPQLQERLTTVVAETLMEKLAAKGVLVVVEAEHLCMAMRGVKKPGTKTITSAVRGIFKEDLATRQEAFTLIKY

SEQ ID NO: 8399 - protein, 183 aa, Fusobacterium canifelinum
  REGION 1..183: note = tr|A0A3P1UQT8|A0A3P1UQT8_9FUSO GTP cyclohydrolase 1; OS = Fusobacterium canifelinum OX=285729 GN=folE PE=3 SV=1
MDSKRIENAFVEVVEALGDVEYKEELKDTPKRIADSYKEIFYGIGVDPKEVLTRTFEINNNELIIEKNIDFYSMCEHHFLPFFGTICIAYIPNKKIFGFGDILKLIEILSRRPQLQERLTEEIAKYIYELLDCQGVYVVVEAKHLCMTMRGQKKENTKILTTSAKGVFETDINKKLEVLTLLK

SEQ ID NO: 8400 - protein, 191 aa, Fusobacterium equinum
  REGION 1..191: note = tr|A0A133N8C2|A0A133N8C2_9FUSO GTP cyclohydrolase 1; OS = Fusobacterium equinum OX=134605 GN=folE PE=3 SV=1
MIDKKVIQEHVKGLLLALGEDPNREGLLETPKRVANMYEEIFEGIQYSNQELATMFGKTFEGDSETNSDDMVIIRDIEIFSVCEHHLALMYDMKVTVAYIPNKKLLGLSKVARICDMVGKRLQLQERIGRDIAEIMQKVTDSEDIAVLIQGKHSCMTMRGIKKQQSITETSCFLGKFKENLVLQNRLYQRL

SEQ ID NO: 8401 - protein, 184 aa, Fusobacterium equinum
  REGION 1..184: note = tr|A0A133NK74|A0A133NK74_9FUSO GTP cyclohydrolase 1; OS = Fusobacterium equinum OX=134605 GN=folE PE=3 SV=1
MDEKRIAKAFEEILEAIGENRNREGLEETPIRVAKSYQELFSGIGQDPRKVLQRTFNVKKNDYIIEKQIDFYSMCEHHFLPFFGKIDIAYIPNGKILGFGDLLKLVDILSKRPQIQERLTEEIATYLYEELRCQGVFVRVKAKHLCMTMRGEKKENTEIITVSSNGVFEMDSQKRFEVLQLLNS

SEQ ID NO: 8402 - protein, 184 aa, Fusobacterium gonidiaformans; identical to SEQ ID NO: 8401
  REGION 1..184: note = tr|E5BGN7|E5BGN7_9FUSO GTP cyclohydrolase 1; OS = Fusobacterium gonidiaformans 3-1-5R OX=469605 GN=folE; PE = 3 SV=1

SEQ ID NO: 8403 - protein, 191 aa, Fusobacterium gonidiaformans
  REGION 1..191: note = tr|E5BED6|E5BED6_9FUSO GTP cyclohydrolase 1; OS = Fusobacterium gonidiaformans 3-1-5R OX=469605 GN=folE; PE = 3 SV=1
MIDKKAIQEHVKGLLLALGEDPNREGLLETPKRVANMYEEIFEGIQYSNQELATMFGKTFEGDSETNSDDMVIIRDIEIFSVCEHHLALMYDMKVTVAYIPNKKLLGLSKVARICDMVGKRLQLQERIGRDIAEIMQKVTDSEDIAVLIQGKHSCMTMRGIKKQQSITETSCFLGKFKENLVLQNRLYQRL

SEQ ID NO: 8404 - protein, 183 aa, unidentified
  source 1..183: note = Fusobacterium hwasookii
  REGION 1..183: note = tr|A0A0S2ZIW6|A0A0S2ZIW6_9FUSO GTP cyclohydrolase 1; OS = Fusobacterium hwasookii ChDC F300 OX=1307444 GN=folE; PE = 3 SV=1
MDSKRIENAFIEVVEALGDVEYKEELKDTPKRIADSYKEIFYGIGIEPKEVLTRTFDINNNELIIEKNIDFYSMCEHHFLPFFGTICIAYIPNKKIFGFGDILKLIEILSRRPQLQERLTEEIAKYIYDLLDCQGVYVVVEAKHLCMTMRGQKKENTKILTTSAKGVFETDINKKLEVLTLLK

SEQ ID NO: 8405 - protein, 183 aa, unidentified
  source 1..183: note = Fusobacterium hwasookii
  REGION 1..183: note = tr|J8VJH2|J8VJH2_9FUSO GTP cyclohydrolase 1; OS = Fusobacterium hwasookii ChDC F128 OX=1216362 GN=folE; PE = 3 SV=1
MDSKRIENAFIEVVEALGDVEYKEELKDTPKRIADSYKEIFYGIGIDPKEVLTRTFDINNNELIIEKSIDFYSMCEHHFLPFFGTICIAYIPNKKIFGFGDILKLIEILSRRPQLQERLTEEIAKYIYDLLDCQGVYVVVEAKHLCMTMRGQKKENTKILTTSAKGVFETDINKKLEVLTLLK

SEQ ID NO: 8406 - protein, 183 aa, Fusobacterium mortiferum
  REGION 1..183: note = tr|A0A414PXG6|A0A414PXG6_FUSMR GTP cyclohydrolase 1; OS = Fusobacterium mortiferum OX=850 GN=folE PE=3 SV=1
MELKKIEKAFEQILEGIGEDRNREGLIDTPKRVAQSYEELFSGIDKNPEEPLLRYFSVDSNDLVMEKNIDFYSMCEHHFLPFFGTIDVAYIPNGKVVGFGDIIKSIEILAKRPQIQERLGSELADVIYKTLDCQGVMVIIKAKHLCMTMRGAKKENSQIITTACRGIFEKDSNRRVEVLTLLK

SEQ ID NO: 8407 - protein, 183 aa, Fusobacterium mortiferum
  REGION 1..183: note = tr|C3WF72|C3WF72_FUSMR GTP cyclohydrolase 1; OS = Fusobacterium mortiferum ATCC 9817 OX=469616 GN=folE; PE = 3 SV=1
MELKKIEKAFEQILEGIGEDRNRESLMDTPKRVAQSYEELFSGIDKNPEEPLLRYFSVDSNDLVMEKNIDFYSMCEHHFLPFFGTIDVAYIPNGKVVGFGDIIKSIEILAKRPQIQERLGSELADVIYKTLDCQGVMVIIKAKHLCMTMRGAKKENSQIITTACRGIFEKDSNRRVEVLTLLK

SEQ ID NO: 8408 - protein, 183 aa, Fusobacterium necrogenes
  REGION 1..183: note = tr|A0A377GYL9|A0A377GYL9_9FUSO GTP cyclohydrolase 1; OS = Fusobacterium necrogenes OX=858 GN=folE_2 PE=3 SV=1
MELKKIEKAFEMILDGIGEDKNREGLVDTPKRVAQSYEEFFSGVNKDPIEPLLKYFSVENNDLVMERNIDFYSMCEHHFLPFFGTIDIAYIPNGKIVGFGDIIKSIEILTKRPQIQERLGSELADVIYRTLNCQGVMVAIRAKHLCMTMRGVKKENSQIITTAYRGVFEDDAARRIEILTLLK

SEQ ID NO: 8409 - protein, 191 aa, Fusobacterium necrogenes
  REGION 1..191: note = tr|A0A377GWL6|A0A377GWL6_9FUSO GTP cyclohydrolase 1; OS = Fusobacterium necrogenes OX=858 GN=folE_1 PE=3 SV=1
MIDKEAIEKHIRGILIALGDNPDREGLIETPKRVANMYEEIFQGMNYTNDEIVEMYNKSFEVLNNLESNDMVIVKDIEIFSCCEHHLALMYDMSVTVAYIPKDKVIGLSKIARICDMIGKRLQLQERIGRDIAYIVSKIINSEDIAVLIKGKHSCMTARGINKTNSFTETSIFMGEFKENYVLQNRLFNRL

SEQ ID NO: 8410 - protein, 184 aa, Fusobacterium necrophorum
  REGION 1..184: note = tr|J5W2M9|J5W2M9_9FUSO GTP cyclohydrolase 1; OS = Fusobacterium necrophorum subsp. funduliforme Fnf 1007; OX = 1161424 GN=folE_2 PE=3 SV=1
MDEKKIVKAFEEILEAIGENKHREGLEETPTRIAKSYRELFSGIGQDPRNVLQRTFAVKKNDYIIEKNIDFYSMCEHHFLPFFGKIDIAYIPDGKILGFGDLLKLVDVLSKRPQIQERLTEEIARYLYECLRCQGVFVRVKAKHLCMTMRGEKKENTEIITVSSNGLFQVDSQKRLEVLQLLHS

SEQ ID NO: 8411 - protein, 191 aa, Fusobacterium necrophorum
  REGION 1..191: note = tr|A0A017H4K8|A0A017H4K8_9FUSO GTP cyclohydrolase 1; OS = Fusobacterium necrophorum subsp. funduliforme B35; OX = 1226633 GN=folE PE=3 SV=1
MVDKKAIQEHIRGLLIALGEDPEREGLLETPERVANMYEEIFEGIQYSNADLAKMFGKTFEGDHPTESDDMVIVRDIEIFSVCEHHLALMYDMKVTVAYLPNKKLLGLSKVARICDMVGKRLQLQERMGRDIAEIMQKVTDSQDVAVFIQGKHSCMTMRGIKKQQSITETSCFLGKFKENLLLQNRVYSRS

SEQ ID NO: 8412 - protein, 187 aa, Fusobacterium nucleatum
  REGION 1..187: note = sp|Q8RH43|GCH1_FUSNN GTP cyclohydrolase 1; OS = Fusobacterium nucleatum subsp. nucleatum (strain ATCC 25586 / CIP 101130 / JCM 8532 / LMG 13131) OX=190304; GN = folE PE=3SV=1
MEEKMDSKRIENAFFEVIEALGDVEYKEELKDTPKRIADSYKEIFYGIDIDPKEVLTKTFEVNSNELIMEKNMDFYSMCEHHFLPFFGTVCIAYVPNKKIFGFGDILKLIEILSRRPQLQERLTEEIAKYIYEILNCQGVYVVVEAKHLCVTMRGQKKENTKILTTSAKGVFETDSNKKLEVLTLLK

SEQ ID NO: 8413 - protein, 183 aa, Fusobacterium nucleatum
  REGION 1..183: note = tr|Q7P4X3|Q7P4X3_FUSNV GTP cyclohydrolase 1; OS = Fusobacterium nucleatum subsp. vincentii ATCC 49256; OX = 209882 GN=folE PE=3 SV=1
MNSKKIENAFVEVIEALGDVEYKEELKDTPKRIADSYKEIFYGINIDPKEVLTRTFEVNSNELIIEKNIDFYSMCEHHFLPFFGTICIAYIPNKKIFGFGDILKLIEILSRRPQLQERLTEEIAKYIYEILNCQGVYVVVEAKHLCMTMRGQKKENTKILTTSAKGIFETDINKKLEVLTLLK

SEQ ID NO: 8414 - protein, 183 aa, Fusobacterium periodonticum
  REGION 1..183: note = tr|K1GJV8|K1GJV8_9FUSO GTP cyclohydrolase 1; OS = Fusobacterium periodonticum D10 OX=620833 GN=folE PE=3; SV = 1
MDSKRIENAFLEVVEALGDVEYKAELKDTPKRIADSYKEIFYGIGIDPKEVLTRTFDINNNELIMEKNIDFYSMCEHHFLPFFGTICIAYVPNKKIFGFGDILKLIEILSRRPQLQERLTEEIARYIYELLDCQGVYVVVEAKHLCMTMRGQKKENTKILTTSAKGIFETDINKKLEVLALLK

SEQ ID NO: 8415 - protein, 187 aa, Fusobacterium periodonticum
  REGION 1..187: note = tr|A0A2D3LVP5|A0A2D3LVP5_9FUSO GTP cyclohydrolase 1; OS = Fusobacterium periodonticum OX=860 GN=folE PE=3 SV=1
MGYINTVTQTDENTIKAEKGIVDLLIALGEDPEREGLKDTPKRVVKAFKEMTSGYGVNVNEILSKTFTSDNNNEVEINDIQFNSLCEHHMLPFIGTVKVKYTPKNGKVVGLSKIPRVVEAFAKRLQIQEKMTKEIAEAIQTNLDCAGVYVEVEARHMCMELRGIKARGSKTKTVYKTGCYLRGDNNC

SEQ ID NO: 8416 - protein, 183 aa, Fusobacterium sp.
  REGION 1..183: note = tr|X8HDH2|X8HDH2_9FUSO GTP cyclohydrolase 1; OS = Fusobacterium sp. CM22 OX=936563 GN=folE PE=3 SV=1
MDSKRIENAFIEVVEALGDVEYKEELKDTPKRIADSYKEIFYGIGVDPKEVLTRTFEINNNELIIEKNIDFYSMCEHHFLPFFGTICIAYIPNKKIFGFGDILKLIEILSRRPQLQERLTEEIAKYIYDLLDCQGVYVVVEAKHLCMTMRGQKKENTKILTTSAKGVFETDINKKLEVLTLLK

SEQ ID NO: 8417 - protein, 183 aa, Fusobacterium sp.
  REGION 1..183: note = tr|R5X116|R5X116_9FUSO GTP cyclohydrolase 1; OS = Fusobacterium sp. CAG:649 OX=1262900 GN=folE PE=3 SV=1
MDSKKIENAFVEVIEALGEAQYKEELKDTPKRIADSYKEIFYGIGINPKEVLKRTFEVNSDELIIEKNIDFYSMCEHHFLPFFGTICIAYIPNKKIFGFGDILKLIEILSRRPQLQERLTEEIAKYIYEILNCQGVYVVVEAKHLCMTMRGQKKENTKILTTSAKGIFETDINKKLEVLTLLK

SEQ ID NO: 8418 - protein, 186 aa, Fusobacterium ulcerans
  REGION 1..186: note = tr|A0A2P1S4G4|A0A2P1S4G4_9FUSO GTP cyclohydrolase 1; OS = Fusobacterium ulcerans OX=861 GN=folE PE=3 SV=1
MKKIDVDKIENAFRDILDALGENVKREGLEDTPKRVAQSYGELFSGLFQNPEDVLKRTFEVEKNDLIVEKNIDFYSMCEHHFLPIFGKIDIAYIPNGKIVGFGDIIKVIDILSKRPQIQERLGAQIADAIYETLNCQGVMIIIKAKHMCMTMRGEKKVNSEIITTSYRGVFEDDAVRRMEILSLLK

SEQ ID NO: 8419 - protein, 186 aa, Fusobacterium ulcerans
  REGION 1..186: note = tr|H1PV36|H1PV36_9FUSO GTP cyclohydrolase 1; OS = Fusobacterium ulcerans 12-1B OX=457404 GN=folE PE=3 SV=1
MKKIDVDKIENAFRDILDALGENVKREGLEDTPKRVAQSYGELFSGLFQNPEDVLKRTFEVEKNDLIVEKNIDFYSMCEHHFLPIFGKIDIAYIPNGKIVGFGDIIKVIDILSKRPQIQERLGAQIADAIYETLNCQGVMIIIKAKHMCMTMRGEKRVNSEIITTSYRGVFEDDAVRRMEILSLLK

SEQ ID NO: 8420 - protein, 186 aa, Fusobacterium varium
  REGION 1..186: note = tr|A0A414TX85|A0A414TX85_FUSVA GTP cyclohydrolase 1; OS = Fusobacterium varium OX=856 GN=folE PE=3 SV=1
MKKIDENKIENAFRDIIDALGENINREGLKDTPKRMAQSYGELFSGLLQNPEDVLKRTFEVEKNDLIVEKNIDFHSMCEHHFLPIFGKIDIAYIPNGKIVGFGDIIKVIDILSKRPQIQERLGAQIADAIYETLNCQGVMIIIKAKHMCMTMRGEKRVNSEIITTSYRGIFENDAVRRMEIFSLLK

SEQ ID NO: 8421 - protein, 186 aa, Fusobacterium varium
  REGION 1..186: note = tr|C6JJY4|C6JJY4_FUSVA GTP cyclohydrolase 1; OS = Fusobacterium varium ATCC 27725 OX=469618 GN=folE PE=3; SV = 1
MKKIDENKIENAFRDIIDALGENINREGLKDTPKRMAQSYGELFSGLLQNPEDVLKRTFEVEKNDLIVEKDIDFHSMCEHHFLPIFGKIDIAYIPNGKIVGFGDIIKVIDILSKRPQIQERLGAQIADAIYETLNCQGVMIIIKAKHMCMTMRGEKRVNSEIITTSYRGIFENDAVRRMEIFSLLK

SEQ ID NO: 8422 - protein, 225 aa, Gaetbulibacter sp.
  REGION 1..225: note = tr|A0A2G5GGB3|A0A2G5GGB3_9FLAO GTP cyclohydrolase 1; OS = Gaetbulibacter sp. 4G1 OX=1891971 GN=folE PE=3 SV=1
MKIENKIEDFESLGDDHIGTSSNTPLRNDAFKLSNEEKIDIIKDDVRHIMETLGLDLSDDSLSGTPNRVAKMFVKEIFGGLNPKKKPSASTFDNKYKYGEMLVEKNITVYSTCEHHLLPIVGKAHIAYISNGTVVGLSKMNRIVDYFAKRPQVQERLTIQVVKELQEVLDTKDVACVIDAKHLCVNSRGIRDIESSTVTSEFGGKFKEEATRREFLDYIKLDTKF

SEQ ID NO: 8423 - protein, 231 aa, Gaetbulibacter sp.
  REGION 1..231: note = tr|A0A2G5KUY1|A0A2G5KUY1_9FLAO GTP cyclohydrolase 1; OS = Gaetbulibacter sp. 5U11 OX=1889780 GN=folE PE=3 SV=1
MIKQNAMPTLNHQDLNGIDYQDIGDDHMYTGLETPMKSDAFKFSDEIKKEKIAILFEEIMDVMGLDLTDDSLKGTPKRVAKMYIDEIFSGLNPQNKPKIALFDNKYKYNQMLVEKNITFYSNCEHHFVPIIGKAHVAYISSGKVIGLSKLNRIVQYFAKRPQVQERLTNQIAEELKAALQTDDVAVIIDAKHLCVSSRGIKDETSATVTTFYGGRFNTPEKIAELQNYLKE

SEQ ID NO: 8424 - protein, 189 aa, unidentified
  source 1..189: note = Gaiellales bacterium
  REGION 1..189: note = tr|A0A419GM38|A0A419GM38_9ACTN GTP cyclohydrolase 1; OS = Gaiellales bacterium OX=2093372 GN=folE PE=3 SV=1
MDPEKIKSGVRLILEGIGEDPGRDGLSSTPERVAAMYEDIFSGLAVEPTSVISTMPGDRHQEMILLKDISYFSMCEHHLLPFFGKAHLAYIPSKGGLITGLSKLTHLVQVVARRPQLQERMTSMIADSLEEALEPRGVLVLVEAEHLCMAMRGIRSPAQTVTSAVRGIFRTNAATRAEALSLINAGSGQ

SEQ ID NO: 8425 - protein, 226 aa, unidentified
  source 1..226: note = Galbibacter marinus
  REGION 1..226: note = tr|K2PRT7|K2PRT7_9FLAO GTP cyclohydrolase 1; OS = Galbibacter marinus OX=555500 GN=folE PE=3 SV=1
MKIDKALEDHYEDLGNDHVSSAAETPMRADAFELSDDQKIEQIESQMYTILETLGLDLTDDSLRGTPRRVAKMFVKEIFAGLHPDRRPKASTFSNKYKYGEMLVEKNITVYSTCEHHLLPIVGRAHIAYISNGSVVGLSKMNRIVDYFAKRPQVQERMTMQIVQELQRALNTKDVACVIDAKHLCVNSRGIRDIESSTVTAEFGGKFKDNAVRREFLDYIKLDTEF

SEQ ID NO: 8426 - protein, 198 aa, unidentified
  source 1..198: note = Galbibacter marinus
  REGION 1..198: note = tr|K2PXA9|K2PXA9_9FLAO GTP cyclohydrolase 1; OS = Galbibacter marinus OX=555500 GN=folE PE=3 SV=1
MGYKTFDEYAIQTTDELKNNYSNIIKELGEDPKREGLFKTPERAAKAMQFLTQGYDQDATQIIKSAMFKEDYNEMVIVKDIELYSLCEHHLLPFFGKAHIAYIPNGYIVGLSKLPRIVDVFSRRLQVQERLTHDILECINNTLNPQGVAVVIEASHMCMMMRGVQKQNSTTTTSGFRGQFEKIETRNEFLKLISTDLS

SEQ ID NO: 8427 - protein, 296 aa, Gallaecimonas pentaromativorans
  REGION 1..296: note = tr|A0A3N1P4A6|A0A3N1P4A6_9GAMM GTP cyclohydrolase FolE2 OS=Gallaecimonas pentaromativorans OX=584787; GN = folE2 PE=3 SV=1
MTHALPDVSLSESPLNASALEWVGMEGIDLPITLAEPGYRRQLHAKVDMQVDLPEPGIKGIHMSRLYRLLEPLANGRALLPGRLRQLLRAMVASHGDCHSSHARLRLHFSLLVRRAALKSDGLSGWKAYPMVIDASLVGGQVALTSQVTVAYSSTCPCSAALTRQLQEQGFLAAFAGQGLLAPETVAAWLRQHGTLATPHSQRSLAEVSVSHSSGAGHFGLLGLIDTIEQALATPVQTAVKRADEQAFAALNGQNLMFVEDAARRLQGALAHYPEAKIKVRHMESLHPHDAIAMAG

SEQ ID NO: 8428 - protein, 183 aa, Gallaecimonas pentaromativorans
  REGION 1..183: note = tr|A0A3N1PHV4|A0A3N1PHV4_9GAMM GTP cyclohydrolase 1; OS = Gallaecimonas pentaromativorans OX=584787 GN=folE PE=3; SV = 1
MTEQLAKHYEAIIRGLGEDPSREGLLKTPERAAKAMQYLTQGYQQSLEELVNGAVFSSDNDELVIVKDIELYSLCEHHLLPFVGKCHIGYLPNGKVLGLSKFARIVDMFARRLQIQENLTRQIALAVEEVTGAQGVAVVIEAKHMCMMMRGVEKQNSSMKSSVMLGSFRESTDTRREFLSLIR

SEQ ID NO: 8429 - protein, 183 aa, unidentified
  source 1..183: note = Gallaecimonas xiamenensis
  REGION 1..183: note = tr|K2K1I0|K2K1I0_9GAMM GTP cyclohydrolase 1; OS = Gallaecimonas xiamenensis 3-C-1 OX=745411 GN=folE PE=3; SV = 1
MTEQLAKHYEAIIRGLGEDPSREGLLKTPERAAKAMQYLTKGYHQSLEELVNGAVFSSDNDELVIIKDIELYSLCEHHLLPFVGRCHIGYLPSGKVLGLSKFARIVDMFARRLQIQENLTREIALAVQEVTGAKGVGVVIEAKHMCMQMRGVEKQNSVMKSSVMLGALRESSDTRKEFLSLLR

SEQ ID NO: 8430 - protein, 294 aa, unidentified
  source 1..294: note = Gallaecimonas xiamenensis
  REGION 1..294: note = tr|K2IHN0|K2IHN0_9GAMM GTP cyclohydrolase FolE2; OS = Gallaecimonas xiamenensis 3-C-1 OX=745411 GN=folE2 PE=3; SV = 1
MPSSLPDVARQQDPCYRPLDQVGMSGLALPLHLDGALVLAKADVSVNLGQAGTKGIHMSRLHLALEALSEQLLYGVKPLHHCLDQCVNSQQGSADSARLRLAFDYPLRRPSLVSGHRGWKAYPIALEAELAKGRFRAWLQLTLPYSSTCPCSAALARQLVAADFAQQFPGSLDKEAVLAWLQSPEGVAATPHSQRSEAQITVSLGDNLPIAPLIDLLESALKTPVQTLVKREDEQAFARLNGRHPLFVEDAARTLAQTLEQSPFGGDFRVRVVHKESLHAHDAVAEISQGLPDG

SEQ ID NO: 8431 - protein, 218 aa, Gallibacterium anatis
  REGION 1..218: note = tr|A0A0A2XVM9|A0A0A2XVM9_9PAST GTP cyclohydrolase 1; OS = Gallibacterium anatis OX=750 GN=folE PE=3 SV=1
MNTISLEAQQVRAALSAKGLETPMVPRVGTQDERRQKIEQHMKEVMTILGLDLSDDSLEETPKRLAKMYLDEIFSGLDYHNFPKITRIENRMNVSEMVLVNDINLTSTCEHHFVTFSGKVSVAYYPKKWVIGLSKINRVVDFFAQRPQVQERLTEQILTAFQTILETDDVAVYVRATHFCVKCRGVRDANSFTVTSAYGGIFSQDRATKQEFLSLISK

SEQ ID NO: 8432 - protein, 218 aa, Gallibacterium anatis; identical to SEQ ID NO: 8431
  REGION 1..218: note = tr|F4HFC4|F4HFC4_GALAU GTP cyclohydrolase 1; OS = Gallibacterium anatis (strain UMN179) OX=1005058; GN = folE PE=3 SV=1

SEQ ID NO: 8433 - protein, 218 aa, unidentified
  source 1..218: note = Gallibacterium genomosp.
  REGION 1..218: note = tr|A0A1A7PDX9|A0A1A7PDX9_9PAST GTP cyclohydrolase 1; OS = Gallibacterium genomosp. 1 OX=155515 GN=folE PE=3 SV=1
MNTISLEAQQVRAALLSKGLETPMMPRVGTQDERRQKIEQHMKEVMTILGLDLRDDSLEETPKRLAKMYLDEIFSGLDYHNFPKITRIENRMNVSEMVLVNDINLTSTCEHHFVTFSGKVAVAYYPKKWVIGLSKINRVVDFFAQRPQVQERLTEQILTAFQTILETDDVAVYVRATHFCVKCRGVRDANSFTVTSAYGGIFSQDRATKQEFLSLISK

SEQ ID NO: 8434 - protein, 218 aa, unidentified
  source 1..218: note = Gallibacterium genomosp.
  REGION 1..218: note = tr|A0A1A7NQA4|A0A1A7NQA4_9PAST GTP cyclohydrolase 1; OS = Gallibacterium genomosp. 3 OX=505345 GN=folE PE=3 SV=1
MNTISLEAQQVRAALSAKGIETPMVARVGTQDERRQKIEQHMREVMNILGLDLRDDSLEETPKRLAKMYLDEIFSGLDYHNFPKITRIENRMNVSEMVLVNDINLTSTCEHHFVTFAGKVSVAYYPKDWVIGLSKINRVVDFLAQRPQVQERLTEQILVAFQTLLETEDVAVYVRATHFCVKCRGVRDANSFTVTSAYGGVFQQDRERKQEFLALISK

SEQ ID NO: 8435 - protein, 218 aa, Gallibacterium salpingitidis
  REGION 1..218: note = tr|A0A1A7Q195|A0A1A7Q195_9PAST GTP cyclohydrolase 1; OS = Gallibacterium salpingitidis OX=505341 GN=folE PE=3 SV=1
MNTISQEAQQVRAALAAKGLETPMVARVGTQDERRQKIEQHMREVMNILGLDLRDDSLEETPKRLAKMYLDEIFSGLDYHNFPKITRIENRMKVSEMVLVNDINLTSTCEHHFVTFAGKVSVAYYPKDWVIGLSKINRVVDFFAQRPQVQERLTEQILTAFQTLLQTEDVAVYVRATHFCVKCRGVRDANSFTVTSAYGGVFLQDRATRQEFLSLISK

SEQ ID NO: 8436 - protein, 218 aa, Gallibacterium salpingitidis
  REGION 1..218: note = tr|A0A1A7NZE2|A0A1A7NZE2_9PAST GTP cyclohydrolase 1; OS = Gallibacterium salpingitidis OX=505341 GN=folE PE=3 SV=1
MNTISQEAQQVRAALATKGLETPMVARVGTQDERRQKIEQHMREVMNILGLDLRDDSLEETPKRLAKMYLDEIFSGLDYHNFPKITRIENRMKVSEMVLVNDINLTSTCEHHFVTFAGKVSVAYYPKDWVIGLSKINRVVDFFAQRPQVQERLTEQILTAFQTLLQTEDVAVYVRATHFCVKCRGVRDANSFTVTSAYGGVFLQDRATRQEFLSLISK

SEQ ID NO: 8437 - protein, 265 aa, unidentified
  source 1..265: note = Gallionella capsiferriformans
  REGION 1..265: note = tr|D9SJ84|D9SJ84_GALCS GTP cyclohydrolase FolE2; OS = Gallionella capsiferriformans (strain ES-2) OX=395494; GN = folE2 PE=3 SV=1
MNNTAPIPDVQSSADLRHIAINRVGIKGIRHPVKVQDKSVGVQHTIATFNMYVHLPHNFKGTHMSRFVEILNRHEREISVESYESILREMVVLLEAESGYIEMSFPYFVNKTAPVSGVQSLLDYDVTLIGEMKDGKASVTMKVLVPVTSLCPCSKKISDRGAHNQRSHVTITLRTNSFVWIEDVVRIAEEQASCELYGLLKRPDEKYVTERAYDNPKFVEDMVRDVAAVLNADARIDAYVVESENFESIHNHSAYALIERDKTNG

SEQ ID NO: 8438 - protein, 267 aa, Gallionella sp.
  REGION 1..267: note = tr|A0A3D2NMZ7|A0A3D2NMZ7_9PROT GTP cyclohydrolase FolE2 OS=Gallionella sp. OX=2052161 GN=folE2 PE=3 SV=1
MNSPKLEPIADVQSTADLRQIAINRVGIKGIRHPVVVKDKSVGVQHTIATFNMYVHLPHNFKGTHMSRFVEILNQHEREISVESFEHILREMVERLEAQSGYIEMSFPYFVNKTAPVSGVQSLLDYDVTLIGEIKEGRAQVTMKVLVPVTSLCPCSKKISERGAHNQRSHVTITISANRFVWIEDVVHIAEQQASCELYGLLKRPDEKYVTERAYDNPKFVEDMVRDVAAVLNADERIDAYIVESENFESIHNHSAYALIERDKTKD

SEQ ID NO: 8439 - protein, 270 aa, Gallionella sp.
  REGION 1..270: note = tr|A0A522X268|A0A522X268_9PROT GTP cyclohydrolase FolE2 OS=Gallionella sp. OX=2052161 GN=folE2 PE=3 SV=1
MNTVARNHIPDVQNSADTRQLAINRVGIKGIRHPVRVKDKSIGVQHTIATFNMYVHLPHNFKGTHMSRFVEILNEHEREISVESFESILHEMVTRLEARSGYIEMSFPYFVNKAAPVSGVQSLLDYDVTLIGEVIDGKTRTTMKVIVPVTSLCPCSKKISERGAHNQRSHVTLTLRTNSFVWIEDVVRIAEEQASCELFGLLKRPDEKFVTERAYDNPKFVEDMVRDVAAVLNADERIDAYVVESENFESIHNHSAYALIERDKTVKGEG

SEQ ID NO: 8440 - protein, 265 aa, unidentified
  source 1..265: note = Gallionellaceae bacterium
  REGION 1..265: note = tr|A0A3B9NZN8|A0A3B9NZN8_9PROT GTP cyclohydrolase FolE2 OS=Gallionellaceae bacterium OX=2052162 GN=folE2; PE = 3 SV=1
MTSAKPIADVQNSADTRQLAINKVGIKSIRHPIQVKDKSLGVQHTIATFNMYVHLPHNFKGTHMSRFVQILNQHGREISVESFESILREMVEKLEAKSGYIEMSFPYFVNKIAPVSGVQSMLDYDVTFIGEVVDGAYRFTMKVLIPVTSLCPCSKEISDRGAHNQRSHVTLTVRTRSSVWIEEVVRFAEDHASSELYGLLKRPDEKFVTERAYDNPKFVEDMVRDVAAVLNADDRIEAYTVESENFESIHNHSAYALIERDKTQG

SEQ ID NO: 8441 - protein, 265 aa, unidentified
  source 1..265: note = Gallionellaceae bacterium
  REGION 1..265: note = tr|A0A2H0NLD4|A0A2H0NLD4_9PROT GTP cyclohydrolase FolE2 OS=Gallionellaceae bacterium CG11_big_fil_rev_8_21_14_0_20_60_62 OX=1974012 GN=folE2; PE = 3 SV=1
MNSIAPIPDVQSGPDTRHIAIDRVGIKSIRHPVVVSDKSEGVQHTIATFNMYVHLPHNFKGTHMSRFVEILNRHGREISVESFEEILREMVDKLEAQSGYIEMAFPYFVNKTAPVSGVQSLLDYDVTFIGEIIEGKYRFSMKVLVPVTSLCPCSKKISERGAHNQRSHVTLTVRTNGVVWIEELVRMAEEQASSELYGLLKRPDEKYVTEYAYDHPKFVEDMVRDIAAALNADERIDTYVVESENFESIHNHSAYALIERDKIRD

SEQ ID NO: 8442 - protein, 270 aa, unidentified
  source 1..270: note = Gallionellales bacterium
  REGION 1..270: note = tr|A0A1G0DNP9|A0A1G0DNP9_9PROT GTP cyclohydrolase FolE2 OS=Gallionellales bacterium RIFCSPLOWO2_02_58_13; OX = 1798252 GN=folE2 PE=3 SV=1
MSPPKPKPIADVQSSADIRHLAINRVGIKGIRHPVKVKDKSIGVQHTVATFNMYVHLPHNFKGTHMSRFVEILNEHEREISVESFGSILREMVLRLEAESGFIEMNFPYFVNKTAPVSGVKSLLDYDVTFIGECDGGNPRFTMKVIVPVTSLCPCSKKISDRGAHNQRSHVTLTLRTNSFVWVEDVIRIAEEQASCELFGLLKRPDEKFVTERAYDNPKFVEDMVRDVAAVLNADERIDAYIVESENFESIHNHSAYALIERDKTVKGEG

SEQ ID NO: 8443 - protein, 267 aa, unidentified
  source 1..267: note = Gallionellales bacterium
  REGION 1..267: note = tr|A0A2M8DZT3|A0A2M8DZT3_9PROT GTP cyclohydrolase FolE2 OS=Gallionellales bacterium CG_4_9_14_0_8_um_filter_55_61 OX=1974015 GN=folE2 PE=3 SV=1
MNSPKLEPIADVQSTADLRQIAINRVGIKGIRHPVVVKDKSVGVQHTIATFNMYVHLPHNFKGTHMSRFVEILNRHEREISVESFEHILREMVERLEAQSGYIEMSFPYFVNKTAPVSGVQSLLDYDVTLIGEIKEGRAQVTMKVLVPVTSLCPCSKKISERGAHNQRSHVTITISANRFVWIEDVVHIAEQQASCELYGLLKRPDEKYVTERAYDNPKFVEDMVRDVAAVLNADERIDAYIVESENFESIHNHSAYALIERDKTKD

SEQ ID NO: 8444 - protein, 305 aa, unidentified
  source 1..305: note = Unknown
  REGION 1..305: note = tr|E1VNW4|E1VNW4_9GAMM GTP cyclohydrolase FolE2; OS = gamma proteobacterium HdN1 OX=83406 GN=folE2 PE=3 SV=1
MPDVAIHSQPKAFGLLDWVGMSGIDTPVSLLTRKGVATHAVAKAQAYVNLKNPKAKGIHMSRLYLLLDESSNQPMTPASLSELLSRFLESHQGLSDRAYIDFRFDLLLRRPALKSEFSGWKAYPVHVVARHLQGEFSAEFSVDIPYSSTCPCSAALARQLIQQQFQHDFGQQASVSVEDVQAWLGSERGIVATPHSQRSIAQVKVRVADSAQQFPIEDLIDLVEGSLKTPVQTAVKREDEQEFARLNGQNLMFCEDAARRVQAALNEKPAYVDYWVRVNHLESLHAHDAVSVITKGVEGGYSPMP

SEQ ID NO: 8445 - protein, 272 aa, unidentified
  source 1..272: note = Unknown
  REGION 1..272: note = tr|A0A2T6MYK7|A0A2T6MYK7_9GAMM GTP cyclohydrolase FolE2 OS=gamma proteobacterium symbiont of Ctena orbiculata OX=1968598 GN=folE2 PE=3 SV=1
MLDKTPLSGSQIADVQNSADMRQIAINKVGIKDIRHPMRIRDRSEGEQHTIANFNMYVNLPHNFKGTHMSRFVEILNSHETEVTVESFKDMLAEMTERLEAESGHIEMNFPFFINKTAPVSGVKSLLDYDVTLIGEIHGGKPVIDIKVVVPVTSLCPCSKKISDRGAHNQRSHVTVQARTRDFIWIEEIIDLVEEQASCELFGLLKRPDEKFVTEHAYDNPKFVEDMVRDIAVQLNREARISAYIVESENFESIHNHSAYALIERDKTKDPV

SEQ ID NO: 8446 - protein, 183 aa, unidentified
  source 1..183: note = Gammaproteobacteria bacterium
  REGION 1..183: note = tr|A0A1G0G8X5|A0A1G0G8X5_9GAMM GTP cyclohydrolase 1; OS = Gammaproteobacteria bacterium RIFCSPHIGHO2_02_FULL_39_13 OX=1798270 GN=folE PE=3 SV=1
MNETIESQFENLIRTLGDDPTREGMIGTPQRAHKAMEFLTQGYHEDLTKIINGAIFTSTMDEMIIVKDIELYSLCEHHLLPFFGKCHIAYLPNEKILGLSKFARIVDHFAKRFQVQENLTVQIAECIEKITGAKGVGVIIEAQHLCMMMRGVEKQNSNMITSMMLGRFRSDDRTRSEFLSLVR

SEQ ID NO: 8447 - protein, 296 aa, unidentified
  source 1..296: note = Gammaproteobacteria bacterium
  REGION 1..296: note = tr|A0A2N1YSF9|A0A2N1YSF9_9GAMM GTP cyclohydrolase FolE2 OS=Gammaproteobacteria bacterium HGW-Gammaproteobacteria-13 OX=2013795 GN=folE2 PE=3 SV=1
MNALTLPDIAAQIPAHVQALDWVGMQGIALPINLAGQRVHAHADVGVSLDDGNARGIHMSRLYLALHALEHQALSPATLQQLLSAFLDSHQDLSQQASITLRGEVLLSRPALVSPLAGWKAYPFEVRARQDSWGFHVELQVEVAYSSTCPCSAALARQLIQQRFIEDFAGRPLDHAQLLAWLGSPQGIVATPHSQRSTATLQVRLQADSTQLPLVELINAAEQALGTAVQTAVKRADEQAFALANGQNLMFCEDAARRLHSALREQAAFSAFHLRVVHAESLHAHDAVAASTWNWR

SEQ ID NO: 8448 - protein, 82 aa, unidentified
  source 1..82: note = Gandjariella thermophila
  REGION 1..82: note = tr|A0A4D4J7E6|A0A4D4J7E6_9PSEU GTP cyclohydrolase 1; OS = Gandjariella thermophila OX=1931992 GN=GTS_27450 PE=3; SV = 1
MVEHFACRPQVQERLTKQIAGWLDTQLRPKGVGVVIQAEHTCMTLRGVQAVGSDTVTSTLLGVLREDPRSRQEFFALTGIHP

SEQ ID NO: 8449 - protein, 132 aa, unidentified
  source 1..132: note = Gandjariella thermophila
  REGION 1..132: note = tr|A0A4D4JFY9|A0A4D4JFY9_9PSEU GTP cyclohydrolase 1; OS = Gandjariella thermophila OX=1931992 GN=GTS_55530 PE=3; SV = 1
MAGDPTPISQPITGQPEQRPHAALRIVHEPAGVDLAAAERAAGEFLRALGMSTDAEGLRRTPRRMAQAYAELFSPRPFDLTTFPNDEGYDELVLARGIPLRSVCEHHLLPFVGVAHVGYLPGERILGPMRFR

SEQ ID NO: 8450 - protein, 188 aa, Garciella nitratireducens
  REGION 1..188: note = tr|A0A1T4MIS5|A0A1T4MIS5_9FIRM GTP cyclohydrolase 1; OS = Garciella nitratireducens DSM 15102 OX=1121911 GN=folE; PE = 3 SV=1
MDKQKIENAVRQILEAIGENPDREGLKGTPNRIARMYEEIFCGLNQDPGKHLEIYFQEEKHEELVLVKDIPFYSMCEHHLVPFFGKAHVGYLPRGGKLTGLSKIARVVDTVAKRPQLQERLTSTIADIFMEKLNPYGVIVVVQAEHMCMTMRGIKKPGSKTVTSAVRGVFHKDAKVRAEAMSLINFEK

SEQ ID NO: 8451 - protein, 166 aa, Gardnerella vaginalis
  REGION 1..166: note = tr|D6SY52|D6SY52_GARVA 7, 8-dihydro-6-hydroxymethylpterin-pyrophosphokinase; OS = Gardnerella vaginalis AMD OX=682147 GN=GVAMD_0211 PE=4; SV = 1
MISSAYISVGSNIGDRLLNLRQAVSLLKQNLHISNIIVSSVYETEPVGDVVQDSFYNIALRLDTDLTAFELLDFIHDIEQRLHRKRIVRWGPRTIDLDIIDFGGQTIKSENLTIPHKERDNRRFVLVPLLEISADDANYHELIQDKLNKTSDTNWINIIESSEVFN

SEQ ID NO: 8452 - protein, 223 aa, unidentified
  source 1..223: note = Geitlerinema sp.
  REGION 1..223: note = tr|K9S8G6|K9S8G6_9CYAN GTP cyclohydrolase 1; OS = Geitlerinema sp. PCC 7407 OX=1173025 GN=folE PE=3 SV=1
MTIAQNGSNGSASTSQIPQAQALSANGNGSAEVGHDEMMEAVRTMLLGVGEDPEREGLLKTPKRVAEAMRFLTSGYSQSLDQLVNGAIFDEGHNEMVLVRDIDVFSLCEHHMLPFIGKAHVAYIPNQKVVGLSKLARIVEMYSRRLQVQERLTRQVAEAIQEILEPQGVAVVMEATHMCMVMRGVQKPGSWTVTSAMVGVFEEEFKTREEFLNLIRHRPSILM

SEQ ID NO: 8453 - protein, 225 aa, Gelidibacter algens
  REGION 1..225: note = tr|A0A1A7QSE5|A0A1A7QSE5_9FLAO GTP cyclohydrolase 1; OS = Gelidibacter algens OX=49280 GN=folE PE=3 SV=1
MKTDKNTQDIDALGDDHVGTSAYTPMRSDAFKLSSDEKIDIIKDDVRHIMETLGLDLTDDSLKGTPLRVAKMFVKEIFGGLDPARKPNASTFKNNYKYGEMLVEKNITLYSTCEHHLLPIVGKAHVAYISKGTVVGLSKMNRIVDYYAKRPQVQERLTMQIVQDLQKVLGTDDVACVIDAKHLCVNSRGIRDIESSTVTSEFGGAFKNQDTRREFLDYIKLDTHF

SEQ ID NO: 8454 - protein, 232 aa, Gelidibacter algens
  REGION 1..232: note = tr|A0A1A7QWH1|A0A1A7QWH1_9FLAO GTP cyclohydrolase 1; OS = Gelidibacter algens OX=49280 GN=folE PE=3 SV=1
MITEKELQPHKNKYHLNGFSIEDIGDDHLFTGLETPLKPDAFKMSDTDKKQRIAVLFEEIMDVMGLDLTDDSLKGTPDRVAKMYIDEIFSGLNPANKPKIALFDNKYQYNQMLVEKNITLYSNCEHHFVPIFGKAHVAYISSGKVIGLSKLNRIVQYYAKRPQVQERLTNQIAEELKHILGTEDVAVIIDAKHLCVSSRGIKDESSATVTSYYGGKFGTPEKIAELQNYLKD

SEQ ID NO: 8455 - protein, 225 aa, Gelidibacter gilvus
  REGION 1..225: note = tr|A0A4Q0XDU9|A0A4Q0XDU9_9FLAO GTP cyclohydrolase 1; OS = Gelidibacter gilvus OX=59602 GN=folE PE=3 SV=1
MKTDKNIQDIDAFGDDHVGSSADTPLRSDAFKLSPDEKIDIIKDDVRHILETLGLDLNDDSLKGTPLRVAKMFVKEIFGGLSPDKKPNASTFDNKYKYGEMLVEKNITVYSTCEHHLLPIVGKAHVAYISNGTVIGLSKMNRIVDYYAKRPQVQERLTIQIVKELQEALGTEDVACVMDAKHLCVNSRGIRDVASSTVTSEFGGQFKNPETRREFLDYIKLDTDF

SEQ ID NO: 8456 - protein, 232 aa, Gelidibacter gilvus
  REGION 1..232: note = tr|A0A4Q0XH98|A0A4Q0XH98_9FLAO GTP cyclohydrolase 1; OS = Gelidibacter gilvus OX=59602 GN=folE PE=3 SV=1
MIPEKDLKIFKVNELINGFNANDIGDDHLFSGLETPMKKDAFKLSDKEKKQRIAHLFEEIMDVLGLDLTDDSLKGTPNRVAKMYVDEIFSGLNPANKPKITLFDNKYQYNQMLVEKNISFNSNCEHHFVPIFGKAHVAYISSGKVIGLSKLNRIVQHYAKRPQVQERLTNQIAEDLKHILGTEDVAVILDAKHLCVSSRGIKDESSTTITSYYGGKFGAPEKIAELQNYLKD

SEQ ID NO: 8457 - protein, 225 aa, Gelidibacter salicanalis
  REGION 1..225: note = tr|A0A5C7AJ11|A0A5C7AJ11_9FLAO GTP cyclohydrolase 1; OS = Gelidibacter salicanalis OX=291193 GN=folE PE=3 SV=1
MNTDNNIQNIDALGEDHVGTSADTPMRSDAFVLSPEEKIDLIKDDVRHIMETLGLDLTDDSLKGTPMRVAKMFVKEIFGGLSPDRKPNASTFENKYKYGEMLVEKNITLYSTCEHHLLPIVGKAHVAYISKGTVVGLSKMNRIVDYYAKRPQVQERLTMQIVQELQRVLGTDDVACVIDAKHLCVNSRGIRDVESSTVTSEFGGAFKNQDTRREFLDYIKLDTHF

SEQ ID NO: 8458 - protein, 232 aa, Gelidibacter salicanalis
  REGION 1..232: note = tr|A0A5C7AQV6|A0A5C7AQV6_9FLAO GTP cyclohydrolase 1; OS = Gelidibacter salicanalis OX=291193 GN=folE PE=3 SV=1
MITEKKVPSPQIQQQLNGICLEDIGDDHLYTGLETPLRPDAFQLSDDEKKKRIAVLFEEIMNVMGLDLTDDSLKGTPKRVAKMYVDEIFSGLNPANKPKITLFDNKYQYNQMLVEKNITLYSSCEHHFVPIFGKAHVAYISSGKVIGLSKLNRIVQYYAQRPQVQERLTNQIAEELKHILGTEDVAVIIDAKHLCVSSRGIKDESSTTISSYYGGKFGTPEKIAELQNYLKD

SEQ ID NO: 8459 - protein, 225 aa, unidentified
  source 1..225: note = Gelidibacter sediminis
  REGION 1..225: note = tr|A0A4R7PJP0|A0A4R7PJP0_9FLAO GTP cyclohydrolase 1; OS = Gelidibacter sediminis OX=1608710 GN=folE PE=3 SV=1
MNTDKNIQDIDALGENHVGTSADTPMRSDAFKLSSDEKIDIIKDDVRHIMETLGLDLTDDSLKGTPLRVAKMFVKEIFGGLSPDKKPNASTFENKYKYGEMLVEKNITLYSTCEHHLLPIVGKAHVAYISKGTVVGLSKMNRIVDYFAKRPQVQERLTIQIVQELQKVLGTDDVACVIDAKHLCVNSRGIRDIESSTVTSEFGGAFKNQDTRREFLDYIKLDTHF

SEQ ID NO: 8460 - protein, 198 aa, unidentified
  source 1..198: note = Gelidibacter sediminis
  REGION 1..198: note = tr|A0A4R7PZT0|A0A4R7PZT0_9FLAO GTP cyclohydrolase 1; OS = Gelidibacter sediminis OX=1608710 GN=folE PE=3 SV=1
MAYKHFEEYDPRITEDIRERYEQIITDLGEDVTRNGLLKTPERASKAIQFLTQGYHQDAAKILKSAMFDESYNEMVIVKDIEVYSLCEHHMLPFFGKAHIAYIPNGQIVGLSKLPRIVDVFARRLQVQERLTEQILDCINDTLKPQGVAVVIEAAHMCKMMRGVQKQNSMTTTSGFRGQFEKIETRNEFLKLISTKFT

SEQ ID NO: 8461 - protein, 186 aa, Gemella asaccharolytica
  REGION 1..186: note = tr|A0A133ZTC3|A0A133ZTC3_9BACL GTP cyclohydrolase 1; OS = Gemella asaccharolytica OX=502393 GN=folE PE=3 SV=1
MNNKEDFKNLIQKLLINIGEDVTRKGLLKTPERCANMYSELLCKTGEDPKEEIDTFFESETDEPILIKDIEFYSLCEHHMLPFYGLCHVAYIPNKNKITGLSKIVRVVENASKRLQIQENMTNMISKAIDEKLNPKGTYVIIEAEHMCIAMRGIKKTGSKTITTKKTGIFETNSDLVRNIDLKIKG

SEQ ID NO: 8462 - protein, 179 aa, Gemella bergeri
  REGION 1..179: note = tr|U2QUH8|U2QUH8_9BACL GTP cyclohydrolase 1; OS = Gemella bergeri ATCC 700627 OX=1321820 GN=folE PE=3 SV=1
MELIKTLLENFGEDPTRKGLIDTPKRCVKMYEELLSKTNVDPKEEINTFFESDNDEPILVKDIQFYSLCEHHMLPFYGVCHIAYVPKNKKITGLSKLARLVESASRRLQIQEDMTLMIVNAMEEQLQPKGVYVVIEAEHMCMAMRGIKKIGSKTVTSKKTGVFLKDNNLVKDIQYKIKL

SEQ ID NO: 8463 - protein, 186 aa, Gemella haemolysans
  REGION 1..186: note = tr|A0A133ZWC2|A0A133ZWC2_9BACL GTP cyclohydrolase 1; OS = Gemella haemolysans OX=1379 GN=folE PE=3 SV=1
MKNKEQSQELIKTLLENIGEDTSRAGLLDTPKRCVKMYEELLSKTNVDPKEEINTFFESDNDEPILVKDIQFYSLCEHHMLPFYGVCHIAYVPNNKKITGLSKLARLVESASRRLQIQEDMTLMLVNAIEEQLQPKGVYVIIEAEHMCMAMRGIKKIGSKTVTSKKTGIFLEDTELVKDIQYKIKL

SEQ ID NO: 8464 - protein, 186 aa, Gemella haemolysans
  REGION 1..186: note = tr|F3A257|F3A257_9BACL GTP cyclohydrolase 1; OS = Gemella haemolysans M341 OX=562981 GN=folE PE=3 SV=1
MKNKEQSQELIKTLLENIGEDTSRPGLLDTPKRCVKMYEELLSKTNVDPKEEINTFFESDNDEPILVKDIQFYSLCEHHMLPFYGVCHIAYVPNNKKITGLSKLARLVESASRRLQIQEDMTLMLVNAIEEQLQPKGVYVIIEAEHMCMAMRGIKKIGSKTVTSKKTGIFLEDTELVKDIQYKIKL

SEQ ID NO: 8465 - protein, 186 aa, Gemella morbillorum
  REGION 1..186: note = tr|A0A2X4N581|A0A2X4N581_9BACL GTP cyclohydrolase 1; OS = Gemella morbillorum OX=29391 GN=folE PE=3 SV=1
MKNKEQSQQLIKTLLENIGEDTSRAGLIDTPKRCVNMYEELLSKTNMDPKEEINTFFESENDEPILVKDIQFYSLCEHHMLPFYGVCHIAYVPNNKKITGLSKLARLVESASRRLQIQEDMTLMLVNAIEEQLQPKGVYVIIEAEHMCMAMRGIKKIGSKTVTSKKTGVFLEDTELVKDIQYKIKL

SEQ ID NO: 8466 - protein, 186 aa, Gemella morbillorum
  REGION 1..186: note = tr|E5V551|E5V551_9BACL GTP cyclohydrolase 1; OS = Gemella morbillorum M424 OX=562982 GN=folE PE=3 SV=1
MKNKEQSQQLIKTLLENIGEDTSRAGLIDTPKRCVNMYEELLSKTNVDPKEEINTFFESENDEPILVKDIQFYSLCEHHMLPFYGVCHIAYVPNNKKITGLSKLARLVESASRRLQIQEDMTLMLVNAIEEQLQPKGVYVIIEAEHMCMAMRGIKKIGSKTVTSKKTGVFLEDTELVKDIQYKIKL

SEQ ID NO: 8467 - protein, 186 aa, Gemella sanguinis
  REGION 1..186: note = tr|A0A2N6SDI6|A0A2N6SDI6_9BACL GTP cyclohydrolase 1; OS = Gemella sanguinis OX=84135 GN=folE PE=3 SV=1
MKNKEQSQQLIKTLLENIGEDTSRAGLLDTPKRCVNMYEELLSKTNVDPKEEINTFFESDNDEPILVKDIQFYSLCEHHMLPFYGVCHIAYVPNNRKITGLSKLARLVESASRRLQIQEDMTLMLVNAIEEQLQPKGVYVIIEAEHMCMAMRGIKKIGSKTVTSKKTGIFLEDSELVKDIQYKIKL

SEQ ID NO: 8468 - protein, 186 aa, Gemella sp.; identical to SEQ ID NO: 8463
  REGION 1..186: note = tr|A0A533HZ86|A0A533HZ86_9BACL GTP cyclohydrolase 1; OS = Gemella sp. OX=1966354 GN=folE PE=3 SV=1

SEQ ID NO: 8469 - protein, 186 aa, Gemella sp.
  REGION 1..186: note = tr|A0A4Y9HGY4|A0A4Y9HGY4_9BACL GTP cyclohydrolase 1; OS = Gemella sp. WT2a OX=2558281 GN=folE PE=3 SV=1
MKNIEESKKLIKELLENLGEDTSRAGLIDTPKRCVKMYEELLSKTGVDPKEEINTFFESDNDEAILVKDIEFYSLCEHHMLPFYGKCHIAYLPNNRKITGLSKLARLVESASRRLQIQEDMTLMIAKAMEEQLQPKGVYVIIEAEHMCMAMRGIKKQGSKTVTSKKTGIFREDFNLIRDIEYKIKL

SEQ ID NO: 8470 - protein, 222 aa, Geminicoccus sp.
  REGION 1..222: note = tr|A0A2E3IPH3|A0A2E3IPH3_9PROT GTP cyclohydrolase 1; OS = Geminicoccus sp. OX=2024832 GN=folE PE=3 SV=1
MAPHDSAALFDADRDHVEETIEVVSTDNVVPIKVSEQPNRTEAEAAVKTLIAYTGEDAERPGVQETPKRVVKAFDEWFGGYEIDAETLLSKTFDEVEGYHDMVLLRDIPFHSHCEHHMAPIVGKAHVAYMPRGRVVGISKLARVVDAFARRFQIQERMTEEVAQTIERVLEPAGVAVVIEAEHHCMTTRGIHTHDTVMHTKHLSGVFREDANLRREFFDALR

SEQ ID NO: 8471 - protein, 222 aa, Geminicoccus sp.
  REGION 1..222: note = tr|A0A2E1V5M0|A0A2E1V5M0_9PROT GTP cyclohydrolase 1; OS = Geminicoccus sp. OX=2024832 GN=folE PE=3 SV=1
MAPHESAALYDHDLELSDEGIDATDVHNIVPIKGTGQPNRSEAEAAVKTLISYTGENADRSGVLETPKRVVKAFDEWFGGYKIDADGLLSKTFDEVEGYQDMVLLRDIPFHSHCEHHMAPIVGKAHVAYMPKGRVVGISKLARVVDAFARRFQIQERMTEEVAQTIERVLEPAGVAVVIEAEHHCMTTRGIHTHDTVMHTKHLSGVFREDTNLRREFFDALR

SEQ ID NO: 8472 - protein, 240 aa, unidentified
  source 1..240: note = Geminocystis sp.
  REGION 1..240: note = tr|A0A0D6AMA6|A0A0D6AMA6_9CHRO GTP cyclohydrolase 1; OS = Geminocystis sp. NIES-3709 OX=1617448 GN=folE PE=3 SV=1
MTEFSNGSNSPKISPDASLSISTEVYNNVATRPDRNTHNGQVAQINLSHEENKQQMMDSVRIILESVGEDPEREGLLKTPKRVAEAMQFLTQGYSQSLEKLVNGAIFDEGHNEMVLVRDIDFFSLCEHHMLPFMGRAHVAYIPNQKVVGLSKLARIVEMYSRRLQVQERLTRQIAEAIQTILDPQGVAVVMEATHMCMVMRGVQKPGSWTVTSAMLGVFQEENKTREEFLNLIRHKPSFL

SEQ ID NO: 8473 - protein, 219 aa, unidentified
  source 1..219: note = Geminocystis sp.
  REGION 1..219: note = tr|A0A0D6AI80|A0A0D6AI80_9CHRO GTP cyclohydrolase 1; OS = Geminocystis sp. NIES-3708 OX=1615909 GN=folE PE=3 SV=1
MTYTGSSIIKSANHNNSFPNLITESQPPVTEADMVQAVRTLLLGLGENPDREGLKDTPKRVVKALKFLTSGYNKSLDELLNGAVFHENANEMVLVRDIDLFSSCEHHILPILGRAHVAYIPNGKVIGLSKIARICEMYARRLQVQKRLTSQIADALQGLLQPQGVAVVIEASHMCMVMRGVQKPGPWTSTSALRGVFNDDAKTRQEFMNLIQHRPTFNS

SEQ ID NO: 8474 - protein, 214 aa, Gemmata obscuriglobus
  REGION 1..214: note = tr|A0A2Z3H8W2|A0A2Z3H8W2_9BACT GTP cyclohydrolase 1; OS = Gemmata obscuriglobus OX=114 GN=folE PE=3 SV=1
MSKISRHTPSPDDADEAPRTSNAITPLKIDHARLRSAVREILLAVGEDPDREGLLETPDRVARMYAEVFAGLQTDPAVYLQKTFTQKHDEMVLVKDIEFASCCEHHLLPFFGKAHIAYLPNGQIVGLSKLARVVDAVARRPQVQERMTENIADLVMTHLKARGVGVVIEASHSCMTIRGVRKPGAMTITSSMRGGFLDSPATRAEMMSLVFGGK

SEQ ID NO: 8475 - protein, 212 aa, Gemmata sp.
  REGION 1..212: note = tr|A0A142XTC8|A0A142XTC8_9BACT GTP cyclohydrolase 1; OS = Gemmata sp. SH-PL17 OX=1630693 GN=folE PE=3 SV=1
MSKTTHSAVPCEADEAPRPPNHMPALTVDHERLRHAVREILIAVGENPDREGLLETPDRVARMYAEIFSGLRTDPAIYLQKTFTQKHDEMVLVKDIEFSSCCEHHLLPFLGKAHIAYLPNGQIVGLSKLARVVEAVAKRPQVQERMTEEIADLIMTHLKARGVGVVIEASHSCMTIRGVRKPGAMTITSSMRGGFLDNPATRAEMMALVFGR

SEQ ID NO: 8476 - protein, 208 aa, unidentified
  source 1..208: note = Gemmataceae bacterium
  REGION 1..208: note = tr|A0A5C1A9I8|A0A5C1A9I8_9BACT GTP cyclohydrolase 1; OS = Gemmataceae bacterium PX52 OX=2598579 GN=folE PE=3 SV=1
MAKSEEMTLSKLAALHASEYQPVDVERIKHAVREILLAVGEDPDREGLLETPDRVARMYAEVFSGLHTNPAIHLQKLFTQKHDEMVIVKDIEFASCCEHHLLPFTGKAHIGYLPDGKVVGLSKLARVVDVVAKRPQVQERMTETIADLIMSEVQPRGVGVIIEASHSCMTIRGVRKPGAMTITSAVRGLVKSNPMTRNELMTLVYNKS

SEQ ID NO: 8477 - protein, 188 aa, unidentified
  source 1..188: note = Gemmataceae bacterium
  REGION 1..188: note = tr|A0A4V0I6S8|A0A4V0I6S8_9BACT GTP cyclohydrolase 1; OS = Gemmataceae bacterium OX=2052164 GN=folE PE=3 SV=1
MDVDHERIRRAVREILVAVGENPDREGLLDTPDRVARMYAEVFSGLRTDPAVHLQTMFTQKHDEMVLVKDIEFASCCEHHLLPFIGKAHIAYLPNGKIVGLSKLARVVDAVARRPQVQERMTEHVADLIMAHLKPRGVGVIVEASHSCMTIRGVRKPGAMTITSSMRGGFLTDPATRSELMSLVFGGK

SEQ ID NO: 8478 - protein, 199 aa, unidentified
  source 1..199: note = Gemmatimonadaceae bacterium
  REGION 1..199: note = tr|A0A2E0DQQ0|A0A2E0DQQ0_9BACT GTP cyclohydrolase 1; OS = Gemmatimonadaceae bacterium OX=2026741 GN=folE PE=3 SV=1
MEDSGAIDLSGVEFEDLVAEMIRRCGDSPDREGMAKTPERVVKAMSFLTKGYGETPEEVVGGAIFPEAHESMVLVKDIELYSMCEHHLLPFFGKAHVAYIPNGSVMGLSKVARLVEVFARRFQVQERLTEQIAQAVLEVSEARGVAVVVEAHHLCMMMRGVQKQNSKTLTSAMRGDFVEDRSLRDEFMWMVSSTHRALG

SEQ ID NO: 8479 - protein, 202 aa, unidentified
  source 1..202: note = Gemmatimonadales bacterium
  REGION 1..202: note = tr|A0A524R1Q1|A0A524R1Q1_9BACT GTP cyclohydrolase 1; OS = Gemmatimonadales bacterium OX=2448054 GN=folE PE=3 SV=1
MSGDAKHVGTDLSQVSFEALVREMIVRLDPDPDRDGMDRTPERVAKSMEFLTRGYHITPEEAIGDGIFEERHHNMVLVKDIELYSMCEHHLLPFFGKAHVAYIPDGKIMGLSKAARLVEVYSRRFQVQERLTEQVAQAVWDTIHPMGVGVVVEAYHLCMMMRGVEKQNSKTITSAMRGVFLSDMKTRDEFLRLSMAGHVLLS

SEQ ID NO: 8480 - protein, 196 aa, unidentified
  source 1..196: note = Gemmatimonadales bacterium
  REGION 1..196: note = tr|A0A524H418|A0A524H418_9BACT GTP cyclohydrolase 1; OS = Gemmatimonadales bacterium OX=2448054 GN=folE PE=3 SV=1
MSNTPVVDTPLAPLVRSLLAGLGEDPDRPGLAKTPERVEASLRWLTSGYALTVEDAVGDALFEEEHESMILVRDIEFYSLCEHHLLPFFGVAHVAYIPDRRILGLSKLPRIVDVFARRLQVQERLTDQVANAIMEVVAPRGVGVVLEASHLCMMMRGVEKQHSRTVTSALRGIFTSDSKTRAEFLLLAHGTGAESE

SEQ ID NO: 8481 - protein, 187 aa, unidentified
  source 1..187: note = Gemmatimonadetes bacterium
  REGION 1..187: note = tr|A0A1Q7E2Z4|A0A1Q7E2Z4_9BACT GTP cyclohydrolase 1; OS = Gemmatimonadetes bacterium 13_1_40CM_66_11 OX=1805195; GN = folE PE=3 SV=1
MPFQTLVHEMLEQLGEDPKREGLRQTPARVEASLKWLTRGYGMNVDEVIGDALFEETHESMICVRDIEIYSMCEHHMLPFFGRAHVAYLPNGRIVGLSKIPRVVEVFARRLQVQERLTDQVAEALCRVLTPLGVGVVIEAYHLCMMMRGVEKQNSKTVTSALRGAFRDDAKTRDEFLRLVHGGNFSL

SEQ ID NO: 8482 - protein, 174 aa, unidentified
  source 1..174: note = Gemmatimonadetes bacterium
  REGION 1..174: note = tr|A0A1Q6ZWT8|A0A1Q6ZWT8_9BACT GTP cyclohydrolase 1; OS = Gemmatimonadetes bacterium 13_2_20CM_2_69_23 OX=1805204; GN = folE PE=3 SV=1
MLAQLGEDPTREGLRQTPARVEASLKWLTRGYHMSVPDVIGDALYRERHENLVCVRDIEIYSLCEHHLLPFFGKAHVAYLPNGRLVGLSKIPRVIEVFARRLQVQERLTDQVADALMDVLEPRGVGVVIEAYHLCMMMRGVEKQNSRTVTSALRGALLQDAKTRDEFLRLVHAG

SEQ ID NO: 8483 - protein, 192 aa, Gemmatimonas aurantiaca
  REGION 1..192: note = tr|A0A3D4V629|A0A3D4V629_9BACT GTP cyclohydrolase 1; OS = Gemmatimonas aurantiaca OX=173480 GN=folE PE=3 SV=1
MAGERSSEYETMVRRQLELIGEDPTRDGLLKTPGRVARSMAWLTRGYDLDPRSVIGDALFAEDHENMVMVRDIEMYSMCEHHMLPFFGKVHIAYIPNGKIVGLSKLPRVVEVFARRLQVQERLGEQIANAIVDVLQPKGVGVVIEAVHLCMMMRGVEKQNSRTITSSLRGLFRDDAKTRSEFLRLAYATPGF

SEQ ID NO: 8484 - protein, 222 aa, Gemmatimonas aurantiaca
  REGION 1..222: note = tr|C1A6G2|C1A6G2_GEMAT GTP cyclohydrolase 1; OS = Gemmatimonas aurantiaca (strain T-27 / DSM 14586 / JCM 11422 / NBRC 100505) OX=379066 GN=folE PE=3 SV=1
MSTTRENEHVMRRELNVGGGAHGADPDELPMAGERSSEYETMVRRQLELIGEDPTRDGLLKTPGRVARSMAWLTRGYDLDPRSVIGDALFAEDHENMVMVRDIEMYSMCEHHMLPFFGKVHIAYIPNGKIVGLSKLPRVVEVFARRLQVQERLGEQIANAIVDVLQPKGVGVVIEAVHLCMMMRGVEKQNSRTITSSLRGLFRDDAKTRSEFLRLAYATPGF

SEQ ID NO: 8485 - protein, 181 aa, unidentified
  source 1..181: note = Gemmatimonas phototrophica
  REGION 1..181: note = tr|A0A143BQ08|A0A143BQ08_9BACT GTP cyclohydrolase 1; OS = Gemmatimonas phototrophica OX=1379270 GN=folE PE=3 SV=1
MVRRQLELMGEDPERDGLLKTPSRVAKAMMWLTRGYDQTAAEVIGDALFEENHENMVMVRDIEMYSMCEHHMLPFFGKVHIAYIPNGKIVGLSKLPRVVEVFARRLQVQERLGEQIANALEETLQPKGVGVVIEAVHLCMMMRGVEKQSSRTITSSMRGLFRDDSKTRSEFLRLAHSPTSY

SEQ ID NO: 8486 - protein, 193 aa, Gemmatimonas sp.
  REGION 1..193: note = tr|A0A0S8H274|A0A0S8H274_9BACT GTP cyclohydrolase 1; OS = Gemmatimonas sp. SM23_52 OX=1703359 GN=folE PE=3 SV=1
MLDTGALSLREVVRAQLRLLGEDPGRPGLLRTPERVEESLRWLTRGYEMDLEQVIGDGVFEAEHDEMVIVKDIELYSLCEHHLLPFFGKAHIAYIPDGRIVGFSKLPRIVEVFARRLQVQERLTDQIARAIQEMVKPKGVGVVVEAAHLCMMMRGVEKQNSRTITSSVQGVFRTDQRTRDEFLKLVASHWFSA

SEQ ID NO: 8487 - protein, 199 aa, Gemmatimonas sp.
  REGION 1..199: note = tr|A0A0S7Z9L7|A0A0S7Z9L7_9BACT GTP cyclohydrolase 1; OS = Gemmatimonas sp. SG8_23 OX=1703356 GN=folE PE=3 SV=1
MSKSVDRADLSSVAFEDLVAEMIRRLGDDPERDGMARTPERVAKAMAFLTKGYGETPEAVLGEALFEESHQSMVLVKDVELYSLCEHHMLPFFGKAHVAYIPNGRIMGLSKVARLVEVYARRFQVQERLTEQIAQAVWDTTQPEGVAVVIEAYHLCMMMRGVEKQNSKTLTSAMRGVFLEDHRTRDEFMRFVTSVHPPL

SEQ ID NO: 8488 - protein, 211 aa, unidentified
  source 1..211: note = Gemmatirosa kalamazoonesis
  REGION 1..211: note = tr|W0RHK2|W0RHK2_9BACT GTP cyclohydrolase 1; OS = Gemmatirosa kalamazoonesis OX=861299 GN=folE PE=3 SV=1
MSSTKDGSIALFASDTVAAGEACANMAAVVRRQLELLGEDPERDGLLKTPERVAKSLTWLTRGYSLNVHDAIGDALFEVDSESMVMVRDIELYSLCEHHMLPFFGKAHIAYLPNGKVVGLSKLARVVEVFSRRLQVQERLTEEIADALEDVLRPAGVGVVIEAVHLCMMMRGVEKQNSQTITSALRGAFRDDGRTRDEFLRLAHNGGSYHR

SEQ ID NO: 8489 - protein, 216 aa, unidentified
  source 1..216: note = Gemmatirosa kalamazoonesis
  REGION 1..216: note = tr|W0RUH3|W0RUH3_9BACT GTP cyclohydrolase 1; OS = Gemmatirosa kalamazoonesis OX=861299 GN=folE PE=3 SV=1
MGSSGSTLRQRFDAVRALGAHADATSFDGAIDDELAATIERQLELLGEDPGRDGLRKTPSRVAAALRFLTRGYDMSADEVVGDAVFSESYRSMVMVRDIEFYSLCEHHMLPFFGKVHIAYLPNGRVVGLSKLPRIVDVYARRLQVQERLTEEIADAIERVLHPAGVGVVVEAAHLCMMMRGVEKQNSSTVTSAVRGAVRDCPMTRDEFLRLAHGRR

SEQ ID NO: 8490 - protein, 362 aa, Gemmobacter aquatilis
  REGION 1..362: note = tr|A0A1H8CN35|A0A1H8CN35_9RHOB GTP cyclohydrolase FolE2 OS=Gemmobacter aquatilis OX=933059 GN=folE2 PE=3 SV=1
MNIHTPEIDRKPSREEAEAALRLLRQWAGKATDREIAEVDPSARALLGDGYPDLVRDYPAEFRVDAAYKDTLPDLQNGPASLIRGAKTQIQHVGISNFRLPIRYRTRDAGEVLLETSVTGTVSLEAEKKGINMSRIMRSFYAHAERDFSFDVIEHALEDYKRDLESFDARIQMRFSFPVKVPSLRSGLSGWQYYDIALELVDRAGERLKIMHLDYVYSSTCPCSLELSEHARRTRGQLATPHSQRSVARISVVLQPGRCLWFEDLIALCRAAVPTETQVMVKREDEQAFAELNAANPIFVEDAARLFCAQLQADPRVGDFRVVASHQESLHSHDAVSLLTSGPTFAQASLDPRLFGTLFHIG

SEQ ID NO: 8491 - protein, 362 aa, unidentified
  source 1..362: note = Gemmobacter caeni
  REGION 1..362: note = tr|A0A2T6BBM6|A0A2T6BBM6_9RHOB GTP cyclohydrolase FolE2 OS=Gemmobacter caeni OX=589035 GN=folE2 PE=3 SV=1
MNIRTPELDRKPGPEEVEAALALIRQWASKASDTEMLALDPAARALIGDGYPDLSTIYPAEFRADAAYKATLPDLQNGPASLIRGAKTQIQHVGISNFRLPIRYRTRDAGEVLLETSVTGTVSLEAEKKGINMSRIMRSFYTHAERDFSFDVIEHALSDYKRDLESFDARIQMRFSFPVKVPSLRSGLSGWQYYDIALELVDRAGERLKIMHLDYVYSSTCPCSLELSEHARRTRGQLATPHSQRSVARISVVANPGPALWFEDLIELCRRAVPTETQVMVKREDEQAFAELNAANPIFVEDAARLFCAQLQADPRVGDFRIVASHQESLHSHDAVSVLTEGPTFAQASLDPRLFGTLFHVG

SEQ ID NO: 8492 - protein, 362 aa, unidentified
  source 1..362: note = Gemmobacter intermedius
  REGION 1..362: note = tr|A0A3S3UEL6|A0A3S3UEL6_9RHOB GTP cyclohydrolase FolE2 OS=Gemmobacter intermedius OX=1553448 GN=folE2 PE=3; SV = 1
MDSRAPQSPAQPDKAQAEAALATLRVWMAGATDQDLLRLGPGIAAMLGHNSPALSRDYPDEFRPDAAYKASMPDLQNGPSSLIVGAKATIQHVGISNFRLPIRYRTRSGGEITLETSVTGTVSLEAGKKGINMSRIMRSFYAHSERQFSFGVAEAALEDYKRDLDSFDARIQLKLSWPQKVESLRSGLSGWQYYDLSLELLDQGGLRRRVMHLDYVYSSTCPCSLELSEHAREVRGQLATPHSQRSVARISAEVLDGERLWFEDLIDLARRAVVTETQVMVKREDEQAFAELNAANPIFVEDAARSFCEALRQDPRIGDFRVIASHQESLHSHDAVSLLTEGPLFAAQSLDPTLFASLIHRG

SEQ ID NO: 8493 - protein, 362 aa, unidentified
  source 1..362: note = Gemmobacter lutimaris
  REGION 1..362: note = tr|A0A398BSS8|A0A398BSS8_9RHOB GTP cyclohydrolase FolE2 OS=Gemmobacter lutimaris OX=2306023 GN=folE2 PE=3; SV = 1
MNIRTPELDRKPGHEEVEAALALLRQWASKASDAEMLALDPAARALIGDGYPELSTSYPAEFRADAAYKATLPDLQNGPASLIRGAKTQIQHVGISNFRLPIRYRTRDAGEVLLETSVTGTVSLEAEKKGINMSRIMRSFYTHAERDFSFDVIEHALSDYKRDLESFDARIQMRFSFPLKVPSLRSGLSGWQYYDIALELVDRAGERLKIMHLDYVYSSTCPCSLELSEHARRTRGQLATPHSQRSVARISVVANPGPALWFEDLIELCRRAVPTETQVMVKREDEQAFAELNAANPIFVEDAARLFCAQLQADPRVGDFRIVASHQESLHSHDAVSVLTEGPTFAQPSLDPRLFGTLFHVG

SEQ ID NO: 8494 - protein, 360 aa, unidentified
  source 1..360: note = Gemmobacter megaterium
  REGION 1..360: note = tr|A0A1N7LNF2|A0A1N7LNF2_9RHOB GTP cyclohydrolase FolE2 OS=Gemmobacter megaterium OX=1086013 GN=folE2 PE=3; SV = 1
MTIHTPAIDRDPARSEAEAALALLRRWAEQTPADEVATLDPALGVVLAGGALRRDYPAGFRPDAAYKATLPDLQNGPSSLIRGARATIQHVGISNFRLPLHYRTRDGGPVMLETSVTGTVSLEAEKKGINMSRIMRSFYTHAERQFSFGVIEAVLDDYRRDLDSFDARIQMRLSWPMRMESLRSGLSGWQYYDIALELVDQGGVRKRLVHLDYVYSSTCPCSLELSEHARATRGQLATPHAQRSVARLSVEVAGDATLWFEDLIDLARRAIPTETQVMVKREDEQAFAELNAANPIFVEDAARSFCAALREDGRIGDFRVVASHQESLHSHDAVSVLTEGPTFASSSLDPHLFASLIHRG

SEQ ID NO: 8495 - protein, 362 aa, Gemmobacter sp.
  REGION 1..362: note = tr|A0A4S3MK27|A0A4S3MK27_9RHOB GTP cyclohydrolase FolE2 OS=Gemmobacter sp. CC-PW-75 OX=1445661 GN=folE2 PE=3; SV = 1
MNIHTPEMDRKPAAEDVEAALALIRRWAGKATDAEMLALDPAARALIGDGYPDLSTVYPADFRADAAYKDTLPDLQNGPASLIRGAKTQIQHVGISNFRLPIRYHTRDNGDLTLETSVTGTVSLEAEKKGINMSRIMRSFYAHAERDFSFEVIEHALEDYKRDLDSFDARIQMRFSFPVKVSSLRSGLSGWQYYDIALELVDVAGVRKRIMHLDYVYSSTCPCSLELSEHARRTRGQLATPHSQRSVARISVVAEDGPCLWFEDLIDIARRAVPTETQVMVKREDEQAFAELNAANPIFVEDAARSFAEQLLADPRVGDFRVVASHQESLHSHDAVSVLTEGATFASESLDPRLFATLFHVG

SEQ ID NO: 8496 - protein, 363 aa, Gemmobacter sp.
  REGION 1..363: note = tr|A0A2S0UMJ8|A0A2S0UMJ8_9RHOB GTP cyclohydrolase FolE2 OS=Gemmobacter sp. HYN0069 OX=2169400 GN=folE2 PE=3; SV = 1
MNIFTPEIDRQPSREEAEAALAVLRRWAGKASDSEISRLDAAVAYLVPGEGYPALSRDYPADFVVTEGYKASLPDLQNGPSSLIKGEKQLIQHVGISNFRLPIRYRTRDNGDLTLETSVTGTVSLEAEKKGINMSRIMRSFYAHAERDFSFGVIEHALEDYKRDLESFDARIQMRFSFPVKVQSLRSGLSGWQYYDIALELVDVAGVRKKIMHLDFVYSSTCPCSLELSEHARRTRGQLATPHSQRSVARISVVVNAGERLWFEDLVELARAAVPTETQVMVKREDEQAFAELNAANPIFVEDAARSFCQALKEDARVGDFRIIASHQESLHSHDAVSVLTEGETFAQESLDPRLFTTLFHVG

SEQ ID NO: 8497 - protein, 258 aa, Geoalkalibacter ferrihydriticus
  REGION 1..258: note = tr|A0A1G9MCI4|A0A1G9MCI4_9DELT GTP cyclohydrolase FolE2 OS=Geoalkalibacter ferrihydriticus OX=392333; GN = folE2 PE=3 SV=1
MRDVQKTPDTRNIAIDKVGVKNIRYPIVVMDKSKARQHTVARVNMYVDLPHHFKGTHMSRFIEVLNLYHGEISIESLDTMLREMKQRLEASRAHLELDFPYFIEKSAPVSGARSLMEYQCRMIGILGEEQDFVLGVSVPVTSLCPCSRDISARGAHNQRSLLSVQIRYQGHVWIEDLVSWLEQCASAPVYALLKREDEKAVTEQAYDNPMFVEDIVRAVTQKLSAVPEITWFQVECENFESIHNHSAYALVESHARPL

SEQ ID NO: 8498 - protein, 258 aa, Geoalkalibacter ferrihydriticus; identical to SEQ ID NO: 8497
  REGION 1..258: note = tr|A0A0C2HY47|A0A0C2HY47_9DELT GTP cyclohydrolase FolE2 OS=Geoalkalibacter ferrihydriticus DSM 17813; OX = 1121915 GN=folE2 PE=3 SV=1

SEQ ID NO: 8499 - protein, 260 aa, Geoalkalibacter subterraneus
  REGION 1..260: note = tr|A0A0B5FAW0|A0A0B5FAW0_9DELT GTP cyclohydrolase FolE2 OS=Geoalkalibacter subterraneus OX=483547 GN=folE2; PE = 3 SV=1
MAEMPDLQQSPDTRNVAIDKVGVKNIRYPIVVSDKSKVRQHTVARVNMYVDLPHHFKGTHMSRFIEVLNLYHGEISIESLDTILHEMKKRLEASRAYLELDFPYFIEKTAPVSGAVGLMEYQCRMLGILGEKQDFVLGVTVPVTSLCPCSREISARGAHNQRSLISVQIRYRDHVWIEDLVGWLEECASAPVYSLLKREDEKAVTEQAYDNPMFVEDIVRAVTVRLSSIARITWFQVECENFESIHNHSAYALVEHREQR

SEQ ID NO: 8500 - protein, 188 aa, Geobacillus galactosidasius
  REGION 1..188: note = tr|A0A226QKU3|A0A226QKU3_9BACI GTP cyclohydrolase 1; OS = Geobacillus galactosidasius OX=883812 GN=folE PE=3 SV=1
MPHVNYEQIEYAVRLILEAIGEDPNREGLVDTPKRVAKMYAEVFAGLHEDPKQHFQTVFSEDHEELVLVKDIPFYSMCEHHLVPFFGVAHVAYIPRGGKVTGLSKLARAVETVARRPQLQERITATVADSIMETLDPYGVMVVVEAEHMCMTMRGVKKPGAKTVTTAVRGVFETDQVARAEVLSLIKG

SEQ ID NO: 8501 - protein, 188 aa, Geobacillus kaustophilus
  REGION 1..188: note = sp|Q5KXT7|GCH1_GEOKA GTP cyclohydrolase 1; OS = Geobacillus kaustophilus (strain HTA426) OX=235909; GN = folE PE=3 SV=1
MPEINFAQIEYAVRLILEAIGEDPNREGLVDTPKRVAKMYAEVFAGLQEDPKQHFQTVFSEEHEELVLVKDIPFYSMCEHHLVPFFGAAHVAYIPREGKVTGLSKLARAVEAVARRPQLQERITATIADSIVEALEPHGVMVVVEAEHMCMTMRGVKKPGSKTVTTAVRGVFETDANARAEVLSLIKA

SEQ ID NO: 8502 - protein, 188 aa, Geobacillus kaustophilus; identical to SEQ ID NO: 4631
  REGION 1..188: note = tr|A0A0D8BS07|A0A0D8BS07_GEOKU GTP cyclohydrolase 1; OS = Geobacillus kaustophilus OX=1462 GN=folE PE=3 SV=1

SEQ ID NO: 8503 - protein, 188 aa, Geobacillus lituanicus
  REGION 1..188: note = tr|A0A223DTR6|A0A223DTR6_9BACI GTP cyclohydrolase 1; OS = Geobacillus lituanicus OX=169283 GN=folE PE=3 SV=1
MPEINFAQIEYAVRLILEAIGEDPNREGLVDTPKRVAKMYAEVFAGLHEDPKEHFQTVFSEEHEELVLVKDIPFYSMCEHHLVPFFGVAHVAYIPREGKVTGLSKLARAVEAVARRPQLQERITATVADSIVEALEPHGVMVVVEAEHMCMTMRGVKKPGAKTVTTAVRGVFETDVAARSEVLSLIKA

SEQ ID NO: 8504 - protein, 188 aa, unidentified
  source 1..188: note = Geobacillus proteiniphilus
  REGION 1..188: note = tr|A0A1Q5T4J4|A0A1Q5T4J4_9BACI GTP cyclohydrolase 1; OS = Geobacillus proteiniphilus OX=860353 GN=folE PE=3 SV=1
MPEINFAQIEYAVRLILEAIGEDPNREGLVDTPKRVAKMYAEVFAGLQEDPKQHFQTVFSEEHEELVLVKDIPFYSMCEHHLVPFFGAAHVAYIPREGKVTGLSKLARAVEAVARRPQLQERITATIADSIVEALEPHGVMVVVEAEHMCMTMRGVKKPGAKTVTMAVRGVFETDANARAEVLSLIKA

SEQ ID NO: 8505 - protein, 188 aa, Geobacillus sp.; identical to SEQ ID NO: 8500
  REGION 1..188: note = sp|C5D3E8|GCH1_GEOSW GTP cyclohydrolase 1; OS = Geobacillus sp. (strain WCH70) OX=471223 GN=folE PE=3; SV = 1

SEQ ID NO: 8506 - protein, 188 aa, Geobacillus sp.
  REGION 1..188: note = tr|A0A0F6BL46|A0A0F6BL46_GEOS0 GTP cyclohydrolase 1; OS = Geobacillus sp. (strain Y4.1MC1) OX=581103 GN=folE PE=3; SV = 1
MSHVNYEQIEYAVRLILEAIGEDPNREGLVDTPKRVAKMYAELFSGLHEDPKQYFQTVFNEDHEELVLVKDIPFYSMCEHHLVPFFGVAHVAYIPRDGKVTGLSKLARAVEAVARRPQLQERITATVADSIMETLDPYGVMVVVEAEHMCMTMRGVKKPGAKTVTTAVRGVFETDQTARAEVLSLIKG

SEQ ID NO: 8507 - protein, 188 aa, Geobacillus stearothermophilus; identical to SEQ ID NO: 4631
  REGION 1..188: note = tr|A0A0K2HBW1|A0A0K2HBW1_GEOSE GTP cyclohydrolase 1; OS = Geobacillus stearothermophilus 10 OX=272567 GN=folE; PE = 3 SV=1

SEQ ID NO: 8508 - protein, 195 aa, Geobacillus stearothermophilus
  REGION 1..195: note = tr|A0A150MK86|A0A150MK86_GEOSE GTP cyclohydrolase 1; OS = Geobacillus stearothermophilus OX=1422 GN=folE PE=3 SV=1
MQEDVVCMPEINFAQIEYAVRLILEAIGEDPNREGLVDTPKRVAKMYAEVFAGLHEDPKEHFQTVFSEEHEELVLVKDIPFYSMCEHHLVPFFGVAHVAYIPREGKVTGLSKLARAVEAVARRPQLQERITATVADSIVEALEPHGVMVVVEAEHMCMTMRGVKKPGAKTVTTAVRGVFETDVAARSEVLSLIKA

SEQ ID NO: 8509 - protein, 188 aa, Geobacillus subterraneus
  REGION 1..188: note = tr|A0A146D1G0|A0A146D1G0_9BACI GTP cyclohydrolase 1; OS = Geobacillus subterraneus OX=129338 GN=folE PE=3 SV=1
MPEINVEQIEYAVRLILEAIGEDPNREGLIDTPKRVAKMYAEVFAGLKEDPKQHFQTVFSEEHEELVLVKDIPFYSMCEHHLVPFFGVAHVAYIPREGKVTGLSKLARAVEAVARRPQLQERITATVADSIVEALEPHGVMVVVEAEHMCMTMRGVKKPGAKTVTTAVRGVFETDANARSEVFSLIKA

SEQ ID NO: 8510 - protein, 188 aa, Geobacillus thermocatenulatus
  REGION 1..188: note = tr|A0A226QEA1|A0A226QEA1_9BACI GTP cyclohydrolase 1; OS = Geobacillus thermocatenulatus OX=33938 GN=folE PE=3 SV=1
MPEINFAQIEYAVRLILEAIGEDPNREGLIDTPKRVAKMYAEVFAGLQEDPKKHFQTVFSEEHEELVLVKDIPFYSMCEHHLVPFFGAAHVAYIPREGKVTGLSKLARAVEAVARRPQLQERITATIADSIVEALEPHGVMVVVEAEHMCMTMRGVKKPGAKTVTTAVRGVFETDANARAEVLSLIKA

SEQ ID NO: 8511 - protein, 196 aa, Geobacillus thermodenitrificans
  REGION 1..196: note = tr|A4IQ96|A4IQ96_GEOTN GTP cyclohydrolase 1; OS = Geobacillus thermodenitrificans (strain NG80-2); OX = 420246 GN=folE PE=3 SV=1
MTQEDVVCMSEINYEQIEYAVRLILEAIGEDPNREGLIDTPKRVAKMYAEVFAGLREDPKQHFQTVFSEEHEELVLVKDIPFYSMCEHHLVPFFGVAHVAYIPREGKVTGLSKLARAVEAVARRPQLQERITATVADSIVEALEPHGVMVVVEAEHMCMTMRGVKKPGAKTVTTAVRGVFETDANARSEVLSLIKA

SEQ ID NO: 8512 - protein, 219 aa, Geobacillus thermodenitrificans
  REGION 1..219: note = tr|A0A1W6VT84|A0A1W6VT84_GEOTD GTP cyclohydrolase 1; OS = Geobacillus thermodenitrificans OX=33940 GN=folE PE=3; SV = 1
MINCPSFLFFFAPYARIGLHAAFMTQEDVVCMSEINYEQIEYAVRLILEAIGEDPNREGLIDTPKRVAKMYAEVFAGLREDPKQHFQTVFSEEHEELVLVKDIPFYSMCEHHLVPFFGVAHVAYIPREGKVTGLSKLARAVEAVARRPQLQERITATVADSIVEALEPHGVMVVVEAEHMCMTMRGVKKPGAKTVTTAVRGVFETDANARSEVLSLIKA

SEQ ID NO: 8513 - protein, 196 aa, Geobacillus thermoleovorans
  REGION 1..196: note = tr|G8MZN4|G8MZN4_GEOTH GTP cyclohydrolase 1; OS = Geobacillus thermoleovorans CCB_US3_UF5 OX=1111068; GN = folE PE=3 SV=1
MMQEDVVCMPEINFAQIEYAVRLILEAIGEDPNREGLVDTPKRVAKMYAEVFAGLQEDPKQHFQTVFSEEHEELVLVKDIPFYSMCEHHLVPFFGAAHVAYIPREGKVTGLSKLARAVEAVARRPQLQERITATIADSIVEALEPHGVMVVVEAEHMCMTMRGVKKPGSKTVTTAVRGVFETDANARAEVLSLIKA

SEQ ID NO: 8514 - protein, 188 aa, Geobacillus thermoleovorans; identical to SEQ ID NO: 8501
  REGION 1..188: note = tr|A0A098L3Q7|A0A098L3Q7_GEOTH GTP cyclohydrolase 1; OS = Geobacillus thermoleovorans B23 OX=1406857 GN=folE PE=3; SV = 1

SEQ ID NO: 8515 - protein, 188 aa, unidentified; identical to SEQ ID NO: 8501
  source 1..188: note = Geobacillus zalihae
  REGION 1..188: note = tr|A0A1V9CU73|A0A1V9CU73_9BACI GTP cyclohydrolase 1; OS = Geobacillus zalihae OX=213419 GN=folE PE=3 SV=1

SEQ ID NO: 8516 - protein, 283 aa, Geobacter argillaceus
  REGION 1..283: note = tr|A0A562WUZ6|A0A562WUZ6_9DELT GTP cyclohydrolase FolE2 OS=Geobacter argillaceus OX=345631 GN=folE2 PE=3 SV=1
MNQKKGSDSQSPVPDTQSRQPLHDVQQLHDPRNIPINKVGVKDISYPVVVMDKNRKFQQTVARINMYVDLPHHFKGTHMSRFVELLNAHREEIALDKLETILGEMKKKLGASSAHLEMEFPYFIEKRAPVSKAKGLMEYTCEFNASLAESFDFVLGIRIPVTSLCPCSKELSQYGAHNQRSIITIRVRYREFVWIEDLVAQVEECGSSPVYSLLKRVDEKFVTERAYENPKFVEDIVREVTQRLLAMDNITWFSVEAENFESIHKHSAYAAIERDKRRSEVRG

SEQ ID NO: 8517 - protein, 267 aa, Geobacter bemidjiensis
  REGION 1..267: note = sp|B5EDQ6|GCH4_GEOBB GTP cyclohydrolase FolE2; OS = Geobacter bemidjiensis (strain Bem / ATCC BAA-1014 / DSM 16622) OX=404380 GN=folE2 PE=3 SV=1
MIKEYLKKPSLSDVQLTRDTRNIPIGKVGVKDISYPIVVMDKNKSFQNTIARINMYVDLPHHFKGTHMSRFVEILNEYREEIALDKLELILSTMKEKLGASNAHLEMEFPYFVEKTAPVSRAKSLMEYTCTFSASLSDRFDFVLGIKVPVTSLCPCSKELSSYGAHNQRSIMTVQVRYSEFIWIEDLIEIIEQCGSSPVYSLLKREDEKFVTERAYENPRFVEDMVREATVRLLSMQNVTWFSVEAENFESIHKHSAYAAIERSRES

SEQ ID NO: 8518 - protein, 276 aa, Geobacter daltonii
  REGION 1..276: note = tr|B9M0M8|B9M0M8_GEODF GTP cyclohydrolase FolE2; OS = Geobacter daltonii (strain DSM 22248 / JCM 15807 / FRC-32) OX=316067 GN=folE2 PE=3 SV=1
MKAKQMTTSPLTPHPSPDVMPDMQKSRDNRNIPISKVGVKDISYPIVVMDKNKSIQHTVARINMYVDLPHHFKGTHMSRFIEILNVYREEIALDKMEAMLQKMKEKLGASTAHLEIEFPYFIEKKAPASGAKSLMEYTCEFSASLASDFDFVLGVRVPVTSLCPCSKELSRYGAHNQRSIMTVKVRYREFIWIEDLIEIVEGCGSSPVYSLLKREDEKLVTERAYENPKFVEDMVREATEKLLSMDKITWFSVEAENFESIHKHSAYAAIERDKMG

SEQ ID NO: 8519 - protein, 266 aa, Geobacter lovleyi
  REGION 1..266: note = tr|B3E2D2|B3E2D2_GEOLS GTP cyclohydrolase FolE2; OS = Geobacter lovleyi (strain ATCC BAA-1151 / DSM 17278 / SZ) OX=398767 GN=folE2 PE=3 SV=1
MTRTMPDLQQSRDHRKIPIRKVGVKNISYPIVVQDKHRSLQHTVATVDMYVDLPHQFKGTHMSRFVEILNRHREQIALDRLEEILQEMRQKLGAETAHLRVEFPYFIDKAAPVSRARSLMEYTCEFDACLNGDQLDFVLGVKVPVTSLCPCSKELSQFGAHNQRSIMTVKVRYREFIWIEDLVELIEQCGSSPLYALLKRADEKHVTEQAYLNPRFVEDMVREAYLRLAASENITWFSVEAENFESIHNHSAYAEVELDRRDLRQP

SEQ ID NO: 8520 - protein, 261 aa, Geobacter metallireducens
  REGION 1..261: note = sp|Q39R36|GCH4_GEOMG GTP cyclohydrolase FolE2; OS = Geobacter metallireducens (strain GS-15 / ATCC 53774 / DSM 7210) OX=269799 GN=folE2 PE=3 SV=1
MTTMPDMQKTSDTRKIPINKVGVKDISYPIVVMDKNKKFQQTVARINMYVDLPHHFKGTHMSRFVEILNAYREDIALDKMEPILQKMKEKLGASSAHLEIEFPYFIEKRAPVSGARSLMEYTCTFCGSLGEEFDFVLGVQIPVTSLCPCSKELSRYGAHNQRSHITVRLRYTDFIWIEDLVAMIEECGSSPVWSLLKRVDEQYVTERAYENPKFVEDIVREVTQKLLAHDAITWFSVEAENFESIHKHSAYAAIERDKKMT

SEQ ID NO: 8521 - protein, 267 aa, Geobacter pelophilus
  REGION 1..267: note = tr|A0A1W7QXL3|A0A1W7QXL3_9DELT GTP cyclohydrolase FolE2 OS=Geobacter pelophilus OX=60036 GN=folE2 PE=3 SV=1
MIKEYLKKPALSDVQLTRDTRNIPIGKVGVKDISYPIVVMDKNKSFQNTIARINMYVDLPHHFKGTHMSRFVEILNEYREEIALDKLELILSTMKEKLGASNAHLEMEFPYFVEKTAPVSRAKSLMEYTCTFSASLSDRFDFVLGIKVPVTSLCPCSKELSSYGAHNQRSIMTVQVRYSEFIWIEDLIDVIEECGSSPVYSLLKREDEKFVTERAYENPRFVEDMVREATVRLLSMQNVTWFSVEAENFESIHKHSAYAAIERSKES

SEQ ID NO: 8522 - protein, 259 aa, Geobacter pickeringii
  REGION 1..259: note = tr|A0A0B5BC82|A0A0B5BC82_9DELT GTP cyclohydrolase FolE2 OS=Geobacter pickeringii OX=345632 GN=folE2 PE=3 SV=1
MPDMQKTPDTRKIPISKVGVKDISYPIVVMDKNRKFQQTVARVNMYVDLPHHFKGTHMSRFIEILNAYREEIALDKMEPILQKMKEKLGASSAHLEIEFPYFIEKRAPVSGARSLMEYTCSFVGTLGEEFDFVLGVTVPVTSLCPCSKELSRYGAHNQRSAITVRVRYRDFIWIEDLVAMIEECGSSPVWSLLKREDEKFVTERAYENPKFVEDIVRETTQKLLAEEAITWFSVEAENYESIHKHSAYAAIERDKRNKQ

SEQ ID NO: 8523 - protein, 258 aa, unidentified
  source 1..258: note = Geobacter soli
  REGION 1..258: note = tr|A0A0C1TTJ2|A0A0C1TTJ2_9DELT GTP cyclohydrolase FolE2 OS=Geobacter soli OX=1510391 GN=folE2 PE=3 SV=1
MPDMQTSRDTRKIPISKVGVKDISYPIVVMDKNRKFQQTVARVNMYVDLPHHFKGTHMSRFIEILNVYREDIGLDKMEPILQEMKKKLGASSAHLEIEFPYFIEKRAPVSGARSLMEYTCTFTGTLGETFDFVLGVQVPVTSLCPCSKELSRYGAHNQRSHITVRVRYAGFVWIEDLVDLIEGCGSSPVWSLLKRADEKFVTERAYENPKFVEDIVREATLVLAAHEAIAWFSVEAENFESIHKHSAYAAIERDKRKA

SEQ ID NO: 8524 - protein, 267 aa, Geobacter sp.
  REGION 1..267: note = sp|C6E7E6|GCH4_GEOSM GTP cyclohydrolase FolE2; OS = Geobacter sp. (strain M21) OX=443144 GN=folE2 PE=3 SV=1
MIKEYLKKPSLSDVQLTRDTRNIPIGKVGVKDISYPIVVMDKNKSFQNTIARINMYVDLPHHFKGTHMSRFVEILNEYREEIALDKLELILSTMKEKLGASNAHLEMEFPYFVEKTAPVSRAKSLMEYTCTFSASLSDRFDFVLGIKVPVTSLCPCSKELSSYGAHNQRSIMTVQVRYSEFIWIEDLIDIIEECGSSPVYSLLKREDEKFVTERAYENPRFVEDMVREATVRLLNMQNISWFSVEAENFESIHKHSAYAAIERSRES

SEQ ID NO: 8525 - protein, 268 aa, Geobacter sp.
  REGION 1..268: note = tr|A0A351WQQ5|A0A351WQQ5_9DELT GTP cyclohydrolase FolE2 OS=Geobacter sp. OX=46610 GN=folE2 PE=3 SV=1
MTDKKLKKEGNSLSDVQLTRDTRNIPIGKVGVKDISYPIVVMDKNKSFQNTIARINMYVDLPHHFKGTHMSRFVEILNSYREEIALDKMEIILATMKQKLGASNAHLEMEFPYFVEKLAPVSRAKSLMEYTCTFSASLSDRFDFVLGIKVPVTSLCPCSKELSAYGAHNQRSIMTVQVRYSEFIWIEDLIEIIEECGSSPVYSLLKREDEKFVTERAYENPRFVEDMVREATVRLLSMENITWFSVEAENFESIHKHSAYAAIERNKS

SEQ ID NO: 8526 - protein, 258 aa, Geobacter sulfurreducens
  REGION 1..258: note = sp|Q74FW8|GCH4_GEOSL GTP cyclohydrolase FolE2; OS = Geobacter sulfurreducens (strain ATCC 51573 / DSM 12127 / PCA) OX=243231 GN=folE2 PE=3 SV=1
MPDMQTSRDTRKIPISKVGVKDISYPIVVMDKNRKFQQTVARVNMYVDLPHHFKGTHMSRFIEILNAYREDIALDKMEPILQEMKKKLGASSAHLEIEFPYFIEKRAPVSGARSLMEYTCTFTGTLAETFDFVLGVQVPVTSLCPCSKELSRYGAHNQRSHITVRVRYAGFVWIEELVELIEGCGSSPVWSLLKRADEKFVTERAYENPKFVEDIVREATLALAAHEAITWFSVEAENFESIHKHSAYAAIEQDKRKA

SEQ ID NO: 8527 - protein, 258 aa, Geobacter sulfurreducens; identical to SEQ ID NO: 8526
  REGION 1..258: note = tr|A0A0D5NCX7|A0A0D5NCX7_GEOSN GTP cyclohydrolase FolE2 OS=Geobacter sulfurreducens OX=35554 GN=folE2 PE=3; SV = 1

SEQ ID NO: 8528 - protein, 266 aa, Geobacter thiogenes
  REGION 1..266: note = tr|A0A1T4RG03|A0A1T4RG03_9DELT GTP cyclohydrolase FolE2 OS=Geobacter thiogenes OX=115783 GN=folE2 PE=3 SV=1
MTKTMPDLQQSRDHRKIPIRKVGVKNISYPIVVQDKHRSLQHTVATVDMYVDLPHQFKGTHMSRFVEILNRHREQIALDRLEEILQEMRQKLGAETAHLRVEFPYFIDKAAPVSRARSLMEYTCEFDACLNGDQLDFVLGVKVPVTSLCPCSKELSQFGAHNQRSIMTVKVRYKEFIWIEDLVELIEQCGSSPLYALLKRADEKHVTEQAYQNPRFVEDMVREAYLRLAASENITWFSVEAENFESIHNHSAYAEVELDRRDTQHP

SEQ ID NO: 8529 - protein, 271 aa, Geobacter uraniireducens
  REGION 1..271: note = sp|A5G8S1|GCH4_GEOUR GTP cyclohydrolase FolE2; OS = Geobacter uraniireducens (strain Rf4) OX=351605; GN = folE2 PE=3 SV=2
MSDVQKSRDTRNIPISKVGVKDISYPIVIMDKNKSIQHTVARINMYVDLPHHFKGTHMSRFIEILNVYREKIALDNMEAMLQRMKEKLGAGSAHVEIEFPYFIEKKAPASGAKSLMEYTCEFSASLSSEFDFILGIKVPVTSLCPCSKELSHYGAHNQRSIMTVRVRYREFVWIEDLIEIVEGCGSSPVYSLLKREDEKFVTEKAYENPKFVEDMVREATQKLLAMEKITWFSVEAENFESIHNHSAYAAIERDKREKGVDNPVDKPGNCG

SEQ ID NO: 8530 - protein, 257 aa, unidentified
  source 1..257: note = Geobacteraceae bacterium
  REGION 1..257: note = tr|A0A1G0LAX8|A0A1G0LAX8_9DELT GTP cyclohydrolase FolE2 OS=Geobacteraceae bacterium GWB2_52_12 OX=1798314; GN = folE2 PE=3 SV=1
MPDMQKRLDTRRIPISKVGVKDIMYPVVVMDKNRSLQHTVARVNMYVDLPHHFKGTHMSRFVEILNQYREQIALDKLETILSEMKSKLESDSAHLEIQFPYFIDKKAPVSGATSLMEYTCEFNASMTDTLDFVLGAKVPLTSLCPCSKELSRFGAHNQRSVMTVRVRYRDFIWIEDLVELIEECGSSPLYALLKREDEKFVTEQAYENPRFVEDMVREAYSRLAALENITWFTVETENFESIHNHSAYASVGLDRRG

SEQ ID NO: 8531 - protein, 256 aa, unidentified
  source 1..256: note = Geobacteraceae bacterium
  REGION 1..256: note = tr|A0A1G0M9K0|A0A1G0M9K0_9DELT GTP cyclohydrolase FolE2 OS=Geobacteraceae bacterium GWC2_55_20 OX=1798317; GN = folE2 PE=3 SV=1
MPDMQKRPDHRRIPISKVGVKDITYPIVVMDKNRTLQHTVARVNMYVDLPHHFKGTHMSRFVEILNKYREQIALDKLETILEEMKSRLGSASAHLEIQFPYFIDKAAPVSGAKSLMEYTCEFSASMTDSLDFVLGVRVPLTSLCPCSKELSRFGAHNQRSIMTVRVRYRDFIWIEDLVELIEQCGSSPLYSLLKREDEKYVTEHAYENPRFVEDMVREAYSRLAALDNITWFSVETENFESIHNHSAFAAVELDRR

SEQ ID NO: 8532 - protein, 206 aa, unidentified
  source 1..206: note = Geodermatophilus africanus
  REGION 1..206: note = tr|A0A1H3GHZ9|A0A1H3GHZ9_9ACTN GTP cyclohydrolase 1; OS = Geodermatophilus africanus OX=1137993 GN=folE PE=3 SV=1
MSEVPAEPDDLLLERARAGVDHARAAAAVRELLIAVGEDPDRPGLQDTPARVARAYAETFAGLWQDPAEVLSTTFDEDHDEMVLVKDIPMYSTCEHHLVPFHGVAHIGYIPGEDGRVTGLSKLARLVEVYARRPQVQERMTSQIADALADVLKPRGVLVVIEAEHLCMAMRGVRKPGSSTVTSAVRGIFRENGATRSEAMSLVLGR

SEQ ID NO: 8533 - protein, 202 aa, unidentified
  source 1..202: note = Geodermatophilus amargosae
  REGION 1..202: note = tr|A0A1I6XEP3|A0A1I6XEP3_9ACTN GTP cyclohydrolase 1; OS = Geodermatophilus amargosae OX=1296565 GN=folE PE=3 SV=1
MSLVPEDEVRADPSHVDTARAAAAVRELLLAVGEDPDRPGLRDTPTRVARAYAETFAGLWQDPAEVLATVFDEDHDELVLVKDIPMYSTCEHHLVPFHGAAHVGYIPAEDGRVTGLSKLARLVDVYARRPQVQERMTRQIADALDENLKPRGVIVVVEAEHLCMGMRGIRKPGSTTVTSAVRGIFRDNAATRAEAMSLVLGR

SEQ ID NO: 8534 - protein, 214 aa, unidentified
  source 1..214: note = Geodermatophilus aquaeductus
  REGION 1..214: note = tr|A0A521DQT4|A0A521DQT4_9ACTN GTP cyclohydrolase 1; OS = Geodermatophilus aquaeductus OX=1564161 GN=folE PE=3; SV = 1
MTLADSSTLRPGAGTTEQRPAPLRVVREGGTIDVPAAERAVADLLSALGRDPASPHLAGTPRRVVDSFAEMLTGPSFDLTTFPNDEGYDELVLATALPVRSLCEHHLLPFAGVAHVGYLPGDRILGLSKLARVLDLLARDLQVQERLTQQVADWLQEHLAPRGVGVVIEAEHLCMSLRGVRAAGARTTTSALRGVLRDDARSRGEFLSLARTAA

SEQ ID NO: 8535 - protein, 205 aa, unidentified
  source 1..205: note = Geodermatophilus aquaeductus
  REGION 1..205: note = tr|A0A521CW13|A0A521CW13_9ACTN GTP cyclohydrolase 1; OS = Geodermatophilus aquaeductus OX=1564161 GN=folE PE=3; SV = 1
MSVIPEEPEDEVRADPANIDTARAAAAVRELLLAVGEDPDRPGLRDTPARVARAYAETFAGLWQDPAEVLATVFDEDHDEMVLVKDIPMYSTCEHHLVPFHGAAHVGYIPGADGRVTGLSKLARLVDVYARRPQVQERMTRQIADALDQHLKPRGVIVVVEAEHLCMGMRGIRKPGSTTVTSAVRGMFRDSAATRAEAMSLVLGR

SEQ ID NO: 8536 - protein, 205 aa, unidentified
  source 1..205: note = Geodermatophilus dictyosporus
  REGION 1..205: note = tr|A0A1I5N9W7|A0A1I5N9W7_9ACTN GTP cyclohydrolase 1; OS = Geodermatophilus dictyosporus OX=1523247 GN=folE PE=3; SV = 1
MNELLEEPEGEVRADFSRVDTARAEAAVRELLLAVGEDPDRPGLRNTPGRVARAYAETFAGLWQDPGEILATVFDEDHDELVLVKDIPMYSTCEHHLVPFHGAAHVGYIPGEDGRVTGLSKIARLVDVYARRPQVQERMTRQIADALAEHLQPRGVLVVIEAEHLCMGMRGIRKPGSTTVTSAVRGIFRDNAATRAEAMGLVLGR

SEQ ID NO: 8537 - protein, 205 aa, unidentified
  source 1..205: note = Geodermatophilus nigrescens
  REGION 1..205: note = tr|A0A1M5DMV2|A0A1M5DMV2_9ACTN GTP cyclohydrolase 1; OS = Geodermatophilus nigrescens OX=1070870 GN=folE PE=3 SV=1
MSELPEEPGDEVRADPSRIDAARAEAAVRELLIAVGEDPDRPGLRDTPARVARAYAETFAGLWQDPAEVLATTFDEDHDELVLVKDIPMYSTCEHHLVPFHGAAHVGYIPGEDGKVTGLSKIARLVDVYARRPQVQERMTRQIADALADVLKPRGVIVVIEAEHLCMGMRGIRKPGSTTVTSAVRGMFRDNAATRAEAMSLVLGR

SEQ ID NO: 8538 - protein, 205 aa, unidentified
  source 1..205: note = Geodermatophilus normandii
  REGION 1..205: note = tr|A0A317QFM3|A0A317QFM3_9ACTN GTP cyclohydrolase 1; OS = Geodermatophilus normandii OX=1137989 GN=folE PE=3 SV=1
MTDLAHEPEDEVRADPAHVDTARAAAAVRELLLAVGEDPDRPGLRDTPARVARAYAETFAGLWQDPAEVLATVFDEDHDEMVLVRDIPMYSTCEHHLVPFHGAAHVGYIPGDDGRVTGLSKLARLVDVYARRPQVQERMTRQIADALDQHLKPRGVIVVIEAEHLCMGMRGIRKPGSTTVTSAVRGMFRDNPATRAEAMSLVLGR

SEQ ID NO: 8539 - protein, 212 aa, Geodermatophilus obscurus
  REGION 1..212: note = tr|A0A1M7V106|A0A1M7V106_9ACTN GTP cyclohydrolase 1; OS = Geodermatophilus obscurus OX=1861 GN=folE PE=3 SV=1
MTEIPAGAGGDEDSAALLLSPPRAGVDHVRAAAAVRELLLAVGEDPDRPGLQDTPDRVARAYAETFAGLWQDPAEVLATTFDEDHDEMILVKDIPMYSTCEHHLVPFHGVAHIGYIPGEDGRVTGLSKLARLVEVYARRPQVQERMTSQIADALADVLKPRGVLVVIEAEHLCMAMRGVRKPGSSTVTSAVRGIFRENAATRSEAMSLVRGR

SEQ ID NO: 8540 - protein, 205 aa, Geodermatophilus obscurus
  REGION 1..205: note = tr|A0A1I5ENU5|A0A1I5ENU5_9ACTN GTP cyclohydrolase 1; OS = Geodermatophilus obscurus OX=1861 GN=folE PE=3 SV=1
MSVLPEESEDEVRADPARIDSARAEAAVRELLLAVGEDPDRPGLRDTPARVARAYAETFAGIWQDPAEILATVFDEDHDELVLVKDIPMYSTCEHHLVPFHGMAHVGYIPGEDGRVTGLSKLGRLVDVYARRPQVQERMTRQIADALDEHLKPRGVIVVIEAEHLCMGMRGIRKPGSTTVTSAVRGMFRDNPATRAEAMSLVIGR

SEQ ID NO: 8541 - protein, 212 aa, unidentified
  source 1..212: note = Geodermatophilus poikilotrophus
  REGION 1..212: note = tr|A0A1I0EXR7|A0A1I0EXR7_9ACTN GTP cyclohydrolase 1; OS = Geodermatophilus poikilotrophus OX=1333667 GN=folE PE=3; SV = 1
MSEVPARAGGDEDGAALLLSPPRTGVDHARAAAAVRELLLAVGEDPDRPGLQGTPDRVARAYAETFAGLWQDPAAVLATTFDEDHDEMVLVKDIPMYSTCEHHLVPFHGVAHIGYIPGEDGRVTGLSKLARLVEVYARRPQVQERMTSQIADALADVLKPRGVLVVIEAEHLCMAMRGVRKPGSSTVTSAVRGIFRDNAATRSEAMSLVLGR

SEQ ID NO: 8542 - protein, 210 aa, unidentified
  source 1..210: note = Geodermatophilus pulveris
  REGION 1..210: note = tr|A0A239GFM3|A0A239GFM3_9ACTN GTP cyclohydrolase 1; OS = Geodermatophilus pulveris OX=1564159 GN=folE PE=3 SV=1
MSALPDGEGGAGPARGPDRPRTGVDHARAAAAVRELLIAVGEDPDRPGLQDTPDRVARAYAETFAGLWEDPADVLSTTFDEDHDELVLVKDIPMYSTCEHHLVPFHGMAHIGYVPGQDGKVTGLSKLARLVEVYARRPQVQERMTSQIADALADVLKPRGVLVVIEAEHLCMAMRGVRKPGSRTVTSAVRGVFKDSIATRNEAMSLVVRR

SEQ ID NO: 8543 - protein, 207 aa, Geodermatophilus ruber
  REGION 1..207: note = tr|A0A1I4D7L9|A0A1I4D7L9_9ACTN GTP cyclohydrolase 1; OS = Geodermatophilus ruber OX=504800 GN=folE PE=3 SV=1
MTEVPAEPDEEQPASRPRPGVDEERAAAAVRELLLAVGEDPDRPGLQDTPARVARAYAESFAGLWQDPAEVLATTFDEDHDEMVLVKDIPMYSTCEHHLVPFHGVAHVGYIPGEDGRVTGLSKLARLVEVYARRPQVQERMTSQIADALADVLKPRGVLVVIEAEHLCMAMRGIRKPGSTTVTSAVRGIFRDSQATRAEAMSLVLGR

SEQ ID NO: 8544 - protein, 207 aa, unidentified
  source 1..207: note = Geodermatophilus sabuli
  REGION 1..207: note = tr|A0A285ECY8|A0A285ECY8_9ACTN GTP cyclohydrolase 1; OS = Geodermatophilus sabuli OX=1564158 GN=folE PE=3 SV=1
MSEVPAEPDDLLLQRPPGAGVDQERAAAAVRELLLAVGEDPDRPGLKETPGRVARAYAETFAGLWQDPADVLATTFDEDHDEMVLVKDIPMYSTCEHHLVPFHGVAHIGYIPGEDGRVTGLSKLARLVEVYARRPQVQERMTSQIADALSEVLKPRGVLVVIEAEHLCMAMRGIRKPGSTTVTSAVRGIFRDNPATRAEAMSLVLGR

SEQ ID NO: 8545 - protein, 208 aa, unidentified
  source 1..208: note = Geodermatophilus sabuli
  REGION 1..208: note = tr|A0A285EA29|A0A285EA29_9ACTN GTP cyclohydrolase 1; OS = Geodermatophilus sabuli OX=1564158 GN=folE PE=3 SV=1
MTTPEVAVGPARRSGHLHAVRPAAAVDLLAAERAVGDLLRALGRDPASPHLADTPRRVAESYAELLTGRPFELTTFTNDEGYDELVIARDIPVQSLCEHHLLPFSGVAHIGYLPGGRILGLSKLARVLELFARDLQVQERLIQQVADWLQEHLAPRGVGVVVEAEHLCMSLRGVRATGSRTVTSALHGVLRNDARSRAEFFALTGTTA

SEQ ID NO: 8546 - protein, 205 aa, unidentified
  source 1..205: note = Geodermatophilus saharensis
  REGION 1..205: note = tr|A0A239GU55|A0A239GU55_9ACTN GTP cyclohydrolase 1; OS = Geodermatophilus saharensis OX=1137994 GN=folE PE=3 SV=1
MSVLPEEPEDEVGPDLARIDSARAEAAVRELLLAVGEDPDRPGLRDTPARVARAYAETFAGIWQDPGEILATVFDEDHDELVLVKDIPMYSTCEHHLVPFHGAAHVGYIPGEDGRVTGLSKLARLVDVYARRPQVQERMTRQIADALAEHLKPRGVIVVVEAEHLCMGMRGIRKPGSTTVTSAVRGIFRDNAATRAEAMSLVLGR

SEQ ID NO: 8547 - protein, 214 aa, unidentified
  source 1..214: note = Geodermatophilus saharensis
  REGION 1..214: note = tr|A0A239BN04|A0A239BN04_9ACTN GTP cyclohydrolase 1; OS = Geodermatophilus saharensis OX=1137994 GN=folE PE=3 SV=1
MTTQSTRCATDPGPSPAGRPRALRFVREAGAVDRPATERAVAELLRALGRDPADPHLAETPRRVADALTELLTGRPFELTTFPNDEGYDELVIATGIPVQSLCEHHLLPFTGVASIGYLPGERILGLSKLARVLESFARDLQVQERLTQQVADWLWDHLAPRGVGVVIEAEHQCMSLRGVRAAGSRTITSALHGLLREDARSRQEFFALTGTAA

SEQ ID NO: 8548 - protein, 209 aa, unidentified
  source 1..209: note = Geodermatophilus siccatus
  REGION 1..209: note = tr|A0A1G9UV73|A0A1G9UV73_9ACTN GTP cyclohydrolase 1; OS = Geodermatophilus siccatus OX=1137991 GN=folE PE=3 SV=1
MTAAGPLAAVTTEDPLPALRVVRETGTVDLPAAEAAVTALLRALGRDPASPHLAETPRRVARSYAELLTGRQFELTTFPNDEGYDELVIARDIPLQSLCEHHLLPFSGVAHIGYLPGARILGLSKLARVLELFARDLQVQERLTQQVADWLQEHLAPRGVGVVVEAEHLCMSLRGVRAPGARTVTSALHGVLRSDARSRAEFFALTGTT

SEQ ID NO: 8549 - protein, 212 aa, unidentified
  source 1..212: note = Geodermatophilus siccatus
  REGION 1..212: note = tr|A0A1G9TPC9|A0A1G9TPC9_9ACTN GTP cyclohydrolase 1; OS = Geodermatophilus siccatus OX=1137991 GN=folE PE=3 SV=1
MSQIPAGVGGDEDRADLLLERPRTGVDHARAVAAVRELLLAVGEDPDRPGLQATPDRVARAYAETFAGLWQDPAEVLATTFDEDHDEMVLVKDIPMYSTCEHHLVPFHGVAHVGYIPGEDGRVTGLSKLARLVEVYARRPQVQERMTSQIADALADVLKPRGVLVVIEAEHLCMAMRGIRKPGSSTVTSAVRGIFRESAATRSEAMSLVLGR

SEQ ID NO: 8550 - protein, 203 aa, Geodermatophilus sp.
  REGION 1..203: note = tr|A0A4Y9NBY8|A0A4Y9NBY8_9ACTN GTP cyclohydrolase 1; OS = Geodermatophilus sp. DF01_2 OX=2559610 GN=folE PE=3 SV=1
MPAGADDQLLSRPRREVDQARAAAAVRELLLAIGEDPDRPGLQDTPERVARAYAETFAGLWQDPSDILATTFDEDHDEMVLVKDIPMYSTCEHHLVPFHGVAHVGYIPGEDGKVTGLSKLARLVEVYARRPQVQERMTSQIADALADVLKPRGVLVVIEAEHLCMAMRGIRKPGSTTVTSAVRGIFRDNPATRSEAMSLVLRR

SEQ ID NO: 8551 - protein, 206 aa, Geodermatophilus sp.
  REGION 1..206: note = tr|A0A372J4W4|A0A372J4W4_9ACTN GTP cyclohydrolase 1; OS = Geodermatophilus sp. LHW52908 OX=2303986 GN=folE PE=3; SV = 1
MSEVAAEPDDLLPAPPRPGVDHERAAAAVRELLLAVGEDPDRPGLRDTPGRVARAYAETFAGLWQDPQDVLATTFDEDHDEMVLVKDIPMYSTCEHHLVPFHGVAHIGYIPGDDGRVTGLSKLARLVEVYARRPQVQERMTSQIADALAEVLKPRGVLVVIQAEHLCMAMRGIRKPGSSTVTSAVRGIFRDSAATRAEAMGLVLGR

SEQ ID NO: 8552 - protein, 206 aa, unidentified
  source 1..206: note = Geodermatophilus telluris
  REGION 1..206: note = tr|A0A1G6SG04|A0A1G6SG04_9ACTN GTP cyclohydrolase 1; OS = Geodermatophilus telluris OX=1190417 GN=folE PE=3 SV=1
MTGGPAAREEHAGHLRVVRDDAGVDLPAAERAVAALLRALGRDPAAPHLADTPRRVAEAYAEFLTGRPFALTTFPNDGGYDEMVVATGIPVTSLCEHHLLPFTGVAAIGYVPGERILGLSKLARVLDHLARDLQVQERLTRQVADWLRDHLAPRGVGVVIAAEHQCVSLRGIRAAGSRTVTSALHGLLREDPRSRQEFLALTGTAA

SEQ ID NO: 8553 - protein, 205 aa, unidentified
  source 1..205: note = Geodermatophilus telluris
  REGION 1..205: note = tr|A0A1G6LLY7|A0A1G6LLY7_9ACTN GTP cyclohydrolase 1; OS = Geodermatophilus telluris OX=1190417 GN=folE PE=3 SV=1
MSELPEEAEDEVRVDLSRVDTARAEAAVRELLLAVGEDPDRPGLRDTPGRVARAYAETFAGLWQDPAEILATVFDEDHDELVLVKDIPMYSTCEHHLVPFHGTAHVGYIPGEDGRVTGLSKIARLVDVYARRPQVQERMTRQIADAVDENLKPRGVLVVIEAEHLCMGMRGIRKPGSTTVTSAVRGIFRDNAATRAEAMGLVLGR

SEQ ID NO: 8554 - protein, 204 aa, unidentified
  source 1..204: note = Geodermatophilus tzadiensis
  REGION 1..204: note = tr|A0A2T0TPK2|A0A2T0TPK2_9ACTN GTP cyclohydrolase 1; OS = Geodermatophilus tzadiensis OX=1137988 GN=folE PE=3 SV=1
MTGGPATGLAGPLRVVRDGSGVDVPAAERAVAALLRALGRDPAAPHLAETPRRVAEAYAELLTGRPFALTTFPNDGGYDEMVVATGIPVASLCEHHLLPFTGVASVGHLPGERILGLSKLARVLDHFARDLQVQERLTQQVADWLRDHLAPRGVGVVIAAEHQCTSLRGIRAAASRTVTSALHGLLREDVRSRQEFLALTGTAA

SEQ ID NO: 8555 - protein, 205 aa, unidentified
  source 1..205: note = Geodermatophilus tzadiensis
  REGION 1..205: note = tr|A0A2T0TC08|A0A2T0TC08_9ACTN GTP cyclohydrolase 1; OS = Geodermatophilus tzadiensis OX=1137988 GN=folE PE=3 SV=1
MSELPEEPEDEVRVDLSRVDTARAEAAVRELLLAVGEDPDRPGLRDTPGRVARAYAETFAGLWQDPGEILATVFDEDHDELVLVKDIPMYSTCEHHLVPFHGAAHVGYIPGEDGRVTGLSKIARLVDVYARRPQVQERMTRQIADAVDEHLKPRGVLVVIEAEHLCMGMRGIRKPGSITVTSAVRGIIRDNAATRAEAMGLVLGR

SEQ ID NO: 8556 - protein, 207 aa, Geofilum rubicundum
  REGION 1..207: note = tr|A0A0E9LRA7|A0A0E9LRA7_9BACT GTP cyclohydrolase 1; OS = Geofilum rubicundum JCM 15548 OX=1236989 GN=folE PE=3; SV = 1
MEFSLNNGKGYVKVESYDDETTHQLARVYEQSLRLLGEDPTREGLEKTPIRVAKAMQFLTQGYNMKPDEIIRSAMFREDYQQMVVVKDIELYSMCEHHMLPFFGKAHVAYIPRHHITGLSKIARVVEAFARRLQVQERLTTQIKDCIQTTLNPLGVAVVIEAQHMCMQMRGVQKQHSVTTTSDFTGAFLKNLATRDEFFNIIGSRLH

SEQ ID NO: 8557 - protein, 188 aa, Geomicrobium sp.
  REGION 1..188: note = tr|A0A061N8A1|A0A061N8A1_9BACL GTP cyclohydrolase 1; OS = Geomicrobium sp. JCM 19055 OX=1460649 GN=folE PE=3 SV=1
MTKFDKDKIETAVRHILEAIGDNPDREGIKDTPARVARMYEEVFSGIDEDPTTHLQTVFGEEHEELVLVKDITFYSMCEHHLLPFFGKVHVGYIPKNGTVTGLSKLARVVETVTRRPQLQERITSTVLDAMLETLEPHGVMVIVEAEHMCMTMRGIQKPGSSTVTSAVRGVFANDESSRQEVLSLIKG

SEQ ID NO: 8558 - protein, 188 aa, Geomicrobium sp.
  REGION 1..188: note = tr|A0A061NIC5|A0A061NIC5_9BACL GTP cyclohydrolase 1; OS = Geomicrobium sp. JCM 19037 OX=1460634 GN=folE PE=3 SV=1
MTKFDKEKIESAVRQILEAIGDDPGREGIIDTPARVARMYEEVFGGIGEDPAEHLKTVFGEEHEELVLVKDITFYSMCEHHLLPFFGKVHVGYIPKNGTVTGLSKLARVVETVTRRPQLQERITSTVADALVETLDPHGVMVVVEAEHMCMTMRGIQKPGSSTVTSAVRGVFEEEESSRQEVLSLIKY

SEQ ID NO: 8559 - protein, 269 aa, unidentified
  source 1..269: note = Geomonas terrae
  REGION 1..269: note = tr|A0A4S1CME9|A0A4S1CME9_9DELT GTP cyclohydrolase FolE2 OS=Geomonas terrae OX=2562681 GN=folE2 PE=3 SV=1
MSKVTDQNKEAQPLTDVQLTRDTRNIPISKVGVKDVSYPIVVMDKNKKFQNTIARINMYVDLPHHFKGTHMSRFVEILNKYREEIALDKLELILATMKEKLGASNAHLEMEFPYFVEKKAPVSKAKSLMEYTCTFSASLSDTFDFVLGIKVPVTSLCPCSKELSSYGAHNQRSIMTVQVRYSEFIWIEDLIEVIEECGSSPVYSLLKREDEKFVTERAYENPRFVEDMVREATVRLLSMENITWFSIEAENFESIHKHSAYAAIERDKR

SEQ ID NO: 8560 - protein, 222 aa, Georgenia muralis
  REGION 1..222: note = tr|A0A3N4Z849|A0A3N4Z849_9MICO GTP cyclohydrolase 1; OS = Georgenia muralis OX=154117 GN=folE PE=3 SV=1
MTRAIPQSPDEPGGVADRASDAAPLLDGGTAVRPYDPEGVRRAVRDLLVAVGEDPDREGLAGTPDRMARAYAEMFAGLAEDPADHLDAVFDIGHEEMVLVRDIPLYSMCEHHLLPFHGVAHVGYIPAVDGRVTGLSKLARLVEGYARRPQVQERLTSQVADALVARLEPRGAIVVVEAEHLCMSMRGVRKPGARTMTSAVRGRMRNAATRSEAMSLILAGTR

SEQ ID NO: 8561 - protein, 200 aa, unidentified
  source 1..200: note = Georgenia satyanarayanai
  REGION 1..200: note = tr|A0A2Y9BYC3|A0A2Y9BYC3_9MICO GTP cyclohydrolase 1; OS = Georgenia satyanarayanai OX=860221 GN=folE PE=3 SV=1
MGEEQAAPAELRPYDAEGVRAAVRDLLVAVGEDPDREGLRDTPARVSRALQEIFAGMRTDPAEILATTFDLGHEEMILVRDIEVYSTCEHHLLPFHGVAHVGYIPGHQGRVTGLSKIARLVETFARRPQVQERLTSQIADALVTHLDPQGVIVVIECEHLCMSMRGVRKPGARTITSAVRGQMRQAATRAEAMSLIAPRR

SEQ ID NO: 8562 - protein, 230 aa, Georgenia soli
  REGION 1..230: note = tr|A0A2A9ENY2|A0A2A9ENY2_9MICO GTP cyclohydrolase 1; OS = Georgenia soli OX=638953 GN=folE PE=3 SV=1
MVAQDPTGTGSATWDAGIAGSPPEADGMASDSSPIRYRHTPRPYDADGVRRAVRDLLAAVGEDPDREGLLGTPDRLARSFAEIFAGLAEDPADHLDAVFDIGHEEMVLVRDIPLYSMCEHHLLPFHGVAHVGYIPAENGRVTGLSKLARLVEGYARRPQVQERLTSQVADALVDRLEPRGVIVVVEAEHLCMSMRGVRKPGSRTITSAVRGQMRRAATRAEAMSLLVNRA

SEQ ID NO: 8563 - protein, 249 aa, Georgenia soli
  REGION 1..249: note = tr|A0A2A9ERK0|A0A2A9ERK0_9MICO GTP cyclohydrolase 1; OS = Georgenia soli OX=638953 GN=folE PE=3 SV=1
MAVVTLADERLALDAEPTLDTTLPHAPTVDPRPVPAESRAALVEQRPAPVDDAAGSAGRIDLARARSAVADLLGALGRDTRSEHLADTPRRVADALAEMLTPRPFEMTTFPNDEGYDELVLVRDVPFHSLCEHHLLPFHGVAHLAYLPGERIVGLSKLARVLEHFSRDLQVQERLTQQVADLLQERLRPRGVGVVLEAEHLCMSLRGVAVTGSRTVTSALRGTLREDPRSRAEFLALVGAGPAPRSYAG

SEQ ID NO: 8564 - protein, 241 aa, Georgenia sp.
  REGION 1..241: note = tr|A0A5B8C153|A0A5B8C153_9MICO GTP cyclohydrolase 1; OS = Georgenia sp. Z443 OX=2589797 GN=folE PE=3 SV=1
MTTITTGPLTERPPALDPRPSTRDARPSTRDARPPAPNAPLDTPVARAPLPQAHPDARGIDHAAATRAVTDLLAALGHDARGPHLAETPRRVADALAELLTPRPFTLTTFPNDEGYDQLVLVRDVPFHSLCEHHLLPFHGVAHIAYLPGERIVGLSKLARVLHHFARDLQVQERLTQQVADLLQDRLAPRGVGVVLQAEHMCMALRGVQVSGSRTVTSALHGALREDARTREEFFALAGLQ

SEQ ID NO: 8565 - protein, 246 aa, Georgenia sp.
  REGION 1..246: note = tr|A0A552WM94|A0A552WM94_9MICO GTP cyclohydrolase 1; OS = Georgenia sp. Z446 OX=2594180 GN=folE PE=3 SV=1
MTTITTVPRAERPPSLDPRPSPPDARPASRDDRPPAPNALLDAPALDAPAARAPLPQAHPDARGIDHAAATRAVTDLLAALGHDARGPHLAETPRRVADALAELLTPRPFTLTTFPNDEGYDQLVLVRDVPFHSLCEHHLLPFHGVAHIAYLPGERIVGLSKLARVLHHFARDLQVQERLTQQVADLLQDRLAPRGVGVVLQAEHLCMALRGVQVSGSRTVTSALHGALREDARTREEFFALAGLQ

SEQ ID NO: 8566 - protein, 209 aa, unidentified
  source 1..209: note = Georhizobium profundi
  REGION 1..209: note = tr|A0A3Q8XP99|A0A3Q8XP99_9RHIZ GTP cyclohydrolase 1; OS = Georhizobium profundi OX=2341112 GN=folE PE=3 SV=1
MDAIVKSFPGKDQDEKDARPSQSEVEAAVRTLLLWVGDDPDREGLVDTPKRVAKAYKDLFGGYDEDPEDVLGRTFEEVAGYDDMVLVRDIPFFSHCEHHMVPIIGKAHVAYLPDGKVLGLSKIARVIDIYARRLQTQESMTAQVSKAIDETLRPLGVAVMIEAEHMCMAMRGIRKQGSTTLTTTFTGQFKTDPHQQARFMTMLRSHNGH

SEQ ID NO: 8567 - protein, 188 aa, unidentified
  source 1..188: note = Geosporobacter ferrireducens
  REGION 1..188: note = tr|A0A1D8GNZ5|A0A1D8GNZ5_9CLOT GTP cyclohydrolase 1; OS = Geosporobacter ferrireducens OX=1424294 GN=folE PE=3; SV = 1
MDKAKIERAVRDILEAIGENPDREGLRDTPKRIARMYEEIFAGLKADPKDHLEIYFEEEKHEELVLVKDIPFFSVCEHHLVPFYGKAHIGYIPKGGKLTGLSKLARVLDTVSKRPQLQERLTATIADTIVEKLHPHGVIVVVEAEHMCMTMRGIKKPGSKTLTSAVRGIFQDDAKARAEAMALINFGS

SEQ ID NO: 8568 - protein, 188 aa, Geosporobacter subterraneus
  REGION 1..188: note = tr|A0A1M6H6B8|A0A1M6H6B8_9CLOT GTP cyclohydrolase 1; OS = Geosporobacter subterraneus DSM 17957 OX=1121919; GN = folE PE=3 SV=1
MDKTKIERAVRDILEAIGEDPDREGLRDTPKRIARMYGEIFAGLKADPKDHLEIYFEEEKHEELVLVKDIPFYSVCEHHLVPFYGKAHIGYIPKGGKLTGLSKLARVLETVSKRPQLQERLTATIADTIMEKLNPYGVIVVVEAEHMCMTMRGVKKPGSKTLTSAVRGIFQDDAKSRAEAMALINFGK

SEQ ID NO: 8569 - protein, 261 aa, Geothermobacter ehrlichii
  REGION 1..261: note = tr|A0A5D3WJI3|A0A5D3WJI3_9DELT GTP cyclohydrolase FolE2 OS=Geothermobacter ehrlichii OX=213224 GN=folE2 PE=3; SV = 1
MTMPDMQQSPDSRNIPIDKVGVKGIRYPIVVQDKTRQWQHTVARVNMYVDLPEHFKGTHMSRFIEILNRYHGAVSVDNLEEILAEMKRRLESSCAHLELDFPYFIEKAAPVSGARGLMEYQCRMVGSLGEQFDFVLEAAVPVTSLCPCSREISEAGAHNQRSTVRVRIRYRKHVWLEDLIALVESCASAPVYSLLKREDEKAVTEQAYANPMFVEDIVREVTRRLRQEEKITWFAVECENFESIHNHSAYALVEDVRPAPG

SEQ ID NO: 8570 - protein, 257 aa, Geothermobacter sp.
  REGION 1..257: note = tr|A0A1X0XZP0|A0A1X0XZP0_9DELT GTP cyclohydrolase FolE2 OS=Geothermobacter sp. EPR-M OX=1969733 GN=folE2; PE = 3 SV=1
MPDLQKSRDTRNISIDKVGVKDIRYPIVLLDKYREQQHTVARINMYVDLPEQFKGTHMSRFIEILNRYHGEISVDNLEEILGEMQQRLDAGRAHLELSFPYFIEKRAPVSGARGLMEYQCRMIGTLSDHFDFVIEAEVPVTSLCPCSREISEVGAHNQRSLVRVQIRYREHVWLEDLIATVEGCASAPVYSLLKREDEKAVTEQAYHNPMFVEDMVREVTRKLKENSEISWFRVECENFESIHNHSAYAQIEMTTGD

SEQ ID NO: 8571 - protein, 257 aa, Geothermobacter sp.
  REGION 1..257: note = tr|A0A2K2HB01|A0A2K2HB01_9DELT GTP cyclohydrolase FolE2 OS=Geothermobacter sp. HR-1 OX=654845 GN=folE2 PE=3; SV = 1
MPDLQKSRDTRNIPIDKVGVKDIRYPIVLLDKYREQQHTVARINMYVDLPEQFKGTHMSRFIEILNRYHGEISVDNLEEILGEMQQRLDAGRAHLELCFPYFIEKRAPVSGARGLMEYQCRMIGTLSDHFDFVIEAEVPVTSLCPCSREISEVGAHNQRSLVRVQIRYREHVWLEDLIATVESCASAPVYSLLKREDEKAVTEQAYHNPMFVEDMVREVTRKLKENGEISWFRVECENFESIHNHSAYAQVEMTVGD

SEQ ID NO: 8572 - protein, 259 aa, Geovibrio thiophilus
  REGION 1..259: note = tr|A0A3R5UTB7|A0A3R5UTB7_9BACT GTP cyclohydrolase FolE2 OS=Geovibrio thiophilus OX=139438 GN=folE2 PE=3 SV=1
MRDIQNEKDARNISIDKVGIKGIVYPVILDDKKKGRQHTNASINMYVQLPQDFKGTHMSRFVEILNDHRENMGISTVWIILEEMKKRLGSSESHIELFFKYFIEKEAPVSGLTSMMDYTCEYYATLTDTERDFVLCVRVPVMTLCPCSKEISEYGAHNQRSIITIKVRFKKMLWIEELVDIAESSASSPVYPLLKREDEKYVTEHSYMNPAFVEDVVRNAAEKLMAESRVTWFEVSSENYESIHNHSAYAVIVRDKRTL

SEQ ID NO: 8573 - protein, 220 aa, Gibbsiella quercinecans
  REGION 1..220: note = tr|A0A250AXW4|A0A250AXW4_9ENTR GTP cyclohydrolase 1; OS = Gibbsiella quercinecans OX=929813 GN=folE PE=3 SV=1
MTTLSNEAVQVHAALEARGLETPLRGEMLDGETRKRRIKEHMTEIMQLLNLDLSDDSLAETPHRIAKMYVDEIFSGLDYANFPKITVIENKMKVDEMVTVRDITLTSTCEHHFVTIDGKATVAYIPKDAVIGLSKINRIVQFFAQRPQVQERLTQQILVALQTLLGTNNVAVSIDAVHYCVKARGIRDANSATTTTSLGGLFKSSQNTRQEFLRAVRHHG

SEQ ID NO: 8574 - protein, 219 aa, unidentified
  source 1..219: note = Gilliamella apicola
  REGION 1..219: note = tr|A0A1B9JUK9|A0A1B9JUK9_9GAMM GTP cyclohydrolase 1; OS = Gilliamella apicola OX=1196095 GN=folE PE=3 SV=1
MTELSLAAQKVKAALAAKNLETPSCRLTMDNSERKIKIESHFREIMKLMELDLSDDSLSETPHRVAKMYVDEIFSGLYYENFPKITLIENKMQVDEMITVRNISLTSICEHHFVTIDGKATVSYIPKDSVIGLSKINRIVKFFSQRPQVQERLTQQILVALQTLLGTVNVAVSIDATHYCVKARGVKDSSSITTTTALGGGFKTNPSTRQEFLRALTHY

SEQ ID NO: 8575 - protein, 219 aa, unidentified
  source 1..219: note = Gilliamella apicola
  REGION 1..219: note = tr|X2H0Q2|X2H0Q2_9GAMM GTP cyclohydrolase 1; OS = Gilliamella apicola OX=1196095 GN=folE PE=3 SV=1
MTELSLAAQKVKEALAAKNLETPSSRLDMDSSERKAKIEAHFREIMKLMELDLSDDSLAETPHRVAKMYVDEIFSGLNYHNFPKITLIENKMQVDEMITVRDITLTSVCEHHFVTIDGKATVSYIPKDKVIGLSKINRIVEFFSQRPQVQERLTQQILVALQTLLGTVNVAVSIDATHYCVKARGIKDSNSLTTTTALGGGFKTNPSTRQEFLRALKHY

SEQ ID NO: 8576 - protein, 219 aa, unidentified
  source 1..219: note = Gilliamella apis
  REGION 1..219: note = tr|A0A242NRS7|A0A242NRS7_9GAMM GTP cyclohydrolase 1; OS = Gilliamella apis OX=1970738 GN=folE PE=3 SV=1
MTELSPAAQKVKEALAAKNLETPSCRLAMENSERKAKIEAHFREIMKLMELDLHDDSLSETPHRVAKMYVDEIFSGLNYHNFPKITLIENKMQVDEMITVRDITLTSVCEHHFVTIDGKATVSYIPKDKVIGLSKINRIVQFFSQRPQVQERLTQQILVALQTLLGTVNVAVSIDATHFCVKARGIKDSNSLTTTTALGGGFKTNPSTRQEFLRALKHY

SEQ ID NO: 8577 - protein, 219 aa, unidentified
  source 1..219: note = Gilliamella apis
  REGION 1..219: note = tr|A0A242P4L5|A0A242P4L5_9GAMM GTP cyclohydrolase 1; OS = Gilliamella apis OX=1970738 GN=folE PE=3 SV=1
MTELSPAAQKVKEALAAKNLETPSCRLAMENSERKAKIEAHFREIMKLMELDLHDDSLSETPHRVAKMYVDEIFSGLNYHNFPKITLIENKMQVDEMITVRDITLTSVCEHHFVTIDGKATVSYIPKDKVIGLSKINRIVEFFSQRPQVQERLTQQILVALQTLLGTVNVAVSIDATHYCVKARGIKDSNSLTTTTALGGGFKTNPSTRQEFLRALKHY

SEQ ID NO: 8578 - protein, 219 aa, unidentified
  source 1..219: note = Gilliamella bombicola
  REGION 1..219: note = tr|A0A1C4CEB6|A0A1C4CEB6_9GAMM GTP cyclohydrolase 1; OS = Gilliamella bombicola OX=1798182 GN=folE PE=3 SV=1
MTELSLAAQKVKAALAAKNLETPSCRLAMDNGERKEKIEAHFREIMKLMELDLTDDSLAETPHRVSKMYVDEIFSGLYYENFPKITLIENKMQVDEMITVRDITLTSVCEHHFVTIDGKATVSYIPKDKVIGLSKINRIVEFFSQRPQVQERLTQQILVALQTLLGTVNVAVSIDATHYCVKARGIKDSSSMTTTTALGGGFKTNPSTRQEFLRTLNHY

SEQ ID NO: 8579 - protein, 219 aa, unidentified
  source 1..219: note = Gilliamella intestini
  REGION 1..219: note = tr|A0A1C4C1N6|A0A1C4C1N6_9GAMM GTP cyclohydrolase 1; OS = Gilliamella intestini OX=1798183 GN=folE PE=3 SV=1
MTELSLAAQKVKEALAAKNLETPSCRLTMDNCERKNKIEAHFREIMKLMELDLTDDSLAETPHRVSKMYVDEIFSGLYYENFPKITLIENKMQVDEMITVRDITLTSVCEHHFVTIDGKATVSYIPKDKVIGLSKINRIVEFFSQRPQVQERLTQQILVALQTLLGTVNVAVSIDATHYCVKARGIKDSSSMTTTTALGGGFKTNPSTRQEFLRALNHY

SEQ ID NO: 8580 - protein, 219 aa, unidentified
  source 1..219: note = Gilliamella sp.
  REGION 1..219: note = tr|A0A242PB69|A0A242PB69_9GAMM GTP cyclohydrolase 1; OS = Gilliamella sp. N-G2 OX=1970471 GN=folE PE=3 SV=1
MTELSLAAQKVKEELAAKNLETPSCRLAMENSERKAKIEAHFREIMKLMELDLHDDSLAETPHRVAKMYVDEIFSGLNYHNFPKITLIENKMQVDEMITVRDITLTSVCEHHFVTIDGKATVSYIPKDKVIGLSKINRIVQFFSQRPQVQERLTQQILVALQTLLGTVNVAVSIDATHFCVKARGIKDSNSLTTTTALGGGFKTNPSTRQEFLRALKHY

SEQ ID NO: 8581 - protein, 219 aa, unidentified
  source 1..219: note = Gilliamella sp.
  REGION 1..219: note = tr|A0A242P2T1|A0A242P2T1_9GAMM GTP cyclohydrolase 1; OS = Gilliamella sp. A7 OX=1970465 GN=folE PE=3 SV=1
MTELSLAAQKVKEALAAKNLETPSCRLAMENSERKAKIEAHFREIMKLMELDLHDDSLAETPHRVAKMYVDEIFSGLNYHNFPKITLIENKMQVDEMITVRDITLTSVCEHHFVTIDGKATVSYIPKDKVIGLSKINRIVQFFSQRPQVQERLTQQILVALQTLLGTVNVAVSIDATHFCVKARGIKDSNSLTTTTALGGGFKTNPSTRQEFLRALKHY

SEQ ID NO: 8582 - protein, 197 aa, Gillisia hiemivivida
  REGION 1..197: note = tr|A0A5C6ZWS7|A0A5C6ZWS7_9FLAO GTP cyclohydrolase 1; OS = Gillisia hiemivivida OX=291190 GN=folE PE=3 SV=1
MYRFFEEYNEEVTEGLTDNFKQIIHGLGEDTSREGILKTPERAAKAMQFLTQGYDADPVKILNDAMFNESYDEMVVVKDIELYSLCEHHMLPFFGKAHIAYIPNGKIVGLSKIPRVVDVFARRLQVQERLTHDILECINNTLQPQGVAVVIEAQHMCMMMRGVQKQNSVTTTSGFRGQFKKIETRNEFLKLISSDLK

SEQ ID NO: 8583 - protein, 223 aa, Gillisia hiemivivida
  REGION 1..223: note = tr|A0A5C6ZNV4|A0A5C6ZNV4_9FLAO GTP cyclohydrolase 1; OS = Gillisia hiemivivida OX=291190 GN=folE PE=3 SV=1
MDHMENKIDEMGDAHVSTSANNPLREDAFDLSNEEKIVLINKDVKSILQTLGMDLTDDSIKGTPQRVAKMFVNEIFGGLDPKRKPKASTFENKYKYGEMLVEKNITIYSTCEHHLLPIVGRAHVAYISKGSVIGLSKMNRIVDYFAKRPQVQERMTMQIVQELQNALGTQDVACIIDAKHLCVNSRGIRDIESSTVTSEFGGAFKENSVKREFLDYIKLDTSF

SEQ ID NO: 8584 - protein, 197 aa, Gillisia limnaea
  REGION 1..197: note = tr|H2BWY6|H2BWY6_9FLAO GTP cyclohydrolase 1; OS = Gillisia limnaea DSM 15749 OX=865937 GN=folE PE=3 SV=1
MYNYFEEYDEKVTGELQENFKNIIEHLGENVSREGIVKTPERAAKAMQFLMQGYSADPKKILEKAMFKESYDEMVVVKNIELYSLCEHHMLPFFGKAHIAYIPNGQIVGLSKLPRIVDVFARRMQVQERLTHDILECINTVVKPKGVAVVIEAQHMCMMMRGVQKQNSVTTTSGFRGQFKEIETRNEFLKLITSDLK

SEQ ID NO: 8585 - protein, 226 aa, Gillisia limnaea
  REGION 1..226: note = tr|H2BY84|H2BY84_9FLAO GTP cyclohydrolase 1; OS = Gillisia limnaea DSM 15749 OX=865937 GN=folE PE=3 SV=1
MKIDKIDEPLDDIGDAFISANTNTPMRKDAFEKSDAEKIELIHEDVKNILTTLGLDLTDDSLKGTPNRVAKMFVKEIFGGLNPKLKPKASTFENKYKYGEMLVEKNITLYSTCEHHLLPIVGKAHVGYISNGTVIGLSKMNRIVDFYAKRPQVQERLTMQIVKELQEALGTEDVACVIDAKHLCVNSRGIRDVDSSTVTSEYGGKFKDAETRRDFLDYINLETNFN

SEQ ID NO: 8586 - protein, 225 aa, Gillisia mitskevichiae
  REGION 1..225: note = tr|A0A495P724|A0A495P724_9FLAO GTP cyclohydrolase 1; OS = Gillisia mitskevichiae OX=270921 GN=folE PE=3 SV=1
MKIDHMENKIDEMGDAHVSTSANNPLRDDAFDLSNEEKIARINEDVKSILQTLGMDLTDDSIKGTPQRVAKMFVNEIFGGLDPKRKPKASTFENKYKYGEMLVEKNITIYSTCEHHLLPIVGRAHVAYISKGSVIGLSKMNRIVDYFAKRPQVQERLTMQIVQELQNALGTQDVACVIDAKHLCVNSRGIRDIESSTVTSEFGGAFKETSVRREFLDYIKLETSF

SEQ ID NO: 8587 - protein, 197 aa, Gillisia mitskevichiae
  REGION 1..197: note = tr|A0A495PU37|A0A495PU37_9FLAO GTP cyclohydrolase 1; OS = Gillisia mitskevichiae OX=270921 GN=folE PE=3 SV=1
MYQFFEEYNEEVTEDLTNNFKQIIHGLGEDTSREGILKTPERAAKAMQFLTQGYDADPVKILNDAMFSESYDEMVVVKDIEVYSLCEHHMLPFFGKAHIAYIPNGKIVGLSKLPRVVDVFARRLQVQERLTHDILECINNTLQPQGVAVVIEAQHMCMMMRGVQKQNSVTTTSGFRGQFKQIETRNEFLKLISSDLK

SEQ ID NO: 8588 - protein, 197 aa, Gillisia sp.
  REGION 1..197: note = tr|A0A559PSM3|A0A559PSM3_9FLAO GTP cyclohydrolase 1; OS = Gillisia sp. Hel_I_86 OX=1249981 GN=folE PE=3 SV=1
MYRFFEEYSEEVTEDLTNNFKQIINGLGEDTSREGILKTPERAAKAMQFLTQGYDADPVKILNDAMFNESYDEMVVVKDIEVYSLCEHHMLPFFGKAHIAYIPNGKIVGLSKLPRLVDVFARRLQVQERLTHDILECINNTLQPQGVAVVIEAQHMCMMMRGVQKQNSVTTTSGFRGQFKQIETRNEFLKLISSDLK

SEQ ID NO: 8589 - protein, 197 aa, Gillisia sp.
  REGION 1..197: note = tr|A0A1H1SSC3|A0A1H1SSC3_9FLAO GTP cyclohydrolase 1; OS = Gillisia sp. Hel1_33_143 OX=1336796 GN=folE PE=3 SV=1
MYKYFEEYDLEVSEALKDNFKNIIEKIGEDPKREGIVKTPERAAKAMQFLMQGYDANPKEILRSAMFKETYNEMVLVKDIELYSLCEHHMLPFFGKAHIAYIPNGHIVGLSKLPRIVDIFSRRMQVQERLTHDILECINSTLKPQGVAVVIEAQHMCMMMRGVQKQNSVTTTSGFRGQFEKIETRNEFMNLISSHLR

SEQ ID NO: 8590 - protein, 198 aa, Gilvibacter sp.
  REGION 1..198: note = tr|A0A1Y0MS29|A0A1Y0MS29_9FLAO GTP cyclohydrolase 1; OS = Gilvibacter sp. SZ-19 OX=754429 GN=folE PE=3 SV=1
MAYRHFEEYSQTTTEDMKEKYRDIITKLGEDVSREGIVKTPERAAKAMQFLTQGYDQNAEQILRSAMFKEDYDEMVIVKDIEVYSLCEHHILPFFGKAHIAYIPNGYIVGLSKLPRVVDVFARRLQVQERLTHDILECINKTLKPRGVAVVIEASHMCMMMRGVQKQNSVTTTSGFRGQFEKNETRSEFLRLISNELS

SEQ ID NO: 8591 - protein, 225 aa, Gilvibacter sp.
  REGION 1..225: note = tr|A0A1Y0MQM4|A0A1Y0MQM4_9FLAO GTP cyclohydrolase 1; OS = Gilvibacter sp. SZ-19 OX=754429 GN=folE PE=3 SV=1
MDLEKQLKEIEAMGDEHVGSSTDTPLRPDAFELSDIEKIDRIKGQVKEIMETLGLDLEDDSLKGTPTRVAKMFVNEIFGGLHPDRKPSASTFENKYKYGEILVEKNITLYSTCEHHLLPIVGKAHVAYISKGTVVGLSKMNRIVDYYAKRPQVQERLTMQIVKELQAVLGTQDVACVIDAKHLCVNSRGIRDIDSSTVTSEFGGKFKDPAVRREFLDYINLDTEF

SEQ ID NO: 8592 - protein, 336 aa, unidentified
  source 1..336: note = Gimesia maris
  REGION 1..336: note = tr|A0A3D3RG41|A0A3D3RG41_9PLAN GTP cyclohydrolase FolE2 OS=Gimesia maris OX=122 GN=folE2 PE=3 SV=1
MFEFVSDALNLKQMGSIDPGAQSVLSTDSRVASSKSLMPDVANESLPLTGGTLERVGMSGVELVLRLRDASGEIFRTPARADAAVSLDDENVKGIHMSRLFLSLNNRLADTELSLPVVNEILQDFIHTHQDMSSSSYLTLTYEHSLKRPALLSDHAGWRAYPVKIQSACQQGVFRHQLQVRLTYSSACPCSAALSRQLIQQAFENRFSDRSELTHDEIMQWLGTPEAILAVPHSQRSHADVCVELESDIEEFPIESLIDYLERVIATPVQTAVKREDEQEFARLNGANLMFCEDAARKLKGALEGHEGVKDFRVEINHLESLHPHDASAVAIKNRS

SEQ ID NO: 8593 - protein, 336 aa, unidentified
  source 1..336: note = Gimesia maris
  REGION 1..336: note = tr|A6BZI1|A6BZI1_9PLAN GTP cyclohydrolase FolE2; OS = Gimesia maris DSM 8797 OX=344747 GN=folE2 PE=3 SV=1
MFEFVSDALNLKQMGSIDPGAQSVLSTDSRVASSKSLMPDVANESLPLTGGTLERVGMSGVELVLRLRDASGEIFRTPARADAAVSLDDENVKGIHMSRLFLSLNNRLADTELSLPVVNEILKDFIHTHQDMSSSSYLTLTYEHSLKRPALLSDHAGWRAYPVKIQSACQQGVFRHQVQVRLTYSSACPCSAALSRQLIQQAFENRFSDRSELTHDEIMQWLGTPEAILAVPHSQRSHADVCVELESEIEEFPIESLIDYLERVIATPVQTAVKREDEQEFARLNGANLMFCEDAARKLKGALEGYEGVKDFRVEINHLESLHPHDASAVAIKNRS

SEQ ID NO: 8594 - protein, 336 aa, unidentified; identical to SEQ ID NO: 8592
  source 1..336: note = Gimesia sp.
  REGION 1..336: note = tr|A0A2D5GQT7|A0A2D5GQT7_9PLAN GTP cyclohydrolase FolE2 OS=Gimesia sp. OX=2024833 GN=folE2 PE=3 SV=1

SEQ ID NO: 8595 - protein, 336 aa, unidentified
  source 1..336: note = Gimesia sp.
  REGION 1..336: note = tr|A0A2E2C5V2|A0A2E2C5V2_9PLAN GTP cyclohydrolase FolE2 OS=Gimesia sp. OX=2024833 GN=folE2 PE=3 SV=1
MFEFVSDALNLKQMGAADQGTQSVMSTDSRAVSTASLLPDVANELLPTAGGTLERVGMSGVELVLRLRDASGEIFRTPARADAAVSLDDENVKGIHMSRLFLSLNNRLADTELTLPVVNDILKDFIRTHQDMSSSSYLTLTYEHSLKRPALLSDHAGWRAYPVKIQSACQQGVFRHQLQIRLTYSSTCPCSAALSRQLIQQAFENRFGDRSELTHDEIVQWLGTPEAILAVPHSQRSHADVCVELESDVDDFPIAALIDYLERVIATPVQTAVKRQDEQEFARLNGANLMFCEDAARKLKGALEHYAGIKDFRVEINHLESLHPHDASAVAIKNRS

SEQ ID NO: 8596 - protein, 229 aa, Glaciecola nitratireducens
  REGION 1..229: note = tr|G4QIL2|G4QIL2_GLANF GTP cyclohydrolase 1; OS = Glaciecola nitratireducens (strain JCM 12485 / KCTC 12276 / FR1064) OX=1085623 GN=folE PE=3 SV=1
MLAHEAIKIRGAAEPSISAEATIVRRALEAKGLETPMVENALSNEEKRIKIQAAMREVMETLGLDLTDDSLQDTPNRIAKMYVNEIFAGLDYRAFPKITQIENKMSIDQPVQVTDISLTSTCEHHFVTIDGTATVSYIPKDTVLGLSKINRLVGFFAQRPQVQERLTQQVMVAIQALTGTDDVAVSINATHYCVKARGVKDSQSFTRTSSLGGAFSTNPDLRREFYQLK

SEQ ID NO: 8597 - protein, 233 aa, Glaciecola pallidula
  REGION 1..233: note = tr|K6YCT4|K6YCT4_9ALTE GTP cyclohydrolase 1; OS = Glaciecola pallidula DSM 14239 = ACAM 615 OX=1121922; GN = folE PE=3 SV=1
MLANEAIKIRGAAVPSISAEATIVRRALEAKGLETPMAENGLSNEEKRIRIQGAMRVVMETLGLDLNDDSLQDTPNRIAKMYVNEIFSGLDYHAFPKITQIENKMSIDQPVQVTDISLTSTCEHHFVTIDGTATVSYIPKDTVLGLSKINRLVGFFAQRPQVQERLTQQVMVAIQALTGTDDVAVSINATHYCVKARGIRDSQSYTKTSSLGGAFSSNPDLRREFYNSTQSKG

SEQ ID NO: 8598 - protein, 229 aa, Glaciecola punicea
  REGION 1..229: note = tr|H5T864|H5T864_9ALTE GTP cyclohydrolase 1; OS = Glaciecola punicea ACAM 611 OX=1121923 GN=folE PE=3 SV=1
MLANDKIVMHGANHNIALSEQAELVRDALLVAGLETPMVDNGLTAEEKRLKIKQSMTAIMQALGLDLNDDSLQDTPNRIAKMYVNEIFSGLDYKNFPKITQIENKMSIDQPVQVTDISLTSTCEHHFVTIDGTATVSYIPNKTVIGLSKINRLVSFFAQRPQVQERLTQQVMVALQALTGTKDVAVSINATHYCVKARGVRDTNSYTKTSSLGGSFNTDRDLRREFFQI

SEQ ID NO: 8599 - protein, 228 aa, Glaciecola sp.
  REGION 1..228: note = tr|A0A3D1S1Z7|A0A3D1S1Z7_9ALTE GTP cyclohydrolase 1; OS = Glaciecola sp. OX=1905676 GN=folE PE=3 SV=1
MLAKEAVIVRTALEPAITKEAALVRTALIEQGLETPMKDNGLTDDEKRSKIQRAMNDVMDALGLDLEDDSLCDTPRRIAKMYVDEIFSGLDYRKFPKITQIENKMKIEQPVQVSDVSLTSTCEHHFVTIDGTASVSYIPKQTVIGLSKINRLVAFFAQRPQVQERLTQQIMVALQALTGTEDVAVSINATHYCVKARGIRDSKSYTKTSSLGGVFSRDADMRKEFFAG

SEQ ID NO: 8600 - protein, 220 aa, Glaciecola sp.
  REGION 1..220: note = tr|A0A2Z6UIA5|A0A2Z6UIA5_GLASK GTP cyclohydrolase 1; OS = Glaciecola sp. (strain KUL10) OX=2161813 GN=folE PE=3; SV = 1
MREAAEPAISAEALLVRRALEAKGLETPMIDNGLSNEEKRKRIKAAMTEVMQTLGLDLSDDSLQDTPNRIAKMYVNEIFSGLDYRSFPKITQIENKMQIDQPVQVSDISLTSTCEHHFVTIDGTASVSYIPKGTVIGLSKLNRLVAFFAQRPQVQERLTQQVMVAIQALTGTDDVAVSINATHYCVKARGVMDSSSYTKTSSLGGQFNTNADLRREFFSL

SEQ ID NO: 8601 - protein, 198 aa, Glaciibacter sp.
  REGION 1..198: note = tr|A0A4S4FKC0|A0A4S4FKC0_9MICO GTP cyclohydrolase 1; OS = Glaciibacter sp. YIM 131861 OX=2565934 GN=folE PE=3 SV=1
MTGVDRARIEAAVTELLLAIGEDPGRPGLVKTPRRVAESYDEFFGGLHRDPVEHLKDAVPLGSSDDGLPQTGDAVMVRGIEFRSICEHHLLPFVGVVHVAYQPGERVVGLGKLSDVVETLSARPQLQERLTEEIADALQEGLEARGVLVVMDAVHRCVVARGSRQTGSSTVTVASRGRLTDPVQRAELMTLIGSSTRG

SEQ ID NO: 8602 - protein, 197 aa, unidentified
  source 1..197: note = Glaciihabitans sp.
  REGION 1..197: note = tr|A0A4Q9GTC6|A0A4Q9GTC6_9MICO GTP cyclohydrolase 1; OS = Glaciihabitans sp. RP-3-7 OX=2528207 GN=folE PE=3 SV=1
MPIDTARIEAAVAEILSAIGEDVARPGLATTPQRVAQAYGDFFAGLGVDPLIHLEETLELESDQRGELVLLRDIEFRSICEHHLLPFIGMAHVAYVPAKKVVGLGRLPKVVETLASRPQLQERLTEEIADALETGLAPQGVLVVLDAVHGCVSARGARQARSSTVTMASRGTLADPVARSGVLALIGGMPQDGGAGV

SEQ ID NO: 8603 - protein, 191 aa, unidentified
  source 1..191: note = Glaciihabitans sp.
  REGION 1..191: note = tr|A0A5C8UQJ7|A0A5C8UQJ7_9MICO GTP cyclohydrolase 1; OS = Glaciihabitans sp. CHu50b-6-2 OX=2603793 GN=folE PE=3; SV = 1
MDTARIEAAVLEILAAIGEDPGRPGLRSTPQRVAQSYLEFFGGLRVDPQVHLADSDEFSAVSGDQGELVLLRDIEFRSICEHHLLPFSGVAHVAYLPRTRIIGLGRIPRVVETLAARPQLQERLTEEIADALQAGLDPRGVLVVLTANHGCVSDRGVRQAKSSTVTMATRGMLKEPLERAEIMAMIGAQRE

SEQ ID NO: 8604 - protein, 193 aa, unidentified
  source 1..193: note = Glaciihabitans tibetensis
  REGION 1..193: note = tr|A0A2T0VB51|A0A2T0VB51_9MICO GTP cyclohydrolase 1; OS = Glaciihabitans tibetensis OX=1266600 GN=folE PE=3 SV=1
MAPIDTGRIEAAVAEILAAIGDDASRPGLATTPQRVAQAYTEFFSGVGVDPTVHLAETADLRADADELSELVVLRGIEFRSMCEHHLLPFTGVVHIAYAPRTRIVGLGKLPRVVETVASRPQVQERLTEEIADALVAGLDPLGVLVVVDATHSCVSTRGTRQANSTTLTLASRGTLADPVLRAETIALIGSRP

SEQ ID NO: 8605 - protein, 218 aa, unidentified
  source 1..218: note = Glaesserella parasuis
  REGION 1..218: note = tr|U4SLP6|U4SLP6_HAEPR GTP cyclohydrolase 1; OS = Glaesserella parasuis D74 OX=1275971 GN=folE PE=3 SV=1
MSNISPEAQSVRDALLAKGIETPTVCHQKDKDSRRNEIQQHMRAVLELLGLDLRDDSLEETPHRLAKMYMDEIFSGLDYETFPKITKIKNQMKVSEMVLVDDITLTSTCEHHFVTIDGKVAVAYYPKDWVIGLSKINRVVQFFAQRPQVQERFTEQILTAFQTILETEDVAVYVKATHFCVKCRGVKDTHSQTMTSAFGGVFLQDRDTRKEFLSLINK

SEQ ID NO: 8606 - protein, 218 aa, unidentified
  source 1..218: note = Glaesserella parasuis
  REGION 1..218: note = tr|U4S0W9|U4S0W9_HAEPR GTP cyclohydrolase 1; OS = Glaesserella parasuis str. Nagasaki OX=1117322 GN=folE; PE = 3 SV=1
MSNISPEAQSVRDALLAKGIETPTVCHQKDKDSRRNEIQQHMRAVLELLGLDLRDDSLEETPHRLAKMYVDEIFSGLDYETFPKITKIKNQMKVSEMVLVDDITLTSTCEHHFVTIDGKVAVAYYPKDWVIGLSKINRVVQFFAQRPQVQERFTEQILTAFQTILETEDVAVYVKATHFCVKCRGVKDTHSQTMTSAFGGVFLQDRDTRKEFLSLINK

SEQ ID NO: 8607 - protein, 218 aa, unidentified
  source 1..218: note = Glaesserella sp.
  REGION 1..218: note = tr|A0A328BWW5|A0A328BWW5_9PAST GTP cyclohydrolase 1; OS = Glaesserella sp. HHC-2018 OX=2094024 GN=folE PE=3 SV=1
MSNISPEAQSVREALLAKGIETPTVDHQKDKDTRRSEIQQHMRSVLELLGLDLRDDSLEETPHRLAKMYVDEIFSGLDYETFPKITKIKNQMKVSEMVLVDDITLTSTCEHHFVTIDGKVAVAYYPKDWVIGLSKINRVVQFFAQRPQVQERFTEQILTAFQTILETEDVAVYVKATHFCVKCRGVKDTHSQTMTSAFGGVFLQDRDTRKEFLSLISK

SEQ ID NO: 8608 - protein, 210 aa, unidentified
  source 1..210: note = Gloeobacter kilaueensis
  REGION 1..210: note = tr|U5QFL7|U5QFL7_9CYAN GTP cyclohydrolase 1; OS = Gloeobacter kilaueensis JS1 OX=1183438 GN=folE PE=3 SV=1
MTIAHKDLLPSDWHGSDLESQNGQDPMREAVRTLLVGVGEDPERDGLERTPKRVAEALKFLTQGYSQSLEELLNGAIFDVGHDELVLVRDIDLFSMCEHHMLPFIGRAHVGYIPNQKVVGLSKIARIVEMYARRLQVQERLTRQVAEAIQAVLQPRGVAVVIEASHMCMVMRGVQKPNSWTVTSSMVGVFKESQSTRQEFLDLIHHKASF

SEQ ID NO: 8609 - protein, 214 aa, unidentified
  source 1..214: note = Gloeobacter violaceus
  REGION 1..214: note = sp|Q7NK98|GCH1_GLOVI GTP cyclohydrolase 1; OS = Gloeobacter violaceus (strain ATCC 29082 / PCC 7421); OX = 251221 GN=folE PE=3 SV=1
MTIAHKDFLPSDWHEDDSASEAASRNGLDPMMDAVRTLLVGVGEDPERNGLERTPKRVAEALKFLTKGYGQSLEELLNGAIFDLGHDELVLVRDIDLFSMCEHHMLPFIGRAHVGYIPDQKVVGLSKLARIVEMYARRLQVQERLTRQIAEALQEVLQPRGVAVVIEASHMCMVMRGVQKPNSWTVTSSMVGVFKESQSTRQEFLDLIHHKATF

SEQ ID NO: 8610 - protein, 239 aa, Gloeocapsa sp.
  REGION 1..239: note = tr|K9X8G7|K9X8G7_9CHRO GTP cyclohydrolase 1; OS = Gloeocapsa sp. PCC 7428 OX=1173026 GN=folE PE=3 SV=1
MTIGFPNGSPRSNSPLMPDSLEDTINRIATRPDRNTQNGKEAQLQPPSEELNEAMVEAVRTMLLGVGEDPEREGLLKTPKRVVEAMRFLTSGYNQSLEDLVNNAIFDEGHNEMVLVRDINFFSLCEHHMLPFMGRAHVAYIPNEKVVGLSKLARIVEMYSRRLQVQERLTRQIAEAVQTILEPQGVAVVMEATHMCMVMRGVQKPGSWTVTSAMVGVFHDEQKTREEFLNLIRHQPAFF

SEQ ID NO: 8611 - protein, 229 aa, Gloeocapsa sp.
  REGION 1..229: note = tr|L8LP61|L8LP61_9CHRO GTP cyclohydrolase 1; OS = Gloeocapsa sp. PCC 73106 OX=102232 GN=folE PE=3 SV=1
MTTASSNGSNYSGKTLNSRPDRTSHQGGTPALRPQLSPAEAQAQLADAVEKILEGLGEDTQREGLLKTPKRVAESMQFLTQGYNQSLETIVNGAIFDEGHNEMVLVRDIDFFSLCEHHMLPFMGRAHVAYIPNQKVVGLSKLARVVEMYSRRLQVQERLTRQVAEAIQTVLEPQGVAVVMEATHMCMVMRGVQKPGSWTVTSAMIGAFQEDQRTREEFLNLIRHQPNFM

SEQ ID NO: 8612 - protein, 274 aa, unidentified
  source 1..274: note = Gloeomargarita lithophora
  REGION 1..274: note = tr|A0A1J0AFM3|A0A1J0AFM3_9CYAN GTP cyclohydrolase 1; OS = Gloeomargarita lithophora Alchichica-D10 OX=1188229; GN = folE PE=3 SV=1
MTLIPRFVNPAANGHLSKLGNGVVPADGEMPLLLGESPSPDRYGDDEPVTRSRKTDPELGQRVAAFLLAKGVATPQVATGLDENQKRTLIARNFAEIMVALGLDLGDDSLADTPRRVAQMYVDEIFYGLDWRHFPKCTTVENKMGYSSMVMERNINVQSNCEHHFVIIDGRAHVAYIPKQKVLGLSKINRIVEYFAKRPQIQERLTEQIFYALSYILETEDIAVVIQAKHYCVKSRGVADVNSDTVTSKLGGLFLHSTATRSEFMRVVNSVIAP

SEQ ID NO: 8613 - protein, 247 aa, unidentified
  source 1..247: note = Gloeothece citriformis
  REGION 1..247: note = tr|B7KE49|B7KE49_GLOC7 GTP cyclohydrolase 1; OS = Gloeothece citriformis (strain PCC 7424) OX=65393; GN = folE PE=3 SV=1
MTVAPSNGYNRSNSVNSSSLTPANSNGLNPDLVERVVSRPDRNTHNGQPAHIHTTTEENKEKMMQAVEMILESVGEDPGREGLLKTPKRVAEAMQFLTQGYNQSLEELVNDAIFDEGHNEMVLVRDIDFFSLCEHHMLPFMGKAHVAYIPNQKVVGLSKLARIVEMYARRLQVQERLTRQIAEAIQEILNPQGVAVVMEATHMCMVMRGVQKPGSWTVTSAMLGAFQDDQKTREEFLNLIRHRPNFM

SEQ ID NO: 8614 - protein, 218 aa, unidentified
  source 1..218: note = Gloeothece citriformis
  REGION 1..218: note = tr|B7KJE3|B7KJE3_GLOC7 GTP cyclohydrolase 1; OS = Gloeothece citriformis (strain PCC 7424) OX=65393; GN = folE PE=3 SV=1
MTLSKSERSIINSSQHSLPPLTTEHHSPVSEADMIQAVRTLLLGLGEDPDREGLRDTPKRVVKALKFLTSGYHQSLDELLNGAVFGEDTNEMVLVRDIDLFSSCEHHILPILGRAHVAYIPNGKVIGLSKIARICEMYARRLQVQERLTAQIADALQGLLKPQGVAVVIEATHMCMVMRGVQKPGSWTSTSAVRGVFAEDAKTRQEFMSLIRHNPAFH

SEQ ID NO: 8615 - protein, 247 aa, unidentified
  source 1..247: note = Gloeothece verrucosa
  REGION 1..247: note = tr|E0UBA4|E0UBA4_GLOV7 GTP cyclohydrolase 1; OS = Gloeothece verrucosa (strain PCC 7822) OX=497965; GN = folE PE=3 SV=1
MTVAPSNGYNRANSSNSSNVTAANSNILNPNLVDRVSTRPDRNTHNGQPAQIHLASVDSKAQMSDAVRMILEAVGEDPDREGLLKTPKRVAEAMQFLTQGYNQSLEEIVNGAIFDEGHNEMVLVRDIDFFSLCEHHMLPFMGRAHVAYIPNQKVVGLSKLARIVEMYSRRLQVQERLTRQIAEAIKEILEPQGVAVVMEATHMCMVMRGVQKPGSWTVTSAMLGVFQEEQKTREEFLNLIHHRPNFM

SEQ ID NO: 8616 - protein, 205 aa, Gluconacetobacter diazotrophicus
  REGION 1..205: note = tr|A9HAP7|A9HAP7_GLUDA GTP cyclohydrolase 1; OS = Gluconacetobacter diazotrophicus (strain ATCC 49037 / DSM 5601 / PAl5) OX=272568 GN=folE PE=3 SV=1
MTPTDTVPLPRPSREEAEDAIRTLLRWAGEDPAREGLLDTPGRVVRSYEEFFQGYAEDPSEILSRTFSEVDDYDEIVLLRDIRFESHCEHHMVPIIGVAHVAYLPGKRVVGISKLARVVEAFSRRLQIQERLTAQIANTINDVLQPHGVAVILEAGHQCMTTRGVHRPGVSMVTSRMLGVFRTNSDTRRELMAMLNRPSAATTHI

SEQ ID NO: 8617 - protein, 204 aa, Gluconacetobacter entanii
  REGION 1..204: note = tr|A0A318PS55|A0A318PS55_9PROT GTP cyclohydrolase 1; OS = Gluconacetobacter entanii OX=108528 GN=folE PE=3 SV=1
MTPTDSAPPPRPTREEAEDAVRTLLRWAGEDPRREGLHDTPARVVRSYEEFFCGYAEDPVDLLTRTFSEVEDYDEMVLLRDIRFESHCEHHMVPIIGVAHVAYLPRKRVVGISKLARVVDAYARRFQIQERMTAQIANTINEVLQPRGVGVVIEASHQCMTTRGVHRPGVSMVTSRMLGTFRSNSDTRREFLSILNRPGVTGGV

SEQ ID NO: 8618 - protein, 202 aa, Gluconacetobacter liquefaciens
  REGION 1..202: note = tr|A0A370G7E4|A0A370G7E4_GLULI GTP cyclohydrolase 1; OS = Gluconacetobacter liquefaciens OX=89584 GN=folE PE=3; SV = 1
MSQAPLLRPSREEAEDAIRTLLRWAGEDPSREGLLDTPGRVVRSYEEFFEGYGEDPSAILSRTFSEVDDYDEIVLLRDIRFESHCEHHMVPIIGVAHVAYLPSKRVVGISKLARVVDAFARRLQIQERLTAQIANTINDVLQPHGVAVILEAGHQCMTTRGVHRPGVSMVTSRMLGVFRSNSDTRRELMSMLNRPSVATAHL

SEQ ID NO: 8619 - protein, 201 aa, Gluconacetobacter sp.
  REGION 1..201: note = tr|F3S6T4|F3S6T4_9PROT GTP cyclohydrolase 1; OS = Gluconacetobacter sp. SXCC-1 OX=1004836 GN=folE PE=3; SV = 1
MTPIDTRPTRAEAEDAVRTLLRWAGEDPGREGLLDTPARVVKSYDEFFCGYAEDPAEMLRRTFSEVADYDEMVLLRDIRLESHCEHHMVPIIGVAHVAYLPRRRVVGISKLARVVDAYARRFQIQERLTAQIANTINEELQPYGVGVVIEAAHQCMTTRGVHRPGVSMVTSRMLGTFRTNSDTRREFLSILNRPAMNSTGL

SEQ ID NO: 8620 - protein, 203 aa, Gluconobacter albidus
  REGION 1..203: note = tr|A0A1U9L2W3|A0A1U9L2W3_9PROT GTP cyclohydrolase 1; OS = Gluconobacter albidus OX=318683 GN=folE PE=3 SV=1
MDTLMDVPRQVRTRPTRAQAEEAVRTLLAWTGDDPDREGLAGTPDRVVRAYEEFFEGYHDDPVALLERTFEESGNYNEMVVLRDIRLESHCEHHIIPLIGKAHVAYLPDKRVVGISKLARLVDVFAHRLQIQEKLTAQIADTIQGVLQPRGVAVVIDAAHQCMTTRGVHKPGVSMVTSRLLGEFETSESLRRQFFTMAGMGGV

SEQ ID NO: 8621 - protein, 194 aa, Gluconobacter albidus
  REGION 1..194: note = tr|A0A149THD0|A0A149THD0_9PROT GTP cyclohydrolase 1; OS = Gluconobacter albidus OX=318683 GN=folE PE=3 SV=1
MGALPLPADAEVRIAGAVRQILEALGENPDREGLLDTPQRVAKMYLEVFSGLHQDPRDHLKTQFSADRHHGAVIVKDIRFHSMCEHHLLPVYGKAHVAYLPAGGRLTGLSKIARLVEGFARRPQLQERLTDQIAQGMEDVLAPEAVLVVIEAEHMCMSMRGVRSPGSTTVTSIARGSWLRDSAARMEIMSLLRS

SEQ ID NO: 8622 - protein, 212 aa, Gluconobacter cerinus
  REGION 1..212: note = tr|A0A1B6VLM0|A0A1B6VLM0_9PROT GTP cyclohydrolase 1; OS = Gluconobacter cerinus OX=38307 GN=folE PE=3 SV=1
MTDRNATAAKASNEDLRPLEGLSRPVDAQERIAGAVRTILEAIGENPEREGLHDTPQRVAKMYLEVFEGLYEDPRDHLKTQFSADQHHGAVIVKDIHFHSMCEHHLLPVHGKAHVAYLPAGGRLTGLSKLARVVEGFARRPQLQERLTDQVAQAMEDVLAPEAVLVVIEAEHMCMSMRGVRSPGSTTVTMIARGTWKHDHAARMEILSLLRS

SEQ ID NO: 8623 - protein, 199 aa, Gluconobacter cerinus
  REGION 1..199: note = tr|A0A1B6VGT6|A0A1B6VGT6_9PROT GTP cyclohydrolase 1; OS = Gluconobacter cerinus OX=38307 GN=folE PE=3 SV=1
MDIPRQVRTRPTRAQAEEAVRTLLAWTGDDPDREGLVGTPDRVVRAYEEFFEGYQDDPVALLERTFEESGNYNEMVVLRDIRLESHCEHHIIPLIGKAHVAYLPDRRVVGISKLARLVDVFAHRLQIQEKLTAQIADTIQSVLQPRGVAVVIDAAHQCMTTRGVHKPGVSMVTSRLLGEFETSEPLRRQFFAMAGMGGM

SEQ ID NO: 8624 - protein, 212 aa, Gluconobacter frateurii
  REGION 1..212: note = tr|A0A0D6PM87|A0A0D6PM87_9PROT GTP cyclohydrolase 1; OS = Gluconobacter frateurii M-2 OX=1231354 GN=folE PE=3 SV=1
MTDLNATAMTARKDDQRPLGALSRPVDAEERLASAIRTILEAVGENPEREGLQDTPQRVAKMYLEVFGGLYEDPREHLKTQFSADQHHGAVIVKDIRFHSMCEHHLLPVHGKAHVAYLPAGGRLTGLSKLARVVEGFARRPQLQERMTDQVAQAMEDVLVPEAVLVVIEAEHMCMSMRGVRSPGSTTVTTVARGTWKHDHAARMEILSLLRG

SEQ ID NO: 8625 - protein, 212 aa, Gluconobacter frateurii
  REGION 1..212: note = tr|A0A0K8N5M1|A0A0K8N5M1_9PROT GTP cyclohydrolase 1; OS = Gluconobacter frateurii NBRC 101659 OX=1104996 GN=folE; PE = 3 SV=1
MTDLNATAMTACKDDQRPLGALSRPADAEERLANAVRTILEAVGENPEREGLQDTPQRVAKMYLEVFGGLYEDPREHLKTQFSADQHHAAVIVKDIRFHSMCEHHLLPVHGKAHVAYLPAGGRLTGLSKLARVVEGFARRPQLQERMTDQVAQAMEDVLAPEAVLVVIEAEHMCMSMRGVRSPGSTTVTTVARGTWKHDHAARMEILSLLRG

SEQ ID NO: 8626 - protein, 204 aa, Gluconobacter japonicus
  REGION 1..204: note = tr|A0A149S4J6|A0A149S4J6_GLUJA GTP cyclohydrolase 1; OS = Gluconobacter japonicus OX=376620 GN=folE PE=3 SV=1
MTACKDDQRPLGALSRPADAEERLANAVRTILEAVGENPEREGLQDTPQRVAKMYLEVFGGLYEDPREHLKTQFSADQHHAAVIVKDIRFHSMCEHHLLPVHGKAHVAYLPAGGRLTGLSKLARVVEGFARRPQLQERMTDQVAQAMEDILAPEAVLVVIEAEHMCMSMRGVRSPGSTTVTTVARGTWKHDHAARMEILSLLRG

SEQ ID NO: 8627 - protein, 173 aa, Gluconobacter japonicus
  REGION 1..173: note = tr|A0A149T5V3|A0A149T5V3_GLUJA GTP cyclohydrolase 1 (Fragment) OS=Gluconobacter japonicus OX=376620; GN = AD936_11780 PE=3 SV=1
MIACKDDQRPLGALSRPADAEERLANAVRTILEAVGENPEREGLQDTPQRVAKMYLEVFGGLYEDPREHLKTQFSADQHHAAVIVKDIRFHSMCEHHLLPVHGKAHVAYLPAGGRLTGLSKLARVVEGLARRPQLQERMTDQVAQAMEDVLAPEAVLVVIEAEHMCMSMRGVR

SEQ ID NO: 8628 - protein, 223 aa, Gluconobacter kanchanaburiensis
  REGION 1..223: note = tr|A0A511B8X0|A0A511B8X0_9PROT GTP cyclohydrolase 1; OS = Gluconobacter kanchanaburiensis NBRC 103587 OX=1307948; GN = folE PE=3 SV=1
MNNLNATILTATARQSDSQDSLSSEELRPMEALPLPEDAEVRIAGAVREILEALGENPEREGLLDTPQRVAKMYLEVFSGLHQDPRDHLKTQFSADRHHGAVIVKDIRFHSMCEHHLLPVYGKAHVAYLPAGGRLTGLSKIARLVEGFARRPQLQERLTDQIAQGMEDILAPEAVLVVIEAEHMCMSMRGVRSPGSTTVTSIARGTWLRDSTARMEIMALLRG

SEQ ID NO: 8629 - protein, 215 aa, unidentified
  source 1..215: note = Gluconobacter morbifer
  REGION 1..215: note = tr|G6XFJ4|G6XFJ4_9PROT GTP cyclohydrolase 1; OS = Gluconobacter morbifer G707 OX=1088869 GN=folE PE=3 SV=1
MTKLNAATVTTMPQGTEDLRPLGALPLPADAEERIAKAVREILAAVGENPDREGLLDTPQRVARMYLEVFGGLHQDPRDHLRTQFSADRHHGAIIVKDIQFHSMCEHHLLPVRGKAHVAYLPAGGRLTGLSKIARLVEGFARRPQLQERLTDQIAQGMEDILAPEAVLVVVEAEHMCMSMRGVRSPGSTTVTTIARGAWLRDHAARMEIMSLLRG

SEQ ID NO: 8630 - protein, 212 aa, Gluconobacter oxydans
  REGION 1..212: note = tr|K7SG12|K7SG12_GLUOY GTP cyclohydrolase 1; OS = Gluconobacter oxydans H24 OX=1224746 GN=folE PE=3 SV=1
MTDLNATAMTACKDDQRPLGALSRPVDSEERLASAIRTILEAVGENPDREGLQDTPQRVAKMYLEVFGGLYEDPREHLKTQFSADQHHGAVIVKDIRFHSMCEHHLLPVHGKAHVAYLPAGGRLTGLSKLARVVEGFARRPQLQERMTDQVAQAMEDVLAPEAVLVVIEAEHMCMSMRGVRSPGSTTVTTVARGTWKHDHAARMEILSLLRG

SEQ ID NO: 8631 - protein, 224 aa, Gluconobacter oxydans
  REGION 1..224: note = tr|A0A067Z4Z2|A0A067Z4Z2_GLUOY GTP cyclohydrolase 1; OS = Gluconobacter oxydans DSM 3504 OX=1288313 GN=folE PE=3; SV = 1
MTNLNATIMTAASARLSDSQDSLSSEELRPMGALPLPADAEVRIAGAVREILEALGENPEREGLLDTPQRVAKMYLEVFSGLHQDPRDHLKTQFSADRHHGAVIVKDIRFHSMCEHHLLPVYGKAHVAYLPAGGRLTGLSKIARLVEGFARRPQLQERLTDQIAQGMEDVLAPEAVLVVIEAEHMCMSMRGVRSPGSTTVTSIARGTWLRDSAARMEIMSLLRG

SEQ ID NO: 8632 - protein, 224 aa, Gluconobacter roseus; identical to SEQ ID NO: 8631
  REGION 1..224: note = tr|A0A4Y3M076|A0A4Y3M076_9PROT GTP cyclohydrolase 1; OS = Gluconobacter roseus NBRC 3990 OX=1307950 GN=folE PE=3; SV = 1

SEQ ID NO: 8633 - protein, 191 aa, Gluconobacter sp.
  REGION 1..191: note = tr|A0A252BMX0|A0A252BMX0_9PROT GTP cyclohydrolase 1; OS = Gluconobacter sp. DsW_058 OX=1511210 GN=folE PE=3 SV=1
MSRPADAQERIAGAVRTILEAIGENPEREGLHDTPQRVAKMYLEVFEGLYEDPRDHLKTQFSADQHHGAVIVKDIHFHSMCEHHLLPVHGKAHVAYLPAGGRLTGLSKLARVVEGFARRPQLQERLTDQVAQAMEDVLAPEAVLVVIEAEHMCMSMRGVRSPGSTTVTMIARGTWKHDHAARMEILSLLRS

SEQ ID NO: 8634 - protein, 224 aa, Gluconobacter sphaericus
  REGION 1..224: note = tr|A0A4Y3Q9Q7|A0A4Y3Q9Q7_9PROT GTP cyclohydrolase 1; OS = Gluconobacter sphaericus NBRC 12467 OX=1307951; GN = folE_1 PE=3 SV=1
MTNLNATIMTAASARLSDSQDSLSSEELRPMGALPLPADAEVRIAGAVREILEALGENPEREGLLDTPRRVAKMYLEVFSGLHQDPRDHLKTQFSADQHHGAVIVKDIRFHSMCEHHLLPVYGKAHVAYLPAGGRLTGLSKIARLVEGFARRPQLQERLTDQIAQGMEDVLAPEAVLVVIEAEHMCMSMRGVRSPGSTTVTSIARGTWLRDSAARMEIMSLLRG

SEQ ID NO: 8635 - protein, 203 aa, Gluconobacter sphaericus
  REGION 1..203: note = tr|A0A4Y3QFE9|A0A4Y3QFE9_9PROT GTP cyclohydrolase 1; OS = Gluconobacter sphaericus NBRC 12467 OX=1307951; GN = folE_2 PE=3 SV=1
MDTLMDIPRQVRTRPTRAQAEEAVRTLLAWTGDDPDREGLVGTPDRVVRAYEEFFEGYQDDPVALLERTFEESGNYNEMVVLRDICLESHCEHHIIPLIGKAHVAYLPDRRVVGISKLARLVDVFAHRLQIQEKLTAQIADTIQSVLQPRGVAVVIDAAHQCMTTRGVHKPGVSMVTSRLLGEFETSEPLRRQFFAMAGMGGM

SEQ ID NO: 8636 - protein, 212 aa, Gluconobacter thailandicus
  REGION 1..212: note = tr|A0A5C0A3U3|A0A5C0A3U3_GLUTH GTP cyclohydrolase I FolE OS=Gluconobacter thailandicus OX=257438 GN=folE PE=4; SV = 1
MTDLNATAMTACKDDQRPLGALSRPVDAEERLASAIRTILEAVGENPEREGLQDTPQRVAKMYLEVFGGLYEDPREHLKTQFSADQHHGAVIVKDIRFHSMCEHHLLPVHGKAHVAYLPAGGRLTGLSKLARVVEGFARRPQLQERMTDQVAQAMEDVLAPEAVLVVIEAEHMCMSMRGVRSPGSTTVTTVARGTWKHDHAARMEILSLLRG

SEQ ID NO: 8637 - protein, 204 aa, Gluconobacter thailandicus
  REGION 1..204: note = tr|A0A149SMQ3|A0A149SMQ3_GLUTH GTP cyclohydrolase 1; OS = Gluconobacter thailandicus OX=257438 GN=folE PE=3 SV=1
MTACKDDQRPLGALSRPVDAEERLASAIRTILEAVGENPEREGLQDTPQRVAKMYLEVFGGLYEDPREHLKTQFSADQHHGAVIVKDIRFHSMCEHHLLPVHGKAHVAYLPAGGRLTGLSKLARVVEGFARRPQLQERMTDQVAQAMEDVLAPEAVLVVIEAEHMCMSMRGVRSPGSTTVTTVARGTWKHDHAARMEILSLLRG

SEQ ID NO: 8638 - protein, 215 aa, Gluconobacter wancherniae
  REGION 1..215: note = tr|A0A511B8J4|A0A511B8J4_9PROT GTP cyclohydrolase 1; OS = Gluconobacter wancherniae NBRC 103581 OX=656744 GN=folE; PE = 3 SV=1
MSNLNAATASIPVAQAEGPRPLGALTRPVDAEDRIAAAVREILTALGENPEREGLRDTPDRVARMYLEVLGGLHQDPRDHLKTQFSADHHHGAVIVKDILFHSMCEHHLLPVHGRAHVAYLPAGGRLTGLSKIARLVEGFARRPQLQERLTDQIAQGMEDILAPEAILVVVEGEHMCMSMRGVRSPGSTTVTTVARGIWASNSAARMEIMALLKG

SEQ ID NO: 8639 - protein, 192 aa, unidentified
  source 1..192: note = Glutamicibacter arilaitensis
  REGION 1..192: note = tr|E1VRS1|E1VRS1_GLUAR GTP cyclohydrolase 1; OS = Glutamicibacter arilaitensis (strain DSM 16368 / CIP 108037 / IAM 15318 / JCM 13566 / Re117) OX=861360 GN=folE; PE = 3 SV =1
MSELQEIDQPRIAAAVREILEAIGEDPDRDGLVDTPKRVAKAYAEFFAGLHQDAADHLATTFDIEHDEMVLVKDIPFYSTCEHHLVPFYGSAHIGYIPGKGGKVTGLSKLARLVEVYARRPQVQERLTTQIVDALVEHLSPSGAIVVVECEHMCMSMRGVRKPGAKTVTSAVRGQLRETATRAEAMSLILGK

SEQ ID NO: 8640 - protein, 192 aa, unidentified; identical to SEQ ID NO: 8639
  source 1..192: note = Glutamicibacter arilaitensis
  REGION 1..192: note = tr|A0A2N7S0P7|A0A2N7S0P7_9MICC GTP cyclohydrolase 1; OS = Glutamicibacter arilaitensis OX=256701 GN=folE PE=3 SV=1

SEQ ID NO: 8641 - protein, 218 aa, unidentified
  source 1..218: note = Glutamicibacter creatinolyticus
  REGION 1..218: note = tr|A0A5B7WPD2|A0A5B7WPD2_9MICC GTP cyclohydrolase 1; OS = Glutamicibacter creatinolyticus OX=162496 GN=folE PE=3; SV = 1
MSSSKTIDSSKSQDSVPGPEGAQSSNGVPAKEVDQPRIAAAVREILLAIGEDPDRDGLVDTPKRVAKAYAEFFAGLSQDPAEHLDTTFDIEHDELVLVKDIPFYSTCEHHLVPFHGSAHIGYIPGKAGKVTGLSKLARLVEVFARRPQVQERLTTQIVDALVEHLHPQGAIVVVECEHMCMSMRGVQKPGAKTVTSAVRGQLRETATRAEAMSLILGK

SEQ ID NO: 8642 - protein, 192 aa, unidentified
  source 1..192: note = Glutamicibacter halophytocola
  REGION 1..192: note = tr|A0A5B8I2L8|A0A5B8I2L8_9MICC GTP cyclohydrolase 1; OS = Glutamicibacter halophytocola OX=1933880 GN=folE PE=3; SV = 1
MSELEQIDQPRIAAAVREILEAIGEDPDRDGLAETPKRVAKAYAEFFAGLHQNAAEHLSTTFDIEHDEMVLVKDIPFYSTCEHHLVPFYGSAHIGYIPGKGGKVTGLSKLARLVEVYARRPQVQERLTTQIVDSLVEHLNPAGAIVVVECEHMCMSMRGVQKPGAKTVTSAVRGQLRETATRAEAMSLILGK

SEQ ID NO: 8643 - protein, 192 aa, unidentified
  source 1..192: note = Glutamicibacter mysorens
  REGION 1..192: note = tr|A0A2M9AIP4|A0A2M9AIP4_9MICC GTP cyclohydrolase 1; OS = Glutamicibacter mysorens OX=257984 GN=folE PE=3 SV=1
MSELKEIDQPRIAAAVREILEAIGEDPDRDGLVDTPKRVAKAYAEFFAGLHQQPADHLSTTFDIEHDEMVLVKDIPFYSTCEHHLVPFYGSAHIGYIPGKGGKVTGLSKLARLVEVYARRPQVQERLTTQIVDALVEHLSPAGAIVVVECEHMCMSMRGVQKPGAKTVTSAVRGQLRETATRAEAMSLILGK

SEQ ID NO: 8644 - protein, 192 aa, unidentified
  source 1..192: note = Glutamicibacter nicotianae
  REGION 1..192: note = tr|A0A4Y3W393|A0A4Y3W393_GLUNI GTP cyclohydrolase 1; OS = Glutamicibacter nicotianae OX=37929 GN=folE PE=3 SV=1
MSELKEIDQPRIAAAVREILEAIGEDPDRDGLVDTPKRVAKAYAEFFAGLHQQPADHLSTTFDIEHDEMVLVKDIPFYSTCEHHLVPFYGSAHIGYIPGKGGKVTGLSKLARLVEVYARRPQVQERLTTQIVDALVEHLNPAGAIVVVECEHMCMSMRGVQKPGAKTVTSAVRGQLRETATRAEAMSLILGK

SEQ ID NO: 8645 - protein, 192 aa, unidentified
  source 1..192: note = Glutamicibacter soli
  REGION 1..192: note = tr|A0A365Y7T7|A0A365Y7T7_9MICC GTP cyclohydrolase 1; OS = Glutamicibacter soli OX=453836 GN=folE PE=3 SV=1
MTEENLIDQPRIAAAVREILLAIGEDPDRDGLQDTPKRVAKAYAEFFAGLHQRPEEHLSTTFDIEHDEMVLVKDIAFYSTCEHHLVPFYGRAHIGYIPGKGGKVTGLSKLARLVEVFARRPQVQERLTTQIVDALVEHLNPSGAIVVVECEHMCMSMRGVQKPGAKTVTSAVRGQLRETATRAEAMSLILGR

SEQ ID NO: 8646 - protein, 220 aa, unidentified
  source 1..220: note = Glutamicibacter soli
  REGION 1..220: note = tr|A0A365Y7K5|A0A365Y7K5_9MICC GTP cyclohydrolase 1; OS = Glutamicibacter soli OX=453836 GN=folE PE=3 SV=1
MNPLDQLGEALAEVEELGGQAPGLPARVLSPQQAGEMDLAGAEHAAGEFLRALGMDLGAVHLQRTPARMAQAWAQMLTPRDFTFTTFPNEEHYDELVVLRDNPVRPVCGHHLLPFTGRAGVGYLPGERSVGLSKLARIVEHFACRPRTQERLTQQFADWLRKVLSPRAVGVVISAEHSCMSLRGANIPGTSTVTSALLGHLRDNAGARQEFLSFSGLMNN

SEQ ID NO: 8647 - protein, 186 aa, unidentified
  source 1..186: note = Glutamicibacter sp.
  REGION 1..186: note = tr|A0A2A3Y3Z6|A0A2A3Y3Z6_9MICC GTP cyclohydrolase 1; OS = Glutamicibacter sp. BW80 OX=2024404 GN=folE PE=3 SV=1
MDQPRIAAAVREILEAIGEDPDRDGLLDTPKRVAKAYAEFFAGLHQDAAEHLSTTFDIEHDELVLVKDIPFYSTCEHHLVPFYGTAHIGYIPGRGGKVTGLSKLARLVEVFARRPQVQERLTTQIVDALVEHLEPTGAIVVIECEHMCMSMRGVRKPGAKTVTSAVRGQLRETATRAEAMSLILGR

SEQ ID NO: 8648 - protein, 192 aa, unidentified
  source 1..192: note = Glutamicibacter sp.
  REGION 1..192: note = tr|A0A2A3YB45|A0A2A3YB45_9MICC GTP cyclohydrolase 1; OS = Glutamicibacter sp. BW77 OX=2024402 GN=folE PE=3 SV=1
MIEETKIDQPRIAAAVREILEAIGEDPDRDGLLDTPKRVAKAYAEFFAGLHQDAAEHLSTTFDIEHDEMVLVKDIAFYSTCEHHLVPFYGTAHIGYIPGKGGKVTGLSKLARLVEVFARRPQVQERLTTQIVDALVEHLEPSGAIVVIECEHMCMSMRGVRKPGAKTVTSAVRGQLRETATRAEAMSLILGR

SEQ ID NO: 8649 - protein, 192 aa, unidentified
  source 1..192: note = Glutamicibacter uratoxydans
  REGION 1..192: note = tr|A0A4Y4DR52|A0A4Y4DR52_9MICC GTP cyclohydrolase 1; OS = Glutamicibacter uratoxydans OX=43667 GN=folE_2 PE=3 SV=1
MSEENLIDQPRIAAAVREILLAIGEDPDRDGLLDTPKRVAKAYAEFFGGLHQDAAEHLSTTFDIEHDEMVLVKDIPFYSTCEHHLVPFHGTAHIGYIPGKGGKVTGLSKLARLVEVFARRPQVQERLTTQIVDALMEHLNPSGAIVVIECEHMCMSMRGVRKPGAKTVTSAVRGQLRETATRAEATSLILGR

SEQ ID NO: 8650 - protein, 219 aa, unidentified
  source 1..219: note = Glutamicibacter uratoxydans
  REGION 1..219: note = tr|A0A4Y4DT20|A0A4Y4DT20_9MICC GTP cyclohydrolase 1; OS = Glutamicibacter uratoxydans OX=43667 GN=folE_1 PE=3 SV=1
MSHFTQLDEGIELEGELDPAGLGLPVRVPAGGGQHRMDLDAAERAAADFLAALGMDLNAVHLQRSPARMAQAWAQMLTPREFNLTTFPNEEKYDQLVMVRDIPVRSLCEHHLLPFTGKACVGYLPGERIVGLSKLARIVEHFSCRPQTQERLTQQIATWLQDELNPRAVGVVIAAEHSCMTLRGVNTPGTSTVTSALLGHLRHSTSARQEFLSFSGLMN

SEQ ID NO: 8651 - protein, 211 aa, unidentified
  source 1..211: note = Glycocaulis alkaliphilus
  REGION 1..211: note = tr|A0A3T0E6M3|A0A3T0E6M3_9RHOB GTP cyclohydrolase 1; OS = Glycocaulis alkaliphilus OX=1434191 GN=folE PE=3 SV=1
MDAILKKTDLGSAAEILEPVQRPSREEAEEAVRTLLRWAGDDPRREGLIETPKRVVKAYEEWFRGYHEDPAKILGKRFEDVQGYDDMVMLTHIDVESHCEHHMAPILGTACVAYLPDRAVVGISKIAKVVEAFSKRLQTQETMTAQIADAINDAMAPRGVAIFVDAKHQCMTTRGVHHPHVSTITTTFTGEFKANPELRERFMRLCEQSKR

SEQ ID NO: 8652 - protein, 209 aa, unidentified
  source 1..209: note = Glycocaulis sp.
  REGION 1..209: note = tr|A0A550KB52|A0A550KB52_9RHOB GTP cyclohydrolase 1; OS = Glycocaulis sp. ZYF765 OX=2518983 GN=folE PE=3 SV=1
MDALTSKTALATAGQTDIDRPTREQAEEAVRTLIAWAGDDPRREGLIDTPKRVAKAYQEWFRGYALDPAKELGRVFEDVQGYDDMVMLTDIDVESHCEHHLAPILGKACVAYLPDKAVVGISKIAKVVEIFSKRLQTQETMTAQIADAINDAMRPRGVAVFVDAKHQCMTTRGVHHPNVSTITTTFTGEFRANPELRDRFMRLCEKSRA

SEQ ID NO: 8653 - protein, 200 aa, unidentified
  source 1..200: note = Glycomyces artemisiae
  REGION 1..200: note = tr|A0A2T0UL69|A0A2T0UL69_9ACTN GTP cyclohydrolase 1; OS = Glycomyces artemisiae OX=1076443 GN=folE PE=3 SV=1
MSTTAAPRPEFRDREGAVEPDLVAAEAAAAAFLKALGMDHDSEHLRATPGRMARAWAEMLTPRPFNLTTFPNEEGYDELVLARGIPFRSICEHHLLPFTGHACVGYLPGERVLGLSKLARVVEHFACRPQTQERLTKQTADWLQAQLGAKAVGVVLKAEHSCMTLRGALATGSSTVTSTLLGTLRTDPSSRQEFLALAGF

SEQ ID NO: 8654 - protein, 212 aa, unidentified
  source 1..212: note = Glycomyces artemisiae
  REGION 1..212: note = tr|A0A2T0UM63|A0A2T0UM63_9ACTN GTP cyclohydrolase 1; OS = Glycomyces artemisiae OX=1076443 GN=folE PE=3 SV=1
MAELDNLAARLIDGRINGSPVENVVDLERIEGAVREILAAIGEDPDRPGLKETPRRVARAYAELFAGLRVDPAEVLKTSFDENHNELVLVRDIDVQSFCEHHLLPFTGVAHVGYIPGVSGQIVGLSKLARLVEVYSRRPQVQERLTSQIADQLYESLEATGVIVVVECEHTCMSMRGIRKQGSKTITSAVRGSLQSDARTRAEAMSLLRGGA

SEQ ID NO: 8655 - protein, 183 aa, unidentified
  source 1..183: note = Glycomyces fuscus
  REGION 1..183: note = tr|A0A2A6F047|A0A2A6F047_9ACTN GTP cyclohydrolase 1; OS = Glycomyces fuscus OX=1407559 GN=folE PE=3 SV=1
MAAEDAARAFLGCLGVSLEPEAMQKTPGRMARAYSDLLNPRPFTLTTFPNEHGHRDFVIARNIPMHSVCEHHFLPFSGVAHVGYLPGARIVGLSKLARTVEYFSRRPQVQERLTHQIASWLAEQLDADAVGAVVEAEHLCMSIRGVQAAGSTTTTSVMLGSLGKDAELRREFLTLVGLAGPGR

SEQ ID NO: 8656 - protein, 199 aa, unidentified
  source 1..199: note = Glycomyces fuscus
  REGION 1..199: note = tr|A0A2A6EV51|A0A2A6EV51_9ACTN GTP cyclohydrolase 1; OS = Glycomyces fuscus OX=1407559 GN=folE PE=3 SV=1
MSAAEELPPRSVDRLRIERAVREILLAIGEDPDRDGLAKTPERVARAYEEQFAGLGQKPGDVLTTVFEAAHEEMVLVKDIELYSTCEHHLVPFYGVAHVGYIPGADGRITGLSKLARLVDVYARRPQVQERLTGQVSDAIMEYLQPRGVIVVVEAEHLCMTMRGVRKPGAKTVTSAVRGIFRSSDRTRSEAMSLILSQR

SEQ ID NO: 8657 - protein, 213 aa, Glycomyces harbinensis
  REGION 1..213: note = tr|A0A1G7CLV3|A0A1G7CLV3_9ACTN GTP cyclohydrolase 1; OS = Glycomyces harbinensis OX=58114 GN=folE PE=3 SV=1
MAELDNLAARLIDGRINGSPVEDAVDLGRIEAAVREILAAIGEDPDRPGLKETPRRVARAYAELFAGLRVDPAAVLKTSFDENHNELVLVRDIDVQSFCEHHLLPFTGVAHVGYIPGANGQIVGLSKLARLVEVYSRRPQVQERLTSQIADQLYKSLEASGVIVVVECEHTCMSMRGIRKQGSKTITSAVRGSMQSDARTRAEAMSLLRGTAG

SEQ ID NO: 8658 - protein, 213 aa, unidentified
  source 1..213: note = Glycomyces paridis
  REGION 1..213: note = tr|A0A4S8PCM5|A0A4S8PCM5_9ACTN GTP cyclohydrolase 1; OS = Glycomyces paridis OX=2126555 GN=folE PE=3 SV=1
MAELDNLAARLVDGRINGSPVEDAVDLGRIEAAVREILAAIGEDPERPGLKETPRRVARAYAELFAGLRVDPAEVLKTSFDENHNELVLVRDIDVQSFCEHHLLPFTGVAHVGYIPGEGGQIAGLSKLARLVEVYSRRPQVQERLTSQIADQLYKSLAASGVIVVVECEHTCMSMRGIRKQGSVTVTSAVRGLLQSDARTRAEAMALLRGTAR

SEQ ID NO: 8659 - protein, 213 aa, Glycomyces sambucus
  REGION 1..213: note = tr|A0A1G9GWN8|A0A1G9GWN8_9ACTN GTP cyclohydrolase 1; OS = Glycomyces sambucus OX=380244 GN=folE PE=3 SV=1
MAELDNLAARLIDGRINGSPVEDAVDLDRIEAAVREILAAIGEDPDRPGLKETPRRVARAYAELFAGLRVDPAQVLKTSFDENHNELVLVREIEVQSFCEHHLLPFTGVAHVGYIPGAGGQIVGLSKLARLVEVYSRRPQVQERLTSQIADQLYTSLEATGVIVVVECEHTCMSMRGIRKQGSSTITSAVRGSLQSDARTRAEAMSLLRGTTG

SEQ ID NO: 8660 - protein, 213 aa, Glycomyces sp.
  REGION 1..213: note = tr|A0A4R7PX76|A0A4R7PX76_9ACTN GTP cyclohydrolase 1; OS = Glycomyces sp. MMG10089 OX=2135788 GN=folE PE=3 SV=1
MPELDNLAARLVDGRINGSPVEDAVDLGRIEAAVREILTAVGEDPDRPGLKETPRRVARAYAELFAGLRVDPAEVLKTSFDENHNELVLVRDIDVQSFCEHHLLPFTGVAHVGYIPGESGQIAGLSKLARLVEVYSRRPQVQERLTSQIADQLYRSLSAKGVIVVVECEHTCMSMRGIRKQGSKTVTSAVRGILQSDARTRAEAMSLLRGTTG

SEQ ID NO: 8661 - protein, 213 aa, Glycomyces sp.
  REGION 1..213: note = tr|A0A4V4HSK1|A0A4V4HSK1_9ACTN GTP cyclohydrolase 1; OS = Glycomyces sp. 18 OX=2570927 GN=folE PE=3 SV=1
MAELDNLAARLIDGRINGSPVEDSVDLPRIEAAVREILEAIGEDPDRPGLIETPRRVARAYAELFAGLRVDPSHVLKTSFDEDHNELILVREIEVQSFCEHHLLPFTGIAHVGYIPGISGQVAGLSKLARLVEVYSRRPQVQERLTSQIADQLDQSLEARGVIVVVECEHMCMSMRGIRKQGAKTVTSAVRGILQSDARTRAEAMSLLRGTTG

SEQ ID NO: 8662 - protein, 209 aa, Goodfellowiella sp.
  REGION 1..209: note = tr|A0A5B2XEW4|A0A5B2XEW4_9PSEU GTP cyclohydrolase 1; OS = Goodfellowiella sp. AN110305 OX=1892852 GN=folE PE=3; SV = 1
MTKSVDAVVPTHEDDDAPSRPVFDQARAERAVRELLLACGEDPERQGLRDTPARVARAYREMFAGLYTDPDTVLAKTFDESHEELVLVTDIPMYSNCEHHLVPFHGVAHVGYIPNSHGRVTGLSKLARLVDLYAKRPQVQERLTSQVADALVRRLDPRGVIVVIEAEHLCMAMRGVRKPGARTTTSAVRGMFRTSASSRAEAIELIKGR

SEQ ID NO: 8663 - protein, 212 aa, Gordonia aichiensis
  REGION 1..212: note = tr|L7KGK2|L7KGK2_9ACTN GTP cyclohydrolase 1; OS = Gordonia aichiensis NBRC 108223 OX=1220583 GN=folE PE=3; SV = 1
MTISEGHDIAAHDGTSRELMTDGGRFFDQERAEAAVRELLIAVGEDPDREGLQRTPTRVANAYREMFAGLYTDPSEVLATTFDEDHDEFVLVKDIPMYSTCEHHLVSFHGVAHVGYIPGPTGQVTGLSKLARVVDLYAKRPQVQERLTSQIADALVRRLNPRGVIVVIEAEHLCMAMRGIRKPGARTTTSAVRGIFKTSAVSRGEALDLITR

SEQ ID NO: 8664 - protein, 203 aa, Gordonia alkanivorans
  REGION 1..203: note = tr|A0A3T0UXV8|A0A3T0UXV8_9ACTN GTP cyclohydrolase 1; OS = Gordonia alkanivorans OX=84096 GN=folE PE=3 SV=1
MTISEGRDAVVDGHRSEFDQARAEAAVRELLLAIGEDPEREGLVRTPTRVANAYREMFAGLYTDPDEVLATTFDEDHDELVLVKDIPMYSTCEHHLVSFHGVAHVGYIPGTSGRVTGLSKLARLVDLYAKRPQVQERLTSQIADAVMRKLEPRGVIVVIEAEHLCMAMRGIRKPGATTTTSAVRGIFKTSAVSRGEALDLITR

SEQ ID NO: 8665 - protein, 203 aa, Gordonia alkanivorans
  REGION 1..203: note = tr|F9VQG4|F9VQG4_9ACTN GTP cyclohydrolase 1; OS = Gordonia alkanivorans NBRC 16433 OX=1027371 GN=folE; PE = 3 SV=1
MTISEGRDAVVNGHRSEFDQARAEAAVRELLLAIGEDPDREGLVRTPTRVANAYREMFAGLYTDPDEVLATTFDEDHDELVLVKDIPMYSTCEHHLVSFHGVAHVGYIPGTSGRVTGLSKLARLVDLYAKRPQVQERLTSQIADAVMRKLEPRGVIVVIEAEHLCMAMRGIRKPGATTTTSAVRGIFKTSAVSRGEALDLITR

SEQ ID NO: 8666 - protein, 208 aa, Gordonia amarae
  REGION 1..208: note = tr|G7GW06|G7GW06_9ACTN GTP cyclohydrolase 1; OS = Gordonia amarae NBRC 15530 OX=1075090 GN=folE PE=3 SV=1
MTMTEDSEPLADATPAGAARRPFDFARAEAAVRELLLAVGEDPDREGLRRTPARVAKAYEEVFAGLYTDPSEVLATTFDEDHDELVLVKDIPMYSTCEHHLVSFHGVAHVGYIPGESGQVTGLSKLARLVDLYAKRPQVQERLTSQIADAIVARLNPRGVIVVIEAEHLCMAMRGIRKPGATTTTSAVRGLFKTSAVSRGEALDLISR

SEQ ID NO: 8667 - protein, 203 aa, Gordonia amicalis
  REGION 1..203: note = tr|L7L1E0|L7L1E0_9ACTN GTP cyclohydrolase 1; OS = Gordonia amicalis NBRC 100051 = JCM 11271 OX=1220574; GN = folE PE=3 SV=1
MTISKGHDAVVDGHRSEFDQARAEAAVRELLLAVGEDPDREGLIRTPTRVANAYREMFAGLYTDPDEVLATTFDEDHDELVLVKDIPMYSTCEHHLVSFHGVAHVGYIPGESGRVTGLSKLARLVDLYAKRPQVQERLTSQIADAVMRKLGPRGVIVVIEAEHLCMAMRGIRKPGATTTTSAVRGIFKTSAVSRGEALDLITR

SEQ ID NO: 8668 - protein, 203 aa, Gordonia araii
  REGION 1..203: note = tr|G7H2W6|G7H2W6_9ACTN GTP cyclohydrolase 1; OS = Gordonia araii NBRC 100433 OX=1073574 GN=folE PE=3 SV=1
MTAEDAARPASTPGPARFDQARAEAAVRELLIAVGEDPDREGLRRTPTRVANAFHEVFAGLYTDPDEVLETTFDENHEELVLVKDIPLYSTCEHHLVAFHGVAHVGYIPGSSGRVTGLSKLARVVDLYAKRPQVQERLTSQIADAVMSKLDPRGVIVVIEAEHLCMAMRGIRKPGSSTTTSAVRGIFKTNAVSRSEALQLIAR

SEQ ID NO: 8669 - protein, 219 aa, Gordonia bronchialis
  REGION 1..219: note = tr|D0L433|D0L433_GORB4 GTP cyclohydrolase 1; OS = Gordonia bronchialis (strain ATCC 25592 / DSM 43247 / JCM 3198 / NCTC 10667) OX=526226 GN=folE PE=3 SV=1
MTISERHEADFDTAADVDTAADVDARAVPQRAGFDQARAEAAVRELLLAVGEDPDRQGLLRTPTRVANAYREMFAGLYTEPDDVLATTFDEDHDELVLVKDIPMYSTCEHHLVPFHGVAHVGYIPGVSGQVTGLSKLARLVDLYAKRPQVQERLTSQIADAIVRRLDPRGVIVVIEAEHLCMAMRGIRKPGATTTTSAVRGLFKTSAVSRGEALDLITR

SEQ ID NO: 8670 - protein, 205 aa, Gordonia effusa
  REGION 1..205: note = tr|H0R2A2|H0R2A2_9ACTN GTP cyclohydrolase 1; OS = Gordonia effusa NBRC 100432 OX=1077974 GN=folE PE=3 SV=1
MTISEETVVGQSDRREPAEFDQARAEAAVRELLIAVGEDPDREGLQRTPTRVANAYREVFAGLYTDPDEVLATTFDENHDELVLVKDIPLYSTCEHHLVSFHGVAHVGYIPGTSGRVTGLSKLARLVDLYAKRPQVQERLTSQIADAIVRKLDPRGVIVVIEAEHLCMAMRGIRKPGARTTTSAVRGLFKTSAVSRGEALDLITR

SEQ ID NO: 8671 - protein, 200 aa, Gordonia hirsuta
  REGION 1..200: note = tr|L7LDG6|L7LDG6_9ACTN GTP cyclohydrolase 1; OS = Gordonia hirsuta DSM 44140 = NBRC 16056 OX=1121927; GN = folE PE=3 SV=1
MSDDEQLITAEGRVFDQARAEAAVRELLLAVGEDPDREGLRRTPERVARAYREVFGGLYTEPAEVLATVFDEDHRELVLVKDIPMYSTCEHHLVSFHGVAHVGYIPGDTGQVTGLSKLARLVDLYARRPQVQERLTSQIADAMMDRLSPRGVIVVIEAEHLCMAMRGIRKPGSSTTTSAVRGIFQTSAVSRGEALDLINR

SEQ ID NO: 8672 - protein, 199 aa, unidentified
  source 1..199: note = Gordonia iterans
  REGION 1..199: note = tr|A0A2S0KCU8|A0A2S0KCU8_9ACTN GTP cyclohydrolase 1; OS = Gordonia iterans OX=1004901 GN=folE PE=3 SV=1
MSDEPLLTADGREFDQARAEAAVRELLLAVGEDPDREGLRRTPERVARAYREMFGGLYTQPDEVLATVFDEDHRELVLVKDIPMYSTCEHHLVSFHGVAHVGYIPGASGQVTGLSKLARLVDLYARRPQVQERLTSQIADALMRKLEPRGVIVVIEAEHLCMAMRGIRKPGASTTTSAVRGIFQTSAVSRGEALDLIAR

SEQ ID NO: 8673 - protein, 203 aa, Gordonia lacunae
  REGION 1..203: note = tr|A0A243Q5W8|A0A243Q5W8_9ACTN GTP cyclohydrolase 1; OS = Gordonia lacunae OX=417102 GN=folE PE=3 SV=1
MSINERQDAVLAGPRSEFDQARAEAAVRELLLAVGEDPDREGLLRTPTRVANAYREMFAGLYTEPDDVLATTFDEDHDELVLVKDIPMYSTCEHHLVSFHGVAHVGYIPGTSGRVTGLSKLARLVDLYAKRPQVQERLTSQIADAMMRRLEPRGVIVVIEAEHLCMAMRGIRKPGATTTTSAVRGIFKTSAVSRGEALDLITR

SEQ ID NO: 8674 - protein, 209 aa, Gordonia malaquae
  REGION 1..209: note = tr|M3VBL2|M3VBL2_9ACTN GTP cyclohydrolase 1; OS = Gordonia malaquae NBRC 108250 OX=1223542 GN=folE PE=3; SV = 1
MTSVDDTHAVDGVTAPGHGAVGEFDQARAEAAVRELLIAVGEDPDREGLKRTPHRVANAYREMFAGLYIEPDEVLATVFDEGHSELVLVKDIPMYSTCEHHLVAFRGVAHVGYIPGESGQVTGLSKLARVVDLYAKRPQVQERLTSQIADALVRRLDPRGVIVVIEAEHLCMAMRGIRKPGATTTTSAVRGLFKTSATSRGEALDLITR

SEQ ID NO: 8675 - protein, 203 aa, Gordonia namibiensis
  REGION 1..203: note = tr|K6XSN6|K6XSN6_9ACTN GTP cyclohydrolase 1; OS = Gordonia namibiensis NBRC 108229 OX=1208314 GN=folE; PE = 3 SV=1
MTISEGRDTVVNGHRSEFDQARAEAAVRELLLAVGEDPDREGLLRTPTRVANAYREMFAGLYTDPDEVLATTFDEDHDELVLVKDIPMYSTCEHHLVSFHGVAHVGYIPGESGRVTGLSKLARLVDLYAKRPQVQERLTTQIADAIMRKLEPRGVIVVIEAEHLCMAMRGIRKPGATTTTSAVRGIFKTSAVSRGEALDLITR

SEQ ID NO: 8676 - protein, 222 aa, Gordonia neofelifaecis
  REGION 1..222: note = tr|F1YLP3|F1YLP3_9ACTN GTP cyclohydrolase 1; OS = Gordonia neofelifaecis NRRL B-59395 OX=644548 GN=folE; PE = 3 SV=1
MNGEHGEMTTSIDRNGDGGAHAVDALHVPAAAGDRLFDQARAEAAVRELLIAVGEDPDRAGLKRTPTRVANAYREMFAGLYTDPDEVLATVFDEDHEELVLVKDIPMYSTCEHHLVSFHGVAHVGYIPGETGQVTGLSKLARVVDLYAKRPQVQERLTSQIADALVRKLDPRGVIVVIEAEHLCMAMRGIRKPGARTTTSAVRGLFKTSAVSRGEALDLITR

SEQ ID NO: 8677 - protein, 212 aa, Gordonia otitidis
  REGION 1..212: note = tr|H5TGF8|H5TGF8_9ACTN GTP cyclohydrolase 1; OS = Gordonia otitidis NBRC 100426 OX=1108044 GN=folE PE=3; SV = 1
MTISEGHDIATHEDASHATTVDGGRFFDQQRAEAAVRELLIAVGEDPDREGLRRTPTRVANAYREMFAGLYTDPSEVLATIFDEDHDELVLVKDIPMYSTCEHHLVSFHGVAHVGYIPGPTGQVTGLSKLARVVDLYAKRPQVQERLTSQIADALVNRLNPRGVIVVIEAEHLCMAMRGIRKPGARTTTSAVRGIFKTSAVSRGEALDLITR

SEQ ID NO: 8678 - protein, 203 aa, Gordonia paraffinivorans
  REGION 1..203: note = tr|A0A2U1ZJK8|A0A2U1ZJK8_9ACTN GTP cyclohydrolase 1; OS = Gordonia paraffinivorans OX=175628 GN=folE PE=3 SV=1
MTISERQDAVVDGHRSQFDQARAEAAVRELLLAVGEDPDREGLRRTPTRVANAYREMFAGLYTDPDDVLATTFDEDHDELVLVKDIPMYSTCEHHLVSFHGVAHVGYIPGASGRVTGLSKLARLVDLYAKRPQVQERLTSQIADAIMRRLDPRGVIVVIEAEHLCMAMRGIRKPGATTTTSAVRGIFKSSAVSRGEALDLITR

SEQ ID NO: 8679 - protein, 203 aa, Gordonia paraffinivorans; identical to SEQ ID NO: 8678
  REGION 1..203: note = tr|M3UXH9|M3UXH9_9ACTN GTP cyclohydrolase 1; OS = Gordonia paraffinivorans NBRC 108238 OX=1223543 GN=folE; PE = 3 SV=1

SEQ ID NO: 8680 - protein, 206 aa, unidentified
  source 1..206: note = Gordonia phthalatica
  REGION 1..206: note = tr|A0A0N9MSE2|A0A0N9MSE2_9ACTN GTP cyclohydrolase 1; OS = Gordonia phthalatica OX=1136941 GN=folE PE=3 SV=1
MTTDHAVDALAVPDTAETKVFDQERAEAAVRELLLAVGEDPDRPGLQRTPHRVAKAYAEMFAGLYCDPDEVLATVFDENHEELVLVKDIPMYSTCEHHLVSFHGVAHVGYIPGPTGQVTGLSKLARVVDLYAKRPQVQERLTSQIADALVRKLNPRGVIVVIEAEHLCMAMRGIRKPGARTTTSAVRGLFKTSAVSRGEALDLITR

SEQ ID NO: 8681 - protein, 204 aa, Gordonia polyisoprenivorans
  REGION 1..204: note = tr|H0RJG3|H0RJG3_9ACTN GTP cyclohydrolase 1; OS = Gordonia polyisoprenivorans NBRC 16320 = JCM 10675; OX = 1077976 GN=folE PE=3 SV=1
MTTLDQRGPDSAAEPVREFDQARAEAAVRELLLAIGEDPDREGLRRTPTRVANAYREMFAGLYTDPSEVLATTFDEDHDELVLVKDIPLYSTCEHHLVSFHGVAHVGYIPGVSGQVTGLSKLARLVDLYAKRPQVQERLTSQVADALVRRLNPRGVIVVIEAEHLCMAMRGIRKPGARTTTSAVRGLFKTSAVSRGEALDLITR

SEQ ID NO: 8682 - protein, 204 aa, Gordonia polyisoprenivorans; identical to SEQ ID NO: 8681
  REGION 1..204: note = tr|H6MVN7|H6MVN7_GORPV GTP cyclohydrolase 1; OS = Gordonia polyisoprenivorans (strain DSM 44266 / VH2); OX = 1112204 GN=folE PE=3 SV=1

SEQ ID NO: 8683 - protein, 120 aa, Gordonia rhizosphera
  REGION 1..120: note = tr|K6WB02|K6WB02_9ACTN GTP cyclohydrolase 1 (Fragment) OS=Gordonia rhizosphera NBRC 16068 OX=1108045; GN = folE PE=3 SV=1
DIPMYSTCEHHLVSFHGVAHVGYIPGESGQVTGLSKLARLVDLFAKRPQVQERLTSQIADAMMRRLEPRGVIVVIEAEHLCMAMRGIRKPGATTTTSAVRGIFKTSAVSRGEALDLISRP

SEQ ID NO: 8684 - protein, 203 aa, Gordonia rubripertincta; identical to SEQ ID NO: 8675
  REGION 1..203: note = tr|L7K646|L7K646_GORRU GTP cyclohydrolase 1; OS = Gordonia rubripertincta NBRC 101908 OX=1077975 GN=folE; PE = 3 SV=1

SEQ ID NO: 8685 - protein, 203 aa, Gordonia rubripertincta; identical to SEQ ID NO: 8675
  REGION 1..203: note = tr|A0A222TPG7|A0A222TPG7_GORRU GTP cyclohydrolase 1; OS = Gordonia rubripertincta OX=36822 GN=folE PE=3 SV=1

SEQ ID NO: 8686 - protein, 216 aa, Gordonia sihwensis
  REGION 1..216: note = tr|L7LJ64|L7LJ64_9ACTN GTP cyclohydrolase 1; OS = Gordonia sihwensis NBRC 108236 OX=1223544 GN=folE PE=3; SV = 1
MTTSSIDHDGDLNEHAVDALGVPAAAGERVFDQARAEAAVRELLLAVGEDPDREGLKRTPTRVANAYREMFAGLYTDPDEVLATVFDEDHEELVLVKDIPMYSTCEHHLVSFHGVAHVGYIPGDTGQVTGLSKLARVVDLYAKRPQVQERLTSQIADALVRKLNPRGVIVVIEAEHLCMAMRGIRKPGARTTTSAVRGLFKTSAVSRGEALDLITR

SEQ ID NO: 8687 - protein, 207 aa, Gordonia soli
  REGION 1..207: note = tr|M0QHK6|M0QHK6_9ACTN GTP cyclohydrolase 1; OS = Gordonia soli NBRC 108243 OX=1223545 GN=folE PE=3 SV=1
MTISETDHDGESAVDTEESGFDQARAEAAVRELLLAVGEDPDREGLRRTPSRVANAYREVFAGLYTDPDDVLATTFDENHDELVLVKDIPMYSTCEHHLVSFHGVAHVGYIPGVSGRVTGLSKLARLVDLYAKRPQVQERLTSQIADAIVRRLEPRGVIVVIEAEHLCMAMRGIRKPGARTTTSAVRGLFKTSAVSRGEALDLISRP

SEQ ID NO: 8688 - protein, 203 aa, Gordonia sp.; identical to SEQ ID NO: 8667
  REGION 1..203: note = tr|A0A290XT16|A0A290XT16_9ACTN GTP cyclohydrolase 1; OS = Gordonia sp. 1D OX=1737359 GN=folE PE=3 SV=1

SEQ ID NO: 8689 - protein, 212 aa, Gordonia sp.
  REGION 1..212: note = tr|A0A1A0KS07|A0A1A0KS07_9ACTN GTP cyclohydrolase 1; OS = Gordonia sp. 852002-10350_SCH5691597 OX=1834085 GN=folE; PE = 3 SV=1
MTISEGHDIATHDGASRELSTGDGRFFDQERAEAAVRELLIAVGEDPDREGLRRTPTRVANAYREMFAGLYTDPSDVLATIFDEDHDELVLVKDIPMYSTCEHHLVSFHGVAHVGYIPGPSGQVTGLSKLARVVDLYAKRPQVQERLTSQIADALVDRLNPRGVIVVIEAEHLCMAMRGIRKPGARTTTSAVRGIFKTSAVSRGEALDLITR

SEQ ID NO: 8690 - protein, 212 aa, Gordonia sputi
  REGION 1..212: note = tr|H5U425|H5U425_9ACTN GTP cyclohydrolase 1; OS = Gordonia sputi NBRC 100414 OX=1089453 GN=folE PE=3 SV=1
MTISEGHDIATHDGASRELSTGEGRFFDQERAEAAVRELLIAVGEDPDREGLRRTPTRVANAYREMFAGLYTDPSEVLATIFDEDHDELVLVKDIPMYSTCEHHLVSFHGVAHVGYIPGPSGQVTGLSKLARVVDLYAKRPQVQERLTSQIADALVERLNPRGVIVVIEAEHLCMAMRGIRKPGARTTTSAVRGIFKTSAVSRGEALDLITR

SEQ ID NO: 8691 - protein, 203 aa, Gordonia terrae
  REGION 1..203: note = tr|A0A2I1RAN1|A0A2I1RAN1_9ACTN GTP cyclohydrolase 1; OS = Gordonia terrae OX=2055 GN=folE PE=3 SV=1
MSINERQDAVLAGPRSEFDQARAEAAVRELLLAVGEDPDREGLVRTPTRVANAYREMFAGLYTEPDDVLATTFDEDHDELVLVKDIPMYSTCEHHLVSFHGVAHVGYIPGTSGRVTGLSKLARLVDLYAKRPQVQERLTSQIADAMMRRLEPRGVIVVIEAEHLCMAMRGIRKPGATTTTSAVRGIFKTSAVSRGEALDLITR

SEQ ID NO: 8692 - protein, 203 aa, Gordonia terrae
  REGION 1..203: note = tr|H5UDZ5|H5UDZ5_9ACTN GTP cyclohydrolase 1; OS = Gordonia terrae NBRC 100016 OX=1089454 GN=folE PE=3 SV=1
MSINERQDAVLAGPRSEFDQARAEAAVRELLLAVGEDPDREGLIRTPTRVANAYREMFAGLYTEPDDVLATTFDEDHDELVLVKDIPMYSTCEHHLVSFHGVAHVGYIPGTSGRVTGLSKLARLVDLYAKRPQVQERLTSQIADAMMRRLEPRGVIVVIEAEHLCMAMRGIRKPGATTTTSAVRGIFKTSAVSRGEALDLITR

SEQ ID NO: 8693 - protein, 203 aa, Gordonia westfalica
  REGION 1..203: note = tr|A0A1H2LJZ3|A0A1H2LJZ3_9ACTN GTP cyclohydrolase 1; OS = Gordonia westfalica OX=158898 GN=folE PE=3 SV=1
MTISEGRDAVVNGHRSEFDQARAEAAVRELLLAVGEDPDREGLVRTPTRVANAYREMFAGLYTDPDEVLATTFDEDHDELVLVKDIPMYSTCEHHLVSFHGVAHVGYIPGTSGRVTGLSKLARLVDLYAKRPQVQERLTSQVADAVMRKLEPRGVIVVIEAEHLCMAMRGIRKPGATTTTSAVRGIFKTSAVSRGEALDLITR

SEQ ID NO: 8694 - protein, 189 aa, Gordonibacter pamelaeae
  REGION 1..189: note = tr|A0A369LV53|A0A369LV53_9ACTN GTP cyclohydrolase 1; OS = Gordonibacter pamelaeae OX=471189 GN=folE PE=3 SV=1
MDAAKIEAGVRLILEGVGEDPEREGLRETPARVARMYEEVFAGLEQDPAEHFATTFDEHHEEMVLVRDIPFYSMCEHHLVPFFGKAHVAYIPAADGRICGLSKLARLVDVFAKRPQVQERLTSQIADTLIEQLHPQGVIVVLEAEHLCMSMRGVKKAGAKTTTSAVRGAFERSQATRAEALSLIFARRD

SEQ ID NO: 8695 - protein, 189 aa, Gordonibacter pamelaeae; identical to SEQ ID NO: 8694
  REGION 1..189: note = tr|D6EAM8|D6EAM8_9ACTN GTP cyclohydrolase 1; OS = Gordonibacter pamelaeae 7-10-1-b OX=657308 GN=folE PE=3; SV = 1

SEQ ID NO: 8696 - protein, 189 aa, Gordonibacter sp.
  REGION 1..189: note = tr|A0A369M1R1|A0A369M1R1_9ACTN GTP cyclohydrolase 1; OS = Gordonibacter sp. 28C OX=2078569 GN=folE PE=3 SV=1
MDAAKIEAGVRLILEGVGEDPEREGLRETPARVARMYQEVFAGLEQDPAEHFATTFDEHHEEMVLVRDIPFYSMCEHHLVPFFGMAHVAYIPAADGRICGLSKLARLVDVFAKRPQVQERLTSQIADTLIEQLHPQGVIVVLEAEHLCMSMRGVKKPGAKTTTSAVRGVFERSQATRAEALSLIFARRD

SEQ ID NO: 8697 - protein, 189 aa, Gordonibacter sp.; identical to SEQ ID NO: 7013
  REGION 1..189: note = tr|A0A1Y4FTN3|A0A1Y4FTN3_9ACTN GTP cyclohydrolase 1; OS = Gordonibacter sp. An232A OX=1965593 GN=folE PE=3 SV=1

SEQ ID NO: 8698 - protein, 189 aa, unidentified
  source 1..189: note = Gordonibacter urolithinfaciens
  REGION 1..189: note = tr|A0A1Y4FT62|A0A1Y4FT62_9ACTN GTP cyclohydrolase 1; OS = Gordonibacter urolithinfaciens OX=1335613 GN=folE PE=3; SV = 1
MDAAKIEAGVRLILEGVGEDPEREGLSETPARVARMYEEVFAGLEQDPAEHFATTFDEHHEEMVLVRDIPFYSMCEHHLVPFFGKAHVAYIPAADGRICGLSKLARLVDVFAKRPQVQERLTSQIADTLIEQLHPQGVIVVLEAEHLCMSMRGVKKAGAKTTTSAVRGAFERSQATRAEALSLIFARRD

SEQ ID NO: 8699 - protein, 192 aa, unidentified
  source 1..192: note = Gottschalkia acidurici
  REGION 1..192: note = tr|K0B395|K0B395_GOTA9 GTP cyclohydrolase 1; OS = Gottschalkia acidurici (strain ATCC 7906 / DSM 604 / BCRC 14475 / CIP 104303 / NCIMB 10678 / 9a) OX=1128398; GN = folE PE =3 SV=1
MEGDKSMDKPRIEAAVREILIAIGENPEREGLLDTPKRIAKMYEEIFSGLKEDPKEHLKVNFGEEGHEELVLVKDIPFYSVCEHHFVPFFGKAHVGYIPKDGKLTGLSKLARVVDTVAKRPQLQERITSTIADAVQEALDPYGVIVVVEAEHMCMTMRGVKKPGSKTVTSAVRGLFNKDAKARAEAMSLIKF

SEQ ID NO: 8700 - protein, 186 aa, unidentified
  source 1..186: note = Gottschalkia purinilytica
  REGION 1..186: note = tr|A0A0L0WCK7|A0A0L0WCK7_GOTPU GTP cyclohydrolase 1; OS = Gottschalkia purinilytica OX=1503 GN=folE PE=3 SV=1
MDKPRIESAVREILIGIGENPEREGLIDTPRRIAKMYEEIFSGLTEDPKKHLQVYFQEDQHEELVLVKDIPFYSVCEHHFVPFFGKAHVGYLPKNGKLTGLSKLARVVDTVAKRPQLQERITASVADTIVEVLDPYGVIVVVEAEHMCMTMRGIKKPGSKTVTSAVRGLFKNDAKARAEAMSLIKF

SEQ ID NO: 8701 - protein, 181 aa, unidentified
  source 1..181: note = Gottschalkiaceae bacterium
  REGION 1..181: note = tr|A0A521IW91|A0A521IW91_9FIRM GTP cyclohydrolase 1; OS = Gottschalkiaceae bacterium OX=2527676 GN=EWM50_07195; PE = 3 SV=1
MKDLLQATTDLVESLNPDYQNDPDMKGTPERLQKMYQHFFRNEDIEYHFEKKFPTTNDQMVVVRNIEVIGMCPHHFVPIIYRVSIGYIPDKWAIGLSKLARIAIGLASYPKLQENYTDEIVQAIKKHLKPKGVIVVVDGVHGCMRCRGVQQSESSTITSSIDGIFMDKDTAKQEFLKLIKL

SEQ ID NO: 8702 - protein, 307 aa, Gracilibacillus boraciitolerans
  REGION 1..307: note = tr|W4VFB7|W4VFB7_9BACI GTP cyclohydrolase FolE2; OS = Gracilibacillus boraciitolerans JCM 21714 OX=1298598; GN = folE2 PE=3 SV=1
MKEVSTNNFPNKEERHKLFGSVEPGKKIKPTEKDKMPDLQNTQKDFLFDINQVGIVNVKHPIQVSGKLKPTTQTTIGTFKMTSSINKNLKGTNMSRFTEMMQEYSKDNTFEISVSKLKIFAQKMAERLEHDNNQITVSFPWFFERSGPASDIKGMNHADAEISVMYDRNLGYRFEVSLQGTITTLCPCSKEISEYSAHNQRGLVTMKAELTGDFDEEQIDWKQALLEAAESNASARIHPVLKRPDEKMVTEQAYENPRFVEDMVRLVAADLFELSFVQKFTVTCQNEESIHLHDAFASISYDKSLHN

SEQ ID NO: 8703 - protein, 307 aa, Gracilibacillus dipsosauri
  REGION 1..307: note = tr|A0A317KYZ7|A0A317KYZ7_9BACI GTP cyclohydrolase FolE2 OS=Gracilibacillus dipsosauri OX=178340 GN=folE2; PE = 3 SV=1
MDRNYPIQLPNKLERHKLFGSVEPGEKTKPTEKEKMPDLQNTKKDFLFDIDHVGITNVKHPILVSSETKPTTQTTIGTLTMTSSIKKNHKGTNMSRFTELLHDYSNGEPFDISINKLKAFTKELTEKLEQEDTQLQISFPWFFERSGPSSDKTGMNHANAMITIHYHKNTGYQLEVALEGTVTTLCPCSKEISEYSAHNQRGIVKMAVRLAPDYTEDQKDWKLALLEAAESNASARIHPVLKRPDEKMVTEQAYENPRFVEDMVRLVAADLYELPFVEQFSVTCQNEESIHLHDAIATINYDKSLAR

SEQ ID NO: 8704 - protein, 188 aa, Gracilibacillus halophilus
  REGION 1..188: note = tr|N4WB94|N4WB94_9BACI GTP cyclohydrolase 1; OS = Gracilibacillus halophilus YIM-C55.5 OX=1308866 GN=folE; PE = 3 SV=1
MSNDTLSTSKVEDHIRGILEEIGEDPKREGLLNTPTRVAKMYKEVFEGVDVPPETALTTTFDAEGYDGMVVVKNIDYYTFCEHHLIPFFGKAHIGYIPDSQIIGLSKFARLVELVAKRPQVQERMTNQIASAIEKVLQPKGVIVSVEGQHLCMCARGVKKPGSKTVTTVKKGCFETSNDLVQEFMRSE

SEQ ID NO: 8705 - protein, 307 aa, Gracilibacillus halophilus
  REGION 1..307: note = tr|N4WCL1|N4WCL1_9BACI GTP cyclohydrolase FolE2; OS = Gracilibacillus halophilus YIM-C55.5 OX=1308866; GN = folE2 PE=3 SV=1
MKDERNVSLPNKAERHKLFGSVEPGPRSKPTKKHEMPDLQNTKQDFLFDIDHVGITNVKHPVIVNSHVTPHVQTTIGTFYMTSSVNKTHKGTNMSRFTELLNQYYENGELEVSLAFLKEFTAELSHRLEQEETTITVEFPWFFERRGPDSDKPGMNHADAKVTVHYHQTSGYHYTVSLKGTITTLCPCSKEISEYSAHNQRGNVSMEAELTGDFDETTTDWKLALLEAAESNASARIHPVLKRPDEKMVTEQAYENPRFVEDMVRLVAADLYEMPFIQKFTVTCQNEESIHLHDAIATITYDKSWHM

SEQ ID NO: 8706 - protein, 307 aa, Gracilibacillus kekensis
  REGION 1..307: note = tr|A0A1M7PKA6|A0A1M7PKA6_9BACI GTP cyclohydrolase FolE2 OS=Gracilibacillus kekensis OX=1027249 GN=folE2 PE=3; SV = 1
MKEASSKQLPNKSVRHKLFGSVQPGEKIKPTEKEKMPDLQNTKKDFLFDIDQVGIANVKHPVQVFSKTKPLAQTTIGTFKMTSSIQKNHKGTNMSRFTEMMQEYSENSTFDLSIASLKTFTKEMAERLEQDDNQITVSFPWFFERSGPASDMTGMNHADAEITILYEKNAGYHVTVSLQGTITTLCPCSKEISEYSAHNQRGIVSMKTELTGEYNEDEMDWKLALLEAAESNASARIHPVLKRPDEKMVTEQAYENPRFVEDMVRLVAADLYELPFVQKFSVTCQNEESIHLHDAIATISYDKSLHN

SEQ ID NO: 8707 - protein, 307 aa, Gracilibacillus orientalis
  REGION 1..307: note = tr|A0A1I4QAD5|A0A1I4QAD5_9BACI GTP cyclohydrolase FolE2 OS=Gracilibacillus orientalis OX=334253 GN=folE2; PE = 3 SV=1
MKDFNTKQLPNKTERHKLFGSVEPGEKKKPTEKEKMPDLQNTQKDFLFDIDQVGISNVKHPIQVTSKMKPTTQTTIGTFKMTSSIKKNHKGTNMSRFTEMIQNYSNGSPFDLSVSTLKQFTKEMADRLEQVDNQITVSFPWFFERSGPASDMAGMNHANAEITMIYDKNAGYKITVSLEGTITTLCPCSKEISEYSAHNQRGNVKMTAEFSADYQEDDVDWKQALLEAAESNASARIHPVLKRPDEKMVTEQAYENPRFVEDMVRLVAADLFEMEFIEKFTVTCENEESIHLHDAMASITYDKALHR

SEQ ID NO: 8708 - protein, 307 aa, Gracilibacillus ureilyticus
  REGION 1..307: note = tr|A0A1H9LDV0|A0A1H9LDV0_9BACI GTP cyclohydrolase FolE2 OS=Gracilibacillus ureilyticus OX=531814 GN=folE2; PE = 3 SV=1
MFSKLPKQLPNKQERHKLFGSVEPGEKTKPTEKEKMPDLQNTKKDFLFDINQVGIANVKQPIYISSNIKPYNQTTIGNFKLTSAINKDSKGTNMSRFTELMYEYSNGEPLMVSISELKRFTKELTDKLQQEDTQITVSFPWFFERSGPSSAITGMNHAEARLTVIYDRIHGYQVDVAIEGTVTTLCPCSKEISEYSAHNQRGIVKIGAQLTPNFDEEQVDWKAALLEAAESNASARIHPVLKRPDEKMVTEQAYENPRFVEDMVRLVAADLYEMPFVEKFSVTCQNEESIHLHDAIATISYDKTLHN

SEQ ID NO: 8709 - protein, 188 aa, Gracilibacter sp.
  REGION 1..188: note = tr|A0A101W5U6|A0A101W5U6_9FIRM GTP cyclohydrolase 1; OS = Gracilibacter sp. BRH_c7a OX=1734398 GN=folE PE=3 SV=1
MSIDLHKIERAVEMILEAIGEDPSREGLIDTPKRVAKFYKEAFAGLQEDPSKNLTVQFSENHEEMVMVKDIPIYSLCEHHLLPFVGKAHIAYIPRNGKVTGLSKLARVVEGYARRPQLQERLTSQIADTIKDTLNARGVLVVIEAEHMCMTIRGIKTPGSHTLTSAVRGIFQTNPATRAEAFSLISSK

SEQ ID NO: 8710 - protein, 192 aa, Gracilibacter sp.
  REGION 1..192: note = tr|A0A101VXS9|A0A101VXS9_9FIRM GTP cyclohydrolase 1; OS = Gracilibacter sp. BRH_c7a OX=1734398 GN=folE PE=3 SV=1
MLTSSINLGKIESAVRDILEAVGENPDREGLKDTPRRVARFYQEAFVGLHEDPSRHLTVQFSENHEEMIIVKDIPIYSMCEHHLLPFVGQAHIAYIPRHEKVTGLSKLARVAEAFAKRPQLQERLTGQIADTVQQILEARGVLVVIEAEHMCMTIRGIKKPGSKTVTSAVRGIFQTSSATRAEAFSLIMSSK

SEQ ID NO: 8711 - protein, 228 aa, unidentified
  source 1..228: note = Gracilimonas mengyeensis
  REGION 1..228: note = tr|A0A521EAM9|A0A521EAM9_9BACT GTP cyclohydrolase 1; OS = Gracilimonas mengyeensis OX=1302730 GN=folE PE=3 SV=1
MKTLDLDKITAEEIGEDHIGTSVQTPLRDDAFDKSDEEKIEIIQEHFAEIMKALGLDLEDDSLKGTPYRVAKMYVKEIFEGLNPKNKPVARQFSNNYDYSGMLVEKNIQVTSFCEHHFLPFIGKAHVAYIPSGKKVIGLSKINRIVDYYSRRPQVQERLTLQIADELQGALETEDVAVFIDSKHLCVSTRGIKDHSSTTITAEYRGAFQNEDTQQKFIDYIKTDTQID

SEQ ID NO: 8712 - protein, 299 aa, unidentified
  source 1..299: note = Gracilimonas mengyeensis
  REGION 1..299: note = tr|A0A521FD87|A0A521FD87_9BACT GTP cyclohydrolase FolE2 OS=Gracilimonas mengyeensis OX=1302730 GN=folE2 PE=3; SV = 1
MISNEIQRFYDPTFTVTEEYKESLPDLQNGPASLIEGANVPIQQVGISNFKLPLKFRRREGEPITLEASVDGYVSLEMDKKGINMSRIMRTFYKFQDKVFHLDRLEDILKAYKEDLDSQESFLRISFNYPMLMDSLRSGMKGYQYYKVQLEGRLDNYNQFQKYMHLDFEYSSACPCSYELSEHARETREVAAIPHSQRSVANVTVALKDEFFVEDLVQICRNALKTETQVMVKREDEQAFAEMNGAYQKFVEDAARLLYDELDSYNSIRDFVVRCVHMESLHSHDAVSRICKGLPNGLR

SEQ ID NO: 8713 - protein, 299 aa, Gracilimonas sp.
  REGION 1..299: note = tr|A0A316TQZ7|A0A316TQZ7_9BACT GTP cyclohydrolase FolE2 OS=Gracilimonas sp. 8A47 OX=2079485 GN=folE2 PE=3; SV = 1
MITTNLRRFYDPTFTVTDSYKESLPDLQNGPASLIEGANVPIQQVGISNFKLPLKYPTPSGELLTLETSVDGYVGLDAGKKGINMGRIMRTFYKFQHDVFHPDKLEEVLKAYQDDLESRSAFLKLSFSYPMMKESLRSGLAGYQYYNVSIEGKLDESGQFTSYMHLDFEYSSACPCSYELSEHARESRDLAAIPHSQRSVATITAQLNSEIFVDDMVEICREALQTETQVIVKREDEQAFAEMNGAFQKFVEDAARLLYDELNKDERIRDFVVRCAHLESLHSHDAVSRICKGVPNGLR

SEQ ID NO: 8714 - protein, 233 aa, Gracilimonas sp.
  REGION 1..233: note = tr|A0A316TQJ3|A0A316TQJ3_9BACT GTP cyclohydrolase 1; OS = Gracilimonas sp. 8A47 OX=2079485 GN=folE PE=3 SV=1
MSKDKNILDTLDLNHSEAEEIGDNHLSTSVQTPLRKDAFELTDSEKIEVIEKHFAEIMHALGLDLTDESLSGTPRRVAKMYVKEIFQGLNPVNRPDTRKFGNKYEYGDMVVVKNINVTSFCEHHFLPFIGKAHVAYFSSGKVIGLSKINRMVDYYARRPQVQERLTLQIAEELQESLETDDVAVFIESKHFCVSTRGIQDRESSTVTTEYRGRFKEKEIQQRFIDYMKAEMMV

SEQ ID NO: 8715 - protein, 225 aa, unidentified
  source 1..225: note = Gramella flava
  REGION 1..225: note = tr|A0A1L7I2X3|A0A1L7I2X3_9FLAO GTP cyclohydrolase 1; OS = Gramella flava JLT2011 OX=1229726 GN=folE PE=3 SV=1
MKIDKILNEIEEMGDAHASGSAETPLREDAFEISDSEKIEKIREDVRNIMHTLGLDLKDDSLKGTPQRVAKMFVNEIFGGLDPKRKPKASVFENKYKYGEMLVEKNITVYSTCEHHLLPIVGKAHVAYISNGTVVGLSKMNRIVDYYAKRPQVQERMTMQIVQELQNVLGTPDVACVIDAKHLCVNSRGIRDIESSTVTSEFGGAFQKKDVRREFLDYIKLDTTF

SEQ ID NO: 8716 - protein, 198 aa, unidentified
  source 1..198: note = Gramella flava
  REGION 1..198: note = tr|A0A1L7I8D6|A0A1L7I8D6_9FLAO GTP cyclohydrolase 1; OS = Gramella flava JLT2011 OX=1229726 GN=folE PE=3 SV=1
MSYSYFEQYDDERTDKLRESFSEIIQNVGENPDREGVLKTPERAAKAMQFLTQGYTMDAEKILQKAIFHEKYDEMVVVKDIELYSLCEHHMLPFFGKAHIAYIPNGKIVGLSKLPRVVDVFARRLQVQERLTHDILECLNKTLQPQGVAVVIEAVHMCMMMRGVQKQNSATTTSGFRGQFEKQETRNEFLKLISSDLR

SEQ ID NO: 8717 - protein, 225 aa, unidentified
  source 1..225: note = Gramella forsetii
  REGION 1..225: note = tr|A0M4Z9|A0M4Z9_GRAFK GTP cyclohydrolase 1; OS = Gramella forsetii (strain KT0803) OX=411154 GN=folE; PE = 3 SV=1
MKVDKILNEIEEMGDAHAGSSANNPLREDAFDLSDEEKIELIKKDVRNILDTLGLDLNDDSLKGTPQRVAKMFVNEIFSGLHPKRKPKASTFENKYQYGEMLVEKNITVYSTCEHHLLPIVGKAHVAYISNGTVVGLSKMNRIVDYFAKRPQVQERMTMQIVHELQNVLGTPDVACVIDAKHLCVNSRGIRDIESSTVTSEFGGAFKKKEVRREFLDYIKLDTSF

SEQ ID NO: 8718 - protein, 198 aa, unidentified
  source 1..198: note = Gramella forsetii
  REGION 1..198: note = tr|A0M1E0|A0M1E0_GRAFK GTP cyclohydrolase 1; OS = Gramella forsetii (strain KT0803) OX=411154 GN=folE; PE = 3 SV=1
MSYKYFEEYNEEITENMKNNFQEIIKGVGENPDREGIVKTPERAAKAMQFLTQGYSMDAEEILKKAVFEESYDEMVVVKDIELYSLCEHHMLPFFGKAHIAYIPNGKIIGLSKLPRVVDVFARRLQVQERLTHDILECLNETLQPQGVAVVIEAVHMCMMMRGVQKQNSATTTSGFRGQFKEIETRNEFLKLISSDLR

SEQ ID NO: 8719 - protein, 225 aa, Gramella gaetbulicola
  REGION 1..225: note = tr|A0A2T6AE27|A0A2T6AE27_9FLAO GTP cyclohydrolase 1; OS = Gramella gaetbulicola OX=703340 GN=folE PE=3 SV=1
MKIDKILNEIEEMGDAHASSSANTPLREDAFEKTDQEKVDLIKEDVKNILETLGLDLTDDSLKGTPLRVAKMFVNEIFAGLHPKRKPKASTFENKYKYGEMLVEKNITVYSTCEHHLLPIVGRAHVAYISNGTVVGLSKMNRIVDYFAKRPQVQERMTMQIVHELQNVLGTPDVACVIDAKHLCVNSRGIRDIESSTVTSEFGGAFKKKEVRREFLDYIKLDTSF

SEQ ID NO: 8720 - protein, 198 aa, Gramella gaetbulicola
  REGION 1..198: note = tr|A0A2T6AHF9|A0A2T6AHF9_9FLAO GTP cyclohydrolase 1; OS = Gramella gaetbulicola OX=703340 GN=folE PE=3 SV=1
MSYKFIEEYDKELTQGLKANFKEIIAGVGEDPDREGVLNTPERAAKAMQFLTQGYSMDAEEILKKAVFEETYDEMVVVKDIELYSLCEHHMLPFFGKAHIAYIPNGKIVGLSKLPRVVDVFARRLQVQERLTNDILECLNKTLKPRGVAVVIEAVHLCMMMRGVQKQNSATTTSGFRGQFKEIETRNEFLKLISSDLR

SEQ ID NO: 8721 - protein, 233 aa, unidentified
  source 1..233: note = Gramella jeungdoensis
  REGION 1..233: note = tr|A0A4Y8AVS7|A0A4Y8AVS7_9FLAO GTP cyclohydrolase 1; OS = Gramella jeungdoensis OX=708091 GN=folE PE=3 SV=1
MRHEETLLNIPINGTKLNGFTFDEIGDDHLYTGIETPLTSTAFDISDEEKKEKIAKLFSQIMEVMGLDLTDDSLKGTPKRVAKMYIEEIFSGLNPENKPKIALFENKYKYNQMLVEKNIQFYSNCEHHFVPIFGKVHVAYVSSGKVIGLSKINRIVQYFANRPQVQERLTNQIALELASILETDDIAVIIDAKHLCVASRGIKDDSSATVTSYYGGIFNQQEKIVELQNYLKL

SEQ ID NO: 8722 - protein, 225 aa, unidentified
  source 1..225: note = Gramella jeungdoensis
  REGION 1..225: note = tr|A0A4Y8AWM5|A0A4Y8AWM5_9FLAO GTP cyclohydrolase 1; OS = Gramella jeungdoensis OX=708091 GN=folE PE=3 SV=1
MINKIDEIGDDHVGSSAKTPLRADAFDISDAEKRKRIEASVRDILDTLGMDLEDDSIKGTPRRVAKAYVNEIFSGLNPANKPKLSTFDNNYKYGEMLVEKNITVYSTCEHHLLPIVGRAHVAYISDGNVIGLSKMNRIVDYYAKRPQVQERLTMQIVQALQKALGTDDVACVIDAKHLCVNSRGVRDIVSSTVTSEFGGKFKEKDTKREFLDYIKMDTDFKNIEA

SEQ ID NO: 8723 - protein, 225 aa, unidentified
  source 1..225: note = Gramella salexigens
  REGION 1..225: note = tr|A0A1L3J7Y5|A0A1L3J7Y5_9FLAO GTP cyclohydrolase 1; OS = Gramella salexigens OX=1913577 GN=folE PE=3 SV=1
MKVDKILNEIEEMGDAHAGSSANTPLREDAFELSDSEKIDLIKEDVKRIMDTLGLDLTDDSLKGTPLRVAKMYVNEIFSGLHPKRKPKASVFENKYKYGEMLVEKNITVYSTCEHHLLPIVGKAHVAYISNGTVVGLSKMNRIVDYFAKRPQVQERMTMQVVHELQNVLGTPDVACVIDAKHLCVNSRGIRDIESSTVTSEFGGAFKQKEIKREFLDYIKLDTSF

SEQ ID NO: 8724 - protein, 198 aa, unidentified
  source 1..198: note = Gramella salexigens
  REGION 1..198: note = tr|A0A1L3J3H7|A0A1L3J3H7_9FLAO GTP cyclohydrolase 1; OS = Gramella salexigens OX=1913577 GN=folE PE=3 SV=1
MSYKYFEEYDQEVTGNLKRNFQEIIDGVGEDPKREGLIKTPERAAKAMQFLTQGYDLDAEKILNKAVFKESYDEMVVVKDIELYSLCEHHMLPFFGKAHIAYIPNGKIIGLSKLPRVVDVFSRRLQVQERLTHDILECLNKTLEPRGVAVVIEAVHMCMMMRGVQKQNSATTTSGFRGQFKEIETRNEFLKLISSDLK

SEQ ID NO: 8725 - protein, 225 aa, Gramella sp.
  REGION 1..225: note = tr|A0A1H1PEL4|A0A1H1PEL4_9FLAO GTP cyclohydrolase 1; OS = Gramella sp. MAR_2010_102 OX=1250231 GN=folE PE=3 SV=1
MKIDKILNEIEEMGDAHAGSSAHTPLREDAFEKTDQEKIDLIKEDVKNILDTLGLDLTDDSLKGTPLRVAKMFVNEVFSGLHPKRKPKASTFENKYKYGEMLVEKNITVYSTCEHHLLPIVGKAHVAYISNGTVVGLSKMNRIVDYFAKRPQVQERMTMQIVHELQNVLGTPDVACVIDAKHLCVNSRGIRDIESSTVTSEFGGAFKQKDIRREFLDYIKLDTSF

SEQ ID NO: 8726 - protein, 225 aa, Gramella sp.
  REGION 1..225: note = tr|A0A2R3ZAJ1|A0A2R3ZAJ1_9FLAO GTP cyclohydrolase 1; OS = Gramella sp. SH35 OX=2126553 GN=folE PE=3 SV=1
MKIDKILNEIEEMGDAHAGSSAETPIRDDAFEKSDIEKIDLIKEDVRHIMETLGLDLTDDSLKGTPMRVAKMFVNEIFSGLHPKRKPKASVFENKYKYGEMLVEKNITVYSTCEHHLLPIVGKAHVGYISNGTVVGLSKMNRIVDYFAKRPQVQERMTMQIVQELQNVLGTEDVACVVDAKHLCVNSRGIRDIESSTVTSEFGGKFKQKDIRREFLDYIKLDTSF

SEQ ID NO: 8727 - protein, 217 aa, Granulibacter bethesdensis
  REGION 1..217: note = tr|Q0BW17|Q0BW17_GRABC GTP cyclohydrolase 1; OS = Granulibacter bethesdensis (strain ATCC BAA-1260 / CGDNIH1) OX=391165 GN=folE PE=3 SV=1
MTDAPSLRPSDLPAEAGMPETTRPSRQEAEQAVRTLLRWACDDPTREGLQETPSRVVRAYEEWFAGYHDDPVKVLERTFSETEGYDEIILLRGIRIESFCEHHMAPIIGRAHVAYLPRHRVVGISKLARVVEAFSKRLQIQEKLTAQIANTIDSVLQPHGVAVIVEAAHQCMTTRGVHKTGVSMVTSRMLGVFRTNPETRRELMAMINNPVQPSALG

SEQ ID NO: 8728 - protein, 232 aa, Granulibacter bethesdensis
  REGION 1..232: note = tr|W6I152|W6I152_9PROT GTP cyclohydrolase 1; OS = Granulibacter bethesdensis OX=364410 GN=folE PE=3 SV=1
MRCLHPLPLRKRTTELTDAPSLRPSDLPAEAGMPETTRPSRQEAEQAVRTLLRWACDDPTREGLQETPSRVVRAYEEWFAGYHDDPVKVLERTFSETEGYDEIILLRGIRIESFCEHHMAPIIGRAHVAYLPRHRVVGISKLARVVEAFSKRLQIQEKLTAQIANTIDSVLQPHGVAVIVEAAHQCMTTRGVHKTGVSMVTSRMLGVFRTNPETRRELMAMINNPVQPSALG

SEQ ID NO: 8729 - protein, 184 aa, Granulicatella sp.
  REGION 1..184: note = tr|A0A4Y9IUG4|A0A4Y9IUG4_9LACT GTP cyclohydrolase 1; OS = Granulicatella sp. WM01 OX=2558277 GN=folE PE=3 SV=1
MDKKKIEQAVKMIIEAVGEDGQREGLQETPQRIAKMYEEIFSGLGKNAQDHLSKSFEIVDDNMVIEKDIPFHSMCEHHFLPFYGKVHIAYVPNGRVAGLSKLARTVEVYAKKPQIQERLTIEIVEALMNYLDAKGAMVVIEAEHMCMNMRGIKKPGTSTVTSVARGVLEQDDTLKQEAYRLMGF

SEQ ID NO: 8730 - protein, 203 aa, unidentified
  source 1..203: note = Granulicella mallensis
  REGION 1..203: note = tr|G8NYD8|G8NYD8_GRAMM GTP cyclohydrolase 1; OS = Granulicella mallensis (strain ATCC BAA-1857 / DSM 23137 / MP5ACTX8) OX=682795 GN=folE PE=3 SV=1
MTKKSSKPSAESSNPTLASASLQQIYAELLTRIGEDPSRDGLLNTPKRMEKSMAFLTQGYTQSIDAVLHGALFDVHYDEMVIVKEIEFYSQCEHHLLPFFGRAHVAYVPNGKVIGLSKIPRIIDVFARRLQVQERLTQQIAQAIEDAIQPQGVGVIVEAQHLCMMMRGVEKQGSSTVTSAMLGVFKSQQQTRNEFLSLVERRR

SEQ ID NO: 8731 - protein, 206 aa, Granulicella pectinivorans
  REGION 1..206: note = tr|A0A1I6M2H5|A0A1I6M2H5_9BACT GTP cyclohydrolase 1; OS = Granulicella pectinivorans OX=474950 GN=folE PE=3 SV=1
MLALRPEETTEDQTTLSAASTQEIYRELLRRMGEDPDRDGLLRTPERMEKSTAFLTQGYTQSVEEVLHEALFDVDYDEMVIVRDIEFYSQCEHHLLPFFGKAHIAYVPQGKVIGLSKLPRIVDVFARRLQVQERLTRQIAEAITGAINPQGVAVIVEAEHLCMMMRGVQKQSSATVTSAMLGVFKTQLQTRNEFLSLVRTGRGNQQ

SEQ ID NO: 8732 - protein, 199 aa, Granulicella rosea
  REGION 1..199: note = tr|A0A239IXM9|A0A239IXM9_9BACT GTP cyclohydrolase 1; OS = Granulicella rosea OX=474952 GN=folE PE=3 SV=1
MAIASAPPELTLESATTQDLYRELLSRIGEDPTRDGLLGTPERMEKSMAYLTRGYTMDVTEVLHNALFDVDYDEMVIVKDIEFYSMCEHHLLPFFGKAHVAYVPKGKVIGLSKVARLVDVFARRLQVQERLTRQVADAIEEAIQPQGVAVIMEASHLCMMMRGVEKQHSATVTSAMLGVFKTQLQTRNEFLSLVRRGRD

SEQ ID NO: 8733 - protein, 206 aa, unidentified
  source 1..206: note = Granulicella sibirica
  REGION 1..206: note = tr|A0A4Q0T0I3|A0A4Q0T0I3_9BACT GTP cyclohydrolase 1; OS = Granulicella sibirica OX=2479048 GN=folE PE=3 SV=1
MLATLTKDQKTASPALADASTQEIYRELLRRMGEDPDRDGLLRTPERVEKSTAFLTKGYTQSVDEVLHNALFDVDYDEMVIVRDVEFYSQCEHHLLPFFGKAHVAYVPNGKVIGLSKIPRIIDVFARRLQVQERLTRQIAEAITDAIHPQGVAVILEAEHLCMMMRGVEKQQSNTVTSAMLGVFKTQMQTRNEFLSLVRTGRGSNL

SEQ ID NO: 8734 - protein, 202 aa, Granulicella sp.
  REGION 1..202: note = tr|A0A3N1JIV3|A0A3N1JIV3_9BACT GTP cyclohydrolase 1; OS = Granulicella sp. GAS466 OX=2485170 GN=folE PE=3 SV=1
MAGSEATLEAAALETLSTQELYREILRRIGEDPNRDGLVRTPERMEKSMAFLTRGYTMDVTEVLHDALFDVDYDEMVIVKDVEFFSMCEHHLLPFFGKAHIAYVPNGKVIGLSKIPRLVDVFARRLQVQERLTTQIGDAITEAINPQGVAVILEAQHLCMMMRGVEKQHSSTVTSAMLGVFKTQLQTRNEFLSLVRRNGNSF

SEQ ID NO: 8735 - protein, 196 aa, unidentified
  source 1..196: note = Granulicella tundricola
  REGION 1..196: note = tr|E8X3P9|E8X3P9_GRATM GTP cyclohydrolase 1; OS = Granulicella tundricola (strain ATCC BAA-1859 / DSM 23138 / MP5ACTX9) OX=1198114 GN=folE PE=3 SV=1
MSEQNQTLASASTQDLYREMIRRMGEDPDRDGLLRTPERMEKSTAFLTQGYKQTVTEVLHNALFDVDYDEMVIVKDIEFYSQCEHHLLPFFGKAHVAYVPNGKVIGLSKIARLVDVFARRLQVQERLTRQIAESIEEAIAPQGVGIILEAQHLCMMMRGVEKQHSHTVTSAMLGVFKTQLQTRNEFLSLVRHKTTL

SEQ ID NO: 8736 - protein, 183 aa, Granulosicoccus antarcticus
  REGION 1..183: note = tr|A0A2Z2NU04|A0A2Z2NU04_9GAMM GTP cyclohydrolase 1; OS = Granulosicoccus antarcticus IMCC3135 OX=1192854 GN=folE; PE = 3 SV=1
MDTMKTAYLNILESVGEDPERDGLRDTPERAAKAMAFLTHGYQQTLEEVVNGAIFESESDEMVIVKNIELYSLCEHHLLPFIGKCHVAYLPRGKVIGLSKIARIVDMYARRLQIQESLTHQIATAVLEVTGGRGVGVIIESQHMCMMMRGVQKQNSSMTTSSMLGLFRKDINTRNEFLQLVKD

SEQ ID NO: 8737 - protein, 221 aa, unidentified
  source 1..221: note = Grimontella sp.
  REGION 1..221: note = tr|A0A318GFZ1|A0A318GFZ1_9GAMM GTP cyclohydrolase 1; OS = Grimontella sp. AG753 OX=2183905 GN=folE PE=3 SV=1
MSSLSKEAALVHEALVARGLETPLRPPVDMDNETRKRLIAGHMTEIMQLLNLDLNDDSLMETPHRIAKMYVDEIFSGLDYANFPKITVIENKMKVDEMVTVRDITLTSTCEHHFVTIDGKATVAYIPKESVIGLSKINRIVQFFAQRPQVQERLTQQILTALQTLLGTNNVAVSIDAVHYCVKARGIRDATSATTTTSLGGLFKSSQNTRQEFLRAVRHHN

SEQ ID NO: 8738 - protein, 252 aa, unidentified
  source 1..252: note = Grimontia celer
  REGION 1..252: note = tr|A0A128F0Q0|A0A128F0Q0_9GAMM Putative GTP cyclohydrolase 1 type 2 OS=Grimontia celer OX=1796497; GN = GCE9029_01787 PE=4 SV=1
MNNYQLESLLNDFLKPFAIKDYCPNGMQVEGKAEVKKIVTGVTASQALIDAAIEQRADALLVHHGYFWRGEAEPLKGMKFKRIKALIENGINLYAYHLPLDVHPDVGNNAQLAKLLGIKQLGGLEDGNPNSVAVWGELPVTLSAEDFSDLLARKLNRQPLHIESGIAKSIKKVGWCTGGGQDFIDLAASKGMDAFVSGEISERTTYSARELGVHYFSAGHHATERYGVKALGEWLASEHGFNVSFIDIDNPV

SEQ ID NO: 8739 - protein, 218 aa, unidentified
  source 1..218: note = Grimontia celer
  REGION 1..218: note = tr|A0A128EXR0|A0A128EXR0_9GAMM GTP cyclohydrolase 1; OS = Grimontia celer OX=1796497 GN=folE PE=3 SV=1
MTALSDSAKRVREALIARGIETPMQAGSSMTAQEKKEKIEYHMREILTAMDLDLEDDSLTETPIRIAKMYVDEVFSGLDYTNFPKITVIDNKMGCDEMVRVKDITLTSTCEHHLVTIDGKCTVAYLPKSKIIGLSKINRIVRFFSQRPQVQERLTRQILVALQTLLETDNVAVHMNATHYCVKARGVMDATSATTTTALGGIFKSNASTRAEFLHGIG

SEQ ID NO: 8740 - protein, 218 aa, Grimontia hollisae
  REGION 1..218: note = tr|A0A377HM81|A0A377HM81_GRIHO GTP cyclohydrolase 1; OS = Grimontia hollisae OX=673 GN=folE PE=3 SV=1
MTALSDSAKRVREALIACGIETPMQAGSSMTAQEKKEKIEYHMREILSVIDLDLDDDSLTETPARIAKMYVDEIFSGLDYRNFPKITVIDNKMGCDEMVRVKDITLTSTCEHHLVTIDGKCTVAYLPKNKIIGLSKINRIVRFFAQRPQVQERLTRQILVALQTLLETENVAVHMNATHYCVKARGVMDATSATTTTALGGVFKSNASTRAEFLHGIG

SEQ ID NO: 8741 - protein, 218 aa, Grimontia hollisae; identical to SEQ ID NO: 8740
  REGION 1..218: note = tr|D0IB23|D0IB23_GRIHO GTP cyclohydrolase 1; OS = Grimontia hollisae CIP 101886 OX=675812 GN=folE PE=3; SV = 1

SEQ ID NO: 8742 - protein, 217 aa, unidentified
  source 1..217: note = Grimontia indica
  REGION 1..217: note = tr|R1H0I7|R1H0I7_9GAMM GTP cyclohydrolase 1; OS = Grimontia indica OX=1056512 GN=folE PE=3 SV=1
MTALSDSAKRVREALIARGIETPMQAGSPMTAQEKKEKIEYHMREILTAMDLDLEDDSLTETPMRIAKMYVDEVFSGLDYANFPKITVIDNKMGCDEMVRVKNITLTSTCEHHLVTIDGQCTVAYLPKNKIIGLSKINRIVRFFSQRPQVQERLTRQILVALQTLLETDNVAVHMNATHYCVKARGVMDATSETTTTALGGIFKSNSATRAEFLHGI

SEQ ID NO: 8743 - protein, 252 aa, unidentified
  source 1..252: note = Grimontia marina
  REGION 1..252: note = tr|A0A128ESJ2|A0A128ESJ2_9GAMM Putative GTP cyclohydrolase 1 type 2 OS=Grimontia marina OX=646534; GN = GMA8713_00217 PE=4 SV=1
MNNYQLESVLNEFLKPFAIKDYCPNGMQIEGKEEVRKIVTGVTASQALIEAAIEQDADALLVHHGYFWRGESEPLKGMKFKRIKSLIESGINLYAYHLPLDVHPEVGNNAQLATLLGIEQLGGLEDGNPNSVAVWGELPSSLSAKDFGKLLATKLNREPLHIESAIAKPIKKVGWCTGGGQDFIDLAASKGMDAFVSGEISERTTYSARELGIHYFSAGHHATERYGVKALGQWLADQHGFEVTFIDIDNPV

SEQ ID NO: 8744 - protein, 218 aa, unidentified
  source 1..218: note = Grimontia marina
  REGION 1..218: note = tr|A0A128FFM2|A0A128FFM2_9GAMM GTP cyclohydrolase 1; OS = Grimontia marina OX=646534 GN=folE PE=3 SV=1
MTALNDSAKRVREALIARGIETPMQAGSSMTAQEKKEKIEYHMREILTAMDLDLEDDSLTETPIRIAKMYVDEVFSGLDYTNFPKITVIDNKMGCDEMVRVKDITLTSTCEHHLVTIDGKCTVAYLPKNKIIGLSKINRIVRFFSQRPQVQERLTRQILVALQTLLETDNVAVHMNATHYCVKARGVMDATSATTTTALGGIFKSNASTRAEFLHGIG

SEQ ID NO: 8745 - protein, 217 aa, Grimontia sp.; identical to SEQ ID NO: 8742
  REGION 1..217: note = tr|A0A0F5ZVE0|A0A0F5ZVE0_9GAMM GTP cyclohydrolase 1; OS = Grimontia sp. AD028 OX=1581149 GN=folE PE=3 SV=1

SEQ ID NO: 8746 - protein, 191 aa, unidentified
  source 1..191: note = Gryllotalpicola sp.
  REGION 1..191: note = tr|A0A387BGT0|A0A387BGT0_9MICO GTP cyclohydrolase 1; OS = Gryllotalpicola sp. 2DFW10M-5 OX=2419771 GN=folE PE=3; SV = 1
MTGIDRARVEAAVAELLAAIGEDPARPGLRETPSKVADAYAEFFSGLGEDPIAPLRETIPVGDVEPELVIVRDLEFRSVCEHHLLPFLGRAHLAYLPAEKVVGLGRLPQLVDTLAARPQLQERLTEQIADALVQALEPRGVVVVLDAQHQCVTTRGARQVHSTTVTVASRGELDDPVRRAEVITLIGSAAQ

SEQ ID NO: 8747 - protein, 264 aa, Gulbenkiania indica
  REGION 1..264: note = tr|A0A0K6H4S2|A0A0K6H4S2_9NEIS GTP cyclohydrolase FolE2 OS=Gulbenkiania indica OX=375574 GN=folE2 PE=3 SV=1
MNQTTIPDVQSTQDTRNLPINKVGIKSIRHPVKVAERAGGVQHTIGLFNMYVHLPAEFKGTHMSRFVEILNAQEREMSVAHFESVVRQMVERLEARSGYVEMSFPYFVNKTAPVSGVQSLLDYEVTYIGEMVEGEYRFTMKVVVPVTSLCPCSKKISQYGAHNQRSHVTITAKTRDYVWIEELIDIAERQASCELYGLLKRPDEKYVTERAYENPKFVEDLVRDVAAELDADGRVQAYVVESENFESIHNHSAYALIERDKLAG

SEQ ID NO: 8748 - protein, 259 aa, Gulosibacter sp.
  REGION 1..259: note = tr|A0A1R4FUR4|A0A1R4FUR4_9MICO GTP cyclohydrolase 1; OS = Gulosibacter sp. 10 OX=1255570 GN=FM112_06670 PE=3 SV=1
MAVDRTRAAAAIREFLAACGLAEDDPRLTRTPARVAAAAEELFAGEGADPVPALREGRISVDASADAAAGAAAGGGGLSDGAASASAAPDGVAEGDVAAGDPGEGDRGGAEDGAASPADAGVPVSAEDSAGNLVLVRNVRFRSMCEHHLLPFDGWVHLAYLPGDSIIGFGRLYDLVETVSSRLSLQERLGEDLVEAIMEGLDALGALAVVEARQGCVADRGPRQADSDSVTLAARGSLLDPQARADALRLISLGGQDRE

SEQ ID NO: 8749 - protein, 262 aa, unidentified
  source 1..262: note = Guyparkeria sp.
  REGION 1..262: note = tr|A0A426QPQ0|A0A426QPQ0_9GAMM GTP cyclohydrolase FolE2 OS=Guyparkeria sp. SCN-R1 OX=2341113 GN=folE2 PE=3; SV = 1
MNSHDMPDVQSSHDARDIAIDQVGIKAIRHPMTFLDHGQEHPTVAECQLTVGLPADKKGTHMSRFVALLNEGPLRLSVESLAEWTEAMIERLEAHSGEAHFAFPYFIAKDAPVSGQGAMMDYDVTLIGRVEHGRAHVGLKLVIPVTSLCPCSKEISAYGAHNQRSHITVETEISDPALSLRDLITAVEDQGSCPLWGLLKRPDEKWITEYAFDNPKFVEDMVRDVANALEGYPGINGFSISVENFESIHNHSAWAVIHRPGR

SEQ ID NO: 8750 - protein, 202 aa, unidentified
  source 1..202: note = Guyparkeria sp.
  REGION 1..202: note = tr|A0A426QER3|A0A426QER3_9GAMM GTP cyclohydrolase 1; OS = Guyparkeria sp. SCN-R1 OX=2341113 GN=folE PE=3 SV=1
MAALHEDDFPEPVGADEKRVETIAGAVKTILAELGEDTAREGLVDTPKRVAKALLYLNQGLNQRVESAIGNALFESDNDEMVVVRNIEFYSLCEHHMLPIIGHVDIGYIPQGKVLGLSKLARIVDLYARRLQIQENMTQQIAEAVESATGAAGVAVQVRAAHMCMAMRGVEKVESETITSRMTGQFRNSAATRNEFLQLVAR

SEQ ID NO: 8751 - protein, 187 aa, unidentified
  source 1..187: note = Gynuella sunshinyii
  REGION 1..187: note = tr|A0A0C5W1Q2|A0A0C5W1Q2_9GAMM GTP cyclohydrolase 1; OS = Gynuella sunshinyii YC6258 OX=1445510 GN=folE PE=3 SV=1
MIDKLTENYRDIIVQLGENPDREGLLDTPQRAAKAMAFLTEGYNQSLEEIVNGAIFESEMDEMVVVEGIEFYSLCEHHLLPFIGTASIAYIPDGKVLGLSKFARIVDMFARRLQIQENLTRQIAHAISDITQCKGVGVVLEAKHMCMMMRGVQKQNSVMSTSMMLGSFRKSQATRSEFLTLIGQRKP

SEQ ID NO: 8752 - protein, 176 aa, unidentified
  source 1..176: note = Gynuella sunshinyii
  REGION 1..176: note = tr|A0A0C5VFV0|A0A0C5VFV0_9GAMM GTP cyclohydrolase 1; OS = Gynuella sunshinyii YC6258 OX=1445510 GN=folE PE=3 SV=1
MLNNLGENVEREGLLDTPKRYAKAMMYLTQGYKADIKEVINGALFSSTATGVVVVKDIDFFSMCEHHILPFHGKVHIAYIPSGKVLGLSKFARVVEVFARRLQIQEQLNEQIADAIEDILEPKGVIVSIEAAHMCMSMRGVQKIGSKTLTTVARGELKDDQKCNETLFKFFNSSVS

SEQ ID NO: 8753 - protein, 368 aa, unidentified
  source 1..368: note = Haematobacter genomosp.
  REGION 1..368: note = tr|A0A212AEY2|A0A212AEY2_9RHOB GTP cyclohydrolase FolE2 OS=Haematobacter genomosp. 1 OX=366618 GN=folE2 PE=3; SV = 1
MNAPTKPDLTPAAPDREKAKAALDLLRSWAALATPEEVATLDPAIARLLPGREVANYPDLNRSYPADFVADEAYRATLPDLQNGPSSLIVGAHRPIQQVGISNFRLPIRYRLRAGGEISLETSVTGTVSLASGKKGINMSRIMRSFYAHAERSFSFEVMSSVLDDYKADLGSCDARLMMRFSFPARVKALRSGLEGYQYYDIALEMIETDGRRERFVHLDYVYSSTCPCSLELSEHARQVRGQLATPHSQRSVARISVALAGGRTLWFEDLIDICRAAVPTETQVMVKREDEQAFAELNAANPIFVEDAARSFAERLLGDARIGDFRVAASHQESLHSHDAVSILTEGPTFAQRSVDPRFLATLHHSG

SEQ ID NO: 8754 - protein, 368 aa, Haematobacter massiliensis
  REGION 1..368: note = tr|A0A086YB82|A0A086YB82_9RHOB GTP cyclohydrolase FolE2 OS=Haematobacter massiliensis OX=195105 GN=folE2; PE = 3 SV=1
MNAPTKPDLAPAAPDRQDAKAALDLLRNWAALATPEEVATLDPAIARLLPGREVSNYPDLNRSYPADFVADEAYRATLPDLQNGPSSLIVGAHRPIQQVGISNFRLPIRYRLRAGGEISLETSVTGTVSLASGKKGINMSRIMRSFYAHAERSFSFEVMSSVLDDYKADLGSCDARLMMRFSFPAKVKALRSGLEGYQYYSIALEMIETDGRRERFVHLDYVYSSTCPCSLELSEHARQVRGQLATPHSQRSVARISVALAGGRTLWFEDLIDICRAAVPTETQVMVKREDEQAFAELNAANPIFVEDAARSFAERLLDDARIGDFRVAASHQESLHSHDAVSILTEGPTFAQRSVDPRFLATLHHSG

SEQ ID NO: 8755 - protein, 368 aa, Haematobacter missouriensis
  REGION 1..368: note = tr|A0A212ASY3|A0A212ASY3_9RHOB GTP cyclohydrolase FolE2 OS=Haematobacter missouriensis OX=366616 GN=folE2; PE = 3 SV=1
MNAPTKPDLTPIAPDREEAKAALDLLRRWAVLATPEEVATLDPAIARLLPGREVSNYPDLNRSYPADFVADEAYRATLPDLQNGPSSLIVGAHRPIQQVGISNFRLPIRYRLRAGGEISLETSVTGTVSLASGKKGINMSRIMRSFYAHAERSFSFEVMSSVLDDYKADLGSCDARLMMRFSFPARVKALRSGLEGYQYYDIALEMIETDGRRERFVHLDYVYSSTCPCSLELSEHARQARGQLATPHSQRSVARISVALAGGRTLWFEDLIDLCRVAVPTETQVMVKREDEQAFAELNAANPIFVEDAARSFAERLMDDARIGDFRVAASHQESLHSHDAVSILTEGPTFSQRSVDPRFLATLHHSG

SEQ ID NO: 8756 - protein, 204 aa, unidentified
  source 1..204: note = Haematospirillum jordaniae
  REGION 1..204: note = tr|A0A143DH27|A0A143DH27_9PROT GTP cyclohydrolase 1; OS = Haematospirillum jordaniae OX=1549855 GN=folE PE=3 SV=1
MSTVQSSVTQGKASERPSRQDAEEAVRTLLRWAGDDPAREGLLETPARVARAWEEWCSGYGNDPEEYLRRTFEEVEGYDEMVILKDITFESHCEHHLAAIIGQAHVAYLPDRRVVGISKLARIVDLYAKRLQIQEKMTAQIAGAIQDVLEPKGVAVVIEASHQCMTTRGVHKTGVNMVTSRMLGAFREDSATRREFLAVISSTR

SEQ ID NO: 8757 - protein, 218 aa, Haemophilus aegyptius
  REGION 1..218: note = tr|A0A3S4XY20|A0A3S4XY20_HAEAE GTP cyclohydrolase 1; OS = Haemophilus aegyptius OX=197575 GN=folE PE=3 SV=1
MSKISLDAQNVRNALIEKGIETPMIDPTQAKNERRESIAKHMHEVMKLIGLDLRDDSLEETPNRLAKMFIDEIFSGMDYANFPKMTKIKNQMKVSEMVQVNDITLTSTCEHHFVTIDGKVCVAYYPKDWVIGLSKINRIVSFFAQRPQVQERLTEQLLTAFQTILETDDVAVYVKATHFCVKARGIRDTNSYTVTSAYGGVFLEDRDTRKEFLATVQK

SEQ ID NO: 8758 - protein, 218 aa, Haemophilus ducreyi
  REGION 1..218: note = sp|Q7VM90|GCH1_HAEDU GTP cyclohydrolase 1; OS = Haemophilus ducreyi (strain 35000HP / ATCC 700724); OX = 233412 GN=folE PE=3 SV=1
MSIISSEAQKVRQALIKKGIETPTIELTQDKDSRRAEIQQHMRSVLELLGLDLRDDSLEETPHRLAKMYVDEIFSGLDYATFPKITTIENRMKVSEMVLVDDITLTSTCEHHFVTIDGKVAVAYYPKKWVIGLSKINRVVQFFAQRPQVQERFTEQILTAFQTILETEDVAIYVKATHFCVKCRGIKDSNSYTVTSAFGGVFLDDRETRKEFLNLIHK

SEQ ID NO: 8759 - protein, 218 aa, Haemophilus ducreyi
  REGION 1..218: note = tr|A0A448KKG0|A0A448KKG0_HAEDC GTP cyclohydrolase 1; OS = Haemophilus ducreyi OX=730 GN=folE PE=3 SV=1
MSIISSEAQKVRKALIKKGIETPTIELTQDKDSRRAEIEQHMRSVLELLGLDLRDDSLEETPHRLAKMYVDEIFSGLDYATFPKITTIENRMKVSEMVLVDDITLTSTCEHHFVTIDGKVAVAYYPKKWVIGLSKINRVVQFFAQRPQVQERFTEQILTAFQTILETEDVAIYVKAMHFCVKCRGIKDSNSYTVTSAFGGVFLDDRETRKEFLNLIHK

SEQ ID NO: 8760 - protein, 218 aa, unidentified
  source 1..218: note = [Haemophilus] felis
  REGION 1..218: note = tr|A0A1T0B235|A0A1T0B235_9PAST GTP cyclohydrolase 1; OS = [Haemophilus] felis OX=123822 GN=folE PE=3 SV=1
MDKISSEAEKVRNALLQKGIETPMINLSLDKQERRIGIENHMREVMKLIGLDLRDDSLEETPVRLAKMFVDEIFSGLDYANFPKITNIENRMKVSEMVLVNDVTLTSTCEHHFVTIDGKVSVAYYPKKWVIGLSKINRIVSFFAQRPQVQERLTEQILLAFQTILETEDVAVYVKATHFCVKCRGIKDTNSYTVTSAFGGVFLDDRETRKEFISLINK

SEQ ID NO: 8761 - protein, 233 aa, Haemophilus haemoglobinophilus
  REGION 1..233: note = tr|A0A377HWA0|A0A377HWA0_9PAST GTP cyclohydrolase 1; OS = Haemophilus haemoglobinophilus OX=733 GN=folE PE=3 SV=1
MFGIFERYNNLWEVVMSNLSPEAIKVRNALIEKGIETPMIDVTQDKDQRRQGIEQHMREVMKLIGLDLSDDSLEETPGRLSKMFIDEIFSGLDYTNFPKITNIENRMKVSEMVLVNDVTLTSTCEHHFVTIDGKVSVAYYPKKWVIGLSKINRVVAFFAQRPQVQERLTEQILLAFQTILETEDVAVYVKAIHFCVKCRGIKDTNSYTVTSAFGGVFLDDRETRKEFLTLINK

SEQ ID NO: 8762 - protein, 218 aa, Haemophilus haemolyticus
  REGION 1..218: note = tr|A0A0M3G8C6|A0A0M3G8C6_HAEHA GTP cyclohydrolase 1; OS = Haemophilus haemolyticus OX=726 GN=folE PE=3 SV=1
MSKISLDALNVRHALIEKGIETPMIDPTQAKDERRESIAKHMHEVMKLIGLDLRDDSLEETPNRLAKMFIDEIFSGMDYANFPKMTKIKNQMKVSEMVQVNDITLTSTCEHHFVTIDGKVCVAYYPKDWVIGLSKINRIVSFFAQRPQVQERLTEQLLTAFQTILETDDVAVYVKATHFCVKARGIRDTNSYTVTSAYGGVFLEDRDTRKEFLATVQK

SEQ ID NO: 8763 - protein, 218 aa, Haemophilus haemolyticus
  REGION 1..218: note = tr|A0A0M3G233|A0A0M3G233_HAEHA GTP cyclohydrolase 1; OS = Haemophilus haemolyticus OX=726 GN=folE PE=3 SV=1
MSKISLDALNVRNALIEKGIETPMIDPTQAKDERRESIAKHMHEVMKLIGLDLRDDSLEETPNRLAKMFIDEIFSGMDYANFPKMTKIKNQMKVSEMVQVNDITLTSTCEHHFVTIDGKVCVAYYPKDWVIGLSKINRIVSFFAQRPQVQERLTEQLLTAFQTILETDDVAVYVKATHFCVKARGIRDTNSYTVTSAYGGVFLEDRDTRKEFLATVQK

SEQ ID NO: 8764 - protein, 218 aa, Haemophilus influenzae
  REGION 1..218: note = sp|A5UEW4|GCH1_HAEIG GTP cyclohydrolase 1; OS = Haemophilus influenzae (strain PittGG) OX=374931; GN = folE PE=3 SV=1
MSKISLDALNVRNALIEKGIETPMIDPTQAKNERRESIAKHMHEVMKLIGLDLRDDSLEETPNRLAKMFIDEIFSGMDYANFPKMTKIKNQMKVSEMVQVNDITLTSTCEHHFVTIDGKVCVAYYPKDWVIGLSKINRIVSFFAQRPQVQERLTEQLLTAFQTILETDDVAVYVKATHFCVKARGIRDTNSYTVTYAYGGVFLEDRDTRKEFLATVQK

SEQ ID NO: 8765 - protein, 251 aa, Haemophilus influenzae
  REGION 1..251: note = tr|A0A2S9RX49|A0A2S9RX49_HAEIF Nif3-like dinuclear metal center hexameric protein OS=Haemophilus influenzae; OX = 727 GN=BV171_00630 PE=4 SV=1
MNNLELEQLINQKLSSDKINDYAPNGLQVEGKTEIKKIITGVTASQALIDYAISKNADAILVHHGYFWKSENPCIRGMKGKRIKALLVNDINLYGYHLPLDVHPELGNNAQLAKLLDIENLQPLEKGSVSIPVWGKLKEPMTGKDFAEKIEKVLNRKPLICIENGPHLIRKIGICTGGGQGYIDLAAEQGCDAFITGEVSEQTIHSAREQGLHFFSAGHHATERYGIKALGEWLAKEYDFDVEFKDIDNPA

SEQ ID NO: 8766 - protein, 218 aa, Haemophilus paracuniculus
  REGION 1..218: note = tr|A0A1T0ASV6|A0A1T0ASV6_9PAST GTP cyclohydrolase 1; OS = Haemophilus paracuniculus OX=734 GN=folE PE=3 SV=1
MSQLSLEAQQVRQALLEKGIETPTITLTKDKDSRRAEIQQHLRSVLELLGLDLRDDSLEETPHRLAKMYVDEIFSGLDYATFPKITKIKNQMKVSEMVLVDDITLTSTCEHHFVTIDGKVAVAYYPKNWVIGLSKINRVVQFFAQRPQVQERFTEQLLTAFQTILETDDVAVYVKATHFCVKCRGVKDTNSYTVTSAFGGVFLEDRETRKEFLTLINK

SEQ ID NO: 8767 - protein, 224 aa, Haemophilus parahaemolyticus
  REGION 1..224: note = tr|A0A377I1X5|A0A377I1X5_HAEPH GTP cyclohydrolase 1; OS = Haemophilus parahaemolyticus OX=735 GN=folE PE=3 SV=1
MTTISPILGLSDEAQKVRNALLAKGIETPTVPHTKDKDSRRAEIQAHMRSVLELLGLDLQDDSLEETPNRLAKMYVDEIFSGLDYATFPKITNIENRMKVSEMVLVDDITLTSTCEHHFVTIDGKVAVAYYPKKWVIGLSKINRVVQFFAQRPQVQERFTEQILTAFQTILETEDVAVYVKATHFCVKCRGVKDTNSYTVTSAFGGAFLDDRDVRKEFLTLIKK

SEQ ID NO: 8768 - protein, 224 aa, Haemophilus parahaemolyticus
  REGION 1..224: note = tr|A0A5C1QR53|A0A5C1QR53_HAEPH GTP cyclohydrolase 1; OS = Haemophilus parahaemolyticus OX=735 GN=folE PE=3 SV=1
MTTISPILGLSDEAQKVRNALLAKGIETPTVPHTKDKDSRRAEIQDHMRSVLELLGLDLQDDSLEETPNRLAKMYVDEIFSGLDYATFPKITNIENRMKVSEMVLVDDITLTSTCEHHFVTIDGKVAVAYYPKKWVIGLSKINRVVQFFAQRPQVQERFTEQILTAFQTILETEDVAVYVKATHFCVKCRGVKDTNSYTVTSAFGGVFLDDRDVRKEFLTLIKK

SEQ ID NO: 8769 - protein, 218 aa, Haemophilus parainfluenzae
  REGION 1..218: note = tr|A0A369ZGE5|A0A369ZGE5_HAEPA GTP cyclohydrolase 1; OS = Haemophilus parainfluenzae OX=729 GN=folE PE=3 SV=1
MNAISPDAENVRRALIAKGIETPMIDPTQCKDERRAAIASHMREVMKLIGLDLHDDSLEETPNRLAKMFIDEIFSGMDYANFPKMTKIKNQMKVSEMVQVNDITLTSTCEHHFVTIDGNVAVAYYPKDWVIGLSKINRIVAFFAQRPQVQERLTEQLLTAFQTILETDDVAVYVKATHFCVKARGVKDTHSYTVTSAYGGVFLEDRETRKEFLSSIQK

SEQ ID NO: 8770 - protein, 218 aa, Haemophilus parainfluenzae
  REGION 1..218: note = tr|F0EU69|F0EU69_HAEPA GTP cyclohydrolase 1; OS = Haemophilus parainfluenzae ATCC 33392 OX=888828 GN=folE; PE = 3 SV=1
MNSISPDAENVRRALVAKGIETPMINPTQCKDERRAAIASHMREVMKLIGLDLRDDSLEETPNRLAKMFIDEIFSGMDYANFPKMTKIKNQMKVSEMVQVNDITLTSTCEHHFVTIDGNVAVAYYPKDWVIGLSKINRIVAFFAQRPQVQERLTEQLLTAFQTILETDDVAVYVKATHFCVKARGVKDTHSYTVTSAYGGVFLEDRETRKEFLSSIQK

SEQ ID NO: 8771 - protein, 224 aa, Haemophilus paraphrohaemolyticus
  REGION 1..224: note = tr|A0A369ZL55|A0A369ZL55_9PAST GTP cyclohydrolase 1; OS = Haemophilus paraphrohaemolyticus OX=736 GN=folE PE=3; SV = 1
MTTISPILGLSDEAQKVRNALLAKGIETPTVSHTKDKDSRRAEIQAHMRSVLELLGLDLRDDSLEETPNRLAKMYVDEIFSGLDYATFPKITNIENRMKVSEMVLVDDITLTSTCEHHFVTIDGKVAVAYYPKKWVIGLSKINRVVQFFAQRPQVQERFTEQILTAFQTILETEDVAVYVKATHFCVKCRGVKDTNSYTVTSAFGGAFLDDRDVRKEFLTLIKK

SEQ ID NO: 8772 - protein, 224 aa, Haemophilus paraphrohaemolyticus; identical to SEQ ID NO: 8771
  REGION 1..224: note = tr|I2NJ71|I2NJ71_9PAST GTP cyclohydrolase 1; OS = Haemophilus paraphrohaemolyticus HK411 OX=1095743; GN = folE PE=3 SV=1

SEQ ID NO: 8773 - protein, 218 aa, Haemophilus parasuis
  REGION 1..218: note = tr|A0A084EYE0|A0A084EYE0_HAEPR GTP cyclohydrolase 1; OS = Haemophilus parasuis OX=738 GN=folE PE=3 SV=1
MSNISPEAQSVRDALLAKGIETPTVCHQKDKDSRRNEIQQHMRAVLELLGLDLRDDSLEETPHRLAKMYMDEIFSGLDYKTFPKITKIKNQMKVSEMVLVDDITLTSTCEHHFVTIDGKVAVAYYPKDWVIGLSKINRVVQFFAQRPQVQERFTEQILTAFQTILETEDVAVYVKATHFCVKCRGVKDTHSQTMTSAFGGVFLQDRDTRKEFLSLINK

SEQ ID NO: 8774 - protein, 218 aa, Haemophilus parasuis; identical to SEQ ID NO: 8605
  REGION 1..218: note = tr|A0A143CEK7|A0A143CEK7_HAEPR GTP cyclohydrolase 1; OS = Haemophilus parasuis OX=738 GN=folE PE=3 SV=1

SEQ ID NO: 8775 - protein, 218 aa, Haemophilus pittmaniae
  REGION 1..218: note = tr|F9Q5Q4|F9Q5Q4_9PAST GTP cyclohydrolase 1; OS = Haemophilus pittmaniae HK 85 OX=1035188 GN=folE PE=3; SV = 1
MNTISTDAANVRDALLAKGIETPMIDPAQHKDARRAGIAAHMRQVMELIGLDLRDDSLEETPNRLAKMFIDEIFSGMDYANFPKMTKIKNQMKVSEMVQVNDITLTSTCEHHFVTIDGSVAVAYYPRDWVIGLSKINRIVAFFAQRPQVQERLTEQLLTAFQTILETDDVAVYVKATHFCVKARGVKDTHSYTVTSAYGGVFLNDRDTRKEFLASIQK

SEQ ID NO: 8776 - protein, 218 aa, Haemophilus pittmaniae
  REGION 1..218: note = tr|A0A377J0A7|A0A377J0A7_9PAST GTP cyclohydrolase 1; OS = Haemophilus pittmaniae OX=249188 GN=folE PE=3 SV=1
MNTISTDAANVRDALLAKGIETPMIDPAQHKDARRAGIAAHMRQVMELIGLDLRDDSLEETPNRLAKMFIDEIFSGMDYANFPKMTKIKNQMKVSEMVQVNDITLTSTCEHHFVTIDGSVAVAYYPKDWVIGLSKINRIVAFFAQRPQVQERLTEQLLTAFQTILETDDVAVYVKATHFCVKARGVKDTHSYTVTSAYGGVFLNDRDTRKEFLASIQK

SEQ ID NO: 8777 - protein, 218 aa, unidentified
  source 1..218: note = Haemophilus somnus
  REGION 1..218: note = sp|Q0I3F6|GCH1_HAES1 GTP cyclohydrolase 1; OS = Haemophilus somnus (strain 129Pt) OX=205914 GN=folE; PE = 3 SV=1
MSNLSPEAIKVRNALVEKGIETPMIDLVQDKDQRRQGIEQHMREVIKLIGLDLSDDSLEETPARLSKMFIDEIFSGLDYANFPKITNIENRMKVSEMVLVDDVTLTSTCEHHFVTIDGKVSVAYYPQKWVIGLSKINRVVAFFAQRPQVQERLTQQILLAFQTILETEDVAVYVKATHFCVKCRGIKDTNSYTVTSAFGGVFLDDRETRKEFLTLLKK

SEQ ID NO: 8778 - protein, 218 aa, Haemophilus sp.; identical to SEQ ID NO: 8763
  REGION 1..218: note = tr|H1LN80|H1LN80_9PAST GTP cyclohydrolase 1; OS = Haemophilus sp. oral taxon 851 str. F0397 OX=762965; GN = folE PE=3 SV=1

SEQ ID NO: 8779 - protein, 218 aa, Haemophilus sp.; identical to SEQ ID NO: 8769
  REGION 1..218: note = tr|A0A1F0UEH7|A0A1F0UEH7_9PAST GTP cyclohydrolase 1; OS = Haemophilus sp. HMSC073C03 OX=1739452 GN=folE PE=3 SV=1

SEQ ID NO: 8780 - protein, 218 aa, unidentified
  source 1..218: note = Haemophilus sputorum
  REGION 1..218: note = tr|J5HTE9|J5HTE9_9PAST GTP cyclohydrolase 1; OS = Haemophilus sputorum HK 2154 OX=1078483 GN=folE PE=3; SV = 1
MNIISTEAQKVRQALLAKGIETPTVELTQDKDTRRAEIQSHMRQVMELLGLDLTDDSLEETPHRLAKMYVDEIFSGLDYATFPKITNIENRMKVSEMVLVDDITLTSTCEHHFVTIDGKVAVAYYPKKWVIGLSKINRVVQFFAQRPQVQERFTEQILTAFQTILETDDVAVYVKATHFCVKCRGVKDTNSYTVTSAFGGVFLDDRETRKEFLQLIQK

SEQ ID NO: 8781 - protein, 218 aa, unidentified; identical to SEQ ID NO: 8780
  source 1..218: note = Haemophilus sputorum
  REGION 1..218: note = tr|A0A369YJK8|A0A369YJK8_9PAST GTP cyclohydrolase 1; OS = Haemophilus sputorum OX=1078480 GN=folE PE=3 SV=1

SEQ ID NO: 8782 - protein, 220 aa, Hafnia alvei
  REGION 1..220: note = tr|A0A0K0HSD1|A0A0K0HSD1_HAFAL GTP cyclohydrolase 1; OS = Hafnia alvei OX=569 GN=folE PE=3 SV=1
MSSLSKEAVLVHTALEARGLETPLRGEVLDREIRKQRIKEHMTEIMQLLNLDLSDDSLAETPHRIAKMYVDEIFSGLDYANFPKITVIENKMKVDEMVTVRDITLTSTCEHHFVTIDGKATVAYIPKDCVIGLSKINRIVQFFAQRPQVQERLTQQILVALQTLLGTNNVAVSIDATHYCVKARGVRDATSATTTTSLGGLFKSSQNTRQEFLRAVRHHG

SEQ ID NO: 8783 - protein, 220 aa, Hafnia alvei; identical to SEQ ID NO: 8782
  REGION 1..220: note = tr|A0A097R0I8|A0A097R0I8_HAFAL GTP cyclohydrolase 1; OS = Hafnia alvei FB1 OX=1453496 GN=folE PE=3 SV=1

SEQ ID NO: 8784 - protein, 220 aa, Hafnia paralvei
  REGION 1..220: note = tr|A0A2A2MGT8|A0A2A2MGT8_9GAMM GTP cyclohydrolase 1; OS = Hafnia paralvei OX=546367 GN=folE PE=3 SV=1
MSLLSKEAAQVHAALEARGLETPLRGEVLDRETRKQRIKEHMTEIMQLLNLDLTDDSLAETPHRIAKMYVDEIFSGLDYANFPKITVIENKMKVDEMVTVRDITLTSTCEHHFVTIDGKATVAYIPKDCVIGLSKINRIVQFFAQRPQVQERLTQQILVALQTLLGTNNVAVSIDATHYCVKARGVRDATSATTTTSLGGLFKSSQNTRQEFLRAVRHHG

SEQ ID NO: 8785 - protein, 304 aa, Hahella chejuensis
  REGION 1..304: note = sp|Q2SLC0|GCH4_HAHCH GTP cyclohydrolase FolE2; OS = Hahella chejuensis (strain KCTC 2396) OX=349521; GN = folE2 PE=3 SV=1
MQIVRALPDIAKTRTEFETYTLQWVGMEDIAVPLTLNIGGGKQQSLPAKANVYVSLDDAAEKGIHMSRLHAILNQLASQVCDKEGLDLLLRNMVASQGKISRSAKVELVFDLLLPKPSLLSNETGFQTYRIEIGGQCLSEKYDYSLKITVPYSSTCPCSAALSRQLFSDAIDNEFSTSRIDKQELLSWALTSTVATPHSQRSYAYLNLLLGNHGWPSLSSFIMQIEEAIGTPVQTMVKRTDEQEFARLNADNLMFCEDAARNVKTLLEQSSWIEDYWFKVEHQESLHAHNAVVIDQKYSKGAML

SEQ ID NO: 8786 - protein, 188 aa, Hahella chejuensis
  REGION 1..188: note = sp|Q2SPJ2|GCH1_HAHCH GTP cyclohydrolase 1 OS=Hahella chejuensis (strain KCTC 2396) OX=349521 GN=folE PE=3 SV=1
MLDKLVAQYSAIIESLGEDVNREGLRDTPKRAAKAMQFLCRGYNQSLEEVTNGAVFESDTDEMVLVKDIELYSLCEHHLLPFIGRCHIAYIPNGKVLGLSKFARIVDMFARRMQIQENLTRQIAEAVLEVTNAHGVGVIIEARHMCMMMRGVEKQNSVMSSSVMLGSMRNNPSTRSEFLTLVHSRRAL

SEQ ID NO: 8787 - protein, 188 aa, Hahella sp.
  REGION 1..188: note = tr|A0A451F6R6|A0A451F6R6_9GAMM GTP cyclohydrolase 1; OS = Hahella sp. KA22 OX=1628392 GN=folE PE=3 SV=1
MLDKLVAQYSAIIESLGEDVNREGLRDTPKRAAKAMQFLCRGYNQSLEEVTNGAIFESDTDEMVLVKDIELYSLCEHHLLPFIGRCHIAYIPNGKVLGLSKFARIVDMFARRMQIQENLTRQIAEAVLEVTNAHGVGVIIEARHMCMMMRGVEKQNSVMSSSVMLGSMRNNPSTRSEFLTLVHSRRAL

SEQ ID NO: 8788 - protein, 188 aa, Hahella sp.
  REGION 1..188: note = tr|A0A261GUH0|A0A261GUH0_9GAMM GTP cyclohydrolase 1; OS = Hahella sp. CCB-MM4 OX=1926491 GN=folE PE=3 SV=1
MLDKLAEHYRAIIEGLGEDANREGLVDTPMRAAKAMQFLCKGYDQDLETIVNGAVFESDTDEMVMVKDIELYSMCEHHMLPFIGRCHIAYLPRGRVLGLSKFARIVDMYARRMQIQENLTKQIAEAVQSVTNARGVGVIIEARHMCMMMRGVEKQNSSMVSSVMLGSMRNDISTRAEFLNLAKGSAGL

SEQ ID NO: 8789 - protein, 186 aa, unidentified
  source 1..186: note = Hahellaceae bacterium
  REGION 1..186: note = tr|A0A2D8RAU4|A0A2D8RAU4_9GAMM GTP cyclohydrolase 1; OS = Hahellaceae bacterium OX=2048971 GN=folE PE=3 SV=1
MSDTLAGHYKSILELIGEDTTREGLRDTPARAAKAMEYLCKGYNDTLAQIVNNAIFESDTEEMVVVKDIELYSLCEHHLLPFIGRCHIAYIPNGKVLGLSKFARIVDMYARRAQIQENLTKQIAEAVEQVTGAYGVGVIIEAKHLCMMARGVEKQNSSMMSSVMLGSIRTNPATRTEFLTLVKMNK

SEQ ID NO: 8790 - protein, 307 aa, Halalkalibacillus sp.
  REGION 1..307: note = tr|A0A2I0QWM0|A0A2I0QWM0_9BACI GTP cyclohydrolase FolE2 OS=Halalkalibacillus sp. B3227 OX=2018042 GN=folE2; PE = 3 SV=1
MNEVSTKKQLPTKSDRHKLFGSVDPGPRTKPEEKSEMVDLQNTKKDFLFELDAVGISNVKHPVSIQSGIAPNKQSTIGTFYFASTISQDSKGTNMSRFTEQLQSYSQNEFEVNIPTLKKFVYELHTRLNQRDAELSVSFPWFFERKAPYTGQSGMNHAEAWMDVRYDQDTGYDITVGLTGKVTTLCPCSKEISEYSAHNQRGNLTMEVKLDETFDDSKVDWKEVLLEAAESNASARIHPVLKRPDEKMVTEQAFENPRFVEDMVRLVAADLYEMEFVEKFYVECVNEESIHLHDAVASITYDKMSDK

SEQ ID NO: 8791 - protein, 333 aa, Halanaerobium saccharolyticum
  REGION 1..333: note = tr|M5DYN2|M5DYN2_9FIRM GTP cyclohydrolase I type 2; OS = Halanaerobium saccharolyticum subsp. saccharolyticum DSM 6643 OX=1293054 GN=HSACCH_00540 PE=3 SV=1
MDQFKRDVQKEEPRLVVGLNRVGVKNIQKIIRIKNNNKENLFYSTIDIFVDLLPQQKGAHMSRFDETITQIIDETIQKKVMVIEDFATYMAEMARKRQNAHRAEVRIKAKYPVEEIAPASEKKTQKINTIMGRAVSTENGSRHLIGVETNGMTVCPCAQQMIKEYAEDKLEKEGFTKEQLEKVFKHIPMPSHNQRGTGILMIGSEKKIKAEKLVRIVENSMSSKVLDLLKRVDELEIVRNAHLNPRFVEDVVREMVALTLKEFDFLSDDDYFLAKQTNYEGIHSYEVYAERSGTIGEIKEEIKKAENDYLDEDYIINCNNTSSDEWLESNGGC

SEQ ID NO: 8792 - protein, 201 aa, Haliangium ochraceum
  REGION 1..201: note = tr|D0LRN8|D0LRN8_HALO1 GTP cyclohydrolase I; OS = Haliangium ochraceum (strain DSM 14365 / JCM 11303 / SMP-2) OX=502025 GN=Hoch_6562 PE=4 SV=1
MEKNQRALDLFTKGFESILEGIGELGYDITDANFADTAPRAAKGLHELIHDQAKAQDEVKKLLSKTFPARYTEMVISKHNVAFGVCPHHILPVIYRISLAYIPVKKVLGLSKLSRLARLYARSPMLQEDLTHELCRTLHEDLESEGAAVYIEGLHMCMAARGIGAHEARLVTSAVRGVFLNEPATRNEFIKLVTTAHPPLV

SEQ ID NO: 8793 - protein, 186 aa, Haliea salexigens
  REGION 1..186: note = tr|A0A3C1KRB7|A0A3C1KRB7_9GAMM GTP cyclohydrolase 1 (Fragment) OS=Haliea salexigens OX=287487 GN=DCP75_16100; PE = 3 SV=1
METALAGNIPYPSKMSAEAAMVRKALLERGLETPMIQNGLTRDEKYRRIVQSFTEITRTLGLDLNDDSLAETPHRIAKMYVDEIFSGLDYAQFPKISVIANKMQVEEMVQVDNIDVVSTCEHHFVTIDGLARVAYIPKDKVIGLSKINRIVRFFAQRPQVQERLTQQILVALQALLDTDDVAVTID

SEQ ID NO: 8794 - protein, 182 aa, Haliea salexigens
  REGION 1..182: note = tr|A0A3C1KJU0|A0A3C1KJU0_9GAMM GTP cyclohydrolase 1; OS = Haliea salexigens OX=287487 GN=folE PE=3 SV=1
MEQEWARIIEAIGEDLSRPGLADTPKRAAKAFEFLTRGYHQSVEDVVNNALFPSDSSEMVLVQNVELYSLCEHHVLPFIGKCHVAYIPTGKVLGLSKVARIVDVFARRLQIQESLTTQIAQTIMDVTEAEGVGVIIEAQHMCMMMRGVEKQNSVMKTSAMLGSFRTEQKTRDEFLSLLQLGR

SEQ ID NO: 8795 - protein, 225 aa, Haliea sp.
  REGION 1..225: note = tr|A0A2D5FCM7|A0A2D5FCM7_9GAMM GTP cyclohydrolase 1; OS = Haliea sp. OX=1932666 GN=folE PE=3 SV=1
METALANPLEFTENLSAEAALVRRALLEKGLETPMVHNGLSRDEKYRRLVAAFTDVTRTLGLDLNDDSLQETPHRIAKMYVDEIFSGLDYRHFPKISVIDNKMQVEEMVQIDDIDLVSTCEHHFVTIDGTAKVAYIPRDKIIGLSKINRIVRFFAQRPQVQERLTQQVLVALQALLGTDDVAVSINAVHYCVKSRGVMDSNSRTRTTALGGTFKQDPSTRAEFLT

SEQ ID NO: 8796 - protein, 225 aa, Haliea sp.
  REGION 1..225: note = tr|A0A2D4TEI0|A0A2D4TEI0_9GAMM GTP cyclohydrolase 1; OS = Haliea sp. OX=1932666 GN=folE PE=3 SV=1
METALAGNIPYPSKMSAEAAMVRKALLERGLETPMIQNGLTRDEKYRRIVQSFTEITRTLGLDLNDDSLAETPHRIAKMYVDEIFSGLDYAQFPKISVIANKMQVEEMVQVDNIDVVSTCEHHFVTIDGLARVAYIPKDKVIGLSKINRIVRFFAQRPQVQERLTQQILVALQALLDTDDVAVTIDAVHYCVKSRGVMDSNSRTRTTSLGGAFKSNASTRAEFLN

SEQ ID NO: 8797 - protein, 228 aa, unidentified
  source 1..228: note = Halieaceae bacterium
  REGION 1..228: note = tr|A0A2E6YME6|A0A2E6YME6_9GAMM GTP cyclohydrolase 1; OS = Halieaceae bacterium OX=2026743 GN=folE PE=3 SV=1
MSINRAAPSIATPLPGSLTDEAIAVRGALLERGLETPMINNGLNRDQRYEVIREAFGDIMNALGLDLRDDSLEETPHRIAKMYVDEVFGGLDYSQFPKITVIENKMNVEEMVCVEDIDLTSTCEHHFVTIDGSAKVAYIPNEKVIGLSKINRLVRFFAQRPQVQERLTQQVLVAMQTLLGTDNVAVTISAVHYCVKARGVKDGNSSTRTTSLGGVFKTDPASRAEFLS

SEQ ID NO: 8798 - protein, 53 aa, unidentified
  source 1..53: note = Halieaceae bacterium
  REGION 1..53: note = tr|A0A355SNH4|A0A355SNH4_9GAMM GTP cyclohydrolase I FolE (Fragment) OS=Halieaceae bacterium OX=2026743; GN = DD459_05695 PE=4 SV=1
EGVGVIIEAQHMCMMMRGVEKQNSVMKTSAMLGSFRTEQKTRDEFLSLLQLGR

SEQ ID NO: 8799 - protein, 182 aa, unidentified
  source 1..182: note = Halioglobus japonicus
  REGION 1..182: note = tr|A0A2N5YF51|A0A2N5YF51_9GAMM GTP cyclohydrolase 1; OS = Halioglobus japonicus OX=930805 GN=folE PE=3 SV=1
MEKNWASIIEAIGEDLNRPGLVDTPKRAAKAFEFLTRGYHQSVEEVVNNALFPSDSSEMVLVQDIELYSLCEHHLLPFIGKCHVAYIPTGQVLGLSKVARIVDVFARRLQIQESLTTQIAKTIMEVTGAEGVGVIIEARHMCMMMRGVEKQNSVMKTSAMLGSFRKSQVTREEFLQLLRLST

SEQ ID NO: 8800 - protein, 225 aa, unidentified
  source 1..225: note = Halioglobus japonicus
  REGION 1..225: note = tr|A0A2N5YDX2|A0A2N5YDX2_9GAMM GTP cyclohydrolase 1; OS = Halioglobus japonicus OX=930805 GN=folE PE=3 SV=1
MNAITSPALNREADFSPEALAVREALIAHGLETPLVANGLSSEEQYKRLQQSFTDIMNVLGLDLRDDSLSETPHRMASMYLNDLFAGLDYGTFPKISSIENKMGVDEMVLIDDIELISTCEHHFVTIDGFARVAYVPNERVIGLSKINRLVRFFARRPQVQERLTRQIQVALQTLLETDDVAVLVQATHYCVKSRGVMDASSSTRTQALGGVFRTNDNERRSFLG

SEQ ID NO: 8801 - protein, 180 aa, unidentified
  source 1..180: note = Halioglobus lutimaris
  REGION 1..180: note = tr|A0A2N5X2W3|A0A2N5X2W3_9GAMM GTP cyclohydrolase 1; OS = Halioglobus lutimaris OX=1737061 GN=folE PE=3 SV=1
MEENWANIITAIGEDLNRPGLVDTPARAARAFEFLTRGYQQSVDEVVNEALFPSESSEMVLVQNVELYSLCEHHLLPFIGRCHVAYIPTGKVLGLSKVARLVDVFARRLQIQESLTSQIAETIMTVTGAEGVGVIIEARHMCMMMRGVEKQNSVMKTSAMLGSFREHQATRDEFLQLLQM

SEQ ID NO: 8802 - protein, 227 aa, unidentified
  source 1..227: note = Halioglobus lutimaris
  REGION 1..227: note = tr|A0A2N5X6S5|A0A2N5X6S5_9GAMM GTP cyclohydrolase 1; OS = Halioglobus lutimaris OX=1737061 GN=folE PE=3 SV=1
MKTALMESIAAPVQALSEDARRVRDALVEHGLETPMLHNGLTRDQKVERIRDAFVDIAQALELDLTDDSLCDTPKRIARMYVDEIFSGLDYSRFPKATAIENKMGVDEMVRVDDITLVSTCEHHFITIDGSARVAYVPKGRVIGLSKINRIVRFFAQRPQVQERLTRQIMVALQTLLGTEDVAVVIDAAHYCVKARGVMDATSSTRTSALGGQFRHDERCRAEFLTS

SEQ ID NO: 8803 - protein, 180 aa, unidentified
  source 1..180: note = Halioglobus sp.
  REGION 1..180: note = tr|A0A3L7DZG4|A0A3L7DZG4_9GAMM GTP cyclohydrolase 1; OS = Halioglobus sp. U0301 OX=2283635 GN=folE PE=3 SV=1
MEQHWAEIIKAIGEDLDRPGLHDTPKRAAKAFEFLTRGYQQSVDEVVNNALFPSDSSEMVLVQNVELYSLCEHHLLPFIGKCHVAYIPTGKVLGLSKVARIVDLFARRLQIQESLTTEIAQTIMDVTDAEGVGVIIEARHMCMMMRGVEKQNSVMKTSAMLGSFRDSQVTREEFLQILQM

SEQ ID NO: 8804 - protein, 227 aa, unidentified
  source 1..227: note = Halioglobus sp.
  REGION 1..227: note = tr|A0A5B0X4Z9|A0A5B0X4Z9_9GAMM GTP cyclohydrolase 1; OS = Halioglobus sp. NY5 OX=2606449 GN=folE PE=3 SV=1
MKTAVMESIASPVHALSEDARKVRDALVEHGLETPMLRNGLTRDQKVERIREAFVDIAQALELDLTDDSLCDTPNRIAKMYVDEIFSGLDYSRFPKATAIDNKMGVDEMVRVDDITLVSTCEHHFITIDGTARVAYIPKGRVIGLSKINRIVRFFAQRPQVQERLTRQVMVALQTLLGTDDVAVVIDAAHYCVKARGVMDATSSTRTSALGGQFRHDERRRSEFLAG

SEQ ID NO: 8805 - protein, 226 aa, Haliscomenobacter hydrossis
  REGION 1..226: note = tr|F4L522|F4L522_HALH1 GTP cyclohydrolase 1; OS = Haliscomenobacter hydrossis (strain ATCC 27775 / DSM 1100 / LMG 10767 / O) OX=760192 GN=folE PE=3 SV=1
MVTTDNTLDLVLGQKAQTMGDNHISTGVETPLRPDAFDMNDKEKMEIIAHHFAAIMDTLGLDLNDDSLQDTPKRVAKMFVQEIFHGLNPANKPEISAFDNSYDYKRMLVEKNITVKTFCEHHFLPITGKAHVGYVSNGKVIGLSKLNRIVDYYARRPQVQERMTKQILLALQEALDTKDVIIVVDAKHMCVSHRGIQHDESTTLTLEYSGCFENNDMRREFMDCLK

SEQ ID NO: 8806 - protein, 195 aa, Haloactinobacterium album
  REGION 1..195: note = tr|A0A1H5MRR8|A0A1H5MRR8_9MICO GTP cyclohydrolase 1; OS = Haloactinobacterium album OX=648782 GN=folE PE=3 SV=1
MSDAGTIGSYDAAAVERAVRDLLVAVGEDPEREGLRDTPGRLAKAYAEIFVGLRQRPEDVVQTFFDIDHEEMVLVRDIEVYSTCEHHLLPFHGVAHVGYIPSESGTVTGLSKLARLVDVFAKRPQVQERLTTQVADALVELLDARGVIVVIECEHLCMSMRGVRKPGSRTVTSAVRGLMRNTATRAEAMSLIARG

SEQ ID NO: 8807 - protein, 191 aa, Haloactinopolyspora alba
  REGION 1..191: note = tr|A0A2P8DEY2|A0A2P8DEY2_9ACTN GTP cyclohydrolase 1; OS = Haloactinopolyspora alba OX=648780 GN=folE PE=3 SV=1
MTTTANSPAVDAAALMLGQLGLYDPDSDASRDTPRRLVQALTEMTAGQHVDPDRHLKTTFPPESDDPGLIVVTAVPFISVCEHHLLPFTGTATVGYLPSAGARIVGLSKLSRVVQEYAARPQVQERLGQQVVDALTRHLDTRAAGCVIRSAHSCMTHRGARATGAEMVTSHLAGQLRTDPAMRSEFMALTR

SEQ ID NO: 8808 - protein, 204 aa, Haloactinopolyspora alba
  REGION 1..204: note = tr|A0A2P8EFQ6|A0A2P8EFQ6_9ACTN GTP cyclohydrolase 1; OS = Haloactinopolyspora alba OX=648780 GN=folE PE=3 SV=1
MEADGESGELELSSSARPFDYERAEAAVRELLLAVGEDPERDGLAQTPERVARAYEEMFRGLRQDPSAALTTTFELGHDEMVLVKDIELASMCEHHLVPFYGYAHIGYVPGSDGRIAGLSKLARLVDVFAKRPQVQERLTSQIADSLRDLLKPGGVIVVIEAEHLCMTMRGVRKPGAKTLTSAVRGQLRDPATRSEAMSLIIGR

SEQ ID NO: 8809 - protein, 238 aa, Haloactinospora alba
  REGION 1..238: note = tr|A0A543NMX1|A0A543NMX1_9ACTN GTP cyclohydrolase 1; OS = Haloactinospora alba OX=405555 GN=folE PE=3 SV=1
MSPAGGHQPGSGQNPEPSAAGPEHPVTPGEGGVPAEPDPETPLVAPASEGVDHGRLEKAVREILLAIGEDPDREGLRDTPSRVARAYTEQFAGLHQQPEDVLTTVFEAGHEEMVLVKDIELYSTCEHHLVPFYGSAHVGYIPNSQGQITGLSKLARLVDVYARRPQVQERLTTEIADALMENLAPRGVIVVIQAEHLCMTMRGVRKPGAKTVTSAVRGDFRSRDRTRSEAMSLILGDG

SEQ ID NO: 8810 - protein, 190 aa, unidentified
  source 1..190: note = Haloarcobacter mediterraneus
  REGION 1..190: note = tr|A0A4Q1AZA8|A0A4Q1AZA8_9PROT GTP cyclohydrolase 1; OS = Haloarcobacter mediterraneus OX=2023153 GN=folE PE=3; SV = 1
MSKELEFENSVKNILEYIGEDVNREGLEKTPSRVRKAFEFMCGGYKQDPKEIINQALFTSTNDEMVVIKDIEFYSMCEHHMLPIIGKAHIAYIPDGKVVGLSKIPRIVDVFARRLQIQEQMTEQICDALHEALNPKGVAVMIDARHMCMEMRGVEKICSTTVTSALRGLFKREKTTKDEFLSIVAQSLHK

SEQ ID NO: 8811 - protein, 310 aa, Halobacillus aidingensis
  REGION 1..310: note = tr|A0A1H0N8P1|A0A1H0N8P1_HALAD GTP cyclohydrolase FolE2 OS=Halobacillus aidingensis OX=240303 GN=folE2 PE=3; SV = 1
MNKTELNQNKQLPSKKERHKLFGSVEPGPRTKPMEKDQMADLQNSKKDFLFDIDMVGISSVKHPIRIPSTMTPEIQTTIGTFSFGSSIAQGSKGTNMSRFTEQLDKYHNEGFAMDIATLKQFTEELAGRLKQTDAEVEVTFPWFFERKGPYSGLAGMNHADATIRVEYDKETGHDVTVTLTGKITTLCPCSKEISEYSAHNQRGNVTMSVKLTDDFKEQEIDWKAALLEAAESNASARIHPVLKRPDEKMVTEQAYENPRFVEDIVRLVAADLYEYSFVEAFTVKCRNEESIHLHDAVASLSYDKKKEAE

SEQ ID NO: 8812 - protein, 310 aa, Halobacillus alkaliphilus
  REGION 1..310: note = tr|A0A1I2K2G5|A0A1I2K2G5_9BACI GTP cyclohydrolase FolE2 OS=Halobacillus alkaliphilus OX=396056 GN=folE2 PE=3; SV = 1
MNKTELNHNKQLPSKEERHQLFGSVKPGPRTKPVDKDKMADLQNSKKDFLFDIDMVGISNVKHPIRIPSKLTPEIQTTIGTFSFGSSIRKGSKGTNMSRFTEQLDKYHNEGFAIDIATLKGFTEELAGRLKQKDAEVEVHFPWFFERKGPYSDLAGMNYADATIRDEYKEETGHDVTVTLTGKITTLCPCSKEISEYSAHNQRGNVSMTVTLTDDFDEQEIDWKAALLEAAESNASARIHPVLKRPDEKMVTEQAYENPRFVEDIVRLVAADLYEYEFVEAFTVTCRNEESIHLHDAVATLSYDKKQEAE

SEQ ID NO: 8813 - protein, 310 aa, Halobacillus dabanensis
  REGION 1..310: note = tr|A0A1I3YC81|A0A1I3YC81_HALDA GTP cyclohydrolase FolE2 OS=Halobacillus dabanensis OX=240302 GN=folE2 PE=3; SV = 1
MNKTDLNQIKKLPSKKERHKLFGSIEPGPRTKPVEKDQMADLQNSKKDFLFDIDMVGISNVKHPIRIPSQLTPEIQTTIGTFSFGSSISQGSKGTNMSRFTEQLDKYHNEGFAVDIATLKQFTEELAGRLKQSDAEVEVTFPWFFERKGPYSNLTGMNHADATIRVEYDVETGHDITVTLTGKITTLCPCSKEISEYSAHNQRGNVTMSVKLTDDFDEQDIDWKTALLEAAESNASARIHPVLKRPDEKMVTEQAYENPRFVEDIVRLVAADLYEYPFVESFTVHCRNEESIHLHDAVATLSYDKKQEEK

SEQ ID NO: 8814 - protein, 310 aa, Halobacillus faecis
  REGION 1..310: note = tr|A0A511WSA1|A0A511WSA1_9BACI GTP cyclohydrolase FolE2 OS=Halobacillus faecis OX=360184 GN=folE2 PE=3 SV=1
MNKTELNQNKQLPSKKERHKLFGSVEPGPRTKPMEKDQMADLQNSKKDFLFDIDMVGVSNVKHPIRIPSTMTPEIQTTIGSFSFGSSITQGSKGTNMSRFTEQLDKYHNEGFAVDIVTLKQFTEELAGRLKQSDAEVEVSFPWFFERKGPYSGLAGMNHADATIRVEYDKETGHDVTVSLTGKITTLCPCSKEISEYSAHNQRGNVTMSVKLTDDFKEQEIDWKAALLEAAESNASARIHPVLKRPDEKMVTEQAYENPRFVEDIVRLVAADLYEYSFVEAFTVKCRNEESIHLHDAVATLSYDKKKEAE

SEQ ID NO: 8815 - protein, 310 aa, Halobacillus halophilus
  REGION 1..310: note = tr|I0JMY0|I0JMY0_HALH3 GTP cyclohydrolase FolE2; OS = Halobacillus halophilus (strain ATCC 35676 / DSM 2266 / JCM 20832 / NBRC 102448/ NCIMB 2269) OX=866895 GN=yciA PE= 3 SV=1
MNKTELNHNKQLPSKEERHQLFGSVNPGPRTKPVDKDKMADLQNSKKDFLFDIDMVGISNVKHPIRIPSKLTPEIQTTIGTFSFGSSIVKGSKGTNMSRFTEQLDKYHNEGFAIDIATLKGFTEELAGRLKEKDAEVEVHFPWFFERKGPYSDLAGMNYADATIRDEYREETGHDVTVTLTGKITTLCPCSKEISEYSAHNQRGNVSMTVTLTDDFDEQEIDWKAALLEAAESNASARIHPVLKRPDEKMVTEQAYENPRFVEDIVRLVAADLYELEFVEAFSVTCRNEESIHLHDAVATLSYDKKQEAE

SEQ ID NO: 8816 - protein, 310 aa, Halobacillus karajensis
  REGION 1..310: note = tr|A0A024P1B6|A0A024P1B6_9BACI GTP cyclohydrolase FolE2 OS=Halobacillus karajensis OX=195088 GN=folE2 PE=3; SV = 1
MNKTELSQNKQLPSKKERHKLFGSVDPGPRTKPMEKDQMADLQNSRKDFLFDIDMVGISNVKHPIRIPSTLTPEIQTTIGTFSFGSSISQGSKGTNMSRFTEQLDKYHNEGFAIDIATLKEFTEELAGRLKQTDAEVEVSFPWFFERKGPFSGLTGMNHADATIRVEYDIHSGHDVTVTLTGKITTLCPCSKEISEYSAHNQRGNVTMSVKLTDDFDEQKTDWKAALLEAAESNASARIHPVLKRPDEKMVTEQAYENPRFVEDIVRLVAADLYEYSFVEAFQVQCRNEESIHLHDAVATVSYDKKRESK

SEQ ID NO: 8817 - protein, 310 aa, Halobacillus litoralis
  REGION 1..310: note = tr|A0A410M854|A0A410M854_9BACI GTP cyclohydrolase FolE2 OS=Halobacillus litoralis OX=45668 GN=folE2 PE=3 SV=1
MNKTELNQIKQLPSKEERHKLFGSVDPGPRTKPVEKDRMADLQNSKKDFLFDIDMVGISNVKHPIRIPSGLTPQIQTTIGTFSFGSSIAKGSKGTNMSRFTEQLDKYHNEGFAIDIETLKGFTEELAARLKQTDAEVEVTFPWFFERKGPYSDLAGMNHADATIRVEYDQETGHDVTVTLTGKITTLCPCSKEISEYSAHNQRGNVTMCVKLTDDFDEQEQDWKSALLEAAESNASARIHPVLKRPDEKMVTEQAFENPRFVEDIVRLVAADLYEYEFVESFTVTCRNEESIHLHDAVATLSYDKKQEIL

SEQ ID NO: 8818 - protein, 310 aa, Halobacillus mangrovi
  REGION 1..310: note = tr|A0A1W5ZVR3|A0A1W5ZVR3_9BACI GTP cyclohydrolase FolE2 OS=Halobacillus mangrovi OX=402384 GN=folE2 PE=3 SV=1
MNKTELNHNKSLPSKEERHKLFGSVKPGPRTKPIDKKGMADLQNSKKDFLFDIDMVGISNVKHPIRIPSQLTPEIQTTIGTFSFGSSIAQGSKGTNMSRFTEQLDQYHNEGFAVDIATMKEFTKELAGRLKQNDSEVEVTFPWFFERKGPYSDLTGMNYADATIRVEYHKETGHDITVSLTGKITTLCPCSKEISEYSAHNQRGNVTMTIKLTDDFNEQEVDWKAALLEAAESNASARIHPVLKRPDEKMVTEQAYENPRFVEDIVRLVAADLYEYDFVESFTVMCRNEESIHLHDAVASLSYDKKQERE

SEQ ID NO: 8819 - protein, 310 aa, Halobacillus salinus
  REGION 1..310: note = tr|A0A4Z0H439|A0A4Z0H439_9BACI GTP cyclohydrolase FolE2 OS=Halobacillus salinus OX=192814 GN=folE2 PE=3 SV=1
MNKTELQQNKSLPSKQERHKLFGSVEPGPRTKPIDKNKMADLQNSKKDFLFDIDMVGISNVKHPISIPSTMTPEIQTTIGTFSFGSSIAKGSKGTNMSRFTEQLDKYHREGFAIDLTTLKTFTEELAGRLKESDAEVEVSFPWFFERKGPYSDLSGMNHAHATIRVEYDEKTGHDITCTLTGTITTLCPCSKEISEYSAHNQRGNVTMSVKLTDDFDEQKTDWKAALLEAAESNASARIHPVLKRPDEKMVTEQAYENPRFVEDIVRLVAADLYEYDFVEAFEVTCRNEESIHLHDAVASLSYDKKQELK

SEQ ID NO: 8820 - protein, 310 aa, Halobacillus sp.
  REGION 1..310: note = tr|A0A0B0D956|A0A0B0D956_9BACI GTP cyclohydrolase FolE2 OS=Halobacillus sp. BBL2006 OX=1543706 GN=folE2 PE=3; SV = 1
MNKTELNHNKSLPSKEERHKLFGSVEPGPKTKPVDKKGMADLQNSKKDFLFDIDMVGISNVKHPIRIPSQLNPEIQTTIGTFSFGSSIAQGSKGTNMSRFTEQLDQYHNEGFAVDISTMKEFTEELSGRLKQENAEVEVSFPWFFERKGPYSDLAGMNYADATIRVEYHKQTGHDVTVSLTGKITTLCPCSKEISEYSAHNQRGNVTMTVKLTDDFNEQEIDWKAALLEAAESNASARIHPVLKRPDEKMVTEQAYENPRFVEDIVRLVAADLYEYTFIESFTVKCRNEESIHLHDAVASLSYDKKQENE

SEQ ID NO: 8821 - protein, 310 aa, Halobacillus sp.
  REGION 1..310: note = tr|A0A3S4DVW6|A0A3S4DVW6_9BACI GTP cyclohydrolase FolE2 OS=Halobacillus sp. SKP4-6 OX=2498856 GN=folE2 PE=3; SV = 1
MNKTELQQQKQLPSKEERHKLFGSVKPGPRTKPVEKDKMADLQNSKKDFLFDIDVVGISNVKHPIRIPSQLTPEIQTTIGTFSFGSSIAKGSKGTNMSRFTEQLDKYHNEGFAVDIETLKQFTEELAGRLKETDAEVEVNFPWFFERRGPASDLAGMNHADATIRVEYDEKTGHDVTVSLTGKITTLCPCSKEISEYSAHNQRGNVTMTVKLTDDFDEQETDWKAALLEAAESNASARIHPVLKRPDEKMVTEQAYENPRFVEDIVRLVAADLYEYSFVESFTVGCRNEESIHLHDAVASLSYDKKQELE

SEQ ID NO: 8822 - protein, 310 aa, Halobacillus trueperi
  REGION 1..310: note = tr|A0A3E0J9I6|A0A3E0J9I6_9BACI GTP cyclohydrolase FolE2 OS=Halobacillus trueperi OX=156205 GN=folE2 PE=3 SV=1
MNKTELNQNKQLPSKKERHKLFGSVEPGPRTKPMEKDQMADLQNSKKDFLFDIDMVGISSVKHPIRIPSTMTPEIQTTIGTFSFGSSIAQGSKGTNMSRFTEQLDKYHNEGFAVDIATLKQFTEELAGRLKQTDAEVEVTFPWFFERKGPYSGLAGMNHADATIRVEYDKETGHDVTVTLTGKITTLCPCSKEISEYSAHNQRGNVTMSVKLTDDFKEQEIDWKAALLEAAESNASARIHPVLKRPDEKMVTEQAYENPRFVEDIVRLVAADLYEYSFVEAFTVKCRNEESIHLHDAVATLSYDKKQEAE

SEQ ID NO: 8823 - protein, 310 aa, Halobacillus trueperi
  REGION 1..310: note = tr|A0A3D8VGI5|A0A3D8VGI5_9BACI GTP cyclohydrolase FolE2 OS=Halobacillus trueperi OX=156205 GN=folE2 PE=3 SV=1
MNKTELNQNKQLPSKKERHKLFGSVEPGPRTKPMEKDQMADLQNSKKDFLFDIDMVGISSVKHPIRIPSTMTPEIQTTIGTFSFGSSIAQGSKGTNMSRFTEQLDKYHNEGFAVDIATLKQFTEELAGRLKQTDAEVEVTFPWFFERKGPYSGLAGMNHSDATIRVEYDKETGHDVTVTLTGKITTLCPCSKEISEYSAHNQRGNVTMSVKLTDDFKEQEIDWKAALLEAAESNASARIHPVLKRPDEKMVTEQAYENPRFVEDIVRLVAADLYEYSFVEAFTVKCRNEESIHLHDAVASLSYDKKKEAE

SEQ ID NO: 8824 - protein, 202 aa, unidentified
  source 1..202: note = Halobacteriovorax sp.
  REGION 1..202: note = tr|A0A2E6H7R5|A0A2E6H7R5_9PROT GTP cyclohydrolase 1; OS = Halobacteriovorax sp. OX=2020862 GN=folE PE=3 SV=1
MDFEINKDNNDKTFPGNEKEAEEALATVIKYLGEDITREGLRDTPKRILKSYKRLFGGYLQNVDEIMTTFEEDNVIPHDQIILLKDIEFYSTCEHHFLPFVGKAHVAYIPRDKVVGISKLARIVEIYSRRLQIQERIGNEVTQALMEKLNAKGSACIIESKHFCMTCRGVEKQNSVMVTSSLRGAFLEKIETRQELMTLIKN

SEQ ID NO: 8825 - protein, 196 aa, unidentified
  source 1..196: note = Halobacteriovorax sp.
  REGION 1..196: note = tr|A0A2E5JHB3|A0A2E5JHB3_9PROT GTP cyclohydrolase 1; OS = Halobacteriovorax sp. OX=2020862 GN=folE PE=3 SV=1
MSKPLFPGHKDKEKVKELMLAMFAYLGEDANREGLKDTPNRVVKSWDKLYGGYLQKPEDVLTTFEEDDVIPHDQIILLKDIEFYSTCEHHLLPFVGKAHVAYIPKDKVVGISKLARIVEIYARRLQVQERIGNQVTKALMTHLNAKGASCIIESKHFCMTCRGVEKQNSVMVTSSLRGTFLEDGRTRQELMTLIRS

SEQ ID NO: 8826 - protein, 189 aa, Halobacteroides halobius
  REGION 1..189: note = tr|L0K628|L0K628_HALHC GTP cyclohydrolase 1; OS = Halobacteroides halobius (strain ATCC 35273 / DSM 5150 / MD-1) OX=748449 GN=folE PE=3 SV=1
MDQDRIEKSISNILEAIGEDPQREGLEKTPKRVAKMYQEIFLGVNKEPSEALDVFVEDEANDLVLVRDITFYSLCEHHLIPFFGKVHLAYKPQGGRVTGFSKLTKLVETVAKRPQLQERMTKIIADTMMEILEPQGVYVIVEAQQLCMTMRGVEQTETETITSASRGIFKEDSGAKNEVINLIYRGRTR

SEQ ID NO: 8827 - protein, 198 aa, Halocella sp.
  REGION 1..198: note = tr|A0A3Q9B5L7|A0A3Q9B5L7_9FIRM GTP cyclohydrolase 1; OS = Halocella sp. SP3-1 OX=2382161 GN=folE PE=3 SV=1
MAIDKTKIEEHIRGILMALGEDPEREGLLETPARVARMYEEIFEGISYTNDEIAEMFNRTFEDDLYISEYNKEIVMLRDIEIFSFCEHHLALMYNMKVAVAYIPNGKILGLSKIARIADMVSKRLQLQERIGSDIAEIMQKVTETEDVAVLIEGQHACMTARGIKNTNAVTVTTTLCGRFNTDQCLMDKLMVLYNKIL

SEQ ID NO: 8828 - protein, 365 aa, unidentified
  source 1..365: note = Halocynthiibacter arcticus
  REGION 1..365: note = tr|A0A126UV33|A0A126UV33_9RHOB GTP cyclohydrolase FolE2 OS=Halocynthiibacter arcticus OX=1579316 GN=folE2; PE = 3 SV=1
MNTDMQKTLLSRDQAKAALETLREWAAHVSPVEVAELDPAIGRLLPERALENYPALARAYPEEFTTDDAYRATLPDLQNGPESLIRGSRRPIQHVGISNFRLPIRFQARAGGDLALETSVTGTVSLEAGKKGINMSRIMRTFYKYAESVFSFDVIEAALADYKTDLESFDARIQMAFSFPVKNKSLRSGLAGYQYYNIALELVETAGKVVKIIHLDYVYSSTCPCSLELSEHARQTRHQLATPHSQRSVARISVLLNSEKPRLWFEDLIDLCRAAVPTETQVMVKREDEQAFAELNAANPIFVEDAARLFSEQLQNDERILDYRIVASHQESLHSHDAVSVLTEGQTFAAQSFDPKLFSTLFHVG

SEQ ID NO: 8829 - protein, 259 aa, unidentified
  source 1..259: note = Halodesulfovibrio marinisediminis
  REGION 1..259: note = tr|A0A1N6H6E3|A0A1N6H6E3_9DELT GTP cyclohydrolase FolE2 OS=Halodesulfovibrio marinisediminis DSM 17456; OX = 1121457 GN=folE2 PE=3 SV=1
MPKKLQDIQMSSSEVAIPIDSVGVKNLRVPLLVRDRENGAQHTVAQVEVGVDLPAAFKGTHMSRFVESLETFGEELDYHSLRDLLAQIQERLSARNAFISFTFPYFMTLPSPATKRKSRMNYEVTLTGALEDEEMSCMLEVCVPVMTVCPCSKAISDEGAHSQRAEIRLQINMSGFAWIEEFIEIANNAGSSPVYSLLKREDEKYVTEYAFANPTFVEDVVRAVAKQLSEHEKIDWYRVEVESFESIHNHSAYAVIESR

SEQ ID NO: 8830 - protein, 255 aa, unidentified
  source 1..255: note = Halodesulfovibrio spirochaetisodalis
  REGION 1..255: note = tr|A0A1B7X983|A0A1B7X983_9DELT GTP cyclohydrolase FolE2 OS=Halodesulfovibrio spirochaetisodalis OX=1560234; GN = folE2 PE=3 SV=1
MQDIQMSSSEVAIPIDSVGVKNLRVPLSVRDREKGAQHTIAQVEVGVDLPAAFKGTHMSRFVESLESFGEKLDYHSLKELLAQIQERLSARNAFISFTFPYFMTLPSPATKRESRMDYEVTLTGALEDNHMSCMLEVCVPVMTVCPCSKAISDEGAHSQRAEIRLQISMSGFAWIEEFIEIANNSGSSPVYSLLKREDEKYVTEYAFANPTFVEDVVRTVAKQLSDHEKIDWYRVEVESFESIHNHSAYAVIESK

SEQ ID NO: 8831 - protein, 228 aa, Haloechinothrix alba
  REGION 1..228: note = tr|A0A238XTT2|A0A238XTT2_9PSEU GTP cyclohydrolase 1; OS = Haloechinothrix alba OX=664784 GN=folE PE=3 SV=1
MGNIEGDELGPYVASGDEYVRDGEPDGAGELGETGVGRVFDAGRAEKAVRELLIACGEDPDREGLQETPARVARAYRELFAGLHTDPAAVIDRTFDESHEELVLITDIPMFSTCEHHLVPFHGVAHVGYIPDEHGRVTGLSKLARLVDLYARRPQVQERLTSQIADALERRLQPRGVIVVVEAEHLCMAMRGIRKPGARTTTSAVRGLLKSSASSRAEALDLLKGRIR

SEQ ID NO: 8832 - protein, 307 aa, Halolactibacillus alkaliphilus
  REGION 1..307: note = tr|A0A511WZY7|A0A511WZY7_9BACI GTP cyclohydrolase FolE2 OS=Halolactibacillus alkaliphilus OX=442899 GN=folE2; PE = 3 SV=1
MTSSKKNLPNKQARHRLFGSVAPGEKTKPVEKEQMADLQNTKNDFLFHIDAVGITNVKHPVIINGDKEPKIQTSIGTFTMTSSIVKDSKGTNMSRFTEQLEAYFQQNKLTTKLSDLQAFTKELSARLKTQDAQIELSVPYFYQQAGPYSKLQGLNHIDLNFKVTYDEKEGFTTTVGIVATITTLCPCSKEISEYSAHNQRGVVTINALLNASFDETFVDWKAVLLEMAESNASARIHPVLKRTDEKVVTEHAYENPRFVEDMVRLVSADLYEWEDVVKFDVHCQNEESIHLHDAIASIHYDKRDETK

SEQ ID NO: 8833 - protein, 307 aa, Halolactibacillus halophilus
  REGION 1..307: note = tr|A0A1I5NGH1|A0A1I5NGH1_9BACI GTP cyclohydrolase FolE2 OS=Halolactibacillus halophilus OX=306540 GN=folE2; PE = 3 SV=1
MTQYKKHLPEKQERHRLFGSVSPGKRTKPTEKDAMADLQNTQNDFLFHIDAVGITNVTHPMTIHGEIEPHTQTSVAKFTMTSSIVQQSKGTNMSRFTEQLEAYYQKQRLTTNLKDLKAFTKELSTRLKTTDATIDITVPYFYQQRGPHSQLQGLNHVDLTIKVTYDTSSGFTVHVGLAATITTLCPCSKEISEYSAHNQRGIVSITTELDPLFDETTSDWKKWLLEMAESNASAKIHPVLKRTDEKVVTEHAYENPRFVEDMVRLVSADLYEREDVVAFKVTCRNEESIHLHDAIASITYDKRVENR

SEQ ID NO: 8834 - protein, 307 aa, Halolactibacillus miurensis
  REGION 1..307: note = tr|A0A1I6T483|A0A1I6T483_9BACI GTP cyclohydrolase FolE2 OS=Halolactibacillus miurensis OX=306541 GN=folE2; PE = 3 SV=1
MTQYKKQLPEKQERHRLFGSVSPGKRTKPTEKDEMADLQNTQNDFLFHIDAVGITNVTHPINIHGEMEPTIQTSVAKFTMTSSIVQQSKGTNMSRFTEQLEAYYQQQRLKTNLEDLKAFTKELSSRLKTTDATIEVTVPYFYQQRGPHSQLQGLNHVDLTIKVTYDTASGFTIHVGLAATITTLCPCSKEISEYSAHNQRGIVSITTELDPSFDETAGDWKKRLLDMAESNASARIHPVLKRTDEKVVTEHAYENPRFVEDMVRLVSADLYEWDDVLAFKVTCRNEESIHLHDAIASITYDKRAEKR

SEQ ID NO: 8835 - protein, 240 aa, unidentified
  source 1..240: note = Halomicronema excentricum
  REGION 1..240: note = tr|A0A4Q7EI38|A0A4Q7EI38_9CYAN GTP cyclohydrolase 1; OS = Halomicronema excentricum str. Lakshadweep OX=2294035; GN = folE PE=3 SV=1
MTTVSSNTNNGANLSSSTADLDLRQNGMTAIRPDRNTAYGESTTAKPVSDESQLAMMDAVRTMLLSLGEDPEREGLLKTPKRVAEAMRFLTSGYSQSLDDLVNNAIFDEGHNEMVLVRDINLFSLCEHHMLPFMGRAHVAYIPKQRVVGLSKLARIVEMYSRRLQVQERLTRQVAEAIQEVLDPQGVAVVVEASHMCMSMRGVQKPGSWTVTSAMIGCFQEDSKTREEFLSLVRHQPSLF

SEQ ID NO: 8836 - protein, 252 aa, unidentified
  source 1..252: note = Halomicronema hongdechloris
  REGION 1..252: note = tr|A0A1Z3HUS7|A0A1Z3HUS7_9CYAN GTP cyclohydrolase 1; OS = Halomicronema hongdechloris C2206 OX=1641165 GN=folE1; PE = 3 SV=1
MVQLTFQLARRFQLLFAMTIASSSGLNGASSPTANNGRVPSASSVRPDRSKSHGLMPPTTDESDQEAMQDAVRTLLISVGEDPDREGLLKTPKRVAEAMRFLTSGYHQSLEDLVNGAIFDEGHNEMVLVRDINAFSLCEHHMLPFMGKVHVAYIPDQKVVGLSKLARIVEMYSRRLQVQERLTRQIAEAVQSILDPQGVAVVMEASHMCMVMRGVQKPGSWTVTSAMLGVFQEDSKTREEFLSLIRHQPAFT

SEQ ID NO: 8837 - protein, 212 aa, unidentified
  source 1..212: note = Halomicronema hongdechloris
  REGION 1..212: note = tr|A0A1Z3HTR9|A0A1Z3HTR9_9CYAN GTP cyclohydrolase 1; OS = Halomicronema hongdechloris C2206 OX=1641165 GN=folE2; PE = 3 SV=1
MTLSISRDDIRSGTLKTKAEPPVSDQEMEQAVRTLLLGLGEDPDREGLIDTPKRVVKALKFLTSGYHQSLGDLLNGAVFHENTNEMVLVRDIDLFSSCEHHILPILGRAHVAYIPNGKVIGLSKIARICEMYARRLQVQERLTAQIADALEGLLKPQGVAVVVEASHMCMVMRGVQKPGSWTTTSAMRGVFAADPKTRQEFMSLIRHSPSFH

SEQ ID NO: 8838 - protein, 200 aa, unidentified
  source 1..200: note = Halomonadaceae bacterium
  REGION 1..200: note = tr|A0A139CE57|A0A139CE57_9GAMM GTP cyclohydrolase 1; OS = Halomonadaceae bacterium T82-2 OX=1783518 GN=folE PE=3; SV = 1
MASTAPSREEAENAVRTLIRWAGDDPDREGLVDTPARVARAYEEFFAGYTSDPVGVLERTFSEVEGYDEMIVMNDIRFESHCEHHMAPIIGKAHIGYIPDRRVVGISKLARLVEIYAKRLQIQEKMTVQIADTLHEVLQPQGVAVVIEASHQCMTTRGIHKPGASLVTSRMLGTFRKNPATRREFLRILRLSGGEAPAIS

SEQ ID NO: 8839 - protein, 185 aa, unidentified
  source 1..185: note = Halomonadaceae bacterium
  REGION 1..185: note = tr|A0A2E2BM78|A0A2E2BM78_9GAMM GTP cyclohydrolase 1; OS = Halomonadaceae bacterium OX=2026746 GN=folE PE=3 SV=1
MTEQLADHFRQIITGLGEDPEREGLRDTPKRAAKAMQFLTHGYEQSLESLINGAVFESETDEMVLVKDIELYSMCEHHMLPFIGKCHIAYLPSGKVLGLSKFARIVDMYARRLQIQENLTRQIAEAVQQVTDARGVAVVIEAKHLCMMMRGVEKQNSSMSSSVMLGAFRANQSTRQEFLTLINGR

SEQ ID NO: 8840 - protein, 185 aa, unidentified
  source 1..185: note = Halomonas aestuarii
  REGION 1..185: note = tr|A0A1J0VIS8|A0A1J0VIS8_9GAMM GTP cyclohydrolase 1; OS = Halomonas aestuarii OX=1897729 GN=folE PE=3 SV=1
MTEELANHYRAIIHDLGEDPDREGLRDTPKRAAKAMQFLNRGYTQSLEEIINGAVFESETDEMVLVKDIELYSMCEHHLLPFIGKCHIAYLPSGKVLGLSKFARIVDMYARRMQIQENLTRQIAEAVQQVTEARGVAVVIEARHLCMMMRGVEKQNSSMTSSVMLGAFREKPSTRQEFLTLVSGR

SEQ ID NO: 8841 - protein, 183 aa, Halomonas alkaliantarctica
  REGION 1..183: note = tr|A0A4R7YPV8|A0A4R7YPV8_9GAMM GTP cyclohydrolase 1; OS = Halomonas alkaliantarctica OX=232346 GN=folE PE=3 SV=1
MSDDIAEHYRQIISALGEDPNREGLRDTPKRAAKAMQFLNAGYTQSLDDIINGAVFESQTDEMVLVKDIELYSMCEHHLLPFIGKCHIAYLPNGKVLGLSKFARIVDMFARRMQIQENLTREIAEAVQDVTDAKGVAVVIEARHLCMMMRGVEKQNSSMTSSVMLGGFRKNQATRQEFLMLIS

SEQ ID NO: 8842 - protein, 300 aa, Halomonas alkaliantarctica
  REGION 1..300: note = tr|A0A4R7YLS5|A0A4R7YLS5_9GAMM GTP cyclohydrolase FolE2 OS=Halomonas alkaliantarctica OX=232346 GN=folE2; PE = 3 SV=1
MTVLTLPDVASQTARSPAALTWVGMEGIALPILLGSRSVTAKLNAGVSLDDADARGIHMSRLYLALAPLEEAPLTLPAVKDVLNAFLTSQEGLSQNAYLSIEGELALKRQALISPLAGWKSYPFTLRCQLTPAGFQAELDLTVGYSSTCPCSAALARQLIQQAFEEDFSEIPLTKSAVSAWLGSEEGILATPHSQRSSVECSLRLSESENGELPIADSIENSIDRIERALGTALQTAVKRIDEQAFALANGQNLMFCEDAARRLDKVLRQAPRVSGFQLKVVHAESLHAHDAVARSEWNW

SEQ ID NO: 8843 - protein, 294 aa, Halomonas alkaliphila
  REGION 1..294: note = tr|A0A386X0A6|A0A386X0A6_9GAMM GTP cyclohydrolase FolE2 OS=Halomonas alkaliphila OX=272774 GN=folE2 PE=3 SV=1
MTAFTLPDIAQQPARLPGTLSWVGMEGIALPVQLAGYQVNANVSAGVSLEEAGARGIHMSRLYTALDALEHQPLTLTLIHRVLAAFLESHQALSENAYLTFSGEVLLKRDALISPLSGWKGYPFTLHSQLTPSGFKVELDVSVGYSSTCPCSAALARQLIQQAFVEDFEEIPLTKQAVLAWLGSEEGVLATPHSQRSVAHCSIRLAGNDVIPLAELIERIENALGTALQTAVKRIDEQAFALANGQNLMFCEDAAKRLDRALRRMADISGFQLRVVHAESLHAHDAVARSEWQW

SEQ ID NO: 8844 - protein, 183 aa, Halomonas alkaliphila
  REGION 1..183: note = tr|A0A386X8X0|A0A386X8X0_9GAMM GTP cyclohydrolase 1; OS = Halomonas alkaliphila OX=272774 GN=folE PE=3 SV=1
MTDDIAQHYRHIIAAIGENPDREGLRDTPKRAAKAMQFLNAGYQQSLEEIVNGAVFESQTDEMVLVKDIELYSMCEHHLLPFIGKCHIAYLPSGKVLGLSKFARIVDMYARRMQIQENLTREIAEAVQQVTQSRGVAVVIEARHLCMMMRGVEKQNSSMTSSVMLGSFRSNQATRQEFLTLIS

SEQ ID NO: 8845 - protein, 308 aa, Halomonas andesensis
  REGION 1..308: note = tr|A0A433KJ13|A0A433KJ13_9GAMM GTP cyclohydrolase FolE2 OS=Halomonas andesensis OX=447567 GN=folE2 PE=3 SV=1
MNSPLNKEAIRPARHLDDVASAASPHKGTLSWVGMEGIALPLLVAGQAIAARASAGVSLDAPDTRGIHMSRLYLALAELEHQELSLASIRSLLDTFLDSHQGLSEQAFLELNGEALLRRPALISPLSGWKTYPFALRCRRTPSGTQLILNVSIGYSSTCPCSAALSRQLIQQAFEEDFNDIPVSRAAVHAWLGSEQAILATPHSQRSQAHLSLRLTPDIDELPLLDVINSVEKSLGTALQTAVKRVDEQAFALANGQNLMFCEDAARRLHATLSHQPAVEGFALRIVHAESLHAHDAVARSEWNWEPV

SEQ ID NO: 8846 - protein, 183 aa, Halomonas andesensis
  REGION 1..183: note = tr|A0A3S0XY70|A0A3S0XY70_9GAMM GTP cyclohydrolase 1; OS = Halomonas andesensis OX=447567 GN=folE PE=3 SV=1
MTDDIAQHYRHIISAIGEDPDREGLRDTPKRAAKAMQFLNAGYRQSLEEIVNGAVFESQTDEMVLIKDIELYSMCEHHLLPFIGKCHIAYLPNGKVLGLSKFARIVDMYARRMQIQENLTREIAEAVQEVTQSRGVAVVIEARHLCMMMRGVEKQNSSMTSSVMLGGFRSNQATRQEFLMLIN

SEQ ID NO: 8847 - protein, 185 aa, Halomonas anticariensis
  REGION 1..185: note = tr|S2KMB2|S2KMB2_HALAF GTP cyclohydrolase 1; OS = Halomonas anticariensis (strain DSM 16096 / FP35); OX = 1121939 GN=folE PE=3 SV=1
MTEELAHYYRQIISGLGEDPEREGLRDTPKRAAKAMQFLTRGYSQSLEALVNGAVFESETDEMVLVKDIELYSMCEHHLLPFIGKCHIAYLPSGKVLGLSKFARIVDMYARRMQIQENLTRQIAEAVLQVTEARGVAVVIEAQHMCMMMRGVEKQNSSMTSSVMLGAFRDNQPTRQEFLTLVHGR

SEQ ID NO: 8848 - protein, 183 aa, Halomonas aquamarina
  REGION 1..183: note = tr|A0A1H8LXC5|A0A1H8LXC5_9GAMM GTP cyclohydrolase 1; OS = Halomonas aquamarina OX=77097 GN=folE PE=3 SV=1
MTDDLAQHYRQIISALGENPDREGLRDTPKRAAKAMQFLNAGYHQSLEEIVNGAVFESQTDEMVLVKDIELYSMCEHHLLPFIGKCHIAYLPSGRVLGLSKFARIVDMYARRMQIQENLTREIAEAVQQVTQARGVAVVIEARHLCMMMRGVEKQNSSMTSSVMLGGFRSSQATRQEFLTLIN

SEQ ID NO: 8849 - protein, 184 aa, Halomonas arcis
  REGION 1..184: note = tr|A0A1G9YEE9|A0A1G9YEE9_9GAMM GTP cyclohydrolase 1; OS = Halomonas arcis OX=416873 GN=folE PE=3 SV=1
MTDDIAQHYQHIISALGENPDREGLRDTPKRAAKAMQFLTAGYHQSLEEIVNGAVFESQTDEMVLVKDIELYSMCEHHLLPFIGKCHIAYLPNGNVLGLSKFARIVDMYARRMQIQENLTREIAEAVQQVTQARGVAVVIEARHLCMMMRGVEKQNSSMTSSVMLGDFRANQATRQEFLTLVRS

SEQ ID NO: 8850 - protein, 183 aa, Halomonas axialensis; identical to SEQ ID NO: 8848
  REGION 1..183: note = tr|A0A510J6J5|A0A510J6J5_9GAMM GTP cyclohydrolase 1; OS = Halomonas axialensis OX=115555 GN=folE1 PE=3 SV=1

SEQ ID NO: 8851 - protein, 299 aa, unidentified
  source 1..299: note = Halomonas beimenensis
  REGION 1..299: note = tr|A0A291P5Z3|A0A291P5Z3_9GAMM GTP cyclohydrolase FolE2 OS=Halomonas beimenensis OX=475662 GN=folE2 PE=3 SV=1
MSEDRLADILGEAAIGDTPLAWVGMEGIDLPLQMAGQSLAAKADAGVSLDDPEARGIHMSRLYLALERLAGRDLTLPRLREVLAHFLDSHHGLSQQAFLDLSGEALLRRPALISPLAGWKAYPMAIRTRLTPAGFEARLALSIGYSSTCPCSAALARQLIQERFDRDFAEQDTVESRAMRDWLGGEQGIVATPHSQRSQAHLALLLAPDTETLPVAEVVDRAEAALGTALQTAVKRVDEQAFALANGQNLMFCEDAARRLHRALRDQPGIEGFSLRVVHAESLHAHDAVARSQWNWQEG

SEQ ID NO: 8852 - protein, 185 aa, unidentified
  source 1..185: note = Halomonas beimenensis
  REGION 1..185: note = tr|A0A291P8M6|A0A291P8M6_9GAMM GTP cyclohydrolase 1; OS = Halomonas beimenensis OX=475662 GN=folE PE=3 SV=1
MTDRLANHYRQIIEELGENPDREGLRDTPKRAAKAMQFLNHGYHQSLEEIVNGAVFESDTDEMVLVKDIELYSMCEHHLLPFIGKCHIAYLPRGKVLGLSKFARIVDMYARRMQIQENLTRQIAEAVQQVTEARGVAVVIEARHLCMMMRGVEKQNSSMTSSVMLGAFRELQSTRQEFLTLVHGR

SEQ ID NO: 8853 - protein, 183 aa, Halomonas boliviensis
  REGION 1..183: note = tr|A0A265DZP1|A0A265DZP1_9GAMM GTP cyclohydrolase 1; OS = Halomonas boliviensis LC1 OX=1072583 GN=folE PE=3 SV=1
MSDDIAEHYRQIISALGEDPDREGLRDTPKRAAKAMQFLNAGYTQSLDSIINGAVFEAQTDEMVLVKDIELYSMCEHHLLPFIGKCHIAYLPNGKVLGLSKFARIVDMFARRMQIQENLTRQIAEAVQDVTQAKGVAVVIEARHLCMMMRGVEKQNSSMTSSVMLGGFRKNQATRQEFLMLIS

SEQ ID NO: 8854 - protein, 300 aa, Halomonas boliviensis
  REGION 1..300: note = tr|A0A265E283|A0A265E283_9GAMM GTP cyclohydrolase FolE2 OS=Halomonas boliviensis LC1 OX=1072583 GN=folE2; PE = 3 SV=1
MTVLTLPDIASQTTRLTSTLTWVGMEGIALPVQLGTRSVTAKLDAGVSLDDSEARGIHMSRLYLALAPLEDAPLTLPTVKDVLSTFLTSQEGLSQQAYLTVEGELPLKRQALISPLAGWKSYPFSLRGQLTPAGFQIELGLTVGYSSTCPCSAALARQSIQQAFEEDFSEIPLTPSAVSAWLGSEEGILATPHSQRSSVECSLRLTEGENEELPIADWLERAVDRIEKALGTALQTAVKRIDEQAFALANGQNLMFCEDAARRVDKALRQAPGVAGFQLKVVHAESLHAHDAVARSEWNW

SEQ ID NO: 8855 - protein, 183 aa, Halomonas campaniensis
  REGION 1..183: note = tr|A0A246RVU7|A0A246RVU7_9GAMM GTP cyclohydrolase 1; OS = Halomonas campaniensis OX=213554 GN=folE PE=3 SV=1
MSDDIAEHYRQIISALGEDPNREGLRDTPKRAAKAMQFLNAGYTQSLDDIINGAVFESQTDEMVLVKDIELYSMCEHHLLPFIGKCHIAYLPDGKVLGLSKFARIVDMFARRMQIQENLTREIAEAVQEVTQAKGVAVVIEARHLCMMMRGVEKQNSSMTSSVMLGGFRKNQATRQEFLMLIS

SEQ ID NO: 8856 - protein, 183 aa, Halomonas campaniensis
  REGION 1..183: note = tr|A0A3D0KK13|A0A3D0KK13_9GAMM GTP cyclohydrolase 1; OS = Halomonas campaniensis OX=213554 GN=folE PE=3 SV=1
MTDDIAQHYRHIITAIGENPDREGLRDTPKRAAKAMQFLTAGYQQSLEEIVNGAVFESQTDEMVLVKDIELYSMCEHHLLPFIGKCHIAYLPSGKVLGLSKFARIVDMYARRMQIQENLTREIAEAVQQVTQSRGVAVVIEARHLCMMMRGVEKQNSSMTSSVMLGSFRSNQATRQEFLTLIS

SEQ ID NO: 8857 - protein, 299 aa, Halomonas caseinilytica
  REGION 1..299: note = tr|A0A1M6XGY1|A0A1M6XGY1_9GAMM GTP cyclohydrolase FolE2 OS=Halomonas caseinilytica OX=438744 GN=folE2 PE=3; SV = 1
MMPETLEDVAAGRTTTRGVLNWVGMEGIALPVRVAEHPVDARVSASVSLDDPDAKGIHMSRLYLMLEELAERELEVSRLSGLLEGFLASHADLSRRARIALTGELTLRRPALISPLAGWKGYPVALRSWREGNSVETQVELTVGYSSTCPCSAALARQLIQQQFDRDFGGEPLDHAAIRDWLGESQGILATPHSQRSEARITVRLAQGVDAPPWLALIERVEQALGTALQTAVKRVDEQAFALANGQNTMFCEDAARRLHQALSEAPDITGFHVRVEHAESLHAHDAVAETQADWWWRD

SEQ ID NO: 8858 - protein, 201 aa, Halomonas caseinilytica
  REGION 1..201: note = tr|A0A1M6UDQ7|A0A1M6UDQ7_9GAMM GTP cyclohydrolase 1; OS = Halomonas caseinilytica OX=438744 GN=folE PE=3 SV=1
MAAPTHRNNDSAWGLSMTEQLADHYRQIIQEIGEDPDREGLRDTPKRAAKAMQFLNRGYFQSLEEIVNGAVFESDTDEMVLIKDIELYSICEHHLLPFTGKCHIAYMPRGKVLGLSKFARIVDMYARRMQIQENLTRQIAEAVQQVTDARGVAVVIEAHHLCMMMRGVEKQNSSMTSSVMLGAFRESQSTRQEFLTLVHGR

SEQ ID NO: 8859 - protein, 185 aa, unidentified
  source 1..185: note = Halomonas chromatireducens
  REGION 1..185: note = tr|A0A0X8HCX2|A0A0X8HCX2_9GAMM GTP cyclohydrolase 1; OS = Halomonas chromatireducens OX=507626 GN=folE PE=3 SV=1
MIEELANHYRQIILELGEDPQREGLRDTPKRAAKAMQFLNRGYAQTLEDIINGAVFESETDEMVLVKDIELYSMCEHHLLPFIGKCHIAYLPNGKVLGLSKFARIVDMFARRMQIQENLTRQIAEAVQQVTDARGVAVVVEARHLCMMMRGVEKQNSSMTSSVMLGAFRENQPTRQEFLTLVNSR

SEQ ID NO: 8860 - protein, 103 aa, unidentified
  source 1..103: note = Halomonas chromatireducens
  REGION 1..103: note = tr|A0A0X8HFV4|A0A0X8HFV4_9GAMM Putative GTP cyclohydrolase 1 type 2 OS=Halomonas chromatireducens; OX = 507626 GN=LOKO_02822 PE=4 SV=1
MYKLAFYVPVEDAEAVKEAVFVTGAGRIGNYEACCFQTPGTGQFRPLDGASPHIGQVGDLERVEELKVELVCEDDLIEEAVAALRAAHPYEEPAFDVWKLETF

SEQ ID NO: 8861 - protein, 322 aa, Halomonas cupida
  REGION 1..322: note = tr|A0A1M7ASQ7|A0A1M7ASQ7_9GAMM GTP cyclohydrolase FolE2 OS=Halomonas cupida OX=44933 GN=folE2 PE=3 SV=1
MMDLMLCYYVPYHAFTIIDGNTMSQLSLPDIASGSPLIDTALDWVGMEQIALPLHVAGRSIVGRASAGVSLDTPEARGVHMSRLYLALSELENHELTLSMVSEVLDTFLASHAGLSNTAFLDLGGEALLNRPALLSPLSGWKAYPFSLRCRQDSRGFEAVLGVTVGYSSTCPCSAALARQLIQQAFDEDFVDIPLSHESVRAWLGSEQGILATPHSQRSQAHISVRLSGDAEPLPLPSLIDSAEKALGTALQTAVKRVDEQAFALANGQNLMFCEDAARRLHRTLQRHPLVEGFRVRVVHGESLHAHDAVACSQSDWPSASR

SEQ ID NO: 8862 - protein, 185 aa, Halomonas cupida
  REGION 1..185: note = tr|A0A1M7HUT2|A0A1M7HUT2_9GAMM GTP cyclohydrolase 1; OS = Halomonas cupida OX=44933 GN=folE PE=3 SV=1
MTDTLANHYRGIITELGEDPDREGLVDTPRRAAKAMQFLNRGYTQSLEEIVNGAVFSSETDEMVLVKDIELYSMCEHHLLPFIGKCHIAYLPNGKVLGLSKFARIVDMYARRMQIQENLTRQIADAVQQVTNAQGVAVVIEARHLCMMMRGVEKQNSSMTSSVMLGAFREKATTRQEFLTLVNGR

SEQ ID NO: 8863 - protein, 185 aa, Halomonas daqiaonensis
  REGION 1..185: note = tr|A0A1H7KL87|A0A1H7KL87_9GAMM GTP cyclohydrolase 1; OS = Halomonas daqiaonensis OX=650850 GN=folE PE=3 SV=1
MTEELANHYRRIIHELGEDPDREGLRDTPKRAAKAMQFLNRGYTQSLEEIINGAVFESETDEMVLVKDIELYSMCEHHLLPFIGKCHIAYLPSGKVLGLSKFARIVDMYARRMQIQENLTRQIAEAVQQVTEARGVAVVIEARHLCMMMRGVEKQNSSMTTSVMLGTFREKQSTRQEFLTLVYGR

SEQ ID NO: 8864 - protein, 185 aa, Halomonas daqingensis
  REGION 1..185: note = tr|A0A1H5SUY7|A0A1H5SUY7_9GAMM GTP cyclohydrolase 1; OS = Halomonas daqingensis OX=419596 GN=folE PE=3 SV=1
MNEELANFYRQIILELGEDPEREGLRDTPKRAAKAMQFLTRGYSQTLEELVNGAVFESETDEMVLIKDIELYSMCEHHLLPFIGKCHIAYLPSGKVLGLSKFARIVDMYARRMQIQENLTRQVAEAVQQVTGARGVAVVIEARHLCMMMRGVEKQNSSMSSSVMLGAFRDNPTTRQEFLMLVAGR

SEQ ID NO: 8865 - protein, 301 aa, Halomonas desiderata
  REGION 1..301: note = tr|A0A243SZ20|A0A243SZ20_9GAMM GTP cyclohydrolase FolE2 OS=Halomonas desiderata SP1 OX=1191209 GN=folE2 PE=3; SV = 1
MNRLPLEDIAVAPATRLGTLSWVGMEGIALPFQVAGQGVTGRASAGVSLDDPTARGIHMSRLYLALAELEQRELSLMHVAAVLDGFLDTHQGLSHCAFLDLSGEAMLKRPALISPLAGWQRYPFTLRCRRDSQGFHATLELTVGYSSTCPCSAALSRQLIQQAFDEDFIDMPVSREAVRAWLGSEQGILATPHSQRSQAHLAVRLAGEQDELPLVRLVDRAERALGTALQTAVKRIDEQAFALANGQNLMFCEDAARRLHHALREQPGIGGFRLRVVHAESLHAHDAVARSEWNWDAASCS

SEQ ID NO: 8866 - protein, 185 aa, Halomonas desiderata; identical to SEQ ID NO: 8864
  REGION 1..185: note = tr|A0A243T301|A0A243T301_9GAMM GTP cyclohydrolase 1; OS = Halomonas desiderata SP1 OX=1191209 GN=folE PE=3 SV=1

SEQ ID NO: 8867 - protein, 97 aa, Halomonas elongata
  REGION 1..97: note = tr|A0A1B8P4C8|A0A1B8P4C8_HALEL GTP cyclohydrolase FolE2 OS=Halomonas elongata OX=2746 GN=folE2_1 PE=4 SV=1
MRLADGVDTPPWLDLIDSVEAALGTALQTAVKRVDEQAFALANGQNTMFCEDAARRLHQALSEASGIAGFHVRVVHAESLHAHDAVAETQADWWWRD

SEQ ID NO: 8868 - protein, 299 aa, Halomonas elongata
  REGION 1..299: note = tr|A0A329Q4L7|A0A329Q4L7_HALEL GTP cyclohydrolase FolE2 OS=Halomonas elongata OX=2746 GN=folE2 PE=3 SV=1
MMAEALEDVAAGRTATHGALNWVGMDGISLPVRVAEHPVDARVAASVSLDDPAARGIHMSRLYLLLEELAERELEVSRIAGLLENFLASHAGLSRRARLFLTGELTLRRPALVSPLAGWKGYPVALRSWREGNSVETQLELKVGYSSTCPCSAALARQLIQQQFDRDFGDESLDHASIRDWLGESHGILATPHSQRSEARITVRLADGVDTPPWLDLIDSVEAALGTALQTAVKRVDEQAFALANGQNTMFCEDAARRLHQALSEASGIAGFHVRVVHAESLHAHDAVAETQADWWWRD

SEQ ID NO: 8869 - protein, 185 aa, unidentified
  source 1..185: note = Halomonas endophytica
  REGION 1..185: note = tr|A0A2N7U921|A0A2N7U921_9GAMM GTP cyclohydrolase 1; OS = Halomonas endophytica OX=2033802 GN=folE PE=3 SV=1
MNEELADYYRQIILELGENPEREGLRDTPKRAAKAMQFLNRGYTQTLEDIINGAVFESETDEMVVVKDIELYSLCEHHLLPFIGKCHIAYMPNGKVLGLSKFARIVDMFARRMQIQENLTRQIAQAVQQVTDARGVAVVIEARHLCMMMRGVEKQNSSMTSSVMLGAFRDNQPTRQEFLTLVNGR

SEQ ID NO: 8870 - protein, 185 aa, Halomonas eurihalina
  REGION 1..185: note = tr|A0A5D9DBF2|A0A5D9DBF2_HALER GTP cyclohydrolase 1; OS = Halomonas eurihalina OX=42566 GN=folE PE=3 SV=1
MTEQLADHYRQIIQEIGEDPDREGLRDTPKRAAKAMQFLNRGYFQSLEEIVNGAVFESDTDEMVLIKDIELYSICEHHLLPFTGKCHIAYMPSGKVLGLSKFARIVDMYARRMQIQENLTRQIAEAVQQVTSARGVAVVIEARHLCMMMRGVEKQNSSMTSSVMLGAFRESQSTRQEFLTLVQGR

SEQ ID NO: 8871 - protein, 299 aa, Halomonas eurihalina
  REGION 1..299: note = tr|A0A5D9DFF9|A0A5D9DFF9_HALER GTP cyclohydrolase FolE2 OS=Halomonas eurihalina OX=42566 GN=folE2 PE=3 SV=1
MMSEALEDVAAGRTATHGALNWVGMDGISLPVRVVDHPVDARVAASVSLDDPAARGIHMSRLYLLLEELAERELEVPRIAGLLENFLASHTGLSRRARLFLTGELTLRRPALVSPLAGWKGYPVALRSWREGNSVETQLELKVGYSSTCPCSAALARQLIQQQFDRDFGDESLDHASIRDWLGESHGILATPHSQRSEARITVRLADGVDTPPWLDLIERVEAVLGTALQTAVKRVDEQAFALANGQNTMFCEDAARRLHQALSDVSGIAGFHVRVVHAESLHAHDAVAESQADWWWRD

SEQ ID NO: 8872 - protein, 301 aa, Halomonas gudaonensis
  REGION 1..301: note = tr|A0A1G8Q4T2|A0A1G8Q4T2_9GAMM GTP cyclohydrolase FolE2 OS=Halomonas gudaonensis OX=376427 GN=folE2 PE=3 SV=1
MTPRHLADVADDRRTRGSALSWVGMEGIALPLKVAGRAIAGRASAGVSLDDPTARGIHMSRLYLALAELEGQELSLSRVAGVLEAFLESHEGLASRAFLDLEGEALLRRPALISPLSGWQAYPFALRCRHDAEGLEAILDLTVGYASTCPCSAALARQLIQQAFDEDFVDMPATREAVRTWLGSEQSILATPHSQRSQALLSVRLTDDLDELPLLALVERVEKALGTPLQTAVKRIDEQAFALANGQNLMFCEDAARRLHQALREQPGIDGFALRVVHAESLHAHDAVARSEWNWTSALSD

SEQ ID NO: 8873 - protein, 185 aa, Halomonas gudaonensis
  REGION 1..185: note = tr|A0A1G8TGH1|A0A1G8TGH1_9GAMM GTP cyclohydrolase 1; OS = Halomonas gudaonensis OX=376427 GN=folE PE=3 SV=1
MTEELANHYRQIIQDLGEDPDREGLRDTPRRAAKAMQFLNRGYTQRLEEIINGAVFASETDEMVLVKDIELYSMCEHHLLPFIGKCHIAYLPNGKVLGLSKFARIVDMYARRMQIQENLTRQIAEAVQQVTEARGVAVVIEARHLCMMMRGVEKQNSSMTSSVMLGAFRENQPTRQEFLTLVNGR

SEQ ID NO: 8874 - protein, 185 aa, Halomonas halmophila
  REGION 1..185: note = tr|A0A4Y4EXK3|A0A4Y4EXK3_9GAMM GTP cyclohydrolase 1; OS = Halomonas halmophila OX=252 GN=folE1 PE=3 SV=1
MSEQLADHYRQIIQEIGEDPDREGLRDTPKRAAKAMQFLNRGYFQSLEEIVNGAVFESDTDEMVLVKDIELYSMCEHHLLPFTGKCHIAYLPQGKVLGLSKFARIVDMYARRMQIQENLTRQIAEAVQQVTDARGVAVVIEAHHLCMMMRGVEKQNSSMTSSVMLGAFRESQSTRQEFLTLVQSR

SEQ ID NO: 8875 - protein, 185 aa, Halomonas halophila
  REGION 1..185: note = tr|A0A510Z8W0|A0A510Z8W0_9GAMM GTP cyclohydrolase 1; OS = Halomonas halophila OX=29573 GN=folE1 PE=3 SV=1
MTEHLANHYRQIIEGLGEDPEREGLRDTPKRAAKAMQFLNHGYQQSLEEIVNGAVFASETDEMVLVKDIELYSMCEHHLLPFIGKCHIAYLPRGKVLGLSKFARIVDMYARRMQIQENLTRQIAEAVQQVTEARGVAVVVEARHLCMMMRGVEKQNSSMTSSVMLGAFREHQSTRQEFLTLVQGR

SEQ ID NO: 8876 - protein, 300 aa, Halomonas halophila
  REGION 1..300: note = tr|A0A510Z9C2|A0A510Z9C2_9GAMM GTP cyclohydrolase FolE2 OS=Halomonas halophila OX=29573 GN=folE2 PE=3 SV=1
MTTPLMDIADGAADQPGRLSWVGMEGIDLPLTLAGRPVQARAHAGVSLDAAEARGIHMSRLYLALERLVDREITPGRLQEVLAHFLDSHHDLSREAFLDLEGEAMLRRPALVSPLAGWKAYPFALRGRLGPDGFALRLSLEIGYSSTCPCSAGLARQLIQERFDRDFEDETALDHEAVRRWLGSEQGIVATPHSQRSRAHLELRLDGGLEALPVVEVIERAEASLGTALQTAVKRVDEQAFALANGQNLMFCEDAARRLDRTLREQPGVAGFRLRVVHAESLHAHDAVARSQWNWPEVEG

SEQ ID NO: 8877 - protein, 185 aa, unidentified
  source 1..185: note = Halomonas heilongjiangensis
  REGION 1..185: note = tr|A0A2N7TKF4|A0A2N7TKF4_9GAMM GTP cyclohydrolase 1; OS = Halomonas heilongjiangensis OX=1387883 GN=folE PE=3 SV=1
MTEELANHYRQIILELGEDPEREGLRDTPKRAAKAMQFLNHGYNQSLEEIVNGAVFESETDEMVLVKDIELYSMCEHHLLPFIGKCHIAYLPKGRVLGLSKFARIVDMYARRMQIQENLTRQIAEAVQQVTGASGVAVVIEARHLCMMMRGVEKQNSSMTSSVMLGGFRDNQPTRQEFLTLVNGR

SEQ ID NO: 8878 - protein, 185 aa, unidentified
  source 1..185: note = Halomonas huangheensis
  REGION 1..185: note = tr|W1ND68|W1ND68_9GAMM GTP cyclohydrolase 1; OS = Halomonas huangheensis OX=1178482 GN=folE PE=3 SV=1
MIDSLANHYRNLITELGEDPDREGLVDTPRRAAKAMQFLNRGYTQSLEEIVNGAVFSSETDEMVLVKDIELYSMCEHHLLPFIGKCHIAYLPNGKVLGLSKFARIVDMYARRMQIQENLTRQIADAVQQVTDAQGVAVVIEARHLCMMMRGVEKQNSSMTSSVMLGAFREKSSTRQEFLTLVNGR

SEQ ID NO: 8879 - protein, 298 aa, unidentified
  source 1..298: note = Halomonas huangheensis
  REGION 1..298: note = tr|W1NA72|W1NA72_9GAMM GTP cyclohydrolase FolE2; OS = Halomonas huangheensis OX=1178482 GN=folE2 PE=3 SV=1
MTQMFLPDVAAGPSTLDGALCWVGMEDIALPFMVAGHVVNGRAATGVSLDDPSARGIHMSRLYLALSELQNQELSLPNVATVLDHFLETHDGLSDAAFLDLSGEAMLQRPAMISPLSGWKSYPFALRCRKDARGLHAILDLTLGYSSTCPCSAALSRQLIQQAFDEDFNDMPLSHASVKAWLGSEHGILATPHSQRSQAHLSLQLADDLEELPLVKMVECAERALGTALQTAVKRIDEQAFALANGQNLMFCEDAARRLHHALRQQADISGFRLRVVHAESLHAHDAVACSEWNWENS

SEQ ID NO: 8880 - protein, 187 aa, Halomonas hydrothermalis
  REGION 1..187: note = tr|A0A291JXT5|A0A291JXT5_9GAMM GTP cyclohydrolase 1; OS = Halomonas hydrothermalis OX=115561 GN=folE PE=3 SV=1
MRPTMTDDIAQHYRQIITALGENPDREGLRDTPKRAAKAMQFLTAGYKQSLEELVNGAVFESQTDEMVLVKNIELYSMCEHHLLPFIGKCHIAYLPSGKVLGLSKFARIVDMYARRMQIQENLTREIAEAVQQVTQAKGVAVVIEARHLCMMMRGVEKQNSSMTSSVMLGGFRTNQATRQEFLTLIS

SEQ ID NO: 8881 - protein, 185 aa, Halomonas ilicicola
  REGION 1..185: note = tr|A0A1M5BW83|A0A1M5BW83_9GAMM GTP cyclohydrolase 1; OS = Halomonas ilicicola DSM 19980 OX=1121942 GN=folE PE=3; SV = 1
MTEELANHFREIIAGLGEDPDREGLRDTPMRAAKAMQFLTNGYGQTLDELVNGAVFASDTDEMVLIKDIELYSLCEHHLLPFIGKCHIAYMPGGKVLGLSKFARIVDMYARRLQIQEDLTRQIADAVQLVTEARGVAVVIEARHMCMMMRGVEKQNSSMTSSVMLGSFRGNQTTRQEFLMLVNSR

SEQ ID NO: 8882 - protein, 185 aa, Halomonas korlensis
  REGION 1..185: note = tr|A0A1I7FF53|A0A1I7FF53_9GAMM GTP cyclohydrolase 1; OS = Halomonas korlensis OX=463301 GN=folE PE=3 SV=1
MTEPLANHYRQIILELGEDPEREGLRDTPKRAAKAMQFLNHGYTQSLEEIINGAVFESETDEMVLVKDIELYSMCEHHLLPFIGKCHIAYLPSGRVLGLSKFARIVDMYARRMQIQENLTRQIAEAVLQVTDAKGVAVVIEARHLCMMMRGVEKQNSSMTSSVMLGAFRDKQSTRQEFLTLINSR

SEQ ID NO: 8883 - protein, 183 aa, Halomonas meridiana; identical to SEQ ID NO: 8848
  REGION 1..183: note = tr|A0A0D7V4M1|A0A0D7V4M1_9GAMM GTP cyclohydrolase 1; OS = Halomonas meridiana OX=29570 GN=folE PE=3 SV=1

SEQ ID NO: 8884 - protein, 183 aa, Halomonas meridiana
  REGION 1..183: note = tr|A0A1N6CYF8|A0A1N6CYF8_9GAMM GTP cyclohydrolase 1; OS = Halomonas meridiana OX=29570 GN=folE PE=3 SV=1
MTDDLAQHYRQIISALGENPDREGLRDTPKRAAKAMQFLNAGYHQSLEEIVNGAVFESQTDEMVLVKDIELYSMCEHHLLPFIGKCHIAYLPSGRVLGLSKFARIVDMYARRMQIQENLTREIAEAVQQVTQARGVAVVIEARHLCMMMRGVEKQNSSMTSSVMLGGFRSSQATRQEFLMLIN

SEQ ID NO: 8885 - protein, 185 aa, Halomonas muralis
  REGION 1..185: note = tr|A0A1G9MS76|A0A1G9MS76_9GAMM GTP cyclohydrolase 1; OS = Halomonas muralis OX=119000 GN=folE PE=3 SV=1
MTEELANHYREIIAGLGEDPSREGLRDTPKRAAKAMQFLTHGYSQTLEELVNGAVFASETDEMVLVKDIELYSMCEHHMLPFIGKCHIAYLPKGKVLGLSKFARIVDMYARRLQIQENLTRQIAEAVQQVTQASGVAVVIEAKHMCMMMRGVEKQNSSMTSSVMLGGFRENQPTRQEFLMLVNGH

SEQ ID NO: 8886 - protein, 294 aa, unidentified
  source 1..294: note = Halomonas nigrificans
  REGION 1..294: note = tr|A0A2A4HS02|A0A2A4HS02_9GAMM GTP cyclohydrolase FolE2 OS=Halomonas nigrificans OX=2042704 GN=folE2 PE=3; SV = 1
MTALTLPDIAQQPTCLPGTLSWVGMEGIALPVALAGSLVNAKVSAGVSLEAAEVRGIHMSRLYMALESLEHQSLTQTSIQRVLGAFLDSHQGLSEHAYLTFSGEVLLKRDALISPLSGWKSYPFTLRGQLTPSGFQLELDVSVGYSSTCPCSAALARQLIQQAFAEDFDDIPLTKQSVLAWLGSEEGILATPHSQRSYAHCSVRLKESDDIPLAALIERIEKALGTALQTAVKRIDEQAFALANGQNLMFCEDAAKRLERMLRSMDAISGFQLKVVHAESLHAHDAVARCEWQW

SEQ ID NO: 8887 - protein, 183 aa, unidentified
  source 1..183: note = Halomonas nigrificans
  REGION 1..183: note = tr|A0A2A4HT82|A0A2A4HT82_9GAMM GTP cyclohydrolase 1; OS = Halomonas nigrificans OX=2042704 GN=folE PE=3 SV=1
MTDDIALHYRQIITALGENPDREGLRDTPKRAAKAMQFLTAGYQQSLEQIINGAVFESQTDEMVLVKDIELYSMCEHHLLPFIGKCHIAYLPSGKVLGLSKFARIVDMFARRMQIQENLTREIAEAVQQVTQARGVAVVVEARHLCMMMRGVEKQNSSMTSSMMLGSFRTNQATRQEFLTLIS

SEQ ID NO: 8888 - protein, 302 aa, Halomonas nitroreducens
  REGION 1..302: note = tr|A0A431V5Y9|A0A431V5Y9_9GAMM GTP cyclohydrolase FolE2 OS=Halomonas nitroreducens OX=447425 GN=folE2 PE=3; SV = 1
MSEDRLADIAGQATAAAPRLAWVGMEGIDLPLQVAGQPMAGTADAGVSLDAPGARGIHMSRLYLALERLAGQDLSLMRLREVLTHFLDSHHGLARRAFLDLEGEALLRRPALVSPLAGWKAYPLAVRSCLTPEGFEARLELAIGYSSTCPCSAALARQLIQQRFDDDFAEEAAIERESLRDWLGSERGIAATPHSQRSQAHLQLRLDPDTQTLPVVEVIDRVEAALGTALQTAVKRVDEQAFALANGQNLMFCEDAARRLNRVLREQPGVAGFRLRVVHAESLHAHDAVARSQWNWPEAEPT

SEQ ID NO: 8889 - protein, 185 aa, Halomonas nitroreducens
  REGION 1..185: note = tr|A0A3S0R2L5|A0A3S0R2L5_9GAMM GTP cyclohydrolase 1; OS = Halomonas nitroreducens OX=447425 GN=folE PE=3 SV=1
MTEQLANHYRRIIEELGENPEREGLRDTPKRAAKAMQFLNHGYTQSLEGIVNGAVFESDTDEMVLVKDIELYSMCEHHLLPFIGKCHIAYLPRGKVLGLSKFARIVDMYARRMQIQENLTRQIAEAVQQVTEARGVAVVIEARHLCMMMRGVEKQNSSMTSSVMLGAFREHQSTRQEFLTLVHGR

SEQ ID NO: 8890 - protein, 183 aa, unidentified; identical to SEQ ID NO: 8855
  source 1..183: note = Halomonas olivaria
  REGION 1..183: note = tr|A0A3T1DPS3|A0A3T1DPS3_9GAMM GTP cyclohydrolase 1; OS = Halomonas olivaria OX=390919 GN=folE1 PE=3 SV=1

SEQ ID NO: 8891 - protein, 298 aa, Halomonas pacifica
  REGION 1..298: note = tr|A0A510X5F7|A0A510X5F7_9GAMM GTP cyclohydrolase FolE2 OS=Halomonas pacifica OX=77098 GN=folE2 PE=3 SV=1
MDKHPLEDIAAAPSTRLGTLNWVGMEGIALPLKVAGQAIAGRASAGVSLDDPTARGIHMSRLYLALAELEGQELSLSRLAAVLDAFLASHRGLAHQAFLDLEGEALLRRPALISPLSGWKTYPFTLRCRRDALGLHAILEVSVGYSSTCPCSAALARQLIQQAFAEDFTEMPVTREAVHAWLGSDQGVLATPHSQRSQAHLALRLAIDGDALPLLALVDRVERSLGTALQTAVKRVDEQAFALANGQNLMFCEDAARRLHHSLREQPGIEGFSLRVVHAESLHAHDAVARSQWNWQQA

SEQ ID NO: 8892 - protein, 189 aa, Halomonas pacifica
  REGION 1..189: note = tr|A0A510X7P1|A0A510X7P1_9GAMM GTP cyclohydrolase 1; OS = Halomonas pacifica OX=77098 GN=folE1 PE=3 SV=1
MGHTMTEALAEHYRQIILGLGEDPEREGLRDTPKRAAKAMQFLTRGYEQSLETLVNGAVFESETDEMVLIKDIELYSLCEHHLLPFIGKCHIAYLPSGKVLGLSKFARIVDMYARRMQIQENLTRQIAEAVQQVTQARGVAVVIEAKHMCMMMRGVEKQNSSMTSSVMLGAFRENAPTRQEFLTLINGR

SEQ ID NO: 8893 - protein, 185 aa, Halomonas pantelleriensis
  REGION 1..185: note = tr|A0A1G9VLI1|A0A1G9VLI1_9GAMM GTP cyclohydrolase 1; OS = Halomonas pantelleriensis OX=48727 GN=folE PE=3 SV=1
MTEELANHYRQIIAGLGEDPQREGLRDTPKRAAKAMQFLTRGYHQSLEELINGAVFESETDEMVLVKDIELYSMCEHHLLPFIGKCHIAYLPNGRVLGLSKFARIVDMYARRMQIQENLTRQIAEAVLQVTEARGVAVVIEAKHMCMMMRGVEKQNSSMTSSVMLGAFRENQPTRQEFLTLVNAR

SEQ ID NO: 8894 - protein, 185 aa, Halomonas saccharevitans
  REGION 1..185: note = tr|A0A1I7AP37|A0A1I7AP37_9GAMM GTP cyclohydrolase 1; OS = Halomonas saccharevitans OX=416872 GN=folE PE=3 SV=1
MTEELANHYRHIIHELGENPDREGLRDTPKRAAKAMQFLNRGYSQSLEEIINGAVFESETDEMVLVKDIELYSMCEHHLLPFIGKCHIAYLPSGKVLGLSKFARIVDMYARRMQIQENLTRQIAEAVQQVTEARGVAVVIEARHLCMMMRGVEKQNSSMTSSVMLGAFREKQSTRQEFLTLVNGR

SEQ ID NO: 8895 - protein, 298 aa, Halomonas saccharevitans
  REGION 1..298: note = tr|A0A1I6XEG7|A0A1I6XEG7_9GAMM GTP cyclohydrolase FolE2 OS=Halomonas saccharevitans OX=416872 GN=folE2 PE=3; SV = 1
MPPHHLPDVADDRTVRDSPLSWVGMEQVALPLQLAGRPVNGRVSAGVSLDDPAARGIHMSRLYLALAELQGHELTVSRMAAVLASFLDTHQGLSDVAFLDLSGEALLERPALISSLSGWQAYPFALRCRRDAEGLAITLDLTVGYSSTCPCSAALARQLIQQAFDEDFVDIPITRGAVHAWLGSEQGVLATPHSQRSQAHLSLRLGENVDELPLAALVERVEQALGTPLQTAVKRIDEQAFALANGQNLMFCEDAARRLHHALCEQPGIDGFSLRVVHAESLHAHDAVARSQWNWQEA

SEQ ID NO: 8896 - protein, 185 aa, Halomonas shengliensis
  REGION 1..185: note = tr|A0A1H0IM35|A0A1H0IM35_9GAMM GTP cyclohydrolase 1; OS = Halomonas shengliensis OX=419597 GN=folE PE=3 SV=1
MTEELANHYRQIIRAVGEDPGREGLLDTPKRAAKAMQFLNRGYLQSLEEIVNGAVFESETDEMVLVKDIELYSMCEHHLLPFIGKCHIAYLPSGKVLGLSKFARIVDMYARRMQIQENLTRQIAEAVQEVTQARGVAVVIEAQHLCMMMRGVEKQNSSMTSSVMLGAFRDNISTRQEFLTLIHGR

SEQ ID NO: 8897 - protein, 183 aa, unidentified
  source 1..183: note = Halomonas songnenensis
  REGION 1..183: note = tr|A0A2T0V6D2|A0A2T0V6D2_9GAMM GTP cyclohydrolase 1; OS = Halomonas songnenensis OX=1176243 GN=folE PE=3 SV=1
MTDDIAQHYRQIITALGENPDREGLRDTPKRAAKAMQFLNAGYQQSLEEIINGAVFESQTDEMVLVKNIELYSMCEHHLLPFIGKCHIAYLPDGKVLGLSKFARIVDMYARRMQIQENLTREIADAVQQVTGAKGVAVVVEARHLCMMMRGVEKQNSSMTSSVMLGGFRDNPATRQEFLTLIN

SEQ ID NO: 8898 - protein, 185 aa, Halomonas sp.
  REGION 1..185: note = tr|A0A4Y8W5P5|A0A4Y8W5P5_9GAMM GTP cyclohydrolase 1; OS = Halomonas sp. TBZ202 OX=2599398 GN=folE PE=3 SV=1
MTEELANHYRQILLELGEDPDREGLRDTPKRAAKAMQFLNRGYTQRLEEIINGAVFASETDEMVLVKDIELYSMCEHHLLPFIGKCHIAYLPNGKVLGLSKFARIVDMFARRMQIQENLTRQIAEAVQQVTDARGVAVVIEARHLCMMMRGVEKQNSSMTSSVMLGAFRENQPTRQEFLTLVNGR

SEQ ID NO: 8899 - protein, 185 aa, Halomonas sp.
  REGION 1..185: note = tr|A0A369L6R6|A0A369L6R6_9GAMM GTP cyclohydrolase 1; OS = Halomonas sp. DQ26W OX=2282311 GN=folE PE=3 SV=1
MIEELANHYRQIILELGENPEREGLRDTPKRAAKAMQFLNRGYAQTLEEIINGAVFESETDEMVLVKDIELYSMCEHHLLPFIGKCHIAYLPNGRVLGLSKFARIVDMFARRMQIQENLTRQIAEAVQQVTDARGVAVVVEARHLCMMMRGVEKQNSSMTSSVMLGAFRENQPTRQEFLTLVNSR

SEQ ID NO: 8900 - protein, 183 aa, Halomonas subglaciescola
  REGION 1..183: note = tr|A0A1M7EEY6|A0A1M7EEY6_9GAMM GTP cyclohydrolase 1; OS = Halomonas subglaciescola OX=29571 GN=folE PE=3 SV=1
MTDEIAQHYRQIMQHLGENPDREGLKDTPQRAAKAMQFLTAGYHQTLEEIVNGAVFESQTDEMVLVKDIELYSICEHHLLPFIGKCHVAYLPRGKVLGLSKFARITDMFARRLQIQENLTLQIAEAVQEVTDARGVAVVIEAQHLCMMMRGVEKQNSSMSSSVMLGAFRNNQPTRQEFLTLIS

SEQ ID NO: 8901 - protein, 183 aa, Halomonas subterranea
  REGION 1..183: note = tr|A0A1H9W4R9|A0A1H9W4R9_9GAMM GTP cyclohydrolase 1; OS = Halomonas subterranea OX=416874 GN=folE PE=3 SV=1
MTDDIAQYYQQIISALGENPEREGLKDTPLRAAKAMQFLTHGYHQSLQEIVNGAVFESQTDEMVLVKDIELYSMCEHHLLPFIGKCHIAYLPNGNVLGLSKFARIVDMYARRMQIQENLTREIAEAVQQVTQARGVAVVIEARHLCMMMRGVEKQNSSMTSSVMLGDFRANQATRQEFLTLVN

SEQ ID NO: 8902 - protein, 300 aa, Halomonas subterranea
  REGION 1..300: note = tr|A0A1H9PJ81|A0A1H9PJ81_9GAMM GTP cyclohydrolase FolE2 OS=Halomonas subterranea OX=416874 GN=folE2 PE=3 SV=1
MTVLTLPDIASQTTRLPSTLTWVGMEGIALPAQLGTRSVIVKLDAGVSLDDSEARGIHMSRLYLALSPLEDAPLTLPAVKDILSAFLTSQEGLSQHAYLNVEGELPLKRQALISPLAGWKSYPFSLCCQLTPDGFQAELGVTVGYSSTCPCSAALARQSIQQAFKEDFSEIPLTQSAVLAWLGSEEGILATPHSQRSFVECSLRLAEGENDELPIADWLESTIDRIQTALGTALQTAVKRIDEQAFALANGQNLMFCEDAARRVDKALRQAPGVSGFQLKVVHAESLHAHNAVARSEWNG

SEQ ID NO: 8903 - protein, 96 aa, Halomonas sulfidaeris
  REGION 1..96: note = tr|A0A455U7I7|A0A455U7I7_9GAMM GTP cyclohydrolase 1; OS = Halomonas sulfidaeris OX=115553 GN=HSBAA_28030 PE=3 SV=1
MSDDIAEHYRQIISALGEDPNREGLRDTPKRAAKAMQFLNAGYSQSLETIINGAVFESETDEMVLVKDIELYSMCEHHLCPSLVNAILLICQTAKC

SEQ ID NO: 8904 - protein, 183 aa, Halomonas sulfidaeris
  REGION 1..183: note = tr|A0A365TTB8|A0A365TTB8_9GAMM GTP cyclohydrolase 1; OS = Halomonas sulfidaeris OX=115553 GN=folE PE=3 SV=1
MSDDIAEHYRQIISALGEDPDREGLRDTPKRAAKAMQFLNAGYSQSLETIINGAVFESETDEMVLVKDIELYSMCEHHLLPFIGKCHIAYLPSGKVLGLSKFARIVDMYARRMQIQENLTREIAEAVQEVTQAKGVAVVIEARHLCMMMRGVEKQNSSMTSSVMLGGFRSNQATRHEFLMLIN

SEQ ID NO: 8905 - protein, 185 aa, Halomonas taeanensis; identical to SEQ ID NO: 8839
  REGION 1..185: note = tr|A0A1G7TX33|A0A1G7TX33_9GAMM GTP cyclohydrolase 1; OS = Halomonas taeanensis OX=284577 GN=folE PE=3 SV=1

SEQ ID NO: 8906 - protein, 300 aa, Halomonas titanicae
  REGION 1..300: note = tr|A0A558JER4|A0A558JER4_9GAMM GTP cyclohydrolase FolE2 OS=Halomonas titanicae OX=664683 GN=folE2 PE=3 SV=1
MTVLTLPDVASQTARSPAALTWVGMEGIALPVRLGSRSVTAKLNAGVSLDDADARGIHMSRLYLALAPLEEAPLTLQTVKDVLNAFLTSQDGLSQHAYLSIEGELPLKRQALISLLAGWKSYPFTLRGQLTPAGFQAELDLTVGYSSTCPCSAALARQLIQQAFEEDFAGIPLTKSAVSAWLGSEEGILATPHSQRSSVECSLRLSESESGEWPLADSIENSIDRIERALGTALQTAVKRIDEQAFALANGQNLMFCEDAARRLDKALRQAPGVTGFQLKVVHAESLHAHDAVARSEWNW

SEQ ID NO: 8907 - protein, 188 aa, Halomonas titanicae
  REGION 1..188: note = tr|L9UDE7|L9UDE7_9GAMM GTP cyclohydrolase 1; OS = Halomonas titanicae BH1 OX=1204738 GN=folE PE=3 SV=1
MMRLNMSDDIAEHYRQIISALGEDPAREGLRDTPKRAAKAMQFLNAGYTQSLDDIINGAVFESQTDEMVLVKDIELYSMCEHHLLPFIGKCHIAYLPNGKVLGLSKFARIVDMYARRMQIQENLTREIAEAVQEVTEAKGVAVVIEARHLCMMMRGVEKQNSSMTSSVMLGGFRQNQATRQEFLMLIS

SEQ ID NO: 8908 - protein, 183 aa, unidentified
  source 1..183: note = Halomonas urumqiensis
  REGION 1..183: note = tr|A0A2N7UFF1|A0A2N7UFF1_9GAMM GTP cyclohydrolase 1; OS = Halomonas urumqiensis OX=1684789 GN=folE PE=3 SV=1
MTEELANHYRQIILELGEDPEREGLRDTPKRAAKAMQFLNRGYVQSLEDIVNGAVFESETDEMVLVKDIELYSMCEHHLLPFIGRCHIAYLPRGRVLGLSKFARIVEMYARRMQIQENLTRQIAEAVQQVTEARGVAVVIEAKHMCMMMRGVEKQNSSMTSSVMLGAFRDNQSTRQEFLTLIN

SEQ ID NO: 8909 - protein, 185 aa, Halomonas ventosae
  REGION 1..185: note = tr|A0A4R6ZRA6|A0A4R6ZRA6_9GAMM GTP cyclohydrolase 1; OS = Halomonas ventosae OX=229007 GN=folE PE=3 SV=1
MTEELANHYRRIIHELGEDPDREGLRDTPKRAAKAMQFLNRGYTQSLEEIVNGAVFESETDEMVLVKDIELYSMCEHHLLPFIGKCHIAYLPSGKVLGLSKFARIVDMYARRMQIQENLTRQIAEAVLQVTEARGVAVVIEARHLCMMMRGVEKQNSSMTSSVMLGAFREKQSTRQEFLTLVSGR

SEQ ID NO: 8910 - protein, 185 aa, Halomonas ventosae
  REGION 1..185: note = tr|A0A4V3C226|A0A4V3C226_9GAMM GTP cyclohydrolase 1; OS = Halomonas ventosae OX=229007 GN=folE PE=3 SV=1
MTEELANHYRRIIHELGEDPDREGLRDTPKRAAKAMQFLNRGYAQSLEEIVNGAVFESETDEMVLVKDIELYSMCEHHLLPFIGKCHIAYLPSGKVMGLSKFARIVDMYARRMQIQENLTRQIAEAVQRVTEAHGVAVVIEARHLCMMMRGVEKQNSSMTSSVMLGAFRVKQSTRQEFLTLVSGR

SEQ ID NO: 8911 - protein, 183 aa, Halomonas venusta; identical to SEQ ID NO: 8856
  REGION 1..183: note = tr|A0A3S8YSQ0|A0A3S8YSQ0_9GAMM GTP cyclohydrolase 1; OS = Halomonas venusta OX=44935 GN=folE PE=3 SV=1

SEQ ID NO: 8912 - protein, 294 aa, Halomonas venusta
  REGION 1..294: note = tr|A0A3Q8WFA8|A0A3Q8WFA8_9GAMM GTP cyclohydrolase FolE2 OS=Halomonas venusta OX=44935 GN=folE2 PE=3 SV=1
MTAFTLPDIAQQPARLPGTLSWVGMEGIALPVKLAGCQVNANVSAGVSLEEADARGIHMSRLYTALDALEHQPLTATLIHRVLAAFLESHQALSENAYLSFSGDALLKRDALISPLSGWKSYPFTLRSQLTPSGFKIELDVSVGYSSTCPCSAALARQLIQQAFSEDFEEIPLTKQTVLAWLGSEEGVLATPHSQRSVAHCSIRLAGNDVIPLADLIERIENALGTALQTAVKRIDEQAFALANGQNLMFCEDAAKRLDGALRKMADISGFQLKVVHAESLHAHDAVARSEWQW

SEQ ID NO: 8913 - protein, 185 aa, Halomonas xianhensis
  REGION 1..185: note = tr|A0A4R8FV98|A0A4R8FV98_9GAMM GTP cyclohydrolase 1; OS = Halomonas xianhensis OX=442341 GN=folE PE=3 SV=1
MTEELANHYREIIAGLGEDPDREGLRDTPKRAAKAMQFLTRGYSQSLESLVNGAVFASETEEMVLVKDIELYSMCEHHLLPFIGKCHIAYMPRGKVLGLSKFARIVDMYARRMQIQENLTREIAEAIQQVTGAHGVAVVIEAKHMCMMMRGVEKQNSNMTTSVMLGAFRNNQTTRQEFLLLVNGR

SEQ ID NO: 8914 - protein, 298 aa, Halomonas xianhensis
  REGION 1..298: note = tr|A0A1I3DNR8|A0A1I3DNR8_9GAMM GTP cyclohydrolase FolE2 OS=Halomonas xianhensis OX=442341 GN=folE2 PE=3 SV=1
MTQHELIDVAQGASVVDGTLAWVGMEAIALPFQVGGQPVNGQVSAGVSLDDPLTRGIHMSRLYLALAELENQELTLPRVAAVLENYLDSHAALSDTAFLDLRGEVLIKRPALISPLAGWKAYPFTLRCRRDGRGLQAMLDLTVGYSSTCPCSAALARQLIQQAFDEDFTDMPISREAVRAWLGSEQGILATPHSQRSQAHLSLRLADGIEKLPIEALIDDVERSLGTALQTAVKRIDEQAFTLANGQNLMFCEDAARRLHRTLRRQASVDGFQLRVVHAESLHAHDAVARSEWNWTNA

SEQ ID NO: 8915 - protein, 187 aa, unidentified
  source 1..187: note = Halopeptonella vilamensis
  REGION 1..187: note = tr|A0A4Q8D2M2|A0A4Q8D2M2_9GAMM GTP cyclohydrolase 1; OS = Halopeptonella vilamensis OX=531306 GN=folE PE=3 SV=1
MNPDLDHHFEQIITGLGEDTRRGGLEKTPYRAARAMEYLTQGYHQSLEELVNGAMFESDNDEMVIVRDVEFYSLCEHHVLPFFGHAQVGYIPNGRVIGLSKIARIVDMYARRLQIQENLAREVAEAIQHVTDARGVAVQMDARHMCMMMRGVSKQNAEMSSSVMLGTFRESVSSRNEFLQLIRRRPA

SEQ ID NO: 8916 - protein, 213 aa, unidentified
  source 1..213: note = Halopolyspora algeriensis
  REGION 1..213: note = tr|A0A368VII7|A0A368VII7_9ACTN GTP cyclohydrolase 1; OS = Halopolyspora algeriensis OX=1500506 GN=folE PE=3 SV=1
MTSTTGSAGPGDETAPGDDAVAKPRFDHARAEAAIRELLCAAGEDPDREGLQETPARVARAYQELFAGLYTDPDEVLNRTFGESHEELVLVRDIPVYSQCEHHLLPFHGMAHVGYIPNEHGRVTGLSKIARLVDLYAKRPQVQERLTSQIADALARKLDPRGVIVVVDAEHLCMGMRGVRKAGSTTTTSAVRGIFRSSSSSRSEALSLIRDGR

SEQ ID NO: 8917 - protein, 266 aa, Halorhodospira halochloris
  REGION 1..266: note = tr|A0A125T2Q3|A0A125T2Q3_HALHR GTP cyclohydrolase FolE2 OS=Halorhodospira halochloris OX=1052 GN=folE2 PE=3; SV = 1
MEDVQGRADYRRIDINKVGIKDIRHPVRVRDRTGYEQHTVATFNMYVNLPQHFKGTHMSRFVSILSSHDREITVESFHEMLAEMTERLEAGSGHIEMTFPYFINKRAPISGVQSLMDYEVTFIGEMHPDRHETWVRVAVPLTSLCPCSKQIAERGAHNQRSLVIITALMNGFVWLEELIEIAEEEGSCDLYGLLKRPDEKYVTERAYDNPKFVEDVVRDIAARLNEDDRISAYQVTSENYESIHNHSAFALIEQDKRGYDSPFPCV

SEQ ID NO: 8918 - protein, 259 aa, Halorhodospira halophila
  REGION 1..259: note = sp|A1WYI8|GCH4_HALHL GTP cyclohydrolase FolE2; OS = Halorhodospira halophila (strain DSM 244 / SL1); OX = 349124 GN=folE2 PE=3 SV=1
MEDVQGRADTRQIEINKVGIKDIRHPVRVRDRTGRDQHTVATFSMYVNLPQHFKGTHMSRFVSILEGHDREVTVESFHEMLAEMTDRLEAHSGHIEMAFPYFVNKQAPVTGVESLMDYEVTFIGEIHGGRHETWVRVAVPITTLCPCSKEIAERGAHNQRSLVVVTALMDGFVWLEELIDLVEREGSCELYGLLKRPDEKHVTERAYDNPKFVEDVVRDIAGRLNDDGRIAAYSVTSENYESIHNHSAFALIEQDKRGR

SEQ ID NO: 8919 - protein, 188 aa, Halospina denitrificans
  REGION 1..188: note = tr|A0A4R7K374|A0A4R7K374_9GAMM GTP cyclohydrolase 1; OS = Halospina denitrificans OX=332522 GN=folE PE=3 SV=1
MSDNTEGLAADYRDIISRLGEDPDREGLADTPGRAAKAMEFLTRGYHQNLESVVNGAIFESSNDEMVVVQDIELYSLCEHHLLPFVGKCHLAYLPNGRVIGLSKCARIVDMFARRLQIQESLTRQIAEAIQEVTGAKGVAVVIEANHMCMMMRGVEKQNSTMKTSVMLGAFRESQATRMEFLTLLKRG

SEQ ID NO: 8920 - protein, 188 aa, Halospina sp.
  REGION 1..188: note = tr|A0A5J5FLG1|A0A5J5FLG1_9GAMM GTP cyclohydrolase I FolE OS=Halospina sp. K52047b OX=2614160 GN=folE PE=4 SV=1
MEHNTEGLAADYRDIIQRLGEDPEREGLAETPERAAKAMEFLTHGYHQDLDSIVNGAIFESSNDEMVAVQDIELYSLCEHHLLPFVGKCHLAYLPNGRVLGLSKCARIVDMFARRLQIQESLTRQIAEAIQEVTGAKGVAVVIEAHHMCMMMRGVEKQNSTMKTSVMLGTFRESQATRMEFLTLLKRS

SEQ ID NO: 8921 - protein, 185 aa, Halotalea alkalilenta
  REGION 1..185: note = tr|A0A172YF16|A0A172YF16_9GAMM GTP cyclohydrolase 1; OS = Halotalea alkalilenta OX=376489 GN=folE PE=3 SV=1
MTDQLARHYRAVISELGEDPTREGLRDTPERAAKAMQFLTYGYRQTLEEIVNGAVFSSSTDELVLVKDIELYSLCEHHMLPFIGRCHIGYLPSGKVLGLSKFARIVDMYARRLQIQEELTHQIASAVAEVTGAAGVGVIIEARHMCMMMRGVQKQNSSMKTSVMLGEMRENLNTRQEFLTLVGTR

SEQ ID NO: 8922 - protein, 222 aa, unidentified
  source 1..222: note = Halothece sp.
  REGION 1..222: note = tr|K9YCL6|K9YCL6_HALP7 GTP cyclohydrolase 1; OS = Halothece sp. (strain PCC 7418) OX=65093 GN=folE PE=3; SV = 1
MSNGSVKKVTNQVSLDTASSVEAAVTKDNTQEPQMQEMMGAVRTLLQGVGEDPEREGLLKTPKRVAEAMQFLTQGYEQSLEELVNGAIFDEGHNEMVLVRDIDVFSLCEHHMLPFMGKAHVAYIPNQKVVGLSKLARIVEMYSRRLQVQERLTRQIAEAIQTILDPQGVAVVMEATHMCMVMRGVQKPGSWTVTSAMLGVFQEDHKTREEFLNLIRHQPSFH

SEQ ID NO: 8923 - protein, 258 aa, unidentified
  source 1..258: note = Halothiobacillaceae bacterium
  REGION 1..258: note = tr|A0A545SKC7|A0A545SKC7_9GAMM GTP cyclohydrolase FolE2 OS=Halothiobacillaceae bacterium OX=2268194 GN=folE2; PE = 3 SV=1
MSAAIPDIQGLIDTRRIAIDAVGIKGLRHPLVVQEPDGSSQSTVATCSFTVNLPHDRKGTHMSRFVGLLGDAPRAISAPLIADMHREMLVLLEADEGGIEMSFPFFVRKIAPMSGVSSLMDYVARLSAFGDREATHVTMGVEVPVTSLCPCSKEISQYGAHNQRSHIRVDVQADADLSLTELIQRLEAQASCELYGLLKRADEKHITERAYENPKFVEDMIRDVAHALGEEPRIHGFSVDVENFESIHNHSAYARLSR

SEQ ID NO: 8924 - protein, 221 aa, unidentified
  source 1..221: note = Halothiobacillaceae bacterium
  REGION 1..221: note = tr|A0A545SA81|A0A545SA81_9GAMM GTP cyclohydrolase 1; OS = Halothiobacillaceae bacterium OX=2268194 GN=folE PE=3; SV = 1
MAVQKELDGIVHGGGTTLEGAGKAGRFPLLNSPHGKAESVLMEKHYEAILGAVGEDISRDGLLDTPKRAAKAMRFLTKGYHETLAQVIGGALFESDNDEMVIVKEIELYSLCEHHLLPMVGRVHVGYLPDGKVLGLSKVARIVEMFARRLQIQENMTRQIAEAILEATHAKGVAVVVEAQHFCMMMRGVEKQNSWTTTSMMLGRFREDRGTRMEFLSLIGK

SEQ ID NO: 8925 - protein, 263 aa, Halothiobacillus neapolitanus
  REGION 1..263: note = tr|D0L1D3|D0L1D3_HALNC GTP cyclohydrolase FolE2; OS = Halothiobacillus neapolitanus (strain ATCC 23641 / c2); OX = 555778 GN=folE2 PE=3 SV=1
MTQSAMPDVQSSFDPRNIEIDRVGIKAIKHPLTIVDGDHRQATIAECELTVALPADKKGTHMSRFVALLNAEPLVLSLATLPDWTRRMAELLHAQTADVLFAMPFFVEKSAPVSGQKALMDYQLSLSAHLDDQGQIETQLELVVPVTSLCPCSKEISSYGAHNQRSHVTVTARVTDASLSIVDLIGKIEDQGSCALWGLLKRPDEKYITEYAFDHPKFVEDMIRDVAGTLADYPGIDGYRVTVENFESIHNHSAWAVIDRLGS

SEQ ID NO: 8926 - protein, 203 aa, Halothiobacillus neapolitanus
  REGION 1..203: note = tr|D0KW31|D0KW31_HALNC GTP cyclohydrolase 1; OS = Halothiobacillus neapolitanus (strain ATCC 23641 / c2); OX = 555778 GN=folE PE=3 SV=1
MSPLHEDDFPEPLDQSQTRIATIEAAVHQILDALGEDPNREGLQDTPKRVAKALLYLTHGLNKPLESAIGNALFASDNDEMVVVRNIEFYSLCEHHMLPIIGHVDIGYIPQGKVIGLSKLARIVDLYARRLQIQENMTQQIADAVRESTDARGVAVQVRAAHMCMAMRGVEKVNAETITSMMLGTFRSDARARNEFLQLIGRG

SEQ ID NO: 8927 - protein, 266 aa, Halothiobacillus sp.
  REGION 1..266: note = tr|A0A258QJI3|A0A258QJI3_9GAMM GTP cyclohydrolase FolE2 OS=Halothiobacillus sp. 28-55-5 OX=1970386 GN=folE2; PE = 3 SV=1
MSHTAPPAAMPDVQSSFDARNIEIDRVGIKAIKHPLTVVDGAYRQASIAECELTVALPADKKGTHMSRFVALLNAEPLELSLATLPDWTRQMAELLHAHAADVQFTLPFFVEKAAPVSGQKALMDYQLSLISQLNAQGHSETRLALVVPVTSLCPCSKEISAYGAHNQRSHVSVTVRVTDSALSIRDLIRAIEDQGSCALWGLLKRPDEKFITEYAFDHPKFVEDMIRDVAGTLATYAGIDGYRVTVENFESIHNHSAWAVIDRLG

SEQ ID NO: 8928 - protein, 266 aa, Halothiobacillus sp.
  REGION 1..266: note = tr|A0A257QDF7|A0A257QDF7_9GAMM GTP cyclohydrolase FolE2 OS=Halothiobacillus sp. 20-53-49 OX=1970383 GN=folE2; PE = 3 SV=1
MSHTAPPAAMPDVQSSFDARNIEIDRVGIKAIKHPLTVVDGAYRQASIAECELTVALPADKKGTHMSRFVALLNAEPLVLSLATLPDWTRQMAELLHAHAADVQFTLPFFVEKAAPVSGQKALMDYQLSLISQLNAQGHSETRLALVVPVTSLCPCSKEISAYGAHNQRSHVSVTVRVTDSALSIRDLIRAIEDQGSCALWGLLKRPDEKFITEYAFDHPKFVEDMIRDVAGTLATYAGIDGYRVTVENFESIHNHSAWAVIDRLG

SEQ ID NO: 8929 - protein, 188 aa, Halovibrio sp.
  REGION 1..188: note = tr|A0A2A2FBT1|A0A2A2FBT1_9GAMM GTP cyclohydrolase 1; OS = Halovibrio sp. YL5-2 OX=2032626 GN=folE PE=3 SV=1
MEHNTEGLAADYRDIIRRLGEDPQREGLAETPERAAKAMEFLTRGYHQDLDSIVNGAIFESSNDEMVAVQDIELYSLCEHHLLPFVGKCHLAYLPNGRVLGLSKCARIVDMFARRLQIQESLTRQIAEAIQEVTGAKGVAVVIEAHHMCMMMRGVEKQNSTMKTSVMLGTFRESQATRMEFLTLLKRS

SEQ ID NO: 8930 - protein, 183 aa, unidentified
  source 1..183: note = Halovibrio variabilis
  REGION 1..183: note = tr|A0A511UJS2|A0A511UJS2_9GAMM GTP cyclohydrolase 1; OS = Halovibrio variabilis OX=31910 GN=folE1 PE=3 SV=1
MSDDIAHHYRQIISALGEDPDREGLRDTPQRAAKAMQFLNAGYSQSLEGIVNGAVFESQTDEMVLVKDIELYSMCEHHLLPFIGKCHIAYLPNGKVLGLSKFARIVDMFARRMQIQENLTREIAEAVQEVTQAKGVAVVIEARHLCMMMRGVEKQNSSMTSSVMLGAFRSNQATRQEFLMLIN

SEQ ID NO: 8931 - protein, 220 aa, unidentified; identical to SEQ ID NO: 6213
  source 1..220: note = Hamiltonella defensa
  REGION 1..220: note = sp|C4K3L4|GCH1_HAMD5 GTP cyclohydrolase 1; OS = Hamiltonella defensa subsp. Acyrthosiphon pisum (strain 5AT) OX=572265 GN=folE PE=3 SV=1

SEQ ID NO: 8932 - protein, 192 aa, unidentified
  source 1..192: note = Handelsmanbacteria sp.
  REGION 1..192: note = tr|A0A1F6C2D8|A0A1F6C2D8_HANXR GTP cyclohydrolase 1; OS = Handelsmanbacteria sp. (strain RIFCSPLOWO2_12_FULL_64_10) OX=1817868 GN=folE PE=3 SV=1
MAEDKIKRIAFHVEEMMKVLGLDLRDPHLKDTPGRVARMYLEIFGGLEDGNEPQITTFPNEERYDNMVMVKDVSFFSVCAHHMIPFFGRAHIAYIPGERIVGLSKLARIVEFYARRPQLQERLTEQITRFIEEKIHPKGSMVVVEARHLCMEMRGVEKPGALTVTSAVRGLFRDKMAREEFLDLLQLRREQG

SEQ ID NO: 8933 - protein, 216 aa, Hansschlegelia sp.
  REGION 1..216: note = tr|A0A4Q9GE63|A0A4Q9GE63_9RHIZ GTP cyclohydrolase 1; OS = Hansschlegelia sp. Dub OX=2528245 GN=folE PE=3 SV=1
MDAVVQHPYARVPIPAPKPAAAAAARRPTREEAEAAVRTLIAWAGDNPQREGLLDTPKRVVKAYAELFSGYSQNAAKDLERVFEDVQGYDDMVVLRDIPYFSHCEHHMVPFFGKAHVAYFPSNGVVGLSKIARVIDTYAKRLQTQETLTAQVVAAIDENLNPRGVAVMIEGEHMCMSMRGIQKQGVSTVTTQFTGLFQDDPAEQARFISLVRSVSR

SEQ ID NO: 8934 - protein, 216 aa, Hansschlegelia zhihuaiae
  REGION 1..216: note = tr|A0A4Q0MGA8|A0A4Q0MGA8_9RHIZ GTP cyclohydrolase 1; OS = Hansschlegelia zhihuaiae OX=405005 GN=folE PE=3 SV=1
MDAVVQHPRARVPIPAPKTIAGVPRPTREQAEAAVRTLIAWAGDDPAREGLIDTPKRVVKAYAELFSGYGKSAAEHLERVFEDVQGYGDMVVLRDIPYHSHCEHHMVPFVGKAHVAYYPSNGVVGLSKIARVVDVFAKRLQTQEALTSQIAEAIDEHLKPRGVAVMLEGEHMCMSMRGIQKEGVSTVTTQFSGVFRDDASEQVRFITLVRAGQRTG

SEQ ID NO: 8935 - protein, 198 aa, unidentified
  source 1..198: note = Hanstruepera neustonica
  REGION 1..198: note = tr|A0A2K1DYT3|A0A2K1DYT3_9FLAO GTP cyclohydrolase 1; OS = Hanstruepera neustonica OX=1445657 GN=folE PE=3 SV=1
MPYRKFEEYNMQVTDDVKNRYKKIIEDLGEDVTRDGLLKTPERASKAMQFLTQGYHQDAAAILKSAMFKESYNEMVIVKDIELYSLCEHHILPFFGKAHIAYIPNGHIVGLSKIPRVVDIFARRLQVQERLTEQILDCINDTLKPQGVAVVIEAAHMCMMMRGVQKQNSVTTTSGFRGQFEKIETRNEFLKLISDKFS

SEQ ID NO: 8936 - protein, 225 aa, unidentified
  source 1..225: note = Hanstruepera neustonica
  REGION 1..225: note = tr|A0A2K1DZH2|A0A2K1DZH2_9FLAO GTP cyclohydrolase 1; OS = Hanstruepera neustonica OX=1445657 GN=folE PE=3 SV=1
MKFNTDIEDFDAMGNDHIGTSANTPLRKDAFKLNQDEKIEIIKDDVRRIMETLGLDLTDDSLKGTPNRVAKMFVKELFGGLDPAKKPSASTFENKYKYGEMLVEKNITVYSTCEHHLLPIVGKAHVAYISNGTVVGLSKMNRIVDYYAKRPQVQERLTIQIVKELQEVLGTEDVACVIDAKHLCVNSRGIRDTESSTVTSEFGGKFKEKATRREFLDYIKLDTSF

SEQ ID NO: 8937 - protein, 235 aa, Hapalosiphon sp.
  REGION 1..235: note = tr|A0A0M0SIF8|A0A0M0SIF8_9CYAN GTP cyclohydrolase 1; OS = Hapalosiphon sp. MRB220 OX=1704290 GN=folE PE=3 SV=1
MTIASSNGSNRFQSPLVPDFTEAITTRPDRNTHDGRQAELHPPQEEQMEQMVEAVRTLLLGVGEDPEREGLLKTPKRVAEAMRFLTSGYNQSLEEIVNGAIFDEGHSEMVLVRDIGVFSLCEHHMLPFMGKAHVAYIPNQKVVGLSKLARIVEMYSRRLQVQERLTRQIAEAVQTILEPQGVAVVIEATHMCMVMRGVQKPGSWTVTSAMVGVFEEEHKTREEFFNLIRHQAAIF

SEQ ID NO: 8938 - protein, 235 aa, unidentified
  source 1..235: note = Hapalosiphonaceae cyanobacterium
  REGION 1..235: note = tr|A0A328IBS7|A0A328IBS7_9CYAN GTP cyclohydrolase 1; OS = Hapalosiphonaceae cyanobacterium JJU2 OX=2109628; GN = folE PE=3 SV=1
MTIVSSNGSNRFQSPLIPDFTEAITTRPDRNTHDGRQPDLHPPQEEQMDEMVEAVRTLLLGVGEDPEREGLLKTPKRVAEAMRFLTSGYNQSLEEIVNGAIFDEGHSEMVLVRDINVFSLCEHHMLPFMGKAHVAYIPNQKVVGLSKLARIVEMYSRRLQVQERLTRQIAEAVQTILEPQGVAVVIEATHMCMVMRGVQKPGSWTVTSAMVGVFEEEHKTREEFFNLIRHQAAIF

SEQ ID NO: 8939 - protein, 209 aa, unidentified
  source 1..209: note = Hartmannibacter diazotrophicus
  REGION 1..209: note = tr|A0A2C9D572|A0A2C9D572_9RHIZ GTP cyclohydrolase 1; OS = Hartmannibacter diazotrophicus OX=1482074 GN=folE PE=3; SV = 1
MYVLFNQGNADGAAKKQVARPQRPTREEAEQAVRTLIAWAGDDPDREGLVDTPARVAKAYGELFGGYDQDANEQLARVFEEVGGYKDMILVRDIPFFSHCEHHMVPFIGKAHIAYYPNAGVVGLSKLARVVDVFSRRLQTQENLTAQIADAIEEALKPRGVAVLVEAEHQCMSMRGVQKQGVSTLTTQFTGVFDRDPTEQVRFMTMVRS

SEQ ID NO: 8940 - protein, 183 aa, unidentified
  source 1..183: note = Hathewaya histolytica
  REGION 1..183: note = tr|A0A4U9R8Z1|A0A4U9R8Z1_HATHI GTP cyclohydrolase 1; OS = Hathewaya histolytica OX=1498 GN=folE PE=3 SV=1
MDKIKIQEAVKVIIDAVGEDANREGLKDTPLRISKMYEEIFKGLNEDPKDHLSKTFTVDNDNLVIEKDIHFYSMCEHHFLPFFGKAHIAYIPNGKVVGLSKLARTVEVFARRPQLQERLTEQIGNALLDNLDCKGVMVVVEAEHLCMSMRGIKKPGSKTVSMFVKGSLEKDINMQNHILTLIK

SEQ ID NO: 8941 - protein, 184 aa, unidentified
  source 1..184: note = Hathewaya proteolytica
  REGION 1..184: note = tr|A0A1M6N6S5|A0A1M6N6S5_9CLOT GTP cyclohydrolase 1; OS = Hathewaya proteolytica DSM 3090 OX=1121331 GN=folE PE=3; SV = 1
MIDKEKIENAVEMLLQGIGEDPNREGLKDTPQRIARMFQEIFAGMEEEPSKHLSKTFQVENNEMVMERDITFHSMCEHHLMPFFGKVHIAYVPNGKVVGISKLARTVEVFARRLQIQEKMTAQIAHAIMNELNPKGVMVMVEAEHLCMSMRGIKKPGTNTVTVVKLGEFEENREKVEDFYRMLR

SEQ ID NO: 8942 - protein, 188 aa, unidentified
  source 1..188: note = Hazenella coriacea
  REGION 1..188: note = tr|A0A4R3L1H0|A0A4R3L1H0_9BACL GTP cyclohydrolase 1; OS = Hazenella coriacea OX=1179467 GN=folE PE=3 SV=1
MEIDHRKIEEAVRMILEAVGEDPNREGLLDTPARVARMYKEIFSGLNEDPEEHFSVIFSEDHEELVIVKDIPFFSTCEHHLVPFFGRAHVGYIPQGGRVTGLSKLARAIETVARRPQLQERITSTVADSIMEKLDPHGVIVVVEAEHMCMTMRGVKKPGSKTITTSVRGLFKEDATARAEAINLIGIK

SEQ ID NO: 8943 - protein, 180 aa, Helicobacter acinonychis
  REGION 1..180: note = sp|Q17WX5|GCH1_HELAH GTP cyclohydrolase 1; OS = Helicobacter acinonychis (strain Sheeba) OX=382638; GN = folE PE=3 SV=1
MENFFNQFFENIGEDKNREGLKNTPKRVQELWNFLYKGYKEDPKVALKSAYFQGVCDEMIVAQHIEFYSTCEHHLLPFFGNISLGYIPKEKIIGISAIAKLIEIYSKRLQIQERLTTQIAETFDEIIEPRGVIVICEAKHLCMSMQGVQKQNAIIKTSALKGLFKKDPKTRAEFMQLLKS

SEQ ID NO: 8944 - protein, 181 aa, unidentified
  source 1..181: note = Helicobacter ailurogastricus
  REGION 1..181: note = tr|A0A0K2XBI6|A0A0K2XBI6_9HELI GTP cyclohydrolase 1; OS = Helicobacter ailurogastricus OX=1578720 GN=folE PE=3; SV = 1
MFKDCLEELFLSVGEDPKREGLINTPKRVKALWADLMAGYKDDPREILNSTVLAPTRGLVVLQNIEFYSVCEHHLLPFFGRISVGYLPDSKIVGLGAIVRLVECFSRRLQIQERLGAQIAKGLQECLEPKGVGVFCVAKHLCIAMQGVQKQESVLKTSCRLGVFEEPSVYAEFLQSLNVPV

SEQ ID NO: 8945 - protein, 181 aa, unidentified
  source 1..181: note = Helicobacter ailurogastricus
  REGION 1..181: note = tr|A0A0K2Y4G5|A0A0K2Y4G5_9HELI GTP cyclohydrolase 1; OS = Helicobacter ailurogastricus OX=1578720 GN=folE PE=3; SV = 1
MFKDCLEELFLSVGEDPKREGLINTPKRVKALWADLMAGYKDDPREILNSTVLAPTRGLVVLQNIEFYSVCEHHLLPFFGRISVGYLPDSKIVGLGAIVRLVECFSRRLQIQERLGAQIAKGLQECLEPKGVGVLCVAKHLCIAMQGVQKQESVLKTSCRLGVFEEPSVYAEFLQSLNVPV

SEQ ID NO: 8946 - protein, 178 aa, Helicobacter anseris
  REGION 1..178: note = tr|A0A3D8J4E0|A0A3D8J4E0_9HELI GTP cyclohydrolase 1; OS = Helicobacter anseris OX=375926 GN=folE PE=3 SV=1
MFDFEKFLLQIGEDPKREGLSQTPSRIQKLYADIFDGYKQDSSKALGSIFNEENFDEMITLQNIEFYSMCEHHLLPFFGFINIGYIPDKKLAGIGGLARLVDIFSHRLQIQERLTTQIADTLMELLEPKGVMVTCKATHLCMRMQGIQKQHTDIHTSAVRGIFKSDSKTRAEFIALTK

SEQ ID NO: 8947 - protein, 179 aa, unidentified
  source 1..179: note = Helicobacter apodemus
  REGION 1..179: note = tr|A0A2U8FC86|A0A2U8FC86_9HELI GTP cyclohydrolase 1; OS = Helicobacter apodemus OX=135569 GN=folE PE=3 SV=1
MEESIKKFFDYIGEDREREGLLNTPNRVIESWKHLYSGYKSNPREILDVVFSDGACNEMVILKAIEFYSVCEHHLLPFFGKISIGYIPDSKVVGISKLARLVEVYSRRLQIQEKMTTQIADTLMEVLQPKGVMVVAEAQHMCMIMRGVEKQNSIMITSAIRGLFKSDIKTREEFMGHIR

SEQ ID NO: 8948 - protein, 179 aa, unidentified
  source 1..179: note = Helicobacter apodemus
  REGION 1..179: note = tr|A0A4U8UC43|A0A4U8UC43_9HELI GTP cyclohydrolase 1; OS = Helicobacter apodemus OX=135569 GN=folE PE=3 SV=1
MEESIKKFFDYIGEDREREGLLDTPNRVIESWKHLYSGYKSNPREILDAVFSDGACNEMVILKAIEFYSVCEHHLLPFFGKISIGYIPDSKVVGISKLARLVEVYSRRLQIQEKMTTQIADTLMEVLQPKGVMVVAEAQHMCMIMRGVEKQNSIMITSAIRGLFKSDIKTREEFMGHIR

SEQ ID NO: 8949 - protein, 188 aa, Helicobacter aurati
  REGION 1..188: note = tr|A0A3D8J938|A0A3D8J938_9HELI GTP cyclohydrolase 1; OS = Helicobacter aurati OX=137778 GN=folE PE=3 SV=1
MADKKPEQILSQYLDFFFQSIGENPQREGLKETSRRLIESNAFLYSGYAKNPNDILDSLFSEGACDEMVIVKHIEFYSMCEHHFLPFFGEISIGYIPDKKVVGLSNISELVEVFARRLQIQENLTTQIADTIMQVLKPKGTMVVCEALHLCMAMRGVEKQKARVITSAVRGLFKKDSRTRMEFMQLIK

SEQ ID NO: 8950 - protein, 201 aa, Helicobacter bilis
  REGION 1..201: note = tr|N2BN33|N2BN33_9HELI GTP cyclohydrolase 1; OS = Helicobacter bilis WiWa OX=1235804 GN=folE PE=3 SV=1
MSSKKSISKMPKINMETHIKNTQNYMQDLFCFIGEDSKREGLIKTPERVAKLHEMLYSGYEIDPNSILDSVFSDGACNEMVVVRDIEFYSMCEHHLLPFFGKISIGYIPDKKVVGISNLSKLVEVFARRLQIQEKLTTQIADTIMHSLKPKGAMVVCEALHLCMAMRGNAKQNSKILTSAVRGLFQQDSRTRMEFMQLIKT

SEQ ID NO: 8951 - protein, 201 aa, Helicobacter bilis; identical to SEQ ID NO: 8950
  REGION 1..201: note = tr|A0A4U8TXP7|A0A4U8TXP7_9HELI GTP cyclohydrolase 1; OS = Helicobacter bilis OX=37372 GN=folE PE=3 SV=1

SEQ ID NO: 8952 - protein, 183 aa, Helicobacter bizzozeronii
  REGION 1..183: note = tr|F8KRC3|F8KRC3_HELBC GTP cyclohydrolase 1; OS = Helicobacter bizzozeronii (strain CIII-1) OX=1002804; GN = folE PE=3 SV=1
MCDLEQLLNKWFASIGENPQREGLKDTPKRLEKLWGDLMAGYKSNPQEILQGGFDTCGCEGLVVLKNMEFYSLCEHHLLPFFGHISLGYIPNEKIVGLGAIARLVECFSRRLQIQERLSTQIADTFNQIVHPKGVAVVCSAKHLCMAMQGVQQQDSTIKTSVLRGIFKEDTHTRAEFMELLRS

SEQ ID NO: 8953 - protein, 85 aa, Helicobacter bizzozeronii
  REGION 1..85: note = tr|H5VEQ3|H5VEQ3_HELBI GTP cyclohydrolase 1; OS = Helicobacter bizzozeronii CCUG 35545 OX=1002805; GN = HBZS_121830 PE=3 SV=1
MCDLEQLLNKWFASIGEDPQREGLKDTPKRLEKLWGDLMAGYASNPQEILQGGFGTCGCGGLVVLKNMEFYSLCEHHLLSLFWAY

SEQ ID NO: 8954 - protein, 182 aa, Helicobacter brantae
  REGION 1..182: note = tr|A0A3D8J233|A0A3D8J233_9HELI GTP cyclohydrolase 1; OS = Helicobacter brantae OX=375927 GN=folE PE=3 SV=1
MYRDFFEKLCKSVGENPHREGLKNTPQRLEQSLGELLSGYHKEAKEVFHTTFCEIPYNEMIVIKNVEFYSMCEHHLLPFFGSITIGYIPQEKIAGISDFAKLIEMYARRLQTQENLTFEIIETLMRELSPKGAMLVCEATHLCMAMRGVEKKSSTLLTSAVRGIFKESSKTRAEFLEHIKKC

SEQ ID NO: 8955 - protein, 180 aa, Helicobacter canadensis
  REGION 1..180: note = tr|C5ZWT0|C5ZWT0_9HELI GTP cyclohydrolase 1; OS = Helicobacter canadensis MIT 98-5491 OX=537970 GN=folE; PE = 3 SV=1
MEDYIKAFFDHIGEDKEREGLLETPKRVIKSWEHLYSGYKSDPKEVLGKCFSDGACDEMVVLKNIEFYSVCEHHLLPFFGKISIGYIPNAKVVGISKLARLVEVFSRRLQIQEKMTGQIADTIMEVLQAKGAMVVAEAQHMCMVMRGVEKQNSMMITSAVRGLFKSDHRTIEEFMGHIRN

SEQ ID NO: 8956 - protein, 186 aa, Helicobacter canis
  REGION 1..186: note = tr|V8CKA7|V8CKA7_9HELI GTP cyclohydrolase 1; OS = Helicobacter canis NCTC 12740 OX=1357399 GN=folE PE=3; SV = 1
MSDKPLTQAELEFHAFCARIGENPTRAGLSNTPKRLQELESTLYSGYATNPKDALGTLFDNDNMDQMVLVKDIVFYSMCEHHLLPFFGHIHIGYVPKDKLAGLSGIVRLVEVFAKRLQIQENLTNQIADELSHLLEPKGVMVVCEAQHLCMSMRASNASPLIKTSALRGLFRSDPKTRAEFLELLS

SEQ ID NO: 8957 - protein, 184 aa, Helicobacter canis
  REGION 1..184: note = tr|A0A377J4X0|A0A377J4X0_9HELI GTP cyclohydrolase 1; OS = Helicobacter canis OX=29419 GN=folE PE=3 SV=1
MSDTTQVEQAFRAFCARIGEDPNRAGLSNTPKRLQELESTLYRGYTTSPKDALGALFSNDSMDQMVLVKDIEFYSMCEHHLLPFFGAIHIGYVPRDTLAGFSGIVRLVEAFAKRLQIQENLTNQIADELSRLLKPKGVMVVCEARHLCMSMRASNQNPLIKTSALRGLFRSDPKTRAEFLELLS

SEQ ID NO: 8958 - protein, 180 aa, Helicobacter cetorum
  REGION 1..180: note = tr|I0EN12|I0EN12_HELC0 GTP cyclohydrolase 1; OS = Helicobacter cetorum (strain ATCC BAA-429 / MIT 00-7128) OX=182217 GN=folE PE=3 SV=1
MEKFFNQFFENIGEDKNREGLKDTPKRVIELWNFLYKGYKEDPKVALKSAYFQGVCDEMVIAQHIEFYSTCEHHLLPFFGHISVGYIPNEKIVGISAIAKLIEIYSKRLQIQERLTTQIAETFNEIIEPKGVIVVCEAKHLCMSMQGVQKQNTIIKTSALKGLFKKDPKTRAEFMQLLKS

SEQ ID NO: 8959 - protein, 180 aa, Helicobacter cetorum
  REGION 1..180: note = tr|I0ETB5|I0ETB5_HELCM GTP cyclohydrolase 1; OS = Helicobacter cetorum (strain ATCC BAA-540 / MIT 99-5656) OX=1163745 GN=folE PE=3 SV=1
MENFFNQFFENIGEDKNREGLKDTPKRVQELWNFLYKGYKEDPKIALKSAYFQGVCDEMVIAQHIEFYSTCEHHLLPFFGSISVGYIPNEKIVGISAIARLIEIYSKRLQIQERLTTQIAETFNEIIEPKGVIVVCEAKHLCMSMQGVQKQNAIIKTSALKGLFKKDPKTRAEFMQLLKS

SEQ ID NO: 8960 - protein, 181 aa, Helicobacter cholecystus
  REGION 1..181: note = tr|A0A3D8IX85|A0A3D8IX85_9HELI GTP cyclohydrolase 1; OS = Helicobacter cholecystus OX=45498 GN=folE PE=3 SV=1
MYKEFFENLCKKIGENPHREGLLKTPKRLEQSHLELFSGYKKSAQEVFHTTFCEIPYNEMIVIKNIEFYSMCEHHLLPFFGTMSIGYIPKKKIAGIGDFAKLIEMYARRLQTQENLTFQIIESLMQELSPQGAMLVCEATHLCMTMRGAEKKSSTLLTSALRGIFKENPKTRNEFLEHIKA

SEQ ID NO: 8961 - protein, 192 aa, Helicobacter cinaedi
  REGION 1..192: note = tr|I7GZ38|I7GZ38_9HELI GTP cyclohydrolase 1; OS = Helicobacter cinaedi CCUG 18818 = ATCC BAA-847; OX = 537971 GN=folE PE=3 SV=1
MKTPQDKALEQSSKAFFESLCAFVGEDSKREGLEATPKRIATSFAEMLDGYAQSPKVALGSVFEDGVCDEMIVLKKLPFYSMCEHHLLPFFGFISIGYIPDSKLVGISGLARLAEVFTHRLQIQEQLTAQIANALMSELSPKGVMVVCEARHLCLEMRGKQRQSHIITSALRGLFKKDSKTRAEFMQLLNNP

SEQ ID NO: 8962 - protein, 192 aa, Helicobacter cinaedi
  REGION 1..192: note = tr|A0A377JS99|A0A377JS99_9HELI GTP cyclohydrolase 1; OS = Helicobacter cinaedi OX=213 GN=folE PE=3 SV=1
MKTPQDKALEQSSKAFFESLCAFVGEDSKREGIESTPKRIATSFAEMLDGYAQSPKDALGSVFEDGVCDEMIVLKKLPFYSMCEHHLLPFFGFISIGYIPDSKLVGISGLARLAEVFTHRLQIQEQLTAQIANALMSELSPKGVMVVCEARHLCLEMRGKQRQSHIITSALRGLFKKDSKTRAEFMQLLNNP

SEQ ID NO: 8963 - protein, 185 aa, Helicobacter equorum
  REGION 1..185: note = tr|A0A3D8IQ02|A0A3D8IQ02_9HELI GTP cyclohydrolase 1; OS = Helicobacter equorum OX=361872 GN=folE PE=3 SV=1
MQEVLQEFEQFFAKLCEHIGEDTNREGLKNTPKRILESFQTLFSGYSQNPQELLGATFKEGLCDEMVIAKDIEFYSMCEHHLLPFFGHISIGYIPDKYLAGISSLARLVESFARRLQIQERLTEQIAQCLVETLQPKGVIVVCQAQHLCMSMRGVHKNPQIITSALRGLFKRDSKTRTEFMQLIK

SEQ ID NO: 8964 - protein, 179 aa, Helicobacter felis
  REGION 1..179: note = tr|E7A988|E7A988_HELFC GTP cyclohydrolase 1; OS = Helicobacter felis (strain ATCC 49179 / NCTC 12436 / CS1) OX=936155 GN=folE PE=3 SV=1
MRALWLELCARIGEDPQREGLKNTPKRLKELWDHLMQGYHLNPEQILQSAFSIERCDGIIVLKDIEFYSMCEHHLLPFFGHVSVGYIPRDRVVGLDAIAKLVEAFSRRLQIQERLSEEIASTFERILQPKGVGVFCVAKHLCMAMRGVQKQDTLVKTSALKGLFKSDARTRAEFMQLLS

SEQ ID NO: 8965 - protein, 184 aa, Helicobacter fennelliae
  REGION 1..184: note = tr|A0A2X3DDH0|A0A2X3DDH0_9HELI GTP cyclohydrolase 1; OS = Helicobacter fennelliae OX=215 GN=folE PE=3 SV=1
MDTTAFEEFCNRIGENPKREGLLQTPKRLRECEEFLYGGYKKDPALALGSLFKNNGIDEMITLRNIEFYSMCEHHILPFFGSISIGYVPNEYIAGIGGLAHLIEVFTRRLQIQETLTNQIADTIMEILKPKGVMVVCEAKHLCMSMRGLQKQNATIKTSAVRGLFKSDSKTRTEFLQLIAHSIG

SEQ ID NO: 8966 - protein, 184 aa, Helicobacter fennelliae
  REGION 1..184: note = tr|T1D2M4|T1D2M4_9HELI GTP cyclohydrolase 1; OS = Helicobacter fennelliae MRY12-0050 OX=1325130 GN=folE; PE = 3 SV=1
MDTTAFEEFCNRIGENPKREGLLQTPKRLRECEEFLYGGYKKDPALALGSLFKNNGIDEMITLRNIEFYSMCEHHILPFFGSISIGYVPNEYIAGIGGLAHLIEVFTRRLQIQETLTNQIADTIMEILKPKGVMVVCEAKHLCMSMRGLQKQNVTIKTSAVRGLFKSDSKTRTEFLQLIAHSIG

SEQ ID NO: 8967 - protein, 185 aa, Helicobacter ganmani
  REGION 1..185: note = tr|A0A3D8IGU3|A0A3D8IGU3_9HELI GTP cyclohydrolase 1; OS = Helicobacter ganmani OX=60246 GN=folE PE=3 SV=1
MQQDLQEIIRCIFDYIGEDRNREGLLETPKRVVKSWEHLYSGYKSDPKEILGRVFTEGACDEMVVLKNIEFYSVCEHHLLPFFGKISIGYIPDSKVVGISKLARLVEVYSRRLQIQEKMTSQIADTLMEVLQPKGVMVVAEAKHMCMVMRGVEKQNSIMLTSAIRGLFKSDHRTREEFMGYIKKG

SEQ ID NO: 8968 - protein, 181 aa, Helicobacter heilmannii
  REGION 1..181: note = tr|A0A0K2XX43|A0A0K2XX43_HELHE GTP cyclohydrolase 1; OS = Helicobacter heilmannii OX=35817 GN=folE PE=3 SV=1
MFKKCLEELFLSVGEDPKREGLVHTPKRVKALWADLVAGYKQDPKEILSGALCAPSSGLVVLQNIEFYSVCEHHLLPFFGRVSVGYLPGAKIVGLGAIVRLVECFSRRLQIQERLGMQIAKSLQECLEPRGVGVFCVARHLCVAMQGVQKQESVLKTSCRLGAFEEPSVYAEFLQSLNAPV

SEQ ID NO: 8969 - protein, 181 aa, Helicobacter heilmannii
  REGION 1..181: note = tr|A0A0K2XXM2|A0A0K2XXM2_HELHE GTP cyclohydrolase 1; OS = Helicobacter heilmannii OX=35817 GN=folE PE=3 SV=1
MFKACFQELCLSVGEDPSREGLQNTPKRVKALWADLMAGYKQDPKEILSAALCAPSSGLVVLQNIEFYSVCEHHLLPFFGRVSVGYLPGAKIVGLGAIVRLVECFSRRLQIQERLGMQIAKSLQECLEPRGVGVLCVARHLCVAMQGVQKQESVLKTSCRLGAFEDPAIYQEFLQSLSAPV

SEQ ID NO: 8970 - protein, 206 aa, Helicobacter hepaticus
  REGION 1..206: note = sp|Q7VFG4|GCH1_HELHP GTP cyclohydrolase 1; OS = Helicobacter hepaticus (strain ATCC 51449 / 3B1); OX = 235279 GN=folE PE=3 SV=1
MHNAKRAIFKKRENMQKSSHDSILECNAQAFFESLCQNVGENPTREGLLHTPKRIASAFSDMLNGYAKSPKQALGSVFEDGVCDEMIVLKKLHFYSICEHHLLPFFGHISIGYIPDKKLVGISGLARLTEVFTHRLQIQERLTAQIADALIAELKPKGAMIVCQARHLCLEMRSNVPQSHIITSALRGLFKKDSRTRAEFMQILKD

SEQ ID NO: 8971 - protein, 204 aa, unidentified
  source 1..204: note = Helicobacter jaachi
  REGION 1..204: note = tr|A0A4U8T6F7|A0A4U8T6F7_9HELI GTP cyclohydrolase 1; OS = Helicobacter jaachi OX=1677920 GN=folE PE=3 SV=1
MSAQHHSNNHIDSIHADSVSTLIESSTEFFNILCQNIGENPTREGLLRTPERMAQSLCDMLNGYTISPKAALGSIFKDNVCDEMIILKKLPFYSICEHHLLPFFGTLSIAYIPNKSFVGISGLARLAEIFAHRLQIQEQLTAQIADSIMCELDPKGAIVVCEARHLCLEMRGNHKQSPIITSALRGNFKADSKTRAEFMQLIKD

SEQ ID NO: 8972 - protein, 199 aa, unidentified
  source 1..199: note = Helicobacter japonicus
  REGION 1..199: note = tr|A0A4U8TJW8|A0A4U8TJW8_9HELI GTP cyclohydrolase 1; OS = Helicobacter japonicus OX=425400 GN=folE PE=3 SV=1
MTKHTKDQSTPLQSSLLEQNTQLFFETLCQNVGENSNREGLLRTPERIAQSLSTMLNGYVQSPKEALGSIFEESTYDEMIVLKKLHFYSMCEHHLLPFFGYISIGYIPDKKFVGISGLARLVEVFTHRLQIQENLTAQIANAIESHLHPKGTMIVCEARHLCLEMRGQQPQSPIITSALRGLFKKDSRTRAEFMQLIKD

SEQ ID NO: 8973 - protein, 186 aa, unidentified
  source 1..186: note = Helicobacter macacae
  REGION 1..186: note = tr|V8C960|V8C960_9HELI GTP cyclohydrolase 1; OS = Helicobacter macacae MIT 99-5501 OX=1357400 GN=folE; PE = 3 SV=1
MQNQQINEQIFRDFCKRIGEDYTRAGLQATPKRLAQLESILYAGYSLSPKEALGGLFANSGIDEMISIKDIAFYSMCEHHLLPFFGKVHIGYVPKDSIAGISGFVRLVEVYAKRLQIQENLTNQIAQSITELLSPKGVMVVCEAHHLCMSMREATKTQAQITTSAVRGIFKSDSRTRGEFLQLIKG

SEQ ID NO: 8974 - protein, 192 aa, unidentified
  source 1..192: note = Helicobacter magdeburgensis
  REGION 1..192: note = tr|A0A4U8T320|A0A4U8T320_9HELI GTP cyclohydrolase 1; OS = Helicobacter magdeburgensis OX=471858 GN=folE PE=3 SV=1
MKTPQDKALEQNSKAFFESLCAFVGEDSKREGIESTPKRIATSFAEMLDGYAQSPKDALGSVFEDGVCDEMIVLKKLPFYSMCEHHLLPFFGFISIGYIPDSKLVGISGLARLAEVFTHRLQIQEQLTAQIANALMSELSPKGVMVVCEARHLCLEMRGKQRQSHIITSALRGLFKKDSKTRAEFMQLLNNP

SEQ ID NO: 8975 - protein, 186 aa, Helicobacter marmotae
  REGION 1..186: note = tr|A0A3D8I4L2|A0A3D8I4L2_9HELI GTP cyclohydrolase 1; OS = Helicobacter marmotae OX=152490 GN=folE PE=3 SV=1
MQTLEQLSQGFFKALCAKIGEDINREGLKTTPSRIATSFTQMLDGYTKSPKEALGSVFEEGAYDEMIVLKKLPFYSMCEHHLLPFFGTLSIGYIPNKHFAGISGLARLAEIFTHRLQIQERLCQEIAHAIEAELKPKGVMVVCEARHLCLEMRGEQRQSHIITSTLLGLFKRDSKTRFEFMQLIKE

SEQ ID NO: 8976 - protein, 184 aa, Helicobacter muridarum
  REGION 1..184: note = tr|A0A4U8TIZ5|A0A4U8TIZ5_9HELI GTP cyclohydrolase 1; OS = Helicobacter muridarum OX=216 GN=folE PE=3 SV=1
MEKITSQYLYSLFRHINENPNREGLSNSAKRILELNSFLYKGYERNPSEVLDSVFSDGACDEMVIVKNIEFYSMCEHHLLPFFGEISVGYIPDKRLVGISNIAELVEIFARRLQIQENLTTQIADTIMQTLNPKGTMVVCEALHLCMAMRGVQKQKARVVTSAVRGLFKRDSRTRAEFMQLISS

SEQ ID NO: 8977 - protein, 191 aa, Helicobacter muridarum
  REGION 1..191: note = tr|A0A377PUI7|A0A377PUI7_9HELI GTP cyclohydrolase 1; OS = Helicobacter muridarum OX=216 GN=folE PE=3 SV=1
MCQNDTDMEKITSQYLYSLFRHINENPNREGLSNSAKRILELNSFLYKGYERNPSEVLDSVFSDGACDEMVIVKNIEFYSMCEHHLLPFFGEISVGYIPDKRLVGISNIAELVEIFARRLQIQENLTTQIADTIMQTLNPKGTMVVCEALHLCMAMRGVQKQKARVVTSAVRGLFKRDSRTRAEFMQLISS

SEQ ID NO: 8978 - protein, 181 aa, Helicobacter mustelae
  REGION 1..181: note = tr|D3UJ19|D3UJ19_HELM1 GTP cyclohydrolase 1; OS = Helicobacter mustelae (strain ATCC 43772 / LMG 18044 / NCTC 12198 / 12198) OX=679897 GN=folE PE=3 SV=1
MINFEKFFLKIGEDPNREGLRDTPKRIKKLYESLFDGYHKDIDQALGSVFNEEHFDSMITLKDMEFYSMCEHHLLPFFGKIHIGYIPNEKLAGIGGLARLVDIFAHRLQIQERFTNQIADILMQKLSPKGVMVTCEATHLCMRMQGMQKQHANIHTSAVRGIFKTDSRTRSEFIAFVAAKS

SEQ ID NO: 8979 - protein, 260 aa, Helicobacter pametensis
  REGION 1..260: note = tr|A0A3P6LDR9|A0A3P6LDR9_9HELI GTP cyclohydrolase FolE2 OS=Helicobacter pametensis OX=95149 GN=folE2 PE=3; SV = 1
MNAIADVQSSPDQRNMPINQVGIKDLHFPLQIQGAEGVQHTIARIGMTVALPASQKGTHMSRFVALMEERQHLVLDFTSLHQLTLDMLERLDAQAGRINISFPFFRKKAAPVSGITSFLDYAVTWQGEVPASGEYSHQIKVLAPVTSLCPCSKEISQYGAHNQRSHVTVTLACHKQEVSIEEIIDLVENKASCQLYGLLKRPDEKYVTEHAYENPKFVEDMVRDIAVALKNDPRIDCFSVESENFESIHNHSAYALIEYP

SEQ ID NO: 8980 - protein, 180 aa, Helicobacter pullorum
  REGION 1..180: note = tr|A0A1C0W2K0|A0A1C0W2K0_9HELI GTP cyclohydrolase 1; OS = Helicobacter pullorum OX=35818 GN=folE PE=3 SV=1
MEEKIRAFFDYIGEDRDREGLLETPMRVIKSWEHLYSGYKSDPKEILGKCFSDGACDEMVVLKDIEFYSVCEHHLLPFFGKVSIGYIPDSKVVGISKLARLVEVFSRRLQIQEKMTSQIADTIMEVLQPKGAMVVAEAKHMCMVMRGVEKQNSIMTTSAIRGLFKSDHRTREEFMGHIRS

SEQ ID NO: 8981 - protein, 180 aa, Helicobacter pullorum
  REGION 1..180: note = tr|A0A0N1E794|A0A0N1E794_9HELI GTP cyclohydrolase 1; OS = Helicobacter pullorum OX=35818 GN=folE PE=3 SV=1
MEEKIRAFFDYIGEDRDREGLLETPMRVIKSWEHLYSGYKSDPKEILGKCFSDGACDEMVVLKDIEFYSVCEHHLLPFFGKISIGYIPDSKVVGISKLARLVEVFSRRLQIQEKMTSQIADTIMEVLQPKGAMVVAEAKHMCMVMRGVEKQNSIMTTSAIRGLFKSDHRTREEFMGHIRS

SEQ ID NO: 8982 - protein, 243 aa, Helicobacter pylori
  REGION 1..243: note = sp|O25613|GTPC1_HELPY GTP cyclohydrolase 1 type 2; OS = Helicobacter pylori (strain ATCC 700392 / 26695); OX = 85962 GN=HP_0959 PE=1 SV=1
MALVKEVLVVLNRLSPFELQESWDNSGLNVGSENSEFSEIVACLEITLKIALNAPQNALIITHHPLIFKPLKTLNDEIYPGNILKILIQKNVSVISMHTNFDKTHLNKHFAHALLEFDGLVEKGLMLVKENANIEFDALVKKIKSSLGVGSLACVKSSQTIKDLAFVCGSGASMFSSLKAQSCLITGDVKYHDAMIAQSLGISLIDATHYYSERGFALIVAEILHSFNYLVTIENFKNPLQII

SEQ ID NO: 8983 - protein, 180 aa, Helicobacter pylori
  REGION 1..180: note = tr|J0LA99|J0LA99_HELPX GTP cyclohydrolase 1; OS = Helicobacter pylori Hp H-36 OX=992044 GN=folE PE=3 SV=1
MENFFNQFFENIGEDKNREGLKETPKRVQELWKFLYKGYKEDPRVALKSAYFQGVCDEMIVAQNIEFYSTCEHHLLPFFGNISVGYIPKEKIVGISAIAKLIEIYSKRLQIQERLTTQIAETFDEIIEPRGVIVVCEAKHLCMSMQGVQKQNAIIKTSVLRGLFKKDPKTRAEFMQLLKS

SEQ ID NO: 8984 - protein, 216 aa, unidentified
  source 1..216: note = Helicobacter saguini
  REGION 1..216: note = tr|A0A347VX56|A0A347VX56_9HELI GTP cyclohydrolase 1; OS = Helicobacter saguini OX=1548018 GN=folE PE=3 SV=1
MESKRINSKKDSKKRNKESSKIDSIESNKSYKESIESYFENLCQKIGEDSKRESLAKTPKRLMDLNDFLYSGYNADVSEILSHTFNEFDGVFNEMVIIKDIEFYSMCEHHLLPFFGNISIGYIPDKKVVGISSLAKLVEVFAKRLQIQENLTKQIADSIMESLKPKGAMIVCEALHLCMAMRGAQKQNARILTSAVRGIFQKDSKTRTEFMQLIKK

SEQ ID NO: 8985 - protein, 180 aa, Helicobacter sp.
  REGION 1..180: note = tr|A0A3D6E4D9|A0A3D6E4D9_9HELI GTP cyclohydrolase 1; OS = Helicobacter sp. OX=218 GN=folE PE=3 SV=1
MEETIRSIFDFIGDDRHREGLLDTPKRVVKSWDKLYSGYTQDPREILGTVFEDGACDEMVVLKNIEFYSMCEHHMLPFFGKVSIGYIPDQKVVGISKLARLVEVFARRLQIQEKMTGQIADTLMEVLQPKGAMVVAEATHMCMVMRGVEKQQSVMVTSAVRGLFKRDARTREEFMGHIRH

SEQ ID NO: 8986 - protein, 199 aa, Helicobacter sp.
  REGION 1..199: note = tr|A0A4U8SRM5|A0A4U8SRM5_9HELI GTP cyclohydrolase 1; OS = Helicobacter sp. MIT 03-1616 OX=1548148 GN=folE PE=3; SV = 1
MTKHTKNQSLPLQSPLLKQNTQLFFETLCQNVGENPNRDGLLRTPERIAQSFSTMLNGYSQSPKEALGSIFEENVCDEMIVLKKLHFYSMCEHHLLPFFGHISIGYIPDKKLVGISGLARLVEVFAHRLQIQENLTTQIANALDEELKPKGAMIVCEARHLCLEMRNKQPQSPVITSTLRGLFKKDSRTRAEFMQLIQH

SEQ ID NO: 8987 - protein, 183 aa, Helicobacter suis
  REGION 1..183: note = tr|A0A510HBJ0|A0A510HBJ0_9HELI GTP cyclohydrolase 1; OS = Helicobacter suis OX=104628 GN=folE PE=3 SV=1
MTQDLWNLLCARIGEDPQREGLKNTPQRVKLLWEFLTSGYQSDPEQILQSAFEIGSTDGIVLLQNIEFYSLCEHHLLPFFGHISIGYIPNDKVVGLSALARFVESFARRLQIQERLTTQIAQTLKRVLEPKGVGVICTAKHLCMAMQGIQKQDSVVKTSVLEGIFKENARTRAEFMQMLSGLV

SEQ ID NO: 8988 - protein, 183 aa, Helicobacter suis; identical to SEQ ID NO: 8987
  REGION 1..183: note = tr|E7G524|E7G524_9HELI GTP cyclohydrolase 1; OS = Helicobacter suis HS5 OX=710394 GN=folE PE=3 SV=1

SEQ ID NO: 8989 - protein, 201 aa, Helicobacter trogontum
  REGION 1..201: note = tr|A0A4U8S9Z2|A0A4U8S9Z2_9HELI GTP cyclohydrolase 1; OS = Helicobacter trogontum OX=50960 GN=folE PE=3 SV=1
MSSKNSISEKSNTHMQMHIENTQNYMQNLFQFIGEDGNREGLVKTPERVAKLHETLYSGYAIDPNTILDSVFSDGACNEMVVVRDIEFYSMCEHHLLPFFGKISIGYIPDKKVVGISNLSKLVEVFARRLQIQEKLTTQIADTIMHSLKPKGAMVVCEALHLCMAMRDNAKQNSKILTSAVRGLFQQDSRTRMEFMQLIKT

SEQ ID NO: 8990 - protein, 201 aa, Helicobacter trogontum
  REGION 1..201: note = tr|A0A4U8T7Z9|A0A4U8T7Z9_9HELI GTP cyclohydrolase 1; OS = Helicobacter trogontum OX=50960 GN=folE PE=3 SV=1
MSSKNSISEKSNTHMQMHIENTQNYMQNLFQFIGEDSNREGLVKTPERVAKLHETLYSGYAIDPNTILDSVFSDGACNEMVVVRDIEFYSMCEHHLLPFFGKISIGYIPDKKVVGISNLSKLVEVFARRLQIQEKLTTQIADTIMHSLKPKGAMVVCEALHLCMAMRGNAKQNSKILTSAVRGLFQQDSRTRMEFMQLIKT

SEQ ID NO: 8991 - protein, 199 aa, Helicobacter typhlonius
  REGION 1..199: note = tr|A0A099UEF6|A0A099UEF6_9HELI GTP cyclohydrolase 1; OS = Helicobacter typhlonius OX=76936 GN=folE PE=3 SV=1
MTKHTKNQSLPLQSPLLKQNTQLFFETLCQNVGENPNRDGLLRTPERIAQSFSTMLNGYSQSPKEALGSIFEENVCDEMIVLKKLHFYSMCEHHLLPFFGHISVGYIPDKKLVGISGLARLVEVFAHRLQIQENLTTQIANALDEELKPKGAMIVCEARHLCLEMRNKQPQSPVITSTLRGLFKKDSRTRAEFMQLIQH

SEQ ID NO: 8992 - protein, 183 aa, unidentified
  source 1..183: note = Helicobacter valdiviensis
  REGION 1..183: note = tr|A0A2W6PM10|A0A2W6PM10_9HELI GTP cyclohydrolase 1; OS = Helicobacter valdiviensis OX=1458358 GN=folE PE=3 SV=1
MEEKIEQNFKEILEFIGEDSSREGLAQTPKRLMESFKEIFSGYSVNPSEILGTTFNEGASDEMVVLKDVEFYSMCEHHLLPFYGKVSIGYIPDKKIVGISALVRLVEVFSKRLQIQENMTTQIAKTLMEVLNPKGVMVVVEAQHLCMMMRGVKQQKGTLITSAVRGIFKSDPRTREEFMGHIR

SEQ ID NO: 8993 - protein, 192 aa, unidentified
  source 1..192: note = Helicobacter winghamensis
  REGION 1..192: note = tr|A0A2N3PL32|A0A2N3PL32_9HELI GTP cyclohydrolase 1; OS = Helicobacter winghamensis OX=157268 GN=folE PE=3 SV=1
MPKNIKENTGESTQELIRTIFDCIGEDRNREGLLDTPKRVVKSWEHLYSGYKSDPKEILGRVFTEGACDEMVVLKDIEFYSVCEHHMLPFFGKVSIGYIPDSKVVGISKLARLVEVYSRRLQIQEKMTAQIADTLMEVLQPKGVMVVAEAKHMCMVMRGVEKQNSQMLTSAIRGLFKSDHRTREEFMGLIRS

SEQ ID NO: 8994 - protein, 180 aa, unidentified
  source 1..180: note = Helicobacteraceae bacterium
  REGION 1..180: note = tr|A0A1J5FHU4|A0A1J5FHU4_9HELI GTP cyclohydrolase 1; OS = Helicobacteraceae bacterium CG2_30_36_10 OX=1805215; GN = folE PE=3 SV=1
MMMLHVGENPEREGLLETPQRVRKAYEFIYGGYKENPKEILEKALFTSSNDEMVLIKDIEFYSTCEHHLLPIIGRVHVAYIPNGKVVGLSKIPRVVNVFARRMQIQEQLTEQIADAIMDAISPKGVAVVIAARHMCMEMRGVEKINSTTTSSALRGLFKKDEKTRSEFFSLINSPTGMRY

SEQ ID NO: 8995 - protein, 179 aa, unidentified
  source 1..179: note = Helicobacteraceae bacterium
  REGION 1..179: note = tr|A0A1J4TZQ3|A0A1J4TZQ3_9HELI GTP cyclohydrolase 1; OS = Helicobacteraceae bacterium CG1_02_36_14 OX=1805214; GN = folE PE=3 SV=1
MMLHVGENPEREGLLETPSRVRKAYEFIYGGYKENPKEILEKALFTSSNDEMVLIKDIEFYSTCEHHLLPIIGRVHVAYIPDGKVVGLSKIPRVVNVFARRMQIQEQLTEQIADAIMESIAPKGVAVVVVARHMCMEMRGVEKINSTTTSSALRGLFKKDEKTRSEFFSLINSPSGTRY

SEQ ID NO: 8996 - protein, 190 aa, Heliobacterium modesticaldum
  REGION 1..190: note = tr|B0TAY2|B0TAY2_HELMI GTP cyclohydrolase 1; OS = Heliobacterium modesticaldum (strain ATCC 51547 / Ice1); OX = 498761 GN=folE PE=3 SV=1
MDLMKIEQAVYMILEAIGEDPRREGLVDTPRRVARMYQEILGGLEEDPKRHLEVIFTEEHEEMVLVKDIPLYSVCEHHLLPFYGVAHVAYIPRSGMITGLSKLARLVEGFAKRPQLQERLTAQIADAIVEKLNPQGVLVVIEAEHMCMTMRGVKKPGSRTVTSAVRGIFRSRPATRSEAISLIRSSRNLP

SEQ ID NO: 8997 - protein, 189 aa, Heliophilum fasciatum
  REGION 1..189: note = tr|A0A4R2RIT8|A0A4R2RIT8_9FIRM GTP cyclohydrolase 1; OS = Heliophilum fasciatum OX=35700 GN=folE PE=3 SV=1
MDLKKIEQAVTMILEAIGEDPQREGLLDTPKRVARMYQEILGGIEEDPSRHLHVMFNEEHEEMVMVKDIPLYSMCEHHLLPFYGVAHIAYIPQAGRITGLSKIARTVEGFAKRPQLQERLTAQIANSLMDVLEPQGVLVVIEAEHMCMTMRGVKKPGSRTVTSAVRGIFQKNKATRSEAIALLNTGKLP

SEQ ID NO: 8998 - protein, 204 aa, unidentified
  source 1..204: note = Henriciella algicola
  REGION 1..204: note = tr|A0A399RND1|A0A399RND1_9RHOB GTP cyclohydrolase 1; OS = Henriciella algicola OX=1608422 GN=folE PE=3 SV=1
MDAITKEENRGHMDAVRRPTQEEAEDAVRTLLAWAGDDPRREGLLDTPKRVVKAYKEWFQGYEEDPVKYLSRTFDDVQGYDDMVMLREIDVESHCEHHMAPFLGTAYVAYMPTQAVVGISKIARVVEIFAKRLQTQETMTAQICDAITESLAPAGTAVLIDAVHQCMTTRGVHHPNVSTITTQFTGVFKTDKDMRDRFLRLAGR

SEQ ID NO: 8999 - protein, 204 aa, unidentified
  source 1..204: note = Henriciella barbarensis
  REGION 1..204: note = tr|A0A399QZJ2|A0A399QZJ2_9RHOB GTP cyclohydrolase 1; OS = Henriciella barbarensis OX=86342 GN=folE PE=3 SV=1
MDAITRDENRGEMDPVKRPTQQEAEDAVRTLLAWAGDDPRREGLLDTPKRVVKAYKEWFQGYEEDPVKYLSRTFDDVQGYDDMVMLREIDVESHCEHHMAPFLGTAYVAYMPTQAVVGISKIARVVEIFAKRLQTQETMTAQICDAITDSLAPAGTAVLIDAVHQCMTTRGVHHPNVSTITTQFTGVFKTDKDMRDRFLRLAGR

SEQ ID NO: 9000 - protein, 204 aa, Henriciella sp.
  REGION 1..204: note = tr|A0A399RLL8|A0A399RLL8_9RHOB GTP cyclohydrolase 1; OS = Henriciella sp. JN25 OX=2305466 GN=folE PE=3 SV=1
MDAITTDKELAKGEPLTRPSQEEAEAAVRTLLAWAGDDPRREGLLDTPKRVVNAYREWFQGYDEDPVKYLSRTFEDVQGYDDMVMLRDIDVESHCEHHMAPFLGKAWVAYMPTQAVVGISKLARVVEIYAKRLQTQETMTAQICDAITDSLAPSGVAVMIDAVHQCMTTRGVHHPNVSTITTQFTGVFKTDKDMRDRFLRLTGR

SEQ ID NO: 9001 - protein, 204 aa, Henriciella sp.
  REGION 1..204: note = tr|A0A2D8YC05|A0A2D8YC05_9RHOB GTP cyclohydrolase 1; OS = Henriciella sp. OX=1968823 GN=folE PE=3 SV=1
MDAITKDENRDHMDPVKRPTQQEAEEAVRVLLAWAGDDPRREGLLDTPKRVVNAYKEWFQGYEEDPVKYLSRTFDDVQGYDDMVMLREIDVVSHCEHHMAPFLGTAYVAYMPTQAVVGISKIARVVEIFAKRLQTQETMTAQICDAITESLAPAGTAVLIDAVHQCMTTRGVHHPNVSTITTQFTGVFKTDKDMRDRFLRLAGR

SEQ ID NO: 9002 - protein, 215 aa, unidentified
  source 1..215: note = Hephaestia caeni
  REGION 1..215: note = tr|A0A397ND43|A0A397ND43_9SPHN GTP cyclohydrolase 1; OS = Hephaestia caeni OX=645617 GN=folE PE=3 SV=1
MDFYDGSTALNNCATGDFGLPADRSPRPTTEQAVRAMIAATGDNPDREGLLETPARVARAWREWFAGYGVDPAALLARTFTESAGYDDTITLRSIPVVSTCEHHLAPITGVAHVAYRPGASVVGISKLSRLVDAYARRLQLQERLTSQIAHTLDDVLKPRGVAVVIEAHHGCMSSRGVNQHGVSLVTHCWLGDFREDPVLRRELLGTLPLPRRDR

SEQ ID NO: 9003 - protein, 206 aa, unidentified
  source 1..206: note = Hephaestia caeni
  REGION 1..206: note = tr|A0A397PDW8|A0A397PDW8_9SPHN GTP cyclohydrolase 1; OS = Hephaestia caeni OX=645617 GN=folE PE=3 SV=1
MSSLHDSPDDGKAVDAPPAIPVPDDVTEAVRTLIRWAGDDPEREGLLDTPRRVARAWKEYCAGYADDPAHHLARVFEEVGGYDEIVLLKDIPFQSHCEHHMAPIHGTAHIAYLPRNHVVGISKLARVLHAYARRLQVQERLTAEVADCIWNALHPVGVAVVIQATHACMTARGVRTPGVGMVTSRMMGAFRDDERSRREVLALMGF

SEQ ID NO: 9004 - protein, 308 aa, Herbaspirillum aquaticum
  REGION 1..308: note = tr|A0A225T037|A0A225T037_9BURK GTP cyclohydrolase FolE2 OS=Herbaspirillum aquaticum OX=568783 GN=folE2 PE=3; SV = 1
MSVTDKRSPLPDVARDEPASIALPLQWVGMCGIALPLRLPDGTTLPASAEVAVDLPDPQAKGIHMSRLYLLLDTFAGRSRLTPAAVHELLRQMRESHADCQSRAALLRLDFALLQQRAALVTPALTGWKSYPVSLSAQLRDDTLDLRLTVSVAYSSTCPCSAALSRQALQDAFATDFAQHEAIDRDAALGWLARHASVATPHSQRSQAVLSIAVSGDAAQFPLVELIDSAEAALGTAVQTAVRRADEQAFALVNGANLMYVEDAARRLQQALEARFAACSVRVSHFESLHAHDAVATAATPGWQELLR

SEQ ID NO: 9005 - protein, 308 aa, Herbaspirillum huttiense
  REGION 1..308: note = tr|A0A4P7AAT9|A0A4P7AAT9_9BURK GTP cyclohydrolase FolE2 OS=Herbaspirillum huttiense OX=863372 GN=folE2 PE=3; SV = 1
MPHISKRNPLPDVARDEPASIALPLQWVGMCGIALPLRLSDGMQLPASAEVAVDLPDPQAKGIHMSRLYLLLDAFASRSRLTPTAVHELLRQMRESHADCQSRAALLRLDFALLQQRAALVTPELAGWKSYPVTLTAQLRDTTLALRLTVRITYSSTCPCSAALSRQALQDAFAADFAQQQAIGRDAALGWLARNASLATPHSQRSEAELNIAVSGDAAQFPLLELIDTAEAALGTAVQTAVRRADEQAFALANGANLMYVEDAARRLRQALEARFAACSVRVSHFESLHAHDAVATAVTPGWQELLR

SEQ ID NO: 9006 - protein, 308 aa, Herbaspirillum huttiense
  REGION 1..308: note = tr|A0A561L366|A0A561L366_9BURK GTP cyclohydrolase FolE2 OS=Herbaspirillum huttiense OX=863372 GN=folE2 PE=3; SV = 1
MSVTSIRSALPDVARDEPAGIALPLQWVGMRGIALPLRLSDGTQLPASAEVAVDLPDPRAKGIHMSRLYLLLDTFAVRSRLTPAAVHALLRQMRESHADCRSRAALLRLDFALLQQRAALVTPELAGWKSYPVSLSAQLRDDALDIRLTVSVAYSSTCPCSAALSRQALQDAFAADFAQQEAIGRDAALGWLARHASVATPHSQRSKAELSIAVGGDAAQFPLLELIDTAEAALGTAVQTAVRRADEQAFALANGANLMYVEDAARRLRQALEARFAACSVRVSHFESLHAHDAVATAATPGWQEPLR

SEQ ID NO: 9007 - protein, 302 aa, unidentified
  source 1..302: note = Herbaspirillum robiniae
  REGION 1..302: note = tr|A0A2D0B768|A0A2D0B768_9BURK GTP cyclohydrolase FolE2 OS=Herbaspirillum robiniae OX=2014887 GN=folE2 PE=3; SV = 1
MTARLPDVAREERAAIPLPLDSAGMQGVAAMLRLDGGLLLPARAELAVDLPDPQAKGIHMSRLYRLLDERASGEQLSPPMLASLLQKMLDSHADCGSRVAWLALAFDLPVRRAALVTPGLAGWKTYPARLLAELSDGAIRMQLGVRVEYSSTCPCSAALSRQALRDAFAADFAGAQSVSRDEVLDWISERASLATPHSQRSAADVAVALAPHGERLPLAALIDTAEDALGTPVQTAVKRADEQAFALRNGANLMYVEDAARRLRLALEAGFRACSVRVSHIESLHAHDAVATASTPGWQPLR

SEQ ID NO: 9008 - protein, 309 aa, Herbaspirillum rubrisubalbicans
  REGION 1..309: note = tr|A0A0U3LMR4|A0A0U3LMR4_9BURK GTP cyclohydrolase FolE2 OS=Herbaspirillum rubrisubalbicans M1 OX=1078773; GN = folE2 PE=3 SV=1
MRMAEFNKRPLPDVAREERPAIALPLEWVGMRGIALPLQLDSGKTVAASAEVAVDLPDPHAKGIHMSRLYLLLDTFASRARLTPVALHELLRQLRESHADCHSRAAALRLDFALLQQRAALVTPDLDGWKSYPVTLSAELHDDVLEISLRVSIAYSSTCPCSAALSRQALQDAFAQAFAGQPAIEREAALAWLQRNASLATPHSQRSQAELSINVSPKAEQLPIAALIDTAEAALGTAVQTAVRRADEQAFALANGANLMYVEDAARRLRQALETRFGACAVRVAHLESLHAHDAVAATATPGWQDRVR

SEQ ID NO: 9009 - protein, 310 aa, Herbaspirillum rubrisubalbicans
  REGION 1..310: note = tr|A0A328J9Q9|A0A328J9Q9_9BURK GTP cyclohydrolase FolE2 OS=Herbaspirillum rubrisubalbicans OX=80842 GN=folE2; PE = 3 SV=1
MRMAELNQRSLLPDVARDERPAIALPLEWVGMRGIALPLQLDSGKTVAASAEVAVDLPDPHAKGIHMSRLYLLLDTFASRARLTPIALHELLRQLRESHADCHSRAAALRLDFALLQQRAALVTPDLDGWKSYPVTLSAELHDDVLEISLRVSIAYSSTCPCSAALSRQALQDAFAQAFAGQPAIEREAALAWLQRNASLATPHSQRSQAELNINVSPKAEQLPIAALIDTAEAALGTAVQTAVRRADEQAFALANGANLMYVEDAARRLRQALETRFGACAVRVAHLESLHAHDAVAATATPGWQDRVR

SEQ ID NO: 9010 - protein, 308 aa, Herbaspirillum seropedicae
  REGION 1..308: note = tr|A0A4R8NKR5|A0A4R8NKR5_HERSE GTP cyclohydrolase FolE2 OS=Herbaspirillum seropedicae OX=964 GN=folE2 PE=3; SV = 1
MTLISKRNSLPDVARDEPASIALPLQWVGMCGIALPLRLADGTPLPASAEVAVDLPDPQAKGIHMSRLYLLLDAFAARSRLTPAAVHELLRQMRESHADCQSRAALLRLDFALLQQRAALVTPELAGWKSYPVRLTAQLRDATLQIRLQVRIAYSSTCPCSAALSRQALQDAFAADFAQHEAIGRDAALGWLARHASLATPHSQRSEAELNIAVSGDAAQFPLSELIDTAEAALGTAVQTAVRRADEQAFALANGANLMYVEDAARRLRQALEARFATCSVRVSHFESLHAHDAVATAVTPGWQELLR

SEQ ID NO: 9011 - protein, 303 aa, Herbaspirillum seropedicae
  REGION 1..303: note = tr|D8IWM4|D8IWM4_HERSS GTP cyclohydrolase FolE2; OS = Herbaspirillum seropedicae (strain SmR1) OX=757424; GN = folE2 PE=3 SV=1
MATALPDVAREERASIALPLDWVGMCGIALPVRLDNGQIVPASAEIAVDLPHAQAKGIHMSRLYLLLDRFAAQATLNPAALHALLDQMRASHADCGSRAASLRLDFALLHQRAALVTPALAGWKSYPFTLAAELQQDRLHLTLQVRIAYSSTCPCSAALSRQALQDAFASEFGPHTSVAQPAVLDWLARHGSRATPHSQRSYADLGVTVAQEAAELPLLALIDTAEQALGTAVQTAVRRADEQAFALANGANLMYVEDAARRLRQAVEARFGACAIRVSHVESLHAHDAVAATASPGWSGQLR

SEQ ID NO: 9012 - protein, 311 aa, Herbaspirillum sp.
  REGION 1..311: note = tr|A0A542LS12|A0A542LS12_9BURK GTP cyclohydrolase FolE2 OS=Herbaspirillum sp. SJZ130 OX=2572918 GN=folE2; PE = 3 SV=1
MGLSVASALPDVARHESSAIALALDWVGMRGIAIPLPPGGRESGSGAPLAATAELAVDLPDPLAKGIHMSRLYRLLGEFARHGELSPRALRRLLLGMIESHADCGSRAARLGLAFDLLQQRPALRTPELAGWQSYPASVQAVQRGHATQVELAVRIQYSSTCPCSAALSRQAVRDAFAADFDDTALVARGDALDWISARASLATPHSQRSEAEVRIRLSPDAAALPVSALIDCAETALATPVQTAVKRADEQAFALLNGANLMYVEDAARRLRRALEQNFGACSVTVSHHESLHPHDAVASCATPGWERID

SEQ ID NO: 9013 - protein, 308 aa, Herbaspirillum sp.
  REGION 1..308: note = tr|A0A2E7P6T2|A0A2E7P6T2_9BURK GTP cyclohydrolase FolE2 OS=Herbaspirillum sp. OX=1890675 GN=folE2 PE=3 SV=1
MPLISKRTTLPDVARDEPASIALPLQWVGMCGIALPLRLADGTQLPASAEVAVDLPDPQAKGIHMSRLYLLLDAFASRSRLTPTAVHELLRQMRESHADCQSRAALLRLDFALLQQRAALVTPDLAGWKSYPVTLTAQLRDSTLEIRLQVRIAYSSTCPCSAALSRQALQDAFAADFAQQQAIGRDAALGWLARNASLATPHSQRSEAELNIAVSGDAAQFPLLQLIDTAEAALGTAVQTAVRRADEQAFALANGANLMYVEDAARRLRQALEARFAACSIRVSHFESLHAHDAVATAMTPGWQELLR

SEQ ID NO: 9014 - protein, 213 aa, Herbiconiux ginsengi
  REGION 1..213: note = tr|A0A1H3KFX4|A0A1H3KFX4_9MICO GTP cyclohydrolase 1; OS = Herbiconiux ginsengi OX=381665 GN=folE PE=3 SV=1
MSVDRERIEAAVSEILAAIGEDPEREGLLETPRRVAELYAELFGGVGDDPARALRSVFAAPAVKQVAPGGPGAATESGDQPVLIRDITFRSICEHHFLPFEGVVHVAYVPSDRIAGLGSIVSVVESASSRPQLQERLTDDIADAIERGLGARGVLVVVDAKHGCVSARGPRQTRSTTLTLAARGTLVEPAARAEITALIAAPRSDEHGGGDER

SEQ ID NO: 9015 - protein, 216 aa, Herbiconiux sp.
  REGION 1..216: note = tr|A0A521MP23|A0A521MP23_9MICO GTP cyclohydrolase 1; OS = Herbiconiux sp. OX=1871186 GN=folE PE=3 SV=1
MATVDRQRIEAAVAELLAAVGDDPARAELRDTPRRVAELYAELYAGVGHDPAGALGSTFETPDAATPANPRPPAQAAAGEPESSPSGRPVLLRDIAFRSVCEHHLLPFEGVAHVAYEPDRIIAGLGGIVSVIECAASRPQLQERLTDDIAEAIERGLGARGVLVVLDARHGCVTARGPRQTASTTVTLAARGSLAEPAARAELMSLIAAPTRGATP

SEQ ID NO: 9016 - protein, 194 aa, Herbidospora sp.
  REGION 1..194: note = tr|A0A4U3MCB1|A0A4U3MCB1_9ACTN GTP cyclohydrolase 1; OS = Herbidospora sp. NEAU-GS14 OX=2575442 GN=folE PE=3 SV=1
MVGKPLQVDNARIEAAVREILIAIGEDPGREGLVETPARVARAYAEQFAGLGQRPEDVLTTVFDADHDEMVLVRDIEIYSTCEHHLVPFHGVAHIGYIPNDKGQVTGLSKLARLADLYARRPQVQERLTSQVADALMEVLKPRGAIVVIEAEHMCMTMRGVRKPGAKTITSAVRGIFREDDKTRAEAMSLIIGR

SEQ ID NO: 9017 - protein, 500 aa, unidentified
  source 1..500: note = Herbihabitans rhizosphaerae
  REGION 1..500: note = tr|A0A4Q7KW05|A0A4Q7KW05_9PSEU GTP cyclohydrolase 1; OS = Herbihabitans rhizosphaerae OX=1872711 GN=folE PE=3 SV=1
MTGFPWQSADGSQPVFDAERAEKAVRELLLACGEDPDRNGLQETPARVARAFREMFAGLYNNPDSVLDKTFDECHDELVLVTDIPLFSTCVPSKQTVNAVGGRKQAREVQVGDQLWTLADGKVEPTTVTQISSHTTRELVEVTTTGGRFTVTPDHPLATPEGWLEAKDVEGTFIEWTHARQLSRDRWRPTLGYDFGYVVGSVCADGTTAERYVSLVVNDRDYAKKFAVSLRRAFGIEARIEPVERPSGHFRVRVTSSYFADLMRQYASGNFPAVVLNDRSTFNGFLDGCTDGDGAPPLDDLAPLIGARFTPKAGGPASHLYVADSWFRKHGFPQQTVRHELIESEWVRVESVRRIEATGTKPYTVYSFKCDPHPTFLIAGHLSHNCEHHLVPFHGVAHVGYIPSEEGKVTGLSKLARLVDLYAKRPQVQERLTSQIADALVRKLNPRGVIVVIEAEHLCMAMRGIRKPGARTTTSAVRGLHKTSVSSRAEALDLINGRTR

SEQ ID NO: 9018 - protein, 261 aa, Herminiimonas arsenicoxydans
  REGION 1..261: note = sp|A4G1X0|GCH4_HERAR GTP cyclohydrolase FolE2; OS = Herminiimonas arsenicoxydans OX=204773 GN=folE2 PE=3; SV = 1
MSAIPDVQSTPDTRNIVIQRVGVKGVRYPITVKTSSGVQPSVGSWNMYVRLTEEQKGTHMSRFIALLEENNQPLDVAVFGALMRKMLVLLDADAGRIEVSFPYFINKTAPVSGVQSLMDYEVGLTGEMKNGELEVTLKVLVPVTSLCPCSKKISAYGAHNQRSHITVHAVLNGDLVVEELIAKIEEQASCELYGLLKRPDEKYVTERAYDNPKFVEDLVRDVAGMLNKDERVLAYTLEAENFESIHNHSAYALIERDKRLS

SEQ ID NO: 9019 - protein, 201 aa, Herminiimonas arsenicoxydans
  REGION 1..201: note = tr|A4G565|A4G565_HERAR GTP cyclohydrolase 1; OS = Herminiimonas arsenicoxydans OX=204773 GN=folE PE=3 SV=2
MSAHAGSAVVSEMEANDFSEHDWRRLLIHLGENPNRQGLQETPKRVQKAWQQWTAGYAQDPAEILKVFSDGAEQYKELIIVRGIPVYSHCEHHLAPFFGTATIGYTPNGKIVGLSKLTRLVDCYARRLQVQERLTIQIAETLMEHVQPLSVGVVIRCRHMCMESRGIQTQGEETVTSALLGEMRSNPALRSEFLTLTREKD

SEQ ID NO: 9020 - protein, 209 aa, Herminiimonas fonticola
  REGION 1..209: note = tr|A0A4R6G8Z8|A0A4R6G8Z8_9BURK GTP cyclohydrolase 1; OS = Herminiimonas fonticola OX=303380 GN=folE PE=3 SV=1
MKIHPLDEHLLHTRPTALAEIKDDDFSEHDWRRLLIHLGENPKRQGLQDTPRRVQKAWQHWTAGYAQNPAEILKVFEDGAEQYNELIVVRGIPVYSHCEHHLAPFFGTATIGYTPNGKIVGLSKLTRLVDCFARRLQVQERLTIQIAETLMEHVQPLSVGVVIRCRHMCMESRGIQTPGEETVTSALLGEMRSNLGLRSEFLSLAREKN

SEQ ID NO: 9021 - protein, 268 aa, Herminiimonas fonticola
  REGION 1..268: note = tr|A0A4V3BUY9|A0A4V3BUY9_9BURK GTP cyclohydrolase FolE2 OS=Herminiimonas fonticola OX=303380 GN=folE2 PE=3; SV = 1
MNTRDLSLSAMPDVQATPDTRHIVIQRVGVKGVRYPLTVKTSAGTQPSVGTWNMYVHLAEEQKGTHMSRFIALLEDLRGPLDVPAFSKLMRDMLVLLDADAGRIEVSFPYFINKTAPVSGVQSLMDYEVGLTGEIKNGALEITLKVLVPVTSLCPCSKKISAYGAHNQRSHITVHAVLNGDLLVEELIAKIEEQASCELYGLLKRPDEKYVTERAYDNPKFVEDLVRDVAVMLNNEERVLAYTLEAENFESIHNHSAYALIENDKRLK

SEQ ID NO: 9022 - protein, 266 aa, Herminiimonas sp.
  REGION 1..266: note = tr|A0A3N7AB74|A0A3N7AB74_9BURK GTP cyclohydrolase FolE2 OS=Herminiimonas sp. KBW02 OX=2153363 GN=folE2 PE=3; SV = 1
MNTRDPGLSAIPDVQSTPDTRSIAIQRVGVKGVRYPLTVKTLSGVQPSVGTWNMYVHLAEAQKGTHMSRFIALLEENTQALDVQVFGEIMRKMLALLDADAGRIEVSFPYFINKTAPVSGVQSLMDYEVGFIGELKNDKLEITLKVLVPVTSLCPCSKKISAYGAHNQRSHITVQALLGDDLVVEELIANIEAQASCELYGLLKRPDEKYVTERAYDNPKFVEDLVRDVAVMLNQEQRVLAYTLEAENFESIHNHSAYALIEMDKR

SEQ ID NO: 9023 - protein, 198 aa, Herminiimonas sp.
  REGION 1..198: note = tr|A0A3N7C420|A0A3N7C420_9BURK GTP cyclohydrolase 1; OS = Herminiimonas sp. KBW02 OX=2153363 GN=folE PE=3 SV=1
MKQVTNTAQSENDDFSTEDWRRLLTHLGENADRQGLRETPQRVEKAWKHWTSGYDQDPADILKVFEDGAEQYNELIVVRGIPVYSHCEHHLAPFFGTATIGYTPNGKIVGLSKLTRLVDCFAKRLQVQERLTIQIADTLMEHVQPLSVGVVIRCRHMCMESRGIRTPGEETVTSALLGEMRTNLGLRNEFMMLAREKD

SEQ ID NO: 9024 - protein, 206 aa, Herpetosiphon aurantiacus
  REGION 1..206: note = tr|A9B5F8|A9B5F8_HERA2 GTP cyclohydrolase 1; OS = Herpetosiphon aurantiacus (strain ATCC 23779 / DSM 785 / 114-95) OX=316274 GN=folE PE=3 SV=1
MTLIYSGNGLNGNSAPAVREDMEAAVRTILEGLGEDVDREGLQRTPHRVAKMFGELTAGYHTDPVALINDAIFTVEYNEMVLVRDIEFSSLCEHHMLPFWGKAHVAYVPNGKVLGLSKIPRIVDMFAKRLQVQERLTREIADFVAQTIDASGVAVVVQGAHMCSMIRGVKKANARMVTQSLQGVFKTDPQIRAEFMGHITANFSDD

SEQ ID NO: 9025 - protein, 206 aa, Herpetosiphon geysericola
  REGION 1..206: note = tr|A0A0P6XYP0|A0A0P6XYP0_9CHLR GTP cyclohydrolase 1; OS = Herpetosiphon geysericola OX=70996 GN=folE PE=3 SV=1
MTLIYSGNGLNSNSAPAVREDMEAAVKTIIEGLGEDVEREGLQRTPHRVAKMFTELTAGYRTDPVALINEAIFTVDYNEMVLVRDIEFSSLCEHHMLPFWGKAHVAYIPNGKVIGLSKIPRIVDMFAKRLQVQERLTREIADFVAEAIGASGVAVVVHGAHMCSMIRGVKKANARMVTQSLQGVFKTDPQIRAEFMGHITANYSDE

SEQ ID NO: 9026 - protein, 183 aa, Hespellia stercorisuis
  REGION 1..183: note = tr|A0A1M6KNU9|A0A1M6KNU9_9FIRM GTP cyclohydrolase 1; OS = Hespellia stercorisuis DSM 15480 OX=1121950 GN=folE; PE = 3 SV=1
MDQDKIKEGVRLILEGIGEDVNREGLLETPDRIARMYGEIAGGMSQSAEEPLSKRFHVDNNEMVLEKDIVFYSMCEHHMLPFYGKAHVAYIPDGSVVGLSKIARTVEIFAKRLQIQEQLTAQIADAFVEYLKPQGVMVMIEAEHLCMTMRGVKKPGAQTVTYVTRGVFDENEQLQNKFFRLVK

SEQ ID NO: 9027 - protein, 184 aa, Hespellia stercorisuis
  REGION 1..184: note = tr|A0A1M6MMQ2|A0A1M6MMQ2_9FIRM GTP cyclohydrolase 1; OS = Hespellia stercorisuis DSM 15480 OX=1121950 GN=folE; PE = 3 SV=1
MDKNKIKEGVRLILEGIGEDVNREGLRETPDRIARMYEEIMAGMLQTAEEPLSKQFRAENNEMIAEKDIVFYSMCEHHMLPFCGKAHIAYIPDGSVVGISKIVRAVEVYAKRLQLQEQLTAQIADAFVEYLHPRGVMVIVEAEHLCMTMRGVKKPGAKTISYVTRGVFEKNPELQNAFFRMVHN

SEQ ID NO: 9028 - protein, 256 aa, Hippea maritima
  REGION 1..256: note = tr|F2LY46|F2LY46_HIPMA GTP cyclohydrolase FolE2; OS = Hippea maritima (strain ATCC 700847 / DSM 10411 / MH2); OX = 760142 GN=folE2 PE=3 SV=1
MKLADVQSLRDNRNLPIDKVGVKNLRYPITLLDRTKKRQHTIATVNMYVLLPSDFKGTHMSRFIEVLNENRECIDIRKIGKILKQMREKLNARKSYIEFDFPYFIEKEAPVTKIKSLMSYDCKVEAFGDSHTEELFLNVEVPITSLCPCSKEISSYGAHNQRGVARIRAQLAEFVWIEELVEVAESSASCEIYSLLKRPDEKFVTEKAYNNPMFVEDIARNITLELSKDKRIPHFSVEVENFESIHNHNAYAFINR

SEQ ID NO: 9029 - protein, 204 aa, Hirschia baltica
  REGION 1..204: note = tr|C6XNB5|C6XNB5_HIRBI GTP cyclohydrolase 1; OS = Hirschia baltica (strain ATCC 49814 / DSM 5838 / IFAM 1418) OX=582402 GN=folE PE=3 SV=1
MDAIVKDGAVTRDNNDKRPTREEAEKAVKTLLAWAGDDPEREGLLDTPKRVVKAYEEWFSGYRDDPVKYLSRTFEDVQGYDDIVMLRDIDVESHCEHHMAPFMGKAYVAYMPTDSVVGISKLARVVEIYAKRLQTQETMTSQICEAIEESLKPAGVAVMIDAVHQCMTTRGVHHPNVSTITTQFTGVFKTDKDLRDRFLRLSER

SEQ ID NO: 9030 - protein, 203 aa, Hirschia sp.
  REGION 1..203: note = tr|A0A2E4QT48|A0A2E4QT48_9RHOB GTP cyclohydrolase 1; OS = Hirschia sp. OX=2024835 GN=folE PE=3 SV=1
MDAIVKGGAAVPEESLKPSREEAEAAVRTLLAWAGDDPKREGLIDTPKRVVNAYQEWFSGYREDPITYLSRTFEDVQGYDDIVMLRDIDVESHCEHHMAPFMGKAYVAYMPTNAVVGISKLARVVEIYAKRLQTQETMTAQICDAITESLKPAGAAIMIDAVHQCMTTRGVHHPNVSTITTQFTGVFKTDKELRERFLRLCER

SEQ ID NO: 9031 - protein, 368 aa, unidentified
  source 1..368: note = Histidinibacterium lentulum
  REGION 1..368: note = tr|A0A3N2QS37|A0A3N2QS37_9RHOB GTP cyclohydrolase FolE2 OS=Histidinibacterium lentulum OX=2480588 GN=folE2; PE = 3 SV=1
MNILTPLIERDPSRAEVETALELLRNWAETASAEELADLDPRLASLRSGPAAASYPELSRDYPEGFQADHAYRATLPDLQNGPASLIRGEAAQIQHVGISNFRLPIRYRTRDGAMLTLETGVTGTVSLDADKKGINMSRIMRTFYRHAERTFSFEVIEAALDDYKTDLDSLDARIQMRFRFPAKLRSLRSGLEGFQYYDIALELVERAGVRRKMIHLDYVYSSTCPCSLELSEHARMTRGQLATPHSQRSVARLSVEIAAGTGDCLWFEDLIDMARAAVPTETQVMVKREDEQAFAELNAANAIFVEDAARLFCEQLRADARIGDFRVVASHQESLHSHDAVSVLTDGPTFASESLDPRFFESLYHTG

SEQ ID NO: 9032 - protein, 218 aa, Histophilus somni; identical to SEQ ID NO: 8777
  REGION 1..218: note = sp|B0UUA9|GCH1_HISS2 GTP cyclohydrolase 1; OS = Histophilus somni (strain 2336) OX=228400 GN=folE PE=3; SV = 1

SEQ ID NO: 9033 - protein, 218 aa, Histophilus somni; identical to SEQ ID NO: 8777
  REGION 1..218: note = tr|A0A4S2QWN9|A0A4S2QWN9_HISSO GTP cyclohydrolase 1; OS = Histophilus somni OX=731 GN=folE PE=3 SV=1

SEQ ID NO: 9034 - protein, 200 aa, unidentified
  source 1..200: note = Hoeflea halophila
  REGION 1..200: note = tr|A0A286HKS6|A0A286HKS6_9RHIZ GTP cyclohydrolase 1; OS = Hoeflea halophila OX=714899 GN=folE PE=3 SV=1
MDAIVKKLHDHDNRPTEAEAEEAVRTLLRFIGDDIGREGLRDTPKRVVKAYKEMFAGYDQDAEEELGRTFEEVAGYDDIVLVKDIPFFSHCEHHMVPIIGKAHVAYLPDGKVLGLSKIARVIEIYGRRLQIQETLTAQIAHGIDDALHPRGVAVMIEAEHMCMAMRGIKKQGSTTITTSFTGAFKSDPHEQVRFMTLIRG

SEQ ID NO: 9035 - protein, 204 aa, Hoeflea marina
  REGION 1..204: note = tr|A0A317PR75|A0A317PR75_9RHIZ GTP cyclohydrolase 1; OS = Hoeflea marina OX=274592 GN=folE PE=3 SV=1
MDAIIKNFPSDAVDTRPTLAEAEEAVRTLLRWAGDDVSREGLADTPKRVAASYRELFSGYDQDPEEVLGRTFEEVAGYDDIVLVKDIPFFSHCEHHMVPIIGKAHIAYLPGGKVLGLSKIARVVEIFGRRLQTQEAMTAQVASAIDGTLQPRGVAVMIEAEHLCMAMRGIQKQGSTTITTTFTGAFKSDPHEQVRFMTLIRGRG

SEQ ID NO: 9036 - protein, 202 aa, unidentified
  source 1..202: note = Hoeflea olei
  REGION 1..202: note = tr|A0A1C1YZH4|A0A1C1YZH4_9RHIZ GTP cyclohydrolase 1; OS = Hoeflea olei OX=1480615 GN=folE PE=3 SV=1
MDAIVNPLPGTDEDNRPTQAEAEAAVSTLLRWIGDDTTREGLIDTPMRVVKAYKELFSGYDQDAEEALGRTFEEVAGYDDIVLIKDIPFFSHCEHHMVPIIGKAHVAYLPDGKVVGLSKIARVVEIFGRRLQTQETLTAQIAHAIDETLRPRGVAVMIEAEHMCMAMRGIQKQGSTTMTTTFTGAFKTDPHEQVRFMTMLRG

SEQ ID NO: 9037 - protein, 204 aa, Hoeflea phototrophica
  REGION 1..204: note = tr|A9D9T1|A9D9T1_HOEPD GTP cyclohydrolase 1; OS = Hoeflea phototrophica (strain DSM 17068 / NCIMB 14078 / DFL-43) OX=411684 GN=folE PE=3 SV=2
MDAIVKTFPGKDGEARPTQAEAEEAVRTLLRWAGDDVTREGLIDTPKRVAKAYKELFAGYEQDAEEELGRTFEEVAGYDDIVLVKDIPFFSHCEHHMVPIIGKAHVAYLPDGKVLGLSKIARVVEIFGRRLQTQETMTAQVAHSIDDTLHPRGVAVMIEAEHMCMAMRGIKKQGSTTITTTFTGAFKTEPHEQVRFMTLVRGRD

SEQ ID NO: 9038 - protein, 200 aa, Hoeflea sp.
  REGION 1..200: note = tr|A0A2G2DJN1|A0A2G2DJN1_9RHIZ GTP cyclohydrolase 1; OS = Hoeflea sp. OX=1940281 GN=folE PE=3 SV=1
MDAIVNRLNDQDNRPTEAEAEEAVRTLLRWVGDDITREGLLDTPKRVVKAYKELFSGYDQDAEEELGRTFEEVAGYDDIVLVKDIPFFSHCEHHMVPIIGKAHVAYLPDGKVLGLSKIARVIEIYGRRLQIQETMTAQVAHSIDDALHPRGVAVMIEAEHMCMAMRGIKKQGSTTITTTFTGAFKTDPHEQVRFMTLIRG

SEQ ID NO: 9039 - protein, 202 aa, Hoeflea sp.
  REGION 1..202: note = tr|A0A0F7PLW3|A0A0F7PLW3_9RHIZ GTP cyclohydrolase 1; OS = Hoeflea sp. IMCC20628 OX=1620421 GN=folE PE=3 SV=1
MDAIVNKMSDKGKDNRPTEAEAEEAVRTLLRWTGDDITREGLLDTPKRVVKAYKELFSGYDLDAEEELGRTFEEVAGYDDIVLIKDIPFFSHCEHHMVPIIGKAHVAYLPDGKVLGLSKIARAVEIFGRRLQTQETMTAQVAHSIDETLQPRGVAVMIEAEHMCMAMRGIKKQGSTTITTTFTGAFKQDPHEQVRFITLIRG

SEQ ID NO: 9040 - protein, 194 aa, unidentified
  source 1..194: note = Homoserinibacter sp.
  REGION 1..194: note = tr|A0A5C8IEG8|A0A5C8IEG8_9MICO GTP cyclohydrolase 1; OS = Homoserinibacter sp. GY 40078 OX=2603275 GN=folE PE=3; SV = 1
MAIDSERIEAAVVELLRAIGEDPDRPGLSATPRRVAESYAELFSGVGEDPLTHLADAADFTGDDASGELVLLRDIAFRSTCEHHLLPFTGVAHLAYVPGERIVGLGSLARVVETVSARPQLQERLTEQIADAIEVGLAPRGVLVVMDARHGCVTARGVRQAESTTVTVAARGTLIDPAAQAGVLALLGRGAVTP

SEQ ID NO: 9041 - protein, 221 aa, unidentified
  source 1..221: note = Homoserinimonas aerilata
  REGION 1..221: note = tr|A0A542Y1M6|A0A542Y1M6_9MICO GTP cyclohydrolase 1; OS = Homoserinimonas aerilata OX=1162970 GN=folE PE=3 SV=1
MAGASGTGVDGSPARSGVDRPRIEAAVLELLAAIGEDTARPGLASTPARVAEAYSEFFSGLSVDPVSHLADSVELEPDELGELVLLRGIEFRSICEHHLLPFLGVAHVAYVPRTRVVGLGRLPRVVDTLASRPQLQERLGEEIADALQEGLDPRGVLVVLDASHGCVVSRGVRQVHSSTLTVASRGELDDPAQRAAVLSLIGSSPAGGGVAAHDPVDGSRG

SEQ ID NO: 9042 - protein, 233 aa, unidentified
  source 1..233: note = Hormoscilla sp.
  REGION 1..233: note = tr|A0A533P8M9|A0A533P8M9_9CYAN GTP cyclohydrolase 1; OS = Hormoscilla sp. GUM202 OX=2480853 GN=folE PE=3 SV=1
MTIASLNGSQRPDMTKNQDAKKVLTRPDRNTSNGLQPRQPDEEIDDEQMMAAVKTMLLGVGEDPNREGLLKTPKRVAEAMRFLTNGYNQSLEEIVNGAIFDEDHNEMVLVRDINLFSLCEHHMLPFMGKAHVAYIPTQKVVGLSKLARIVEMYARRLQVQERLTRQVAEAIQEILGPQGVAIVVEATHMCMVMRGVQKPGSWTVTSAMLGVFQEDQKTKEEFLNLIRHQPAFF

SEQ ID NO: 9043 - protein, 212 aa, unidentified
  source 1..212: note = Hormoscilla sp.
  REGION 1..212: note = tr|A0A533NW15|A0A533NW15_9CYAN GTP cyclohydrolase 1; OS = Hormoscilla sp. GUM202 OX=2480853 GN=folE PE=3 SV=1
MILSISPDDIRKQAILTEPKAPVSDEEMRQAVRTLLLGLGEDPDREGLRDTPKRVVKALKFLTSGYNQSLDELLNGAVFHEDTNEMVLVRDIDLFSSCEHHILPILGRAHVAYIPNGKVIGLSKIARICEMYGRRLQVQERLTQQIAHALQGLLQPQGVAVVVEATHMCMVMRGVQKPGSWTVTSSMQGVFAENVSTRQEFMALIRHTPSLH

SEQ ID NO: 9044 - protein, 209 aa, unidentified
  source 1..209: note = Hoyosella subflava
  REGION 1..209: note = tr|F6EG69|F6EG69_HOYSD GTP cyclohydrolase 1; OS = Hoyosella subflava (strain DSM 45089 / JCM 17490 / NBRC 109087 / DQS3-9A1) OX=443218 GN=folE PE=3 SV=1
MTSIRPEDRIDPEDRIGEVPRVFDQPRAEAAVRELLIAVGEDPSRSGLADTPARVARAYAELFAGLHTDPDHVLDTTFDEGHDELVLLKDIPMYSTCEHHLVPFHGVAHVGYIPNESGRVTGLSKLARLVDLYAKQPQVQERLTSQIADAMMRKLDPRGVIVVVEAEHLCMAMRGIRKPGATTTTSAVRGLFKSSAASRSEALDLIIRK

SEQ ID NO: 9045 - protein, 190 aa, Humibacillus sp.
  REGION 1..190: note = tr|A0A1E8D1B2|A0A1E8D1B2_9MICO GTP cyclohydrolase 1; OS = Humibacillus sp. DSM 29435 OX=1869167 GN=folE PE=3 SV=1
MAVDQARAEAAVRELLLAVGEDPDREGLVDTPGRVARAYAEIFAGLDMRADQVLDKTFEIDHQELVIVRDIELYSTCEHHLVPFHGVAHVGYIPNKSGRVTGLSKLARLVDVYARRPQVQERLTSQIADALVEHLDVQGVIVVIQAEHLCMSMRGIRKSGASTITSAVRGQLRDPATRAEAMSLMLQSNR

SEQ ID NO: 9046 - protein, 191 aa, Humibacillus sp.
  REGION 1..191: note = tr|A0A1E8CU42|A0A1E8CU42_9MICO GTP cyclohydrolase 1; OS = Humibacillus sp. DSM 29435 OX=1869167 GN=folE PE=3 SV=1
MHVVRDSAGVDEAGVVQAATDLLRALGRDTNSPHLADTPRRIAAAYVELLSPRPFELTTFSNDDGYDGLVLVRDIPVHSLCAHHLLPFNGVAHVAYLPADRILGLSKLARVVEMFARDLQVQERLTQQVANWLQEHLEPQGVGVVIEAEHLCMSMRGVQASGTLTLTSALHGLMREDPRTRQEFFDLVRRS

SEQ ID NO: 9047 - protein, 190 aa, Humibacillus xanthopallidus
  REGION 1..190: note = tr|A0A543PMQ5|A0A543PMQ5_9MICO GTP cyclohydrolase 1; OS = Humibacillus xanthopallidus OX=412689 GN=folE PE=3 SV=1
MAIDQARAEAAVRELLLAIGEDPTREGLLDTPARVARSYSEIFAGLDMDAADVLGTTFMIDHQELVIVRDIELYSTCEHHLVPFHGVAHVGYIPSQDGRVTGLSKLARLVEVYARRPQVQERLTSQVADALVEHLDVQGVIVVIQAEHLCMSMRGIRKPGASTITSAVRGQLRDAATRAEAMALMLEGNK

SEQ ID NO: 9048 - protein, 218 aa, Humibacillus xanthopallidus
  REGION 1..218: note = tr|A0A543PLY7|A0A543PLY7_9MICO GTP cyclohydrolase 1; OS = Humibacillus xanthopallidus OX=412689 GN=folE PE=3 SV=1
MNPSSTSSHPSPTVLPPRPHHTRQPWNGTGAVGEPDLERAATGARILLEALGIDVHSEAMMRTPERMAASLLEMTSPRPFHLTTFPNDGNYDELILAKSIPLRSLCEHHMLPFVGTAHIGYLPGERILGLSKLARVLEHFASRPQVQERLTVQIADWLSAQLSAAGVGVVIEAEHLCMTLRRVQAPGTTTITSSLLGVMREDPRTRAEFLALTRVPRY

SEQ ID NO: 9049 - protein, 222 aa, Humibacter sp.
  REGION 1..222: note = tr|A0A345K1V0|A0A345K1V0_9MICO GTP cyclohydrolase 1; OS = Humibacter sp. BT305 OX=2282656 GN=folE PE=3 SV=1
MGSVDRDRIRAAVGEILAAIGEDPAREGLRDTPRRVAELYAELFAGVGDDPADAFGGAFALRDGESDAEPDRAGSSAAKVVGLPDASAGDADEALDRIGSVVLMRDLAFRSICEHHLLPFEGVVHIAYEPDAELAGLGRFAAVVEVASSRPQLQERLGDDIADAVERGLTARGVLVVIEARHGCVTARGPRQTASTTVTLSARGSLADPAARAEVMALVARS

SEQ ID NO: 9050 - protein, 190 aa, Humibacter sp.
  REGION 1..190: note = tr|A0A5B8M5B0|A0A5B8M5B0_9MICO GTP cyclohydrolase 1; OS = Humibacter sp. WJ7-1 OX=2599293 GN=folE PE=3 SV=1
MAVDRARIEAAVADILAAIGEDVARPGLDQTPQRVADAYAEFFGGLALDPLEPLRDTVPLGDSDAETVVLRDIHFRSMCEHHLLPFTGVAHLAYLPGDRVVGLGRLPKVVEILASRPQLQERLTEEIADTFVAGLEPRGVLVVLDATHTCVTTRGARQTDASTVTIASRGELGDPIARAELIALIGRGIR

SEQ ID NO: 9051 - protein, 212 aa, unidentified
  source 1..212: note = Humitalea rosea
  REGION 1..212: note = tr|A0A2W7J4Q5|A0A2W7J4Q5_9PROT GTP cyclohydrolase 1; OS = Humitalea rosea OX=990373 GN=folE PE=3 SV=1
MNIQTPPAPIALADTSLPRPTQAEAEAAIRTLLLWAGDDPLREGLLDTPKRVARAYREWFCGYDEDPRDLLARSFEEVEGYDEMVVLRDIRLESVCEHHMAPIIGRVHIGYLPAGRVVGISKLARVVDAFGKRLQIQEKLTAQIANTISEVLQPKGVAVVIEAAHQCMTTRGVHKTGVSMVTSRMLGAFRDDQSTRREFLAMIQGTRAHTEG

SEQ ID NO: 9052 - protein, 188 aa, unidentified; identical to SEQ ID NO: 4075
  source 1..188: note = Hungateiclostridiaceae bacterium
  REGION 1..188: note = tr|A0A1C7GRA4|A0A1C7GRA4_9FIRM GTP cyclohydrolase 1; OS = Hungateiclostridiaceae bacterium KB18 OX=1834198; GN = folE PE=3 SV=1

SEQ ID NO: 9053 - protein, 187 aa, unidentified
  source 1..187: note = Hungateiclostridium clariflavum
  REGION 1..187: note = tr|G8LSX5|G8LSX5_HUNCD GTP cyclohydrolase 1; OS = Hungateiclostridium clariflavum (strain DSM 19732 / NBRC 101661 / EBR45) OX=720554 GN=folE PE=3 SV=1
MVDKERIKAAVKEILIAIGENPDREGLVETPDRVARMYEEIFAGLHQDPKEVVKVFQEENHEEMVMVKDIPLYSMCEHHLVPFVGVAHVVYIPKKGKIMGLSKLARIVDLLAKKPQLQERLTSEVANVIMETIDPLGVAVVVEAEHLCMTMRGIKKPGSKTVTSALRGIIKTDARTRAEVMSLINRK

SEQ ID NO: 9054 - protein, 187 aa, unidentified
  source 1..187: note = Hungateiclostridium saccincola
  REGION 1..187: note = tr|A0A2K9E654|A0A2K9E654_9FIRM GTP cyclohydrolase 1; OS = Hungateiclostridium saccincola OX=1677857 GN=folE2 PE=3; SV = 1
MIDKERVKAAVREILIAIGEDPDREGLVETPDRVARMYEEIFAGLYTDPKDCIKVFQENTHEEMILVKDIPMYSVCEHHLLPFVGVAHVVYIPRKGKILGLSKLARIVDIIAKKPQLQERLTSEVADIIMNSINPLGVAVVVEAEHLCMTMRGVKKPGSKTVTSALRGIIKTDARTRSEVMSLINGL

SEQ ID NO: 9055 - protein, 187 aa, unidentified
  source 1..187: note = Hungateiclostridium sp.
  REGION 1..187: note = tr|A0A4Q0I735|A0A4Q0I735_9FIRM GTP cyclohydrolase 1; OS = Hungateiclostridium sp. N2K1 OX=2487273 GN=folE PE=3; SV = 1
MIDKERIKAAVREILIGIGEDPDREGVLETPDRVARMCEEIFAGLHQDPKSVVKVFQEESHEEMVMVKDIPIYSVCEHHLLPFVGVAHVVYIPKKGRIMGLSKLARIVDLIAKKPQLQERLGSEVANVIMESINPLGVAVVVEAEHLCMTMRGIKKPGSKTVTSALRGIIKTDARTRAEVMALINGR

SEQ ID NO: 9056 - protein, 187 aa, unidentified
  source 1..187: note = Hungateiclostridium straminisolvens
  REGION 1..187: note = tr|W4V3Q9|W4V3Q9_9FIRM GTP cyclohydrolase 1; OS = Hungateiclostridium straminisolvens JCM 21531; OX = 1294263 GN=folE PE=3 SV=1
MIDKERIKAAVREILIGIGEDPDREGLLETPDRVARMCEEIFAGLHQDPRSVVKVFQEENHEEMVMVKDIPIYSVCEHHLLPFVGVAHVVYIPRKGRIMGLSKLARIVDLIAKKPQLQERLGSEVANVIMETIDPLGVAVVVEAEHLCMTMRGIKKAGSKTVTSALRGIIKTDARTRAEVMALINGK

SEQ ID NO: 9057 - protein, 187 aa, unidentified
  source 1..187: note = Hungateiclostridium thermocellum
  REGION 1..187: note = sp|A3DHH6|GCH1_HUNT2 GTP cyclohydrolase 1; OS = Hungateiclostridium thermocellum (strain ATCC 27405 / DSM 1237 / JCM 9322 / NBRC 103400 / NCIMB 10682 / NRRL B-4536 / VP I 7372) OX=203119 GN=folE PE=3 SV=1
MIDKERIKAAVRELLIGIGEDPDREGLLETPDRVARMCEEIFAGLHQDPKSVVKVFQEENHEEMVMVKDIPIYSICEHHLLPFIGVAHVVYIPRKGKIMGLSKLARIVDIIARKPQLQERLGSEVANVIMESINPLGVAVVVEAEHLCMTMRGIKKAGSKTVTSALRGIIKTDARTRAEVMALINGR

SEQ ID NO: 9058 - protein, 187 aa, unidentified; identical to SEQ ID NO: 9057
  source 1..187: note = Hungateiclostridium thermocellum
  REGION 1..187: note = tr|A0A4V3Z8C1|A0A4V3Z8C1_HUNTH GTP cyclohydrolase 1; OS = Hungateiclostridium thermocellum OX=1515 GN=folE PE=3; SV = 1

SEQ ID NO: 9059 - protein, 184 aa, unidentified
  source 1..184: note = Hungatella hathewayi
  REGION 1..184: note = tr|A0A3E2WKX6|A0A3E2WKX6_9CLOT GTP cyclohydrolase 1; OS = Hungatella hathewayi OX=154046 GN=folE PE=3 SV=1
MIDQEKIKQAVKLLLEGIGEDAEREGLKETPERIARMYEEIYGGIEEDAAEHLKKTFHVDNNEIVMEKDITFYSTCEHHLLPFYGKAHIAYIPDGKVVGLSKLARTVEAFARRLQIQEQLTGQIADALMEHLKPKGVLVMIEAEHMCMTMRGIKKPGSQTVTVVKRGVFLEDPELTNLFFQMIR

SEQ ID NO: 9060 - protein, 185 aa, unidentified
  source 1..185: note = Hungatella hathewayi
  REGION 1..185: note = tr|A0A3E2UHI3|A0A3E2UHI3_9CLOT GTP cyclohydrolase 1; OS = Hungatella hathewayi OX=154046 GN=folE PE=3 SV=1
MIDRNKVEQAVRLLLEGMGEDPSREGLIDTPERVARMYEELYSGMDEHPGMYLEKTFRAENNDLIVEKGITFYSVCEHHLLPFYGKVHVAYVPDKKVAGLSKLARTVEVFSRRLQIQEQLTAQIADALMDGLAPRGVMVMMEAEHMCMTMRGIKKPGSRTVTVVKRGCFCRQEDLVNLFFQMVRG

SEQ ID NO: 9061 - protein, 212 aa, unidentified
  source 1..212: note = Hwanghaeella grinnelliae
  REGION 1..212: note = tr|A0A3S2Z757|A0A3S2Z757_9PROT GTP cyclohydrolase 1; OS = Hwanghaeella grinnelliae OX=2500179 GN=folE PE=3 SV=1
MARIGQLTPEQSGGVSRSGASRERAEKAVRTLIEWAGEDPDREGLVGTPARVVRAYEEFFAGYREDPVELLATTYEENSYDEMIVLRDIRLETHCEHHIVPILGKVHVGYLPSGRVVGISKLVRVVEVFAKRMQIQESLTAQIADAIQTVLEPKGVAVVIEAAHQCMTTRGVRKPGVSMVTSRLLGAFREDPQMRRDYLAMIGQGQGRLDSA

SEQ ID NO: 9062 - protein, 210 aa, unidentified
  source 1..210: note = Hwanghaeella grinnelliae
  REGION 1..210: note = tr|A0A437QI05|A0A437QI05_9PROT GTP cyclohydrolase 1; OS = Hwanghaeella grinnelliae OX=2500179 GN=folE PE=3 SV=1
MTASRLNLVQQIDKDREDALARRPSREDAMAAVRTLLAFAGDDPDREGLLETPDRVVRSWDEFFAGYFEDPVEILSRTFEETDGYDEMVILRDIPFNSHCEHHIRPIIGHAHIAYLPNKRVVGISKLARILEVYAKRLQIQEKMTAQIANAINDVLAPKGVGVVIEATHECMTTRGVNKQGVSMVTSTLLGTFKQDPRTRSEFLRLIGRE

SEQ ID NO: 9063 - protein, 366 aa, Hwanghaeicola aestuarii
  REGION 1..366: note = tr|A0A2W7NIP6|A0A2W7NIP6_9RHOB GTP cyclohydrolase FolE2 OS=Hwanghaeicola aestuarii OX=568105 GN=folE2 PE=3; SV = 1
MNVHNPDIAEPMEAEEAAELYERLRAWAASADRCALDRAGPSLRSFAAAQGEEYPALSSDYPEGFVADAAYRAELPDLQNGPAASIKGDRRHIQHVGIHNFRLPIHFRTRDHGALTLETSVTGTVSLEAEKKGINMSRIMRTFYAHADHTFSFDVIETALDATKTDLESFDARIQMRFSYPLRIDSLRSGLSGYQYYDIALELVERAGVRKKIVHLDYVYSSTCPCSLELSEHARRARGQLATPHSQRSVARLSVELDEAAGCLWFEDLIELCRGAVPTETQVMVKREDEQAFAELNAANPIFVEDAARLFARALDADPRVRDFRVVASHQESLHSHDAVSVLTEGATFAQASLDPRLFATLLHHG

SEQ ID NO: 9064 - protein, 191 aa, Hyalangium minutum
  REGION 1..191: note = tr|A0A085W3A9|A0A085W3A9_9DELT GTP cyclohydrolase 1; OS = Hyalangium minutum OX=394096 GN=folE PE=3 SV=1
MPDAAAMANAVRDFLRAAGLPLTDENLVNTPDRVTQAWMSEFLDGYQRTPEEVLGKTYPAPPHSAGELVVVTDLRFHSMCPHHLLPFEGRAHVAYVPGKRVVGFGRMAALVDCFAHRLILQEELARQVASSLARVLGSPATACIIEAKQSCLRLRGDQQRDAITHSEAYEGRLRKDGALRRELWARLGMPR

SEQ ID NO: 9065 - protein, 198 aa, unidentified
  source 1..198: note = Hydrobacter penzbergensis
  REGION 1..198: note = tr|A0A1H2STX9|A0A1H2STX9_9BACT GTP cyclohydrolase 1; OS = Hydrobacter penzbergensis OX=1235997 GN=folE PE=3 SV=1
MAYSKKEHYDEHTTEKLIKHYHGVLEHLGEDPEREGLLKTPERVAKAMQFLTQGYHLDARSIIHSARFKEEVNEMIIVKDIELYSMCEHHMLPFFGKAHIAYIPNGWITGLSKLARVVDVYSRRLQVQERLTTQILEAIKESLNPLGVAVVIEAKHLCMMMRGVQKQNSVTTTSAFDGEFMKNPTRSEFLKLISTKLD

SEQ ID NO: 9066 - protein, 225 aa, unidentified
  source 1..225: note = Hydrobacter penzbergensis
  REGION 1..225: note = tr|A0A1H2YDA2|A0A1H2YDA2_9BACT GTP cyclohydrolase 1; OS = Hydrobacter penzbergensis OX=1235997 GN=folE PE=3 SV=1
MQIQYQRALAGQMASVSGEEDHFSSGSQTPLRPDAFAMSAEEKVHDIAYHFRSIMHTLGLDLSDDSLKDTPMRVAKMYVRELFSGLDPVNKPAISLFNNSYGYGQLLLEKNIPFVSQCEHHFVPIRGKAHVAYFAGDKVIGLSKLNRIVDYFARRPQVQERLTVQIGQELQQALSTEDVAVIIDAEHMCVSMRGIRQDGCSTVSSFYGGRFNNASVKNELLLQLK

SEQ ID NO: 9067 - protein, 188 aa, unidentified
  source 1..188: note = Hydrocarboniclastica marina
  REGION 1..188: note = tr|A0A4P7XDQ9|A0A4P7XDQ9_9ALTE GTP cyclohydrolase 1; OS = Hydrocarboniclastica marina OX=2259620 GN=folE PE=3 SV=1
MTHSLDTLASSYRQILEQLGEDPSREGLRDTPLRAAKAMQFLTQGYQQNLETIVNGAVFESTNDEMVVVQNIELYSMCEHHMLPFIGKAHIAYLPDGKVLGLSKLARIVDMFARRLQIQENLTRQIADAVLEATDARGVGVVIEAQHMCMMMRGVEKQNSVMSTSVMLGGFRKSQATRSEFLTLISRR

SEQ ID NO: 9068 - protein, 212 aa, Hydrocarboniphaga daqingensis
  REGION 1..212: note = tr|A0A1M5P6C2|A0A1M5P6C2_9GAMM GTP cyclohydrolase 1; OS = Hydrocarboniphaga daqingensis OX=490188 GN=folE PE=3; SV = 1
MDDFAPLSAGTVDDEFEPAAGISLSRGEHHLAPLYRDLLRGVGEDVNREGLVGTPQRAAKAFEFLTQGYTQDIQALLNGAVFESANRDMVIVRDIEFYSLCEHHILPFYGKVHVAYLPAGKVIGLSKIPRIVDVFARRLQIQENLTEQVARCVQEVTGAKGVAVVVEARHMCMLMRGVEKQNSSMVTNTMLGQFRENENARMQFLRFLPNVI

SEQ ID NO: 9069 - protein, 191 aa, Hydrocarboniphaga daqingensis
  REGION 1..191: note = tr|A0A1M5LSR2|A0A1M5LSR2_9GAMM GTP cyclohydrolase 1; OS = Hydrocarboniphaga daqingensis OX=490188 GN=folE PE=3; SV = 1
MQNKPPQKGIIVEEHYRAIIEALGENPDREGLLRTPARAAKAMRFLTQGYEQDIDTIVNGAIFESSNDEMVIVRDIELYSMCEHHLLPFIGKAHVAYLPQGKVVGLSKISRIVDMFARRLQIQENLTKQIGECIQQVTNAAGVAVVIEAKHLCSMMRGVEKQNSAMVTSMMIGRFREDSRTRTEFLNLVRG

SEQ ID NO: 9070 - protein, 181 aa, Hydrocarboniphaga effusa
  REGION 1..181: note = tr|I7ZHJ2|I7ZHJ2_9GAMM GTP cyclohydrolase 1; OS = Hydrocarboniphaga effusa AP103 OX=1172194 GN=folE PE=3; SV = 1
MEEHYRAIIEAIGENPEREGLLRTPHRAAKAMEFLTRGYDQDIGEIVNGAIFESDNEEMVIVRDIELYSMCEHHLLPFIGRCHVAYLPQGKVIGLSKIPRIVDMFARRLQIQENLTKQIGDCIQGVTSAAGVAVVIEAKHLCAMMRGVEKQNSSMITSMMLGRFREDPRTRQEFLNLVQRR

SEQ ID NO: 9071 - protein, 218 aa, Hydrococcus rivularis
  REGION 1..218: note = tr|A0A1U7HBB6|A0A1U7HBB6_9CYAN GTP cyclohydrolase 1; OS = Hydrococcus rivularis NIES-593 OX=1921803 GN=folE PE=3; SV = 1
MTLSKSEPTAIKSTKSSFPNLTTEHQSLVSQEDMIQAVRTLLLGLGEDPDREGLKDTPKRVVKALQFLTSGYHQSLDELLNGAVFHEDTDEMVLVRDIDLFSSCEHHILPILGRAHVAYIPDGKVMGLSKIARICEMYARRLQVQERLTAQIADAIQGLLKPKGVAVVIEATHMCMVMRGVQKPGSWTSTSAVRGVFAEDAKTRQEFMSLICHNPTFH

SEQ ID NO: 9072 - protein, 242 aa, Hydrococcus rivularis
  REGION 1..242: note = tr|A0A1U7HE33|A0A1U7HE33_9CYAN GTP cyclohydrolase 1; OS = Hydrococcus rivularis NIES-593 OX=1921803 GN=folE PE=3; SV = 1
MTITSSNGFNRPNSSSMNRPNALNPNLIERVKSRPDRNTHDGQEAQFHAASAENQDRMIEAVRTMLESVGEDPEREGLLKTPKRVAEAMQFLTQGYTQSLEELVNGAIFDEGHNEMVLVRDIDFFSLCEHHMLPFMGRAHVAYIPNQKVVGLSKLARIVEMYSRRLQVQERLTRQIAEAIQTILDPQGVAVVMEASHMCMVMRGVQKPGSWTVTSAMVGVFQEDQKTREEFLNLIRHRPNFM

SEQ ID NO: 9073 - protein, 243 aa, Hydrocoleum sp.
  REGION 1..243: note = tr|A0A261KUA6|A0A261KUA6_9CYAN GTP cyclohydrolase 1; OS = Hydrocoleum sp. CS-953 OX=1671698 GN=folE PE=3 SV=1
MTQTFSNGSNSSKTLNINGVKTSDADVTGKISYRPDRSSSSNGQSIRQQPPAEESNEAMMEAVRTMLLSVGEDPEREGLLKTPKRVAEAMQFLTSGYSQSLEEIVNGAIFDEGHNEMVLVRDINLFSLCEHHMLPFMGKAHVAYIPNQKVVGLSKLARIVEMYSRRLQVQERLNRQIAEAIQTILEPKGVAVVIEATHMCMVMRGVQKPGSWTVTSAMLGVFEEDQKTREEYLSLIRHQPAFF

SEQ ID NO: 9074 - protein, 236 aa, Hydrocoleum sp.
  REGION 1..236: note = tr|A0A261KKT3|A0A261KKT3_9CYAN GTP cyclohydrolase 1 (Fragment) OS=Hydrocoleum sp. CS-953 OX=1671698; GN = AFK68_26015 PE=3 SV=1
MTQTFSNGSNSSKTLNINGVKTSDADVTGKISYRPDRSSSSNGQSIRQQPPAEESNEAMMEAVRTMLLSVGEDPEREGLLKTPKRVAEAMQFLTSGYSQSLEEIVNGAIFDEGHNEMVLVRDINLFSLCEHHMLPFMGKAHVAYIPNQKVVGLSKLARIVEMYSRRLQVQERLNRQIAEAIQTILEPKGVAVVIEATHMCMVMRGVQKPGSWTVTSAMLGVFEEDQKTREEYLSLI

SEQ ID NO: 9075 - protein, 190 aa, unidentified
  source 1..190: note = Hydrogenibacillus schlegelii
  REGION 1..190: note = tr|A0A179ITH7|A0A179ITH7_HYDSH GTP cyclohydrolase 1; OS = Hydrogenibacillus schlegelii OX=1484 GN=folE PE=3 SV=1
MAVDHEKIEHAVRLILEAIGEDPDREGLRETPARVARMYEEIFSGLHEDPGKHFSAIFGESHEEIVIVKDIPFYSMCEHHLVPFFGKAHVGYIPREGRVVGLSKLARAVETVARRPQLQERMTAEIADAIMTHLEAHGAIVVIEAEHLCMVMRGVKKPGSKTVTSAVRGVFAHDAKARAEAMALITGRLS

SEQ ID NO: 9076 - protein, 190 aa, unidentified
  source 1..190: note = Hydrogenibacillus schlegelii
  REGION 1..190: note = tr|A0A2T5GD01|A0A2T5GD01_HYDSH GTP cyclohydrolase 1; OS = Hydrogenibacillus schlegelii OX=1484 GN=folE PE=3 SV=1
MAVDHEKIEHAVRLILEAIGEDPDREGLRETPARVARMYEEIFSGLHEDPGKHFSAIFSESHEEIVIVKDIPFYSMCEHHLVPFFGKAHVGYIPREGRVVGLSKLARAVETVARRPQLQERMTAEIADAIMSHLEAHGAIVVIEAEHLCMVMRGVKKPGSKTVTSAVRGVFAHDAKARAEAMALITGRLS

SEQ ID NO: 9077 - protein, 43 aa, Hydrogenimonas sp.
  REGION 1..43: note = tr|A0A3G9GUZ1|A0A3G9GUZ1_9PROT GTP cyclohydrolase I, type 1 OS=Hydrogenimonas sp. OX=2231112 GN=NNO_0084 PE=4; SV = 1
MAVVIEARHICMEMRGVEKINSTTVSSALRGSSSVTQRRGKSS

SEQ ID NO: 9078 - protein, 195 aa, Hydrogenimonas sp.
  REGION 1..195: note = tr|A0A432QYR2|A0A432QYR2_9PROT GTP cyclohydrolase 1; OS = Hydrogenimonas sp. OX=2231112 GN=folE PE=3 SV=1
MSNEEKAKKFEEAVTTILELIGEDPTREGLVKTPHRVYKAFEHLCEGYKMDPKKVLNDALFESSNDEMVLVRDIEFYSMCEHHLLPIIGRVHVAYIPDGKVVGLSKIPRMVNIYARRLQIQEQMTEQIADAILETIQPKGVGVIVEARHMCMEMRGVEKINSTTVSSALRGLFKRDAKTREEFMSMVNAPIRPRY

SEQ ID NO: 9079 - protein, 194 aa, Hydrogenimonas thermophila
  REGION 1..194: note = tr|A0A1I5NFJ3|A0A1I5NFJ3_9PROT GTP cyclohydrolase 1; OS = Hydrogenimonas thermophila OX=223786 GN=folE PE=3 SV=1
MSIEKAKKFEEAITTILELIGEDPNREGLKKTPHRVYKAFEHLCEGYKMDPKKVLNDALFESSNDEMVLVRDIEFYSMCEHHMLPIIGRVHVAYIPDGKVVGLSKIPRMVNIYARRLQIQEQMTEQIADAILETIQPKGVGVIVEARHMCMEMRGVEKINSTTVSSALRGLFKSDAKTREEFMSMVNAPLRPRY

SEQ ID NO: 9080 - protein, 264 aa, unidentified
  source 1..264: note = Hydrogenispora ethanolica
  REGION 1..264: note = tr|A0A4R1R9Q4|A0A4R1R9Q4_9FIRM GTP cyclohydrolase FolE2 OS=Hydrogenispora ethanolica OX=1082276 GN=folE2; PE = 3 SV=1
MIDVQSRRDERGIEIQKVGLKDVNLPFQIRMRDGGFQHVHGNVVVSVTLPHHFKGTHLSRFMELLMSWSEKPISWKEIRQILAELCSHLEVSAAEISLKFRYFLPVPAPVSGIVGYLDYLGEFRGVFRQPSGHFHFQLGAEIPVLSLCPCSKEISAYGAHNQRAAIRTLVHCSYPGKILWLEELIELLRIQGSCPIYPVLKREDEKYVTEAAYQNPKFVEDILRDSVLALRSEPRIRSFQVEVESYESIHNHSAFASHVEEAAD

SEQ ID NO: 9081 - protein, 530 aa, Hydrogenivirga caldilitoris
  REGION 1..530: note = tr|A0A497XN72|A0A497XN72_9AQUI GTP cyclohydrolase 1; OS = Hydrogenivirga caldilitoris OX=246264 GN=folE PE=3 SV=1
MVDKEKIKQAIRLFLEGIGEDPDREGLRETPDRIARMWEEFESMRSFDMKLFEEFGEYNEMVLVKDITFYSLCEHHLLPFFGKVHIAYIPDGVICGLSKLVRTVRAFALRPQVQERLTEEIADFLEGELKPKGVAVVMSAEHLCYSEDTEILTDQGWKLFKELNGTEKVAQVYPDTLEIEFTEPVMYHRYPYKGYMINFRNKSLNLLVSPDHKMLFSTDWIFSKSRRENVWLTERADKLLGRTIIVPQAGIMKGKEKEYFEIESEDSVSYYGNTALKTRALKVNANTFLKFLGMYLAEGCVYENPNYRMHKVRIVQKEGYKAELMESVLREMPFKVFKHRRTNGVVEFFINSKALCNFLSPLGKSKDKRLPKEIFNLSPDQKLLFLQYYSLGDGYIKPNGKLHLVSKSKKLMDDIQALLVTIGISTTVYESYTNDQVYYRLETRGDKQGRYKFYSKVRESLKEPYEGYIYSVTVPSGFILVRREGRTAISGNCMSMRGAMSPGHQTVTSALRGVFLKDMKTREEFLKLVR

SEQ ID NO: 9082 - protein, 117 aa, Hydrogenivirga sp.
  REGION 1..117: note = tr|A8V1C4|A8V1C4_9AQUI GTP cyclohydrolase 1; OS = Hydrogenivirga sp. 128-5-R1-1 OX=392423 GN=HG1285_04233; PE = 3 SV=1
MSIDENKLKQSIKLFLEAIGENPDREGLKETPDRIVRLWKEFKTHENFNMTVFEDIGSYDEMVVVRDIQFYSLCEHHLLPFFGKAHIAYIPDGKVCGLSKLVRVVNKFSYRPQFKKG

SEQ ID NO: 9083 - protein, 183 aa, Hydrogenivirga sp.
  REGION 1..183: note = tr|A8UY02|A8UY02_9AQUI GTP cyclohydrolase 1; OS = Hydrogenivirga sp. 128-5-R1-1 OX=392423 GN=folE PE=3; SV = 1
MIDRDKIKEAIRLFLEGIGEDPDREGLKETPERIARMWEEFESMRSFDMKLFEEFGDYNEMVLVKDIQFYSLCEHHLLPFYGKVHIAYIPDGVICGLSKLVRTVRAFALRPQVQERLTDEIADFLERELKPKGVGVIVEAEHLCMSMRGAMSPGHVTTTSALRGVFLSDMKTREEFLKLTKGA

SEQ ID NO: 9084 - protein, 186 aa, Hydrogenobacter hydrogenophilus
  REGION 1..186: note = tr|A0A285NS25|A0A285NS25_9AQUI GTP cyclohydrolase 1; OS = Hydrogenobacter hydrogenophilus OX=35835 GN=folE PE=3; SV = 1
MAVDKEKMKQAVRLFLEAIGEDPNREGLKDTPERVARMWEEFDRMRDFDFKLFEEFGNYNEMVLVKDINVYSICEHHLLPFFGKAHIAYIPDKIVCGLSKLVRTVRAFSLSPQLQERLTNQIADFLMDNLKPKGVAVVLEMEHLCMSMRGVMSPGHLTVTSALRGVFLSDMRTREEFLKLIRKEKE

SEQ ID NO: 9085 - protein, 186 aa, Hydrogenobacter thermophilus
  REGION 1..186: note = tr|D3DI93|D3DI93_HYDTT GTP cyclohydrolase 1; OS = Hydrogenobacter thermophilus (strain DSM 6534 / IAM 12695 / TK-6) OX=608538 GN=folE PE=3 SV=1
MAVDREKIKQAVRLFLEGIGEDPNREGLKETPDRVARMWEEFDSMREFDFKLFEEFGSYNEMVLVKDINIYSICEHHLLPFFGKAHVAYIPDGIVCGLSKLVRTVRAFALRPQLQEKLTNEIADFLMEQLKPKGVAVVLEMEHLCMSMRGVISPGHLTTTSALRGIFLSDIRTREEFLKLIKRGRE

SEQ ID NO: 9086 - protein, 182 aa, Hydrogenobaculum sp.
  REGION 1..182: note = sp|B4U640|GCH1_HYDS0 GTP cyclohydrolase 1; OS = Hydrogenobaculum sp. (strain Y04AAS1) OX=380749 GN=folE; PE = 3 SV=1
MIDKEKIIEGIKLFLEGIGEDITREGIKETPERVAKMWEEFEKERSFDFKLFEEYSNYSEMIIVKDIPFYSMCEHHLLPFFGKAHIAYIPNKKICGLSKLVRTVRAMALKPQVQERLTEEIADIVQKELEPMGVGVVIEAEHLCMSMRGVRSPGHCTVTSSLRGNFLSDIRTKEEFFKLIRQ

SEQ ID NO: 9087 - protein, 182 aa, Hydrogenobaculum sp.
  REGION 1..182: note = tr|M1QGV2|M1QGV2_9AQUI GTP cyclohydrolase 1; OS = Hydrogenobaculum sp. HO OX=547144 GN=folE PE=3 SV=1
MIDKEKIIQGIKLFLEGIGEDITREGIKETPERVARMWEEFEKERSFDFKLFEEYSNYSEMIIVKDIPFYSMCEHHLLPFFGKAHIAYIPNKKICGLSKLVRTVRAMALKPQVQERLTEEIADIVQKELEPMGAGVVIEAEHLCMSMRGVRSPGHCTVTSSLRGSFLSDIRTKEEFFKLIRQ

SEQ ID NO: 9088 - protein, 242 aa, Hydrogenophaga intermedia
  REGION 1..242: note = tr|A0A1L1PNC5|A0A1L1PNC5_HYDIT GTP cyclohydrolase I; OS = Hydrogenophaga intermedia OX=65786 GN=BN948_03710 PE=4; SV = 1
MLMKTDPDQTPATPPSGDEGVPVSVKIRERLKAARQRFHSNDNIAEFIQPGELEKLLDEVTEKMQGVLESMVIDTDSDHNTGNTARRVAKMYLKEVFAGRYVKGPAVTEFPNAEHLNELMIVGPITVRSACSHHFCPVIGKLWIGVMPNEHTNVIGLSKYARLAEWIMGRPQIQEEAVIQLADLIQEKTQPDGLAIVMEASHYCMAWRGVKDMNSKMINSVMRGVFLKDANLRREFLALVPR

SEQ ID NO: 9089 - protein, 251 aa, Hydrogenophaga intermedia
  REGION 1..251: note = tr|A0A1L1PGD0|A0A1L1PGD0_HYDIT Putative GTP cyclohydrolase 1 type 2 OS=Hydrogenophaga intermedia; OX = 65786 GN=BN948_00415 PE=4 SV=1
MSTSRNTLVHAFDTLLQPAQFKDYGPNGLQVEGRQEIRRLISGVTASLALIEAAIEAKADTIFVHHGLFWRGQDGRVTGWMKQRLSRLLAHDINLIAYHLPLDAHPTLGNNAQLAKVLGIALEEGARFGEQALGFVGQRPAEPAETLATHVERALGRPVTLVNPPGRVVRRIGLCTGGAQGYFEAAIAAGVDAFITGEISEPQAHYARECGVAYLACGHHASERYGAPAVAAHVASALGVEHRFIDIPNPA

SEQ ID NO: 9090 - protein, 236 aa, Hydrogenophaga pseudoflava
  REGION 1..236: note = tr|A0A4P6X1C0|A0A4P6X1C0_HYDPS GTP cyclohydrolase 1; OS = Hydrogenophaga pseudoflava OX=47421 GN=folE PE=4 SV=1
MSNPEQLDDSEGTPVSVKIRERLKAARHRFHSNDNIADFIEPGELEKLLDEVTVKMQGVLDAMVIDTENDHNTGDTARRVAKMYLKEVFNGRYVKGPSVTEFPNAEHLNELMIVGPITVRSACSHHFCPVIGKIWIGVMPNEHTNVIGLSKYARLAEWIMGRPQIQEEAVVQLADLIQEKTQPDGLAIVMEASHYCMAWRGVKDMDSKMINSVMRGVFLKDPNLRREFLSLIPRKS

SEQ ID NO: 9091 - protein, 273 aa, Hydrogenophaga pseudoflava
  REGION 1..273: note = tr|A0A4P6X7Y1|A0A4P6X7Y1_HYDPS GTP cyclohydrolase 1 type 2 OS=Hydrogenophaga pseudoflava OX=47421 GN=ybgI PE=4; SV = 1
MSVAAGSDITASMPPDTSPGQGVSRDELLAACDRLLQPALFKDYGPNGLQVEGRARVRKLVSGVTASLAFIDAAIDAGADALFVHHGLFWRGQDGRVTGWMKQRLARLLSHDINLLAYHLPLDAHAELGNNAQLARRIGVRLLEADGGRFGDQSLGFLGLRPPAPAAELLKDIESALGRSALLVGDPGRRVERVAICTGGAQGYFEAAIAAGADVFITGEISEPQTHYAREAGVAYIACGHHASERYGAPAVADHLAELLGIDHQFIDIPNPA

SEQ ID NO: 9092 - protein, 244 aa, Hydrogenophaga sp.
  REGION 1..244: note = tr|W7X3H6|W7X3H6_9BURK GTP cyclohydrolase 1; OS = Hydrogenophaga sp. T4 OX=1437444 GN=folE PE=4 SV=1
MLMKTEPDMTTADTIDDDQGVPVSVKIRERIKAARHRFHSNDNIAGFIEPGELEQLLEEVTVKMQGVLDSMVIDTESDHNTGDTARRVAKMYLKEVFNGRYVHGPSVTEFPNAEHLNELMIVGPITVRSACSHHFCPVIGKIWIGVMPNEHTNVIGLSKYARLAEWIMGRPQIQEEAVVQLADLIQEKTQPDGLAIVMEASHYCMAWRGVKDMDSKMINSVMRGVFLKDPNLRREFLSLIPRNS

SEQ ID NO: 9093 - protein, 273 aa, Hydrogenophaga sp.
  REGION 1..273: note = tr|A0A358BED9|A0A358BED9_9BURK GTP cyclohydrolase FolE2 OS=Hydrogenophaga sp. OX=1904254 GN=folE2 PE=3 SV=1
MSDLSSGVRAVMPDVQGRHDVRAMPIARVGVKNLRYPLVLEVAGRVQHSVGLWDLHVGLKAEQKGAHMSRLLAWLDAFTLDGEVVDFDRLQLAMPELMALLETDSAGLSVSFPFFIRKTAPVSGQQSLLEYEGGWLARCEGGRTEVRMVATVPVKSLCPCSKEVSEDGAHNQRSHIRLEVLLGEAVPWAELVRFAEDHASCELWGLLKRSDEKWVTERAYAHPKFVEDLVRDVALALNDDPRVLTYTVDVINFESIHAHDVHARIAHDKNTAV

SEQ ID NO: 9094 - protein, 277 aa, unidentified
  source 1..277: note = Hydrogenophilaceae bacterium
  REGION 1..277: note = tr|A0A1J4Z552|A0A1J4Z552_9PROT GTP cyclohydrolase FolE2 OS=Hydrogenophilaceae bacterium CG1_02_62_390; OX = 1805218 GN=folE2 PE=3 SV=1
MNPCDSVCDTASPCPTNVMPDVQSYHDARQIAIDKVGIKAIRHPIRVADKNGGVQHTIATFNMYVYLPHHFKGTHMSRFVEILNSYEREFSVESFEAMMRQMVERLEAKSGHVEMSFPYFITKKAPVSGVESMIDYDITFIGEIKDGEYLQTIRAVVPVTSLCPCSKQISDYGAHNQRSHVTLTVRTNRFVWIEDLVRFAEDNGSCELYGLLKRPDEKYVTERAYDNPKFVEDMVRDVAAALNQDARIDAYIVEAENFESIHNHSAYALIERDKKTS

SEQ ID NO: 9095 - protein, 214 aa, unidentified
  source 1..214: note = Hydrogenophilaceae bacterium
  REGION 1..214: note = tr|A0A1J4YZX1|A0A1J4YZX1_9PROT GTP cyclohydrolase 1; OS = Hydrogenophilaceae bacterium CG1_02_62_390 OX=1805218; GN = folE PE=3 SV=1
MSDCCDHDCQSPYQPGHLGIPQVGKFDPAAFEQAVTDLLKACGVEPDSTHTGRTARRVRELWQRRLLGGYDMDPGEVLGDGFEDSRDDMVVVHGIAIHGVCPHHLVPFRGVAHVAYIPGGRLHGFGRIARMVDAIGHRFTYQEWMTRDIAEALIGHGHAQGAACVIEAEQLCLLLGEDRRGDERVVTQAFSGTFRNNPQLRNEFLRAIGVSLHR

SEQ ID NO: 9096 - protein, 213 aa, unidentified
  source 1..213: note = Hydrogenophilales bacterium
  REGION 1..213: note = tr|A0A259EUH1|A0A259EUH1_9PROT GTP cyclohydrolase 1; OS = Hydrogenophilales bacterium 17-64-11 OX=1970526 GN=folE; PE = 3 SV=1
MASEPPDTLFRASEPPARPDRNDAENAVRMLIRWAGDDPDREGLRDTPARVARAYEEFFAGYLEDPVQILSRTFSEVEGYDEMIVMTDIRFESHCEHHMAPIIGKAHVAYLPDRRVVGISKLARLVDIYAKRLQIQERMTVQIADTLNDVLQPKGVAVVIEGAHQCMTTRGVHKPGAAMVTSRMLGAFRSDGSTRREFLAMIGRTGAGPLSNA

SEQ ID NO: 9097 - protein, 214 aa, unidentified
  source 1..214: note = Hydrogenophilales bacterium
  REGION 1..214: note = tr|A0A259ESE0|A0A259ESE0_9PROT GTP cyclohydrolase 1; OS = Hydrogenophilales bacterium 17-61-9 OX=1970524; GN = B7X93_06435 PE=3 SV=1
MSDSCDHDGHPPHGSGSLGIPQTGSFDPVAFEAAVNAMLAACGVAPDSVHTGRTAHRVRELWQKRLLGGYAITPEEALGEGFADDRDDMVVVRGIAVHGVCPHHLVPFRGVAHVAYIPGGRLHGFGRIGRMVDAIGHRFTYQEWMTRDIAEALVTHGMAKGAACIVEAEQLCLLLGEDRRGDERVVTQAFTGCFRDSDQMRNEFLRATSQRELR

SEQ ID NO: 9098 - protein, 272 aa, Hydrogenophilus thermoluteolus
  REGION 1..272: note = tr|A0A2Z6DVX8|A0A2Z6DVX8_HYDTE GTP cyclohydrolase FolE2 OS=Hydrogenophilus thermoluteolus OX=297 GN=folE2; PE = 3 SV=1
MTEIAQPPLADVAHEMPDVQGSADHRNLDIDRVGIKSIRHPIRVSDRSGGVQHTVATFNMYVGLPRHFKGTHMSRFVEILNQQERELSVESFEPMLRHMVERLEAATGRVEMTFPYFVLKKAPVSGVESLMDYDVTFIGEIDESNRYRFTLTVVVPVTSLCPCSKRISERGAHNQRSHITITATLADHVWIEELIDIAETEASCQLYGLLKRPDEKYVTEYAYDHPKFVEDLVRDVAARLNRDPRIVRYVVESENFESIHNHSAYALIEGPK

SEQ ID NO: 9099 - protein, 187 aa, Hydrogenothermus marinus
  REGION 1..187: note = tr|A0A3M0BRK0|A0A3M0BRK0_9AQUI GTP cyclohydrolase 1; OS = Hydrogenothermus marinus OX=133270 GN=folE PE=3 SV=1
MSIDEKKLKESIRLFLEAIGEDPDREGLKETPDRIVRLWKEFKSYENFNMTVFEDIGNYNEMVVVKDIQFYSLCEHHLLPFFGKAHIAYIPDGKVCGLSKLVRVVNKFSYRPQVQERLTGQIAEFLEKELNPKGVAVVMEAEHLCMSMRGVKNPTSYTVTSKLTGIFMENEKTRNEFLNLINSHKKY

SEQ ID NO: 9100 - protein, 187 aa, Hydrogenothermus sp.
  REGION 1..187: note = tr|A0A432REJ3|A0A432REJ3_9AQUI GTP cyclohydrolase 1; OS = Hydrogenothermus sp. OX=2231113 GN=folE PE=3 SV=1
MNIDEKKLKQSVRLFLEAIGENPDREGLKETPDRIVRLWKEFKSYEDFNMTIFEDIGNYDEMVVVRDINFYSLCEHHLLPFFGKAHIAYIPDGKVCGLSKLVRVVNKFSYRPQVQERLTAEIAEYLEKELNPKGVAVVLEAIHLCMAMRGVKNPSSYTVTSKLTGVFKECEKTRNEFLNLINSNKSL

SEQ ID NO: 9101 - protein, 311 aa, unidentified
  source 1..311: note = Hydrogenovibrio crunogenus
  REGION 1..311: note = sp|Q31EF8|GCH4_HYDCU GTP cyclohydrolase FolE2; OS = Hydrogenovibrio crunogenus (strain XCL-2) OX=317025; GN = folE2 PE=3 SV=2
MPDIACQPHQDPQGKLNWVGMSGIELPIKIEQDSQTLTLSSQVQAYVSLDDPLSKGIHMSRLYLILDEMGSNAPLNPASIQTLLTAFIESHQGLSQNAFVEFRFDYYERRRSLKSDNSGWKHYPCTLRGEMRNGQFECEISISVPYSSTCPCSAALSRQLIQEAFEQQFNGQDLDYNQVLEWLGTPEGICATPHSQRSYAQVKLKVNAEHPLNLSNVINQIEDAVKTPVQSTVKREDEQEFARLNATNLMFCEDAARRLQAKLESCPEYKDYWVRVNHLESLHPHDAVAIVTKNVPGGYSDEPNFMERFQN

SEQ ID NO: 9102 - protein, 315 aa, unidentified
  source 1..315: note = Hydrogenovibrio crunogenus
  REGION 1..315: note = tr|A0A4V1C924|A0A4V1C924_9GAMM GTP cyclohydrolase FolE2 OS=Hydrogenovibrio crunogenus OX=39765 GN=folE2 PE=3; SV = 1
MTKHMPDIACQPHQDPQGKLNWVGMSGIELPIKIEQDSQTLTLSSQVQAYVSLDDPLSKGIHMSRLYLILDEMGSNAPLNPASIQTLLTAFIESHQGLSQNAFVEFRFDYYERRRSLKSDNSGWKHYPCTLRGEMRNGQFECEISISVPYSSTCPCSAALSRQLIQEAFEQQFNGQELDYNQVLEWLGTPEGICATPHSQRSYAQVKLKVNAEHPLNLSNVINQIEDAVKTPVQSTVKREDEQEFARLNATNLMFCEDAARRLQAKLESCPEYKDYWVRVNHLESLHPHDAVAIVTKNVPGGYSDEPNFMERFQN

SEQ ID NO: 9103 - protein, 317 aa, Hydrogenovibrio marinus
  REGION 1..317: note = tr|A0A066ZVU0|A0A066ZVU0_HYDMR GTP cyclohydrolase FolE2 OS=Hydrogenovibrio marinus OX=28885 GN=folE2 PE=3; SV = 1
MTKNMPDIACQPYENPQGKLNWVGMSGIELPILVENEQRTPTQLSSQVQAYVSLDDPLSKGIHMSRLYVLLDQKGAEAPLSAQHVKGLLQAFIDSHEGLSNHAFVEFRFDYYERRRSLKSDNSGWKHYPTTLRGELKDGTFECEVSISVPYSSTCPCSAALSRQLIQEAFEQKFSGDQVDYQEVLAWLGTPEGICATPHSQRSYAQVKVKIAEDAPLSISALINQIEDAVQTPVQSTVKREDEQEFARLNASNLMFCEDAARRLQNKFSQQTEYLDFWIRVNHLESLHPHDAVAIVTKGIPGGYDDEPNFMDRLSVN

SEQ ID NO: 9104 - protein, 316 aa, Hydrogenovibrio sp.
  REGION 1..316: note = tr|A0A2I2A4I3|A0A2I2A4I3_9GAMM GTP cyclohydrolase FolE2 OS=Hydrogenovibrio sp. SC-1 OX=2065820 GN=folE2 PE=3; SV = 1
MTKHMPDIACQPHQAPQGKLNWVGMSGIELPILIEQSAQQTLTLSSQVQAYVSLDDPLSKGIHMSRLYLLLDEMGSNEPLTPNRIQVLLEAFLESHHGLSQNAFVEFKFDYYERRKSLKTDNSGWKHYPCTLRGQLRDGQYECEISISVPYSSTCPCSAALSRQLIQEAFQQQFADQPLDYQQVLAWLGTPEGICATPHSQRSYAQIKLKVTADHVLNLSTVINQIEDAVKTPVQSTVKRQDEQEFARLNATNLMFCEDAARRLQAKLESCPEYIDYWVRVNHLESLHPHDAVAVVTKNIPNGYSDEPNFMDAFEH

SEQ ID NO: 9105 - protein, 316 aa, unidentified
  source 1..316: note = Hydrogenovibrio thermophilus
  REGION 1..316: note = tr|A0A410H5G4|A0A410H5G4_9GAMM GTP cyclohydrolase FolE2 OS=Hydrogenovibrio thermophilus OX=265883 GN=folE2; PE = 3 SV=1
MTKHMPDIACQPHQDPQGKLNWVGMSGIELPIQLQQDSQNTLTLSSQVQAYVSLDDPLSKGIHMSRLYLILDETGSKAPLTPASIQNMLQAFIESHQGLSQNAFVEFRFDYYERRRSLKSDNSGWKHYPCTMRGEMRDGQYECEVSISVPYSSTCPCSAALSRQLIQEAFEQQFNGQALDYNQVLEWLGTPEGICATPHSQRSYAQIKLKVDASHDLNLSTVINQIEDAVKTPVQSTVKREDEQEFARLNATNLMFCEDAARRMQAKLESCTEYQDYWVRVNHLESLHPHDAVAIVTKNVPGGYSDEPNFMDRFEH

SEQ ID NO: 9106 - protein, 269 aa, unidentified
  source 1..269: note = Hydromonas duriensis
  REGION 1..269: note = tr|A0A4R6Y4M0|A0A4R6Y4M0_9BURK GTP cyclohydrolase FolE2 OS=Hydromonas duriensis OX=1527608 GN=folE2 PE=3 SV=1
MNSPTDLKNIPDVQSSVDARNMPISRVGIKDVRFPLQIDLGAGAQATVASYTMCVFLPADQKGTHMSRFVALLEENKNVFTLSSFKSLIDDMMVRLESQKGDIQVQFPYFVEKTAPISGIKSLMDYQITLNGTHQHGQSQVALSVLIPMTSLCPCSKKISEYGAHNQRSHVTAHMTFADANMAQFDLHALIAQIEAQGSCELYGLLKRPDEKYVTERAYDNPKFVEDLVRDVAGVLKSQDYVAQFTVEAENFESIHNHSAYAVIQSVDI

SEQ ID NO: 9107 - protein, 269 aa, unidentified
  source 1..269: note = Hydromonas sp.
  REGION 1..269: note = tr|A0A345DAN4|A0A345DAN4_9BURK GTP cyclohydrolase FolE2 OS=Hydromonas sp. F02 OX=2268024 GN=folE2 PE=3 SV=1
MNSPTDLKAIPDVQSTIDARNMPISRVGIKDVRFPLSIDLGAGAQATVARYTMCVYLPADQKGTHMSRFVALLEENKTVFSLSSFKTLIDDMMVRLESEKGDIQAHFPYFVEKVAPVSGIKSLMDYEITLNGTHVKGHSQVTLSVLIPMTSLCPCSKKISAYGAHNQRSHVTAHMTFDDEHMAEFDLHALISAIEAQGSCELYGLLKRPDEKYVTERAYDNPKFVEDLVRDVAGVLKAQTYVAQFSVEAENFESIHNHSAYAVIESTDI

SEQ ID NO: 9108 - protein, 239 aa, unidentified
  source 1..239: note = Hydrotalea sandarakina
  REGION 1..239: note = tr|A0A2W7RRH2|A0A2W7RRH2_9BACT GTP cyclohydrolase 1; OS = Hydrotalea sandarakina OX=1004304 GN=folE PE=3 SV=1
MKPSEIMSSIQLNGKNIALTDVLVDEMGDNHVQTSVDTPLRNDAFVLSDEDKIKAIEKHFRAIMEVLGLDLNDDSLKGTPKRVAKMYVKEIFKGLNPENMPKVTLFNNSYHYNQMLVEKNISFYSNCEHHFVPIIGRAHVAYISNGKVIGLSKLNRIVNYFAKRPQVQERLTMQIGTALQKILGTQDVAVVIDAKHLCVASRGIEDDTSTTVTSFYEGKFKEEATRSEFLKYLELHTKV

SEQ ID NO: 9109 - protein, 240 aa, Hydrotalea sp.
  REGION 1..240: note = tr|A0A4Q0AVB8|A0A4Q0AVB8_9BACT GTP cyclohydrolase 1; OS = Hydrotalea sp. AMD OX=2501297 GN=folE PE=3 SV=1
MKQSETMSSIQLNGKTKAELTDVLIDEMGDNHILTSVDTPLREDAFDLSDEEKTKAIEKHFRSIMEIMGLDLTDDSLKGTPKRMAKMYIKEIFRGLNPANKPKVTLFNNTYQYNQMLVEKNISFYSNCEHHFVPIIGKAHVAYMSNGKVIGLSKLNRMVEYFAKRPQVQERLTMQIGTELQQILGTNDVAVVIDAKHLCVASRGVEDDTSTTITSFYEGKFKEETTRNEFLKYLELNTKF

SEQ ID NO: 9110 - protein, 237 aa, unidentified
  source 1..237: note = Hyella patelloides
  REGION 1..237: note = tr|A0A563VVJ7|A0A563VVJ7_9CYAN GTP cyclohydrolase 1; OS = Hyella patelloides LEGE 07179 OX=945734 GN=folE PE=3; SV = 1
MTQVFSNGSNSSINSNGLKSSLREQVSSRPDRNTHDGKEAVINATSEAAKEKMMDAVKVMLESVGEDPDREGLLKTPKRVAEAMQFLTQGYNQSLEKLVNGAIFDEGHNEMVLVRDIDFFSLCEHHMLPFMGRAHVAYIPSQKVVGLSKLARIVEMYARRLQVQERLTRQIAEAIQEVLEPQGVAVVMEATHMCMSMRGVQKPGSWTVTSAMLGVFQDEQKTREEFLNLIRHQPSFM

SEQ ID NO: 9111 - protein, 235 aa, unidentified
  source 1..235: note = Hyella patelloides
  REGION 1..235: note = tr|A0A563VZ98|A0A563VZ98_9CYAN GTP cyclohydrolase 1; OS = Hyella patelloides LEGE 07179 OX=945734 GN=folE PE=3; SV = 1
MIAWLLPLLFNLILFKFMTLAKSKPNQVNKIDNKLPLLNTTQQPPVSEEEMRQAVRTLLLGLGEDPDREGLRDTPKRVVKALKFLTSGYHQSLDELLNGAVFHENTDEMVLVRDIDLFSSCEHHILPILGRAHVAYIPDRKVIGLSKIARICEMYGRRLQVQERLTAQIADALQGLLQPKGVAVVVEASHMCMVMRGVQKPGSWTSTSAVRGVFANDAKTRQEFMSLIRHNPALR

SEQ ID NO: 9112 - protein, 225 aa, Hymenobacter actinosclerus
  REGION 1..225: note = tr|A0A1I0AJ73|A0A1I0AJ73_9BACT GTP cyclohydrolase 1; OS = Hymenobacter actinosclerus OX=82805 GN=folE PE=3 SV=1
MDNLPLSAVAGSPAAAADAQLPPDLRTPLRPDAFEQSEEAKIEAIAGHFREIMQVLGLDLTDDSLAGTPRRVAKMYVQEWFRGLNPAYHPEVRLFENRYQYQQMLVERDITLFSCCEHHFVPIIGKAHVAYLPGEHVVGLSKLNRVVQYFARRPQVQERLTRQIAEELKRSLGTDDVAVLIEADHLCVMSRGVNDTSSSTLTAEYGGAFGQDATLRQEFLRLIGK

SEQ ID NO: 9113 - protein, 229 aa, unidentified
  source 1..229: note = Hymenobacter amundsenii
  REGION 1..229: note = tr|A0A246FME8|A0A246FME8_9BACT GTP cyclohydrolase 1; OS = Hymenobacter amundsenii OX=2006685 GN=folE PE=3 SV=1
MDNPLSAATAVAGGAAAATAVDAQLPADLRTPLRPDAFALDEEAKIEAIAGHFREIMQVLGLDLTDDSLNGTPRRVAKMYVQEWFRGLNPEYRPDVRLFENRYQYQQMLVERDITLFSCCEHHFVPIIGKAHVAYLPGEHVVGLSKLNRVVQYFARRPQVQERLTRQIAEELKNALHTDNVAVLIEADHLCVMSRGVNDTSSSTLTAEYGGVFGQDAALRQEFLRLIGK

SEQ ID NO: 9114 - protein, 225 aa, unidentified
  source 1..225: note = Hymenobacter aquaticus
  REGION 1..225: note = tr|A0A4Z0PY10|A0A4Z0PY10_9BACT GTP cyclohydrolase 1; OS = Hymenobacter aquaticus OX=1867101 GN=folE PE=3 SV=1
MDNSVSAASAAHSAGPADSHLSPDLRTPLRADAFALSDEEKITGIAEHFHEIMLLLGLDLTDDSLQGTPRRVAKMYVQEWFRGLDPKHRPDVKLFDNRYGYQQMLVERDITVFSCCEHHFVPIMGKAHVAYLPGEHVVGLSKLNRVVQYYARRPQVQERLTRQIAEELKQSLRTDNVAVLIEADHLCVMSRGVNDTGSSTLTAEYGGLFKDDQALRAEFLRQIGK

SEQ ID NO: 9115 - protein, 235 aa, Hymenobacter chitinivorans
  REGION 1..235: note = tr|A0A2M9BAQ4|A0A2M9BAQ4_9BACT GTP cyclohydrolase 1; OS = Hymenobacter chitinivorans DSM 11115 OX=1121954 GN=folE; PE = 3 SV=1
MKRTATLLNTMDNSVSAAAAAHSFGSADAHLSPDLRTPLRPDAFALSEEEKIAGIAEHFHEIMQLLGLDLNDDSLKGTPRRVAKMYVQEWFRGLDPKHRPEVKLFDNRYGYGQMLVEKDITVFSCCEHHFVPIMGKAHVAYLPGEHVVGLSKLNRVVQYYARRPQVQERLTRQIAEELKHSLQTENVAVLIEADHLCVMSRGVNDTSSSTLTAEYGGLFKEDSTLRAEFLRLLGK

SEQ ID NO: 9116 - protein, 219 aa, unidentified
  source 1..219: note = Hymenobacter coccineus
  REGION 1..219: note = tr|A0A1G1TJW0|A0A1G1TJW0_9BACT GTP cyclohydrolase 1; OS = Hymenobacter coccineus OX=1908235 GN=folE PE=3 SV=1
MDNDSGARPAPDAHLPPGLRTPLRPDAFDAADDTKIAAIAGHFAAIMQELGLDLADDSLAGTPHRVAKMYVQEWFRGLNPAHRPHVKLFENRYGYHQLLVERDITLFSCCEHHFVPIVGKAHVAYLPADNVVGLSKLNRVVQHYARRPQVQERLTRQIAEELQQSLGTPDVAVLIEADHLCVMSRGVNDTSSSTLTSEYGGRFATDAALRTEFLRQIGK

SEQ ID NO: 9117 - protein, 224 aa, Hymenobacter daecheongensis
  REGION 1..224: note = tr|A0A1M6CKE3|A0A1M6CKE3_9BACT GTP cyclohydrolase 1; OS = Hymenobacter daecheongensis DSM 21074 OX=1121955; GN = folE PE=3 SV=1
MDKSAPAVGPDGSGLPDTHLSADLRAPLRADAFALTDEAKIAGIAEHFREIMQLLGLDLTDDSLQGTPRRVAKMYVHEWFKGLDPKHRPDVKLFENRYAYKQMLVERDITVFSCCEHHFVPIMGKAHVAYLPGEHVVGLSKLNRVVQYYARRPQVQERLTRQIAEELKQTLHTNNVAVLIEADHLCVMSRGVNDAGSSTITAEYGGAFERDEALRTEFLRLIGK

SEQ ID NO: 9118 - protein, 225 aa, Hymenobacter elongatus
  REGION 1..225: note = tr|A0A4Z0PSW7|A0A4Z0PSW7_9BACT GTP cyclohydrolase 1; OS = Hymenobacter elongatus OX=877208 GN=folE PE=3 SV=1
MDNSVPAAAAAHRFGPADAHLSPDLRTPLRPDAFALSDEEKIAGIAGHFHEIMQLLGLDLTDDSLQGTPRRVAKMYVQEWFRGLDPKHRPDVKLFENRYGYQQMLVERDITVFSCCEHHFVPIMGKAHVAYLPEEHVVGLSKLNRVVQYYARRPQVQERLTRQIAEELKNSLRTENVAVLIEADHLCVMSRGVNDTGSSTLTAEYGGIFKEDQALRAEFLRFIGK

SEQ ID NO: 9119 - protein, 226 aa, Hymenobacter gelipurpurascens
  REGION 1..226: note = tr|A0A212UAJ6|A0A212UAJ6_9BACT GTP cyclohydrolase 1; OS = Hymenobacter gelipurpurascens OX=89968 GN=folE PE=3 SV=1
MDNLVPAASAAEGATPATDGHLAPSLRTPLRPDAFVLSDEEKIDTIAGHFREIMDVLGLDLTDDSLSGTPKRVAKMYVQEWFRGLNPEHRPDVKLFENRYQYENMLVERDITLFSCCEHHFVPIIGKAHVAYLPGEHVVGLSKLNRVVQYYARRPQVQERLTRQIAEELKQTLHTDNVAVLIEADHLCVMSRGVNDTSSGTLTAEYGGVFKDDSGLRQEFLRLIGK

SEQ ID NO: 9120 - protein, 222 aa, unidentified
  source 1..222: note = Hymenobacter gummosus
  REGION 1..222: note = tr|A0A3S0IP46|A0A3S0IP46_9BACT GTP cyclohydrolase 1; OS = Hymenobacter gummosus OX=1776032 GN=folE PE=3 SV=1
MANQPDPGAASGLPDAHLASALRTPLRPDAFALSEEEKIAGITEHFRHIMDLLGLDLTDDSLAGTPRRVAKMFVHEWFRGLNPEHRPDVRLFDNRYQYQQMLVERDITLFSCCEHHFVPIVGKAHVAYLPGEHVVGLSKLNRVVQYYARRPQVQERLTRQIAEELKHSLQTEDVAVLIEADHLCVMSRGVNDTSSSTITAEYGGRFGQDETLRQEFLRQIGK

SEQ ID NO: 9121 - protein, 219 aa, unidentified
  source 1..219: note = Hymenobacter lapidarius
  REGION 1..219: note = tr|A0A1G1T4Z6|A0A1G1T4Z6_9BACT GTP cyclohydrolase 1; OS = Hymenobacter lapidarius OX=1908237 GN=folE PE=3 SV=1
MDNPSGSAPAPDAHLPAELRTPLRDNAFAESDEAKITAISGHFEAIMRELGLDLTDDSLAGTPRRVAKMYVQEWFKGLDPKNRPEVRMFDNRYNYHQLLVERDITLFSCCEHHFVPIIGKAHVAYLPGTNVVGLSKLNRVVQYYARRPQVQERLTRQIAEELKQSLGTDDVAVLIEADHLCVMSRGVNDTSSSTLTSEYSGRFAKDEALRGEFLRQIGK

SEQ ID NO: 9122 - protein, 226 aa, unidentified
  source 1..226: note = Hymenobacter mucosus
  REGION 1..226: note = tr|A0A238W613|A0A238W613_9BACT GTP cyclohydrolase 1; OS = Hymenobacter mucosus OX=1411120 GN=folE PE=3 SV=1
MANSEPAASAADSTTPAADAHLDSALRTPLRPDAFAQSDDEKITAIAEHFREIMQILGLDLTDDSLSGTPRRVAKMYVQEWFRGLDPAHRPDVKLFDNRYQYNNILVERDITLFSCCEHHFVPIIGKAHVAYLPGEHVVGLSKLNRVVQYYARRPQVQERLTRQIAEELKLALHTEDVAVLIEADHLCVMSRGVNDTSSGTLTAEYGGAFGRDEALRREFLRLIGK

SEQ ID NO: 9123 - protein, 219 aa, unidentified
  source 1..219: note = Hymenobacter nivis
  REGION 1..219: note = tr|A0A502H0Y2|A0A502H0Y2_9BACT GTP cyclohydrolase 1; OS = Hymenobacter nivis OX=1850093 GN=folE PE=3 SV=1
MANDSGARPAPDAHLPPGLRTPLRPDAFDAADDTKIAAIAGHFAAIMEELGLDLADDSLAGTPHRVAKMYVQEWFRGLNPAHRPDVKLFENRYGYHQLLVERDITLFSCCEHHFVPIVGKAHVAYLPAGNVVGLSKLNRVVQHYARRPQVQERLTRQIAEELQQSLGTPDVAVLIEADHLCVMSRGVNDTSSSTLTSEYGGRFATDAALRTEFLRQIGK

SEQ ID NO: 9124 - protein, 219 aa, unidentified
  source 1..219: note = Hymenobacter nivis
  REGION 1..219: note = tr|A0A2Z3GQL6|A0A2Z3GQL6_9BACT GTP cyclohydrolase 1; OS = Hymenobacter nivis OX=1850093 GN=folE PE=3 SV=1
MDNDSGARPAPDAHLPAGLRTPLRPDAFDASDETKITAIAGHFAAIMRELGLDLTDDSLAGTPRRVAKMYVQEWFRGLNPAHRPDVKLFENRYQYHQLLVERDITLFSCCEHHFVPIMGKAHVAYLPADNVVGLSKLNRVVQHYARRPQVQERLTRQITAELQQSLGTPDVAVLIEADHLCVMSRGVNDTSSSTLTSEYGGRFATDAALRTEFLRQIGK

SEQ ID NO: 9125 - protein, 228 aa, Hymenobacter perfusus
  REGION 1..228: note = tr|A0A428KHF0|A0A428KHF0_9BACT GTP cyclohydrolase 1; OS = Hymenobacter perfusus OX=1236770 GN=folE PE=3 SV=1
MDNSVPAASAANGATARPAIDTHLPADLRTPLRPDAFALSDDEKIAAIAAHFREIMLVLGLDLNDDSLSGTPKRVAKMYVQEWFKGLDPKHRPDVRLFENRYQYHNMLVERDITLFSCCEHHFVPIIGKAHVAYLPGEHVVGLSKLNRVVQYFARRPQVQERLNRQIAEELKNALNTEDVAVLIEADHLCVMSRGVNDTNSSTITAEYGGAFGRDEALRREFLRLIGK

SEQ ID NO: 9126 - protein, 227 aa, Hymenobacter psychrophilus
  REGION 1..227: note = tr|A0A1H3FL70|A0A1H3FL70_9BACT GTP cyclohydrolase 1; OS = Hymenobacter psychrophilus OX=651662 GN=folE PE=3 SV=1
MDNLPLSAAVAGGPAAAATDTQLPPDLRTPLRADAFELSEDAKIEAISGHFREIMQVLGLDLTDDSLAGTPRRVAKMYVQEWFRGLNPAYRPEVRLFENRYQYRQMLVERDITLFSCCEHHFVPIIGKAHVAYLPGENVVGLSKLNRVVQYFARRPQVQERLTRQIAEELKQSLGTDDVAVLIEADHLCVMSRGVNDTSSSTLTAEYGGAFGQDAALRQEFLRLIGK

SEQ ID NO: 9127 - protein, 223 aa, Hymenobacter psychrotolerans
  REGION 1..223: note = tr|A0A1M6TLN6|A0A1M6TLN6_9BACT GTP cyclohydrolase 1; OS = Hymenobacter psychrotolerans DSM 18569 OX=1121959; GN = folE PE=3 SV=1
MDNAAPTSGSNLRPTDAHLPTDLHTPLRPDAFALSEEDKIASITEHFREIMQLLGLDLTDDSLAGTPRRVAKMYVQEWFRGLHPENRPEVRLFGNRYQYGQMLLERDITLFSCCEHHFVPIIGKAHVAYLPGENVVGLSKLNRVVQYYARRPQVQERLTRQIAEELKQSLHTDNVAVLIEADHLCVMSRGVNDTSSSTITAEYSGAFETDATLRAEFLRLLGK

SEQ ID NO: 9128 - protein, 227 aa, Hymenobacter rigui
  REGION 1..227: note = tr|A0A428KXB3|A0A428KXB3_9BACT GTP cyclohydrolase 1; OS = Hymenobacter rigui OX=334424 GN=folE PE=3 SV=1
MDNPVPVASAADGAHRSAVDTQLPADLRTPLRPDAFHLSDDEKITAIAGHFHEIMLLLGLDLTDDSLSGTPRRVAKMYVQEWFKGLDPKHRPDVRLFENRYHYRNILVERDITVFSCCEHHFVPIIGKAHVAYLPGEHVVGLSKLNRVVQYFARRPQVQERLTRQIAEELKTTLGTEDVAVLIEADHLCVMSRGVNDTNSSTITAEYSGAFGRDETLRQEFLRMLGK

SEQ ID NO: 9129 - protein, 235 aa, Hymenobacter roseosalivarius
  REGION 1..235: note = tr|A0A1W1VUQ6|A0A1W1VUQ6_9BACT GTP cyclohydrolase 1; OS = Hymenobacter roseosalivarius DSM 11622 OX=645990; GN = folE PE=3 SV=1
MRPNATLLNTMDNAVPAAAATDRPVPNDAHLPVDLRTPLRPDAFTLSEEEKIAGIADHFREIMMLLGLDLDDDSLNGTPRRVAKMYVQEWFRGLNPVYQPDVKLFDNRYQYHQMLVERDITLFSCCEHHFVPIIGKAHVAYLPGEHVVGLSKLNRVVQYYARRPQVQERLTRQIAEELKNTLHTNDVAVLIEADHLCVMSRGVNDTSSGTLTAEYGGAFDRDQTLRTEFLRLIGK

SEQ ID NO: 9130 - protein, 219 aa, Hymenobacter roseosalivarius
  REGION 1..219: note = tr|A0A1W1UG83|A0A1W1UG83_9BACT GTP cyclohydrolase 1; OS = Hymenobacter roseosalivarius DSM 11622 OX=645990; GN = folE PE=3 SV=1
MKNAPCALLSRLPQPAATAHLTLPNGPEPRSEEDKIAAISAHFAAIMRELGLDLSDDSLAGTPRRVAKMYVQEWFRGLDPKNRPEMKLFENKYDYHQLLVARDITLFSCCEHHFVPIIGKAHVAYLPADKVVGLSKLNRVVQYYARRPQVQERLTRQIAEELKQSLGTDDVAVLLEADHLCVQSRGVNDTSSATLTSEYGGRFAAEASLRAEFLRQIGK

SEQ ID NO: 9131 - protein, 228 aa, unidentified
  source 1..228: note = Hymenobacter rubripertinctus
  REGION 1..228: note = tr|A0A418QUC0|A0A418QUC0_9BACT GTP cyclohydrolase 1; OS = Hymenobacter rubripertinctus OX=2029981 GN=folE PE=3; SV = 1
MDNPMSAATAAVDCSGAAAVDAQLAADLRTPLRPDAFALSDEAKIDAIAGHFREIMHVLGLDLTDDSLNGTPRRVAKMYVQEWFRGLNPQHRPDVRLFENRYQYQQMLVERDITLFSCCEHHFVPIIGKAHVAYLPGEHVVGLSKLNRVVQYYARRPQVQERLTRQIAEELKNALHTDNVAVLIEADHLCVMSRGVNDTSSSTLTAEYGGVFGQDQALRQEFLRLIGK

SEQ ID NO: 9132 - protein, 219 aa, unidentified
  source 1..219: note = Hymenobacter sedentarius
  REGION 1..219: note = tr|A0A0U4AB11|A0A0U4AB11_9BACT GTP cyclohydrolase 1; OS = Hymenobacter sedentarius OX=1411621 GN=folE PE=3 SV=1
MDNLSGLAPATDAHLPSSLRTPLRDDAFDQADEAKIAAIAGHFEAIMRELGLDLRDDSLAGTPRRVAKMYVQEWFKGLDPKHRPEVRLFENRYGYHQLLVERDITLFSCCEHHFVPIIGKAHVAYLPGSHVVGLSKLNRVVQYYARRPQVQERLTRQIAEELKLSLGTDDVAVLIEADHLCVMSRGVNDTSSSTLTSEYGGRFASDEALRSEFLRQIGK

SEQ ID NO: 9133 - protein, 223 aa, Hymenobacter sp.
  REGION 1..223: note = tr|A0A4Q5LDK3|A0A4Q5LDK3_9BACT GTP cyclohydrolase 1; OS = Hymenobacter sp. 1-3-3-3 OX=2025506 GN=folE PE=3 SV=1
MDNSAAAAPDGSGLPDTHLSAGLRTPLRPDAFALTDEAKIAGIAEHFREIMLLLGLDLTDDSLQGTPRRVAKMYVQEWFKGLDPKHRPDVRLFDNRYGYQQLLVERDITVFSCCEHHFVPIMGKAHVAYLPGEHVVGLSKLNRVVQYYARRPQVQERLTRQIAEELKQTLHTDSVAVLIEADHLCVMSRGVNDTGSSTLTAEYGGAFATDPALRAEFLRQIGK

SEQ ID NO: 9134 - protein, 218 aa, Hymenobacter sp.
  REGION 1..218: note = tr|A0A495VFF5|A0A495VFF5_9BACT GTP cyclohydrolase 1; OS = Hymenobacter sp. YR204 OX=2135668 GN=folE PE=3 SV=1
MDNSVPGPEADAHLPLDLRTPLRTDAFALSDQEKIAAIEPHFREIMTLLGLDLTDDSLSGTPRRVAKMYVQEWFRGLNPEHQPEVRLFENRYNYHQMLVERDITLFSCCEHHFVPIIGKAHVAYMPGDKVVGLSKLNRVVQYYARRPQVQERLTRQIAEELKHALHTNDVAVLIEADHLCVMSRGVNDTSSSTITAEYSGIFLQQEHYRTEFLRLIGK

SEQ ID NO: 9135 - protein, 218 aa, unidentified
  source 1..218: note = Hymenobacter swuensis
  REGION 1..218: note = tr|W8F1P4|W8F1P4_9BACT GTP cyclohydrolase 1; OS = Hymenobacter swuensis DY53 OX=1227739 GN=folE PE=3 SV=1
MDGAAARPAIDTHLPADLRTPLRPDAFALSDDEKIAAIAAHFREIMQVLGLDLTDDSLSGTPKRVAKMYVQEWFKGLDPKHRPDVRLFENRYQYHNMLVERDITLFSCCEHHFVPIIGKAHVAYLPGEHVVGLSKLNRVVQYFARRPQVQERLTRQIAEELKNALHTEDVAVLIEADHLCVMSRGVNDTNSSTITAEYGGAFGRDEALRREFLRLIGK

SEQ ID NO: 9136 - protein, 226 aa, unidentified
  source 1..226: note = Hymenobacter wooponensis
  REGION 1..226: note = tr|A0A4Z0MHJ0|A0A4Z0MHJ0_9BACT GTP cyclohydrolase 1; OS = Hymenobacter wooponensis OX=1525360 GN=folE PE=3 SV=1
MDNPVPAASAADGAAPAADGHLTESLRTPLRSDAFTLSDEEKITAIAGHFREIMEVLGLDLSDDSLNGTPRRVAKMYVQEWFRGLNPEHRPDVKLFENRYQYQNLLVERDITLFSCCEHHFVPIIGKAHVAYLPGEHVVGLSKLNRVVQYYARRPQVQERLTRQIAEELKQALRTDDVAVLIEADHLCVMSRGVNDTSSGTLTAEYGGAFNTDSALRQEFLRLVGK

SEQ ID NO: 9137 - protein, 196 aa, unidentified
  source 1..196: note = Hyphomicrobiaceae bacterium
  REGION 1..196: note = tr|A0A5C7LXS7|A0A5C7LXS7_9RHIZ GTP cyclohydrolase 1; OS = Hyphomicrobiaceae bacterium OX=2015799 GN=folE PE=3 SV=1
MEHDDRSLNEPAPVFDNIEINVAEILLALGRGNDEGTRETPKRVRKFYLDWTTAGEPTFKLTDFDAESFDQMVIQRRIPFFSMCEHHLLPFFGLATVAYIPNGKILGLSKLARIVDWFSRRPQNQERLTQQIGNFISKTLKPKGVGVSLTGRHMCMEMRGIRTYGTMTTTNVLMGIIRTAPDAREEFLRSTTYEQL

SEQ ID NO: 9138 - protein, 206 aa, unidentified; identical to SEQ ID NO: 8086
  source 1..206: note = Hyphomicrobiaceae bacterium
  REGION 1..206: note = tr|A0A424LYL7|A0A424LYL7_9RHIZ GTP cyclohydrolase 1; OS = Hyphomicrobiaceae bacterium TMED74 OX=1986774 GN=folE; PE = 3 SV=1

SEQ ID NO: 9139 - protein, 216 aa, Hyphomicrobium denitrificans
  REGION 1..216: note = tr|N0BFB9|N0BFB9_9RHIZ GTP cyclohydrolase 1; OS = Hyphomicrobium denitrificans 1NES1 OX=670307 GN=folE; PE = 3 SV=1
MSQNQLIKPANQNPEISDQMNSDKKPTRAEVEAAVRTILRWTGDDPTRDGLLETPARVVRAYEEYFAGYNEDPKAILQKTFEEIEGYDEMIVLRGIRFESHCEHHMAPIIGRAWVAYIPRGRVVGISKLARSVDAFAKRLQIQEKMTAQIANTIQEVLDPQGVAVVLKAEHHCMTTRGAHKPGTDMVTSRMLGVFRDNPITRQEFLALVTEDQRIG

SEQ ID NO: 9140 - protein, 203 aa, Hyphomicrobium denitrificans
  REGION 1..203: note = tr|N0B2R9|N0B2R9_9RHIZ GTP cyclohydrolase 1; OS = Hyphomicrobium denitrificans 1NES1 OX=670307 GN=folE; PE = 3 SV=1
MKKLPLSTHVTALSPRRPSRAEAEEAVRTLIAWSGDNPARPGLEKTPERVADAFGEYFRGYKEDALAELAATFEEPSGYNDMVLLKDIAFESHCEHHIAPFFGTAHIAYLPSERIVGLSKIARVVDIFARRLQTQEGLTDQIASALEEGLRARGVAIIMSARHHCMAARGVHQRGVATVTFRFLGEFERDSALRDRFMAAVRD

SEQ ID NO: 9141 - protein, 209 aa, Hyphomicrobium facile
  REGION 1..209: note = tr|A0A1I7MTQ3|A0A1I7MTQ3_9RHIZ GTP cyclohydrolase 1; OS = Hyphomicrobium facile OX=51670 GN=folE PE=3 SV=1
MNVNPQMFDKARCLKNIEADRPDRPDRADVEAAFRTIIRWTGDNPERSGLIETPARATRALEEFFTGYAQDPALILRKTFDEIEGYDEMIVLRDIRFESHCEHHMAPILGRAWVGYVPSGRVVGISKLARVVEAYAKRLQIQEKMTAQIANTINDVLRPQGVGVIIKAAHQCMTTRGVHKPNADLVTSRMLGCVRDNPLTRQEFMSLAV

SEQ ID NO: 9142 - protein, 197 aa, Hyphomicrobium facile
  REGION 1..197: note = tr|A0A1I7MVL9|A0A1I7MVL9_9RHIZ GTP cyclohydrolase 1; OS = Hyphomicrobium facile OX=51670 GN=folE PE=3 SV=1
MNSNNKPTRAEVEAAVKTIIRWTGDDPSRDGLKETPSRVTKAFEEYFRGYDQDPVAILQKTFEEIEGYDEMIVLRGIRFESHCEHHMAPIIGRAWVGYIPDGRVVGISKLARVVDAYAKRLQIQEKMTAQIANTIQDVLQPQGVAVMIKAEHHCMTTRGVMKPGTDMVTSRMLGAFRDNPITRQEFLAIVTEDTKTS

SEQ ID NO: 9143 - protein, 201 aa, unidentified
  source 1..201: note = Hyphomicrobium nitrativorans
  REGION 1..201: note = tr|V5SBV7|V5SBV7_9RHIZ GTP cyclohydrolase 1; OS = Hyphomicrobium nitrativorans NL23 OX=1029756 GN=folE; PE = 3 SV=1
MSNKIIKPDASELSVPTREEAEAAVRTLLRWAGDDPTRDGLIETPKRVAKAFQDYFRGYNDDPEEILQKTFEETEGYDEMIVLRGIRFESHCEHHLAPIVGRAWVGYIPNGRVVGISKLARVVDVFAKRLQIQEKMTSQIANIIDDVLKPQGVAVVIKAEHHCMTTRGIHKPGTDMVTSRMLGVFRDNALTRQEFLSVIDD

SEQ ID NO: 9144 - protein, 207 aa, unidentified
  source 1..207: note = Hyphomicrobium nitrativorans
  REGION 1..207: note = tr|V5SDN0|V5SDN0_9RHIZ GTP cyclohydrolase 1; OS = Hyphomicrobium nitrativorans NL23 OX=1029756 GN=folE; PE = 3 SV=1
MDLHISRLQTSQRKRPSRDVAEAAVRTLIEWAGDDPDREGLLGTPDRVVRAYEEFYAGYAEDPVAILKRTFEETAGYDEIVMLRDIRLESHCEHHMVPIIGRAHVAYLPEGRVVGISKLARLVEIYAKRLQIQEVLTAQIADTINEVLKPKGVAVLIEAAHQCMTTRGIKKPSVVTITSRMTGCFRTDASTRAEFMGMLNARPLDAI

SEQ ID NO: 9145 - protein, 231 aa, Hyphomicrobium sp.
  REGION 1..231: note = tr|A0A2S5P5E3|A0A2S5P5E3_HYPSQ GTP cyclohydrolase 1; OS = Hyphomicrobium sp. OX=82 GN=folE PE=3 SV=1
MAKNGNPGGSRPRNDSIRTTREAAVGSRVERLKSGLLKQKGAEVTRPSREEAEAAFRTIIRWAGDDPDRDGLHETPSRVARAFEEWFHGYNDDPESILKKTFEEIEGYDEMIVLRGIRFESYCEHHMAPIIGKAWVGYIPNGRVVGISKLARVVEVYAKRLQIQEKMTAQIANIIQQVLQPHGVGVVIKAEHHCMTTRGVHKHGTDMVTSRMLGTFRDSAITRQEFLSMVE

SEQ ID NO: 9146 - protein, 215 aa, Hyphomicrobium sp.
  REGION 1..215: note = tr|A0A1E4BZ28|A0A1E4BZ28_9RHIZ GTP cyclohydrolase 1; OS = Hyphomicrobium sp. SCN 65-11 OX=1660102 GN=folE PE=3; SV = 1
MEQMIKKNGAARLELTGETTPGRPTRAEAEEAVRTLLAWAGDDPDREGLRDTPKRVAAAFEEYFAGYDADPVEALSRTFEDVGGYDDMVMLRDIRVQSHCEHHIAPFVGVAHIAYLPSNRVVGLSKLARVVEIFASRLQTQEKLTAEIVGAIESVLKPRGVAILIEAEHQCMSMRGVRQHGVATVTTRFSGVFDTDASYRDRFLQMVHAGPKQRT

SEQ ID NO: 9147 - protein, 208 aa, Hyphomicrobium sulfonivorans
  REGION 1..208: note = tr|A0A120CTT7|A0A120CTT7_HYPSL GTP cyclohydrolase 1; OS = Hyphomicrobium sulfonivorans OX=121290 GN=folE PE=3 SV=1
MDAVVEDLVKRQLRPRPSREDAEAAVRTLIEWAGDDPDREGLVGTPARVARAYEEFFAGYAEDPVEILRTTFEETAGYDEIVMLRDIRLESHCEHHIVPIIGRAHIAYYPSQRVVGISKLARLAEIYAKRLQIQEVLTAQIADAMETVLKPKGVAILIEASHQCMTTRGIKKPGVVTITSRMTGCFRREPETRAEFYRLVAGRPLDPV

SEQ ID NO: 9148 - protein, 191 aa, Hyphomicrobium sulfonivorans
  REGION 1..191: note = tr|A0A109BI81|A0A109BI81_HYPSL GTP cyclohydrolase 1; OS = Hyphomicrobium sulfonivorans OX=121290 GN=folE PE=3 SV=1
MDQSDRPSRSEVEAAFRTILRWTGENPDRDGLHETPKRMARAYEEYFRGYNEDPEAILSKTFEETEGYDEMIVLRGIRFESHCEHHMAPIIGRAWVAYIPSGRVVGISKLARVVEVYAKRLQIQEKMTAQIANAIESVLQPQGVAVVLKAEHHCMTARGIMKPGTDLVTSRMLGCFRDNPVTRQEFLSMIA

SEQ ID NO: 9149 - protein, 205 aa, unidentified
  source 1..205: note = Hyphomonadaceae bacterium
  REGION 1..205: note = tr|A0A0F2QIX9|A0A0F2QIX9_9RHOB GTP cyclohydrolase 1; OS = Hyphomonadaceae bacterium BRH_c29 OX=1629720 GN=folE; PE = 3 SV=1
MDAITPKKDIVRADPVKRPTQAEAEEAVRTLIAWAGDDPAREGVIDTPKRVVNAYKEWFSGYGEDPVKYLSRTFEDVQGYDDIVMLRNIDVESHCEHHMAPFLGKAFVAYMPSENVVGISKLARVVEIFSKRLQTQETMTAQICDAITESLAPMGTAVLIDAVHECMSTRGVHHKDVSTITTQFTGVFKSDADLRNRFLRMAGHG

SEQ ID NO: 9150 - protein, 204 aa, unidentified
  source 1..204: note = Hyphomonadaceae bacterium
  REGION 1..204: note = tr|A0A354TZI2|A0A354TZI2_9RHOB GTP cyclohydrolase 1; OS = Hyphomonadaceae bacterium OX=2026748 GN=folE PE=3 SV=1
MDKITTPGSYERTEPLTRPSREEAEDAVRTLLAWAGDDPRREGLIDTPKRVVKAYEEWFSGYTEDPVAYLSRTFDDVQGYDDLVMLREIDVESHCEHHMAPFLGKAYVAYQPTDAVVGISKLARVVEIFAKRLQTQETMTAQICDAITESLAPAGCAVLIDAKHQCMTTRGVHHPDVSTITTQFTGVFKTDKDKRDRFLRLAGK

SEQ ID NO: 9151 - protein, 205 aa, Hyphomonas adhaerens
  REGION 1..205: note = tr|A0A3B9H1L2|A0A3B9H1L2_9RHOB GTP cyclohydrolase 1; OS = Hyphomonas adhaerens OX=81029 GN=folE PE=3 SV=1
MDAITPKNEVARADTVNRPSQEEAEEAVRTLIAWAGDDPAREGLIDTPKRVVNAYKEWFSGYTEDPVKYLSRTFEDVQGYDDIVMLRDIDVESHCEHHMAPFLGKAYVAYMPTEAVVGISKLARVVEIFSKRLQTQETMTSQICDAITESLAPMGTAVLIDAVHECMSTRGVHHKDVSTITTQFTGVFKSDADLRNRFLRMTGRG

SEQ ID NO: 9152 - protein, 205 aa, Hyphomonas adhaerens; identical to SEQ ID NO: 9151
  REGION 1..205: note = tr|A0A069E8S5|A0A069E8S5_9RHOB GTP cyclohydrolase 1; OS = Hyphomonas adhaerens MHS-3 OX=1280949 GN=folE PE=3 SV=1

SEQ ID NO: 9153 - protein, 207 aa, unidentified
  source 1..207: note = Hyphomonas atlantica
  REGION 1..207: note = tr|A0A059EAR0|A0A059EAR0_9RHOB GTP cyclohydrolase 1; OS = Hyphomonas atlantica OX=1280948 GN=folE PE=3 SV=1
MAMDAITPNKDKARAEPVKRPTVQEAEEAVRTLIAWAGDDPQREGLLDTPKRVVNAYKEWFSGYDEDPVKYLSRTFEDVQGYDDIVMLRSIDVESHCEHHMAPFLGKAYVAYMPSAAVVGISKLARVVEIFSKRLQTQETMTAQICDAITESLAPMGTAVLIDAVHECMSTRGVHHKDVSTITTQFTGVFKSDADLRNRFLRMAGKG

SEQ ID NO: 9154 - protein, 205 aa, unidentified
  source 1..205: note = Hyphomonas atlantica
  REGION 1..205: note = tr|A0A356W508|A0A356W508_9RHOB GTP cyclohydrolase 1; OS = Hyphomonas atlantica OX=1280948 GN=folE PE=3 SV=1
MDAITPNKDKARAEPVKRPTVQEAEEAVRTLIAWAGDDPQREGLLDTPKRVVNAYKEWFSGYDEDPVKYLSRTFEDVQGYDDIVMLRSIDVESHCEHHMAPFLGKAYVAYMPSAAVVGISKLARVVEIFSKRLQTQETMTAQICDAITESLAPMGTAVLIDAVHECMSTRGVHHKDVSTITTQFTGVFKSDADLRNRFLRMAGKG

SEQ ID NO: 9155 - protein, 207 aa, unidentified
  source 1..207: note = Hyphomonas beringensis
  REGION 1..207: note = tr|A0A062UEX4|A0A062UEX4_9RHOB GTP cyclohydrolase 1; OS = Hyphomonas beringensis OX=1280946 GN=folE PE=3 SV=1
MAMDAITPKKDMPRTDPVKRPSVEEAEEAVRTLIAWAGDDPRREGLLDTPKRVVNAYKEWFSGYEEDPVKYLSRTFEDVQGYDDIVMLRNIEVESHCEHHMAPFLGKAYVAYMPSEAVVGISKLARVVEIFSKRLQTQETMTAQICDAITESLAPMGTAVLIDAVHECMSTRGVHHKDVSTITTQFTGVFKSDADLRNRFLRMANHG

SEQ ID NO: 9156 - protein, 206 aa, unidentified
  source 1..206: note = Hyphomonas chukchiensis
  REGION 1..206: note = tr|A0A062UMT4|A0A062UMT4_9RHOB GTP cyclohydrolase 1; OS = Hyphomonas chukchiensis OX=1280947 GN=folE PE=3 SV=1
MAMDAITPKNEKSRGEPLVRPTVQEAEEAVRTLIAWAGDDPRREGLLDTPKRVVNAYKEWFSGYDEDPVKYLSRTFEDVQGYDDIVILRNIDVESHCEHHMAPFIGKAYVAYKPSDAVVGISKLARVVEIFAKRLQTQETMTAQICDAITESLAPMGTAVLIEAVHECMSTRGVHHKDVTTITTQFTGVFKSDADLRNRFLRAANQ

SEQ ID NO: 9157 - protein, 206 aa, Hyphomonas hirschiana
  REGION 1..206: note = tr|A0A059F8K6|A0A059F8K6_9RHOB GTP cyclohydrolase 1; OS = Hyphomonas hirschiana VP5 OX=1280951 GN=folE PE=3 SV=1
MDAVTPKKDIPRPDSVRRPSQQEAEEAVRTLIAWAGDDPAREGLIDTPKRVVNAYKEWFEGYGEDPVKYLSRTFEDVQGYDDIVMLRNIEVESHCEHHIAPFIGKAFIAYKPSTAVVGISKLARVVEIFAKRLQTQETMTAQICDAITESLAPMGTAVFIEAEHQCMSTRGVHHKHVTTITTQFTGVFKSDADLRNRFLNMCGQTV

SEQ ID NO: 9158 - protein, 207 aa, Hyphomonas jannaschiana
  REGION 1..207: note = tr|A0A059F7U7|A0A059F7U7_9RHOB GTP cyclohydrolase 1; OS = Hyphomonas jannaschiana VP2 OX=1280952 GN=folE PE=3 SV=1
MAMDAITPKNEIARANPVKRPSQEEAEEAVRTLIAWAGDDPAREGLIDTPKRVVNAYKEWFSGYTEDPVKYLSRTFEDVQGYDDIVMLRDIDVESHCEHHMAPFLGKAYVAYMPTEAVVGISKLARVVEIFSKRLQTQETMTSQICDAITESLAPMGTAVLIDAVHECMSTRGVHHKDVSTITTQFTGVFKSDADLRNRFLRMTGRG

SEQ ID NO: 9159 - protein, 206 aa, Hyphomonas johnsonii
  REGION 1..206: note = tr|A0A059FM41|A0A059FM41_9RHOB GTP cyclohydrolase 1; OS = Hyphomonas johnsonii MHS-2 OX=1280950 GN=folE PE=3 SV=1
MAMDAITPKNDKSRGDPLVRPTVEEAEAAVRTLIAWAGDDPRREGLLDTPKRVVNAYREWFGGYDEDPVKYLSRTFEDVQGYDDIVILRNIDVESHCEHHMAPFIGKAFVAYKPSDAVVGISKLARVVEIFAKRLQTQETMTAQICDAITESLAPMGTAVLIEAVHECMSTRGVHHKDVTTVTTQFTGVFKSDADLRNRFLRVSGQ

SEQ ID NO: 9160 - protein, 206 aa, Hyphomonas neptunium; identical to SEQ ID NO: 9157
  REGION 1..206: note = sp|Q0BXB5|GCH1_HYPNA GTP cyclohydrolase 1; OS = Hyphomonas neptunium (strain ATCC 15444) OX=228405; GN = folE PE=3 SV=1

SEQ ID NO: 9161 - protein, 206 aa, Hyphomonas oceanitis
  REGION 1..206: note = tr|A0A059G571|A0A059G571_9RHOB GTP cyclohydrolase 1; OS = Hyphomonas oceanitis SCH89 OX=1280953 GN=folE PE=3 SV=1
MAMDAITPKNDKSRGEPLVRPTVQEAEEAVRTLIAWAGDDPRREGLIDTPKRVVNAYKEWFSGYDEDPVKYLSRTFEDVQGYDDIVILRNIDVESHCEHHMAPFIGKAYVAYKPSDAVVGISKLARVVEIFAKRLQTQETMTAQICDAITDSLAPMGTAVLIEAVHECMSTRGVHHKDVTTITTQFTGVFKSDADLRNRFLRAANQ

SEQ ID NO: 9162 - protein, 206 aa, Hyphomonas polymorpha
  REGION 1..206: note = tr|A0A062VBH2|A0A062VBH2_9RHOB GTP cyclohydrolase 1; OS = Hyphomonas polymorpha PS728 OX=1280954 GN=folE PE=3 SV=1
MDAVTPKKDIPRADPVRRPTQQEAEEAVRTLIAWAGDDPRREGLIDTPKRVVNAYKEWFEGYGEDPVKYLSRTFEDVQGYDDIVMLRNIEVESHCEHHIAPFIGKAFVAYKPSSAVVGISKLARVVEIFAKRLQTQETMTAQICDAITESLAPMGTAVFIEAEHQCMSTRGVHHKHVTTITTQFTGVFKSDADLRNRFLAMCNQNG

SEQ ID NO: 9163 - protein, 203 aa, Hyphomonas sp.
  REGION 1..203: note = tr|A0A1Z9XT51|A0A1Z9XT51_9RHOB GTP cyclohydrolase 1; OS = Hyphomonas sp. TMED17 OX=1986605 GN=folE PE=3 SV=1
MDAITPKEEITRVELERPTVEEAMDAVRTLIAWAGDDPRREGLIDTPKRVVKAYQEFFSGYREDPVEYLSRTFDDVQGYDDLVMLKNINVESHCEHHMVPFLGKAFIAYMPTQSVVGISKLARVVEIFAKRLQTQETMTAQICDAITESLAPMGVAVLIDAEHQCMSTRGVHHKDVTTVTTQFTGVFKTDKDLRNRFLRLTES

SEQ ID NO: 9164 - protein, 205 aa, Hyphomonas sp.
  REGION 1..205: note = tr|A0A258BNZ1|A0A258BNZ1_9RHOB GTP cyclohydrolase 1; OS = Hyphomonas sp. 32-62-5 OX=1970391 GN=folE PE=3 SV=1
MRSCLSPSARKAKNSVIRGPAFPVESVRTLIAWAGDDPAREGLIDTPKRVVNAYKEWFEGYGEDPVKYLSRTFEDVQGYDDIVMLRNIEVESHCEHHMAPFIGKAFVAYKPSTAVVGISKLARVVEIFAKRLQTQETMTAQICDAITESLAPMGTAVFIEAEHQCMSTRGVHHKHVTTITTQFTGVFKSDADLRNRFLAMCNQKV

SEQ ID NO: 9165 - protein, 200 aa, unidentified
  source 1..200: note = Hypnocyclicus thermotrophus
  REGION 1..200: note = tr|A0A4R7L075|A0A4R7L075_9FUSO GTP cyclohydrolase 1; OS = Hypnocyclicus thermotrophus OX=1627895 GN=folE PE=3 SV=1
MKEGYKDTMNKEKIAYHVKEILKLIGENPEREGLQGTPMRVARMYEEIFEGLKYTNDEIVKMFGVTFDEEDCYIENNKDMVLLKDIEIFSMCEHHLALMYNMKVAVAYIPKEKIIGLSKVVRIADMVGRRPQLQERIGKDIAEIMQKITETEDVAVIITGEHACMTTRGIKKPGTKTMTTTLRGKFKEDKELLNNLLGML

SEQ ID NO: 9166 - protein, 224 aa, Hyunsoonleella jejuensis
  REGION 1..224: note = tr|A0A1H9GLT7|A0A1H9GLT7_9FLAO GTP cyclohydrolase 1; OS = Hyunsoonleella jejuensis OX=419940 GN=folE PE=3 SV=1
MKFDNLEEFDALGDEHIGSSENTPMRSDAFKLSNEEKIDIIKDDVRHIMETLGLDLTDDSLNGTPNRVAKMFVKEIFGGLDPKKKPSASTFENKYKYGEMLVEKNITVYSTCEHHLLPIVGRAHVAYISNGTVVGLSKMNRIVDYYAKRPQVQERLTIQIVKELQEVLNTKDVACVIDAKHLCVNSRGIRDIESSTVTSEFGGKFKDMATRREFLDYIQLDTQF

SEQ ID NO: 9167 - protein, 245 aa, Hyunsoonleella jejuensis
  REGION 1..245: note = tr|A0A1H9K946|A0A1H9K946_9FLAO GTP cyclohydrolase 1; OS = Hyunsoonleella jejuensis OX=419940 GN=folE PE=3 SV=1
MINNTVKTAQKKEDMQLEKLKTKTNGHKLNGFTVEDIGDDHLYTGLETPMKSDAFKLTDTEKKERIAILFEEIMDVMGLDLTDDSLKGTPQRVAKMYIDEIFSGLNPENKPKVALFDNKYQYNQMLVEKNITFYSNCEHHFVPIIGKAHVAYISSGKVIGLSKLNRIVQYYAKRPQVQERLTNQIANELRTILDTDDIAVIIDAKHLCVSSRGIKDDTSATVTSYYGGQFNTSEKIAELQNYLNN

SEQ ID NO: 9168 - protein, 231 aa, unidentified
  source 1..231: note = Hyunsoonleella pacifica
  REGION 1..231: note = tr|A0A4V2JBF8|A0A4V2JBF8_9FLAO GTP cyclohydrolase 1; OS = Hyunsoonleella pacifica OX=1080224 GN=folE PE=3 SV=1
MQLEKLKQKANGHKLNGFSIDDIGDDHLFTGLDTPMRSDAFKLSDTEKKARIAILFEEIMEVMGLDLTDDSLKGTPKRVAKMYIDEIFSGLNPENKPKVALFDNKYQYNQMLVEKNITFYSNCEHHFVPIIGKAHVAYISSGKVIGLSKLNRIVQYYAKRPQVQERLTNQIANELKEALNTEDIAVIIDAKHLCVSSRGIKDDTSATVTAYYGGKFNTSEKITELQNYLNN

SEQ ID NO: 9169 - protein, 224 aa, unidentified
  source 1..224: note = Hyunsoonleella pacifica
  REGION 1..224: note = tr|A0A4Q9FN35|A0A4Q9FN35_9FLAO GTP cyclohydrolase 1; OS = Hyunsoonleella pacifica OX=1080224 GN=folE PE=3 SV=1
MKFDNLEEFDALGDEHIGTSEDTPMRSDAFKLTSEEKIDIIKDDVRHIMETLGLDLTDDSLSGTPNRVAKMFVNEIFGGLDPKKKPNASTFDNKYKYGEMLVEKNITVYSTCEHHLLPIVGRAHVAYISNGTVVGLSKMNRIVDYFAKRPQVQERLTIQIVKELQSVLNTKDVACVIDAKHLCVNSRGIRDIESSTVTSEFGGKFKDMATRREFLDYIQLDTQF

SEQ ID NO: 9170 - protein, 224 aa, Hyunsoonleella sp.
  REGION 1..224: note = tr|A0A4Q9FGM8|A0A4Q9FGM8_9FLAO GTP cyclohydrolase 1; OS = Hyunsoonleella sp. T58 OX=2527939 GN=folE PE=3 SV=1
MKFDNLEEFDALGDEHVGSSEDTPLRNDAFELTNEEKIDIIKDDVRHIMETLGLDLTDDSLNGTPNRVAKMFVNEIFGGLDPKKKPSASTFENKYKYGEMLVEKNITVYSTCEHHLLPIVGRAHVAYISNGTVVGLSKMNRIVDYFAKRPQVQERLTIQIVKELQKVLNTKDVACVIDAKHLCVNSRGIRDIESSTVTSEFGGKFKDRATRREFLDYIKLDTEF

SEQ ID NO: 9171 - protein, 231 aa, Hyunsoonleella sp.
  REGION 1..231: note = tr|A0A4Q9F9B5|A0A4Q9F9B5_9FLAO GTP cyclohydrolase 1; OS = Hyunsoonleella sp. T58 OX=2527939 GN=folE PE=3 SV=1
MQLEKLEEKKNGHKLNGFTLEDIGDDHLFTSLETPMKPDAFKLSDTEKKERIAILFEEIMDVMGLDLTDDSLKGTPKRVAKMYIDEIFSGLNPENKPKVALFDNKYQYNQMLVEKNITFYSNCEHHFVPIIGKAHVAYISSGKVIGLSKLNRIVQYYAKRPQVQERLTNQIANELKEILDTEDVAVIIDAKHLCVSSRGIKDDTSSTVTAYYGGEFNTSEKITELQNYLNG

SEQ ID NO: 9172 - protein, 198 aa, unidentified
  source 1..198: note = Ichthyenterobacterium magnum
  REGION 1..198: note = tr|A0A420DM43|A0A420DM43_9FLAO GTP cyclohydrolase 1; OS = Ichthyenterobacterium magnum OX=1230530 GN=folE PE=3; SV = 1
MPYRKFEEYNIKVTDDVKARYKNIIEDLGEDTSRDGLLKTPERASKAMQFLTQGYQQDASEILKSAMFAESYNEMVIVKDIELYSLCEHHILPFFGKAHIAYIPNGHIVGLSKIPRIVDVFARRLQVQERLTEQILDCINNTLKPEGVAVVIEASHMCMMMRGVQKQNSTTTTSGFRGAFKNIETRTEFLKLISEKLS

SEQ ID NO: 9173 - protein, 225 aa, unidentified
  source 1..225: note = Ichthyenterobacterium magnum
  REGION 1..225: note = tr|A0A420DF26|A0A420DF26_9FLAO GTP cyclohydrolase 1; OS = Ichthyenterobacterium magnum OX=1230530 GN=folE PE=3; SV = 1
MKIEKDIKDFESLGDNHIGTSAETPMRNDAFKLSNDEKIDIIKDDVRHIMETLGLDLSDDSLKGTPNRVAKMFVKEIFGGLNPKKKPSASTFDNKYKYGEMLVEKNITVYSTCEHHLLPIVGKAHVAYISNGTVVGLSKMNRIVDYYAKRPQVQERLTIQIVKELQEVLNTKDVACVIDAKHLCVNSRGIRDVDSSTVTSEFGGKFKEKETKREFLDYIKLDTTF

SEQ ID NO: 9174 - protein, 176 aa, unidentified
  source 1..176: note = Ichthyobacterium seriolicida
  REGION 1..176: note = tr|A0A1J1DZG5|A0A1J1DZG5_9FLAO GTP cyclohydrolase 1; OS = Ichthyobacterium seriolicida OX=242600 GN=JBKA6_1293; PE = 3 SV=1
MLTLGLDMNDDSLAGTPKRVAKMFVKELFSGLKPMDNEHSSFDNKYNYGEMLIEKNITLYSTCEHHFLPIVGKAHVGYISNGKVIGLSKINRIVNNFSKRPQVQERLTIQIVREMQKNLKTQNVACIIDAKHLCVNSRGIKDTASSTITAEFGGEFKNKEVKENFLNYIQLGTIFH

SEQ ID NO: 9175 - protein, 264 aa, unidentified
  source 1..264: note = Ideonella sakaiensis
  REGION 1..264: note = tr|A0A0K8P0B4|A0A0K8P0B4_IDESA GTP cyclohydrolase FolE2 OS=Ideonella sakaiensis (strain NBRC 110686 / TISTR 2288 / 201-F6) OX=1547922 GN=folE2 PE=3 SV=1
MSHLKDVLHIPDTQSERDERHLAIQRVGIKDVRWPMTLRVGTEALPTVAQWDLDVALPAEQKGTHMSRFVAWLDGFGSEAVDAPLLRARMAAMLDKLHAQRGRIEARFPFFLRKRAPVSGVESLLEYQGRWIVESGPAGTAVWAEAVVPVKSLCPCSKEISDYGAHNQRSHVTVRVELKDEIAWPELVRFAEDSASCEIWPMLKRADEKWVTERAYENPKFVEDLVRDVALRLNADERVGRYRVEVENFESIHAHSAYACIERP

SEQ ID NO: 9176 - protein, 247 aa, unidentified
  source 1..247: note = Ideonella sakaiensis
  REGION 1..247: note = tr|A0A0K8NZR4|A0A0K8NZR4_IDESA GTP cyclohydrolase I; OS = Ideonella sakaiensis (strain NBRC 110686 / TISTR 2288 / 201-F6) OX=1547922 GN=ISF6_1191 PE=4 SV=1
MPTAALPMPASTSTVTLDDAELSRLAASERIRYRLVAADCRYHANDNIAAYIRDGELDELRTEVEAHMHQVLKALVIDTESDHNTQETAKRVAKMFLTEVFRGRYVPMPSVTEFPNVERLNELMIVGPITVRSACSHHLCPILGRVWIGILPNEHSNLIGLSKYARICEWIMSRPQIQEEAVTMLANELQDRVKPDGLAIVMEADHFCMHWRGVKDNDSMMTNSVMRGAFLKDANLRREFLSLLSKK

SEQ ID NO: 9177 - protein, 266 aa, Ideonella sp.
  REGION 1..266: note = tr|A0A437RHP9|A0A437RHP9_9BURK GTP cyclohydrolase FolE2 OS=Ideonella sp. KYPY4 OX=1862385 GN=folE2 PE=3 SV=1
MTNMTDALHIPDTQSERDDRHLAIQRVGVKDVRYPLSIEVAGAVQQTAALWALDVALPAEKKGTHMSRFVAWLDALALSGEPLDAASLRAKHAAMLDKLGADEGRIEAAFSFFIRKRAPVSGLQSLLDYQGRWISETRAGITRVHAEVAVPVKSLCPCSKEISDYGAHNQRSLVTLRVELLQPVPWHELVRFAEDSASSEIWPMLKRPDEKWITERAYENPKFVEDLVRDVALRLNSDARIGRYRVDVENFESIHNHSAYARIERA

SEQ ID NO: 9178 - protein, 267 aa, Ideonella sp.
  REGION 1..267: note = tr|A0A523Q0X2|A0A523Q0X2_9BURK GTP cyclohydrolase FolE2 OS=Ideonella sp. MAG2 OX=2083017 GN=folE2 PE=3 SV=1
MNPQANSLHIPDTQSERDERHLAIQRVGVKDVRYPLTLKVAGAVQSTAALWSLDVALPAEQKGTHMSRFVAWLDAQHEPMDAARLSTELAAMLEKLHADEGRIEARFSFFLRKRAPVSGLESLLDYQGAWIAERRQGQTVIWAEVGVPVKSLCPCSKEISDYGAHNQRSLVTIRVAFKDPVAGAMEWHELVRFAEESASSEIWPMLKRADEKWVTERAYENPKFVEDLVRDVALRLNAEPRIGRYRVDVENFESIHNHSAWARIERD

SEQ ID NO: 9179 - protein, 308 aa, Idiomarina abyssalis
  REGION 1..308: note = tr|A0A370Q6F4|A0A370Q6F4_9GAMM GTP cyclohydrolase FolE2 OS=Idiomarina abyssalis OX=86102 GN=folE2 PE=3 SV=1
MPTVMPDVANQTQAQTEGALDWVGMSNIEVPLMVAAAGVPERPVAAKVEAFVNLKNPKTKGIHMSRLYLLLDKMSTEGELSHDTLKQLLNDFIESHKDISDQAFIKFDFDYHLRRKSLISKKQGWKAYPVSLTGRYDAGQLKLELSVDVPYSSTCPCSAALARQLIQDAFSEKFAGQEQVDASIMHEWLGSTEGIVATPHSQRSVAEVKVALSDSVNDFPIVELIDAIEGALKTPVQAAVKREDEQEFARLNGQNLMFCEDASRRLQHQLNQMSNFRDFWLRVNHYESLHAHDAVSVTTKGVPGGYSA

SEQ ID NO: 9180 - protein, 308 aa, unidentified
  source 1..308: note = Idiomarina aquatica
  REGION 1..308: note = tr|A0A4R6PNG2|A0A4R6PNG2_9GAMM GTP cyclohydrolase FolE2 OS=Idiomarina aquatica OX=1327752 GN=folE2 PE=3 SV=1
MPNSMPDVANHSQAQTEGTLDWVGMSNIEVPLMVAASDAAERPVAAHVEAFVNLKDPKTKGIHMSRLYLLLDQLSTEGELSHASLKQLLRDFIDSHSDISDQAFIKFDFEYHLRRESLISRKKGWKAYPVSLTGRYDAGRLSLELSVDVPYSSTCPCSAALARQLIQEAFVDKFADKEVIDKATMHEWLGSTEGIVATPHSQRSTAEVKVKLAEDLEEFPIVALIDAVEGALKTPVQAAVKREDEQEFARLNGQNLMFCEDASRRLKHQLNQMAIFKDFWLRVNHYESLHAHDAVAIATKGVDSGYRA

SEQ ID NO: 9181 - protein, 304 aa, unidentified
  source 1..304: note = Idiomarina aquimaris
  REGION 1..304: note = tr|A0A432XNT0|A0A432XNT0_9GAMM GTP cyclohydrolase FolE2 OS=Idiomarina aquimaris OX=641841 GN=folE2 PE=3 SV=1
MPDIANQTKAQTEGALDWVGMSNIEMPLVVGAANEPERPVSALVDAFVNLKDPKAKGIHMSRLYLLLEDLSNNNVLSHQSLSKLLHDFIDSHEGLADQAYVKFSFDYHLRRKALISKKPGWKAYPVTVIGRYDHGKLYLQLGVDVPYSSTCPCSAALARQLIQDAFADQFGTDADVDAEMVHRWLGTTQGIVATPHSQRSIAEVKVVMGEEISELPIIALVDAIEEALQTPVQAAVKREDEQEFARLNGQNLMFCEDAARRLQHALNQHKEFSDFWVRVNHYESLHAHDAVSITTKGVPGGFKS

SEQ ID NO: 9182 - protein, 304 aa, unidentified
  source 1..304: note = Idiomarina atlantica
  REGION 1..304: note = tr|A0A094IPP5|A0A094IPP5_9GAMM GTP cyclohydrolase FolE2 OS=Idiomarina atlantica OX=1517416 GN=folE2 PE=3 SV=1
MPDIANQTKAQTEGALDWVGMSNIEMPLVVGAANEPERPVSAKVDAFVNLKDPKAKGIHMSRLYLLLEELSNNDVLSHQSLRKLLHDFIDSHEGLADQAYVKFTFDYHLRRKALISKKPGWKAYPVTVVGRYDAGKLHLELGVEVPYSSTCPCSAALARQLIQDAFAEQFGTDADVDAELVHRWLGTTKGIVATPHSQRSIAEVKVIMGEQVSELPIIHLIDSIEDALQTPVQAAVKREDEQEFARLNGQNLMFCEDAARRLQHALNQNAVFSDFWIRVNHYESLHAHDAVSITTKGVTGGFKA

SEQ ID NO: 9183 - protein, 308 aa, Idiomarina baltica
  REGION 1..308: note = tr|A0A348WQ73|A0A348WQ73_9GAMM GTP cyclohydrolase FolE2 OS=Idiomarina baltica OX=190892 GN=folE2 PE=3 SV=1
MPNSMPDVANQTQAQTEGTLDWVGMSNIEVPMMVAASDASERPVAAHVEAFVNLKDPKAKGIHMSRLYLLLDQLSTEGELSHASLKQLLRDFIESHQDISDRAFIKFDFDYHLRRESLISRKKGWKAYPVSLTGRYDEGHLNLELAVDVPYSSTCPCSAALARQLIQEAFDAKFAEQEHIDKATIHQWLGTTEGIVATPHSQRSTAQVKVALSDSVEEFPIVALIDAIEDALKTPVQAAVKREDEQEFARLNGQNLMFCEDASRRLQHRLNQMPIFEDFWVRVNHYESLHAHDAVSVTTKGVKGGYSS

SEQ ID NO: 9184 - protein, 304 aa, Idiomarina donghaiensis
  REGION 1..304: note = tr|A0A432XMS0|A0A432XMS0_9GAMM GTP cyclohydrolase FolE2 OS=Idiomarina donghaiensis OX=519452 GN=folE2 PE=3; SV = 1
MPDIANQTRAQTEGKLDWVGMSNIEMPLVVLAAQEPERPVGAHVDAFVNLTDPKAKGIHMSRLYLLLEDLSNNDVLSHQSLGKLLHDFIDSHDGLADQAYVKFSFDYHLRRKSLISKKQGWKAYPVTVTGRYDNGHLTLELGVEVPYSSTCPCSAALARQLIQDAFADQFGTDAEVDAELVHRWLGTTQGIVATPHSQRSVAQVKVIMGDDISELPIIALIDAIEDALKTPVQAAVKREDEQEFARLNGQNLMFCEDAARRLQHALNQQSHFSDFWVRVNHYESLHAHDAVSITTKGVPGGYKA

SEQ ID NO: 9185 - protein, 308 aa, Idiomarina fontislapidosi
  REGION 1..308: note = tr|A0A432Y280|A0A432Y280_9GAMM GTP cyclohydrolase FolE2 OS=Idiomarina fontislapidosi OX=263723 GN=folE2 PE=3; SV = 1
MPNSMPDVANQTQAQTEGTLDWVGMSNIEVPIMVAASDASERPVAAHVEAFVNLKDPKAKGIHMSRLYLLLDQLSTEGELSHASLKKLLHDFIESHQDISDRAFIKFDFDYHLRRESLISRKKGWKAYPVSLTGRYDEGHLNLELAVDVPYSSTCPCSAALARQLIQEAFDEKFAGQESVDKATIHQWLGSTEGIVATPHSQRSTAQVKVALSDTVEEFPIVALVDAIENALKTPVQAAVKREDEQEFARLNGQNLMFCEDASRRLQHALNQMPIFEDFWVRVNHYESLHAHDAVSVTTKGVKGGYSS

SEQ ID NO: 9186 - protein, 304 aa, unidentified
  source 1..304: note = Idiomarina halophila
  REGION 1..304: note = tr|A0A432XWW6|A0A432XWW6_9GAMM GTP cyclohydrolase FolE2 OS=Idiomarina halophila OX=1449799 GN=folE2 PE=3 SV=1
MPDIANQTKAQTEGALDWVGMSNIEMPLVVGAANEPERPVSARVDAFVNLKDPKAKGIHMSRLYLLLEDLSNNNVLSHQSLSKLLHDFIDSHEGLSDQAYVKFSFDYHLRRKALISKKPGWKSYPVTVIGRYDHGKLYLQLAVDVPYSSTCPCSAALARQLIQEAFANQFGTDADVDAELVHRWLGTTQGIVATPHSQRSIAEVKVVMGEQISELPIIALIDSIEDALQTPVQAAVKREDEQEFARLNGQNLMFCEDAARRLQHALNQQPVFSDFWVRVNHYESLHAHDAVSITTKGVSGGFQA

SEQ ID NO: 9187 - protein, 304 aa, Idiomarina homiensis
  REGION 1..304: note = tr|A0A432Y7I4|A0A432Y7I4_9GAMM GTP cyclohydrolase FolE2 OS=Idiomarina homiensis OX=364198 GN=folE2 PE=3 SV=1
MPDIANQTKAQTEGALDWVGMSNIEMPLVVGAANEPERPVSALVDAFVNLKDPKAKGIHMSRLYLLLEDLSNNDVLSHQSLSKLLHDFIDSHEGLADQAYVKFSFDYHLRRKALISKKPGWKAYPVTVIGRYDHGKLYLQLGVDVPYSSTCPCSAALARQLIQDAFADQFGTDADVDAEMVHRWLGTTQGIVATPHSQRSIAEVKVVMGEQVSELPIIALVDAIEDALQTPVQAAVKREDEQEFARLNGQNLMFCEDAARRLQHALNQHHEFSDFWVRVNHYESLHAHDAVSITTKGVPGGFKS

SEQ ID NO: 9188 - protein, 312 aa, unidentified
  source 1..312: note = Idiomarina indica
  REGION 1..312: note = tr|A0A1G6BDU2|A0A1G6BDU2_9GAMM GTP cyclohydrolase FolE2 OS=Idiomarina indica OX=1159017 GN=folE2 PE=3 SV=1
MSTATPTMMPDIANQTRAQTEGTLDWVGMSNIEMPLVVGAAQELERPVSAHVDAFVNLTDPKAKGIHMSRLYLLLEELSNNDVLNHQSLKKLLHDFIDSHEGLSDQAYVRFSFDYHLRRKSLISKKQGWKAYPVTVTGRYDNGQLVLELGVDVPYSSTCPCSAALARQLIQDAFAEKFGTDTDIDAEMVHRWLGTTQGIVATPHSQRSVAQVKVIMSNDMTELPISLLIDAIEDSLKTPVQAAVKREDEQEFARLNGQNLMFCEDAARRLQHTLNQLPQYTDFWIRVNHYESLHAHDAVSITTKGVTGGYKA

SEQ ID NO: 9189 - protein, 304 aa, Idiomarina insulisalsae
  REGION 1..304: note = tr|A0A432YNY0|A0A432YNY0_9GAMM GTP cyclohydrolase FolE2 OS=Idiomarina insulisalsae OX=575789 GN=folE2 PE=3; SV = 1
MPDIANQTKAQTEGALDWVGMSNIEMPLVVGAANEPERPVSALVDAFVNLKDPKAKGIHMSRLYLLLEDLSNNNVLSHQSLSKLLHDFIDSHEGLSDQAYVKFSFDYHLRRKALISKKPGWKAYPVTVIGRYDHGKLYLQLGVEVPYSSTCPCSAALARQLIQDAFAEQFGTDAEVDAEMVHRWLGTTQGIVATPHSQRSIAEVKVVMGEEISELPIIALVDAIENALQTPVQAAVKREDEQEFARLNGQNLMFCEDAARRLQHALNQHSEFSDFWVRVNHYESLHAHDAVSITTKGVPGGFQS

SEQ ID NO: 9190 - protein, 308 aa, Idiomarina loihiensis; identical to SEQ ID NO: 9179
  REGION 1..308: note = sp|Q5R041|GCH4_IDILO GTP cyclohydrolase FolE2; OS = Idiomarina loihiensis (strain ATCC BAA-735 / DSM 15497 / L2-TR) OX=283942 GN=folE2 PE=3 SV=1

SEQ ID NO: 9191 - protein, 304 aa, Idiomarina marina
  REGION 1..304: note = tr|A0A432YGT0|A0A432YGT0_9GAMM GTP cyclohydrolase FolE2 OS=Idiomarina marina OX=502366 GN=folE2 PE=3 SV=1
MPDIANQTRAQTEGKLDWVGMSNIEMPLVVGAAQEPERPVSAHVDAFVNLTDPKAKGIHMSRLYLLLEDLSNNDVLSHQSLGKLLHDFIDSHDGLADQAYVKFSFDYHLRRKSLISKKQGWKAYPVTVTGRYDNGKLNLELGVEVPYSSTCPCSAALARQLIQDAFANQFGTDSEVDAELVHRWLGTTQGIVATPHSQRSVAQVKVIMGDNVSELPIIALIDAIEDALKTPVQAAVKREDEQEFARLNGQNLMFCEDAARRLQHALNLQTQFSDFWVRVNHYESLHAHDAVSITTKGVPGGYKA

SEQ ID NO: 9192 - protein, 312 aa, Idiomarina maritima
  REGION 1..312: note = tr|A0A317Q2I3|A0A317Q2I3_9GAMM GTP cyclohydrolase FolE2 OS=Idiomarina maritima OX=519453 GN=folE2 PE=3 SV=1
MPTATPTMMPDIANQTRAQTEGKLDWVGMSNIEMPLVVGAANEPERPVSARVDAFVNLTDPKAKGIHMSRLYLLLEDLSNNDVLSHQSLRTLLHDFIDSHEGLADQAYVKFSFDYHLRRKSLISKKQGWKAYPVTVVGRYDNGNLQLELSVEVPYSSTCPCSAALARQLIQEAFAEQFGTEQEVDAELVHRWLGTTQGIVATPHSQRSIAQVKVALAEQANELPIIMLIDAIEDALKTPVQAAVKREDEQEFARLNGQNLMFCEDAARRLQHELHQHAGFADFWIRVNHYESLHAHDAVSITTKGIPGGFKA

SEQ ID NO: 9193 - protein, 312 aa, Idiomarina maritima
  REGION 1..312: note = tr|A0A1I6GUJ1|A0A1I6GUJ1_9GAMM GTP cyclohydrolase FolE2 OS=Idiomarina maritima OX=519453 GN=folE2 PE=3 SV=1
MPTATPTMMPDIANQTRAQTEGKLDWVGMSNIEMPLVVGAAQEPERPVSAHVDAFVNLTDPKAKGIHMSRLYLLLEDLSNNDVLSHHSLGKLLHDFIDSHDGLADQAYVKFSFDYHLRRKSLISKKQGWKAYPVTVTGRYDSGKLNLELGVEVPYSSTCPCSAALARQLIQDAFANQFGTDAEVDAELVHRWLGTTQGIVATPHSQRSIAQVKVIMGDNVSELPIIALIDAIEDALKTPVQAAVKREDEQEFARLNGQNLMFCEDAARRLQHALNLQAQFSDFWVRVNHYESLHAHDAVSITTKGVPGGYKA

SEQ ID NO: 9194 - protein, 308 aa, unidentified
  source 1..308: note = Idiomarina piscisalsi
  REGION 1..308: note = tr|A0A432YU20|A0A432YU20_9GAMM GTP cyclohydrolase FolE2 OS=Idiomarina piscisalsi OX=1096243 GN=folE2 PE=3; SV = 1
MPTVMPDVANQTQAQTEGTLDWVGMSNIEVPLMVAAAGASERPVSAHVEAFVNLKDPKTKGIHMSRLYLLLDELSTNGELSHESLKQLLNDFIESHKDISNQAFIKFDFDYHLRRKSLISKKQGWKAYPVSLTGRYDAGTLNLELSVDVPYSSTCPCSAALARQLIQDAFSEKFAGQDTVDAATMHEWLGSTEGIVATPHSQRSVAEVKVQLSENVTDFPIVELIDAVEGALKTPVQAAVKREDEQEFARLNGQNLMFCEDASRRLQHTLNQMPNFRDFWLRVNHYESLHAHDAVSVTTKGVPGGYKA

SEQ ID NO: 9195 - protein, 312 aa, unidentified
  source 1..312: note = Idiomarina planktonica
  REGION 1..312: note = tr|A0A1Y6EFH9|A0A1Y6EFH9_9GAMM GTP cyclohydrolase FolE2 OS=Idiomarina planktonica OX=1323738 GN=folE2 PE=3; SV = 1
MSTMTPTIMPDIANQTSAQTEGALDWVGMSNIEIPLMVAAIGEPDRQVSAKVEAFVNLADPKAKGIHMSRLYLLLDELSNNGTLSHASLKQLLNDFIGSHEGLADKAFVRFDFDYHLRRKSLISKKQGWKAYPVTVVGVYDDGNLDLELGVEVPYSSTCPCSAALARQLIQDAFAAKFAGNDAVDAATVKEWLGTTEGIVATPHSQRSIAEVKVTMGKDVDELPIIHLIDSIEDALQTPVQAAVKREDEQEFARLNAQNLMFVEDSARRLQAALNRMPMFTDFWVRVNHLESLHAHDAVSVATKGVQGGFKY

SEQ ID NO: 9196 - protein, 308 aa, Idiomarina ramblicola
  REGION 1..308: note = tr|A0A432Z1R4|A0A432Z1R4_9GAMM GTP cyclohydrolase FolE2 OS=Idiomarina ramblicola OX=263724 GN=folE2 PE=3 SV=1
MPTVMPDVANQTQAQTEGALDWVGMSNIEVPLMVAAAGASERPVAAKVEAFVNLKNPKTKGIHMSRLYLLLDKMSTEGELSHGSMKELLNNFIESHKDISDQAFIKFDFDYHLRRKSLVSKKQGWKAYPVSLTGRYDAGQLKLELSVDVPYSSTCPCSAALARQLIQDAFSEKFAGQEKVDSNILHEWLGSTEGIVATPHSQRSVAEVKVALSESVNDFPIVELIDAVEDALKTPVQAAVKREDEQEFARLNGQNLMFCEDASRRLQHQLNQMPHFRDFWLRVNHYESLHAHDAVSVTTKGVPGGYSA

SEQ ID NO: 9197 - protein, 304 aa, Idiomarina salinarum
  REGION 1..304: note = tr|A0A094IUD8|A0A094IUD8_9GAMM GTP cyclohydrolase FolE2 OS=Idiomarina salinarum OX=435908 GN=folE2 PE=3 SV=1
MPDIANQTLAQTEGALDWVGMSNIEMPLVVGAANEPERPVSARIDAFVNLTDPKAKGIHMSRLYLLLEDLSNNDVLNHDSLRKLLHDFIDSHDGLADQAYVKFSFDYHLRRKALVSKKPGWKAYPITLVGRYDNGKLALQLGVDVPYSSTCPCSAALARQLIQDAFAGQFGTDAEVDAETVHRWLGTTQGIIATPHSQRSVAEVKVLLSDDLNELPIIHLVDAIEEALQTPVQAAVKREDEQEFARLNGQNLMFCEDAARRLKFMLSHQSQFFDFWIRVNHYESLHAHDAVSIATKGVPGGFQP

SEQ ID NO: 9198 - protein, 304 aa, Idiomarina sediminum
  REGION 1..304: note = tr|A0A432ZB16|A0A432ZB16_9GAMM GTP cyclohydrolase FolE2 OS=Idiomarina sediminum OX=431675 GN=folE2 PE=3 SV=1
MPDIANQTQAQTEGALDWVGMSNIEMPLVVGAANEPERPVSALVDAFVNLKDPKAKGIHMSRLYLLLEDLSNNDVLSHQSLGKLLHDFIDSHDGLADQAYVKFSFDYHLRRKALISKKPGWKAYPVTVVGRYDDGQLYLQLGVEVPYSSTCPCSAALARQLIQDAFADQFGTDADVDAELVHRWLGTTQGIVATPHSQRSVAEVKVVMGEQISELPIIALIDAIEHALQTPVQAAVKREDEQEFARLNGQNLMFCEDAARRLQHALNQQSAFSDFWIRVNHYESLHAHDAVSITTKGIPNGFKA

SEQ ID NO: 9199 - protein, 308 aa, Idiomarina seosinensis
  REGION 1..308: note = tr|A0A432ZD23|A0A432ZD23_9GAMM GTP cyclohydrolase FolE2 OS=Idiomarina seosinensis OX=281739 GN=folE2 PE=3; SV = 1
MPNSMPDVANQSQAQTEGTLDWVGMSNIEVPLMVAASDAAERPVAAHVEAFVNLKDPKTKGIHMSRLYLLLDKLSTDGELSHASLKQLLLDFIESHNDISDQAFIKFDFDYHLRRESLISRKKGWKAYPVTLTGRYDAGKLSLELAVDVPYSSTCPCSAALARQLIQEAFVDKFSDQEVVDKATIHEWLGSTEGIVATPHSQRSTAQVKVKLSEELEEFPIVALVDAVEAALKTPVQAAVKREDEQEFARLNGQNLMFCEDASRRLKHQLNQMPIFKDFWLRVNHYESLHAHDAVAIATKGIESGYRS

SEQ ID NO: 9200 - protein, 308 aa, Idiomarina sp.
  REGION 1..308: note = tr|A0A2D9G4J6|A0A2D9G4J6_9GAMM GTP cyclohydrolase FolE2 OS=Idiomarina sp. OX=1874361 GN=folE2 PE=3 SV=1
MPTVMPDVANQTQAQTEGALDWVGMSNIEVPLMVAAAGVPERPVAAKVEAFVNLKNPKTKGIHMSRLYLLLDKLSTEGELSHDTLKQLLNDFIESHKDISDQAFIKFDFDYHLRRKSLISKKQGWKAYPVTLTGRYDAGKLKLELSVDVPYSSTCPCSAALARQLIQDAFSAQFAGQEQVDAATMHEWLGSTEGIVATPHSQRSIAEVKVALSESVTDFPIVELIDAVEDALKTPVQAAVKREDEQEFARLNGQNLMFCEDASRRLQHQLNQMSHFRDFWLRVNHYESLHAHDAVSVTTKGIPGGYSA

SEQ ID NO: 9201 - protein, 308 aa, Idiomarina sp.
  REGION 1..308: note = tr|A0A1S2SYD5|A0A1S2SYD5_9GAMM GTP cyclohydrolase FolE2 OS=Idiomarina sp. MD25a OX=1889913 GN=folE2 PE=3 SV=1
MPNSMPDVANQTQAQTEGTLDWVGMSNIEVPIMVAASDASERPVAAHVEAFVNLKDPKAKGIHMSRLYLLLDQLSTEGELSHASLKQLLRDFIESHQDISDRAFIKFDFDYHLRRESLISRKKGWKAYPVSLTGRYDEGHLNLELAVDVPYSSTCPCSAALARQLIQEAFDEKFAGQDSVDKATIHQWLGSTEGIVATPHSQRSTAQVKVALSDSVEEFPIVALVDAIEDALKTPVQAAVKREDEQEFARLNGQNLMFCEDASRRLQHKLNQMPIFEDFWVRVNHYESLHAHDAVSVTTKGIKGGYSS

SEQ ID NO: 9202 - protein, 312 aa, Idiomarina tainanensis; identical to SEQ ID NO: 9192
  REGION 1..312: note = tr|A0A368UL49|A0A368UL49_9GAMM GTP cyclohydrolase FolE2 OS=Idiomarina tainanensis OX=502365 GN=folE2 PE=3; SV = 1

SEQ ID NO: 9203 - protein, 304 aa, Idiomarina taiwanensis
  REGION 1..304: note = tr|A0A432ZLC7|A0A432ZLC7_9GAMM GTP cyclohydrolase FolE2 OS=Idiomarina taiwanensis OX=337250 GN=folE2 PE=3; SV = 1
MPDIANQTKAQTEGTLDWVGMSNIEMPVVVGAANEPERPVSARVEAFVNLTDPKAKGIHMSRLYLLLEDLSNNNALNYSTLKTLLNDFISSHDGLANQAFVQFAFDYHLRRKSLISKKQGWKAYPVVITGRYNQGNLDLQLAVEVPYSSTCPCSAALARQLIQDAFAEQFGTDEEVDAELVHRWLGTTQGIVATPHSQRSIAEVKVKLSEQTTEFPVVELIDAIEDALQTPVQAAVKREDEQEFARLNGQNLMFCEDAARKLQHALNQESQYADFWIRVNHYESLHAHDAVSITTKGITGGFSA

SEQ ID NO: 9204 - protein, 308 aa, unidentified
  source 1..308: note = Idiomarina tyrosinivorans
  REGION 1..308: note = tr|A0A432ZRA1|A0A432ZRA1_9GAMM GTP cyclohydrolase FolE2 OS=Idiomarina tyrosinivorans OX=1445662 GN=folE2; PE = 3 SV=1
MPTTMPDVANQAKAQTEGTLDWVGMSNIEVPLLIAASGAPERPVGAHVEAFVNLKDPKTKGIHMSRLYLLLDQMSNEGELSHDSLKQLLLDFIASHEDISDQAYVKFEFDYHLRRKSLISKKQGWKAYPVTLVGRYDHGHLSLELKVDVPYSSTCPCSAALARQLIQEAFAKRFEGEQAVDAEQIYEWLGTTEGIVATPHSQRSVAEVKVALSDDLSEFPIIELIDAIEDALQTPVQAAVKREDEQEFARLNGQNLMFCEDAGRRLQHTLNSKPVFTDFWVRVNHYESLHAHDAVSITTKGVVGGFTS

SEQ ID NO: 9205 - protein, 312 aa, unidentified
  source 1..312: note = Idiomarina woesei
  REGION 1..312: note = tr|A0A0K6H7G3|A0A0K6H7G3_9GAMM GTP cyclohydrolase FolE2 OS=Idiomarina woesei OX=1381080 GN=folE2 PE=3 SV=1
MPTATPTLMPDIANQTRAQTEGKLDWVGMSNIEMPLVVLAAQEPERPVGAHVDAFVNLTDPKAKGIHMSRLYLLLEDLSNNDVLSHQSLGKLLHDFIDSHDGLADQAYVKFSFDYHLRRKSLISKKQGWKAYPVTVTGRYDNGHLTLELGVEVPYSSTCPCSAALARQLIQDAFADQFGTDAEVDAELVHRWLGTTQGIVATPHSQRSVAQVKVIMGNDISELPIIALIDAIEDALKTPVQAAVKREDEQEFARLNGQNLMFCEDAARRLQHALNQQSHFSDFWVRVNHYESLHAHDAVSITTKGVPGGYKA

SEQ ID NO: 9206 - protein, 304 aa, Idiomarina xiamenensis
  REGION 1..304: note = tr|K2KBT7|K2KBT7_9GAMM GTP cyclohydrolase FolE2; OS = Idiomarina xiamenensis 10-D-4 OX=740709 GN=folE2 PE=3; SV = 1
MPDVANTSQAQTEGTLDWVGMSNIEVPLVVAASEVPEQTVSAKVETFVNLPDPKAKGIHMSRLYLLLDQLSTEGELSHASLKQLLNDFITSHQGLSDQAFVKFSFDYLLRRKSLISKKQGWKAYPVTLTGRYNNGQLSLELGVNVPYSSTCPCSAALARQLIQEAFSERFANQAQIDASTVHEWLGSTDGIVATPHSQRSVAELKVALSEELTEFPIVALIDLVENALKTPVQAAVKREDEQEFARLNGQNLMFCEDASRRLKYALSQQPQFTDFWVRVNHYESLHAHDAVSIATKGVEGGFKA

SEQ ID NO: 9207 - protein, 308 aa, Idiomarina zobellii
  REGION 1..308: note = tr|A0A1G7T2A4|A0A1G7T2A4_9GAMM GTP cyclohydrolase FolE2 OS=Idiomarina zobellii OX=86103 GN=folE2 PE=3 SV=1
MPTVMPDVANQTQAQTEGTLDWVGMSNIEVPLMVAAAGASERPVSAHVEAFVNLKDPKTKGIHMSRLYLLLDELSTNGELSHESLKQLLNDFIESHKDISNQAFIKFDFDYHLRRKSLISKKQGWKAYPVSLTGRYDAGSLNLELSVDVPYSSTCPCSAALARQLIQDAFSEKFAGQDTVDAATMHEWLGSTEGIVATPHSQRSVAEVKVQLSENVTDFPIVELIDAVEGALKTPVQAAVKREDEQEFARLNGQNLMFCEDASRRLQHTLNQMPNFRDFWLRVNHYESLHAHDAVSVTTKGVPGGYKA

SEQ ID NO: 9208 - protein, 308 aa, unidentified
  source 1..308: note = Idiomarinaceae bacterium
  REGION 1..308: note = tr|A0A2D5Q0U2|A0A2D5Q0U2_9GAMM GTP cyclohydrolase FolE2 OS=Idiomarinaceae bacterium OX=1898113 GN=folE2 PE=3; SV = 1
MPNSMPDVANQTQAQTEGTLDWVGMSNIEVPIMVAASDASERPVAAHVEAFVNLKDPKAKGIHMSRLYLLLDQLSTEGELSHASLKQLLRDFIESHQDISDRAFIKFDFDYHLRRESLISRKKGWKAYPVSLTGRYDEGHLNLELAVDVPYSSTCPCSAALARQLIQEAFDEKFAGQDSVDKATIHQWLGSTEGIVATPHSQRSTAQVKVALSDSVEEFPIVALVDAIEDALKTPVQAAVKREDEQEFARLNGQNLMFCEDASRRLQHKLNQMPIFEDFWVRVNHYESLHAHDAVSVTTKGVKGGYSS

SEQ ID NO: 9209 - protein, 320 aa, unidentified
  source 1..320: note = Idiomarinaceae bacterium
  REGION 1..320: note = tr|A0A0P8B3H7|A0A0P8B3H7_9GAMM GTP cyclohydrolase FolE2 OS=Idiomarinaceae bacterium HL-53 OX=1298881 GN=folE; PE = 3 SV=1
MYKEPDNYSGVAQRMNSSMPDIASHTKTAHVGTLDWVGMSEIEMPLVFVEGGQKHTVGARIDAFVSLDEAEAKGIHMSRLYLALEALSTEGELTPASLRELLAGFIQTHADLSKRAMVAIRFDYHLRRKALLSGKQGWKAYPIEIKAELNEGQFVCDVSLDVTYSSTCPCSAALARQLIQEAFRAKFEGNQLDSEEVAEWLGTTEGIVATPHSQRSVAEAKIRLADSVVDFPVQELIDQLENELKTPVQAAVKREDEQEFARLNGQNNMFCEDAGRILKKALNNREDVTDFRVRINHYESLHAHDAVSIVTKGIPNGFQP

SEQ ID NO: 9210 - protein, 271 aa, unidentified
  source 1..271: note = Ignatzschineria cameli
  REGION 1..271: note = tr|A0A2U2ASN8|A0A2U2ASN8_9GAMM GTP cyclohydrolase FolE2 OS=Ignatzschineria cameli OX=2182793 GN=folE2 PE=3; SV = 1
MTNGDVTAIKDVQAYEDERNVEISQVGISGLRLPIEFSNGGQSQHSVMEAAFTVTLQQERKGTHMSRFIEVWDSLEKPFSLTSVTTLLNRLEEKLDAEKAQVELKFPLFFTRTAPVSKAESLMDFNCEIVAASNQSDPAKSHYELRLMAPVTSLCPCSKEISEFSAHSQRSHLTIALQFRDRQGFEAVDIDQLLMEMESVGSSRLYPLLKRPDEKYVTEMAYKTPRFVEDLVRDLVVLLRERQDLTAFSVQSENFESIHNHQAYAKVNYTF

SEQ ID NO: 9211 - protein, 271 aa, Ignatzschineria indica
  REGION 1..271: note = tr|A0A2U2ANK4|A0A2U2ANK4_9GAMM GTP cyclohydrolase FolE2 OS=Ignatzschineria indica OX=472583 GN=folE2 PE=3; SV = 1
MTNGDVTAIKDVQAYEDGRNVEISQVGISGLRLPIEFSNGGQSQHSVMEAAFTVTLQKERKGTHMSRFIEVWDRLEKPFSLERVTTLLNSLEEKLDAEKAQIELKFPLFFTRTAPVSQAKSLMDFNCEIVAESNHSDPGESHYELRLMAPVTSLCPCSKEISEFSAHSQRSHLTIALQFRDRAGFEAIDIDQLLMEMESVGSSRLYPLLKRPDEKYVTEMAYKTPRFVEDLVRDLVVLLRERQDLIAFSVQSENFESIHNHQAYAKVNYTF

SEQ ID NO: 9212 - protein, 271 aa, Ignatzschineria sp.
  REGION 1..271: note = tr|A0A256CU12|A0A256CU12_9GAMM GTP cyclohydrolase FolE2 OS=Ignatzschineria sp. F8392 OX=1980117 GN=folE2; PE = 3 SV=1
MTNGDVTAIKDVQAYEDERNVEISQVGISGLRLPIEFSNGGQSQHSVMEAAFTVTLQKERKGTHMSRFIEVWDRLEKPFSLERVTTLLNSLEEKLDAEKAQIELKFPLFFTRTAPVSQAKSLMDFNCEIVAESNHSDPGKSHYELRLMAPVTSLCPCSKEISEFSAHSQRSHLTIALQFRDRAGFEAIDIDQLLMEMESVGSSRLYPLLKRPDEKYVTEMAYKTPRFVEDLVRDLVVLLRERQDLIAFSVQSENFESIHNHQAYAKVNYTF

SEQ ID NO: 9213 - protein, 272 aa, Ignatzschineria ureiclastica
  REGION 1..272: note = tr|A0A2U2AGM4|A0A2U2AGM4_9GAMM GTP cyclohydrolase FolE2 OS=Ignatzschineria ureiclastica OX=472582 GN=folE2; PE = 3 SV=1
MIVSNGALTTIKDVQAYEDERNVEISQVGISGLRLPLEFANGGKSQHTVMEAAFTVTLQKERKGTHMSRFIEVWDMQPKPFSLEGVGILLQDLKTKLDAPQAQASLQFPLFFEREAPVSKAKSLMDFECGIDVELCEDEADSSYTLHLMAPVTSLCPCSKEISEFSAHSQRSHLTITLEFKDFTSFAALEIDQLLKTMESVGSSKLYPLLKRPDEKYVTEHAYKNPQFVEDLVRDLVVLLRERTDLLAFSVQSENFESIHNHQAYAKVNYIF

SEQ ID NO: 9214 - protein, 196 aa, unidentified
  source 1..196: note = Ignavibacteria bacterium
  REGION 1..196: note = tr|A0A2M7MQN0|A0A2M7MQN0_9BACT GTP cyclohydrolase 1; OS = Ignavibacteria bacterium CG_4_10_14_3_um_filter_37_18; OX = 1974037 GN=folE PE=3 SV=1
MSNTEESEMDVNKIKNLIEALIIEIGEDPNREGLLRTPNRVAKSYEFLTSGYSKNIDTVLNGAIFNEKYDEMVLVKNIDFYSLCEHHMLPFYGKVHVAYVPNGKIVGLSKIPRIVDVFARRLQVQERMTQQIADTIDKYLAPKGVAVVSEAYHMCMMMRGVEKQNSSATSSAMHGLFKEDARTRTEFLDLIRMNKI

SEQ ID NO: 9215 - protein, 187 aa, unidentified
  source 1..187: note = Ignavibacteria bacterium
  REGION 1..187: note = tr|A0A1G0VF42|A0A1G0VF42_9BACT GTP cyclohydrolase 1; OS = Ignavibacteria bacterium RIFOXYB2_FULL_37_11 OX=1798448; GN = folE PE=3 SV=1
MDYSKFEDSVKTILSEVGEDMSREGLLKTPSRVAKSFEFLTDGYRKNIDEILNDAIFDEKYDEMVIVKDIDFYSMCEHHLLPFYGKIHIAYIPNGKIVGLSKIPRIVEMYARRLQVQERMTQEVADTLEKYLQPRGVAIVAEGYHMCMMMRGVEKQNSITTTSAMHGIFKEDARTRAEFLNLIAKRI

SEQ ID NO: 9216 - protein, 191 aa, unidentified
  source 1..191: note = Ignavibacteriae bacterium
  REGION 1..191: note = tr|A0A3N5L485|A0A3N5L485_9BACT GTP cyclohydrolase 1; OS = Ignavibacteriae bacterium OX=2026749 GN=folE PE=3 SV=1
MDGASTSKMEHIVKDLLIEMGEDPTREGLLRTPLRVAKAYKFLTKGYEQDVNTVLNGAIFNECYNEIVLVKDIDFFSLCEHHLLPFYGKCHIAYIPNNKIVGLSKIPRIVEIFSRRLQVQERMTKQIGDVLYKALQPKGVAVVIEARHLCMMMRGVEKQNSIATTSNMLGVFKSDAKTRAEFLKLINAKLS

SEQ ID NO: 9217 - protein, 188 aa, unidentified
  source 1..188: note = Ignavibacteriae bacterium
  REGION 1..188: note = tr|A0A2N1VYY4|A0A2N1VYY4_9BACT GTP cyclohydrolase 1; OS = Ignavibacteriae bacterium HGW-Ignavibacteriae-2; OX = 2013809 GN=folE PE=3 SV=1
MDLNLVASNVKTILEQIGEDPEREGLQKTPERVAKAYQFLTQGYQKNIDEILNGAIFKEEYDEMVIVKDIDFYSMCEHHLLPFYGKVHVAYIPNGKIVGLSKIPRIVDAFARRLQIQERMTRQIADVIDEYLSPIGVGVVVEGYHMCMMMRGVEKQNSITTTSAMLGVFNNEASTRSEFLNLTSYKRI

SEQ ID NO: 9218 - protein, 225 aa, unidentified
  source 1..225: note = Ignavibacteriales bacterium
  REGION 1..225: note = tr|A0A2M7ZB33|A0A2M7ZB33_9BACT GTP cyclohydrolase 1; OS = Ignavibacteriales bacterium CG_4_9_14_3_um_filter_34_10; OX = 1974044 GN=folE PE=3 SV=1
MSYKENYDFDSLGDEHIGTSLETPLRNDAFSLDDETKIEIIEDLFQQIMITLGLDLNDDSLKGTPHRVAKMYVQEIFSGLKPDNKPVARAFTNNYKYQGMVVEKNINFSSTCEHHFVPIIGHAHVAYIPNGNVIGLSKINRIVNYYAKRPQVQERMTKQILNELKSTLNTDNVAVVIEAKHFCVHSRGIEDNTSTTTTSEFSGKFLDIETKKEFMGYVVNTLTKL

SEQ ID NO: 9219 - protein, 188 aa, unidentified
  source 1..188: note = Ignavibacteriales bacterium
  REGION 1..188: note = tr|A0A2M7ZNF1|A0A2M7ZNF1_9BACT GTP cyclohydrolase 1; OS = Ignavibacteriales bacterium CG_4_9_14_3_um_filter_30_11; OX = 1974043 GN=folE PE=3 SV=1
MNIKRLEEIVTNILNEIGEDTKREGLQKTPQRVAKSYEFLTSGYQKDIAKVLNGAIFHEKYDEMVLVKNIDFYSLCEHHMLPFYGKVHIAYIPNGKIVGLSKIPRIVDVFSRRLQVQERMTQQIADIINEYLEPQGVAVVSEAFHMCMMMRGVQKQNSSATTSAVHGIFKEDARTRTEFLDLISHKNL

SEQ ID NO: 9220 - protein, 188 aa, Ignavibacterium album
  REGION 1..188: note = tr|I0AJ92|I0AJ92_IGNAJ GTP cyclohydrolase 1; OS = Ignavibacterium album (strain DSM 19864 / JCM 16511 / NBRC 101810 / Mat9-16) OX=945713 GN=folE PE=3 SV=1
MNKEKFESLIRNILIEIGEDPNREGLLSTPKRVAEAYQFLTAGYQKDIDEVLNNAIFTEKYDEMVLVKNIDFYSMCEHHMLPFYGKVHVAYIPNGKIVGLSKIPRIVEVFARRLQVQERMTQQIADTLEKYLQPVGVAVVSEAYHMCMMMRGVEKQNSSATTSAMHGVFKEDAKTRNEFINLVGIKNL

SEQ ID NO: 9221 - protein, 227 aa, Ignavibacterium album
  REGION 1..227: note = tr|I0AHX5|I0AHX5_IGNAJ GTP cyclohydrolase 1; OS = Ignavibacterium album (strain DSM 19864 / JCM 16511 / NBRC 101810 / Mat9-16) OX=945713 GN=folE PE=3 SV=1
MKDGKPNTKSFQNDDDFNDEHYFTSIETPIRSDAFEIDDEIKIELIEKRFREIMEVLGLDLSDDSLKDTPKRVAKMYVKEIFKGLDPRNKPSVTLFENKYKFNQMLVEKDISVYSYCEHHFVPIIGKAHVAYYSAGKVVGLSKINRMVQYYSKRPQVQERLTVQIANEMKEMLQTEDVAVLIEADHLCVASRGVQDVSSSTVTSSYHGKFLNPQIRDEFLRYVYSEK

SEQ ID NO: 9222 - protein, 184 aa, Ignavigranum ruoffiae
  REGION 1..184: note = tr|A0A1H9DBI3|A0A1H9DBI3_9LACT GTP cyclohydrolase 1; OS = Ignavigranum ruoffiae OX=89093 GN=folE PE=3 SV=1
MNKEKIEKAVQMIIEAIGEDPKREGLVETPQRIAKMYQEVFSGLNQTAESHLQKSFEIVDNNLVVEKDINFHSMCEHHFLPFWGKAHIAYIPSGRVAGLSKLARTVDIYARKPQIQERLTLEITEALMTYLKAQGAMVVIEAEHMCMNMRGVQKPGTKTVTCVAKGCLETDKELKAEAFRMMGL

SEQ ID NO: 9223 - protein, 273 aa, Ilumatobacter fluminis
  REGION 1..273: note = tr|A0A4R7HUE5|A0A4R7HUE5_9ACTN GTP cyclohydrolase FolE2 OS=Ilumatobacter fluminis OX=467091 GN=folE2 PE=3; SV = 1
MNVSLEDVQGRPDERAICLQRAGVEALRYPVDVADTTGDAQSSVANFDLSVELPGHIKGTHMSRFVEAVAALSDPLSPTSIGGLAEDVRARLKAESATIRTSFPLFLDRAAPATGATAKLEYSCALTAVAASSARRTVVSVRVPVTSLCPCSKAISDYGAHNQRGQVTIAVDIGDSSSVGLIDLIGIAEACASSPVYPLVKRPDERVMTMTAYDKPVFVEDMVRDSVAMVAGKWPGLEFSVLAQNEESIHHHAAFAETWSPGFDHRLAPTHRD

SEQ ID NO: 9224 - protein, 197 aa, Ilyobacter polytropus
  REGION 1..197: note = tr|E3HCY1|E3HCY1_ILYPC GTP cyclohydrolase 1; OS = Ilyobacter polytropus (strain DSM 2926 / CuHBu1); OX = 572544 GN=folE PE=3 SV=1
MKKIDKKKIEEHVKGILEALGDDPDRPGLVDTPKRVANMYAEIFLGLAYTNDDIADMYGVTFDEEDIYTEPGSDMVLMKDIDIFSHCEHHLSLMYNMTVAVAYIPREKVIGLSKIARIADMVSRRPQLQERIGKDIAEIIQKVTQSHDVAVIVKGEHGCMTTRGIKKPGTKTITTTLRGRFKSDDALYGRLMELYRS

SEQ ID NO: 9225 - protein, 212 aa, unidentified
  source 1..212: note = Imhoffiella purpurea
  REGION 1..212: note = tr|W9V9W6|W9V9W6_9GAMM GTP cyclohydrolase 1; OS = Imhoffiella purpurea OX=1249627 GN=folE PE=3 SV=1
MSEKAKLSQMLAHSHYATSFEPEPDEEVYDPAKEDLVRRMLMEIGEDPDREGLRRTPLRVAKALDFLTSGYDLSAEEIIKGAVFAEDVKEMVVVRDIEFYSMCEHHMLPFFGHAHVGYLPNGKVVGLSKVARVVDVFARRLQVQERLTNQIADALMEHLGAHGVAVVLEASHTCMMMRGVQKQRSTTVSSAMRGTFDEDPRTRAEFMSFIKN

SEQ ID NO: 9226 - protein, 303 aa, unidentified
  source 1..303: note = Imhoffiella purpurea
  REGION 1..303: note = tr|W9V272|W9V272_9GAMM GTP cyclohydrolase FolE2; OS = Imhoffiella purpurea OX=1249627 GN=folE2 PE=3 SV=1
MNPKSSGMKAVQIRRGTRPMEQALEPNCRATGAVTDIADVQGSADTRRIAIDKVGIKDIRHPVRVRERGGSEQHTVATFNMYVYLPHDFKGTHMSRFVQVLNNHEREISVSSFKEMLVEMSDRLESEAGHIEMRFPYFISKKAPVSGVESLLDYEVTFIGEIRHGEPRLQLKVAVPVTSLCPCSKKISAYGAHNQRSHVTVQVRMQGFMWLEELIELIEREASSELFGLLKRPDEKYVTEHAYDNPKFVEDLVRDVAKRLNQDERILSYVVEAENFESIHNHSAYALIERDKQSEARMAEASL

SEQ ID NO: 9227 - protein, 271 aa, unidentified
  source 1..271: note = Immundisolibacter cernigliae
  REGION 1..271: note = tr|A0A1B1YW80|A0A1B1YW80_9GAMM GTP cyclohydrolase FolE2 OS=Immundisolibacter cernigliae OX=1810504 GN=folE2; PE = 3 SV=1
MNKPSEPAVPQIADVQGSPDTRRLDIDRVGIKGIRHPVRILARSGTEQHTVANFNMYVHLPHNFKGTHMSRFIEILNGHEQEISLGTFRQMLREMCERLEARAGHIEMSFPFFVNKAAPVTGVTSLMDYQVSYIGEIAHGQAERLTAKLVIPVTSLCPCSKKISDYGAHNQRTHVTLTAHLGTPVWIEELIELVEAQASSELYGLLKRPDEKYVTEHAYDNPKFVEDLVRDIAGALNADERLAGYVVEAENFESIHNHSAYALIEKPVRAG

SEQ ID NO: 9228 - protein, 236 aa, unidentified
  source 1..236: note = Imperialibacter sp.
  REGION 1..236: note = tr|A0A5E8AN50|A0A5E8AN50_9BACT GTP cyclohydrolase 1; OS = Imperialibacter sp. EC-SDR9 OX=2038371 GN=folE PE=3 SV=1
MKQKETLLSTQPSQALDIDDMEDDHVATSYETPLRADAFEMDDDLKMELIAKHFREIMHILGMDLTDDSLKGTPNRVAKMYVKEVFSGLNPKNKPTAKLFDNKYEYNEMLVERDITFYSYCEHHFVPIYGKAHVAYISSGKVIGLSKINRIVQYYAKRPQVQERMTVQIANELKKILKTDNVGVVVDAVHMCVSSRGVGDTNSRTGTAHFSGKFSDENTKKEFLNYINTPNNLNGK

SEQ ID NO: 9229 - protein, 209 aa, unidentified
  source 1..209: note = Imperialibacter sp.
  REGION 1..209: note = tr|A0A5E7YDV2|A0A5E7YDV2_9BACT GTP cyclohydrolase 1; OS = Imperialibacter sp. EC-SDR9 OX=2038371 GN=folE PE=3 SV=1
MERIELLEIKHLSPCLNDEKRLGDDEKVVIIARHFKSIMETLGLDVNDDSLKATPVRVAKMYVKEVFSGLNPINKPSISLFENTYGYNEMLVEKDITLYSYCEHHFVPIIGKVHVAYIPAAKVIGLSKINRLTQYYSRRPQVQERLTREISEGLREALQTQDVAVCIEAAHLCVASRGVEDTKSSTRTVMYSGRFQEAGMKLEFLSALR

SEQ ID NO: 9230 - protein, 226 aa, unidentified
  source 1..226: note = Imtechella halotolerans
  REGION 1..226: note = tr|I0WGV0|I0WGV0_9FLAO GTP cyclohydrolase 1; OS = Imtechella halotolerans K1 OX=946077 GN=folE PE=3 SV=1
MKMDNALEEEFDAFGDDHIASSAETPLRNDAFELSDEEKIDRIQADVYNIMETLGLDLTDDSLKGTPKRVAKMFVKEIFGGLHPNKKPSASTFDNKYKYGEMLVEKNITVYSTCEHHLLPIVGRAHIAYISKGKVVGLSKMNRIVDYFAKRPQVQERMTIQIVQELQKVLGTDDVACVVDAKHLCVNSRGIRDIESSTVTAEFGGQFKNPSVRREFLDYIKLDTQF

SEQ ID NO: 9231 - protein, 199 aa, unidentified
  source 1..199: note = Imtechella halotolerans
  REGION 1..199: note = tr|I0W788|I0W788_9FLAO GTP cyclohydrolase 1; OS = Imtechella halotolerans K1 OX=946077 GN=folE PE=3 SV=1
MSYKKFEEYNIKVTKEVKHGYQEIIKTLGEDIHREGLLKTPERAAKAMQFLTSGYHLDADEILKSAMFKESYNDMVIVKDIEIYSLCEHHMLPFYGKAHIAYIPDGQIVGLSKIPRIVDVFARRLQVQERLTHDILECLNRTLKPQGVAVVIEASHMCMMMRGVQKQNSVTTTSGFRGQFMKNETRNEFLKLISSDLSR

SEQ ID NO: 9232 - protein, 221 aa, Indibacter alkaliphilus
  REGION 1..221: note = tr|S2DCV6|S2DCV6_9BACT GTP cyclohydrolase 1; OS = Indibacter alkaliphilus LW1 OX=1189612 GN=folE PE=3 SV=1
MGISDSHQIDEIGDEHIGTSHDTPLREDAFEMDDDLKMEIIEKHFKEIMHVLGLDLSDDSLKGTPRRVAKMYIKEIFSGLNPKNKPDIKLFENKYKYKEMLVEKDITFYSNCEHHFVPIYGKAHVAYISNGNVIGLSKINRIVQYFAKRPQVQERLTMQIGNELREVLGSDDVAVVIDAHHMCVSTRGVQDVNSSTVTSYYSGKFETDENSRNEFMKYISL

SEQ ID NO: 9233 - protein, 269 aa, Inhella sp.
  REGION 1..269: note = tr|A0A437LCD1|A0A437LCD1_9BURK GTP cyclohydrolase FolE2 OS=Inhella sp. CCP-18 OX=2499851 GN=folE2 PE=3 SV=1
MSPSSTHSAHLPIPDTQSERDERHLAIQRVGVRRVKFPLLVQTERGVQPSVGEWTLDVALPAEQKGTHMSRFVAWLEEGAEQALDAATLRSRHLAMLEKLHASDGVTEVAFTLFERKRAPVSGIESRLDLQARWVVETRGGQTTVWQEVAVPVKSLCPCSKEISDYGAHNQRSIVTVRVEWLADKPLPFSAQMRFAEDSASSEIWPLLKRADEKWVTERAYENPKFVEDLVRDVALRLNADERVGRYHVDVENFESIHSHSAYAVIERN

SEQ ID NO: 9234 - protein, 271 aa, unidentified
  source 1..271: note = Inmirania thermothiophila
  REGION 1..271: note = tr|A0A3N1XSV3|A0A3N1XSV3_9GAMM GTP cyclohydrolase FolE2 OS=Inmirania thermothiophila OX=1750597 GN=folE2; PE = 3 SV=1
MSDSSRDAGIADVQSSHDTRRIPIDRVGIKDIRHPVRVRDRSDGEQHTVASFDMYVNLPHNFKGTHMSRFVEILNRHEREISVDSIRDMLCEMVQVLEAEAGHIEMRFPYFVNKRAPVTGVESLMDYDVTLTAELLDGQVRTWIQVVVPVTSLCPCSKEISDRGAHNQRSHVTVRVRTRGFVWIEELIELVEQEASCELFGLLKRPDEKYVTERAYDNPKFVEDMVRDVAARLNADDRIAAYVVESENFESIHNHSAYAMIDRDKEAEPPC

SEQ ID NO: 9235 - protein, 210 aa, Inquilinus limosus
  REGION 1..210: note = tr|A0A211YSJ1|A0A211YSJ1_9PROT GTP cyclohydrolase 1; OS = Inquilinus limosus OX=171674 GN=folE PE=3 SV=1
MTRNPFTPVAANVAAQSASEQRPSRSEAEEAVRVLLRWAGEDIGREGLRDTPKRVVKAYEEFFRGYDQDPVELLSRTFEEVEGYDEMVLLRDIDFESHCEHHMVPIIGKAHVAYLPDRRVVGISKLARVVDAYAKRLQIQERLTAQIAGAIDQVLKPRGVAVMVSSQHHCMTTRGVHKHGTQMVTSCMIGAFRDEPQLRREFQMMIGMPV

SEQ ID NO: 9236 - protein, 202 aa, Inquilinus limosus
  REGION 1..202: note = tr|A0A0A0D0F3|A0A0A0D0F3_9PROT GTP cyclohydrolase 1; OS = Inquilinus limosus MP06 OX=1398085 GN=folE PE=3 SV=1
MAANVTAQSASEQRPSRSEAEEAVRVLLRWAGEDIGREGLRDTPKRVVKAYEEFFRGYDQDPVELLSRTFEEVEGYDEMVLLRDIDFESHCEHHMVPIIGKAHVAYLPDRRVVGISKLARVVDAYAKRLQIQERLTAQIAGAIDQVLKPRGVAVMVSSQHHCMTTRGVHKHGTQMVTSCMIGAFRDEPQLRREFQMMIGMPV

SEQ ID NO: 9237 - protein, 212 aa, Inquilinus sp.
  REGION 1..212: note = tr|A0A554SF46|A0A554SF46_9PROT GTP cyclohydrolase 1; OS = Inquilinus sp. KBS0705 OX=2578108 GN=folE PE=3 SV=1
MNKDNNIPDRDSGINGYQKIDRYNPELIKNLSGLYHEVLKDIGENPERDGLLKTPERMAKAMLYLTHGYDLSAKDILNSAMFKEEYSQMVIVKDIEVYSMCEHHMLPFFGKAHVAYIPNGYVVGLSKIPRVVDVFSRRLQVQERLTNEIRDCIQETLNPIGVGVVIECRHLCMSMRGVQKQNSVTTTSAFTGEFLKEKTRTEFLNLISSKLS

SEQ ID NO: 9238 - protein, 226 aa, Inquilinus sp.
  REGION 1..226: note = tr|A0A554SAG6|A0A554SAG6_9PROT GTP cyclohydrolase 1; OS = Inquilinus sp. KBS0705 OX=2578108 GN=folE PE=3 SV=1
MTNNTIVDQQDEQDLLHFDHDHHSSTLNTPLREDAFVLDDDTKVDLIAKHFAGIMQVLGMDLEDDSLKDTPKRVAKMYVKEIFSGLNPANKPKPTLFKNPFRYKQMLVEKNISVFSNCEHHFVPIVGKAHVAYISNGQVIGLSKLNRIVQYCSQRPQVQERLTIQIANLMKEALGTEDVAVIVDAHHHCVSSRGIRDAGSTTITAEYSGRFLEADTRNEFLKHIAS

SEQ ID NO: 9239 - protein, 203 aa, Insolitispirillum peregrinum
  REGION 1..203: note = tr|A0A1N7JDT8|A0A1N7JDT8_9PROT GTP cyclohydrolase 1; OS = Insolitispirillum peregrinum OX=80876 GN=folE PE=3 SV=1
MTVSSPSPRPTDTLAPTREDAETAVRTLLRWAGDDPTREGLVDTPARVARAFEEWFAGYGSDPAEVLRRTFEEVEGYDEMVVLKDIPFESHCEHHLAPIIGYAHVAYIPRRRVVGISKLARVVEIYAKRLQIQEKMTAQVANTIQEVLDPLGVAVVISGQHQCMTTRGVHKHGVSMVTSRMLGAFRDDPSTRREFLAMIGNPK

SEQ ID NO: 9240 - protein, 192 aa, Insolitispirillum peregrinum
  REGION 1..192: note = tr|A0A1N7NB61|A0A1N7NB61_9PROT GTP cyclohydrolase 1; OS = Insolitispirillum peregrinum OX=80876 GN=folE PE=3 SV=1
MNAEDSMSIRSRAMAALIRATGDDPARLGLTGTPERAARAHAELFDGYDINPQALLAKAMEPADGYAGLVLVRGIRLYSHCEHHMLPMEGLVHVGYLPDSHLLGLSKVARAIEVLTRQLQGQERLTREIADIIEKVAHPKGVAVAVVARHHCITERGVRQTDSDTVTVVTRGTLDSNPGLRRDFLGLCGLAG

SEQ ID NO: 9241 - protein, 188 aa, unidentified; identical to SEQ ID NO: 6805
  source 1..188: note = Intestinibacter bartlettii
  REGION 1..188: note = tr|B0AC37|B0AC37_9FIRM GTP cyclohydrolase 1; OS = Intestinibacter bartlettii DSM 16795 OX=445973 GN=folE; PE = 3 SV=1

SEQ ID NO: 9242 - protein, 188 aa, unidentified; identical to SEQ ID NO: 6805
  source 1..188: note = Intestinibacter bartlettii
  REGION 1..188: note = tr|W1UR51|W1UR51_9FIRM GTP cyclohydrolase 1; OS = Intestinibacter bartlettii DORA_8_9 OX=1403940 GN=folE; PE = 3 SV=1

SEQ ID NO: 9243 - protein, 190 aa, Intrasporangium calvum
  REGION 1..190: note = tr|E6S9V6|E6S9V6_INTC7 GTP cyclohydrolase 1; OS = Intrasporangium calvum (strain ATCC 23552 / DSM 43043 / JCM 3097 / NBRC 12989 / 7 KIP) OX=710696 GN=folE PE=3 SV=1
MAIDVARAEAAVRELLIAIGEDPERDGLVDTPARVARSYAEIFAGLDMEAGDVLDKTFEIEHDELIILRDIELYSTCEHHLVPFHGVAHVGYIPGRDGRVTGLSKLARLVEVYARRPQVQERLTSQIADALVEHLGVQGVIVVIQAEHLCMSMRGIRKPGASTITSAVRGQLRDPATRAEAMALMLEGNK

SEQ ID NO: 9244 - protein, 190 aa, Intrasporangium chromatireducens
  REGION 1..190: note = tr|W9GRC2|W9GRC2_9MICO GTP cyclohydrolase 1; OS = Intrasporangium chromatireducens Q5-1 OX=584657 GN=folE; PE = 3 SV=1
MAVDQARAAKAVRELLIAVGEDPDREGLRDTPERVARAYAEVFAGLDMEAADVLDKTFNMDHEELVIVRDIELYSTCEHHLVPFHGVAHVGYIPDKHGRVTGLSKLARLVEVYARRPQVQERLTSQIADALVEHLGVQGVIVVIQAEHLCMSMRGIRKPGASTITSAVRGQLRDPATRAEAMALMLEGNK

SEQ ID NO: 9245 - protein, 205 aa, Intrasporangium chromatireducens
  REGION 1..205: note = tr|W9GGD2|W9GGD2_9MICO GTP cyclohydrolase 1; OS = Intrasporangium chromatireducens Q5-1 OX=584657 GN=folE; PE = 3 SV=1
MSEQTVPEAARERPLHSIRTAQPEPQLEVAARAARQFLEALGVDCDTPSTERSPMRMARAYAEMLSARPFELTTFPNDEGYDEMVVVRGIPVASLCEHHLLPFTGVAHIAYLPGDRILGLSKFARVVEMFARRPQVQERLTKQVADWLDEHLAPRGVGVVVEAEHSCLSLRGARVGGAVTRTSALAGLFRENDATRAEFLDALRA

SEQ ID NO: 9246 - protein, 190 aa, Intrasporangium oryzae
  REGION 1..190: note = tr|W9GI82|W9GI82_9MICO GTP cyclohydrolase 1; OS = Intrasporangium oryzae NRRL B-24470 OX=1386089 GN=folE; PE = 3 SV=1
MPIDHDRAAAAVRELLLAVGEDPEREGLQDTPQRVARAYAEIFAGLDMSAADVLGTTFEIDHQELVIVRDIELYSTCEHHLVPFHGVAHVGYIPGKDGRVTGLSKLARLVEVFARRPQVQERLTTQIADALVEHLMVQGVIVVVQAEHLCMSMRGIRKPGASTITSAVRGQLRDPATRAEAMALMLEGNK

SEQ ID NO: 9247 - protein, 263 aa, Iodobacter fluviatilis
  REGION 1..263: note = tr|A0A377SW73|A0A377SW73_9NEIS GTP cyclohydrolase FolE2 OS=Iodobacter fluviatilis OX=537 GN=folE2 PE=3 SV=1
MTMAIADVQNTVDTRNIAINKVGIKSIRHPVKVADRTDGVQHTIAMFDMYVFLPKQFKGTHMSRFVEILNSHEKEISVDSFETILREMCDRLEAESGYLEMRFPYFINKTAPVSGVQSLMDYDITLVGELKNGVFEQKLKVLAPVTSLCPCSKKISAYGAHNQRSHVTVTATLAQSIWIEEIVTLIEQEASSELWGLLKRPDEKFVTERAYDNPKFVEDMVRDVAARVHADPRVSAYVVESENFESIHNHSAYALIEHDKREA

SEQ ID NO: 9248 - protein, 263 aa, Iodobacter sp.
  REGION 1..263: note = tr|A0A3S8ZWU8|A0A3S8ZWU8_9NEIS GTP cyclohydrolase FolE2 OS=Iodobacter sp. H11R3 OX=2496266 GN=folE2 PE=3 SV=1
MTMAIADVQNTVDTRNIAINKVGIKSIRHPVKVADRTDGVQHTIAMFDMYVFLPKQFKGTHMSRFVEILNSHEKEISVDSFETILREMCDRLEAESGYLEMRFPYFINKTAPVSGVQSLMDYDITLLGELKNGVFEQKLKVLVPVTSLCPCSKKISAYGAHNQRSHVTVTATLAQNVWIEEIVTLIEQEASSELWGLLKRPDEKYVTERAYDNPKFVEDMVRDVAARVHADPRITAYVVESENFESIHNHSAYALIEHDKREA

SEQ ID NO: 9249 - protein, 263 aa, Iodobacter sp.
  REGION 1..263: note = tr|A0A2G3J8V3|A0A2G3J8V3_9NEIS GTP cyclohydrolase FolE2 OS=Iodobacter sp. BJB302 OX=1506510 GN=folE2 PE=3; SV = 1
MTMAIADVQNTVDTRNIAINKVGIKSIRHPVKVADRTDGVQHTIAMFDMYVFLPKQFKGTHMSRFVEILNSHEKEISVDSFETILREMCDRLEAESGYLEMRFPYFINKTAPVSGVQSLMDYDITLVGELKNGVFEQKLKVLAPVTSLCPCSKKISAYGAHNQRSHVTVTATLAQSIWIEEIVTLIEQEASSELWGLLKRPDEKFVTERAYDNPKFVEDMVRDVAACVHADPRVSAYVVESENFESIHNHSAYALIEHDKREA

SEQ ID NO: 9250 - protein, 188 aa, Isobaculum melis
  REGION 1..188: note = tr|A0A1H9QXN2|A0A1H9QXN2_9LACT GTP cyclohydrolase 1; OS = Isobaculum melis OX=142588 GN=folE PE=3 SV=1
MDKKQQAIIEAAVTQILTAIGEDPKRSGLKDTPKRVARMYGEVFSSLTEPVFDDYALFDSRNEEDMVLVKDIQFYSMCEHHLLPFFGKAHIAYIPDGNQVLGLSKLPRLVEYCAKRPSVQEDLTMMIAEELSKNVPVKGIAVSIEAAHMCMTMRGVKTPDSLTKTFHYRGLFKENSEWKNDFLQAIRN

SEQ ID NO: 9251 - protein, 209 aa, Isoptericola dokdonensis
  REGION 1..209: note = tr|A0A168FUE5|A0A168FUE5_9MICO GTP cyclohydrolase 1; OS = Isoptericola dokdonensis DS-3 OX=1300344 GN=folE PE=3; SV = 1
MSGSDLPLSPVSLGVRAAADVPAYDEPRAEAAVRELLLAVGEDPEREGLKDTPARVARAYREIFAGLRQEPEEVLTTTFDLGHEEMVLVKDIEVYSTCEHHLVPFHGVAHIGYIPNTDGRITGLSKLARLVEVFARRPQVQERLTTQIADSLVRILDPRGVIVVVECEHLCMSMRGVRKPGARTVTSAVRGGMQNAATRAEAMSLILGR

SEQ ID NO: 9252 - protein, 288 aa, Isoptericola dokdonensis
  REGION 1..288: note = tr|A0A168EDE9|A0A168EDE9_9MICO Putative GTP cyclohydrolase 1 type 2 OS=Isoptericola dokdonensis DS-3; OX = 1300344 GN=I598_0323 PE=4 SV=1
MSTPTLADVVAVLEDLYPPSTAEGWDAVGLVAGDPRREVRKVLLAVDPVAAVVDEALDWGADLVVTHHPLFLKGVHSVAATTFKGSVVHRLLTAGCGLYVAHTNADSAPRGVADALADLVGLVDRAPLVARADDVERGIGRVGRLEAPTTLGAFARHVAGVLPATAQGVRVAGDLDAPVATAAVVGGSGDSLFDAVRAAEVDVYVTADLRHHPASELRERAGFEAGDPEEATAATPFLVDVAHFASEWPWLAYAAADLTSRLPGGTVTTRVSTLVTDPWTARIGAGDR

SEQ ID NO: 9253 - protein, 209 aa, Isoptericola jiangsuensis
  REGION 1..209: note = tr|A0A2A9EZD5|A0A2A9EZD5_9MICO GTP cyclohydrolase 1; OS = Isoptericola jiangsuensis OX=548579 GN=folE PE=3 SV=1
MTGTDLPLSPVSLGMRAAADVPPYDEARAEAAVRELLLAVGEDPDREGLKDTPARVARAYREIFAGLRQEPEEVLTTTFDIGHEEMVLVKDIEVYSTCEHHLVPFHGVAHIGYIPSTDGRITGLSKLARLVEVFARRPQVQERLTTQIADSLVRILDPRGVIVVVECEHLCMSMRGVRKPGARTVTSAVRGGMQNAATRAEAMSLILGR

SEQ ID NO: 9254 - protein, 209 aa, Isoptericola sp.
  REGION 1..209: note = tr|A0A2T0Y4L9|A0A2T0Y4L9_9MICO GTP cyclohydrolase 1; OS = Isoptericola sp. CG 20/1183 OX=1881052 GN=folE PE=3 SV=1
MSDEDLPLTAVSIGVRPAADVPAYDAERAEAAVRELLVAVGEDPDREGLVDTPARVARAYREIFAGLRQDPEDVLTTTFDLGHEEMVLVKDIEVYSTCEHHLVPFHGVAHVGYIPSADGRITGLSKLARLVEVYARRPQVQERLTTQVADALVRILEPRGVIVVVECEHLCMSMRGVRKPGSRTVTSAVRGAMQNAATRAEAMSLILGR

SEQ ID NO: 9255 - protein, 197 aa, Isoptericola sp.
  REGION 1..197: note = tr|A0A2W5WTQ9|A0A2W5WTQ9_9MICO GTP cyclohydrolase 1; OS = Isoptericola sp. PW21 OX=2607479 GN=folE PE=3 SV=1
MGARPAAEVPPYDAARAEAAVRELLLAVGEDPEREGLRDTPARVARAYQEIFAGLRQEPEDVLTTTFDLGHEEMVLVKDIEVYSTCEHHLVPFHGVAHVGYIPNVDGRITGLSKLARLVEVYARRPQVQERLTSQVADALVRILEPRGVLVVVECEHLCMSMRGVRKPGSRTVTSAVRGQMRDPATRAEAMSLVLGK

SEQ ID NO: 9256 - protein, 218 aa, Isoptericola variabilis
  REGION 1..218: note = tr|F6FTY7|F6FTY7_ISOV2 GTP cyclohydrolase 1; OS = Isoptericola variabilis (strain 225) OX=743718 GN=folE; PE = 3 SV=1
MTRHAAEVDDERDLPLTAVSVGVRPASEVPPYDAARAEAAVRELLLAIGEDPDREGLRDTPARVARAYREIFAGLRQEPEDVLTTTFDIGHEEMVLVKDIEVYSTCEHHLVPFHGVAHVGYIPNTDGRITGLSKLARLVEVYARRPQVQERLTTQVADALVRILEPRGVIVVVECEHLCMSMRGVRKPGSRTVTSAVRGIMQDAPATRSEAMSLILGK

SEQ ID NO: 9257 - protein, 200 aa, Isosphaera pallida
  REGION 1..200: note = tr|E8R3F8|E8R3F8_ISOPI GTP cyclohydrolase 1; OS = Isosphaera pallida (strain ATCC 43644 / DSM 9630 / IS1B) OX=575540 GN=folE PE=3 SV=1
MEEDGPPTAASTPSPVDLERIARAVREILIAVGENPDREGIRDTPQRVARMYAEVFQGLHQNPRDHLKTAFTETYEDTILIRDIAFISFCEHHLLPFVGKTHVAYRPRGRVVGLSKVPRVVDVLSRRPQLQERLTTDLADLLHCELDAQGVAVMVEATHSCMTIRGVSKPGSSCWTFAMRGVYETDPALRAEVLAMVRGG

SEQ ID NO: 9258 - protein, 219 aa, unidentified
  source 1..219: note = Isosphaeraceae bacterium
  REGION 1..219: note = tr|A0A432MFE7|A0A432MFE7_9BACT GTP cyclohydrolase 1; OS = Isosphaeraceae bacterium GM2012 OX=2080755 GN=folE PE=3; SV = 1
MSESLSCHPHTLGEPADDRAGPGATDGSHPVDLDRIRRAVREILLAVGEDPDREGLLETPDRVARMYAEVFRGLHQDPSTHLAKRFTQKYDEMVTIRDITFSSFCEHHLLPFSGKAHVAYLPSGKVVGLSKIPRVIDVLSRRPQVQERLTEQIADLLMEQLDALGVAVVMEGVHSCMTVRGVQKPGSTYITSAMRGSFRENVATRMEVLSLIHGASRSV

SEQ ID NO: 9259 - protein, 221 aa, unidentified
  source 1..221: note = Izhakiella australiensis
  REGION 1..221: note = tr|A0A1S8YE61|A0A1S8YE61_9ENTR GTP cyclohydrolase 1; OS = Izhakiella australiensis OX=1926881 GN=folE PE=3 SV=1
MTTLSQEARLVHDALVTRGLETPLRTPVRQLDDDTRKALIAGHMTEIMQLLNLDLEDDSLAETPHRIAKMYVNEVFSGLDYANFPKITLIENKMKVDEMVTVRDITLTSTCEHHFVIIDGKATVAYIPKDKVIGLSKINRIVQFFAQRPQVQERLTQQILVALQTLLGTNNVAVSIDAVHYCVKARGIRDATSATTTTSLGGLFKSSQNTRQEFLRAVRHS

SEQ ID NO: 9260 - protein, 221 aa, unidentified
  source 1..221: note = Izhakiella capsodis
  REGION 1..221: note = tr|A0A1I4Y301|A0A1I4Y301_9ENTR GTP cyclohydrolase 1; OS = Izhakiella capsodis OX=1367852 GN=folE PE=3 SV=1
MPTLSQEARLVHDALVTRGLETPLRKPVHQLDDNKRKALIAGHMTEIMQLLNLDLDDDSLAETPHRIAKMYVNEVFSGLDYANFPKITLIENKMNVDEMVTVRDITLTSTCEHHFVIIDGKATVAYIPKDKVIGLSKINRIVQFFAQRPQVQERLTQQILVAMQTLLGTNNVAVLIDAVHYCVKARGIRDANSATTTTSLGGLFKSSQNTRQEFLRAVRHR

SEQ ID NO: 9261 - protein, 222 aa, unidentified
  source 1..222: note = Izhakiella sp.
  REGION 1..222: note = tr|A0A4P8YMP6|A0A4P8YMP6_9ENTR GTP cyclohydrolase 1; OS = Izhakiella sp. KSNA2 OX=2579935 GN=folE PE=3 SV=1
MPSLSKEAALVHEALVARGLETPLRPPVHELDNETRKSRIAGHMTEIMQLLNLDLSDDSLMETPHRIAKMYVDEIFSGLDYANFPKITLIENKMKVDEMVTVRDITLTSTCEHHFVTIDGKATVAYIPKDTVIGLSKINRIVQFFSSRPQVQERLTQQILVALQTLLGTNNVAVSIDAVHYCVKARGIRDVTSATTTTSLGGLFKSSQNTRQEFLRAVRHHG

SEQ ID NO: 9262 - protein, 191 aa, Janibacter hoylei
  REGION 1..191: note = tr|K1E474|K1E474_9MICO GTP cyclohydrolase 1; OS = Janibacter hoylei PVAS-1 OX=1210046 GN=folE PE=3 SV=1
MADVDLGRIEAAVREILLAVGEDPGRDGLLETPARVARSYAEVFAGLRADPAELLATTFDIDHDELVIVRDIALYSTCEHHLVPFHGVAHVGYTPGKSGKVTGLSKIARLVDIFAKRPQVQERLTSQIADALVEHLDVAGVIVVVEAEHLCMSMRGVRKPGATTITSAVRGQLRDSTTRAEAMALLTGAAR

SEQ ID NO: 9263 - protein, 191 aa, unidentified
  source 1..191: note = Janibacter indicus
  REGION 1..191: note = tr|A0A1W2CTH1|A0A1W2CTH1_9MICO GTP cyclohydrolase 1; OS = Janibacter indicus OX=857417 GN=folE PE=3 SV=1
MTDVDLPRIEAAVREILLAVGEDPDRDGLVDTPGRVARAYAEVFSGLHVDPAELLATTFDIDHGELVIVRDIPLYSTCEHHLVPFHGVAHVGYLPGSSGKVTGLSKIARLVDLFAKRPQVQERLTTQVADALVEHLDVGGVIVVVEAEHLCMSMRGVRKPGATTITSAVRGQLRDATTRAEAMALLTGAAR

SEQ ID NO: 9264 - protein, 191 aa, unidentified
  source 1..191: note = Janibacter indicus
  REGION 1..191: note = tr|A0A1L3MIT0|A0A1L3MIT0_9MICO GTP cyclohydrolase 1; OS = Janibacter indicus OX=857417 GN=folE PE=3 SV=1
MNDVDLPRIEAAVREILLAVGEDPDRDGLVDTPGRVARAYAEVFSGLHVDPAELLATTFDIDHGELVIVRDIPLYSTCEHHLVPFHGVAHVGYLPGSSGKVTGLSKIARLVDLFAKRPQVQERLTTQVADALVEHLDVGGVIVVVEAEHLCMSMRGVRKPGATTITSAVRGQLRDATTRAEAMALLTGAAR

SEQ ID NO: 9265 - protein, 212 aa, Janibacter limosus
  REGION 1..212: note = tr|A0A4P6N007|A0A4P6N007_9MICO GTP cyclohydrolase 1; OS = Janibacter limosus OX=53458 GN=folE PE=3 SV=1
MTPAPSPAAGHDAREASRPHLRVAGTHPAVDPAAAEAAAAALLAALGLDLTAEHLARTPHRMAQALIEMTSSEDFELTTFPNDEGYDELVLVRDIPVQSVCEHHILPFTGVAHVGYLPGERILGLSKFARMVEWHARRPQTQERLTHQIATHLDDALGPRGVGVVVQAEHTCMTLRGARVAGTATTTSALFGRLREDPRSRAEFLALTRSTP

SEQ ID NO: 9266 - protein, 191 aa, Janibacter limosus
  REGION 1..191: note = tr|A0A4V0ZAN0|A0A4V0ZAN0_9MICO GTP cyclohydrolase 1; OS = Janibacter limosus OX=53458 GN=folE PE=3 SV=1
MADVDLDRIEAAVREILIAVGEDPDRDGLVETPARVARSYAEVFAGLRSDPAQLLSTTFDIDHDELVIVRDIELYSTCEHHLVPFHGVAHVGYTPGPSGKVTGLSKLARLVDMFAKRPQVQERLTSQIADALVEHLDVAGVIVVVEAEHLCMSMRGVRKPGAKTITSAVRGQLRDSTTRAEAMALLAGAAR

SEQ ID NO: 9267 - protein, 208 aa, Janibacter melonis
  REGION 1..208: note = tr|A0A176QEE6|A0A176QEE6_9MICO GTP cyclohydrolase 1; OS = Janibacter melonis OX=262209 GN=folE PE=3 SV=1
MSQHEAEALEAGAGTGPVAAAMDLPRIEAAVREILIAVGEDPDREGLLETPARVARAYAETFAGLHQDPAEILATTFDIDHDELVMVRDIPLYSTCEHHLVPFHGVAHVGYVPGRSGQVTGLSKLARLVDVYARRPQVQERLTSQVADALVECLDVTGVIVVVEAEHLCMSMRGVRKPGARTLTSAVRGQLRDPATRAEAMSLLMGAR

SEQ ID NO: 9268 - protein, 191 aa, Janibacter sp.
  REGION 1..191: note = tr|A0A0Q9K853|A0A0Q9K853_9MICO GTP cyclohydrolase 1; OS = Janibacter sp. Soil728 OX=1736393 GN=folE PE=3 SV=1
MADVDLDRIEAAVREILIAVGEDPDRDGLVETPARVARSYAEVFAGLRAEPAELLSTTFDIDHDELVIVRDIELYSTCEHHLVPFHGVAHVGYTPGPSGKVTGLSKLARLVDMFAKRPQVQERLTSQIADALVEHLDVAGVIVVVEAEHLCMSMRGVRKPGAKTITSAVRGQLRDSTTRAEAMALLAGAAR

SEQ ID NO: 9269 - protein, 221 aa, Janibacter sp.
  REGION 1..221: note = tr|A3THT0|A3THT0_9MICO GTP cyclohydrolase 1; OS = Janibacter sp. HTCC2649 OX=313589 GN=folE PE=3 SV=1
MSTPKGTEPGSAPVDAPETPDTRDEVDSVPARQVDHERARAAVRELLFAIGEDPDREGLRDTPDRVARAATQLYAGLSQDPSDVLSARFSIDHEELIIVRDIEIFSTCEHHLLPFHGVAHVGYIPAPDGTVTGLSKLARLVDVFARRPQVQERITTQVADALVEHLGVQGVIVVIEAEHLCMSMRGVHKPGSRTITSAVRGQLRDPATRAEAMSLLLGGKR

SEQ ID NO: 9270 - protein, 191 aa, Janibacter terrae
  REGION 1..191: note = tr|A0A3D1L7Z6|A0A3D1L7Z6_9MICO GTP cyclohydrolase 1; OS = Janibacter terrae OX=103817 GN=folE PE=3 SV=1
MGDVDLARIEAAVREILLAVGEDPDRDGLVDTPARVARSYAEVFAGLRQSPEELLATTFDIDHDELVIVRDIELYSTCEHHLVPFHGLAHVGYVPGHGGQVTGLSKLARLVDIFAKRPQVQERLTSQVADALVTHLDVAGVIVVIEAEHLCMSMRGVRKPGAKTITSAVRGQLRDPTTRAEAMALLTGAAR

SEQ ID NO: 9271 - protein, 346 aa, unidentified
  source 1..346: note = Jannaschia aquimarina
  REGION 1..346: note = tr|A0A0D1EJ77|A0A0D1EJ77_9RHOB FolE2 protein; OS = Jannaschia aquimarina OX=935700 GN=folE2 PE=4 SV=1
MNVHAPDIDRPVTEDEAQAALALLNRYAGQSGAAPMPYPVLAALYDDAHVADEGYRTTLPDLQNGPASLIRGADRRIQHVGISNFRLPLSVPTREGPHRVDASVTGTVSLEAGSKGINMSRIMRSFYRHSGDTMGFDTVEAALDDYLVDLGAFDARLLLRFQLPLEVTALRSGLKGWQYYDCAIEMIQKDGVRTRILHLDYVYSSTCPCSLELSEHARRERGRLATPHSQRSVARLSVEVTGALTHEDIVDACRRVVPTETQVMVKREDEQAFAELNAANPIFVEDAARLFAEALEAEAGAGAFRVVCSHQESLHSHDAVSVLTAGDLFDVETLEPRLFGTLVHPG

SEQ ID NO: 9272 - protein, 346 aa, Jannaschia donghaensis
  REGION 1..346: note = tr|A0A0M6YK28|A0A0M6YK28_9RHOB GTP cyclohydrolase folE2 OS=Jannaschia donghaensis OX=420998 GN=folE2 PE=4; SV = 1
MTVHQPDIERHPTEAEAKEALALLQRYAKTDPSAAVALYPEMSNVYPVHVSDEAYRATLPDLQNGPASLIRGADRRIEHVGISNFRLPMQIATRSGVQAVQVSVTGTVSLEAGKKGINMSRIMRSFYAHADAHMGFDVAEAALDDYLTDLAAFDARLLLSFSLPLRVESLRSGLTGWQYYDISMEVVQSCGVRRRVLHLDYVYSSTCPCSLELSEHARRTRGQLATPHSQRSVARLSAEVTGAVAFEDLIDMCRLAVPTETQVMVKREDEQAFAELNAANPIFVEDAARLFAQGLEAITGVGDFRVVASHQESLHSHDAVSVLTQGDLFATETLEPRLFGTLVHAG

SEQ ID NO: 9273 - protein, 346 aa, Jannaschia rubra
  REGION 1..346: note = tr|A0A0M6XMN5|A0A0M6XMN5_9RHOB GTP cyclohydrolase folE2 OS=Jannaschia rubra OX=282197 GN=folE2 PE=4 SV=1
MTIHAPDIDRDPTEAEAQAALNLLRRYAETGQDARAGLYPALSASFPDHVVDDAYRATLPDLQNGPASLIRGADRRIQHVGISNFRLPLQVATRDGARSVDASVTGTVSLEAGRKGINMSRIMRSFYAHAARSVGFDVVEAALDDYLADLGSFDARLLLRYSLPLQVNSLRSGLIGWQYYDVAMEVTQTGQTRRRILHVDYVYSSTCPCSLELSEHARRTRGQLATPHSQRSVARLSVEVTSDVTVEDVIDMCRAQVPTETQVMVKREDEQAFAELNAANPIFVEDAARLFAEGLERLDGVADFRIVASHQESLHSHDAVSVLTHGDLFAADTLEPRLFGTLIHGG

SEQ ID NO: 9274 - protein, 376 aa, Jannaschia seosinensis
  REGION 1..376: note = tr|A0A0M7BFB5|A0A0M7BFB5_9RHOB GTP cyclohydrolase folE2 OS=Jannaschia seosinensis OX=313367 GN=folE2 PE=4; SV = 1
MSQVFHGNELAFRSGSPKSRNVSANRGEHDMNVYAPDIDRIPTEEEAQAALDLLKRYAATGQGAAVPLYPDLANIYPSHAADAAYRATLPDLQNGPAALIRGADRRIQHVGISNFRLPMRIATRTGDHLAQVSVTGTVSLEAGLKGINMSRIMRSFYRHAEETSDFNVVDRILDDYVTDLDAFDARLLLRFQLPLQVESLRSGLKGWQYYDIAMEVVQMAGTRRHILHLDYVYSSTCPCSLELSEHARRTRGQLATPHSQRSVARLSAQVESGTTVEDMIDMCRAQVPTETQVMVKREDEQAFAELNAANPIFVEDAARLFAEGLEALPGVGDFRVVASHQESLHSHDAVSVLTHGDLFAADTLEPRLFGTMVHPG

SEQ ID NO: 9275 - protein, 362 aa, Jannaschia sp.
  REGION 1..362: note = sp|Q28R88|GCH4_JANSC GTP cyclohydrolase FolE2; OS = Jannaschia sp. (strain CCS1) OX=290400 GN=folE2 PE=3; SV = 1
MNVHVKTADQTPSTVQAQDALAILSAWASEASADQIDALDPGIARLVRVQAYPDLRAEYPGDFTVDEAYRATLPDLQNGPASLIKGANRRIQHVGISNFRLPIRYAVQDGSEVMLETSVTGTVSLEADQKGINMSRIMRSFYKHADASFGFDVIEAALDDYKADLGSFDARIQMRLSYPMKVDSLRSGLSGWQYYDIALELVERGGVRQRIVHLDYVYSSTCPCSLELSEHARATRGQLATPHSQRSVARISVELQGQGVWFEDLIEMARSGVPTETQVMVKREDEQAFAELNAANPIFVEDAARLFAEQLQAHSGVGDFRVMASHQESLHSHDAVSLLTEGDTFAEVSLDPKLFPSLIHVG

SEQ ID NO: 9276 - protein, 362 aa, Jannaschia sp.
  REGION 1..362: note = tr|A0A1B6YYD5|A0A1B6YYD5_9RHOB GTP cyclohydrolase FolE2 OS=Jannaschia sp. EhC01 OX=1849359 GN=folE2 PE=3 SV=1
MNVHVKTADQRPSTLQIQNALELLSAWAEDASADQINALDPKLARLVRAQSYPEFSRSYPDDFAVDAAYRATLPDLQNGPASLIKGANRRIQHVGISNFRLPIRYDVRDGTQVMLETSVTGTVSLEADQKGINMSRIMRSFYKHAEAAFGFDVIEAALDDYKADLGSFDARIQMRLSYPMQVESLRSGLSGWQYYDIALELVERDGVRQRIVHLDYVYSSTCPCSLELSEHARATRGQLATPHSQRSVARLSVELKGEGVWFEELIEMARKGVPTETQVMVKREDEQAFAELNAANPIFVEDAARLFAEQLQSHEGVGDFRVMASHQESLHSHDAVSLLTEGDTFAEVSLDPKLFPSLIHVG

SEQ ID NO: 9277 - protein, 303 aa, Janthinobacterium agaricidamnosum
  REGION 1..303: note = tr|A0A3G2EBP5|A0A3G2EBP5_9BURK GTP cyclohydrolase FolE2 OS=Janthinobacterium agaricidamnosum OX=55508; GN = folE2 PE=3 SV=1
MKRDSLSSPLPDVAAGPHLGHPLPLEWVGMQGIALPLWLEEGGQAQQVHAWADVHVDLPAPRVKGIHMSRLYLLLDAFAAAQPLDAGALAAVLRRMVDSHADCGSTQARIALAFPVLLRRPALLTAGLAGWKSYPVRLQASVSPQGFALSLTVEIGYSSTCPCSAALARQLLADAFAAQFGKGGIDGAAARDWLQEHASLATPHSQRSTATVTVPLTEQAELGLFPLIDRVEAALATPLQTAVKRADEQAFARLNGANLMYVEDAARRVQAALAPHYAQPRVTVRHMESLHPHDAVAQAGQLA

SEQ ID NO: 9278 - protein, 187 aa, Janthinobacterium agaricidamnosum
  REGION 1..187: note = tr|W0UZP9|W0UZP9_9BURK GTP cyclohydrolase 1; OS = Janthinobacterium agaricidamnosum NBRC 102515 = DSM 9628 OX=1349767 GN=folE PE=3 SV=1
MSKEEFTENDWRRLLVSLGEDPQRTGLLETPARVAKAWKHWTSGYGQDPVELLKAFEDGAEQYNELIVVRGIPVYSHCEHHLAPFFGRATIGYVPNGKIVGLSKLTRLVDCYAKRLQVQERMTIQIANSLMEVLEPKAVGVVVRCRHMCMESRGIRTQGEETVTSAMLGELQPNLALRTEFLALARE

SEQ ID NO: 9279 - protein, 188 aa, Janthinobacterium lividum
  REGION 1..188: note = tr|A0A1S1UFF5|A0A1S1UFF5_9BURK GTP cyclohydrolase 1; OS = Janthinobacterium lividum OX=29581 GN=folE PE=3 SV=1
MSQEEFSENDWRRLISSFGEDPQRPGLLETPARVAKAWKHWTSGYGQDPVDLLKAFEDGAEQYNELIVVRGIPVYSHCEHHLAPFFGKATIGYVPNGKIVGLSKLTRLVDCFSKRLQVQERMTMQIANALMEVLEPKSVGVVVRCRHLCMESRGIRTPGEETITSAMLGEMQPNLALRTEFLALAREV

SEQ ID NO: 9280 - protein, 188 aa, Janthinobacterium lividum
  REGION 1..188: note = tr|A0A031GMF2|A0A031GMF2_9BURK GTP cyclohydrolase 1; OS = Janthinobacterium lividum OX=29581 GN=folE PE=3 SV=1
MSQEEFSENDWRRLISSFGEDPQRPGLLETPARVAKAWKHWTSGYGQDPVDLLKAFEDGAEQYNELIVVRGIPVYSHCEHHLAPFFGKATIGYVPNGKIVGLSKLTRLVDCFSKRLQVQERMTMQIANALMEVLEPKSVGVVVRCRHLCMESRGIRTPGEETITSAMLGEMQPNLALRTEFLALARES

SEQ ID NO: 9281 - protein, 268 aa, Janthinobacterium sp.
  REGION 1..268: note = sp|A6SUS5|GCH4_JANMA GTP cyclohydrolase FolE2; OS = Janthinobacterium sp. (strain Marseille) OX=375286; GN = folE2 PE=3 SV=1
MNTRDPGLAAIPDVQATPDTRRIAIQRVGVKGVRYPLTVKTLSGVQPSVGTWNMYVHLAEEQKGTHMSRFIALLEENTQALDVNVFGGMIRKMLALLEADAGRIEVSFPYFINKTAPVSGVQSLMDYEVGFNGEIKNGKLEITLKVLVPVTSLCPCSKKISAYGAHNQRSHITVQALLADDLVVEELIAQIEAQASCELFGLLKRPDEKYVTERAYDNPKFVEDLVRDVAVMLNNEARVLAYTLEAENFESIHNHSAYALIELDKRLA

SEQ ID NO: 9282 - protein, 188 aa, Janthinobacterium sp.
  REGION 1..188: note = tr|A0A349L3G1|A0A349L3G1_9BURK GTP cyclohydrolase 1; OS = Janthinobacterium sp. OX=1871054 GN=folE PE=3 SV=1
MSKEEFSEHDWRRLLASFGEDPKRPGLIETPARVSKAWKHWTSGYGQDPVELLKAFEDGAEQYNELIVVRGIPVYSHCEHHLAPFFGKATIGYVPNGKIVGLSKLTRLVDCFSKRLQVQERMTIQIANALMEVLEPKAVGVVVRCRHLCMESRGIRTPGEETITSAMLGELQPNLALRTEFLALARES

SEQ ID NO: 9283 - protein, 309 aa, unidentified
  source 1..309: note = Janthinobacterium svalbardensis
  REGION 1..309: note = tr|A0A290WXW1|A0A290WXW1_9BURK GTP cyclohydrolase FolE2 OS=Janthinobacterium svalbardensis OX=368607; GN = folE2 PE=3 SV=1
MTMKRDSVSTPLPDVAAGPHLGHPLPLEWVGMQGIALPVWLEEGGQAQQVHAWADVQVDLPDPHVKGIHMSRLYRLLDAFAAAQPLDAGALAAVLRRMVDSHADCGSTQARLALAFPVLRRQAALLTAGLAGWKSYPVRLQASVSAQCFALTLTVEIGYSSTCPCSAALARQLLADAFAARFGEGGIDGIAARDWLREHASLATPHSQRSTATVSVALTEQAELDLFPLIDLVEAALATPLQTAVKRADEQAFARLNGANLMYVEDAARRVQAALAQHYAQARVTVRHMESLHPHDAVAQAGQLARVFQ

SEQ ID NO: 9284 - protein, 188 aa, unidentified; identical to SEQ ID NO: 9279
  source 1..188: note = Janthinobacterium svalbardensis
  REGION 1..188: note = tr|A0A290WQ88|A0A290WQ88_9BURK GTP cyclohydrolase 1; OS = Janthinobacterium svalbardensis OX=368607 GN=folE PE=3; SV = 1

SEQ ID NO: 9285 - protein, 195 aa, unidentified
  source 1..195: note = Jatrophihabitans endophyticus
  REGION 1..195: note = tr|A0A1M5R5G4|A0A1M5R5G4_9ACTN GTP cyclohydrolase 1; OS = Jatrophihabitans endophyticus OX=1206085 GN=folE PE=3; SV = 1
MSDSELLGIDVERAEAAVRELLIAIGEDPDREGLRKTPARVARACAEVFGGLNAEPSDVLETTFDEDHDELVLVKDIPIFSTCEHHLLPWHGTAAIGYIPGADGRITGLSKLARLVDLYARRPQVQERLTSQVADALASRLQPQGVIVVIQAEHLCMSMRGIRKPGSQTMTSAVRGIFKGDPRTRSEALSLILGH

SEQ ID NO: 9286 - protein, 197 aa, unidentified
  source 1..197: note = Jatrophihabitans sp.
  REGION 1..197: note = tr|A0A522QTY8|A0A522QTY8_9ACTN GTP cyclohydrolase 1; OS = Jatrophihabitans sp. OX=1932789 GN=folE PE=3 SV=1
MPAGQLRVSVDLARAQAAVRELLLAIGENPDRDGLRDTPARVARAYAEVFAGLFVEPDEVLETTFDEDHDELVLVKDIPLYSMCEHHLVPWHGTAAVGYIPGEDGRITGLSKLARVVDLFARRPQVQERLTSQVADAVVRRLDPRGVIVVIEAEHLCMAMRGVRKPGAMTITSAVRGIFADDARTRAEALSLIRGRS

SEQ ID NO: 9287 - protein, 197 aa, unidentified
  source 1..197: note = Jatrophihabitans sp.
  REGION 1..197: note = tr|A0A286EI42|A0A286EI42_9ACTN GTP cyclohydrolase 1; OS = Jatrophihabitans sp. GAS493 OX=1907575 GN=folE PE=3 SV=1
MTEPDGEPGGIDLARAEAAVRELLLAIGENPDRPGLERTPERVARSFTEIYGGLHLNPDDVLETQFDEHHDELVLVKDIPLYSTCEHHLVPWHGTAAVGYIPGASGRITGLSKLARVVDLYAKRPQVQERLTSQVADAVMSRLQPRGVIVVLEAEHLCMAMRGVRKPGARTLTSAVRGIFQSDSRTRAEAMSLILGR

SEQ ID NO: 9288 - protein, 195 aa, Jejuia pallidilutea
  REGION 1..195: note = tr|A0A098LSA2|A0A098LSA2_9FLAO GTP cyclohydrolase 1; OS = Jejuia pallidilutea OX=504487 GN=folE PE=3 SV=1
MPYKNIEDYSETVTQGVKDRYKEIIESLGEDTQREGLLKTPERAAKAMQFLTQGYEQDPVEILTSAMFKESYNEMVIVKDIELYSLCEHHILPFFGKVHIAYIPNGYIVGLSKLPRIVDVFARRLQVQERLTEQILDCINDTLKPQGVAVVIEASHMCMMMRGVQKQNSITTTSGFRGQFEKIETRNEFLKLIGK

SEQ ID NO: 9289 - protein, 224 aa, Jejuia pallidilutea
  REGION 1..224: note = tr|A0A090VTX8|A0A090VTX8_9FLAO GTP cyclohydrolase 1; OS = Jejuia pallidilutea OX=504487 GN=folE PE=3 SV=1
MKFDNLEDFDALGDEHIGSSENTPMRSDAFKLTNEEKIDIIKDDVRHIMETLGLDLTDDSLNGTPNRVAKMFVKEIFGGLDPKRKPSASTFENKYKYGEMLVEKNITVYSTCEHHLLPIVGRAHVAYISNGTVVGLSKMNRIVDYFAKRPQVQERLTIQIVKELQNVLNTKDVACVIDAKHLCVNSRGIRDIESSTVTSEFGGKFKDMATRREFLDYIQLDTQF

SEQ ID NO: 9290 - protein, 264 aa, Jeongeupia sp.
  REGION 1..264: note = tr|A0A1D9BHD0|A0A1D9BHD0_9NEIS GTP cyclohydrolase FolE2 OS=Jeongeupia sp. USM3 OX=1906741 GN=folE2 PE=3 SV=1
MNAPQSIPDVQSTPDLRNIAINKVGIKSIRHPVRVADRSEGVQHTVATFDMYVFLPQHFKGTHMSRFVEILNGHEREISVDSFETILRQMCERLEAEAGYLEMRFPYFINKTAPVSGVESLLDYDVALIGELKNGVFTQQLKVLVPVTSLCPCSKKISQYGAHNQRSHVTITATLGEHVWIEELVQIVEAEASCELYGLLKRPDEKFVTERAYENPKFVEDMVRDVAARLNADARVVAYTVESENFESIHNHSAYALIEHDKRG

SEQ ID NO: 9291 - protein, 204 aa, Jeotgalibacillus alimentarius
  REGION 1..204: note = tr|A0A0C2VYA3|A0A0C2VYA3_9BACL GTP cyclohydrolase 1; OS = Jeotgalibacillus alimentarius OX=135826 GN=folE PE=3; SV = 1
MDHTTENITTLNSNDTNRVDREKIQRAITMLLEAVGEDPSREGLLDTPKRVAKMYEEMFSGLNSDPKEYFKTVFNEDHEELVFVKDIPFHSMCEHHLVPFYGKAHVAYLPKDGKVTGLSKLARAVETTARRPQLQERITSTVADAIMEMLAPHGAYVIVEAEHMCMTMRGVKKPGAKTVTTAARGVYEEDHVLRNEVMTLLKMD

SEQ ID NO: 9292 - protein, 205 aa, Jeotgalibacillus campisalis
  REGION 1..205: note = tr|A0A0C2VGS6|A0A0C2VGS6_9BACL GTP cyclohydrolase 1; OS = Jeotgalibacillus campisalis OX=220754 GN=folE PE=3 SV=1
MDQNSKDQSVMTVNEEKNKVNRPQIEAAIRMLLEAVGEDPNREGLLDTPKRVAKMYEELFEGLHKDPREYFKTVFNEDHEELVFVKDIPFYSMCEHHLIPFFGKAHVAYLPKEGRVTGLSKLARAVETTARKPQLQERITSTVADSIMEMLSPHGAMVIVEAEHMCMTMRGVKKPGAMTITTAARGVFENDAIRRNEVLALMKNI

SEQ ID NO: 9293 - protein, 202 aa, unidentified
  source 1..202: note = Jeotgalibacillus malaysiensis
  REGION 1..202: note = tr|A0A0B5ATI4|A0A0B5ATI4_9BACL GTP cyclohydrolase 1; OS = Jeotgalibacillus malaysiensis OX=1508404 GN=folE PE=3; SV = 1
MDHTTEQLTTITDTGRVDREKIQKAITMLLEAVGEDPSREGLLDTPKRVAKMYEEMFSGLHSDPKEYFKTVFNEDHEELVFVKDIPFHSMCEHHLVPFYGKAHVAYLPKNGKVTGLSKLARAVETTARRPQLQERITSTVADAIMEMLAPHGAYVIVEAEHMCMTMRGVKKPGAKTVTTAARGVYEEDSVLRNEVMTLLKMD

SEQ ID NO: 9294 - protein, 190 aa, Jeotgalibacillus marinus; identical to SEQ ID NO: 5047
  REGION 1..190: note = tr|A0A0M0L385|A0A0M0L385_9BACL GTP cyclohydrolase 1; OS = Jeotgalibacillus marinus OX=86667 GN=folE PE=3 SV=1

SEQ ID NO: 9295 - protein, 304 aa, Jeotgalibacillus marinus; identical to SEQ ID NO: 5046
  REGION 1..304: note = tr|A0A0M0KY21|A0A0M0KY21_9BACL GTP cyclohydrolase FolE2 OS=Jeotgalibacillus marinus OX=86667 GN=folE2 PE=3; SV = 1

SEQ ID NO: 9296 - protein, 195 aa, unidentified
  source 1..195: note = Jeotgalibacillus proteolyticus
  REGION 1..195: note = tr|A0A2S5GFE7|A0A2S5GFE7_9BACL GTP cyclohydrolase 1; OS = Jeotgalibacillus proteolyticus OX=2082395 GN=folE PE=3; SV = 1
MTVNTEKNKVNRPQIEEAIRMLLEAVGEDPNREGLIDTPKRVAKMYEEVFEGLHIDPKEYFKTVFNEDHEELVFVKDIPFYSMCEHHLIPFYGKAHVAYLPKNGKVTGLSKLARAVETTARRPQLQERITSTVADGIMEMLAPHGAMVIVEAEHMCMTMRGVKKPGAMTVTTAARGVFEHDAVRRNEVLALMKMN

SEQ ID NO: 9297 - protein, 204 aa, Jeotgalibacillus salarius
  REGION 1..204: note = tr|A0A4Y8LNS2|A0A4Y8LNS2_9BACL GTP cyclohydrolase 1; OS = Jeotgalibacillus salarius OX=546023 GN=folE PE=3 SV=1
MDHTTEQLTTLTENNTGRVDREKIETAITMLLEAVGEDPSREGLLDTPKRVAKMYEEMFSGLHSDPKEYFKTVFNEDHEELVFVKDIPFHSMCEHHLVPFYGKAHVAYLPKDGKVTGLSKLARAVETTARRPQLQERITSTVADAIMDMLSPHGAYVIVEAEHMCMTMRGIKKPGAKTVTTAARGVYETDHVLRNEVMTLLKMD

SEQ ID NO: 9298 - protein, 208 aa, Jeotgalibacillus soli
  REGION 1..208: note = tr|A0A0C2V5B6|A0A0C2V5B6_9BACL GTP cyclohydrolase 1; OS = Jeotgalibacillus soli OX=889306 GN=folE PE=3 SV=1
MTHMKRTEDNKSTISDKEEKIYKVNLPQIEEAVRLILEAVGEDPNREGLLDTPKRVAKMYEEVFEGLHIDPKEYFKTVFNEEHEELVFVKDIPFYSICEHHLVPFYGKAHVAYLPKDGKVTGLSKLARAVEATARRPQLQERITSTVADAIMEMLSPHGAMVIVEAEHMCMTMRGVKKAGAMTITIASRGVFEEDSVKRNEVIALMKS

SEQ ID NO: 9299 - protein, 205 aa, Jeotgalibacillus sp.
  REGION 1..205: note = tr|A0A4V3B0X2|A0A4V3B0X2_9BACL GTP cyclohydrolase 1; OS = Jeotgalibacillus sp. S-D1 OX=2552189 GN=folE PE=3 SV=1
MDHTQENQTTVALTDQKNKVNRPKIEEAITMLLEAVGEDPTREGLLDTPKRVAKMYEEMFEGLHIDPKEYFNTVFNEDHEELVFVKDIPFYSMCEHHLVPFFGKAHVAYLPKDGKVTGLSKLARAVESTARRPQLQERITSTVADAIMEMLAPHGAMVIVEAEHMCMTMRGVKKPGAMTVTTAARGIFEKEAIRRNEVLALMKMR

SEQ ID NO: 9300 - protein, 304 aa, Jeotgalibacillus sp.
  REGION 1..304: note = tr|A0A4Y8L6B3|A0A4Y8L6B3_9BACL GTP cyclohydrolase FolE2 OS=Jeotgalibacillus sp. R-1-5s-1 OX=2555897 GN=folE2; PE = 3 SV=1
MNAMLNKALPTKEERHKQFGSVDKIKGTKPTDKEKMADLQNEKKDYYFAIDQVGISNIRYPVFIESERAPVFQQTEGIFKLTTSLPDSEKGINMSRLPEALHAFYEAQKPLTFETLRELTGDIAGRMKQEKAHIEVTFPWYTERKSPAMEVSGLHHTHVTLASSWQADGKRTESITMKAKVATLCPCSKEISEYSAHNQRGVVTVNMQFDSGQLPKSYKEDLLHILESNASAALYPILKRPDEKFVTEQAFENPRFVEDLIRLIASELYETGWVRAFEITCENQESIHLHDAYAHLKVDKERQR

SEQ ID NO: 9301 - protein, 292 aa, Jeotgalicoccus halophilus
  REGION 1..292: note = tr|A0A1G9AZS7|A0A1G9AZS7_9STAP GTP cyclohydrolase FolE2 OS=Jeotgalicoccus halophilus OX=586411 GN=folE2 PE=3; SV = 1
MEEFDLTTREGRFKHFGSVDPVEGTKPKNKEEMADLQNSRKDFLFEVDSVGINNLTYPVIIGDFQSVGTFELATSLQKDEKGINMSRLIESLETVNSSGVPLNFETIKNLLTTLRERMKQNSAELTASGKWFFNKMSPGTSLSAVAHADVFYSAAFDGDSFTRKQFGMTAQVTTLCPCSKEISEYSAHNQRGNVKVLIDIDDSVELPDTYKEDLYEILEINASSQLYPILKRTDEKMVTERAYENPRFVEDLIRLVAYDLVELDWVKGFELECRNEESIHQHDAFSRLTYQK

SEQ ID NO: 9302 - protein, 292 aa, Jeotgalicoccus halotolerans
  REGION 1..292: note = tr|A0A3E0AXB2|A0A3E0AXB2_9STAP GTP cyclohydrolase FolE2 OS=Jeotgalicoccus halotolerans OX=157227 GN=folE2; PE = 3 SV=1
MEEFDLTTREGRFKYFGSVDPVEGTKPKVKEDMADLQNSRKDFLFEVDSVGINNLSYPVVIGDFQSVGNFELATSLEKDEKGINMSRLIESLETVNSNGVPLDFDTIKELLSKLRDRMKQNSAELTVDGKWFFNKPAPGTGLNAVANADVVYSAAFDGESFTRKQFGMTAQVTTLCPCSKEISEYSAHNQRGNVKVLIDIDDSAELPATYKEDLYEILEINASSQLYPILKRTDEKMVTERAYENPRFVEDLIRLVAYDLVELDWVKGFELECRNEESIHQHDAFSRLKYQK

SEQ ID NO: 9303 - protein, 292 aa, Jeotgalicoccus nanhaiensis
  REGION 1..292: note = tr|A0A4Y9HHG8|A0A4Y9HHG8_9STAP GTP cyclohydrolase FolE2 OS=Jeotgalicoccus nanhaiensis OX=568603 GN=folE2; PE = 3 SV=1
MEEFDLTTREGRFKYFGSVDPIEGTKPKVKEDMADLQNSRKDFLFEVDSVGINNLSYPVVIGDFQSVGNFELATSLEKDEKGINMSRLIESLETVNSGGVPLDFDTIKELLSKLRGRMKQNSAELTVDGKWFFNKPSPGTGLNAVANADVVYSAAFDGESFTRKQFGMTAQVTTLCPCSKEISEYSAHNQRGNVKVLIDIDDSAELPATYKEDLYEILEINASSQLYPILKRTDEKMVTERAYENPRFVEDLIRLVAYDLVELDWVKGFELECRNEESIHQHDAFSRLKYQK

SEQ ID NO: 9304 - protein, 292 aa, unidentified
  source 1..292: note = Jeotgalicoccus saudimassiliensis
  REGION 1..292: note = tr|A0A078MDR5|A0A078MDR5_9STAP GTP cyclohydrolase FolE2 OS=Jeotgalicoccus saudimassiliensis OX=1461582; GN = folE2 PE=3 SV=1
MEEFDLTTREGRFKHFGSVDPVEGTKPKNKEDMADLQNSRKDFLFEVDSVGINNLTYPVVIGDFQSVGNFELATSLEKDEKGINMSRLIESLETVNSNGVPLNFDTIKELLTRLRDRMKQNSAELTVDGKWFFNKPSPGTGLDAIANADVVYSAEFDGEKFTRKQFGMTAQVTTLCPCSKEISEYSAHNQRGNVKVLIDIDDSVELPETYKEDLYEVLEINASSQLYPILKRTDEKMVTERAYENPRFVEDLIRLVAYDLVELDWVKGFELECRNEESIHQHDAFSRLKYQK

SEQ ID NO: 9305 - protein, 292 aa, Jeotgalicoccus sp.
  REGION 1..292: note = tr|A0A358JV24|A0A358JV24_9STAP GTP cyclohydrolase FolE2 OS=Jeotgalicoccus sp. OX=1871619 GN=folE2 PE=3 SV=1
MEEFDLTTREGRFKYFGSVDPVEGTKPKNKEDMADLQNSRKDFLFEVDSVGINNLTYPVVIGDFQSVGNFELATSLEKDEKGINMSRLIESLETVNNGGVALDFDTLKELLSKLRSNMKQNSAELTVDGTWFFNKPSPGTGLNAVANADIVYSAAFDGESFTRKQFGMTAQVTTLCPCSKEISEYSAHNQRGNVKVLIDIDDSVELPATYKEDLYEVLEINASSQLYPILKRTDEKMVTERAYENPRFVEDLIRLVAYDLVELDWVKGFELECRNEESIHQHDAFSRLKYQK

SEQ ID NO: 9306 - protein, 367 aa, Jhaorihella thermophila
  REGION 1..367: note = tr|A0A1H5W7T3|A0A1H5W7T3_9RHOB GTP cyclohydrolase FolE2 OS=Jhaorihella thermophila OX=488547 GN=folE2 PE=3; SV = 1
MNLQTRDIEKTPDQEAAAAALDLLRTWAATASPTEISNLDPAIARLLPGRAVSNYPDLSRDYPHEFDADHAYKATLPDLQNGPSSLIRGAKQHIEHVGISNFRLPIRFHTRDNGDVTLETSVTGTVSLDAEKKGINMSRIMRSFYRHAERTFSFEVMEHALDDYMTDLDSFDARIMMRFSFPMKVESLRSGLSGYQYYDIALELVDMGGVRQKFMHLDYVYSSTCPCSLELSEHARSQRGQLATPHSQRSVARISVQVNCDGPCLWFEDLIELSRRAVPTETQVMVKREDEQAFAELNAANPIFVEDAARLFCEQLRADPRIGDFRIVASHQESLHSHDAVSILTEGETFAATSLDPRLFSTLFHVG

SEQ ID NO: 9307 - protein, 199 aa, Jiangella alba
  REGION 1..199: note = tr|A0A1H5PF40|A0A1H5PF40_9ACTN GTP cyclohydrolase 1; OS = Jiangella alba OX=561176 GN=folE PE=3 SV=1
MNAEPVPTPPPGQFDHARVEAAVRELLVAIGEDPERDGLLDTPSRVARAYAEMFGGLHQDPADVLTTTFELGHDEMVLVKDIELASMCEHHLVPFYGFAHVGYIPGPSGRIAGLSKLARLVDVYAKRPQVQERLTSQVANSLVELLKPAGVIVVVEAEHLCMTMRGVRKPGAKTVTSAVRGQLRDATTRAEAMSLIIGH

SEQ ID NO: 9308 - protein, 199 aa, Jiangella alba
  REGION 1..199: note = tr|A0A1H5CNW3|A0A1H5CNW3_9ACTN GTP cyclohydrolase 1; OS = Jiangella alba OX=561176 GN=folE PE=3 SV=1
MDASTHLRVVHEPDDELDLEAAERAAADFLRALGVHADGEGMRRTPARMARAYAELFTPRPFDLTTFPNDEGYDELVLARDIPVRSVCEHHLLPFVGVAHVGYLPGERILGLSKLARIVEHFARRPQVQERLTKQVADWLGDRLAPKGVGVVVEAEHSCMVLRGVQAIGSTTVTSTLLGTLREDGRSRQEFFALSGVRA

SEQ ID NO: 9309 - protein, 209 aa, Jiangella alkaliphila
  REGION 1..209: note = tr|A0A1H2LDF7|A0A1H2LDF7_9ACTN GTP cyclohydrolase 1; OS = Jiangella alkaliphila OX=419479 GN=folE PE=3 SV=1
MTAAAARLAPAGVGTHRLRIVGARSEPDRPALVAAVADLLVALGRDPTDAHLAETPSRVADAYAELLTPRAFDLTTFPNDEGYDELVMARDIPIHSLCQHHLLPFHGVAHVGYLPGQRILGLSKLARVVELFARDLQVQERLTQQIANWLQDNLAPKGVGVVIEAEHLCMSLRGVRAAGARTVTSALHGALRDDDRSRQEFFALAVGAR

SEQ ID NO: 9310 - protein, 196 aa, Jiangella alkaliphila
  REGION 1..196: note = tr|A0A1H2GKF1|A0A1H2GKF1_9ACTN GTP cyclohydrolase 1; OS = Jiangella alkaliphila OX=419479 GN=folE PE=3 SV=1
MSREPVPPGQFDHARVEAAVRELLVAIGEDPKRDGLLDTPARVARAYEEMFNGLRQDPADVLTTTFELGHEEMVLVKDIELASMCEHHLVPFYGFAHVGYIPGPSGRIAGLSKLARLVDVFAKRPQVQERLTSQVANSLVDLLKPAGVIVVVEAEHLCMTMRGVRKPGAKTVTSAVRGQLRDATTRAEAMSLIIGR

SEQ ID NO: 9311 - protein, 202 aa, Jiangella sp.
  REGION 1..202: note = tr|A0A4R5ADJ8|A0A4R5ADJ8_9ACTN GTP cyclohydrolase 1; OS = Jiangella sp. 8K307 OX=2530373 GN=folE PE=3 SV=1
MRYVNAEPVLPVPPGRFDHARAEAAVRELLVAIGEDPDRDGLLDTPARVARAYAEMFRGLHQDPAEVLTTTFELGHDEMVLVKDIELASMCEHHLVPFYGYAHVGYIPGPSGRIAGLSKLARLVDVYAKRPQVQERLTSQVANSLVELLKPAGVIVVIEAEHLCMTMRGVRKPGAKTLTSAVRGQLRDATTRAEAMSLIIGR

SEQ ID NO: 9312 - protein, 202 aa, Jiangella sp.
  REGION 1..202: note = tr|A0A418KY62|A0A418KY62_9ACTN GTP cyclohydrolase 1; OS = Jiangella sp. NEAU-YY265 OX=2293569 GN=folE PE=3 SV=1
MRDVNAEPVLPEPPGQFDYARAEAAVRELLVAIGEDPDRDGLLDTPSRVARAYAEMFRGLHQDPADVLTTTFELGHDEMVLVKDIELASMCEHHLVPFYGYAHVGYIPGPSGRIAGLSKLARLVDVYAKRPQVQERLTSQVANSLVELLKPAGVIVVVEAEHLCMTMRGVRKPGAKTLTSAVRGQLRDATTRAEAMSLIIGR

SEQ ID NO: 9313 - protein, 205 aa, unidentified
  source 1..205: note = Jiella sp.
  REGION 1..205: note = tr|A0A4Y8RWA1|A0A4Y8RWA1_9RHIZ GTP cyclohydrolase 1; OS = Jiella sp. CBS5Q-3 OX=2558362 GN=folE PE=3 SV=1
MEAVVKKFPEKPDEAGRPSRAEAEAAVETLLRWIGENPGREGLKETPKRVVKAYEELFAGYGHGPGEVLGRVFEEVAGYNDIVLVKDIAFHTHCEHHMVPVIGKAHVAYLPDGRVLGLSKIARLVDMFGRRLQTQEAMTAQIADALNDTLKPRGVAVILEAEHLCMSMRGIRSHGSSTFTGTYRGSFADDVAEQDRVLRLVGLGG

SEQ ID NO: 9314 - protein, 219 aa, Jishengella endophytica
  REGION 1..219: note = tr|A0A2W2CKI4|A0A2W2CKI4_9ACTN GTP cyclohydrolase 1; OS = Jishengella endophytica OX=515350 GN=folE PE=3 SV=1
MAASATEPDDVLDYIAARLVNGRLTGRPVEDAIDLARIEKAVREILIAVGENPDRDGLQQTPARVARAYAELFAGLRVDPATVLTTTFEANHEELVLVRDIDVMSLCEHHLLPFRGSAHIGYIPGPDGRITGLSKLARLVEVFARRPQVQERLTVQIADLLMERLSPRGVVVVLECEHMCMAMRGIQKSGAKTITSAVRGTLQRDAKSRAEAMALIIPR

SEQ ID NO: 9315 - protein, 205 aa, Jishengella sp.
  REGION 1..205: note = tr|A0A2W2DR73|A0A2W2DR73_9ACTN GTP cyclohydrolase 1; OS = Jishengella sp. NA12 OX=1655439 GN=folE PE=3 SV=1
MAARLVNGRLTGRPVEDAMDLGRIEKAVREILIAVGEDPDRDGLQQTPARVARAYAELFAGLRVDPATVLTTTFEANHEELVLVRDIDVMSLCEHHLLPFRGSAHIGYIPGPDGRITGLSKLARLVEVFARRPQVQERLTSQIADLLMERLAPRGVVVVLECEHMCMAMRGIQKAGAKTITSAVRGTLQRDAKSRAEAMALIIHR

SEQ ID NO: 9316 - protein, 236 aa, unidentified
  source 1..236: note = Jiulongibacter sediminis
  REGION 1..236: note = tr|A0A0P7BQF1|A0A0P7BQF1_9BACT GTP cyclohydrolase 1; OS = Jiulongibacter sediminis OX=1605367 GN=folE PE=3 SV=1
MKLKETMSSTQHNDRKVDEIGDDHISSNIFDTPLRPDAFEMDDETKMAKIEEHFREIMHIMGLDLADDSLNGTPRRVAKMYVKELFSGLNPKNLPSLTHFKNHYKYKDMLVERDIMFHSNCEHHFVPIVGKAHVAYIANGHVIGLSKLHRIVNHFARRPQVQERMTIQIGEALKTVLGTESVAVILDADHMCVSSRGINDQTSSTVTSFYGGEFNNTDTRTEFIKMVGLRQNGMKY

SEQ ID NO: 9317 - protein, 200 aa, Jonesia denitrificans
  REGION 1..200: note = tr|C7R116|C7R116_JONDD GTP cyclohydrolase 1; OS = Jonesia denitrificans (strain ATCC 14870 / DSM 20603 / CIP 55134) OX=471856 GN=folE PE=3 SV=1
MTSPRDPLAGVPGEVDLDRAAAAVRELLTAVGEDPDREGLRDTPRRVAKAYAEVFAGLRQNPTDVLNTVFDIGHDEMILVRDIDVYSTCEHHLVPFHGVAHVGYIPGEDGRVTGLSKLARLVDVYAKRPQVQERLTTQIADSLVDVLHPRGVIVVVECEHLCMTMRGVRKPGARTITSAVRGQLRDPATRAEAMSLIVGK

SEQ ID NO: 9318 - protein, 198 aa, Joostella marina
  REGION 1..198: note = tr|I3C9X2|I3C9X2_9FLAO GTP cyclohydrolase 1; OS = Joostella marina DSM 19592 OX=926559 GN=folE PE=3 SV=1
MAYKTFEEYNIETTETIRNQYENIISEIGEDTAREGLLKTPERASKAMQFLTQGYQQNAAEILKGAMFKEDYNEMVIVKDIELYSLCEHHLLPFFGKAHIAYIPNGYIVGLSKLPRIVDVYARRLQVQERLTHDILECINSTLKPQGVAVVIEASHMCMMMRGVQKQNSVTTTSGFRGQFEKIETRNEFLKLISSDLG

SEQ ID NO: 9319 - protein, 226 aa, Joostella marina
  REGION 1..226: note = tr|I3C697|I3C697_9FLAO GTP cyclohydrolase 1; OS = Joostella marina DSM 19592 OX=926559 GN=folE PE=3 SV=1
MKIDKALEDHFEELGNDHVSSAAETPMRKDAFDISDDEKIEQIESQVYNIMETLGLDLTDDSLRGTPRRVAKMFVKEIFAGLHPDRKPKASTFSNKYKYGEMLVEKNITVYSTCEHHLLPIVGRAHIAYISNGSVVGLSKMNRIVDYYAKRPQVQERMTMQVVQELQRALGTKDVACVIDAKHLCVNSRGIRDIESSTVTAEFGGKFKDPAVRREFLDYIKLDTEF

SEQ ID NO: 9320 - protein, 208 aa, unidentified
  source 1..208: note = Kaistia algarum
  REGION 1..208: note = tr|A0A2S5TT86|A0A2S5TT86_9RHIZ GTP cyclohydrolase 1; OS = Kaistia algarum OX=2083279 GN=folE PE=3 SV=1
MDAKIETSKPREPEPRAAPVRPSQAEAEAAVRTLIAFAGDDPSREGLIETPARVAKAFREFYCGYEQNPTDTLDRVFDEAGGYDDMVLVRDIPFYSHCEHHMVPFIGKAHIAYFPDGGVVGLSKLARVVDIFARRLQMQERLTAEIAAAVDDGLRPRGVAVLLEAEHHCVSMRGAEKSGVSTVTTRFTGVFKTDAAERVRFLALANRR

SEQ ID NO: 9321 - protein, 206 aa, Kaistia soli
  REGION 1..206: note = tr|A0A1M5AKD7|A0A1M5AKD7_9RHIZ GTP cyclohydrolase 1; OS = Kaistia soli DSM 19436 OX=1122133 GN=folE PE=3 SV=1
MDAKTPPQLKYAPRAAERPSAAEAEAAVRTLIAYAGDDPDREGLLETPARVAKAYREFYSGYEEDPAAILDRVFDEAGGYDDFVLLRDIPFHSHCEHHMVPFIGKAHIAYLPNGGVVGLSKLARLVDAYARRLQMQERLTQQIADAIEIGLAPHGVAVLIEAEHHCVSMRGARKSGVSTVTTSFKGVFKTDPAERARFLQLVEGRR

SEQ ID NO: 9322 - protein, 210 aa, Kaistia sp.
  REGION 1..210: note = tr|A0A1E4CY63|A0A1E4CY63_9RHIZ GTP cyclohydrolase 1; OS = Kaistia sp. SCN 65-12 OX=1660103 GN=folE PE=3 SV=1
MDAVIKKFSSPAPQPAKPADRPSQAEVEAAVRVLLRWTGDDPDREGLVDTPKRVAKAYREMFSGYAMDPADELGRTFEEVAGYDDLVIVKDIEFHSHCEHHMVPIIGKAHVGYLPDRKVVGLSKIIRVVEIFAHRLQTQEAMTAQIAGAIQDVLNPRGVAVILEAEHMCIAMRGIRKQGSTTLTSTFTGSFKDNPEEQARFIGMIRNAVK

SEQ ID NO: 9323 - protein, 221 aa, unidentified
  source 1..221: note = Kalamiella piersonii
  REGION 1..221: note = tr|A0A3A9IV10|A0A3A9IV10_9GAMM GTP cyclohydrolase 1; OS = Kalamiella piersonii OX=2364647 GN=folE PE=3 SV=1
MSTLSQEAILVHEALLARGLETPLRAPTREMDDETRKRLIAGHMTEVMQLLNLDLEDDSLMETPHRIAKMYVDEVFSGLDYANFPKITVIENKMKVDEMVTVRDITLTSTCEHHFVIIDGKATVAYIPKDKVIGLSKINRIVQFFAQRPQVQERLTQQVLVALQTLLGTNNVAVSIDAVHYCVKARGVKDATSATTTTSLGGLFKSSQNTRQEFLRAVRHI

SEQ ID NO: 9324 - protein, 188 aa, Kandleria vitulina
  REGION 1..188: note = tr|A0A0R2HJW8|A0A0R2HJW8_9FIRM GTP cyclohydrolase 1; OS = Kandleria vitulina DSM 20405 OX=1410657 GN=folE PE=3; SV = 1
MIDTKAIEEHIRGILIALGDDPDREGLKETPQRVARMYEEVFEGMNYTNHEIAEMFNKTFEEDLNEHNQDIVFVKDIDAFSYCEHHMALMYDMKISVAYIPNGKVIGLSKIARICDMVTKRLQLQERIGSDIADIISEVTGSEDVAVFIEAKHSCMSARGIRNTGAKTYSRTLRGRFEKEPYLLGGMM

SEQ ID NO: 9325 - protein, 188 aa, Kandleria vitulina
  REGION 1..188: note = tr|A0A1H2Q9X3|A0A1H2Q9X3_9FIRM GTP cyclohydrolase 1; OS = Kandleria vitulina OX=1630 GN=folE PE=3 SV=1
MIDTKAIEEHIRGILIALGDDPDREGLKETPQRVARMYEEVFEGMNYTNHEIAGMFNKTFEENLNEHNQDIVFVKDIDAFSYCEHHMALMYDMKISVAYIPNGKVIGLSKIARICDMVTKRLQLQERIGSDIADIISEVTGSEDVAVFIEAKHSCMSARGIRNTGAKTYSRTLRGRFEKEPYLLGGMI

SEQ ID NO: 9326 - protein, 185 aa, Kangiella geojedonensis
  REGION 1..185: note = tr|A0A0F6TPR4|A0A0F6TPR4_9GAMM GTP cyclohydrolase 1; OS = Kangiella geojedonensis OX=914150 GN=folE PE=3 SV=1
MSDKLANLYKDVLVELGEDISRNGILDTPTRAAKAMQFLTQGYEQDLNTVVNGAIFDSDNDSMVIVKDIELYSMCEHHMLPFIGKAHVGYLPTGKVIGLSKIARIVDMFARRLQIQENLTKQIAEAIQEVTGASGVGVIIEAKHMCMMMRGVEKQNSVMTSSTMLGQFRSSQNTRNEFLTLIEKK

SEQ ID NO: 9327 - protein, 306 aa, Kangiella geojedonensis
  REGION 1..306: note = tr|A0A0F6RC20|A0A0F6RC20_9GAMM GTP cyclohydrolase FolE2 OS=Kangiella geojedonensis OX=914150 GN=folE2 PE=3; SV = 1
MIKEQLPDITSDTSSQKSYSLRWVGMEGIAVPLHLSDKDAVGQVINSSTSIYVSLDSVESKGIHMSRLHKNINQLSTLKLAKQSLDKLLRSAIKSQEGISCNAKVRLEFDVTFEKSSLLSKNSGYQSYPVAINGEASLDNTDYEYELTIPYSSTCPCSAALARQLYSQQIDQRFEGESISKQELLNWVQSAQNSFATPHSQRSYAYLKLKLKQGELLSLKSLITVLEDVIGTPVQTVVKRVDEQEFARLNGQNLMFCEDAARKLKQYLEQNDSIVDYWIKVEHQESLHAHNAVVMDQKQQVLDTKL

SEQ ID NO: 9328 - protein, 185 aa, Kangiella koreensis
  REGION 1..185: note = tr|C7RAU3|C7RAU3_KANKD GTP cyclohydrolase 1; OS = Kangiella koreensis (strain DSM 16069 / KCTC 12182 / SW-125) OX=523791 GN=folE PE=3 SV=1
MSDKLENLYREILVEIGEDISRNGILDTPKRAAKAMKFLTHGYEQDLNEVVNGAIFDSDNDAMVIVKDIELYSMCEHHILPFIGKVHVGYLPTGKVIGLSKIARIVDMFARRLQIQENLTKQIAHAVQDVTGASGVGVIVEAKHMCMMMRGVEKQNSVMTSSTMLGQFRTSQNTRQEFLTLIEKR

SEQ ID NO: 9329 - protein, 185 aa, unidentified
  source 1..185: note = Kangiella profundi
  REGION 1..185: note = tr|A0A2K9AFI5|A0A2K9AFI5_9GAMM GTP cyclohydrolase 1; OS = Kangiella profundi OX=1561924 GN=folE PE=3 SV=1
MSDKLENLYREILVEIGEDISRNGILDTPKRAAKAMKFLTHGYEQDLDEVVNGAIFDSDNDAMVIVKDIELYSMCEHHILPFIGKVHVGYLPTGKVIGLSKIARIVDMFARRLQIQENLTKQIAHAVQDVTGAAGVGVIVEAKHMCMMMRGVEKQNSVMTSSTMLGQFRSSQNTRNEFLTLIEKR

SEQ ID NO: 9330 - protein, 184 aa, unidentified
  source 1..184: note = Kangiella sediminilitoris
  REGION 1..184: note = tr|A0A1B3B9S3|A0A1B3B9S3_9GAMM GTP cyclohydrolase 1; OS = Kangiella sediminilitoris OX=1144748 GN=folE PE=3 SV=1
MSDKLANLYKEVLVELGEDVSRNGILDTPTRAAKAMQFLTQGYEQDLNTVVNGAIFDSDNDSMVIVKNIELYSMCEHHMLPFIGKAHVGYLPTGKVIGLSKIARIVDMFARRLQIQENLTKQIAEAIQEVTGASGVGVIIEAKHMCMMMRGVEKQNSVMQSSTMLGQFRSSQNTRNEFLTLIEK

SEQ ID NO: 9331 - protein, 184 aa, Kangiella sp.
  REGION 1..184: note = tr|A0A3D8UQL2|A0A3D8UQL2_9GAMM GTP cyclohydrolase 1; OS = Kangiella sp. HD9-110m-PIT-SAG07 OX=2283595 GN=folE; PE = 3 SV=1
MSDKLANLYKDVLVELGEDVSRNGILDTPTRAAKAMQFLTQGYEQDLNTVVNGAIFDSDNDSMVIVKDIELYSMCEHHMLPFIGKAHVGYLPTGKVIGLSKIARIVDMFARRLQIQENLTKQIAEAIQDVTGAAGVGVIIEAKHMCMMMRGVEKQNSVMTSSTMLGQFRSSQNTRNEFLTLIEK

SEQ ID NO: 9332 - protein, 184 aa, Kangiella sp.
  REGION 1..184: note = tr|A0A2G2KYW2|A0A2G2KYW2_9GAMM GTP cyclohydrolase 1; OS = Kangiella sp. OX=1920245 GN=folE PE=3 SV=1
MSDNLEKHYSNILTDLGEDISRDGLIDTPKRAAKAMKFLTQGYDLCLNDVVNNAIFESDNDDMVIVKDIELYSLCEHHMLPFIGKCHVAYLPTGKVLGLSKIARIVDMFARRLQIQENMTKQIAEAIMKVTNAAGVGVIMEAKHMCMMMRGVEKQNSAMITSVMLGAFRKKPATRAEFLNLVKN

SEQ ID NO: 9333 - protein, 185 aa, Kangiella spongicola
  REGION 1..185: note = tr|A0A318D0G8|A0A318D0G8_9GAMM GTP cyclohydrolase 1; OS = Kangiella spongicola OX=796379 GN=folE PE=3 SV=1
MSDKLESLYKDVLVELGEDISRNGILDTPKRAAKAMKFLTQGYEQDLNTVVNNAIFDSDNDSMVIVKDIELYSMCEHHMLPFIGKAHVGYLPTGKVIGLSKIARIVDMFARRLQIQENLTKQIAEAIQDVTGASGVGVIIEAKHMCMMMRGVEKQNSVMTSSTMLGQFRSSQNTRNEFLTLIEKK

SEQ ID NO: 9334 - protein, 205 aa, unidentified
  source 1..205: note = Kangiellaceae bacterium
  REGION 1..205: note = tr|A0A2E2VS78|A0A2E2VS78_9GAMM GTP cyclohydrolase 1; OS = Kangiellaceae bacterium OX=2026751 GN=folE PE=3 SV=1
MSKPSADKITVISDHNHGLEQAYTNILTDIGEDTKREGLVDTPKRAAKAIRYLTGGYEQSLDDVINGAVFSSDNDNMVLVKNIEFFSQCEHHMLPFLGYCHVAYYPNGKVLGLSKLARIVDMYARRLQIQENLSKQIADAINDILKPRGVAVQMTAIHMCMMMRGVEKHSSETTTSALVGEFKSSEAARQEFLQQIGPHNKPIFG

SEQ ID NO: 9335 - protein, 256 aa, unidentified
  source 1..256: note = Keratinibaculum paraultunense
  REGION 1..256: note = tr|A0A4R3L209|A0A4R3L209_9CLOT GTP cyclohydrolase FolE2 OS=Keratinibaculum paraultunense OX=1278232 GN=folE2; PE = 3 SV=1
MIDIQKEIDTRDIALKNVGIKDFKWPILVLDRENKNQRTIANIDASVGLCHNIKGTHMSRFVEIIKEIKEVSPKTIEEILENMMVKLDSKSAYMKIEFDYFIKKVSPVTEIEALSDIKCRYEASKEEQFKLLMGVTIPVITLCPCSKAISKFGAHNQRAIVDILVDMNSLVWIEEMVEIAEESASSPVYPLLKRKDEKHVTEQSYLKPRFVEDVVREVALRLERNKRIDWYSVKVESIESIHNHTAFAYTEKGYIL

SEQ ID NO: 9336 - protein, 271 aa, Kerstersia gyiorum
  REGION 1..271: note = tr|A0A171KUU5|A0A171KUU5_9BURK GTP cyclohydrolase FolE2 OS=Kerstersia gyiorum OX=206506 GN=folE2 PE=3 SV=1
MTSIVESAVVIPDVQSFADVRQIPIQRVGISGVRHPMVVADGSGAAHPTVAEWTLTVALPAEEKGTHMSRFVALLEKYRATPLTPALFSAMAGEMLPLLHAQSGDITASFPYFINKTAPVSGVRSLLDYAVVWTARANGDAVEFELTVTVPVTSLCPCSKSISKYGAHNQRSHVTVRTIVTDGAAFNLDDFISQIEKQGSCELWGLLKRPDEKYVTEHAYENPKFVEDIVRDVAATLNAYAGIAGYRVTVENFESIHNHSAYAVVEGHGKG

SEQ ID NO: 9337 - protein, 271 aa, Kerstersia gyiorum
  REGION 1..271: note = tr|A0A4Q7MSI1|A0A4Q7MSI1_9BURK GTP cyclohydrolase FolE2 OS=Kerstersia gyiorum OX=206506 GN=folE2 PE=3 SV=1
MTSIVESAVVIPDVQSFADVRQIPIQRVGISGVRHPMVVADGSGAAHPTVAEWTLTVALPAEEKGTHMSRFVALLEKYRATPLTPALFSAMAGEMLPLLHAQSGDITASFPYFINKTAPVSGVRSLLDYAVVWTARANGDAVEFELTVTVPVTSLCPCSKSISKYGAHNQRSHVTVRTIVTDGAAFNLDDFISQIEKQGSCELWGLLKRPDEKYVTEHAYENPKFVEDIVRDVAATLNAHAGIAGYRVTVENFESIHNHSAYAVVEGHGKG

SEQ ID NO: 9338 - protein, 305 aa, unidentified
  source 1..305: note = Ketobacter alkanivorans
  REGION 1..305: note = tr|A0A2K9LRU6|A0A2K9LRU6_9GAMM GTP cyclohydrolase FolE2 OS=Ketobacter alkanivorans OX=1917421 GN=folE2 PE=3; SV = 1
MPDIATVSQPKAPGLLDWVGMSEIEVPLSIPTRNGSVAHAVAKAQAYVNLINPEAKGIHMSRLYLLLDELCSQTLTAHSLRDVLARFLESHEGLSDQAFVDFRFDFLARRPALKSEFSGWKAYPARIIATEDPEGFHFELRVEIPYSSTCPCSAALARQLIQKQFREDFGADQQVSADDVYGWLGTEQGIVATPHSQRSIAEIKVRLSDDTDDFPLEDLIDVVEGALKTPVQTAVKREDEQEFALLNGQNLMFCEDAARKIQAAMNDQVSYQDFWVRVNHLESLHAHNAVAIVTKGLKGGYLPQP

SEQ ID NO: 9339 - protein, 305 aa, unidentified
  source 1..305: note = Ketobacter sp.
  REGION 1..305: note = tr|A0A3F2UY05|A0A3F2UY05_9GAMM GTP cyclohydrolase FolE2 OS=Ketobacter sp. OX=2083498 GN=folE2 PE=3 SV=1
MPDIAVASQAKASVALDWVGMSEIDVPLAIPTRNGAVAHAVAKAQAYVNLINPEAKGIHMSRLYLLLDEVCSQTMTARGLRDILRRFLESHEGLSDQAFVDFRFEFLARRPALKSEFSGWKAYPARIVASESPEGFQFELHVEIPYSSTCPCSAALARQLIQQQFRKDFAGHDPISAEEVHGWLGTEQGIVATPHSQRSVAEIKVQLSEDTDDFPLEELIDVVEDALKTPVQTAVKREDEQEFALLNGQNLMFCEDAARRIQTVLNEHESYQDFWLRVNHLESLHAHNAVAIVSKGIKGGYLPKP

SEQ ID NO: 9340 - protein, 181 aa, unidentified
  source 1..181: note = Ketobacter sp.
  REGION 1..181: note = tr|A0A3L8BIL0|A0A3L8BIL0_9GAMM GTP cyclohydrolase 1; OS = Ketobacter sp. OX=2083498 GN=folE PE=3 SV=1
MKENFAAIITAIGEDLTRPGLEKTPERAAKAFEYLTRGYHQQLDDVINNALFPSDASEMVVVKDIELYSMCEHHLLPFIGRAHVAYIPSGKVLGLSKVARIVDMYARRLQIQEQLTTQIAETIQDVVGAAGVGVVVEAQHMCMMMRGVEKQNSVMKTSAMLGTFRDNQATRYEFLSLINAR

SEQ ID NO: 9341 - protein, 199 aa, Kibdelosporangium aridum
  REGION 1..199: note = tr|A0A1Y5Y1D4|A0A1Y5Y1D4_KIBAR GTP cyclohydrolase 1; OS = Kibdelosporangium aridum OX=2030 GN=folE PE=3 SV=1
MRAGTALRVVHEPDTGVDIAAAEDAAAAFLRALGVSTDTESLRGTPGRMARAYAELFSPRPFDLTTFPNDEGYDELVLARAIPVRSVCEHHLLPFVGTAHVGYLPGERILGLSKLARIVEYFACRPQVQERLTKQVADWLNDHLNPRGVGVVIEAEHTCMTLRGVLASGSTTVTSTLLGSLREDVRSRQEFFALSGVHI

SEQ ID NO: 9342 - protein, 203 aa, Kibdelosporangium aridum
  REGION 1..203: note = tr|A0A1W2DRM5|A0A1W2DRM5_KIBAR GTP cyclohydrolase 1; OS = Kibdelosporangium aridum OX=2030 GN=folE PE=3 SV=1
MGAASSDGVRSVRPVFDQARAEKAVRELLLACGEDPDRDGLADTPARVARAYREMFAGLYMDPDAVLAKTFDESHEELVLVTDIPMYSTCEHHLVPFHGVAHVGYIPNEGGKVTGLSKLARLVDAYAKRPQVQERLTSQIADALMRKLEPRGVIVVVEAEHLCMSMRGIRKPGARTTTSAVRGQFKTSASSRAEALDLIKARR

SEQ ID NO: 9343 - protein, 198 aa, unidentified
  source 1..198: note = Kibdelosporangium phytohabitans
  REGION 1..198: note = tr|A0A0N9HSS1|A0A0N9HSS1_9PSEU GTP cyclohydrolase 1; OS = Kibdelosporangium phytohabitans OX=860235 GN=folE PE=3; SV = 1
MDGARSVRPVFDQARAERAVRELLLACGEDPDREGLAETPARVARAYREMFAGLYMDPDTVLAKTFDESHEELVMVTDIPMYSCCEHHLLPFHGVAHVGYIPNEHGKVTGLSKLARLVDAYAKRPQVQERLTSQIADSLMRTLQPRGVIVVMEAEHLCMSMRGIRKPGARTTTSAVRGQFKTSASSRAEALDLIKARR

SEQ ID NO: 9344 - protein, 196 aa, unidentified
  source 1..196: note = Kibdelosporangium phytohabitans
  REGION 1..196: note = tr|A0A0N9HX76|A0A0N9HX76_9PSEU GTP cyclohydrolase 1; OS = Kibdelosporangium phytohabitans OX=860235 GN=folE PE=3; SV = 1
MTLTDQALELDIRARAEDGVRALLELAGDDPDRAGLARTPARFVDAMLEMTAAPGDPAQFLAVQFEDVGQVDEMVHLGPIPFTSVCEHHILPFTGHAWVAYLPTAGRVVGLSKLARLVEHYARQLQVQERLTGQIVDTLIKHLDPRGAGVVLRATHACMAQRGISKPDAVMTTSALRRAFREQPAARAEFLSFATP

SEQ ID NO: 9345 - protein, 199 aa, Kibdelosporangium sp.
  REGION 1..199: note = tr|A0A0K3BKQ8|A0A0K3BKQ8_9PSEU GTP cyclohydrolase 1; OS = Kibdelosporangium sp. MJ126-NF4 OX=703222 GN=folE PE=3; SV = 1
MRAGTALRVVHEPDSGIDLAAAEDAAAAFLRALGVSTDTESLRGTPGRMARAYAELFSPRPFDLTTFPNDEGYDELVLARAIPVRSVCEHHLLPFMGTAHVGYLPGERILGLSKLARIVEYFASRPQVQERLTKQVADWLDDHLRPRGVGVVIEAEHTCMTLRGVLASGSTTVTSTLLGSLRDDARSRQEFFALSGVHA

SEQ ID NO: 9346 - protein, 179 aa, Kibdelosporangium sp.
  REGION 1..179: note = tr|A0A0K3BEZ1|A0A0K3BEZ1_9PSEU GTP cyclohydrolase 1; OS = Kibdelosporangium sp. MJ126-NF4 OX=703222 GN=folE PE=3; SV = 1
MRELLLACGEDPDRQGLAETPARVARAYREMFAGLYMDPDMVLAKTFDEAHEELVLVTDIPMYSTCEHHLVPFHGVAHVGYIPNEHGKVTGLSKLARLVDAFAKRPQVQERLTSQVADSLMRMLEPRGVIVVMEAEHLCMSMRGIRKPGARTTTSAVRGQFKTSASSRAEALDLIKARR

SEQ ID NO: 9347 - protein, 205 aa, unidentified
  source 1..205: note = Kiloniella litopenaei
  REGION 1..205: note = tr|A0A0M2R8A5|A0A0M2R8A5_9PROT GTP cyclohydrolase 1; OS = Kiloniella litopenaei OX=1549748 GN=folE PE=3 SV=1
MQSVSDKDSKVIRPSRDEALAAVETLLRWAGDDPTREGLLGTPDRVVRSYEEFFAGYNIEPRELLERTFEEVEGYDEIVLLRDIRFESHCEHHMAPIIGKAHVAYLPNNRVVGISKLARVIEAYAKRLQIQEKMTAQVANAINEVLQPKGVAVVIEAAHQCMTTRGVHKSGVTMVTSRMLGLFRTNPSTRREFLSLIGNPSSSAS

SEQ ID NO: 9348 - protein, 203 aa, unidentified
  source 1..203: note = Kiloniella litopenaei
  REGION 1..203: note = tr|A0A0M2RBR3|A0A0M2RBR3_9PROT GTP cyclohydrolase 1; OS = Kiloniella litopenaei OX=1549748 GN=folE PE=3 SV=1
MTKVAKPNVSSEHQNSPSREEAMQAVKTLISWAGDDPNREGLIDTPKRVINAYKEFFAGYGMNPDEILARTFEEVEGYDEMVIIKNVRLESHCEHHIVPILGKAHVAYIPDKRVVGISKLARLVDVYAKRLQTQETLTAQIADTLERVLKPRGVAVVIDAGHQCMTTRGIHKTETSTVTSRMLGLFRKDPRTRAEFMNLITKI

SEQ ID NO: 9349 - protein, 222 aa, Kiloniella sp.
  REGION 1..222: note = tr|A0A2D7AIJ1|A0A2D7AIJ1_9PROT GTP cyclohydrolase 1; OS = Kiloniella sp. OX=1938587 GN=folE PE=3 SV=1
MAPHESAAFFDADRDQVEETGEVVSPDNVVPIKGPEQPNRTEAEAAVKTLIAYTGEDAERPGVIETPKRVVKAFDEWFGGYQIDADTLLSKTFDEVEGYQDMVLLRDVPFHSHCEHHMAPIVGKAHVAYMPRGRVVGISKLARVVDAFARRFQIQERMTQEVAQTIDRVLQPAGVAVVIEAEHHCMTTRGIHTHGTVMHTKHLSGVFLEDPNLRREFFDALR

SEQ ID NO: 9350 - protein, 202 aa, unidentified
  source 1..202: note = Kiloniella spongiae
  REGION 1..202: note = tr|A0A0H2MFG6|A0A0H2MFG6_9PROT GTP cyclohydrolase 1; OS = Kiloniella spongiae OX=1489064 GN=folE PE=3 SV=1
MSDKDSKVIRPSRDEALAAVETLLRWAGDDPTREGLLGTPDRVVRSYEEFFAGYNVEPRELLERTFEEVEGYDEIVLLRDIRFESHCEHHMAPIIGKAHVAYLPNNRVVGISKLARVIEAYAKRLQIQEKMTAQVANAINEVLQPKGVAVVIEAAHQCMTTRGVHKSGVTMVTSRMLGLFRTNPSTRREFLSLIGNPSSSAS

SEQ ID NO: 9351 - protein, 205 aa, Kineococcus radiotolerans
  REGION 1..205: note = tr|A6W5D9|A6W5D9_KINRD GTP cyclohydrolase 1; OS = Kineococcus radiotolerans (strain ATCC BAA-149 / DSM 14245 / SRS30216) OX=266940 GN=folE PE=3 SV=1
MSTSGAPVPDARTVPGVHDGPRAEAAVREFLLAIGEDPDREGLRETPARVARAAQELFAGLRQDPADVLATDFGLEHDELVLVKDIEVQSTCEHHLLPFHGVAHVGYIPGEHGRVTGLSKLARLVDVYARRPQLQERLTTQVADALVDGLHPRGVIVVVEAEHSCMTYRGVRKPGAKTITSAVRGALRNPATRAEAMSLIVAGHR

SEQ ID NO: 9352 - protein, 198 aa, Kineococcus rhizosphaerae
  REGION 1..198: note = tr|A0A2T0R5K2|A0A2T0R5K2_9ACTN GTP cyclohydrolase 1; OS = Kineococcus rhizosphaerae OX=559628 GN=folE PE=3 SV=1
MSDAPPVPGTFDRARAENAVREFLLAIGEDPDREGLRDTPQRVAKAATELFAGLWLEPADVLVTDFGLEHDELVLVKDIEVQSTCEHHLLPFHGVAHVGYIPGEHGRVTGLSKLARLVDVYARRPQLQERLTTQVADALVDHLRPRGAIVVVEAEHSCMTYRGVRKPGAKTVTSAVRGALRNAATRAEAMSLIVAGHR

SEQ ID NO: 9353 - protein, 177 aa, Kineococcus xinjiangensis
  REGION 1..177: note = tr|A0A2S6IGV7|A0A2S6IGV7_9ACTN GTP cyclohydrolase 1; OS = Kineococcus xinjiangensis OX=512762 GN=folE PE=3 SV=1
MRELLLAIGEDPDREGLRDTPQRVARAYREMFAGLWQDPTDVLVTDFGLEHDELVLVRDIEVQSMCEHHLLPFHGVAHVGYIPGEHGRVTGLSKLARLVDLYARRPQLQEQLTTQVADALMSRLHPRGAIVVVECEHFCMSYRGVRKDGARTVTSAVRGALRNPATRAEAMSLIVGR

SEQ ID NO: 9354 - protein, 197 aa, Kineosphaera limosa
  REGION 1..197: note = tr|K6X0U2|K6X0U2_9MICO GTP cyclohydrolase 1; OS = Kineosphaera limosa NBRC 100340 OX=1184609 GN=folE PE=3; SV = 1
MTELTQPSPVDQPRIEAAVREILLAVGENPEREGLRDTPARVARAYAEIFSGLHMDPAEVLGTRFEIEHDELVLVRDIELYSTCEHHLVPFHGVAHIAYIPDRNGRVTGLSKLARLVEVYARRPQVQERLTSQVADALVDHLDAQGVLVVLECEHLCMSMRGVRKPGARTITSAVRGILHRPETRAEAMSLVLGGTR

SEQ ID NO: 9355 - protein, 185 aa, unidentified
  source 1..185: note = Kineothrix alysoides
  REGION 1..185: note = tr|A0A4R1QQ85|A0A4R1QQ85_9FIRM GTP cyclohydrolase 1; OS = Kineothrix alysoides OX=1469948 GN=folE PE=3 SV=1
MVNRKKIEEGVRLLLEGIGEDVTREGIADTPDRIARMYEEIFGGMEENAAEHLTKTFTAENNEMVIEKDIVFYSTCEHHMMPFYGKAHVAYIPDGKVTGISKLARTVEVYAKRLQIQEQMTAQIADAIMEYLNPQGVMVMIEAEHMCMTMRGVKKPGSKTVTFVTRGAFEENERLQNIFFQMIKQ

SEQ ID NO: 9356 - protein, 314 aa, Kingella denitrificans
  REGION 1..314: note = tr|F0EZT4|F0EZT4_9NEIS GTP cyclohydrolase FolE2; OS = Kingella denitrificans ATCC 33394 OX=888741 GN=folE2; PE = 3 SV=1
MPKYGEVIYCALLKTVAILICRKQEVQAAFNSIQNLCRIERYGCGALVHTNEELYGMNAIADVQSSQDLRNIPIDQVGIKDLRFPIRIQSQSGEQSTVARLTMTVFLPADQKGTHMSRFVALMEEQQAAFSAAELQRLTEKMLARLDSDAGKISASFPFFRTKTAPVSGIRSLLDYDVSLSCEIRNGAAKSSLHVVVPVTSLCPCSKEISQYGAHNQRSHVTVRLHTNAPVEIEEVLDWVEGQASCQLYGLLKRPDEKYVTERAYDNPKFVEDMVRDIALILQQDARIESFELESENFESIHNHSAYAVICWQR

SEQ ID NO: 9357 - protein, 310 aa, Kingella kingae
  REGION 1..310: note = tr|F5S821|F5S821_9NEIS GTP cyclohydrolase FolE2; OS = Kingella kingae ATCC 23330 OX=887327 GN=folE2 PE=3 SV=1
MSAVQSDSIAERADNIEIFSSVREAHHEEMRKRWGFAKVSGCNQHIHKEINRMSAIADVQSSKDLRNIPINQVGIKDLRFPIRVQSAQGEQHTVARLTMTVFLPADQKGTHMSRFVALMEEQQLAFNAHNLRDLTAQMVAKLDSHSGKISATFPFFRTKTAPVSGIQSLLDYDVTLSCEIVQGKAQSSLRVLVPVTSLCPCSKEISQYGAHNQRSHVTVSLNTNAPVEVEEVLDWVEQQASCQLYGLLKRPDEKFVTERAYENPKFVEDMVRDVATILQQDSRIDSFVLESENFESIHNHSAYAVIEWAR

SEQ ID NO: 9358 - protein, 258 aa, unidentified
  source 1..258: note = Kingella negevensis
  REGION 1..258: note = tr|A0A238T9E9|A0A238T9E9_9NEIS GTP cyclohydrolase FolE2 OS=Kingella negevensis OX=1522312 GN=folE2 PE=3 SV=1
MNEIPDIQSSKDLRNIPINQVGIKDLRFPVSVRSQSGEQATVARFTMTVFLPAEQKGTHMSRFVALLEEFDSVLDWGSLKTLTLEMLARLDSHAGKLSVSFPFFRKKSAPVSGIESLLDYDVSLTGEVSAKGEYSGSLKVLIPVTSLCPCSKEISQYGAHNQRSHVTVSLQCVENVAVEEVLDWVEAQASSQLYGLLKRPDEKFVTERAYENPKFVEDMVRDIAAVLLADKRISAFTVESENFESIHNHSAYALIQYP

SEQ ID NO: 9359 - protein, 250 aa, unidentified
  source 1..250: note = Kingella negevensis
  REGION 1..250: note = tr|A0A238HET3|A0A238HET3_9NEIS Putative GTP cyclohydrolase 1 type 2 OS=Kingella negevensis OX=1522312; GN = KEBURONENSIS_00960 PE=4 SV=1
MNSRQTLLTWCDQTLQTTQFKDYAPNGLQVEGKNEIRKIITAVTASRAAIEFAAEQGADMLLVHHGMFWKSEPVTITGWKKQRIATLLKHQINLVGYHLPLDAHPTLGNNTQLAAQMSWQPENAFGEQNLLNIGSLPENQQTLADLAAQLKTVLQREPVVVGNLSGSLKKVAWCTGGAQGFFQAAIDAGADVFITGEISEAQYHLANETGVAFVSAGHHATERYGVQALGKAIAEEFGLDVQFFDESNPA

SEQ ID NO: 9360 - protein, 254 aa, Kingella oralis
  REGION 1..254: note = tr|C4GK71|C4GK71_9NEIS GTP cyclohydrolase FolE2; OS = Kingella oralis ATCC 51147 OX=629741 GN=folE2 PE=3 SV=1
MPDVQSTPDVRNIPIDQVGIKDLRFPVRIRSQAGEQATVARISMTVSLPAEQKGTHMSRFVALMEEHRAALDFATLEALTGNMLARLEANAGKISIAFPFFRQKAAPVSGCLSLMDYDVTLIGEMREHAFIGSLKIVIPVTSLCPCSKEISDYGAHNQRSHVTLTLRCREAVAIEEAIDWVENQASCQLYGLLKRPDEKFVTEHAYENPKFVEDMVRDIATVLKQDPRIAAFTVESENFESIHNHSAYALVAFP

SEQ ID NO: 9361 - protein, 257 aa, Kingella potus
  REGION 1..257: note = tr|A0A377QZB7|A0A377QZB7_9NEIS GTP cyclohydrolase FolE2 OS=Kingella potus OX=265175 GN=folE2 PE=3 SV=1
MSAIADVQSSKDLRNLPINQVGIKDLRFPVQILTASGIQSTIARLTMTVRLPADQKGTHMSRFVALMESRQRPLDYGELQNLTQQMLELLDADAGEISISFPFFRSKSAPVSGIRSLLDYDVGLSGRVAGGAYSYGLKVLVPVTSLCPCSKEISQYGAHNQRSHVTVSLICRQDVPPEDIIDIVEEQASCQLYGLLKRPDEKYVTERAYENPKFVEDMVRDVAVALRGDPRIESFTVESENFESIHNHSAYACIAYP

SEQ ID NO: 9362 - protein, 314 aa, unidentified
  source 1..314: note = Kiritimatiella glycovorans
  REGION 1..314: note = tr|A0A0G3EJ57|A0A0G3EJ57_9BACT GTP cyclohydrolase FolE2 OS=Kiritimatiella glycovorans OX=1307763 GN=folE2; PE = 3 SV=1
MPISCLSLAFPFMPFPPSWLTSFLSPPFPPFLPLDNRAECVSMGPPIRTAADMKDTQNSPDFRNMPIRKVGIKGLRYPIIVKDRQYESQHTVARVNMYVDLPHHFKGTHMSRFVEILNQYHGRISIHKLEGILRAMIRTLDSRTAHLEIRFPYFIEKQAPVSGAVSLMDYDCAFIASLDTNGEEHPPDLVVEVDVPVCTLCPCSKAISTDGAHNQRSSIRIQIRSQAMVWIEDLIEIAESEASAPLYSLLKREDEKAVTEQAYRNPRFVEDVVRGVGVRLKEDPRIDWYRVESENAESIHNHSAYALVEPEKRR

SEQ ID NO: 9363 - protein, 180 aa, unidentified
  source 1..180: note = Kiritimatiellaceae bacterium
  REGION 1..180: note = tr|A0A2E0R8C3|A0A2E0R8C3_9BACT GTP cyclohydrolase 1; OS = Kiritimatiellaceae bacterium OX=2026752 GN=folE PE=3; SV = 1
MNKEYLNIIKQIGEDPQREGLLKTADRAAEAMKFLTDGYRQNLEEVINDAVFTVEDNHMIIVKDIELYSLCEHHMLPFFGKCHIGYIPNGKVLGVSKLARIVDLFSRRLQIQERLTHQVAKTISTRLEADGVGVVIEAQHLCMMMRGVEKQNSNMVTSAMLGSFRRDASTRNEFLKLIGS

SEQ ID NO: 9364 - protein, 194 aa, unidentified
  source 1..194: note = Kiritimatiellaceae bacterium
  REGION 1..194: note = tr|A0A2E1U5D1|A0A2E1U5D1_9BACT GTP cyclohydrolase 1; OS = Kiritimatiellaceae bacterium OX=2026752 GN=folE PE=3; SV = 1
MVLSPPYKSSSETLMNKEYLNIIKHIGEDPQREGLLKTADRAAEAMKFLTDGYRQNLEEVINDAVFTVEDNHMIIVKDIELYSLCEHHMLPFFGKCHIGYIPNGKVLGVSKLARIVDLFSRRLQIQERLTHQVAKTISTRLEADGVGVVIEAQHLCMMMRGVEKQNSNMVTSAMLGSFRRDASTRNEFLKLIGS

SEQ ID NO: 9365 - protein, 201 aa, unidentified
  source 1..201: note = Kitasatospora albolonga
  REGION 1..201: note = tr|A0A1V0V7K4|A0A1V0V7K4_9ACTN GTP cyclohydrolase 1; OS = Kitasatospora albolonga OX=68173 GN=folE PE=3 SV=1
MTDPVTLDGQGSIGEFDEKRAEAAVRELLIAVGEDPDREGLRETPGRVARAYKEIFAGLYQQPEDVLTTTFDLGHDEMVLVKDIEVFSTCEHHLVPFRGVAHVGYIPASTGKITGLSKLARLVDVYARRPQVQERLTTQIAESLMEILEPRGVIVVVECEHMCMSMRGIRKPGAKTLTSAVRGQLRDPATRAEAMSLIMAR

SEQ ID NO: 9366 - protein, 214 aa, Kitasatospora atroaurantiaca
  REGION 1..214: note = tr|A0A561EIX5|A0A561EIX5_9ACTN GTP cyclohydrolase 1; OS = Kitasatospora atroaurantiaca OX=285545 GN=folE PE=3 SV=1
MTTRLHPAPAGPQKPPMRTGPALRVVHETGAVDLAAAEDAAAAFLHALGIPTDSESLRGTPGRMARAYAELFSPRPFDLTTFPNDEGYDELVLARSIPVRSVCEHHLLPFVGTAHVGYLPGTRILGLSKLARVVEHFACRPQVQERLTKQVADWLQAHLDPKGVGVVIEAEHTCMTLRGVQATGSRTMTSTLLGILREDARSRAEFLALTGLPT

SEQ ID NO: 9367 - protein, 201 aa, Kitasatospora atroaurantiaca
  REGION 1..201: note = tr|A0A561ETM4|A0A561ETM4_9ACTN GTP cyclohydrolase 1; OS = Kitasatospora atroaurantiaca OX=285545 GN=folE PE=3 SV=1
MIDPVTLEQDATIGTFDQKRAENAVRELLIAVGEDPDREGLLETPARVARAYKEIFAGLWQEPEDVLTTTFDLGHDEMVLVKDIEVFSTCEHHLVPFQGVAHVGYIPSVQGKITGLSKLARLVDVYARRPQVQERLTSQVADSLMRILEPRGAIVVIECEHMCMSMRGIRKPGAKTITSAVRGQLRDPATRAEAMSLIIGR

SEQ ID NO: 9368 - protein, 201 aa, unidentified
  source 1..201: note = Kitasatospora aureofaciens
  REGION 1..201: note = tr|A0A1E7N778|A0A1E7N778_KITAU GTP cyclohydrolase 1; OS = Kitasatospora aureofaciens OX=1894 GN=folE PE=3 SV=1
MIDPVTLDGPPAVGTFDQKRAENAIRELLLAVGEDPDREGLLETPARVARAYKEIFAGLWQVPEDVLTTTFDLGHDEMVLVKDIELTSVCEHHLVPFRGVAHVGYIPSTSGKITGLSKLARLVDVYARRPQVQERLTSQVADALMRILEPRGAIVVVECEHMCMSMRGIRKPGAKTITSCVRGQLRDPATRAEAMSLIIGR

SEQ ID NO: 9369 - protein, 201 aa, unidentified
  source 1..201: note = Kitasatospora aureofaciens
  REGION 1..201: note = tr|A0A0L8NYR1|A0A0L8NYR1_KITAU GTP cyclohydrolase 1; OS = Kitasatospora aureofaciens OX=1894 GN=folE PE=3 SV=1
MTDPVTLDGDGKIGEFDEKRAENAVRELLIAVGEDPDREGLLETPARVARAYKEILAGLRQEPEDVLTTTFDLGHDEMVLVKDIEIVSLCEHHLLPFHGVAHVGYIPAESGKITGLSKLARLVEVFARRPQVQERLTTQIADSLMRILEARGAIVVIEAEHMCMSVRGIRKPGAKTTTSAVRGQLRDSTTRSEAMSLILAR

SEQ ID NO: 9370 - protein, 201 aa, Kitasatospora cheerisanensis
  REGION 1..201: note = tr|A0A066YR71|A0A066YR71_9ACTN GTP cyclohydrolase 1; OS = Kitasatospora cheerisanensis KCTC 2395 OX=1348663; GN = folE PE=3 SV=1
MIDPVTLDGEPPVGEFDQKRAENAVRELLIAVGEDPDREGLLETPARVARAYREIFAGLWQQPEDVLTTTFDLGHDEMVLVKDIEVYSTCEHHLVPFRGVAHVGYIPSVSGKITGLSKLARLVDVYARRPQVQERLTSQVADALMRILEPRGAIVVIECEHMCMSMRGIRKPGATTVTSAVRGQLRDPATRAEAMSLIIGR

SEQ ID NO: 9371 - protein, 201 aa, Kitasatospora cineracea
  REGION 1..201: note = tr|A0A3N1YYG5|A0A3N1YYG5_9ACTN GTP cyclohydrolase 1; OS = Kitasatospora cineracea OX=88074 GN=folE PE=3 SV=1
MIDPVTLDGETPVREFDQKRAENAVRELLLAVGEDPDREGLLETPARVARAYREIFAGLWQQPEDVLTTTFDLGHDEMVLVKDIEVFSTCEHHLVPFRGVAHVGYIPSTSGKITGLSKLARLVDVYARRPQVQERLTSQVADALMRILEPRGAIVVFECEHMCMSMRGIRKPGAKTITSAVRGQLRDPATRNEAMSLIIGR

SEQ ID NO: 9372 - protein, 197 aa, Kitasatospora cineracea
  REGION 1..197: note = tr|A0A3N1YWY2|A0A3N1YWY2_9ACTN GTP cyclohydrolase 1; OS = Kitasatospora cineracea OX=88074 GN=folE PE=3 SV=1
MTSTDNTIDLARAAEHAAGLFAALGIPCDTESTAATPARVAKALAELTAGQHLDPTRHLAVTFPPEGQRAGLIAAVDVPFTALCEHHGLPFTGRAAVAYLPVPGARIVGLSKLARLLQEFAARPQVQERLGEQVVEALGAHLDVQGAACLIRSVHACMTLRGARAHGAAMVTTHLTGALHADPAHRAEVLALMPPSP

SEQ ID NO: 9373 - protein, 201 aa, Kitasatospora griseola
  REGION 1..201: note = tr|A0A0D0PXD5|A0A0D0PXD5_KITGR GTP cyclohydrolase 1; OS = Kitasatospora griseola OX=2064 GN=folE PE=3 SV=1
MIDPVTLDGEFPVGEFDQKRAENAVRELLIAVGEDPDREGLLETPARVARAYREIFAGLWQQPEDVLTTTFDLGHDEMVLVKDIEVFSTCEHHLVPFRGVAHVGYIPATTGKITGLSKLARLVDVFARRPQVQERLTSQVADALMRILEPRGAIVVIECEHMCMSMRGIRKPGATTVTSAVRGQLRDPATRAEAMSLIIGR

SEQ ID NO: 9374 - protein, 201 aa, Kitasatospora niigatensis; identical to SEQ ID NO: 9371
  REGION 1..201: note = tr|A0A3N4RQA2|A0A3N4RQA2_9ACTN GTP cyclohydrolase 1; OS = Kitasatospora niigatensis OX=88075 GN=folE PE=3 SV=1

SEQ ID NO: 9375 - protein, 201 aa, unidentified
  source 1..201: note = Kitasatospora setae
  REGION 1..201: note = tr|E4NF86|E4NF86_KITSK GTP cyclohydrolase 1; OS = Kitasatospora setae (strain ATCC 33774 / DSM 43861 / JCM 3304 / KCC A-0304 / NBRC 14216 / KM-6054) OX=452652; GN = folE P E=3 SV=1
MIDPVTLDGEQPVREFDQKRAENAVRELLIAVGEDPDREGLLETPARVARAYREIFAGLWQRPEDVLTTTFDLGHDEMVLVKDIEVFSTCEHHLVPFRGVAHVGYIPSASGKITGLSKLARLVDVYARRPQVQERLTSQVADALMRILEPRGAIVVIECEHMCMSMRGIRKPGAKTLTSAVRGQLRDPATRNEAMSLIIGR

SEQ ID NO: 9376 - protein, 202 aa, Kitasatospora sp.
  REGION 1..202: note = tr|A0A0Q8PBZ3|A0A0Q8PBZ3_9ACTN GTP cyclohydrolase 1; OS = Kitasatospora sp. Root187 OX=1736486 GN=folE PE=3 SV=1
MIDPVTLEQDAAAIGTFDQKRAENAVRELLIAVGEDPDREGLLETPARVARAYQEIFAGLWQEPEDVLTTTFDLGHDEMVLVKDIEVFSTCEHHLVPFRGVAHVGYIPSPSGKITGLSKLARLVDVYARRPQVQERLTSQVADSLMRILEPRGAIVVIECEHMCMSMRGIRKAGAKTITSAVRGQLRDPATRAEAMSLIIGR

SEQ ID NO: 9377 - protein, 201 aa, Kitasatospora sp.
  REGION 1..201: note = tr|A0A2H5B3W2|A0A2H5B3W2_9ACTN GTP cyclohydrolase 1; OS = Kitasatospora sp. MMS16-BH015 OX=2018025 GN=folE PE=3; SV = 1
MIDPVTLDGEATVGQFDQKRAENAVRELLIAVGEDPDREGLLETPARVARAYKEIFAGLWQQPEDVLSTTFDLGHDEMVLVKDIEVYSTCEHHLVPFRGVAHVGYIPSTSGKITGLSKLARLVDVYARRPQVQERLTTQVADALMRILEPRGVIVVIECEHMCMSMRGIRKPGAKTITSAVRGQLRDPATRNEAMSLIIGR

SEQ ID NO: 9378 - protein, 201 aa, Kitasatospora viridis
  REGION 1..201: note = tr|A0A561UGI6|A0A561UGI6_9ACTN GTP cyclohydrolase 1; OS = Kitasatospora viridis OX=281105 GN=folE PE=3 SV=1
MIDPVTLDGQSVIGTFDQKRAENAVRELLIAVGEDPDREGLLDTPARVARAYKEIFAGLWQQPEDVLTTTFDLGHDEMVLVKDIEVFSTCEHHLVPFQGVAHVGYIPAATGKITGLSKLARLVDVFARRPQVQERLTSQVADSLMRILEPRGAIVVIECEHMCMSMRGIRKPGAKTLTSAVRGQLRDPATRAEAMSLIMSR

SEQ ID NO: 9379 - protein, 198 aa, unidentified
  source 1..198: note = Kitasatospora xanthocidica
  REGION 1..198: note = tr|A0A373A511|A0A373A511_9ACTN GTP cyclohydrolase I FolE OS=Kitasatospora xanthocidica OX=83382 GN=folE PE=4; SV = 1
MTSIPVQSQNRRPVDRVRAQELTRELLLALGEDPDRDGLQDTPRRFADWWGEFLDHDAGRLDTSFAQEGRYGDFVLLTGIEAWSVCEHHLLPFRLDVSVAYVPDTAVLGLSKLVRHLEARTHALQLQERITHDVAHDLAKAAATDDVAVFTTGEHLCMSMRGVKATAVRSTTMCRLGRTESDPDLAARIERLALPVRL

SEQ ID NO: 9380 - protein, 197 aa, unidentified
  source 1..197: note = Kitasatospora xanthocidica
  REGION 1..197: note = tr|A0A373A1P8|A0A373A1P8_9ACTN GTP cyclohydrolase 1; OS = Kitasatospora xanthocidica OX=83382 GN=folE PE=3 SV=1
MTTPANTADLARAVEHAAGLLAALGIPCDTESTAATPRRMAKALAELTAGVRLDPARHLAVTFPPEGERAGLIAAVDVPFTALCEHHVLPFTGRAAVAYLPTPGARIVGLSKLARLVQEFAARPQVQERLGQQVVDALGAHLDIQGAGCLIRSQHACMTARGARAHGAAMVTTHLTGALHADLARRAEVLALMPPPA

SEQ ID NO: 9381 - protein, 222 aa, unidentified
  source 1..222: note = Klebsiella aerogenes
  REGION 1..222: note = tr|A0A3S4MKM7|A0A3S4MKM7_KLEAE GTP cyclohydrolase 1; OS = Klebsiella aerogenes OX=548 GN=folE PE=3 SV=1
MSSLSKEAVLVHEALVARGLETPMRAPVQEIDNETRKRLITGHMTEIMQLLNLDLSDDSLMETPHRIAKMYVDEIFSGLDYSRFPKITVIENKMKVDEMVTVRDITLTSTCEHHFVTIDGKATVAYIPKDSVIGLSKINRIVQFFAQRPQVQERLTQQILIALQTLLGTNNVAVSIDAVHYCVKARGIRDATSATTTTSLGGLFKSSQNTRQEFLRAVRHHD

SEQ ID NO: 9382 - protein, 311 aa, unidentified
  source 1..311: note = Klebsiella aerogenes
  REGION 1..311: note = tr|A0A0F0YQJ4|A0A0F0YQJ4_KLEAE GTP cyclohydrolase FolE2 OS=Klebsiella aerogenes OX=548 GN=folE2 PE=3 SV=1
MSIAAKQTLCPGMLPDIQSTKGDGEGESLSWVGMEQIDLPIDIAGRPVSAKVNAGINLLSSPEAEKGIHMSRLYLLLDELTQGEITPALLQHVLKAFLVSHQGRSDEASIEISGDLLLSRKSLNSNHSGWKAYPLTLSAELRQSFTVTLKVGIPYSSTCPASAALSRHVAGLQFSKDFGNRIDRLPAAEIADWLVEKGMPATPHSQRSWAWVSIRLNPEAKSLPVIELIDYAEVALGTAVQTVVKRSDEQAFAVANGQNLMFCEDAARRLNNVFRCAPFCEAFDIRVEHQESLHPHNAVARIHWKGSKNVT

SEQ ID NO: 9383 - protein, 222 aa, unidentified
  source 1..222: note = Klebsiella grimontii
  REGION 1..222: note = tr|A0A285B6M5|A0A285B6M5_9ENTR GTP cyclohydrolase 1; OS = Klebsiella grimontii OX=2058152 GN=folE PE=3 SV=1
MSSLSKEAILVHEALVARGLETPLRPPVQEIDNETRKRLIAGHMTEIMQLLNLDLSDDSLMETPHRIAKMYVDEIFSGLDYARFPKITVIENKMQVDEMVTVRDITLTSTCEHHFVTIDGKATVAYIPKDSVIGLSKINRIVQFFSQRPQVQERLTQQILTALQTLLGTSNVAVSIDAVHYCVKARGIRDATSATTTTSLGGLFKSSQNTRQEFLRAVRHHN

SEQ ID NO: 9384 - protein, 312 aa, unidentified
  source 1..312: note = Klebsiella michiganensis
  REGION 1..312: note = tr|A0A0D5WS43|A0A0D5WS43_9ENTR GTP cyclohydrolase FolE2 OS=Klebsiella michiganensis OX=1134687 GN=folE2 PE=3; SV = 1
MRYMTVTPMLCPKTLPDIQSLRSHEFDTALSWVGMEKIDLPVEVAGRPMTAKVNAGINLLSSPEAEKGIHMSRIYLLLDELTQGEITPAVLRHLLGEFLVSHQRSSDRASVEITGELLLSRKSLISNHFGWKAYPISILAECGKSFAVTIRVGIPYSSTCPASAALSRNLAQQQFLRDFGSRHDGVSVEEMMAWLGEKGMPGTPHSQRSWAWISSQLKPDVATLPFLALIDLGEATLGTAVQTVVKRGDEQAFAWANGQNLMFCEDAARRLNKAMLDAPFSEAFSLRVEHQESLHAHNAVARIHWTGNHHVA

SEQ ID NO: 9385 - protein, 222 aa, unidentified; identical to SEQ ID NO: 9383
  source 1..222: note = Klebsiella michiganensis
  REGION 1..222: note = tr|H3N002|H3N002_9ENTR GTP cyclohydrolase 1; OS = Klebsiella michiganensis OX=1134687 GN=folE PE=3 SV=1

SEQ ID NO: 9386 - protein, 308 aa, Klebsiella oxytoca
  REGION 1..308: note = tr|A0A170C9N0|A0A170C9N0_KLEOX GTP cyclohydrolase FolE2 OS=Klebsiella oxytoca OX=571 GN=folE2 PE=3 SV=1
MNEVALPPRRSLPDAQAWRGEMSDVGLDWVGMQGIALPLELAGKPLMAKVDAGINLRAEAAGERGIHMSRLYLALDELTQGELTPQRIGRTLQAFLDSQPEHSDRAKLAIGGELLLSRPALLSPQRGWKAYPLRIEATLTNRLTLALTVGVPYSSTCPSSAALSRQLAQQQFQFDFEQAAERVSQRQVSEWLLEQGMPATPHSQRSWAWVTVTPENERAFEPVKLIDRIEHALGTPVQTLVKRRDEQAFALANGQNLMFCEDAARRLYRMLRSQCDYRAFSLRVEHQESLHAHNAVAELSWPGENHAA

SEQ ID NO: 9387 - protein, 222 aa, Klebsiella oxytoca; identical to SEQ ID NO: 7955
  REGION 1..222: note = tr|A0A181WMA5|A0A181WMA5_KLEOX GTP cyclohydrolase 1; OS = Klebsiella oxytoca OX=571 GN=folE PE=3 SV=1

SEQ ID NO: 9388 - protein, 222 aa, Klebsiella pneumoniae
  REGION 1..222: note = sp|B5XP57|GCH1_KLEP3 GTP cyclohydrolase 1; OS = Klebsiella pneumoniae (strain 342) OX=507522 GN=folE; PE = 3 SV=1
MSSLSKEAVLVHEALVARGLETPMRAPVQEIDNETRKRLITGHMTEIMQLLNLDLSDDSLMETPHRIAKMYVDEIFSGLDYSRFPKITVIENKMKVDEMVTVRDITLTSTCEHHFVTIDGKATVAYIPKDAVIGLSKINRIVQFFAQRPQVQERLTQQILIALQTLLGTSNVAVSIDAVHYCVKARGIRDATSATTTTSLGGLFKSSQNTRQEFLRAVRHHN

SEQ ID NO: 9389 - protein, 222 aa, Klebsiella pneumoniae
  REGION 1..222: note = tr|W8UX47|W8UX47_KLEPN GTP cyclohydrolase 1; OS = Klebsiella pneumoniae 30684/NJST258_2 OX=1420013; GN = folE PE=3 SV=1
MSSLSKEAVLVHEALVARGLETPMRAPVQEIDNETRKRLITGHMTEIMQLLNLDLSDDSLMETPHRIAKMYVDEIFSGLDYSRFPKITVIENKMKVDEMVTVRDITLTSTCEHHFVTIDGKATVAYIPKDSVIGLSKINRIVQFFAQRPQVQERLTQQILIALQTLLGTNNVAVSIDAVHYCVKARGIRDATSATTTTSLGGLFKSSQNTRQEFLRAVRHHN

SEQ ID NO: 9390 - protein, 222 aa, unidentified
  source 1..222: note = Klebsiella quasipneumoniae
  REGION 1..222: note = tr|A0A2A5MJD0|A0A2A5MJD0_9ENTR GTP cyclohydrolase 1; OS = Klebsiella quasipneumoniae OX=1463165 GN=folE PE=3 SV=1
MSSLSKEAVLVHEALVARGLETPMRAPVQEIDNETRKRLITGHMTEIMQLLNLDLSDDSLMETPHRIAKMYVDEIFSGLDYSRFPKITVIENKMKVDEMVTVRDITLTSTCEHHFVTIDGKATVAYIPKDSVIGLSKINRIVQFFAQRPQVQERLTQQILIALQTLLGTSNVAVSIDAVHYCVKARGIRDATSATTTTSLGGLFKSSQNTRQEFLRAVRHHS

SEQ ID NO: 9391 - protein, 222 aa, unidentified; identical to SEQ ID NO: 9390
  source 1..222: note = Klebsiella quasipneumoniae
  REGION 1..222: note = tr|A0A5C6ITY9|A0A5C6ITY9_9ENTR GTP cyclohydrolase 1; OS = Klebsiella quasipneumoniae subsp. similipneumoniae; OX = 1463164 GN=folE PE=3 SV=1

SEQ ID NO: 9392 - protein, 222 aa, unidentified
  source 1..222: note = Klebsiella quasivariicola
  REGION 1..222: note = tr|A0A223U8Q7|A0A223U8Q7_9ENTR GTP cyclohydrolase 1; OS = Klebsiella quasivariicola OX=2026240 GN=folE PE=3 SV=1
MSSLSKEAVLVHEALVARGLETPMRAPVQEIDNETRKRLITGHMTEIMQLLNLDLSDDSLMETPHRIAKMYVDEIFSGLDYSRFPKITVIENKMKVDEMVTVRDITLTSTCEHHFVTIDGKATVAYIPKDSVIGLSKINRIVQFFAQRPQVQERLTQQILIALQTLLGTSNVAVSIDAVHYCVKARGIRDATSATTTTSLGGLFKSSQNTRQEFLRAVRHHN

SEQ ID NO: 9393 - protein, 222 aa, Klebsiella sp.; identical to SEQ ID NO: 9390
  REGION 1..222: note = tr|A0A3T0QLS0|A0A3T0QLS0_9ENTR GTP cyclohydrolase 1; OS = Klebsiella sp. LY OX=2015795 GN=folE PE=3 SV=1

SEQ ID NO: 9394 - protein, 222 aa, Klebsiella sp.; identical to SEQ ID NO: 9388
  REGION 1..222: note = tr|A0A3G5D2B0|A0A3G5D2B0_9ENTR GTP cyclohydrolase 1; OS = Klebsiella sp. P1CD1 OX=2267618 GN=folE PE=3 SV=1

SEQ ID NO: 9395 - protein, 222 aa, Klebsiella variicola
  REGION 1..222: note = tr|A0A2N4YYV3|A0A2N4YYV3_KLEVA GTP cyclohydrolase 1; OS = Klebsiella variicola OX=244366 GN=folE PE=3 SV=1
MSSLSKEAVLVHEALVARGLETPMRAPVQEIDNETRKRLITGHMTEIMQLLNLDLSDDSLMETPHRIAKMYVDEIFSGLDYSRFPKITVIENKMKVDEMVTVRDITLTSTCEHHFVTIDGKATVAYIPKDAVIGLSKINRIVQFFAQRPQVQERLTQQILIALQTLLGTSNVAVSIDAVHYCVKARGIRDATSATTTTSLGGLFKSSQNTRQEFLRAVRHHT

SEQ ID NO: 9396 - protein, 222 aa, Klebsiella variicola; identical to SEQ ID NO: 9388
  REGION 1..222: note = tr|A0A087FM50|A0A087FM50_KLEVA GTP cyclohydrolase 1; OS = Klebsiella variicola OX=244366 GN=folE PE=3 SV=1

SEQ ID NO: 9397 - protein, 204 aa, unidentified
  source 1..204: note = Klenkia brasiliensis
  REGION 1..204: note = tr|A0A1G7M8W7|A0A1G7M8W7_9ACTN GTP cyclohydrolase 1; OS = Klenkia brasiliensis OX=333142 GN=folE PE=3 SV=1
MIDHTVDPHPVPHDQDGVDHARAEAAVRELLLAVGEDPDRPGLRETPARVARAYAETFAGLRQDPATILSTTFDEDHDELVLVKDIPMYSTCEHHLVPFHGVAHIGYIPGQDGRVTGLSKLARLVEVYARRPQVQERMTKQIADAMVESLHPRGVIVVVEAEHLCMAMRGVRKPGSRTMTSAVRGVFKQSAATRAEALSLVLGR

SEQ ID NO: 9398 - protein, 204 aa, unidentified
  source 1..204: note = Klenkia marina
  REGION 1..204: note = tr|A0A1G4XDW6|A0A1G4XDW6_9ACTN GTP cyclohydrolase 1; OS = Klenkia marina OX=1960309 GN=folE PE=3 SV=1
MIDPTVDPRPVPHDQDGVDHARAEAAVRELLIAVGEDPDRPGLQETPARVARAYAEVFAGLRQDPVQILSTTFDEDHDELVLVRDIALYSTCEHHLVPFHGVAHIGYIPGADGRVTGLSKLARLVEVYARRPQVQERMTKQIADAMVDSLHPRGVIVVIEAEHLCMAMRGVRKPGARTTTSAVRGIFKESASTRAEALSLVLGR

SEQ ID NO: 9399 - protein, 204 aa, unidentified
  source 1..204: note = Klenkia soli
  REGION 1..204: note = tr|A0A1H0NGY6|A0A1H0NGY6_9ACTN GTP cyclohydrolase 1; OS = Klenkia soli OX=1052260 GN=folE PE=3 SV=1
MIDHSVDPRPVPHAEDGVDHARAEAAVRELLIAVGEDPDRPGLRETPARVARAYAETFAGLRQDPVQVLSTVFDEDHDELVLVRDIALYSTCEHHLVPFHGVAHIGYIPGADGRVTGLSKLARLVEVFARRPQVQERMTKQIADAMMTGLQPRGVIVVVEAEHLCMAMRGVRKPGTRTLTSAVRGIFKESQATRSEAMSLVLGR

SEQ ID NO: 9400 - protein, 204 aa, unidentified
  source 1..204: note = Klenkia taihuensis
  REGION 1..204: note = tr|A0A1I1NGZ4|A0A1I1NGZ4_9ACTN GTP cyclohydrolase 1; OS = Klenkia taihuensis OX=1225127 GN=folE PE=3 SV=1
MIDHSVDPRPVPHSEDGVDHARAEAAVRELLLAVGEDPDRPGLRETPARVARAYAETFAGLRQDPATILSTTFDEDHDELVLVKDIPMYSTCEHHLVPFHGVAHIGYIPGSDGRVTGLSKLARLVEVYARRPQVQERMTKQIADAMVSSLHPRGVIVVVEAEHLCMAMRGVRKPGSRTMTSAVRGVFKESAATRAEALSLVLGR

SEQ ID NO: 9401 - protein, 192 aa, Klugiella xanthotipulae
  REGION 1..192: note = tr|A0A543I5P1|A0A543I5P1_9MICO GTP cyclohydrolase 1; OS = Klugiella xanthotipulae OX=244735 GN=folE PE=3 SV=1
MNESRIDKARIEAAVAEILAAIGEDLDRPGLQTTPARVAEACTDFFSGVGEDAEAHLADSIPVGEDTGDLVMLRDIQFRSMCEHHLLPFQGVAHIAYQPDKRVVGLGALPRLLASLAARPQVQERLTEQVANSLESALHPHGVFVLIEASHGCVTARGPRQLGSTTVTMAGRGRLGEPAQRAELIALIGGSE

SEQ ID NO: 9402 - protein, 222 aa, Kluyvera ascorbata
  REGION 1..222: note = tr|A0A2T2Y8F0|A0A2T2Y8F0_9ENTR GTP cyclohydrolase 1; OS = Kluyvera ascorbata OX=51288 GN=folE PE=3 SV=1
MSSLSKEAVLVHEALVARGLETPLRPPVREMDNETRKRLIAGHMTEIMQLLNLDLSDDSLMETPHRIAKMYVNEIFSGLDYANFPKITVIENKMKVDEMVTVRDITLTSTCEHHFVTIDGKATVAYIPKDSVIGLSKINRIVQFFAQRPQVQERLTQQILTALQTLLGTNNVAVSIDAVHYCVKARGIRDATSATTTTSLGGLFKSSQNTRQEFLRAVRHHN

SEQ ID NO: 9403 - protein, 222 aa, Kluyvera ascorbata
  REGION 1..222: note = tr|A0A378GK19|A0A378GK19_9ENTR GTP cyclohydrolase 1; OS = Kluyvera ascorbata OX=51288 GN=folE PE=3 SV=1
MSSLSKEAVLVHEALVARGLETPLRPSEREMDNETRKRLITGHMTEIMQLLNLDLSDDSLMETPHRIAKMYVDEIFSGLDYANFPKITVIENKMKVDEMVTVRDITLTSTCEHHFVTIDGKATVAYIPKDSVIGLSKINRIVQFFAQRPQVQERLTQQILTALQTLLGTNNVAVSIDAVHYCVKARGIRDATSATTTTSLGGLFKSSQNTRQEFLRAVRHHN

SEQ ID NO: 9404 - protein, 222 aa, Kluyvera cryocrescens
  REGION 1..222: note = tr|A0A2X3GB20|A0A2X3GB20_KLUCR GTP cyclohydrolase 1; OS = Kluyvera cryocrescens OX=580 GN=folE PE=3 SV=1
MSSLSKEAVLVHEALVARGLETPLRPPVREMDNETRKNLISGHMTEIMQLLNLDLSDDSLMETPRRIAKMYVDEIFSGLDYANFPKITVIENKMKVDEMVTVRDITLTSTCEHHFVTIDGKATVAYIPKDSVIGLSKINRIVQFFAQRPQVQERLTQQILTALQTLLGTNNVAVSIDAVHYCVKARGIRDATSATTTTSLGGLFKSSQNTRQEFLRAVRHHN

SEQ ID NO: 9405 - protein, 222 aa, Kluyvera georgiana
  REGION 1..222: note = tr|A0A1B7K2F2|A0A1B7K2F2_9ENTR GTP cyclohydrolase 1; OS = Kluyvera georgiana ATCC 51603 OX=1354264 GN=folE PE=3; SV = 1
MSSLSKEAVLVHEALVARGLETPLRPPVREMDNETRKRLITGHMTEIMQLLNLDLSDDSLMETPRRIAKMYVDEIFSGLDYANFPKITVIENKMKVDEMVTVRDITLTSTCEHHFVTIDGKATVAYIPKDSVIGLSKINRIVQFFAQRPQVQERLTQQILTALQTLLGTNNVAVSIDAVHYCVKARGIRDATSATTTTSLGGLFKSSQNTRQEFLRAVRHHN

SEQ ID NO: 9406 - protein, 222 aa, Kluyvera intermedia
  REGION 1..222: note = tr|A0A3S4IAZ4|A0A3S4IAZ4_KLUIN GTP cyclohydrolase 1; OS = Kluyvera intermedia OX=61648 GN=folE PE=3 SV=1
MSSLSKEAVLVHEALVARGLETPLRPPVREMDNETRKQLISGHMTEIMQLLNLDLSDDSLMETPRRIAKMYVDEIFSGLDYANFPKITVIENKMKVDEMVTVRDITLTSTCEHHFVTIDGKATVAYIPKESVIGLSKINRIVQFFAQRPQVQERLTQQILTALQTLLGTNNVAVSIDAVHYCVKARGIRDATSATTTTSLGGLFKSSQNTRQEFLRAVRHHN

SEQ ID NO: 9407 - protein, 221 aa, Kluyvera intermedia; identical to SEQ ID NO: 8737
  REGION 1..221: note = tr|A0A1X0XFW2|A0A1X0XFW2_KLUIN GTP cyclohydrolase 1; OS = Kluyvera intermedia OX=61648 GN=folE PE=3 SV=1

SEQ ID NO: 9408 - protein, 221 aa, Kluyvera sp.; identical to SEQ ID NO: 8737
  REGION 1..221: note = tr|A0A2T3XAX2|A0A2T3XAX2_9ENTR GTP cyclohydrolase 1; OS = Kluyvera sp. Nf5 OX=2116543 GN=folE PE=3 SV=1

SEQ ID NO: 9409 - protein, 215 aa, Knoellia aerolata
  REGION 1..215: note = tr|A0A0A0JVR9|A0A0A0JVR9_9MICO GTP cyclohydrolase 1; OS = Knoellia aerolata DSM 18566 OX=1385519 GN=folE PE=3 SV=1
MSIPTPTDGASADPDLSAEIDSVAPRQVDHERARAAVREFLLAIGEDPDRAGLRDTPDRVARAATQLFGGLSQDPVEVLSARFSIDHEELIIVRDIEIYSTCEHHLLPFHGVAHVGYIPAPDGTVTGLSKLARLVDVFARRPQVQERITTQVADALVDHLGVQGVIVVIEAEHLCMSMRGVHKPGSRTITSAVRGQLRDPATRAEAMSLLLGGKR

SEQ ID NO: 9410 - protein, 215 aa, Knoellia flava
  REGION 1..215: note = tr|A0A0A0J1Q8|A0A0A0J1Q8_9MICO GTP cyclohydrolase 1; OS = Knoellia flava TL1 OX=1385518 GN=folE PE=3 SV=1
MSTPTPTDGGSAVPDTSDESDTLPPRQVDHDRARRAVRELLLAIGEDPDREGLRDTPDRVARAATQLYAGLSQDPADVLSARFSIDHEELIIVRDIEIYSTCEHHLLPFHGVAHVGYIPAPDGTVTGLSKLARLVDVFARRPQVQERITTQVADALVEHLGVQGVIVVIEAEHLCMSMRGVHKPGSRTITSAVRGQLRDPATRSEAMSLLLGGKR

SEQ ID NO: 9411 - protein, 203 aa, Knoellia locipacati
  REGION 1..203: note = tr|A0A512T0X0|A0A512T0X0_9MICO GTP cyclohydrolase 1; OS = Knoellia locipacati OX=882824 GN=folE PE=3 SV=1
MPDTSDETDTLPPRQVDHERARAAVREFLIAIGEDPDREGLLDTPDRVARAATQLYAGLSQDPAQVLSARFSIDHEELIIVRDIEIFSTCEHHLLPFHGVAHVGYIPATDGTVTGLSKLARLVDVFARRPQVQERITTQVADALVENLGVQGVIVVIEAEHLCMSMRGVHKPGSRTITSAVRGQLRDPATRAEAMSLLLGGKR

SEQ ID NO: 9412 - protein, 216 aa, unidentified
  source 1..216: note = Knoellia remsis
  REGION 1..216: note = tr|A0A2T0UN40|A0A2T0UN40_9MICO GTP cyclohydrolase 1; OS = Knoellia remsis OX=407159 GN=folE PE=3 SV=1
MATDGAAVDGRTFDGVLPKEADSLPARVVDHERAAAAVREYLIAIGEDPDREGLRDTPDRVARAATQLYAGLSQSPEDVLSARFSIDHEELIIVRDIEIFSTCEHHLLPFHGVAHVGYIPATDGTVTGLSKLARLVDVFARRPQVQERITTQVADALVEHLGVQGVIVVVEAEHLCMSMRGVHKPGSRTITSAVRGQLRNPATRAEAMSLLLGGKR

SEQ ID NO: 9413 - protein, 211 aa, Knoellia sinensis
  REGION 1..211: note = tr|A0A0A0J7P2|A0A0A0J7P2_9MICO GTP cyclohydrolase 1; OS = Knoellia sinensis KCTC 19936 OX=1385520 GN=folE PE=3; SV = 1
MTEPADRRASEFDDEEDTIPPRQVDHARARAAMREYLFAIGEDPDREGLRDTPDRVARAATQLYAGLSQDPADVLSARFSIDHEELIIVRDIELFSTCEHHLLPFHGVAHVGYIPAVDGTVTGLSKLARLVDVFARRPQVQERITTQVADALVEHLNVQGVIVVIEAEHLCMSMRGVHKPGSRTLTSAVRGQLRDPATRAEAMSLLLGGKR

SEQ ID NO: 9414 - protein, 209 aa, Knoellia sp.
  REGION 1..209: note = tr|A0A0Q9KU98|A0A0Q9KU98_9MICO GTP cyclohydrolase 1; OS = Knoellia sp. Soil729 OX=1736394 GN=folE PE=3 SV=1
MTSTGLHHREPARPRPSWAAVEAVGEPDVDSATSAAADLLTALGVDVESESLRRTPERMVLALAEMLRPRPFELTTFPNDGGYDELIVARNIPVRSLCEHHVLPFIGTAHVGYLPGERILGLSKLARVVEHFSRRPQVQERLTMQVSTWLRDQLGATGVGVVIEAEHMCMTLRGVQVPGTSTVTSSLLGVLRDDPRTRAEFLALTHSPR

SEQ ID NO: 9415 - protein, 188 aa, Knoellia sp.
  REGION 1..188: note = tr|A0A0Q9KZ98|A0A0Q9KZ98_9MICO GTP cyclohydrolase 1; OS = Knoellia sp. Soil729 OX=1736394 GN=folE PE=3 SV=1
MDHERARAAVRELLFAIGEDPDREGLQDTPDRVARAATQLYAGLSQDPADILSTRFSIDHEELIIVRDIEIYSTCEHHLLPFHGVAHVGYIPSPDGTVTGLSKLARLVDVFARRPQVQERITTQVADALVEHLGVQGVIVVIEAEHLCMSMRGVHKPGSRTITSAVRGQLRDPATRAEAMSLLLGGKR

SEQ ID NO: 9416 - protein, 207 aa, Knoellia subterranea
  REGION 1..207: note = tr|A0A0A0JN15|A0A0A0JN15_9MICO GTP cyclohydrolase 1; OS = Knoellia subterranea KCTC 19937 OX=1385521 GN=folE PE=3; SV = 1
MTESPDLKDDEGDALPPRQVDHERARAAIREYLFAIGEDPDREGLRDTPDRVARAATQLYAGLSQSPEDVLSARFSIDHEELIIVRDIEIFSTCEHHLLPFHGVAHVGYIPAPDGTVTGLSKLARLVDVFARRPQVQERITTQVADALVTHLGVQGVIVVVEAEHLCMSMRGVHKPGSRTITSAVRGQLRDPATRAEAMSLLLGGKR

SEQ ID NO: 9417 - protein, 248 aa, Kocuria flava
  REGION 1..248: note = tr|A0A2N4SYD3|A0A2N4SYD3_9MICC GTP cyclohydrolase 1; OS = Kocuria flava OX=446860 GN=folE PE=3 SV=1
MGREAGRARRPALPGETAQHQEEGALPHEARTDGTTPHDPRQEAFEPPYPDPDPALEAGAGAVDQERVAAAVRELLLAIGEDPDREGLQGTPGRVARAWAEMFAGLHQDPGEVLGTTFDIGHSEMVLVKDIPFYSTCEHHLVPFHGHAHVGYIPGHDGAVTGLSKLARLVDLYARRPQVQERLTTQIVDAIVEHLAPAGVIVVVECEHLCMSMRGVRKPGAKTVTSAVRGQLRETATRAEAMSLILGR

SEQ ID NO: 9418 - protein, 248 aa, Kocuria flava
  REGION 1..248: note = tr|A0A0U3G350|A0A0U3G350_9MICC GTP cyclohydrolase 1; OS = Kocuria flava OX=446860 GN=folE PE=3 SV=1
MGREAGRARRPALPGETAQHQEEGALPHEARTDGTTPHDPRQEAFEPPYPDTDPALEAGAGAVDQERVAAAVRELLLAIGEDPDREGLQGTPGRVARAWAEMFAGLHQDPGEVLGTTFDIGHSEMVLVKDIPFYSTCEHHLVPFHGHAHVGYIPGHDGAVTGLSKLARLVDLYARRPQVQERLTTQIVDAIVEHLAPAGVIVVVECEHLCMSMRGVRKPGAKTVTSAVRGQLRETATRAEAMSLILGR

SEQ ID NO: 9419 - protein, 218 aa, unidentified
  source 1..218: note = Kocuria indica
  REGION 1..218: note = tr|A0A4P6RS17|A0A4P6RS17_9MICC GTP cyclohydrolase 1; OS = Kocuria indica OX=1049583 GN=folE PE=3 SV=1
MHGTHEDDPHEPVSGSYADYADAPQLDPTIDQPRIAAAVREILLAVGEDPDRDGLRDTPARVARAYAEVFAGLHQDPADLLATSFDIGHSEMVLVRDIPFYSTCEHHLVPFHGLAHVGYIPGPEGKVTGLSKLARLVDLYAKRPQVQERLTTQVVEALSEHLHPAGAIVVIECEHLCMSMRGVRKPGAMTVTSAVRGQLRNPATRAEAMNLIQAGHAQ

SEQ ID NO: 9420 - protein, 218 aa, unidentified
  source 1..218: note = Kocuria indica
  REGION 1..218: note = tr|A0A1X7DXY1|A0A1X7DXY1_9MICC GTP cyclohydrolase 1; OS = Kocuria indica OX=1049583 GN=folE PE=3 SV=1
MHGTHEDDPHEPVSGSYADYADAPQLDPTIDQPRIAAAVREILLAVGEDPDRDGLRDTPARVARAYAEVFAGLHQDPADLLATSFDIGHSEMVLVRDIPFYSTCEHHLVPFHGLAHVGYIPGPEGKVTGLSKLARLVDLYAKRPQVQERLTTQVVEALSEHLHPAGAIVVIECEHLCMSMRGVRKPGAKTVTSAVRGQLRNPATRAEAMNLIQAGHAR

SEQ ID NO: 9421 - protein, 189 aa, Kocuria marina
  REGION 1..189: note = tr|A0A0B0DDV9|A0A0B0DDV9_9MICC GTP cyclohydrolase 1; OS = Kocuria marina OX=223184 GN=folE PE=3 SV=1
MDQPRIAAAVREILLAVGEDPDRGGLRDTPARVARAYAEVFAGLHQDPVDLLATSFDIGHSEMVLVRDIPFYSTCEHHLVPFHGLAHVGYIPGPEGKVTGLSKLARLVDLYAKRPQVQERLTTQVVEALSEHLHPAGAIVVIECEHLCMSMRGVRKPGAKTVTSAVRGQLRNPATRAEAMNLIQAGRAQ

SEQ ID NO: 9422 - protein, 204 aa, Kocuria palustris
  REGION 1..204: note = tr|A0A0X3Q839|A0A0X3Q839_9MICC GTP cyclohydrolase 1; OS = Kocuria palustris OX=71999 GN=folE PE=3 SV=1
MQQQDHHEVGGGPGDLAPVDQPRIRDAVREILSAIGEDPDREGLRETPDRVARAYAEMFSGLAQDPSEVLSASFDIGHSELVLVKDISFYSTCEHHLVPFHGSAHVGYIPGPSGRVTGLSKIARLVEVYARRPQVQERLTTQIADALMDELNAAGAIVVVQCEHLCMSMRGVRKPGASTVTSAVRGQLREPATRSEAMSLILGG

SEQ ID NO: 9423 - protein, 204 aa, Kocuria palustris
  REGION 1..204: note = tr|M2YG42|M2YG42_9MICC GTP cyclohydrolase 1; OS = Kocuria palustris PEL OX=1236550 GN=folE PE=3 SV=1
MQQQDHHEVGGGPGDLAPVDQPRIRDAVREILSAIGEDPDREGLRETPDRVARAYAEMFSGLAQDPSEVLSASFDIGHSELVLVKDISFYSTCEHHLVPFHGSAHVGYIPGPSGRVTGLSKIARLVEVYARRLQVQERLTTQIADALMGELNAAGAIVVVQCEHLCMSMRGVRKPGASTVTSAVRGQLREPATRSEAMSLILGG

SEQ ID NO: 9424 - protein, 193 aa, Kocuria polaris
  REGION 1..193: note = tr|A0A0W8I3E1|A0A0W8I3E1_9MICC GTP cyclohydrolase 1; OS = Kocuria polaris OX=136273 GN=folE PE=3 SV=1
MEAGAGAVDQPRVAAAVRELLLAIGEDPDRDGLQGTPGRVARAYAEMFAGLHQDPAEVLGTTFDIGHSEMVLVKDIAFYSTCEHHLVPFHGHAHVGYIPGHDGMVTGLSKLARLVDLYARRPQVQERLTTQIVEAIVEHLQPAGVIVVIECEHLCMSMRGVRKPGAMTVTSAVRGQLRETATRAEAMSLILGR

SEQ ID NO: 9425 - protein, 251 aa, Kocuria polaris
  REGION 1..251: note = tr|A0A0A6YCM7|A0A0A6YCM7_9MICC GTP cyclohydrolase 1; OS = Kocuria polaris OX=136273 GN=folE PE=3 SV=1
MERQPVASADSRPVRQTPPHRQIPKEGALPHEARTKQTSAHDLRAEAFDPPYPDPAPALEAGAGAVDQPRVAAAVRELLLAIGEDPDRDGLQGTPGRVARAYAEMFAGLHQDPAEILGTTFDIGHSEMVLVKDIPFYSTCEHHLVPFHGHAHVGYIPGHDGMVTGLSKLARLVDLFARRPQVQERLTTQVVEAIMEHLQPAGVIVVVECEHLCMSMRGVRKPGAKTVTSAVRGQLREPATRAEAMSLILGR

SEQ ID NO: 9426 - protein, 216 aa, Kocuria rhizophila
  REGION 1..216: note = tr|A0A0B4DT43|A0A0B4DT43_KOCRH GTP cyclohydrolase 1; OS = Kocuria rhizophila OX=72000 GN=folE PE=3 SV=1
MTHQHEPGEPVSGSYLEHVAGAETAAAVDQPRIAAAVREILLAVGEDPDRSGLRDTPERVARAYAEVFAGLHEDPAELLATSFDIGHSEMVLVRDVPFYSTCEHHLVPFHGVAHVGYIPGPEGKVTGLSKLARLVDLFAKRPQVQERLTTQVVEALVEHLHPAGAIVVVECEHLCMSMRGVRKPGAKTVTSAVRGQLRDPATRAEAMNLIAAGHSR

SEQ ID NO: 9427 - protein, 232 aa, Kocuria rhizophila
  REGION 1..232: note = tr|B2GG73|B2GG73_KOCRD GTP cyclohydrolase 1; OS = Kocuria rhizophila (strain ATCC 9341 / DSM 348 / NBRC 103217 / DC2201) OX=378753 GN=folE PE=3 SV=1
MAPAPEQNAPIPSAPEHDAHEPVSEPVSGSFLDHAGTGEVSAAVDQPRIAAAVREILLAVGEDPDRNGLRDTPARVARAYAEVFAGLHEDPAELLATSFDIGHSEMVLVRDVPFYSTCEHHLVPFHGVAHVGYIPGPEGKVTGLSKLARLVDLYAKRPQVQERLTTQVVEALVAHLHPAGAIVVVECEHLCMSMRGVRKPGARTVTSAVRGQLRDPATRAEAMNLIAAGHGR

SEQ ID NO: 9428 - protein, 251 aa, Kocuria rosea
  REGION 1..251: note = tr|A0A4R5YAT4|A0A4R5YAT4_KOCRO GTP cyclohydrolase 1; OS = Kocuria rosea OX=1275 GN=folE PE=3 SV=1
MERQPVASADSRPVRQTPPHRQIPKEGALPHEARTKQTSAHDLRAEAFDPPYPDPAPALEAGAGAVDQPRVAAAVRELLLAIGEDPDRDGLQGTPGRVARAYAEMFAGLHQDPAEILGTTFDIGHSEMVLVKDIPFYSTCEHHLVPFHGHAHVGYIPGHDGMVTGLSKLARLVDLFARRPQVQERLTTQVVEAIVEHLQPAGVIVVVECEHLCMSMRGVRKPGAKTVTSAVRGQLREPATRAEAMSLILGR

SEQ ID NO: 9429 - protein, 251 aa, Kocuria rosea
  REGION 1..251: note = tr|A0A378GSL9|A0A378GSL9_KOCRO GTP cyclohydrolase 1; OS = Kocuria rosea OX=1275 GN=folE PE=3 SV=1
MERQPVASADSRPVRQTPPHRQIPKEGALPHEARTKQTSAHDLRAEAFDPPYPDPAPALEAGAGAVDQPRVAAAVRELLLAIGDDPDRDGLQGTPGRVARAYAEMFAGLHQDPAEILGTTFDIGHSEMVLVKDIPFYSTCEHHLVPFHGHAHVGYIPGHDGMVTGLSKLARLVDLFARRPQVQERLTTQVVEAIMEHLQPAGVIVVVECEHLCMSMRGVRKPGAKTVTSAVRGQLREPATRAEAMSLILGR

SEQ ID NO: 9430 - protein, 206 aa, Kocuria sp.
  REGION 1..206: note = tr|A0A1A0J9L3|A0A1A0J9L3_9MICC GTP cyclohydrolase 1; OS = Kocuria sp. ICS0012 OX=1834155 GN=folE PE=3 SV=1
MSGSYADYADAPQLDPTVDQPRIAAAVREILLAVGEDPDRDGLRDTPARVARAYAEVFAGLHQDPADLLATSFDIGHSEMVLVRDIPFYSTCEHHLVPFHGLAHVGYIPGPEGKVTGLSKLARLVDLYAKRPQVQERLTTQVVEALSEHLHPAGAIVVIECEHLCMSMRGVRKPGAMTVTSAVRGQLRNPATRAEAMNLIQAGHAQ

SEQ ID NO: 9431 - protein, 218 aa, Kocuria sp.
  REGION 1..218: note = tr|A0A3S1A140|A0A3S1A140_9MICC GTP cyclohydrolase 1; OS = Kocuria sp. HSID17590 OX=2419513 GN=folE PE=3 SV=1
MTSADQHGVPEPVSGSYEELAAVASASPAVDQPRIAAAVREILLAVGEDPDRSGLEETPERVARAYAEIFAGLHEDPAKLLATSFDIGHSEMVLVKDIPFYSTCEHHLVPFHGVAHVGYIPGPEGKVTGLSKLARLVDLFAKRPQVQERLTTQVVEALVTHLNPAGAIVVVECEHLCMSMRGVRKPGARTVTSAVRGQLRDPATRAEAMNLIAAEHRR

SEQ ID NO: 9432 - protein, 222 aa, Kocuria turfanensis
  REGION 1..222: note = tr|A0A512IC77|A0A512IC77_9MICC GTP cyclohydrolase 1; OS = Kocuria turfanensis OX=388357 GN=folE PE=3 SV=1
MPHEARTHTHTHDLAAEAFEPPYPDPAPALEAGAGAVDQPRVAAAVRELLLAIGEDPDRDGLQGTPGRVARAYAEMFAGLHQDPAEILGTTFDIGHSEMVLVKDIPFYSTCEHHLVPFHGHAHVGYIPGHDGMVTGLSKLARLVDLFARRPQVQERLTTQIVEAIVEHLKPAGVIVVVECEHLCMSMRGVRKPGAKTVTSAVRGQLRETATRAEAMSLILGR

SEQ ID NO: 9433 - protein, 191 aa, unidentified
  source 1..191: note = Kocuria tytonicola
  REGION 1..191: note = tr|A0A3L9KZE3|A0A3L9KZE3_9MICC GTP cyclohydrolase 1; OS = Kocuria tytonicola OX=2055946 GN=folE PE=3 SV=1
MSPAIDQPRIAAAVREILLAVGEDPDRNGLRDTPARVARSYAEVFAGLHEDPAELLATSFDIGHSEMVLVRDVPFYSTCEHHLMPFHGVAHVGYIPGPEGKVTGLSKLARLVDLYARRPQVQERLTTQVVEAIVEHLHPAGAIVVVECEHLCMSMRGVRKPGAKTVTSAVRGQLRNPATRAEAMNLIASGH

SEQ ID NO: 9434 - protein, 226 aa, Kocuria varians
  REGION 1..226: note = tr|A0A4Y4D0V0|A0A4Y4D0V0_KOCVA GTP cyclohydrolase 1; OS = Kocuria varians OX=1272 GN=folE PE=3 SV=1
MSPQDQYGSPEPVSARTAEPVSGSYAEYAENAELSHEVDQPRIAAAVREILLAVGEDPDRSGLRDTPQRVARAYAEVFAGLHQDPSRLLATSFDIGHSEMVLVKDIPFFSTCEHHLVPFHGVAHVGYIPGPEGKVTGLSKLARLVDLYAKRPQVQERLTTQVVEALVAHLAPAGAIVVVECEHLCMSMRGVRKPGAQTVTSAVRGQLRDPATRAEAMNLIAAGHRR

SEQ ID NO: 9435 - protein, 204 aa, unidentified
  source 1..204: note = Komagataeibacter cocois
  REGION 1..204: note = tr|A0A365YYV5|A0A365YYV5_9PROT GTP cyclohydrolase 1; OS = Komagataeibacter cocois OX=1747507 GN=folE PE=3 SV=1
MTPTDTAPLHRPTREEAEDAVRTLLRWAGEDPGREGLHDTPSRVVRSYEEFFCGYAEDPVDLLTRTFSEVEDYDEMVLLRDIRFESHCEHHMVPIVGVAHVAYLPRKRVVGISKLARVVDAYSKRFQIQERLTAQIANTINDVLQPRGVGVVIEGSHQCMTTRGVHRPGVSMVTSRMLGTFRSNSDTRREFLSILNRPGVTGGV

SEQ ID NO: 9436 - protein, 201 aa, unidentified
  source 1..201: note = Komagataeibacter europaeus
  REGION 1..201: note = tr|A0A0M0EI03|A0A0M0EI03_KOMEU GTP cyclohydrolase 1; OS = Komagataeibacter europaeus OX=33995 GN=folE PE=3 SV=1
MTPIDSRPSRTEAEEAVRTLLRWAGEDPDREGLRDTPQRVIKSYDEFFCGYAEDPVDLLRRTFSEVDDYDEMVLLRDIRVESHCEHHMVPIIGVAHVAYLPRKRVVGISKLARVVDAYARRFQIQERLTAQIANTINEELQPYGVGVVIEASHQCMTTRGVHRPGVSMVTSRMLGTFRTNSDTRREFLSILNRPAMNSSGI

SEQ ID NO: 9437 - protein, 201 aa, unidentified
  source 1..201: note = Komagataeibacter europaeus
  REGION 1..201: note = tr|A0A0D6Q1D5|A0A0D6Q1D5_KOMEU GTP cyclohydrolase 1; OS = Komagataeibacter europaeus NBRC 3261 OX=1234669 GN=folE; PE = 3 SV=1
MTPIDSRPSRTEAEEAVRTLLRWAGEDPDREGLRDTPQRVIKSYDEFFCGYAEDPVDLLRRTFSEVDDYDEMVLLRDIRVESHCEHHMVPIIGVAHVAYLPRKRVVGISKLARVVDAYARRFQIQERLTAQIANTINEELQPYGVGVVIEASHQCMTTRGVHRPGVSMVTSRMLGTFRTNSDTRREFLSILNRPAMNSGGI

SEQ ID NO: 9438 - protein, 204 aa, unidentified
  source 1..204: note = Komagataeibacter hansenii
  REGION 1..204: note = tr|A0A318PW88|A0A318PW88_KOMHA GTP cyclohydrolase 1; OS = Komagataeibacter hansenii OX=436 GN=folE PE=3 SV=1
MTPTDSAPLPPPTREEAEDAVRTLLRWAGEDPRREGLHDTPSRVVRSYEEFFCGYAEDPVDLLTRTFSEVEDYDEMVLLRDIRFESHCEHHMVPIIGVAHVAYLPRKRVVGISKLARVVDAYAKRFQIQERLTAQIANTINDVLQPRGVGVVIEASHQCMTTRGVHRPGVSMVTSRMLGTFRSNSDTRREFLSILNRPGVTGGV

SEQ ID NO: 9439 - protein, 204 aa, unidentified; identical to SEQ ID NO: 9438
  source 1..204: note = Komagataeibacter hansenii
  REGION 1..204: note = tr|D5QJ61|D5QJ61_KOMHA GTP cyclohydrolase 1; OS = Komagataeibacter hansenii ATCC 23769 OX=714995 GN=folE; PE = 3 SV=1

SEQ ID NO: 9440 - protein, 208 aa, unidentified
  source 1..208: note = Komagataeibacter intermedius
  REGION 1..208: note = tr|A0A0N0MDD8|A0A0N0MDD8_9PROT GTP cyclohydrolase 1; OS = Komagataeibacter intermedius AF2 OX=1458464 GN=folE; PE = 3 SV=1
MQQEPTAMTPIDSHPTRQEAEEAVRTLLRWAGEDPDREGLRDTPQRVIKSYDEFFCGYAEDPVDLLRRTFSEVDDYDEMVLLRDIRVESHCEHHMVPIIGVAHVAYLPRKRVVGISKLARVVDAYARRFQIQERLTAQIANTINEELQPYGVAVVIEASHQCMTTRGVHRPGVSMVTSRMLGTFRTNSDTRREFLSILNRPAMNSSGI

SEQ ID NO: 9441 - protein, 161 aa, unidentified
  source 1..161: note = Komagataeibacter maltaceti
  REGION 1..161: note = tr|A0A2S3W323|A0A2S3W323_9PROT GTP cyclohydrolase 1; OS = Komagataeibacter maltaceti OX=1203393 GN=folE PE=3 SV=1
MVRSYEEFFCGYAEDPVDLLTRTFSEVEDYDEMVLLRDIRFESHCEHHMVPIIGVAHVAYLPRKRVVGISKLARVVDAYARRFQIQERMTAQIANTINEVLQPRGVGVVIEASHQCMTTRGVHRPGVSMVTSRMLGTFRSNSDTRREFLSILNRPGVTGGV

SEQ ID NO: 9442 - protein, 201 aa, unidentified
  source 1..201: note = Komagataeibacter medellinensis
  REGION 1..201: note = tr|G2I6M6|G2I6M6_KOMMN GTP cyclohydrolase 1; OS = Komagataeibacter medellinensis (strain NBRC 3288 / BCRC 11682 / LMG 1693 / Kondo 51) OX=634177 GN=folE PE=3 SV=1
MTPIDTRPTRADAEEAVRTLLRWAGEDPGREGLLDTPARVVKSYGEFFCGYAEDPAEMLRRTFSEVADYDEMVLLRDIRVESHCEHHMVPIIGVAHVAYLPRRRVVGISKLARVVDAYARRFQIQERLTAQIANTINDELQPYGVGVVIEAAHQCMTTRGVHRPGVSMVTSRMLGTFRTNSDTRREFLSILNRPAMNGTGI

SEQ ID NO: 9443 - protein, 201 aa, unidentified
  source 1..201: note = Komagataeibacter nataicola
  REGION 1..201: note = tr|A0A1U9RK56|A0A1U9RK56_9PROT GTP cyclohydrolase 1; OS = Komagataeibacter nataicola OX=265960 GN=folE PE=3 SV=1
MTPIDSHPTRTEAEEAVRTLLRWAGEDPDREGLRDTPARVIKSYGEFFAGYAEDPVDMLRRTFSEVDDYDEMVLLRDIRVESHCEHHMVPIIGVAHVAYLPRKRVVGISKLARVVDAYARRFQIQERLTAQIANTINEELQPYGVGVVIEAAHQCMTTRGVHRPGVSMVTSRMLGTFRTNSDTRREFLSILNRPAMSSAGI

SEQ ID NO: 9444 - protein, 210 aa, unidentified; identical to SEQ ID NO: 3686
  source 1..210: note = Komagataeibacter nataicola
  REGION 1..210: note = tr|A0A1U9RPQ9|A0A1U9RPQ9_9PROT GTP cyclohydrolase 1; OS = Komagataeibacter nataicola OX=265960 GN=folE PE=3 SV=1

SEQ ID NO: 9445 - protein, 201 aa, unidentified
  source 1..201: note = Komagataeibacter oboediens
  REGION 1..201: note = tr|A0A318QWX3|A0A318QWX3_9PROT GTP cyclohydrolase 1; OS = Komagataeibacter oboediens OX=65958 GN=folE PE=3 SV=1
MTPIDSHPTRQEAEEAVRTLLRWAGEDPDREGLRDTPQRVIKSYDEFFCGYAEDPVDLLRRTFSEVDDYDEMVLLRDIRVESHCEHHMVPIIGVAHVAYLPRKRVVGISKLARVVDAYARRFQIQERLTAQIANTINEELQPYGVAVVIEASHQCMTTRGVHRPGVSMVTSRMLGTFRTNSDTRREFLSILNRPAMNSSGI

SEQ ID NO: 9446 - protein, 204 aa, unidentified; identical to SEQ ID NO: 9435
  source 1..204: note = Komagataeibacter pomaceti
  REGION 1..204: note = tr|A0A318QDN2|A0A318QDN2_9PROT GTP cyclohydrolase 1; OS = Komagataeibacter pomaceti OX=2021998 GN=folE PE=3 SV=1

SEQ ID NO: 9447 - protein, 201 aa, unidentified; identical to SEQ ID NO: 8619
  source 1..201: note = Komagataeibacter rhaeticus
  REGION 1..201: note = tr|A0A181CDE7|A0A181CDE7_9PROT GTP cyclohydrolase 1; OS = Komagataeibacter rhaeticus OX=215221 GN=folE PE=3 SV=1

SEQ ID NO: 9448 - protein, 201 aa, unidentified; identical to SEQ ID NO: 8619
  source 1..201: note = Komagataeibacter rhaeticus
  REGION 1..201: note = tr|A0A070AFL4|A0A070AFL4_9PROT GTP cyclohydrolase 1; OS = Komagataeibacter rhaeticus AF1 OX=1432055 GN=folE PE=3; SV = 1

SEQ ID NO: 9449 - protein, 201 aa, unidentified
  source 1..201: note = Komagataeibacter saccharivorans
  REGION 1..201: note = tr|A0A347WBG0|A0A347WBG0_9PROT GTP cyclohydrolase 1; OS = Komagataeibacter saccharivorans OX=265959 GN=folE PE=3; SV = 1
MNAIDSRPSRTDAEEAVRTLLRWAGEDPDREGLRDTPERVIKSYDEFFCGYAEDPVDLLRRTFSEVEDYDEMVLLRDIRVESHCEHHMVPIIGVAHVAYLPRKRVVGISKLARVVDAYARRFQIQERLTAQIANTINEELQPYGVGVVIEASHQCMTTRGVHRPGVSMVTSRMLGTFRSNSDTRREFLSILNRPPMNSSGI

SEQ ID NO: 9450 - protein, 201 aa, unidentified; identical to SEQ ID NO: 9436
  source 1..201: note = Komagataeibacter sp.
  REGION 1..201: note = tr|A0A4P5P5V2|A0A4P5P5V2_9PROT GTP cyclohydrolase 1; OS = Komagataeibacter sp. MSKU15 OX=1932664 GN=folE PE=3 SV=1

SEQ ID NO: 9451 - protein, 201 aa, unidentified; identical to SEQ ID NO: 9436
  source 1..201: note = Komagataeibacter sp.
  REGION 1..201: note = tr|A0A4P5NQE4|A0A4P5NQE4_9PROT GTP cyclohydrolase 1; OS = Komagataeibacter sp. MSKU9 OX=1932662 GN=folE PE=3 SV=1

SEQ ID NO: 9452 - protein, 201 aa, unidentified
  source 1..201: note = Komagataeibacter sucrofermentans
  REGION 1..201: note = tr|A0A318QKL7|A0A318QKL7_9PROT GTP cyclohydrolase 1; OS = Komagataeibacter sucrofermentans OX=1053551 GN=folE; PE = 3 SV=1
MTPIDSRPTRTEAEDAVRTLLRWAGEDPDREGLRDTPARVIKSYGEFFAGYAEDPVDMLRRTFSEVDDYDEMVLLRDIRVESHCEHHMVPIIGVAHVAYLPRKRVVGISKLARVVDAYARRFQIQERLTAQIANTINEELQPYGVGVVIEAAHQCMTTRGVHRPGVSMVTSRMLGTFRTNSDTRREFLSILNRPAMSSAGI

SEQ ID NO: 9453 - protein, 201 aa, unidentified
  source 1..201: note = Komagataeibacter swingsii
  REGION 1..201: note = tr|A0A2V4RAJ6|A0A2V4RAJ6_9PROT GTP cyclohydrolase 1; OS = Komagataeibacter swingsii OX=215220 GN=folE PE=3 SV=1
MTSIDSRPSRTEAEEAVRTLLRWAGEDPDREGLRDTPQRVIKSYDEFFCGYAEDPVDLLRRTFSEVDDYDEMVLLRDIRVESHCEHHMVPIIGVAHVAYLPRKRVVGISKLARVVDAYARRFQIQERLTAQIANTINEELQPYGVGVVIEASHQCMTTRGVHRPGVSMVTSRMLGTFRTNSDTRREFLSILNRPAMNSSGI

SEQ ID NO: 9454 - protein, 201 aa, unidentified; identical to SEQ ID NO: 8619
  source 1..201: note = Komagataeibacter xylinus
  REGION 1..201: note = tr|A0A2D3HAP0|A0A2D3HAP0_KOMXY GTP cyclohydrolase 1; OS = Komagataeibacter xylinus OX=28448 GN=folE PE=3 SV=1

SEQ ID NO: 9455 - protein, 204 aa, unidentified
  source 1..204: note = Komagataeibacter xylinus
  REGION 1..204: note = tr|A0A143WN06|A0A143WN06_KOMXY GTP cyclohydrolase 1; OS = Komagataeibacter xylinus OX=28448 GN=folE PE=3 SV=1
MTPTDSAPLPPPTREEAEDAVRTLLRWAGEDPRREGLHDTPSRVVRSYEEFFCGYAEDPVDLLTRTFSEVEDYDEMVLLRDIRFESHCEHHMVPIIGVAHVAYLPRKRVVGISKLARVVDAYAKRFQIQERLTAQIANTINDVLQPRGVGVVIEASHQCMTTRGVHRPGVSMVTSRMLGTFRSNSDTRREFLSILNRPGITGGV

SEQ ID NO: 9456 - protein, 198 aa, Kordia algicida
  REGION 1..198: note = tr|A9DXR7|A9DXR7_9FLAO GTP cyclohydrolase 1; OS = Kordia algicida OT-1 OX=391587 GN=folE PE=3 SV=1
MPYRKLEEYNIEVTNEVKDRYKAIIEELGEDTTREGLLKTPERAAKAMQFLTQGYDMDPAEILKGAMFAEDYNEMVIVKDIELYSLCEHHILPFFGKAHIAYIPNGHIVGLSKLPRIVDVFSRRLQVQERLTHDILECINNTLKPKGVAVVIEASHMCMMMRGVQKQNSVTTTSGFRGAFETIETRTEFLKLISSSLS

SEQ ID NO: 9457 - protein, 233 aa, Kordia algicida
  REGION 1..233: note = tr|A9E3M2|A9E3M2_9FLAO GTP cyclohydrolase 1; OS = Kordia algicida OT-1 OX=391587 GN=folE PE=3 SV=1
MKTADVLNHMNGTAISLNGFNHDEIGDEHLLTGMETPMRADAFKMSDEEKKQKISYHFAEIMETLGLDLNDDSLKGTPNRVAKMYIEEIFSGLNPMNKPKVALFDNKYQYNQMLIEKNIQFYSNCEHHFVPIMGKAHVAYISSGKVIGLSKLNRIVQYYAKRPQVQERLTNQIATELCEILQTDDVAVIIDAKHLCVSSRGVKDDSSTTITSYYGGVFNTPEKIIELQNFLNN

SEQ ID NO: 9458 - protein, 198 aa, Kordia periserrulae
  REGION 1..198: note = tr|A0A2T6C3U5|A0A2T6C3U5_9FLAO GTP cyclohydrolase 1; OS = Kordia periserrulae OX=701523 GN=folE PE=3 SV=1
MSYRKLEEYDLQVTQEVKNRYKTIIEELGEDTTREGLLKTPERAAKAMQFLTQGYDMDAAEILKGAMFAEDYNEMVIVKDIELYSLCEHHILPFFGKAHIAYIPNGHIVGLSKLPRVVDVFARRLQVQERLTHDILECINNTLKPKGVAVVIEASHMCMMMRGVQKQNSVTTTSGFRGAFESMETRNEFLKLISSDLS

SEQ ID NO: 9459 - protein, 226 aa, Kordia periserrulae
  REGION 1..226: note = tr|A0A2T6BYR7|A0A2T6BYR7_9FLAO GTP cyclohydrolase 1; OS = Kordia periserrulae OX=701523 GN=folE PE=3 SV=1
MKIDKALEEEIQAMGDDHMMTSYETPMREDAFDLSDDEKIQSIRKDVANIMQTLGLDMTDDSLKGTPNRVAKMFVKEIFGGLHPDRRPKASTFDNKYKYNEMLVEKNITVYSTCEHHLLPIVGRAHIAYISNGNVVGLSKMNRIVDYYAKRPQVQERLTIQVVKELQKVLGTEDVACVIDAKHLCVNSRGIRDIESSTVTAEFGGKFKNEKTRLEFLDYIKLDTKF

SEQ ID NO: 9460 - protein, 226 aa, Kordia sp.
  REGION 1..226: note = tr|A0A501HI58|A0A501HI58_9FLAO GTP cyclohydrolase 1; OS = Kordia sp. TARA_039_SRF OX=2530203 GN=folE PE=3 SV=1
MKIDKALEEEIQAMGDDHIMTSYETPLREDAFDLSDDEKIVSIRKDVANIMQTLGLDMTDDSLKGTPNRVAKMFVKEIFGGLHPDRRPKASTFDNKYKYNEMLVEKNITVYSTCEHHLLPIVGRAHIAYISNGNVVGLSKMNRIVDYYAKRPQVQERLTIQVVKELQKVLGTEDVACVIDAKHLCVNSRGIRDIESSTVTAEFGGKFKNEKTRLEFLDYIKLDTKF

SEQ ID NO: 9461 - protein, 220 aa, Kordia sp.
  REGION 1..220: note = tr|A0A501HD16|A0A501HD16_9FLAO GTP cyclohydrolase 1; OS = Kordia sp. TARA_039_SRF OX=2530203 GN=folE PE=3 SV=1
MNKEQIELLGDNHIASSPETPLRPDAFDTSDDEKVKNIQEYFGMIMQELGLDLTDDSLSGTPYRVAKMYVKELFYGLNPANKPKLSTFENKYEYGKMLVEQQITIDSSCEHHFLPIVGYAHVAYVPKDRVIGLSKINRLVDYYAHRPQVQERLSLQILKDLQTALNTEDVIVMVVAKHLCVSSRGIKDKNSFTTTVEFGGCFEQDEKRQEFLDIVTKISM

SEQ ID NO: 9462 - protein, 228 aa, unidentified
  source 1..228: note = Kordiimonadales bacterium
  REGION 1..228: note = tr|A0A5A7N3T1|A0A5A7N3T1_9PROT GTP cyclohydrolase 1; OS = Kordiimonadales bacterium JCM 17846 OX=1236968; GN = folE_1 PE=3 SV=1
MDELIRLASGDRDGTALHRPYDSKAISDENRGDDVLNGQLRPDRQAAMQAVETLLAFMGENPQRSGLLETPRRVVDALLEHGRGYDLDPDAILARTFDEVEGYDDMVLLQGIRFESRCEHHLEPIIGVAHVAYLPSDRVVGLSKIARVVDVFAKRLQVQERMTAQIASAIDRALAPRGVAVWLSAEHFCMASRGVHKVGVSTHTQRMTGLFAKDVHLATRFMTLAKAD

SEQ ID NO: 9463 - protein, 213 aa, unidentified
  source 1..213: note = Kordiimonadales bacterium
  REGION 1..213: note = tr|A0A2A4VM78|A0A2A4VM78_9PROT GTP cyclohydrolase 1; OS = Kordiimonadales bacterium OX=2030814 GN=folE PE=3 SV=1
MDAVLDRIDHDPELKVVSQDTEISTSKRPSRAEAEAAVRTLIRWAGDDPTREGLIDTPKRVTKAYEEFFEGYDQDPEEILARTFDEVAGYDDMVVLRGIRVESHCEHHMVPVQGTAHVAYMPNGSVVGISKLARIVETYSKRLQTQETMTAQIADAIEKYLDPKGVAIVIDATHQCMSCRGVKHQNVYTITRQFRGCFKEADQERRFWDLVRG

SEQ ID NO: 9464 - protein, 220 aa, Kordiimonas lacus
  REGION 1..220: note = tr|A0A1G6Y2C3|A0A1G6Y2C3_9PROT GTP cyclohydrolase 1; OS = Kordiimonas lacus OX=637679 GN=folE PE=3 SV=1
MDAVLERADTGSELKVIPDDARGDAGAGTTPRVIKPSRAEAEEAVRTLIRWAGDDPTREGLLDTPKRVTKAYKEFFKGYEDDPAEILSRTFEEVAGYDDMVVLRGIKVESHCEHHMVPVLGTAHVAYMPNGSVVGISKLARIVEAYGKRLQTQETMTAQIADAIETYLKPKGVAVVIDATHSCMSCRGVKHSDVYTITRQFRGVFREADQERRFWDLVRG

SEQ ID NO: 9465 - protein, 211 aa, Kordiimonas sp.
  REGION 1..211: note = tr|A0A2E1CSV0|A0A2E1CSV0_9PROT GTP cyclohydrolase 1; OS = Kordiimonas sp. OX=1970157 GN=folE PE=3 SV=1
MVVKAVQKQEAAVVRPDREEAEAAVRTLLQWAGDDPDREGLLDTPARVARAFEEYFAGYKMDPVDYLSRTFEEVAGYDEMVVLKDIPFESHCEHHLAPIIGRAHVGYLPSNRVVGISKLARVVEAYAKRLQVQEKMTAQIADCILDVLQPKGVAVYIEATHHCMTTRGVHKHGVSMVTSRLLGAFRDDEKTRREFLATVGTTQFSSPHFVG

SEQ ID NO: 9466 - protein, 199 aa, unidentified
  source 1..199: note = Koribacter versatilis
  REGION 1..199: note = tr|Q1IPJ1|Q1IPJ1_KORVE GTP cyclohydrolase 1; OS = Koribacter versatilis (strain Ellin345) OX=204669; GN = folE PE=3 SV=1
MKTEKEPTTLTSASNEELVAELLQRIGEDPKREGLLRTPERYAKALKFLTKGYDEDPETVLNGALFTVTYDEMVIVKDIEMFSLCEHHLLPFFGKVHIAYIPNGKVIGLSKLPRLVEVFARRLQVQERLTTEIAQTIERVIEPLGVGVIIEARHLCMMMRGVEKQHSSTVTSAMLGAFRAPQTREEFLSLVRNSKTNGF

SEQ ID NO: 9467 - protein, 222 aa, unidentified
  source 1..222: note = Kosakonia arachidis
  REGION 1..222: note = tr|A0A1I7CXH2|A0A1I7CXH2_9ENTR GTP cyclohydrolase 1; OS = Kosakonia arachidis OX=551989 GN=folE PE=3 SV=1
MSSLSKEAALVHEALVARGLETPLRPPVREMDNETRKRLISGHMTEIMQLLNLDLNDDSLMETPHRIAKMYVDEIFSGLDYANFPKITVIENKMKVDEMVTVRDITLTSTCEHHFVTIDGKATVAYIPKESVIGLSKINRIVQFFAQRPQVQERLTQQILTALQTLLGTNNVAVSIDAVHYCVKARGIRDATSATTTTSLGGLFKSSQNTRQEFLRAVRHSN

SEQ ID NO: 9468 - protein, 221 aa, unidentified
  source 1..221: note = Kosakonia cowanii
  REGION 1..221: note = tr|A0A3R5YF60|A0A3R5YF60_9ENTR GTP cyclohydrolase 1; OS = Kosakonia cowanii OX=208223 GN=folE PE=3 SV=1
MSSLSKEAALVHEALVARGLETPLRPPVQMDNETRKRLIAGHMTEIMQLLNLDLNDDSLMETPHRIAKMYVDEIFSGLDYANFPKITVIENKMKVDEMVTVRDITLTSTCEHHFVTIDGKATVAYIPKESVIGLSKINRIVQFFAQRPQVQERLTQQILTALQTLLGTNNVAVSIDAVHYCVKARGIRDATSATTTTSLGGLFKSSQNTRQEFLRAVRHTN

SEQ ID NO: 9469 - protein, 222 aa, unidentified; identical to SEQ ID NO: 9467
  source 1..222: note = Kosakonia oryzae
  REGION 1..222: note = tr|A0A1T5HHT2|A0A1T5HHT2_9ENTR GTP cyclohydrolase 1; OS = Kosakonia oryzae OX=497725 GN=folE PE=3 SV=1

SEQ ID NO: 9470 - protein, 222 aa, unidentified
  source 1..222: note = Kosakonia oryzendophytica
  REGION 1..222: note = tr|A0A1C3Z092|A0A1C3Z092_9ENTR GTP cyclohydrolase 1; OS = Kosakonia oryzendophytica OX=1005665 GN=folE PE=3 SV=1
MSSLSKEAALVHEALVARGLETPLRPPVRETDNETRKRLIAGHMTEIMQLLNLDLNDDSLMETPHRIAKMYVDEIFSGLDYANFPKITVIENKMKVDEMVTVRDITLTSTCEHHFVTIDGKATVAYIPKESVIGLSKINRIVQFFAQRPQVQERLTQQILTALQTLLGTNNVAVSIDAVHYCVKARGIRDATSATTTTSLGGLFKSSQNTRQEFLRAVRHHN

SEQ ID NO: 9471 - protein, 222 aa, unidentified
  source 1..222: note = Kosakonia oryziphila
  REGION 1..222: note = tr|A0A1C4AU15|A0A1C4AU15_9ENTR GTP cyclohydrolase 1; OS = Kosakonia oryziphila OX=1005667 GN=folE PE=3 SV=1
MSSLSKEAALVHEALVARGLETPLRPPVREMDNETRKRLISGHMTEIMQLLNLDLTDDSLMETPHRIAKMYVDEIFSGLDYANFPKITVIENKMKVDEMVTVRDITLTSTCEHHFVTIDGKATVAYIPKESVIGLSKINRIVQFFAQRPQVQERLTQQILTALQTLLGTNNVAVSIDAVHYCVKARGIRDATSATTTTSLGGLFKSSQNTRQEFLRAVRHSN

SEQ ID NO: 9472 - protein, 222 aa, unidentified; identical to SEQ ID NO: 9467
  source 1..222: note = Kosakonia radicincitans
  REGION 1..222: note = tr|A0A1V0LBM0|A0A1V0LBM0_9ENTR GTP cyclohydrolase 1; OS = Kosakonia radicincitans DSM 16656 OX=1177180 GN=folE; PE = 3 SV=1

SEQ ID NO: 9473 - protein, 222 aa, unidentified; identical to SEQ ID NO: 9467
  source 1..222: note = Kosakonia radicincitans
  REGION 1..222: note = tr|A0A5E8BNW6|A0A5E8BNW6_9ENTR GTP cyclohydrolase 1; OS = Kosakonia radicincitans OX=283686 GN=folE PE=3 SV=1

SEQ ID NO: 9474 - protein, 221 aa, unidentified; identical to SEQ ID NO: 8737
  source 1..221: note = Kosakonia sp.
  REGION 1..221: note = tr|A0A1I2CP18|A0A1I2CP18_9ENTR GTP cyclohydrolase 1; OS = Kosakonia sp. S29 OX=1855371 GN=folE PE=3 SV=1

SEQ ID NO: 9475 - protein, 221 aa, unidentified
  source 1..221: note = Kosakonia sp.
  REGION 1..221: note = tr|A0A4R0H2J8|A0A4R0H2J8_9ENTR GTP cyclohydrolase 1; OS = Kosakonia sp. WCHEs120001 OX=2529380 GN=folE PE=3 SV=1
MSSLSKEAALVHEALVARGLETPLRPPVQMDNESRKRLIAGHMTEIMQLLNLDLNDDSLMETPHRIAKMYVDEIFSGLDYANFPKITVIENKMKVDEMVTVRDITLTSTCEHHFVTIDGKATVAYIPKDSVIGLSKINRIVQFFAQRPQVQERLTQQILTALQTLLGTNNVAVSIDAVHYCVKARGIRDATSATTTTSLGGLFKSSQNTRQEFLRAVRHTN

SEQ ID NO: 9476 - protein, 256 aa, Kosmotoga arenicorallina
  REGION 1..256: note = tr|A0A176K2W9|A0A176K2W9_9BACT GTP cyclohydrolase FolE2 OS=Kosmotoga arenicorallina S304 OX=1453497 GN=folE2; PE = 3 SV=1
MRDVQNERDERNVPIDMVGIRGLKYPIVVLDRANGRQRTVGTFDLFVDLPRDFRGTHMSRFVEVLDRHNNRITPRNMESILRDMRTFLKADVAHINVFFPYFLRKSAPISGISSYSSFICGFIARLNEGFDFILEVNVPVMTVCPCSKEISERGAHNQRANAKVRIRMKSLVWIEEIIEIAESSASAPIFSLLKREDEKYITELSYDNPRFVEDLSREIVLRLEKDQRITWYRVEVASQESIHNHEAYACIEKRGI

SEQ ID NO: 9477 - protein, 257 aa, Kosmotoga olearia
  REGION 1..257: note = sp|C5CEC0|GCH4_KOSOT GTP cyclohydrolase FolE2; OS = Kosmotoga olearia (strain ATCC BAA-1733 / DSM 21960 / TBF 19.5.1) OX=521045 GN=folE2 PE=3 SV=1
MRDVQSEKDHRNIPINMVGIKGLKYPIIVMDRTNKRQHTIGTFNLFVDLPKDFRGTHMSRFVEVLDRHNMKVTPKNMESILDDMREALKATVAHVTVDFPYFIRKNAPISGIGSYSSYNCGFISTKNKEFDFILKVEVPVLTVCPCSKEISDRGAHNQRAMVNVQVRMNSLVWIEEIIEMVEDAASAPIFTLLKREDEKFITEVSYDNPRFVEDVSREVVLRFMNDPRISWYRVEVSSQESIHNHEAYACIEKGKSL

SEQ ID NO: 9478 - protein, 263 aa, unidentified
  source 1..263: note = Kosmotoga pacifica
  REGION 1..263: note = tr|A0A0G2Z681|A0A0G2Z681_9BACT GTP cyclohydrolase FolE2 OS=Kosmotoga pacifica OX=1330330 GN=folE2 PE=3 SV=1
MKNEKAFLRDVQNERDERNVPIDMVGIRGLKYPIVVLDRANGRQRTVGTFDLFVDLPRDFRGTHMSRFVEVLDRHNNRITPRNMESILKDMREFLKADVAHINVFFPYFLRKSAPVSGISSYSSFECGFITRLNEGFDFILEVNVPVMTVCPCSKEISDRGAHNQRANAKVRIRMNSLVWIEEIIEIAETSASAPIFSLLKREDEKFITELSYDNPRFVEDLSREIVLRLEKDPRITWYRVEVASQESIHNHEAYACIEKRGI

SEQ ID NO: 9479 - protein, 258 aa, Kosmotoga sp.
  REGION 1..258: note = tr|A0A5D0SSM9|A0A5D0SSM9_9BACT GTP cyclohydrolase FolE2 OS=Kosmotoga sp. OX=1955248 GN=folE2 PE=3 SV=1
MRDIQNEMDNRNLSIDMVGIRSLEYPIIVLDRKEGKQSTIGHFDLFVDLPQNFRGTHMSRFVEVLNKHNKKITPKNMRSMLQDMRDSLKAKVAHINVSFPYFIKKAAPVSKIESYSRFHCSFITTLNNSFDFILEVNVPVMTVCPCSREISDRGAHNQRANVRIKIKMNSLVWIEELIEYSEKSASAPIYSLLKREDERFITEISYDRPRFVEDLSREVVLHLQKDERIDWYRVEVSSQESIHNHEAYACIEKGKKWV

SEQ ID NO: 9480 - protein, 258 aa, unidentified
  source 1..258: note = Kosmotogaceae bacterium
  REGION 1..258: note = tr|A0A3B8NA24|A0A3B8NA24_9BACT GTP cyclohydrolase FolE2 OS=Kosmotogaceae bacterium OX=2053567 GN=folE2 PE=3; SV = 1
MIMRDVQNDRDKRNIPVDMVGVRSVMYPIVVLDKENQNQNTVGSFNICVDLPKDFRGTHMSRFIEVLDSHNKKITPRNMKHILDDILRSLDAAVAHLKVEFPYFIRKQAPVSRVESYSSYKCSFTATKNNHFDFVLGVSVPVMTVCPCSREISDRGAHNQRAETHVQLRMNSLVWIEDVVQIVEDSASSPVFSLLKREDEKFVTENSYDNPRFVEDLSREIVQKLEMDRRISWYKVEVTSMESIHNHEAYACIERKDD

SEQ ID NO: 9481 - protein, 223 aa, unidentified
  source 1..223: note = Kouleothrix aurantiaca
  REGION 1..223: note = tr|A0A0P9D523|A0A0P9D523_9CHLR GTP cyclohydrolase 1; OS = Kouleothrix aurantiaca OX=186479 GN=folE PE=3 SV=1
MTSNGHTNGNGTLPLALSAEDNDLVLPGQGKLEGMTFASNDQIEAAVSTILTNIGEDPAREGLQRTPYRVAKMYAELTAGYHVDPVALINDAIFSVDYDEMVLVKDIDFYSLCEHHMLPFMGRVHVAYIPNGKVIGLSKIPRIVETYARRLQVQERMTVEIANFINDALHPQGVAVVAEGVHMCSVMRGVKKANAKMVTSAMRGVFRKDARTRAEFMSHIDHD

SEQ ID NO: 9482 - protein, 200 aa, Kozakia baliensis
  REGION 1..200: note = tr|A0A1D8UXB9|A0A1D8UXB9_9PROT GTP cyclohydrolase 1; OS = Kozakia baliensis OX=153496 GN=folE PE=3 SV=1
MGGERPLGPIDRPADAEERIADAVKEILTALGEDPEREGLFETPQRVARMYLDVLGGLHQDPREHLYKQFVADHHEGAVIVRDIGFHSMCEHHLLPFFGKAHVAYLPEDGRLTGLSKIARMVDALARRPQLQERLTDQIAASIIEVLEPKAVMVLVEAEHMCMAMRGIRSVGSRTVTTVARGVWQRDAQARAEILSLLKG

SEQ ID NO: 9483 - protein, 218 aa, Kozakia baliensis
  REGION 1..218: note = tr|A0A511GP03|A0A511GP03_9PROT GTP cyclohydrolase 1; OS = Kozakia baliensis OX=153496 GN=folE PE=3 SV=1
MNKPTADLVALDAARHKGLGGERPLGPIDRPADAEERIADAVKEILTALGEDPEREGLFETPQRVARMYLDVLGGLHQDPREHLYKQFVADHHEGAVIVRDIGFHSMCEHHLLPFFGKAHVAYLPEDGRLTGLSKIARMVDALARRPQLQERLTDQIAASIIEVLEPKAVMVLVEAEHMCMAMRGIRSVGSRTVTTVARGVWQRDAQARAEILSLLKG

SEQ ID NO: 9484 - protein, 187 aa, Krasilnikovia cinnamomea
  REGION 1..187: note = tr|A0A4Q7ZK42|A0A4Q7ZK42_9ACTN GTP cyclohydrolase 1; OS = Krasilnikovia cinnamomea OX=349313 GN=folE PE=3 SV=1
MLDPHARAAAEEHLRELLKVFGHDIDREGLVDTPRRYVRFLEQFLVPEEFDFTSFSKENYDQMIVQRDVPFYSICEHHLVPFFGVGTIAYIPDRRIVGLSKLARCLRFHAAGLQNQERITMATASRLQEALEPKGVAVILQARHLCMEMRGIKAYGATTITSEVIGAFRDQNRTRGELLSLISQGQK

SEQ ID NO: 9485 - protein, 204 aa, unidentified
  source 1..204: note = Krasilnikoviella flava
  REGION 1..204: note = tr|A0A1T5IKX6|A0A1T5IKX6_9MICO GTP cyclohydrolase 1; OS = Krasilnikoviella flava OX=526729 GN=folE PE=3 SV=1
MTDPVTDLGMRAAADVPPYDSARAEAAVRELLLAVGEDPEREGLKETPARVARAYQEIFAGLRQEPEDVLTTTFDLGHEEMVLVRDIEVYSTCEHHLVPFHGVAHVGYIPSTDGRITGLSKIARLVEVYARRPQVQERLTTQIADAMVRILEPRGVLVVVECEHLCMSMRGVRKPGSRTVTSAVRGIMQSATTRAEAMSLVMGR

SEQ ID NO: 9486 - protein, 190 aa, unidentified
  source 1..190: note = Kribbella albertanoniae
  REGION 1..190: note = tr|A0A4R4QFX7|A0A4R4QFX7_9ACTN GTP cyclohydrolase 1; OS = Kribbella albertanoniae OX=1266829 GN=folE PE=3 SV=1
MTSPKFDHARAERAVRELLFAIGEDPDRDGLRETPARVARSYAEITAGLGQRAEDVLSTTFELEHDEMVLVKDIEVWSVCEHHLVPFTGVAHVGYIPNRDGRITGLSKLARLVDVYAKRPQVQERLTTQIAESLVELLEPRGVIVVIECEHLCMTMRGVRKAGAKTITSAVRGQLRNPVTRAEAMSLIVG

SEQ ID NO: 9487 - protein, 203 aa, unidentified
  source 1..203: note = Kribbella albertanoniae
  REGION 1..203: note = tr|A0A4R4P1I2|A0A4R4P1I2_9ACTN GTP cyclohydrolase 1; OS = Kribbella albertanoniae OX=1266829 GN=folE PE=3 SV=1
MAISADLEAVPLHIVASRAEIDLPAAERAVADLLKALGRDPHSSHLADTPRRVANAYAEMLTPREFALTTFPNDEGYDELVLAKDIPVQSLCEHHLLPFQGVAHVGYLPGDRILGLSKLARVVELFARDLQVQERLTKQVADWLQDHLAPQGVGVVIEAEHQCMSLRGVRAVGSRTVTSALHGVLRDKPSSRQEFFALTGLTP

SEQ ID NO: 9488 - protein, 215 aa, Kribbella amoyensis
  REGION 1..215: note = tr|A0A561BWE8|A0A561BWE8_9ACTN GTP cyclohydrolase 1; OS = Kribbella amoyensis OX=996641 GN=folE PE=3 SV=1
MTTIRSELADPTTQLADPDAPAKLHVVGGRPGIDLPAAQQAVADLLRALGRDPDSAHLADTPRRVANAYAEMLTPREFDLTTFPNDEGYDELVLARDIPVQSLCEHHLLPFEGVAHVGYLPGDRILGLSKLARVVELFARDLQVQERLTKQVADWLQGHLAPKGVGVVIEAEHQCMSLRGVRATGSRTVTSSVHGVLRTNPASRQEFFALTGIAA

SEQ ID NO: 9489 - protein, 190 aa, Kribbella amoyensis
  REGION 1..190: note = tr|A0A561BLU8|A0A561BLU8_9ACTN GTP cyclohydrolase 1; OS = Kribbella amoyensis OX=996641 GN=folE PE=3 SV=1
MTSPKFDHDRAERAIRELLIAIGEDPDREGLKETPARVARSYAEIAGGLGQSAADVLTTTFDLGHDEMVLVKDIEVWSLCEHHLVPFTGVAHVGYIPSAEGRITGLSKLARLVDVYAKRPQVQERLTTQVADSLVELLGPRGVIVVVECEHLCMTMRGVRKPGAKTITSAVRGQLRDPVTRAEAMSLIVG

SEQ ID NO: 9490 - protein, 190 aa, Kribbella antibiotica
  REGION 1..190: note = tr|A0A4R4ZV26|A0A4R4ZV26_9ACTN GTP cyclohydrolase 1; OS = Kribbella antibiotica OX=190195 GN=folE PE=3 SV=1
MTSPKFDHARAERAVRELLFAIGEDPDRDGLRDTPARVARSYAEITAGLGQTAEEVLSTTFDLGHDEMVLVKDIEVWSICEHHLVPFTGVAHVGYIPNRDGRITGLSKLARLVDVYAKRPQVQERLTTQVAESLMELLEPRGVIVVIQCEHLCMTMRGVRKAGAKTITSAVRGQLRNPVTRAEAMSLIVG

SEQ ID NO: 9491 - protein, 207 aa, Kribbella antibiotica
  REGION 1..207: note = tr|A0A4R4Z4G7|A0A4R4Z4G7_9ACTN GTP cyclohydrolase 1; OS = Kribbella antibiotica OX=190195 GN=folE PE=3 SV=1
MSAMAISADLEPVAPLRIVAGRERIDLPAAERAVADLLRALGRDPDSVHLADTPRRVAHAYEEMLTPREFSLTTFPNDEGYDELVLAKDIPVQSLCEHHMLPFQGVAHVGYLPGDRILGLSKLARVVELFARDFQVQERLTKQVADWLQDHLAPKGVGVVIEAEHQCMSLRGVRAIGSRTVTSSLHGILRDKPSSRQEFFALTGLTP

SEQ ID NO: 9492 - protein, 208 aa, Kribbella flavida
  REGION 1..208: note = tr|D2PXS2|D2PXS2_KRIFD GTP cyclohydrolase 1; OS = Kribbella flavida (strain DSM 17836 / JCM 10339 / NBRC 14399) OX=479435 GN=folE PE=3 SV=1
MTTIRTELVETATPATLHVVGGRPAIDLAAAERAVADLLVALGRDPHSAHLAETPRRVANAYAEMLTPREFDLTTFPNDEGYDELVLARDIPVQSLCEHHMLPFQGVAHVGYLPGARILGLSKLARVVELFARDLQVQERLTKQVADWLQLQLAPKGVGVVIEAEHQCMSLRGVRATGSTTVTSAVHGALRENPASRQEFFALTGIAA

SEQ ID NO: 9493 - protein, 198 aa, Kribbella flavida
  REGION 1..198: note = tr|D2PY96|D2PY96_KRIFD GTP cyclohydrolase 1; OS = Kribbella flavida (strain DSM 17836 / JCM 10339 / NBRC 14399) OX=479435 GN=folE PE=3 SV=1
MPAGCAAPVTSPKFDHERAERAVRELLIAIGEDPDREGLKETPARVARSYEEITAGLGLTASDVLTTTFDLGHDEMILVKDIEVWSLCEHHLVPFTGVAHVGYIPNPDGRITGLSKLARLVDVYAKRPQVQERLTTQVAESLVELLQPRGVIVVIECEHLCMTMRGVRKPGARTITSAVRGQLRNPSTRAEAMSLIVG

SEQ ID NO: 9494 - protein, 203 aa, Kribbella jejuensis
  REGION 1..203: note = tr|A0A542DB10|A0A542DB10_9ACTN GTP cyclohydrolase 1; OS = Kribbella jejuensis OX=236068 GN=folE PE=3 SV=1
MAISADLESVPLHIVARREQIDLPAAQRAVADLLTALGRDPQSAHLADTPRRVANAYAEMLTPREFELTTFPNDEGYDELVLAKDIPVQSLCEHHLLPFQGVAHVGYLPGDRILGLSKLARVVELFARDFQVQERLTKQVADWLQDHLEPKGVGVVIEAEHQCMSLRGVRATGSKTVTSALHGTLRNNPSSRAEFFALTGLTP

SEQ ID NO: 9495 - protein, 190 aa, Kribbella jejuensis
  REGION 1..190: note = tr|A0A542ESL2|A0A542ESL2_9ACTN GTP cyclohydrolase 1; OS = Kribbella jejuensis OX=236068 GN=folE PE=3 SV=1
MTSPKFDHARAERAVRELLIAIGEDPEREGLRDTPARVARSYAEMTAGLGNRAEDVLTTTFALEHDEMVLVKDIEVWSLCEHHLVPFTGVAHVGYIPSRDGRVTGLSKLARLVDVYAKRPQVQERLTTQVAESLVEILQPRGVIVVIECEHLCMTMRGVRKPGAKTITSAVRGQLRNPVTRAEAMSLIVG

SEQ ID NO: 9496 - protein, 203 aa, unidentified
  source 1..203: note = Kribbella pittospori
  REGION 1..203: note = tr|A0A4R0KZV8|A0A4R0KZV8_9ACTN GTP cyclohydrolase 1; OS = Kribbella pittospori OX=722689 GN=folE PE=3 SV=1
MAMSADLESVPLHIVPGRAEIDLPAAQRAVADLLTALGRDPHSAHLADTPRRVADAYAEMLTPREFELTTFPNDEGYDELVLAKDIPVQSLCEHHLLPFTGVAHVGYLPGERILGLSKLARVVELFARDFQVQERLTKQVADWLQDHLAPKGVGVVIEAEHQCMSLRGVRATGSRTVTSSLHGTLRENPSSRQEFFALTGLTP

SEQ ID NO: 9497 - protein, 190 aa, unidentified
  source 1..190: note = Kribbella pittospori
  REGION 1..190: note = tr|A0A4R0KGE5|A0A4R0KGE5_9ACTN GTP cyclohydrolase 1; OS = Kribbella pittospori OX=722689 GN=folE PE=3 SV=1
MTSPKFDHARAERAVRELLIAIGEDPDREGLLDTPARVARSYAEITGGLGQRAEDVLTTTFDIGHDEMVLVKGIEVWSLCEHHLVPFTGVAHVGYIPSRDGRITGLSKLARLVDVYAKRPQVQERLTTQVADSLVELLEPRGVIVVIECEHLCMTMRGVRKPGAKTITSAVRGQLRNPVTRAEAMSLIVG

SEQ ID NO: 9498 - protein, 190 aa, unidentified
  source 1..190: note = Kribbella sindirgiensis
  REGION 1..190: note = tr|A0A4R0I676|A0A4R0I676_9ACTN GTP cyclohydrolase 1; OS = Kribbella sindirgiensis OX=1124744 GN=folE PE=3 SV=1
MVSPNFDHERAERAVRELLYAIGEDPDREGLRDTPARVARSYAEITAGLGQGAEDVLTTTFALEHDEMILVKDIEVWSLCEHHLVPFTGVAHVGYIPSRDGRVTGLSKLARLVDVYAKRPQVQERLTTQVAESLVEILQPRGVIVVIECEHLCMTMRGVRKPGAKTITSAVRGQLRNPVTRAEAMSLIVG

SEQ ID NO: 9499 - protein, 203 aa, unidentified
  source 1..203: note = Kribbella sindirgiensis
  REGION 1..203: note = tr|A0A4R0IMT5|A0A4R0IMT5_9ACTN GTP cyclohydrolase 1; OS = Kribbella sindirgiensis OX=1124744 GN=folE PE=3 SV=1
MAISADLESVPLHIVARRAEIDLPAAQRAVADLLTALGRDPHSAHLADTPRRVANAYAEMLTPREFELTTFPNDEGYDELVLAKDIPVQSLCEHHLLPFQGVAHVGYLPGDRILGLSKLARVVELFARDFQVQERLTKQVADWLQDHLAPKGVGVVIEAEHQCMSLRGVRAAGSRTVTSSLHGILRESPSSRQEFFALTGLTP

SEQ ID NO: 9500 - protein, 190 aa, unidentified
  source 1..190: note = Kribbella soli
  REGION 1..190: note = tr|A0A4Q7X9T1|A0A4Q7X9T1_9ACTN GTP cyclohydrolase 1; OS = Kribbella soli OX=1124743 GN=folE PE=3 SV=1
MTSPNFDHERAANAVRELLFAIGEDPDREGLRDTPDRVARSYAEITAGLGQSAGDVLTTTFALEHDEMILVKDIEVWSICEHHLVPFTGVAHVGYIPSRDGRITGLSKLARLVDVYAKRPQIQERLTTQVAESLVEILEPRGVIVVIECEHLCMTMRGVRKPGAKTITSAVRGQLRNPVTRAEAMSLIVG

SEQ ID NO: 9501 - protein, 203 aa, unidentified
  source 1..203: note = Kribbella soli
  REGION 1..203: note = tr|A0A4Q7WPW2|A0A4Q7WPW2_9ACTN GTP cyclohydrolase 1; OS = Kribbella soli OX=1124743 GN=folE PE=3 SV=1
MAISADLESVPLHIVARRAEIDLPAAQRAVADLLTALGRDPESAHLADTPRRVANAYAEMLTPREFELTTFPNDEGYDELVLAKDIPVQSLCEHHLLPFQGVAHVGYLPGDRILGLSKLARVVELFARDFQVQERLTKQVADWLQDHLDPKGVGVVIEAEHQCMSLRGVRAAGSKTVTSSLQGILRDNPSSRQEFFALTGLTP

SEQ ID NO: 9502 - protein, 203 aa, Kribbella sp.; identical to SEQ ID NO: 9499
  REGION 1..203: note = tr|A0A4R0IZD0|A0A4R0IZD0_9ACTN GTP cyclohydrolase 1; OS = Kribbella sp. YM55 OX=1572660 GN=folE PE=3 SV=1

SEQ ID NO: 9503 - protein, 203 aa, Kribbella sp.
  REGION 1..203: note = tr|A0A4R8DXF6|A0A4R8DXF6_9ACTN GTP cyclohydrolase 1; OS = Kribbella sp. VKM Ac-2566 OX=2512218 GN=folE PE=3 SV=1
MAISADLESVPLHIVARREEIDLPAAQRAVADLLTALGRDPQSAHLADTPRRVANAYAEMLTPREFELTTFPNDEGYDELVLAKDIPVQSLCEHHLLPFQGVAHVGYLPGDRILGLSKLARVVELFARDFQVQERLTKQVADWLKDHLDPKGVGVVIEAEHQCMSLRGVRAAGSRTVTSSLHGVLRDSPSSRQEFFALTGLTP

SEQ ID NO: 9504 - protein, 238 aa, Kriegella aquimaris
  REGION 1..238: note = tr|A0A1G9RJD8|A0A1G9RJD8_9FLAO GTP cyclohydrolase 1; OS = Kriegella aquimaris OX=192904 GN=folE PE=3 SV=1
MYIFAIRFSHSSMKIDSTLEDHFEEMGNNHVSTSGETPLRNDAFVLNDEDKIERIKESVRDILLTLGLDLEDDSLKGTPNRVAKMFVNEIFGGLHPDRKPKSSTFKNKYKYGEMLVEKNITLYSTCEHHLLPIVGRAHIAYISSGTVVGLSKMNRIVDYYAKRPQVQERLNIQIVRELQKVMNTEDVACVIDAKHLCVNSRGIRDIESSTVTAEYGGKFKDEAVRREFLDYINLETKF

SEQ ID NO: 9505 - protein, 199 aa, Kriegella aquimaris
  REGION 1..199: note = tr|A0A1G9J2Q5|A0A1G9J2Q5_9FLAO GTP cyclohydrolase 1; OS = Kriegella aquimaris OX=192904 GN=folE PE=3 SV=1
MSPYRNLEEYNLEITDEVRDRYASIINEIGEDVTREGLEKTPERAAKAMLFLTQGYKQDAVEILKGAMFKESYDDMVIIKDIELYSLCEHHMLPFFGKAHVAYIPNGHIVGLSKIPRVVDVFARRLQVQERLTHDILECINDTLKPKGVAVVIEAAHMCMMMRGVQKQNSVTTTSGFRGQFEKIETRNEFLKLISSHLS

SEQ ID NO: 9506 - protein, 212 aa, Kroppenstedtia eburnea
  REGION 1..212: note = tr|A0A1N7IPW3|A0A1N7IPW3_9BACL GTP cyclohydrolase 1; OS = Kroppenstedtia eburnea OX=714067 GN=folE PE=3 SV=1
MKFLIGSGLPTRKKLRKREATQDMGVNHEQIQQAVRMILEAVGEDPDREGLKETPARVARMYEEIFSGMGEDPDEYFSTVFGEDHEELVLVKDIPFFSLCEHHLVPFFGKAHVGYIPKSGRVTGLSKLARAVDTVARRPQLQERITYTVADSLERTLQPHGVIVVVEAEHMCMTMRGIKKPGSRTVTSAVRGVFEKNSAARAEAFSLIGFGK

SEQ ID NO: 9507 - protein, 196 aa, unidentified
  source 1..196: note = Kroppenstedtia sanguinis
  REGION 1..196: note = tr|A0A482U4A3|A0A482U4A3_9BACL GTP cyclohydrolase 1; OS = Kroppenstedtia sanguinis OX=1380684 GN=folE PE=3 SV=1
MSTEPSRIGEFDQARAEAAVRELLLALGEDPDREGLRRTPTRVANAFREVFAGLYTDPDEVLSTTFDENHEELVLVKDIPLYSTCEHHLVAFHGVAHVGYIPGPSGRVTGLSKLARVVDLYAKRPQVQERLTSQIADAVMSKLDPRGVIVVIEAEHLCMAMRGIRKPGSSTTTSAVRGIFKTNAVSRSEALQLIAR

SEQ ID NO: 9508 - protein, 216 aa, Ktedonobacter racemifer
  REGION 1..216: note = tr|D6TD44|D6TD44_9CHLR GTP cyclohydrolase 1; OS = Ktedonobacter racemifer DSM 44963 OX=485913 GN=folE; PE = 3 SV=1
MTLNIDLDDLEFEDAIELKQRHISVEQMRTFEGYMAEIFDAMGMNVSTPGTEDTPKRFLKAMLDATEGYDGDPKLIKVFPAEHPNGTNSHLSQVIEGPIHFFSLCEHHAFPFFGQAYVGYIADEHIIGLSKLTRLVRVFAKRFSVQERITQQIASSLEAILQPQGVAVYLEANHLCMAMRGVRESSALTRTTAWRGEYEHNAELRSEFFSTANIRP

SEQ ID NO: 9509 - protein, 205 aa, Ktedonobacter racemifer
  REGION 1..205: note = tr|D6TZN0|D6TZN0_9CHLR GTP cyclohydrolase 1; OS = Ktedonobacter racemifer DSM 44963 OX=485913 GN=folE; PE = 3 SV=1
MTTHMNKGQLNGHASLESLLTAGQKKVDYPRLLELGRELLIAIGEDPDREGLLDTPRRWADSWREFVEYDPGSTETCFSSASTDQMVCVSGMRVFSMCEHHLMPFWCDVAIGYIAGDKVLGLSKFARIAHQFAHKLQLQERIGHEIADEITRITGSPDVAVVLKGEHMCMTARGIRTPGVMTSSVMRGVFRSESEARLEFLRLIE

SEQ ID NO: 9510 - protein, 202 aa, Ktedonobacter sp.
  REGION 1..202: note = tr|A0A1Q7A5K0|A0A1Q7A5K0_9CHLR GTP cyclohydrolase 1; OS = Ktedonobacter sp. 13_2_20CM_2_56_8 OX=1805232 GN=folE; PE = 3 SV=1
MMELQRREISQEQMRKFEGYMAEIFDALGMDLNTPATEETPQRFVRAMFDATEGYDGDPKLLKVFETECRGGSDCRLSQVIEGPIPFFALCEHHALPFYGLAYIGYIAHVHIIGISKLTRLVRLFAKRFTVQERLGRQIADTFTAMLEPHGVAVYVEAHHLCMQMRGVKETASLTRTTVWRGEYEQNSSLRVEFLLGCGADV

SEQ ID NO: 9511 - protein, 202 aa, Ktedonobacter sp.; identical to SEQ ID NO: 9510
  REGION 1..202: note = tr|A0A1Q7WT79|A0A1Q7WT79_9CHLR GTP cyclohydrolase 1; OS = Ktedonobacter sp. 13_1_20CM_3_54_15 OX=1805224 GN=folE; PE = 3 SV=1

SEQ ID NO: 9512 - protein, 194 aa, unidentified
  source 1..194: note = Ktedonobacterales bacterium
  REGION 1..194: note = tr|A0A4V0YYN2|A0A4V0YYN2_9CHLR GTP cyclohydrolase I FolE OS=Ktedonobacterales bacterium SCAWS-G2 OX=2509675; GN = folE PE=4 SV=1
MVDEILRPTTPRVDYDTLVRLGRELLVAIGEDPQREGIQDTPRRWADWWREYIEYEPGTTDTSFTSTRAGQLVCISGIRVWTLCEHHLLPFWCDVAIGYLVNETVLGLSKFARIAHHCAHRLQHQEQLGQHIADMVSQMVQTDDVAVCLRGEHLCMMMRGIKTPALITSTVMSGAFEREKELQSQFLHLVAPHF

SEQ ID NO: 9513 - protein, 212 aa, unidentified
  source 1..212: note = Kuenenia stuttgartiensis
  REGION 1..212: note = tr|Q1Q0A8|Q1Q0A8_KUEST Strongly similar to GTP cyclohydrolase I OS=Kuenenia stuttgartiensis OX=174633; GN = folE PE=4 SV=1
MNENVIANENNFLKVKKRQISDEQIRKFEGYAAEIFTTLGLNLNTAATKETPHRFINALIESTEGYDGDPKLVKVFETECRGGPDCRLSQIIEGPIRFFALCEHHCLPFYGVVYVGYISHEHIIGLSKLTRLVHLFSRRFEVQERIGQQIADTLNQLLLPHGVAVYIEAHHLCVEMRGVKEISSISRTTFWRGNYDGDPALRAEFLAACGKK

SEQ ID NO: 9514 - protein, 187 aa, unidentified
  source 1..187: note = Kuenenia stuttgartiensis
  REGION 1..187: note = tr|Q1PYF3|Q1PYF3_KUEST GTP cyclohydrolase 1; OS = Kuenenia stuttgartiensis OX=174633 GN=gch PE=3 SV=1
MIDKEKIQAAIRLFIEGIGEDPNREGLQETPERVAEMCEEIFAGIGQDSHSVIKVLKSEKYDEIVLLKDIPFYSMCEHHLLPFSGVSHVAYIPQGNRVTGISKLARVVNIEARRPQVQERLTTDIAESIMKALKPKGVLVIIEAEHLCMTMRGIKKPGTKVLTSVVRGIFRDNPATRAEVMALIKGH

SEQ ID NO: 9515 - protein, 204 aa, Kurthia sibirica
  REGION 1..204: note = tr|A0A2U3AJ03|A0A2U3AJ03_9BACL GTP cyclohydrolase 1; OS = Kurthia sibirica OX=202750 GN=folE PE=3 SV=1
MDSKQWRIHTVTKTNTQAVDIEKIQEAVKMILEAVGEDPSREGLLDTPKRVSKMYAEMFEGLHMDPRDYFETVFHEGHNEVVLVKDIPFFSMCEHHLVPFYGKAHIAYIPQDGVVAGLSKLARTVETVAKRPQLQERITTTVANTMMEMLKPQGVYVVIEAEHMCMTMRGIKKPGAKTITTVAKGIFENDDVKRNEILSFIQMP

SEQ ID NO: 9516 - protein, 197 aa, Kurthia sp.
  REGION 1..197: note = tr|A0A433RSS5|A0A433RSS5_9BACL GTP cyclohydrolase 1; OS = Kurthia sp. 3B1D OX=1562256 GN=folE PE=3 SV=1
MTNTTEHTDNKVDLDKIKQAVTMILEAVGEDPTREGLEDTPKRVAKMYAEMFAGLHTDAREYFETVFHEGHDEVVLVKDIPFFSMCEHHLVPFYGKAHVAYIPQNGVVAGLSKLARTVDTVARRPQLQERITAEVATVLEEKLNPKGVYVLIEAEHMCMTMRGIKKPGAKTITTVAKGIFETDEVKRSEILSFIQMS

SEQ ID NO: 9517 - protein, 194 aa, Kurthia sp.
  REGION 1..194: note = tr|A0A0X1RY00|A0A0X1RY00_9BACL GTP cyclohydrolase 1; OS = Kurthia sp. 11kri321 OX=1750719 GN=folE PE=3 SV=1
MTKEISSQVDINKIQTAVKMILEAVGENPSREGLLDTPKRVAKMYAEMFEGLHKDPKEYFETVFHEGHDEVVLVKDIPFFSMCEHHLVPFYGKAHVAYIPKDGVVAGLSKLARTVETVARRPQLQERITDTVAQTLMDMLSPQGVYVVVEAEHMCMTMRGIKKPGAKTITSVAKGVFEEDSVKRNEILSFIQMP

SEQ ID NO: 9518 - protein, 210 aa, Kurthia zopfii
  REGION 1..210: note = tr|A0A2U3AFT8|A0A2U3AFT8_9BACL GTP cyclohydrolase 1; OS = Kurthia zopfii OX=1650 GN=folE PE=3 SV=1
MLTSKREFHVDNGGLKLTKQINSQVDIDKIKDAVTMILEAVGEDPTREGLIDTPKRVAKMYAEMFEGLHKDPKEYFETVFNEGHDEVVLVKDIPFFSMCEHHLVPFYGKAHVAYIPQGGVVAGLSKLARTVETVARRPQLQERITGTVAETLMEMLKPQGVYVVVEAEHMCMTMRGIKKPGAKTITSVAKGIFETDDVKRNEILSFIQMP

SEQ ID NO: 9519 - protein, 234 aa, Kurthia zopfii
  REGION 1..234: note = tr|A0A3S4Z1X3|A0A3S4Z1X3_9BACL GTP cyclohydrolase 1; OS = Kurthia zopfii OX=1650 GN=folE PE=3 SV=1
MFVSKNNKKFVGIIVLHLCYAWGYMLTSKREFHVDNGGLKLTKQINSQVDIDKIKDAVTMILEAVGEDPTREGLIDTPKRVAKMYAEMFEGLHKDPKEYFETVFNEGHDEVVLVKDIPFFSMCEHHLVPFYGKAHVAYIPQGGVVAGLSKLARTVETVARRPQLQERITGTVAETLMEMLKPQGVYVVVEAEHMCMTMRGIKKPGAKTITSVAKGIFETDDVKRNEILSFIQMP

SEQ ID NO: 9520 - protein, 202 aa, Kushneria avicenniae
  REGION 1..202: note = tr|A0A1I1G1U6|A0A1I1G1U6_9GAMM GTP cyclohydrolase 1; OS = Kushneria avicenniae OX=402385 GN=folE PE=3 SV=1
MPRCPYVTPDIPETQERNMSQEMENHYREILSALGEDPEREGLQDTPARAAKAMQFLTHGYQQSLGDIVNDAVFSSDTDEMVIVKDIELYSMCEHHMLPFIGKCHIGYLPRGKVLGLSKFARIVDMYARRLQIQEELTRQIANAVQDATDARGVGVIVEARHMCMMMRGVEKQNSSMKTSVMLGDFRDNLPSRQEFLTLVYN

SEQ ID NO: 9521 - protein, 184 aa, Kushneria indalinina
  REGION 1..184: note = tr|A0A3D9DYY1|A0A3D9DYY1_9GAMM GTP cyclohydrolase 1; OS = Kushneria indalinina DSM 14324 OX=1122140 GN=folE PE=3; SV = 1
MSQEMENHYREILSALGENPEREGLQDTPARAAKAMQFLTHGYQQSLDDIVNGAVFSSDTDEMVIVKDIELYSMCEHHMLPFIGKCHIGYLPRGKVLGLSKFARIVDMYARRLQIQEELTRQIANAVQDATDARGVGVIVEARHMCMMMRGVEKQNSSMKTSVMLGDFRDNLPSRQEFLTLVYN

SEQ ID NO: 9522 - protein, 184 aa, unidentified
  source 1..184: note = Kushneria konosiri
  REGION 1..184: note = tr|A0A2Z2H8N0|A0A2Z2H8N0_9GAMM GTP cyclohydrolase 1; OS = Kushneria konosiri OX=698828 GN=folE PE=3 SV=1
MSQEMENHYREILSALGEDPEREGLQDTPARAAKAMQFLTHGYQQSLEDIVNGAVFSSDTDEMVIIKDIELYSMCEHHMLPFIGKCHIGYLPRGKVLGLSKFARIVDMYARRLQIQEELTRQIASAVLDATDARGVGVIVEARHMCMMMRGVQKQNSSMKSSVMLGDFRDNLSTRQEFLTLVHN

SEQ ID NO: 9523 - protein, 184 aa, Kushneria marisflavi
  REGION 1..184: note = tr|A0A240ULI3|A0A240ULI3_9GAMM GTP cyclohydrolase 1; OS = Kushneria marisflavi OX=157779 GN=folE PE=3 SV=1
MSQEMENHYREILSALGEDPEREGLQDTPARAAKAMQFLTHGYQQSLEDIVNGAVFSSDTDEMVIVKDIELYSMCEHHMLPFIGKCHIGYLPRGKVLGLSKFARIVDMYARRLQIQEELTRQIANAVLDATDARGVGVIVEARHMCMMMRGVQKQNSSMKSSVMLGDFRDNLSTRQEFLTLVHN

SEQ ID NO: 9524 - protein, 184 aa, unidentified
  source 1..184: note = Kushneria phyllosphaerae
  REGION 1..184: note = tr|A0A2R8CKF7|A0A2R8CKF7_9GAMM GTP cyclohydrolase 1; OS = Kushneria phyllosphaerae OX=2100822 GN=folE PE=3 SV=1
MSQEMENHYREILSALGEDPEREGLQDTPARAAKAMQYLTHGYQQSLGDIVNDAVFSSDTDEMVIVKDIELYSMCEHHMLPFIGKCHIGYLPRGKVLGLSKFARIVDMYARRLQIQEELTRQIANAVLDATDARGVGVIVEARHMCMMMRGVQKQNSSMKTSVMLGDFRENLSTRQEFLTLVHN

SEQ ID NO: 9525 - protein, 300 aa, Kushneria sinocarnis
  REGION 1..300: note = tr|A0A420WU69|A0A420WU69_9GAMM GTP cyclohydrolase FolE2 OS=Kushneria sinocarnis OX=595502 GN=folE2 PE=3 SV=1
MTRTELPDIAMESSMLQGALSRVGMERIALPLQVTGQGIVGRASAGVSLDDPAARGVHMSRLYLALRALEHRELSIAAVEGVLDAFLETHQGLSDTAFVDLSGEALLSRPAMVSPLSGWKSYPFTLRCRKDAQGMQVTLELTIGYSSTCPCSAALARQLIQQAFDERFRETPLTHEAVHDWLGSEQGVPATPHSQRSQAHLSLQLERTLEVLPLPAIIDGVEEALGTALQTAVKRVDEQAFALANGQNLMFCEDAARRLHHTLKAQEGVIGFQLRVVHAESLHAHDAVASSEWHRAPPMP

SEQ ID NO: 9526 - protein, 186 aa, Kushneria sinocarnis
  REGION 1..186: note = tr|A0A420WYX4|A0A420WYX4_9GAMM GTP cyclohydrolase 1; OS = Kushneria sinocarnis OX=595502 GN=folE PE=3 SV=1
MSEKLSQHYRAIIEGLGEDPDREGLRETPMRAAKAMSFLTHGYQQSLDDVVNGAVFTSSSDEMVLIKDIELYSMCEHHMLPFIGKCHIGYLPNGKVLGLSKFARIVDMYARRLQIQEELTRQIADAIVEATDARGVGVIIEARHLCMMMRGVEKQNSSMKTSVMLGDFREHQATRNEFLNLAGRQA

SEQ ID NO: 9527 - protein, 184 aa, Kushneria sp.
  REGION 1..184: note = tr|A0A5C1A1E0|A0A5C1A1E0_9GAMM GTP cyclohydrolase 1; OS = Kushneria sp. YCWA18 OX=657387 GN=folE PE=3 SV=1
MSEELSHHYRAIIEGLGEDPDREGLRETPMRAAKAMGFLTRGYQQSLDEVVNGAVFTSSSDEMVLIKDIELYSMCEHHMLPFIGKCHIGYLPNGKVLGLSKFARIVDMYARRLQIQEELTRQIADAIVEATDARGVGVIVEARHLCMMMRGVEKQNSSMKTSVMLGDFRQSQATRNEFLNLVGR

SEQ ID NO: 9528 - protein, 302 aa, Kushneria sp.
  REGION 1..302: note = tr|A0A5C0ZVP3|A0A5C0ZVP3_9GAMM GTP cyclohydrolase FolE2 OS=Kushneria sp. YCWA18 OX=657387 GN=folE2 PE=3 SV=1
MNRNDLPDIATETSTLQGALSRVGMEQIALPLQVAGQGIVGRASAGVSLDNASARGVHMSRLYLALSALENRELSIDEVEGVLDAFLDTHQGLSDRAFLDLSGEAMLRRPALVSPLSGWKAYPFTLRCRKDTQGLQATLELTIGYSSTCPCSAALARQLIQQSFDEHFQDTPLTHEAVHDWLGSEQGVPATPHSQRSQTHLSLRLKNTPEALPLEAAINRVEDALGTALQTAVKRVDEQAFALANGQNLMFCEDAARRLHHTLQTQEEVIGFQLQVVHAESLHAHDAVASSEWNWQGCGEAF

SEQ ID NO: 9529 - protein, 194 aa, Kutzneria albida
  REGION 1..194: note = tr|W5W5D0|W5W5D0_9PSEU GTP cyclohydrolase 1; OS = Kutzneria albida DSM 43870 OX=1449976 GN=folE PE=3 SV=1
MSLHVAPEVGQPDLAAAELAAGQFLRALGISTESESLRDTPRRMAKAYAELFSPRPFDLTTFPNDEGYDELVLARSIPLRSVCEHHLLPFVGVAHVGYLPGSRILGLSKLARVVEHFACRPQVQERLTKQVADWLHAQLQPKGVGVVIAAEHTCMTLRGVQAVGSSTVTSTLLGTLRSDARSRQEFFALTGINP

SEQ ID NO: 9530 - protein, 199 aa, Kutzneria albida
  REGION 1..199: note = tr|W5WA63|W5WA63_9PSEU GTP cyclohydrolase 1; OS = Kutzneria albida DSM 43870 OX=1449976 GN=KALB_4072 PE=3; SV = 1
MTTSTTYPDPAGEGRDPLEDVARQLLIAIGENPDRDGLKQTPARFARWWREFSGYDAGEVNTLFSLRTQQGQTVTVSDIHLWSLCEHHLLPFSCTVTIAYRPNGDVLGLSKFARIAHRHAHRLQIQERLVQDIAEEITAVSGSPDVAVIAQGEHLCMTMRGIRTPALMTSSVLNGVFGQDGPARQELMATAFPALSGRR

SEQ ID NO: 9531 - protein, 196 aa, unidentified
  source 1..196: note = Kutzneria buriramensis
  REGION 1..196: note = tr|A0A3E0HK68|A0A3E0HK68_9PSEU GTP cyclohydrolase 1; OS = Kutzneria buriramensis OX=1045776 GN=folE PE=3 SV=1
MSVTDLDLDGDPAVSRTAEDPLVDLARQLLKEIGEDPNRDGLRDTPARFARWWREFINYDTGSLGTLFESVGTSQLVVVSDIQVWSLCEHHLLPFNCSITIAYRPTGQLLGLSKFARVAHQYAHKLQVQERLVDQIALEISTLSGASDVAVIAKGEHLCMTMRGIKAAAQMTSTAYRGAFGTDSGLRGELFDLLRA

SEQ ID NO: 9532 - protein, 195 aa, unidentified
  source 1..195: note = Kutzneria buriramensis
  REGION 1..195: note = tr|A0A3E0I560|A0A3E0I560_9PSEU GTP cyclohydrolase 1; OS = Kutzneria buriramensis OX=1045776 GN=folE PE=3 SV=1
MHALRVVHEPAAGIDLDAAERAAGDLLRALGVDTDSESLRATPGRMARAYAELFTPRPFDLTTFPNDEGYDELVLARGIPVRSVCEHHLLPFVGVAHVGYLPAGRILGLSKLARVVEHFASRPQVQERLTKQVADWLCEQLEPKGVGVVIEAEHTCMTLRGVRAVGSDTVTSTLLGTLRSDARSRQEFFALAGVK

SEQ ID NO: 9533 - protein, 209 aa, Kutzneria sp.
  REGION 1..209: note = tr|W7SNV3|W7SNV3_9PSEU GTP cyclohydrolase 1; OS = Kutzneria sp. 744 OX=345341 GN=folE PE=3 SV=1
MNSAAPAWITQTRTESALHVVHESGVVDPAAAERAAADLLRALGIEHSSESMRETPARMARAYAELFTPRPFDLTTFPNDEGYDELVLARDIPVRSVCEHHLLPFVGVAHVGYLPGERILGLSKLARVVEHFACRPQVQERLTKQIADWLADQLDPVGVGVVVRAEHSCMTLRGVQAIGSCTVTSTLLGSLREDARSRHEFFALAGIMS

SEQ ID NO: 9534 - protein, 195 aa, Kutzneria sp.
  REGION 1..195: note = tr|W7SSV7|W7SSV7_9PSEU GTP cyclohydrolase 1; OS = Kutzneria sp. 744 OX=345341 GN=folE PE=3 SV=1
MQALRVVHEPATGVDLEAAERAAGDLLRALGVDTDTESLRATPGRMARAYAELFTPRPFDLTTFPNDEGYDELVLARSIPVRSVCEHHLLPFVGVAHVGYLPDARILGLSKLARVVEHFASRPQVQERLTKQVADWLSTQLAPKGVGVVIEAEHTCMTLRGVKAAGSSTVTSTMLGVLRSDARSRQEFFALAGVK

SEQ ID NO: 9535 - protein, 188 aa, unidentified
  source 1..188: note = Kyrpidia spormannii
  REGION 1..188: note = tr|A0A2K8N8L0|A0A2K8N8L0_9BACL GTP cyclohydrolase 1; OS = Kyrpidia spormannii OX=2055160 GN=folE PE=3 SV=1
MGFDVDKIQTAVRMILEAIGEDPEREGLKDTPGRVARMYQEVFRGLHQDPREELNAIFNIEHEELVLVRDILFYSMCEHHLVPFFGKAHVAYLPRGGRVTGLSKLARLVETVARRPQLQERITSTVADAIMEKLEARGAVVVLEAEHMCMTMRGVNKPGSQTVTSAVRGVFLEDGKLREEVFRLIGHR

SEQ ID NO: 9536 - protein, 207 aa, unidentified
  source 1..207: note = Kyrpidia tusciae
  REGION 1..207: note = tr|D5WQ81|D5WQ81_KYRT2 GTP cyclohydrolase 1; OS = Kyrpidia tusciae (strain DSM 2912 / NBRC 15312 / T2); OX = 562970 GN=folE PE=3 SV=1
MVHDRGRVAGVGEGKGTTSMDFDVDKIQTAVRMILEAIGEDPEREGLQDTPARVARMYQEVFRGLHQDPREELNAIFNIEHEELVLVRDILFYSMCEHHLVPFFGKAHVAYLPRGGRVTGLSKLARLVETVARRPQLQERITSTVADAIMDKLEARGAVVVLEAEHMCMTMRGVNKPGSQTVTSAVRGVFLQDGKLREEVFRLIGHR

SEQ ID NO: 9537 - protein, 186 aa, Kytococcus aerolatus
  REGION 1..186: note = tr|A0A212U692|A0A212U692_9MICO GTP cyclohydrolase 1; OS = Kytococcus aerolatus OX=592308 GN=folE PE=3 SV=1
MDHARAEAAVRELLLAIGEDPDRDGLLETPARVARSFAELTSGLEGDPAEVLGTRFAIDHDEMVLVRDIEMHSLCEHHLLPFHGVAHVGYTPRGGTVVGLSKLARLVELYARRPQVQERLTTQVANALVDHLDPGGVIVVVEAEHLCMTMRGVRKAGARTVTSAVRGHFTDQATRAEAMSLIASHR

SEQ ID NO: 9538 - protein, 185 aa, Kytococcus schroeteri
  REGION 1..185: note = tr|A0A2I1PC12|A0A2I1PC12_9MICO GTP cyclohydrolase 1; OS = Kytococcus schroeteri OX=138300 GN=folE PE=3 SV=1
MDLARAEAAVRELLLAVGEDPDRDGLLDTPARVARSYAELTSGLEQDPADVLGTTFAVDHDEMVLVRDIEMYSLCEHHLLPFHGVAHVGYTPRNGRVAGLSKLARLVEMYARRPQVQERLTTQVANALVDHLDPGGVIVVVEAEHLCMTMRGVRKPGARTVTSAVRGHFTDQATRAEALTLLRNG

SEQ ID NO: 9539 - protein, 195 aa, Kytococcus sedentarius
  REGION 1..195: note = tr|C7NFT4|C7NFT4_KYTSD GTP cyclohydrolase 1; OS = Kytococcus sedentarius (strain ATCC 14392 / DSM 20547 / CCM 314 / 541) OX=478801 GN=folE PE=3 SV=1
MGAGGFAGRLMDHARAEAAVRELLLAVGEDPDRDGLVDTPARVARSYAELTSGLDQDPSEILGTTFAIDHDEMVMVRDIEMHSLCEHHLLPFHGVAHVGYTPQDGRVVGLSKLARLVEMYARRPQVQERLTTQVANALVDHLRPGGVIVVVEAEHLCMTMRGVRKPGARTVTSAVRGQFTDQATRAEALSLLRNG

SEQ ID NO: 9540 - protein, 185 aa, Kytococcus sp.
  REGION 1..185: note = tr|A0A1F1KGM2|A0A1F1KGM2_9MICO GTP cyclohydrolase 1; OS = Kytococcus sp. HMSC28H12 OX=1581067 GN=folE PE=3 SV=1
MDLARAEAAVRELLLAVGEDPDRDGLLDTPARVARSYAELTSGLGQDPADVLGTTFAVDHDEMVLVRDIEMYSLCEHHLLPFHGVAHVGYTPRNGRVAGLSKLARLVETYARRPQVQERLTTQVANALVDHLDPGGVIVVVEAEHLCMTMRGVRKPGARTVTSAVRGQFTDQATRAEALTLLRNG

SEQ ID NO: 9541 - protein, 211 aa, unidentified
  source 1..211: note = Labedaea rhizosphaerae
  REGION 1..211: note = tr|A0A4R6SF36|A0A4R6SF36_9PSEU GTP cyclohydrolase 1; OS = Labedaea rhizosphaerae OX=598644 GN=folE PE=3 SV=1
MTNSLSDRSATVSKLRPRLSHAGAPVDLAAAERAAADFLVALGIDVSSEATEDTPRRMAHAFAEMLTVPEFDMTTFPNDQDYDELVVVEGIEFRSLCEHHMLPFTGVAHVGYLPGERILGLSKLARLVAFFAARPQTQERLTKQIADELNRNLAPKGVGVVVMAEHACMSLRGARARNTHTVTSALYGDVRENPALRAEFLSLTKNARTNP

SEQ ID NO: 9542 - protein, 203 aa, unidentified
  source 1..203: note = Labedaea rhizosphaerae
  REGION 1..203: note = tr|A0A4R6SMY3|A0A4R6SMY3_9PSEU GTP cyclohydrolase 1; OS = Labedaea rhizosphaerae OX=598644 GN=folE PE=3 SV=1
MTGTLDGVTQQARVFDQERAERAIRELLIACGEDPNREGLLETPARVARAYREMFAGLYTDPDEVLSKTFDESHEELVLVTDIPMFSSCEHHLVPFHGVAHVGYIPNEKGKVTGLSKLARLVDLYAKRPQVQERLTSQVADALMRKLAPRGAIVVIEAEHLCMAMRGIRKPGARTTTSAVRGLLKDSSSSRAEALDLIKGRTR

SEQ ID NO: 9543 - protein, 199 aa, unidentified
  source 1..199: note = Labedella endophytica
  REGION 1..199: note = tr|A0A433JX44|A0A433JX44_9MICO GTP cyclohydrolase 1; OS = Labedella endophytica OX=1523160 GN=folE PE=3 SV=1
MAGVDRRRIEAAVTELLLAIGEDPDREGLDATPQRVAESYAEFFAGIGADPLDHLRETIPTGSSDSVGELTGETVIVRDIAFRSVCEHHLLPFTGVAHIAYVPGDAVVGLGRLPRVVDTLASRPQVQERLTEQIASAIDEGLAPLGVLVVLDASHQCVTTRGSRQTASTTVTVASRGTLASGPGRSDVLALIGSGRAHD

SEQ ID NO: 9544 - protein, 200 aa, Labedella gwakjiensis
  REGION 1..200: note = tr|A0A2P8GSC3|A0A2P8GSC3_9MICO GTP cyclohydrolase 1; OS = Labedella gwakjiensis OX=390269 GN=folE PE=3 SV=1
MADVDRRRIESAVTELLLAIGEDPGRDGLESTPQRVAEAYAEFFGGVGADPLEHLRETIPTGSPDAVGQLTGETVIVRDIAFRSVCEHHLLPFVGVAHIAYIPGDAVVGLGRLPRVVDTLASRPQVQERLTEQIAGAIDEGLAPRGVLVVLDASHQCVTTRGARQTASSTVTVASRGDLRSGSARSDVIALIGAGVQGRS

SEQ ID NO: 9545 - protein, 196 aa, unidentified
  source 1..196: note = Labedella phragmitis
  REGION 1..196: note = tr|A0A444PSJ0|A0A444PSJ0_9MICO GTP cyclohydrolase 1; OS = Labedella phragmitis OX=2498849 GN=folE PE=3 SV=1
MAGVDRRRIEAAVTELLLAIGERPDREGLLSTPERVADAYAEFFGGLGHDPVDHLRETVPTELDTAGEAVIVRDISFRSVCEHHLLPFTGVAHVAYLPDAAVVGLGRFARVVDTLASRPQVQERLTEQIADAIDEGLAPLGVLVVLDASHQCMTTRGPRQTGSTTVTIASRGALSSGPLRSDVLALIGAGRSRDDD

SEQ ID NO: 9546 - protein, 195 aa, unidentified
  source 1..195: note = Labedella populi
  REGION 1..195: note = tr|A0A444Q6J4|A0A444Q6J4_9MICO GTP cyclohydrolase 1; OS = Labedella populi OX=2498850 GN=folE PE=3 SV=1
MAGVDRRRIEAAVTELLLAIGERPDREGLLSTPQRVADAYAEFFGGLGEDPLDHLRETIPTEIDTAGEAVIVRDIAFRSVCEHHLLPFTGVAHVAYLPGVSAVGLGRFARVVDTLASRPQVQERLTEQIADAVDEGLSPRGVLVVLDASHQCLTARGPRQTSSTTVTIASRGALVSGAERSDVLALIGGSAGRDE

SEQ ID NO: 9547 - protein, 209 aa, unidentified
  source 1..209: note = Labilibaculum antarcticum
  REGION 1..209: note = tr|A0A1Y1CGJ4|A0A1Y1CGJ4_9BACT GTP cyclohydrolase 1; OS = Labilibaculum antarcticum OX=1717717 GN=folE PE=3 SV=1
MEFSTNGDSHNGFTKIEKYNQDTTEQLMFHYKKVLELLGEDAEREGLLKTPLRVAKAMQFLTQGYHNNPEDILKSAIFKEDYRQMVIVKDIEVYSMCEHHMLPFVGRAHVAYIPNGTITGLSKIARVVDAFARRLQVQERLTTQIKDCIQNTLNPLGVAVVIEAQHMCMSMRGVQKQNAITTTSDFTGAFEKVATREEFIRLISTKSNY

SEQ ID NO: 9548 - protein, 209 aa, unidentified
  source 1..209: note = Labilibaculum filiforme
  REGION 1..209: note = tr|A0A2N3I5P2|A0A2N3I5P2_9BACT GTP cyclohydrolase 1; OS = Labilibaculum filiforme OX=1940526 GN=folE PE=3 SV=1
MEFSTNEDNHKGFTKIEKYDQETTEQLMFHYKKVLELLGEDAEREGLLKTPLRVAKAMQFLTQGYHNNPEDILKSAIFQEDYRQMVIVKDIEVYSMCEHHMLPFVGRAHVAYIPNGTITGLSKIARVVDAFARRLQVQERLTTQIKDCIQNTLNPLGVAVVIEAQHMCMAMRGVQKQNAITTTSDFTGAFEKVATREEFIRLIATKSSY

SEQ ID NO: 9549 - protein, 209 aa, unidentified
  source 1..209: note = Labilibaculum manganireducens
  REGION 1..209: note = tr|A0A2N3IFY7|A0A2N3IFY7_9BACT GTP cyclohydrolase 1; OS = Labilibaculum manganireducens OX=1940525 GN=folE PE=3; SV = 1
MEFSTNGDNNKGFTKIEKYNQDTTEQLMFHYKKVLELLGEDAEREGLLKTPLRVAKAMQFLTQGYHNNPEDILRSAMFQEDYRQMVIVKDIEVYSMCEHHMLPFVGRAHVAYIPNGTITGLSKLARVVDAFARRLQVQERLTTQIKDCIQNTLNPLGVAVVIEAQHMCMSMRGIQKQNAITTTSDFTGAFEKVATREEFIRLIANKSNY

SEQ ID NO: 9550 - protein, 211 aa, Labrenzia aggregata
  REGION 1..211: note = tr|A0A0M6XY41|A0A0M6XY41_9RHOB GTP cyclohydrolase 1; OS = Labrenzia aggregata OX=187304 GN=folE PE=3 SV=1
MDAVLKPVEKTFERKSPDQLHRPSREEAEAAVRTLLAWTGDDPDREGLVETPKRVVKALSQLYSGYFEDPAEHLARTFEDVGGYKDIVLVRGIPFHSHCEHHMLPFIGEAHIAYYPAEGVVGLSKLARVVDIYAKRLQTQENLTAQIASVIDDALAPRGLAVMLEAEHQCMTMRGVQKPGVSTITTQFTGVFQDDPAEQAKFMSLVRGKGL

SEQ ID NO: 9551 - protein, 211 aa, Labrenzia aggregata
  REGION 1..211: note = tr|A0NWQ8|A0NWQ8_LABAI GTP cyclohydrolase 1; OS = Labrenzia aggregata (strain ATCC 25650 / DSM 13394 / JCM 20685 / NBRC 16684 / NCIMB 2208 / IAM 12614) OX=384765; GN = fol E PE=3 SV=1
MDAVLKPVEKTFERKSPDQLHRPSREEAEAAVRTLLAWTGDDPDREGLVETPKRVVKALSQLYSGYYEDPAEHLARTFEDVGGYKDIVLVRGIPFHSHCEHHMLPFIGEAHIAYYPAEGVVGLSKLARVVDIYAKRLQTQENLTAQIASVIDDALAPRGLAVMLEAEHQCMTMRGVQKPGVSTITTQFTGVFQDDPAEQAKFMSLVRGKGL

SEQ ID NO: 9552 - protein, 211 aa, Labrenzia alba
  REGION 1..211: note = tr|A0A0M6Z9T0|A0A0M6Z9T0_9RHOB GTP cyclohydrolase 1; OS = Labrenzia alba OX=311410 GN=folE PE=3 SV=1
MDAVLKPVEKRFERKSPEQLLRPSREEVEAAVRTILAWTGDDPDREGLVETPKRVVKALSQLYSGYFEDPAEHLERTFEDVGGYQDIVLVRGIPFHSHCEHHMLPFIGEAHIAYYPAEGVVGLSKLARVVDIYAKRLQTQENLTAQIASVIDDTLAPRGLAVMLEAEHQCMTMRGVQKPGVSTITTQFTGVFQDDPAEQAKFMTMVRSKGL

SEQ ID NO: 9553 - protein, 236 aa, Labrenzia alba
  REGION 1..236: note = tr|A0A0M6YMY8|A0A0M6YMY8_9RHOB GTP cyclohydrolase 1; OS = Labrenzia alba OX=311410 GN=folE PE=3 SV=1
MVRSFWANDLCTKERRMTSDKGKIARIPMDAVLKPVVKAFERRSPDQLHRPSREEVEAAVRTILAWTGDDPDREGLVETPKRVVKALSQLYSGYFEDPAEHLARTFEDVGGYQDIVLVRGIPFHSHCEHHMLPFIGEAHIAYYPAEGVVGLSKLARVVDIYAKRLQTQENLTAQIASVIDDALAPRGLAVMLEAEHQCMTMRGVQKPGVSTITTQFTGVFQDDPAEQAKFMSLVRG

SEQ ID NO: 9554 - protein, 208 aa, Labrenzia alexandrii
  REGION 1..208: note = tr|A0A5E8GU03|A0A5E8GU03_LABAD GTP cyclohydrolase 1; OS = Labrenzia alexandrii (strain DSM 17067 / NCIMB 14079 / DFL-11) OX=244592 GN=folE PE=3 SV=1
MDAVLKPVGKTFERKTPDQLQRPSREEAEAAVRTILAWTGDDPEREGLLDTPKRVVKAITQLYGGYFEDPAEHLERTFEDVGGYQDIVLVRGIPFHSHCEHHMLPFVGEAHIAYYPAEGVVGLSKLARVVDIFAKRLQTQENLTSQIASTIDDALAPRGLAVMMEAEHQCMTMRGVQKPGVSTITTQFTGIFEDDPAEQAKFMTLVRG

SEQ ID NO: 9555 - protein, 208 aa, Labrenzia alexandrii
  REGION 1..208: note = tr|A0A0M7A1B8|A0A0M7A1B8_9RHOB GTP cyclohydrolase 1; OS = Labrenzia alexandrii OX=388408 GN=folE PE=3 SV=1
MDAVLKPVGKTFERKTPDQLQRPSREEAEAAVRTILAWTGDDPDREGLLDTPKRVVKAITQLYGGYFEDPAEHLERTFEDVGGYQDIVLVRGIPFHSHCEHHMLPFVGEAHIAYYPAEGVVGLSKLARVVDIFAKRLQTQENLTSQIASTIDDALAPRGLAVMMEAEHQCMTMRGVQKPGVSTITTQFTGIFEDDPAEQAKFMTLVRG

SEQ ID NO: 9556 - protein, 211 aa, Labrenzia marina
  REGION 1..211: note = tr|A0A2S3UVN2|A0A2S3UVN2_9RHOB GTP cyclohydrolase 1; OS = Labrenzia marina OX=281252 GN=folE PE=3 SV=1
MDAVLKPVAKPLERKTPDQLHRPSREEAEAAVRTILAWTGDDPDREGLADTPKRVVKALSQLYSGYYEDPAEHLERTFEDVGGYRDIVVVRGIPFHSHCEHHMLPFIGEAHIAYYPAEGVVGLSKLARVVDIYAKRLQTQENLTAQIASVIDDTLAPRGLAVMLEAEHQCMTMRGVQKPGVSTITTQFTGVFQDDPAEQAKFMTLVRGKGF

SEQ ID NO: 9557 - protein, 212 aa, Labrenzia sp.
  REGION 1..212: note = tr|A0A222F467|A0A222F467_9RHOB GTP cyclohydrolase 1; OS = Labrenzia sp. VG12 OX=2021862 GN=folE PE=3 SV=1
MNYAATVTAMAEYRKEHGLRPSRADAEAAVRILLEWTGDDPDREGLVDTPARVVRAYEEFFEGYTIDPAELLARTFEETNDYNDLIVLRNMRLESHCEHHVVPIIGKVHIAYLPANRVVGISKLARVVEVFAKRLQIQETLTSQIADTIQDVLRPRGVAVVIEAAHMCMTTRGIRKPGVSMLTRRLLGEFQTDPDLRRDFLSSISSSLKGEV

SEQ ID NO: 9558 - protein, 211 aa, Labrenzia sp.
  REGION 1..211: note = tr|A0A163U4G9|A0A163U4G9_9RHOB GTP cyclohydrolase 1; OS = Labrenzia sp. OB1 OX=1561204 GN=folE PE=3 SV=1
MDAVLKPVAKPFERKTPDELQRPSREEAEAAVRTILAWTGDDPDREGLVDTPKRVVKALSQLYSGYFEDPAEHLSRTFEDVGGYKDIVLVRGIPFHSHCEHHMLPFIGEAHIAYYPADGVVGLSKLARVVDIFAKRLQTQENLTAQVASVIDDALAPRGLAVMLEAEHQCMTMRGVQKPGVSTITTQFTGVFQDEPAEQAKFMTLVRGKGV

SEQ ID NO: 9559 - protein, 211 aa, unidentified
  source 1..211: note = Labrenzia suaedae
  REGION 1..211: note = tr|A0A1M7G2X3|A0A1M7G2X3_9RHOB GTP cyclohydrolase 1; OS = Labrenzia suaedae OX=735517 GN=folE PE=3 SV=1
MDAVLKNGSASHQRKSPKEIRRPSREEAEAAVRTLLAWTGDDPDREGLLDTPKRVVKAYSELFGGYFEDPIQHLERTFEDVGGYKDIVMVRGIPFHSHCEHHMLPFIGQAHIAYYPAEGVVGLSKLARVVDIFAKRLQTQENLTAQIASAIDDQLAPRGLAVLLEAEHQCMTMRGVQKPGVSTITTQFTGIFQDEPAEQAKFMSLVRGGGL

SEQ ID NO: 9560 - protein, 215 aa, Labrys neptuniae
  REGION 1..215: note = tr|A0A5C1WPN8|A0A5C1WPN8_9RHIZ GTP cyclohydrolase 1; OS = Labrys neptuniae OX=376174 GN=folE PE=3 SV=1
MDALVDKPAAKLERDDVARAPMPRPTRKEAEAAVRTLIQWAGDDPDREGLIDTPKRMVKAWREMFKGYEHDAAEELDTVFEEVGGYDDMVLVRDIPFFSHCEHHIVPILGHAHIAYYPSGGVVGLSKLARVVEIYARRLQTQEHLTANVTQAIEERLKPRGLAVMLEAEHMCMAMRGIQKQGVSTVTTGFTGIFKSEPQQQMHFLSLVQRAYKAR

SEQ ID NO: 9561 - protein, 215 aa, Labrys okinawensis
  REGION 1..215: note = tr|A0A2S9Q5E1|A0A2S9Q5E1_9RHIZ GTP cyclohydrolase 1; OS = Labrys okinawensis OX=346911 GN=folE PE=3 SV=1
MDALVDKPAAKLERDDAIRAPLPRPTRKEAEAAVRTLIQWAGDDPDREGLVDTPKRVVKAWREMFKGYEHDAGEELDTVFEEVGGYDDMVLVRDIPFYSHCEHHIVPILGHAHIAYYPSGGVVGLSKLARVVEIYARRLQTQEHLTANVTQAIEERLKPRGLAVMLEAEHMCMAMRGIQKQGISTVTTGFTGIFKSDPQQQMHFLSLVQRAYKAR

SEQ ID NO: 9562 - protein, 187 aa, Laceyella sacchari
  REGION 1..187: note = tr|A0A2I7SS69|A0A2I7SS69_LACSH GTP cyclohydrolase 1; OS = Laceyella sacchari OX=37482 GN=folE PE=3 SV=1
MIDHRKIEDAVRMILEAIGEDPNREGLLDTPARVARMYAEIFSGLNEDPKEHFSVVFGEDHEELVLVKDIPFFSTCEHHLVPFFGKAHVGYIPRGGRVTGLSKLARALETVARRPQLQERITATVADSIMEKLDPHGVIVVVEAEHMCMTMRGVKKPGSKTITSAVRGVFAEDSAARAEALSLIGLK

SEQ ID NO: 9563 - protein, 187 aa, Laceyella sediminis; identical to SEQ ID NO: 9562
  REGION 1..187: note = tr|A0A2T0YH82|A0A2T0YH82_9BACL GTP cyclohydrolase 1; OS = Laceyella sediminis OX=573074 GN=folE PE=3 SV=1

SEQ ID NO: 9564 - protein, 201 aa, Lachnobacterium bovis
  REGION 1..201: note = tr|A0A1H3LS01|A0A1H3LS01_9FIRM GTP cyclohydrolase 1; OS = Lachnobacterium bovis DSM 14045 OX=1122142 GN=folE PE=3; SV = 1
MINQENQAIKKIDTEKIEKNIREILIALGANPDSEGLKETPKRVAKMYEEVFEGMNYTNDQIAEMFNKTFSEDIKTTSSKDMVIVKDIDAFSYCEHHMALMYNMKIDVAYIPNGKVIGLSKIARIVDMVTKRLQLQERIGTDILDIMKKITESQDIAVIIRANHSCMTARGIKNINSRTYTQTLSGKFEEDTTLLNRLTYA

SEQ ID NO: 9565 - protein, 191 aa, Lachnobacterium bovis
  REGION 1..191: note = tr|A0A1H9UMP6|A0A1H9UMP6_9FIRM GTP cyclohydrolase 1; OS = Lachnobacterium bovis OX=140626 GN=folE PE=3 SV=1
MIDVEKIEKNIREIIVALGANPDSEGLRETPKRVAKMYEEVFEGMNYTNDQIAEMFNKTFSEDLESTSSNDMVIVKDIDAFSYCEHHMALMYNMKIDVAYIPNGKVIGLSKIARIVDMVTKRLQLQERIGTDILDIMKKITGSSDIAVIIRANHSCMTARGIKNTNSRTYTQTLSGKFEEDPLLLNRLNYA

SEQ ID NO: 9566 - protein, 194 aa, unidentified
  source 1..194: note = Lachnoclostridium phytofermentans
  REGION 1..194: note = tr|A9KKW3|A9KKW3_LACP7 GTP cyclohydrolase 1; OS = Lachnoclostridium phytofermentans (strain ATCC 700394 / DSM 18823 / ISDg) OX=357809 GN=Cphy_2334 PE=3 SV=1
MSIDKNLIQESVSNILIALGEDPLREGLIDTPKRVANMYEEVFLGIQYTNDDIVTMFNKCFEEDQNTFLANGIVWIKDIECFSFCEHHMTLIYDMHITIGYKPLHKVIGISKIARIADMVCKRLQIQERIASDILEILTKITGSDDIFIKIEGKHGCMTSRGIQKPHATTCTILTSGIFQHNPMSFITKESGHV

SEQ ID NO: 9567 - protein, 194 aa, unidentified
  source 1..194: note = Lachnoclostridium phytofermentans
  REGION 1..194: note = tr|A0A3D2XAX1|A0A3D2XAX1_9FIRM GTP cyclohydrolase 1; OS = Lachnoclostridium phytofermentans OX=66219; GN = DHW61_18050 PE=3 SV=1
MGINKKIIQESVSNILVALGENPLREGLIDTPKRVANMYEEVFLGIQYTNDDIVSMFNKCFEEEQDIFLTNGIVWINDIECFSFCEHHMSLIYDMHITIGYKPLHKVIGISKIARIADMVCKRLQIQERIASDILEILGKITESNDIFIKIEGKHGCMTSRGIQKTHATTCTILTSGIFQHNPLSFNTKESGLV

SEQ ID NO: 9568 - protein, 186 aa, unidentified
  source 1..186: note = Lachnoclostridium sp.
  REGION 1..186: note = tr|A0A1Y3T9M8|A0A1Y3T9M8_9FIRM GTP cyclohydrolase 1; OS = Lachnoclostridium sp. An76 OX=1965654 GN=folE PE=3 SV=1
MIDEKKIEQAVRLMLEGIGEDPDREGLADTPSRIARMCAELYGGMSDDAGIHLSRTFTSDSSEMVIEKDITFYSMCEHHVLPFYGKAHIAYIPDGKVVGLSKLARTVEVFARRLQIQEQLTGQIADALMEYMQPKGALVLIEAEHMCMTMRGIKKPGSQTVTLAKRGVFETDPALEERFFRMMDRR

SEQ ID NO: 9569 - protein, 186 aa, unidentified
  source 1..186: note = Lachnoclostridium sp.
  REGION 1..186: note = tr|A0A1Y4RMT6|A0A1Y4RMT6_9FIRM GTP cyclohydrolase 1; OS = Lachnoclostridium sp. An138 OX=1965560 GN=folE PE=3 SV=1
MMDYEKIKAGVQLLLEGIGEDVGREGLLETPDRIARMCQEIYGGLYEDPAVHLKKQFSVERNDMVIEKDITFYSVCEHHLLPFYGKAHIGYLPDGKVVGLSKLARTVDVFARRPQIQEKMTAQIARALEENLNPRGVIVMLEAEHTCMTMRGIKKPGSKTVTMTATGVFQDNYELQNRFLSMVKQG

SEQ ID NO: 9570 - protein, 183 aa, Lachnospira multipara
  REGION 1..183: note = tr|A0A1H5UGV3|A0A1H5UGV3_9FIRM GTP cyclohydrolase 1; OS = Lachnospira multipara OX=28051 GN=folE PE=3 SV=1
MFDDEKIKEGVRLILEGIGEDVNREGLLETPDRVARMYHELAAGYSDDAKEHLSKRFHVDNSDIVMEKDIYFYSLCEHHMLPFYGKAAIAYIPNGEVVGLSKIARTVEVYARRLQIQEQLTNQIADAFMKELNCKGVMVHIEAEHMCMTMRGIKKPGSKTVTVVKRGAFEDEKLENTFYRMLG

SEQ ID NO: 9571 - protein, 195 aa, Lachnospira pectinoschiza
  REGION 1..195: note = tr|A0A174G2S2|A0A174G2S2_9FIRM GTP cyclohydrolase 1; OS = Lachnospira pectinoschiza OX=28052 GN=folE PE=3 SV=1
MKQIDSEAIRFHIRGILEALGDDPDREGLKETPDRVARMYEEVFEGMKYSNDEIADMFDKTFAEDVDDEGTSRYGDMVVVKDIDIFSYCEHHIALMYDMKVTVAYVPKGRVIGLSKIARIADMVGKRLQLQERIGSDIADIICKVTGSEDVAVFIEGCHSCMTARGIKKTNTKTYTQTLRGRFSNESNGFMQWWR

SEQ ID NO: 9572 - protein, 183 aa, Lachnospira pectinoschiza; identical to SEQ ID NO: 9570
  REGION 1..183: note = tr|A0A1G9WT26|A0A1G9WT26_9FIRM GTP cyclohydrolase 1; OS = Lachnospira pectinoschiza OX=28052 GN=folE PE=3 SV=1

SEQ ID NO: 9573 - protein, 184 aa, unidentified
  source 1..184: note = Lachnospiraceae bacterium
  REGION 1..184: note = tr|R6EUC2|R6EUC2_9FIRM GTP cyclohydrolase 1; OS = Lachnospiraceae bacterium CAG:215 OX=1262985 GN=folE; PE = 3 SV=1
MIDQEKIKQAVRLLLEGIGEDPSREGLVETPERIARMYEEIYGGLTEDAGVHLAKTFTVEHSEMVLEKDITFYSTCEHHLLPFYGKAHIAYIPDGRVVGLSKLARTVEVYARRPQIQEQLTGQIADALEKYLEPKGVMVMIEAEHMCMTMRGIKKPGSKTVTVAKRGVFAEEEALQNTFFRMLS

SEQ ID NO: 9574 - protein, 186 aa, unidentified
  source 1..186: note = Lachnospiraceae bacterium
  REGION 1..186: note = tr|R9IX85|R9IX85_9FIRM GTP cyclohydrolase 1; OS = Lachnospiraceae bacterium 3-1 OX=397288 GN=folE PE=3; SV = 1
MIDREKIEQAVTLLLEGMGEDVTREGLKETPRRIARMYEEIFAGIGQTPEEYLGKTFSVEDGGMVLEKGIVFYSTCEHHLLPFYGKAHIAYIPDGKVVGLSKLARTVEVYARRPQLQERLTVQIADALMEYLQPKGVMVLVEAEHMCMTMRGIKKPGTQTVTVAARGSFAKDKSLQEEFWRMLERR

SEQ ID NO: 9575 - protein, 184 aa, unidentified
  source 1..184: note = Lachnotalea glycerini
  REGION 1..184: note = tr|A0A255I0U5|A0A255I0U5_9FIRM GTP cyclohydrolase 1; OS = Lachnotalea glycerini OX=1763509 GN=folE PE=3 SV=1
MVDKEKVKEAIKLLLEGIGEETTREGLRETPERIARMCEEIYGGMSDDANIHLSKTFQVENNEMVIEKDITFYSMCEHHLMPFYGKASMAYIPDGRVVGLSKLARTVEVFAKRPQIQEKLTAQIADALMYHLMPKGAIVLIEAEHLCMTMRGIKKPGSKTITIVARGEFETNLELKNEFLQLVK

SEQ ID NO: 9576 - protein, 198 aa, Lacibacter cauensis
  REGION 1..198: note = tr|A0A562SE08|A0A562SE08_9BACT GTP cyclohydrolase 1; OS = Lacibacter cauensis OX=510947 GN=folE PE=3 SV=1
MAYKKTEQYEEKITSGLIENYRSAIDLLGEDSSREGLLKTPERVAKAMQYLTQGYHMDAKAILESAKFHEEVSEMVIVKDIELYSMCEHHMLPFFGKAHIAYIPNGWITGLSKLARVVDVYSRRMQVQERLTTQILEAIKESLNPMGVAVVVEAQHLCMMMRGVQKQNSVTTTSAFSGEFQKEATRSEFLKLISGKFN

SEQ ID NO: 9577 - protein, 198 aa, Lacibacter sp.
  REGION 1..198: note = tr|A0A4Q1CNY6|A0A4Q1CNY6_9BACT GTP cyclohydrolase 1; OS = Lacibacter sp. TTM-7 OX=2508719 GN=folE PE=3 SV=1
MAYKKTEQYEEKITSGLIENYRSAIDLLGEDSQREGLLKTPERVAKAMQFLTQGYHMDAKAILESAKFHEEVSEMVIVKDIELYSMCEHHMLPFFGKAHIAYIPNGWITGLSKLARVVDVYSRRLQVQERLTTQILEAIKESLNPMGVAVVVEAQHLCMMMRGVQKQNSVTTTSAFSGEFQKEATRSEFLKLISGKFN

SEQ ID NO: 9578 - protein, 184 aa, unidentified
  source 1..184: note = Lacimicrobium alkaliphilum
  REGION 1..184: note = tr|A0A0U3AG96|A0A0U3AG96_9ALTE GTP cyclohydrolase 1; OS = Lacimicrobium alkaliphilum OX=1526571 GN=folE PE=3 SV=1
MSDEIKHHYQKIIELLGEDVSRDGLADTPKRAATAMQYLTDGYNKTLDEVVNGAVFESDTDEMVVIQDIEFYSLCEHHMLPFIGRCHISYLPTGKVLGLSKFARIVDMFARRLQIQEGLTKQIAEAVQLVTGAKGVGVIMEGKHMCMMMRGVQKQNSSMVTSVMLGHMRSNQATRNEFLRLIGK

SEQ ID NO: 9579 - protein, 225 aa, Lacinutrix sp.
  REGION 1..225: note = tr|A0A4U0EYW9|A0A4U0EYW9_9FLAO GTP cyclohydrolase 1; OS = Lacinutrix sp. CAU 1491 OX=2565367 GN=folE PE=3 SV=1
MKIEREIEDFDSLGDNHVGTSSNTPLRADAFKLTKEEKIDIIKDDVRHIMETLGLDLTDDSLQGTPNRVAKMFVSEIFGGLDPQKKPNASTFENKYKYGEMLVEKNITVYSTCEHHLLPIVGKAHVAYISNGTVVGLSKMNRIVDYFAKRPQVQERLTIQIVEELQKVLNTKDVACVIDAKHLCVNSRGIRDTESSTVTSEFGGKFKEKETKREFLDYIKLDTQF

SEQ ID NO: 9580 - protein, 198 aa, Lacinutrix sp.
  REGION 1..198: note = tr|A0A1J5KRB5|A0A1J5KRB5_9FLAO GTP cyclohydrolase 1; OS = Lacinutrix sp. MedPE-SW OX=1860087 GN=folE PE=3 SV=1
MPYKKFEEYNIKVTDDVKNRYKEIIEDLGEDTSREGLVKTPERAAKAMQFLTQGYNQNAADILRGAMFKEDYNDMVVVKDIEFYSLCEHHILPFFGKAHIAYIPNGHIVGLSKLPRIVDVFARRLQVQERLTHEILNCIDDTLKPEGVAVVLEASHMCMQMRGVQKQNSVTTTSGFRGAFKNIETRTEFLKLISETLS

SEQ ID NO: 9581 - protein, 225 aa, unidentified
  source 1..225: note = Lacinutrix venerupis
  REGION 1..225: note = tr|A0A420ZE34|A0A420ZE34_9FLAO GTP cyclohydrolase 1; OS = Lacinutrix venerupis OX=1486034 GN=folE PE=3 SV=1
MKIENTTNTNDDLGENHVGTSSDTPMKADAFKLSDNEKIDIIQSDVRHIMETLGLDLTDDSLNGTPKRVAKMFVNEIFGGLNPDKKPSASVFDNKYKYGEMLVEKNITVYSTCEHHLLPIVGKAHIAYISNGTVVGLSKMNRIVDYFAKRPQVQERLTIQIVKELQKVLNTDDVACVIDAKHLCVNSRGIRDIESSTVTSEFGGQFKNKEIKREFLDYISLETKF

SEQ ID NO: 9582 - protein, 265 aa, Lactobacillus algidus
  REGION 1..265: note = tr|A0A2C8EMK8|A0A2C8EMK8_9LACO Putative GTP cyclohydrolase 1 type 2 OS=Lactobacillus algidus OX=105612; GN = LALCM10_130101 PE=4 SV=1
MTRISDLIQRFELFAPKNMAEIGDPVGLQLGNMNNKVSKVMTTLDVRPEVVQEAIDNNIDFIFAHHPLMFRPAKNLDTTNPQNKMYADLLSHNITVYAAHTNLDNVVGGMNDWLADQLGLQKTIPLVHTTSMDYGMGRVGNLKNEMTVAEFSEYCKQQFNLSGLRVISTDLTQSVKRVAILGGDGGKFYPEAIKNQADVYVTGDVYYHTAHDMLAEGLSAVDPGHHIESICKPQLKRLFNEWTIDNDWQIETIESTINTDPFQFI

SEQ ID NO: 9583 - protein, 351 aa, Lactobacillus aquaticus
  REGION 1..351: note = tr|A0A0R2CYI7|A0A0R2CYI7_9LACO GTP cyclohydrolase 1; OS = Lactobacillus aquaticus DSM 21051 OX=1423725 GN=folE; PE = 3 SV=1
MESIYLSLGSNIGDRQNYLKKALEHLGSESRLIIDKVSNYYETAPVGGVEQDAFLNIAAKIYTTCTPEELLNIIHKVEAKLNRSRKVHWGPRTLDIDIIFWGDRSINNEKLIIPHKETFKRLFVLIPLLDIYDKSSIFYKKIKQSITFLKQTEKEQKVIRVPEKEENTQTIKRVVKELLLAIGDDPQREGVRETPRRVAEMYQEIFSSQNQNEFQEYKVFETPKRDNSQMVLVKDISFYSMCEHHMLPFFGKAHVAYIPRNGRIIGLSKIPRLVDFVSRRLSLQEKITSDIADTLMEILDPVGVAVVVEARHMCVEMRGVKKSNSLTRTTYFTGDFNSNAQLRAEFLRVLN

SEQ ID NO: 9584 - protein, 185 aa, Lactobacillus aviarius
  REGION 1..185: note = tr|A0A0R1ZCK3|A0A0R1ZCK3_9LACO GTP cyclohydrolase 1; OS = Lactobacillus aviarius subsp. araffinosus DSM 20653; OX = 1423820 GN=folE PE=3 SV=1
MKDNIEKIITQLLESIGEDPSRPGIVETPKRIEKMYQEIFSSINQENFTDFKLFDNDAVNENQDIIVTDIPFYSMCEHHMLPFFGVAHVAYIPNDKIIGLSKIPRLVDFVTKKLTLQEKVTRDIALQLNKILHPKGVAVQTEARHMCIEMRGIKKTNSTTKVKYYDGIYQENNHMLDNFISTING

SEQ ID NO: 9585 - protein, 187 aa, unidentified
  source 1..187: note = Lactobacillus backii
  REGION 1..187: note = tr|A0A192H1F0|A0A192H1F0_9LACO GTP cyclohydrolase 1; OS = Lactobacillus backii OX=375175 GN=folE PE=3 SV=1
MKQTELKKIELAVQTILETVGEDIKRPGLKETPARVARMYAEIFASVKQTEFTDYKMFKTDSENDLVIVKEIPFYSMCEHHLLPFWGTVSVGYVPKAGQIIGLSKIARLVDYVAKRPSVQERLTSQIVTELDKILRPGGIAVEVKARHMCMEMRGIQKTGSETVTAAFSGGLKNAVAKSEFQQRLAL

SEQ ID NO: 9586 - protein, 215 aa, unidentified
  source 1..215: note = Lactobacillus backii
  REGION 1..215: note = tr|A0A1Q8FGF7|A0A1Q8FGF7_9LACO GTP cyclohydrolase 1; OS = Lactobacillus backii OX=375175 GN=folE PE=3 SV=1
MTTNNDHYNEAELLASYFSETANNSELLQQKLTDVQQIEQALQTLMALCGQDDNNPDLDKTPFRVVKAFLEYTSGYREDPTAHLEKVFDIQQNDPIIVKDIEFYSMCEHHFAPFFGVAHVAYLPDQKVTGLSKIARVVEGYARRFQVQERLTNQIADAIDTVLQPKGVMVAIEAKHLCVSSRGAKKEQAQTFTLASRGAYIKDSQLRSEFMTAIK

SEQ ID NO: 9587 - protein, 187 aa, Lactobacillus bifermentans
  REGION 1..187: note = tr|A0A0R1H1A2|A0A0R1H1A2_9LACO GTP cyclohydrolase 1; OS = Lactobacillus bifermentans DSM 20003 OX=1423726 GN=folE; PE = 3 SV=1
MTDEATAQIEAAVRTILTAIGEDPDRPGLQETPARVARMYAEVFSSVQQPQFTNYKLFPTESQDDLVLVKDIPFYSMCEHHLLPFFGHVHVAYVPQHKQIIGLSKIARLVDYCAKRPNVQERLTSAIADELQTILDPAGIAVEVQARHMCMEMRGIQKTGSQTVTASFRGTLNNAEAKAEFQRRVQL

SEQ ID NO: 9588 - protein, 357 aa, Lactobacillus brevis
  REGION 1..357: note = tr|C2D4Q7|C2D4Q7_LACBR GTP cyclohydrolase 1; OS = Lactobacillus brevis subsp. gravesensis ATCC 27305; OX = 525310 GN=folE PE=3 SV=1
MNDDIVLSLGSNIGNREFYINKAIQLLGSDANILIDKVSNFYETSPVGNVKQRHFVNIALKIATTYTPEKLLAVIHQVELSLHRTREIHWGPRTLDIDIIFWGDKKMSTDDLTIPHPETFNRLFVLVPILELISKQFPFYQQISKQIQVLQKKDQTVSLIKKDAQPKRLVESSIHNILSAIGDDPDRPGLVETPDRVARMYDEIFSSEGLENFEDYKLFKSKSSNHSKMVLMKNIPFYSMCEHHMMPFWGKAHIAYIPDHGTIIGLSKIPRLVDFVSHKLGLQEKLTDDIVDQLNKILAPKGAAVVIDARHMCVEMRGVKKTDSSTRTIRFSGIFDTDQDLQMAFLNSIGDINGKSI

SEQ ID NO: 9589 - protein, 353 aa, Lactobacillus buchneri
  REGION 1..353: note = tr|A0A4R5NKX6|A0A4R5NKX6_LACBU GTP cyclohydrolase 1; OS = Lactobacillus buchneri DSM 20057 OX=1423728 GN=folE; PE = 3 SV=1
MEDVYLSLGSNIGNREAFLQQAIEALGSDPRIMIEKQASLYETSPVGGVKQRAFVNTAVKIGTTYEPLALLKVIHEIESGLHRTRQVHWGPRTVDIDIIFFGNEQIDQPGLSIPHPEAFNRLFVLIPIQELIDGQFPDADKIATAIKSLQQDDQSIKKISPANNFYTEITNNVTNILAAIGDDPTRKGLIETPDRVARMYANIFDSIGLEDFQDYKLFDSPESDDSKTVMVKGIPFYSMCEHHMMPFWGKVSVAYVPDNGKIIGLSKILRLVDFVSHKLSLQEKITDDVLSQMEKILHPKGVAVIVDARHMCIEMRGVKKTGTVTRTTKFTGVFQQNDELRSEFLNSIQVGQI

SEQ ID NO: 9590 - protein, 353 aa, Lactobacillus buchneri; identical to SEQ ID NO: 9589
  REGION 1..353: note = tr|A0A4U0D823|A0A4U0D823_LACBU GTP cyclohydrolase 1; OS = Lactobacillus buchneri OX=1581 GN=folE PE=3 SV=1

SEQ ID NO: 9591 - protein, 351 aa, Lactobacillus capillatus
  REGION 1..351: note = tr|A0A0R1M6K1|A0A0R1M6K1_9LACO GTP cyclohydrolase 1; OS = Lactobacillus capillatus DSM 19910 OX=1423731 GN=folE; PE = 3 SV=1
MESIYLSLGSNIGNRQENLEKAIEYLGNDKNLIVDQVSEYYETSPVGDIVQDNFLNIAVKVFTTYTPGELLKQIHKIEAFLKRIRKVHWGPRTLDIDIIFWGNKQFKTSELTVPHQETFNRLFVLIPLLDIYEKTGPFYSQIKETIMILEQEEQDQKITRVPKKDSRTVTIERAITTLLVAIGDDPKREGIVETPKRVAKMYQEIFASQSQDDFQDYKVFKTPKKDNAQMVLVKDIPFYSMCEHHMLPFFGKVHVAYIPQNGKIIGLSKIPRLVDFVSRRLSLQEKITSDIAETLTKILNPAGVAVMAEARHMCVEMRGVKKSSSLTRTTYFTGDFDLNAQLRAEFLSTLK

SEQ ID NO: 9592 - protein, 190 aa, Lactobacillus casei
  REGION 1..190: note = tr|A0A1Z2F3L1|A0A1Z2F3L1_LACCA GTP cyclohydrolase 1; OS = Lactobacillus casei OX=1582 GN=folE PE=3 SV=1
MKPFDRALLETSVRNILIAIGDDPDREGLKETPARVASAYEEMFSSLHQKAFTESKVFNSSLANDGELVVVADIPFYSMCEHHLLPFFGSVSVGYMPKNGRIIGLSKIPRLVDYVAKKPNVQENLTSQIGLELQKLVDPQGVAVVVKARHMCTEMRGIKKANSHTLTSFFSGAFKNKDYRMEFLQEIKNQ

SEQ ID NO: 9593 - protein, 190 aa, Lactobacillus casei
  REGION 1..190: note = tr|A0A1Q9MM36|A0A1Q9MM36_LACCA GTP cyclohydrolase 1; OS = Lactobacillus casei OX=1582 GN=folE PE=3 SV=1
MKPFDRALLETSVRNILIAIGDDPDREGLQETPARVASAYEEMFSSLHQKAFTESKVFNSSMANDGELVVVADIPFYSMCEHHLLPFFGSVSVGYMPKNGRIIGLSKIPRLVDYVAKKPNVQENLTSQIGLELQKLVDPQGVAVVVKARHMCTEMRGIKKANSHTLTSFFSGAFKNKDYRMEFLQEIKNQ

SEQ ID NO: 9594 - protein, 192 aa, Lactobacillus coleohominis
  REGION 1..192: note = tr|A0A0R2BPI5|A0A0R2BPI5_9LACO GTP cyclohydrolase 1; OS = Lactobacillus coleohominis DSM 14060 OX=887896 GN=folE; PE = 3 SV=1
MDQQKIEKVVRDLLIAIGENPHREGLLETPQRVAKMYQEVFSSLKRQPEDVANYKVFHASDVPEMVLFQHIPFYSMCEHHLLPFFGYANVAYVPKDDQVIGLSKIPRLIDFVTKKPGMQERVTTDLAAELQRILDPAGIAVTISARHLCMEMRGVNKAGQYTYTDKFTGRFKEDKDLKREFLMQTRNNHADL

SEQ ID NO: 9595 - protein, 192 aa, Lactobacillus coleohominis
  REGION 1..192: note = tr|C7XWW0|C7XWW0_9LACO GTP cyclohydrolase 1; OS = Lactobacillus coleohominis 101-4-CHN OX=575594 GN=folE; PE = 3 SV=1
MDQQKIEKVVRDLLIAIGENPHREGLLETPQRVAKMYQEVFSSLKRQPEDVANYKVFHVSDVPEMVLVQHIPFYSMCEHHLLPFFGYANVAYVPKDDQVIGLSKIPRLIDFVTKKPGMQERVTTDLAAELQRILDPAGIAVTISARHLCMEMRGVNKAGQYTYTDKFTGRFKEDKDLKREFLMQTRNNHADL

SEQ ID NO: 9596 - protein, 189 aa, Lactobacillus collinoides
  REGION 1..189: note = tr|A0A166HUI1|A0A166HUI1_LACCL GTP cyclohydrolase 1; OS = Lactobacillus collinoides OX=33960 GN=folE PE=3 SV=1
MIDKTNQEKIEKAVRMILEAVGEDPDRPGLVETPARVARSYGEIFSSLNAPAFDNYKLFPVEETTEMVLIKDIPFYSMCEHHLLPFFGTVQVAYVPDHKRVMGLSKIPRLIDYCAKRPNVQERLTVNIAKELNRILDPNGVAVSISARHMCMEMRGVEKTGSQTESSYYTGNFKTDTVLKQEFLQRING

SEQ ID NO: 9597 - protein, 189 aa, Lactobacillus collinoides; identical to SEQ ID NO: 9596
  REGION 1..189: note = tr|A0A0R2BCT6|A0A0R2BCT6_LACCL GTP cyclohydrolase 1; OS = Lactobacillus collinoides DSM 20515 = JCM 1123; OX = 1423733 GN=folE PE=3 SV=1

SEQ ID NO: 9598 - protein, 182 aa, Lactobacillus composti
  REGION 1..182: note = tr|A0A0R1Y1R9|A0A0R1Y1R9_9LACO GTP cyclohydrolase 1; OS = Lactobacillus composti DSM 18527 = JCM 14202 OX=1423734; GN = folE PE=3 SV=1
MITQAVRQILTAVGEDPDRPGLVETPDRVARMYAEVFSSLEDREFKDYKIFDSDHDQDEIVLVKDIPFYSMCEHHLLPFFGTVSVAYIPKDGKIIGLSKIPRLVDFVSHKPTLQENITAEIAQTLDHILKPAGVAVIVKARHMCMEMRGVKKTNSQTRTTYYSGAFKTPQTRQDLMLQLQAV

SEQ ID NO: 9599 - protein, 186 aa, Lactobacillus coryniformis
  REGION 1..186: note = tr|A0A5B8THS5|A0A5B8THS5_9LACO GTP cyclohydrolase 1; OS = Lactobacillus coryniformis OX=1610 GN=folE PE=3 SV=1
MNDEQKQQIIAAVKQILVAVGEDPERAGLVETPERVARMYTEIFSSLREPEFTNYKLFQTDSHAEMVLVKDIPFYSMCEHHLLPFFGTAHIAYLPADGQIIGLSKIARLVDYVAHKPNVQERLTSQLVDELQKILQPRGIAVELEARHMCMEMRGIQKTGSQTVTTRFTGALDDPVRIAEFERRLH

SEQ ID NO: 9600 - protein, 186 aa, Lactobacillus coryniformis
  REGION 1..186: note = tr|A0A0R1F7I4|A0A0R1F7I4_9LACO GTP cyclohydrolase 1; OS = Lactobacillus coryniformis subsp. coryniformis KCTC 3167 = DSM 20001 OX=913848 GN=folE PE=3 SV=1
MNDEQKQQIIAAVKQILVAVGEDPERAGLVETPERVARMYAEIFSSLREPEFTNYKLFQTDSHAEMVLVKDIPFYSMCEHHLLPFFGTVHIAYLPADGQIIGLSKIARLVDYVAHKPNVQERLTSQLVDELQKILQPRGIAVELEARHMCMEMRGIQKTGSQTVTTRFTGALDDPVRIAEFERRLH

SEQ ID NO: 9601 - protein, 357 aa, unidentified
  source 1..357: note = Lactobacillus curieae
  REGION 1..357: note = tr|A0A1S6QKD0|A0A1S6QKD0_9LACO GTP cyclohydrolase 1; OS = Lactobacillus curieae OX=1138822 GN=folE PE=3 SV=1
MQTNVILSLGSNIGNREFNINRAITAISSDPQNMLVNTSNFYETSPVGNVEQKNFINVAINVATNYEPEKLLAKIHQIEADLHRTRDIHWGPRTIDIDIVFWGDQTISDSDLVVPHPEAFNRLFVLVPSLEVLPADFNLNDTIKQRITELSASDQSIKLIKQNKRGDQEIMQSVRTILANIGEDPDRAGLLETPDRVQRMYAEIFSTTGQEKFQDYKLFDSENPDSSKMIMMRNIPFYSMCEHHMMPFFGKAHVAYIPTNGKIIGLSKIPRLVDFVTHKLGLQEKVTDDIATQLNKILNPQGVAVVVDARHMCVEMRGVKKTDSSTRTFSFSGLFKEDSNLQAEFLNSIGDLNDQNL

SEQ ID NO: 9602 - protein, 190 aa, unidentified
  source 1..190: note = Lactobacillus curieae
  REGION 1..190: note = tr|A0A401FNE3|A0A401FNE3_9LACO GTP cyclohydrolase 1; OS = Lactobacillus curieae OX=1138822 GN=folE PE=3 SV=1
MNEEKIEAAITSLLEAVGEDPNREGLVETPKRVAKAYAEIFAGLNHRPEEFTDYKIFHVDEDPEMILVQQIPFYSMCEHHLLPFFGVANVAYVPKDGQVIGISKIPRLVEFVSKRPGMQERVNTQIVTELEDILHPQGIAVSLSARHMCMEMRGINKDGLSTYTSKFTGVFKDNLDLKNEFLQQTRNLRG

SEQ ID NO: 9603 - protein, 357 aa, Lactobacillus delbrueckii
  REGION 1..357: note = tr|A0A219D3D6|A0A219D3D6_LACDE GTP cyclohydrolase 1; OS = Lactobacillus delbrueckii subsp. bulgaricus OX=1585; GN = folE PE=3 SV=1
MMENVILSLGSNIGNREAYINKAVALLGNDPAILIDKASSFYETSPVGNVNQRAFINIALKIATTDSPEDLLTKIHQIELHLHRTRDVHWGPRTLDVDIIFWGDQKIKTESLIIPHPEAFNRLFVLVPTLEIVTPEFPFYNQIKAQIQKLQKADQTIQLVQKQTQSKQVVESAIRQILNAIGDDPDRPGLVETPDRVARMYNEIFSSEGLDNFEDYKLFNTKETDNSKMVMVKNIPFYSMCEHHMMPFWGKAHIAYVPDHGKIIGLSKIPRLVDFVSHKLGLQEKLTDDIVAQMNRILAPKGVAVIVDARHMCVEMRGVKKADSLTRTIRFSGVFETDQALRMAFLNSIGDVNGKTI

SEQ ID NO: 9604 - protein, 357 aa, Lactobacillus delbrueckii
  REGION 1..357: note = tr|F0JZ38|F0JZ38_LACD2 GTP cyclohydrolase 1; OS = Lactobacillus delbrueckii subsp. bulgaricus (strain 2038) OX=353496 GN=folE PE=3 SV=1
MMENVILSLGSNIGNREAYINKAVALLGNDPAILIDKASSFYETSPVGNVNQRAFINIALKIATTDSPEDLLTKIHQIELHLHRTRDVHWGPRTLDIDIIFWGDQKIKTESLIIPHPEAFNRLFVLVPTLEIVTPEFPFYNQIKAQIQKLQKADQTIQLVQKQTQSKQVVESAIRQILNAIGDDPDRPGLVETPDRVARMYNEIFSSEGLDNFEDYKLFNTKETDNSKMVMVKNIPFYSMCEHHMMPFWGKAHIAYVPDHGKIIGLSKIPRLVDFVSHKLGLQEKLTDDIVAQMNRILAPKGVAVIVDARHMCVEMRGVKKADSLTRTIRFSGVFETDQALRMAFLNSIGDVNGKTI

SEQ ID NO: 9605 - protein, 220 aa, Lactobacillus dextrinicus
  REGION 1..220: note = tr|A0A0R2BKQ5|A0A0R2BKQ5_9LACO GTP cyclohydrolase 1; OS = Lactobacillus dextrinicus DSM 20335 OX=1423738 GN=folE; PE = 3 SV=1
MTLSFEKNATEHYDLDHLLTTYFPELINQPTELATKKTTVNEIELALQKLIALCGEDPQQADLAETPFRVIKAFLEYTAGYREDPTAHLEKVFDIQQNDPIIVKDIEFYSMCEHHFAPFFGVAHVAYLPDQKVTGLSKIARVVEGYARRFQVQERLTNQIADAIDTVLQPKGVMVAIEAKHLCVSSRGAKKEQAQTFTLASRGAYIKDSQLRSEFMAAIK

SEQ ID NO: 9606 - protein, 202 aa, Lactobacillus dextrinicus
  REGION 1..202: note = tr|A0A5J6UV21|A0A5J6UV21_9LACO GTP cyclohydrolase I FolE OS=Lactobacillus dextrinicus OX=51664 GN=folE PE=4; SV = 1
MTTYFPELINQPTELATKKTTVNEIELALQKLIALCGEDPQQADLAETPFRVIKAFLEYTAGYREDPTAHLEKVFDIQQNDPIIVKDIEFYSMCEHHFAPFFGVAHVAYLPDQKVTGLSKIARVVEGYARRFQVQERLTNQIADAIDTVLQPKGVMVAIEAKHLCVSSRGAKKEQAQTFTLASRGAYIKDSQLRSEFMAAIK

SEQ ID NO: 9607 - protein, 190 aa, Lactobacillus diolivorans
  REGION 1..190: note = tr|A0A0R1SD44|A0A0R1SD44_9LACO GTP cyclohydrolase 1; OS = Lactobacillus diolivorans DSM 14421 OX=1423739 GN=folE; PE = 3 SV=1
MSPENKQIIETSIRHILTAVGENPDRAGLKETPARVARMYEEIFSSLEKKSFDDGKVFDADKSVDDEIVTVKHVPFYSMCEHHLLPFFGTVSVGYVPQNGKIIGLSKIPRLIEYVAAKPSVQEEITSQIGKEMTKILAPQGVAVVITARHMCVEMRGIKKLNSQTTTSYYDGILKKDRDKKAEFLQEINR

SEQ ID NO: 9608 - protein, 190 aa, Lactobacillus fabifermentans
  REGION 1..190: note = tr|W6TBR2|W6TBR2_9LACO GTP cyclohydrolase 1; OS = Lactobacillus fabifermentans T30PCM01 OX=1400520; GN = folE PE=3 SV=1
MIDETNQAKIRHAVREILTAVGEDPDRPGLVETPDRVARMYAEVFATKTAAPFDNYKLFEVTDPTEMVLLKDIPFYSMCEHHLLPFFGTVQVAYVPQHDQVIGLSKIPRLIDYCAQQPNVQERLTVSIAKELQRILDPAGIAVSITARHMCMEMRGVSKPGVQTESSYYSGQFKTDLDLKREFLQRIASK

SEQ ID NO: 9609 - protein, 190 aa, Lactobacillus fabifermentans; identical to SEQ ID NO: 9608
  REGION 1..190: note = tr|A0A0R2NC87|A0A0R2NC87_9LACO GTP cyclohydrolase 1; OS = Lactobacillus fabifermentans DSM 21115 OX=1413187; GN = folE PE=3 SV=1

SEQ ID NO: 9610 - protein, 357 aa, Lactobacillus farraginis
  REGION 1..357: note = tr|X0PF78|X0PF78_9LACO GTP cyclohydrolase 1; OS = Lactobacillus farraginis DSM 18382 = JCM 14108; OX = 1423743 GN=folE PE=3 SV=1
MMENVILSLGSNIGNREAYINKAVALLGNDPAILIDKVSSFYETSPVGNVNQRAFINIALKIATTDSPEDLLTKIHQIELHLHRTRDVHWGPRTLDVDIIFWGDQKIKTESLIIPHPEAFNRLFVLVPTLEIVTPEFPFYNQIKAQIQKLQKADQTIQLVQKQTQSKQVVESAIRQILNAIGDDPDRPGLVETPDRVARMYNEIFSSEGLDNFEDYKLFNTKETDNSKMVMVKNIPFYSMCEHHMMPFWGKAHIAYVPDHGKIIGLSKIPRLVDFVSHKLGLQEKLTDDIVAQMNRILAPKGVAVIVDARHMCVEMRGVKKADSSTRTIRFSGVFDTDQALRMAFLNSIGDVNGKTI

SEQ ID NO: 9611 - protein, 190 aa, Lactobacillus fermentum
  REGION 1..190: note = tr|A0A3R5XFA0|A0A3R5XFA0_LACFE GTP cyclohydrolase 1; OS = Lactobacillus fermentum OX=1613 GN=folE PE=3 SV=1
MDQEKLIKATKMMIEAFGEDPDREGLRETPERVAKMYAEIFSSLDAKRPEAVTNYKVFHVADTPEMVAIQEIPFYSMCEHHLLPFFGTVSVAYVPKNGRVIGLSKIPRLVDFVSHKPGMQERVTTELVQELTRLLDPAGVAVVVAARHMCMEMRGVTKAGQFTYTSHFTGAFFDQPNLKQEFLDQVRGRP

SEQ ID NO: 9612 - protein, 190 aa, Lactobacillus fermentum
  REGION 1..190: note = tr|A0A2K2TK15|A0A2K2TK15_LACFE GTP cyclohydrolase 1; OS = Lactobacillus fermentum OX=1613 GN=folE PE=3 SV=1
MDQEKLIKATKMMIEAFGEDPDREGLRETPERVAKMYAEIFSSLDAKRPEAVTNYKVFHVADTPEMVVVQEIPFYSMCEHHLLPFFGTVSVAYVPKNGRVIGLSKIPRLVDFVSHKPGMQERVTTELVQELTRLLDPAGVAVVVAARHMCMEMRGVTKAGQFTYTSHFTGAFLDQPNLKQEFLDQVRGRP

SEQ ID NO: 9613 - protein, 190 aa, Lactobacillus frumenti
  REGION 1..190: note = tr|A0A5J6VF03|A0A5J6VF03_9LACO GTP cyclohydrolase I FolE OS=Lactobacillus frumenti OX=104955 GN=folE PE=4 SV=1
MDQVKVERAIHDLIVALGEDPDREGLRETPTRVAKMYGEIFSSLNHRPEEFTNYKVFHVDEQPEMVLIQHIPFYSMCEHHFLPFFGYANVAYVPRNGRVIGLSKIPRLVDFVTKKPGMQERVTTELVGELQRILDPQGIAVTIVARHMCMEMRGICKAGQFTYTDKFTGDFHDRQDLRQEFLQQTRQTQC

SEQ ID NO: 9614 - protein, 187 aa, Lactobacillus frumenti
  REGION 1..187: note = tr|A0A0R1P5E2|A0A0R1P5E2_9LACO GTP cyclohydrolase 1; OS = Lactobacillus frumenti DSM 13145 OX=1423746 GN=folE; PE = 3 SV=1
MKVERAIHDLIVALGEDPDREGLRETPTRVAKMYGEIFSSLNHRPEEFTNYKVFHVDEQPEMVLIQHIPFYSMCEHHFLPFFGYANVAYVPRNGRVIGLSKIPRLVDFVTKKPGMQERVTTELVGELQRILDPQGIAVTIVARHMCMEMRGICKAGQFTYTDKFTGDFHDRQDLRQEFLQQTRQTQC

SEQ ID NO: 9615 - protein, 189 aa, Lactobacillus fuchuensis
  REGION 1..189: note = tr|A0A0R1S5I6|A0A0R1S5I6_9LACO GTP cyclohydrolase 1; OS = Lactobacillus fuchuensis DSM 14340 = JCM 11249; OX = 1423747 GN=folE PE=3 SV=1
MVDKTVQQIEKDVRDILKQVGDDPQRAGVFETPQRVAKMYQEVLAYQGQTDFKDYKLFETEIVDDDQLVLMQAIPFYSMCEHHMLPFFGQVNVAYLPAEGRIIGLSKIPRLVDFVSKRLSVQENLTRDIGQILNQILAPQGVAVQVTARHMCVEMRGIKKATSQTLTTFYSGQFKTDRQLRNEFLQLLK

SEQ ID NO: 9616 - protein, 189 aa, Lactobacillus fuchuensis; identical to SEQ ID NO: 9615
  REGION 1..189: note = tr|A0A2N9DV02|A0A2N9DV02_9LACO GTP cyclohydrolase 1; OS = Lactobacillus fuchuensis OX=164393 GN=folE PE=3 SV=1

SEQ ID NO: 9617 - protein, 357 aa, Lactobacillus gallinarum
  REGION 1..357: note = tr|A0A0P0EFI5|A0A0P0EFI5_9LACO GTP cyclohydrolase 1; OS = Lactobacillus gallinarum OX=52242 GN=folE PE=3 SV=1
MMENVILSLGSNIGNREAYINKAVALLGNDPAILIDKASSFYETSPVGNVNQRAFINIALKIATTDSPEDLLTKIHQIELHLHRTRDVHWGPRTLDVDIIFWGDQKIKTESLIIPHPEAFNRLFVLVPTLEIVTPEFPFYNQIKAQIQKLQKADQTIQLVQKQTQSKQVVESAIRQILNAIGDDPDRPGLVETPDRVARMYNEIFSSEGLDNFEDYKLFNTKETDNSKMVMVKNISFYSMCEHHMMPFFGKAHIAYVPDHGKIIGLSKIPRLVDFVSHKLGLQEKLTDDIVAQMNRILAPKGVAVIVDARHMCVEMRGVKKADSSTRTIRFSGVFDTDQALRMAFLNSIGDVNGKTI

SEQ ID NO: 9618 - protein, 190 aa, unidentified
  source 1..190: note = Lactobacillus ginsenosidimutans
  REGION 1..190: note = tr|A0A0H4QLH1|A0A0H4QLH1_9LACO GTP cyclohydrolase 1; OS = Lactobacillus ginsenosidimutans OX=1007676 GN=folE PE=3; SV = 1
MTPDNQKIIEDSVKNILKAVGDDPDREGVQETPARVARMYSEIFSSLEEPEFNDSKIFQSSNLVDGENVIVKDIPFYSMCEHHLLPFFGKVTVGYEPKNGKIIGLSKIPRLVDFVARKPNVQENITSEIGTRLNKLLAPQGVAVIVTARHMCVEMRGVQKTASKTTTTFYSGVFRDRDKKMEFLEEIKYN

SEQ ID NO: 9619 - protein, 191 aa, unidentified
  source 1..191: note = Lactobacillus heilongjiangensis
  REGION 1..191: note = tr|A0A0K2LDJ4|A0A0K2LDJ4_9LACO GTP cyclohydrolase 1; OS = Lactobacillus heilongjiangensis OX=1074467 GN=folE PE=3; SV = 1
MSVNRTTNIEESVRNIIKLTGDNPEREGLLETPKRVARMYQEILSSQGKKKFEEYKIFTANTTNNSQMILINDIPFYSMCEHHMLPFFGTAHVAYIPNNGKIIGLSKIPRLVDFVSRKLNVQENITRDVALILDEILNPKGVAVVLDARHMCVEMRGIKKGNCVTRTSFYSGKFDKYPQMRYEFLQNLNNK

SEQ ID NO: 9620 - protein, 357 aa, Lactobacillus helveticus
  REGION 1..357: note = tr|W5XG05|W5XG05_LACHE GTP cyclohydrolase 1; OS = Lactobacillus helveticus H9 OX=767456 GN=folE PE=3 SV=1
MMENVILSLGSNIGNREAYINKAVALLGNDPAILIDKASSFYETSPVGNVNQRAFINIALKIATTDSPEDLLTKIHQIELHLHRTRDVHWGPRTLDVDIIFWGDQKIKTESLIIPHPEAFNRLFVLVPTLEIVTPEFPFYNQIKAQIQKLQKADQTIQLVQKQTQSKQVVESAIRQILNAIGDDPDRPGLVETPDRVARMYNEIFSSEGLDNFEDYKLFNTKETDNSKMVMVKNIPFYSMCEHHMMPFWGEAHIAYVPDHGKIIGLSKIPRLVDFVSHKLGLQEKLTDDIVAQMNRILAPKGVAVIVDARHMCVEMRGVKKADSLTRTIRFSGVFETDQALRMAFLNSIGDVNGKTI

SEQ ID NO: 9621 - protein, 265 aa, Lactobacillus helveticus
  REGION 1..265: note = tr|A0A0R2MQ78|A0A0R2MQ78_LACHE GTP cyclohydrolase 1 type 2 OS=Lactobacillus helveticus OX=1587; GN = IV62_GL001266 PE=4 SV=1
MTKVKDIVNRLREDFPEDIASKGDPVGMQIGSMEADVTKVMTTLDVRPQVVEEAVEKGVNFIVSHHPVMFRPARNLDFADAQNAMYGNIIKNGITVYSIHTNSDKAQDGSADWQAEELGLKDVEPFCLDDDGIAMGRKGRLPETMTAYDFAYYVKEKMGIKMARLITADNNKKISTVGFICGDGGKYWTRALDNHLDAFITGDVYYHVGHDMISSGLTVVDPGHYTEKLFKYKVYDRLKKWNQENNWNVGVELSEVSTNPFQDLF

SEQ ID NO: 9622 - protein, 357 aa, Lactobacillus hilgardii
  REGION 1..357: note = tr|C0XLW6|C0XLW6_LACHI GTP cyclohydrolase 1; OS = Lactobacillus hilgardii DSM 20176 = ATCC 8290; OX = 1423757 GN=folE PE=3 SV=1
MKDDIVLSLGSNIGNREFYINKAIQLLGNDANILIDKVSNFYETSPVGNVKQRHFVNIALKIATTYTPEKLLAVIHQVELSLHRTREIHWGPRTLDIDIIFWGDKKMSTDDLTIPHPETFNRLFVLVPILEIISKQFPFYQQISKQIQVLQKKDQTVSLIKKDAQPKRLVESSIHNILSAIGDDPDRPGLVETPDRVARMYDEIFSSEGLENFEDYKLFKSKSSNHSKMVLMKNIPFYSMCEHHMMPFWGKAHIAYIPDHGTIIGLSKIPRLVDFVSHKLSLQEKLTDDIVDQLNKILAPKGAAVVIDARHMCVEMRGVKKTDSSTRTIRFSGIFDTDQDLQMAFLNSIGDINGKSI

SEQ ID NO: 9623 - protein, 189 aa, unidentified
  source 1..189: note = Lactobacillus hokkaidonensis
  REGION 1..189: note = tr|A0A0A1GY17|A0A0A1GY17_9LACO GTP cyclohydrolase 1; OS = Lactobacillus hokkaidonensis JCM 18461 OX=1291742; GN = folE PE=3 SV=1
MDEKRIENAVKEILNAIGDDPNREGLVETPARVAKMYGEVFASLDEKATFDDYKVFHVDEDPGMVLIQQIPFYSMCEHHLLPFFGTANVAYVPRDGKIMGLSKIPRLVDFVAKRPGVQERITTQIVAQMEQILHPKGIAVSLSARHMCMEMRGISKSGLFTYTSKFEGVFKDDLELKNEFLRQTGNHSE

SEQ ID NO: 9624 - protein, 186 aa, Lactobacillus iners
  REGION 1..186: note = tr|E1NNV2|E1NNV2_9LACO GTP cyclohydrolase 1; OS = Lactobacillus iners LactinV 03V1-b OX=879298 GN=folE; PE = 3 SV=1
MNQQKIEHAVRELLVAVGEDPDRSGLVETPKRVAKMYQEIFSSLNHRPEDFANYKKFHVDSNPEMVSINHIPIYSMCEHHLLPFFGYADIAYIPNNNMVLGLSKIPRLVEFVSKKPTMQEKITTDIVKQLAKFIDPKGIAVAIKARHLCMEMRGINKYGQYTYTSDYAGLFNEDDRLKQEFLNQRG

SEQ ID NO: 9625 - protein, 186 aa, Lactobacillus iners
  REGION 1..186: note = tr|A0A2N6RTX1|A0A2N6RTX1_9LACO GTP cyclohydrolase 1; OS = Lactobacillus iners OX=147802 GN=folE PE=3 SV=1
MNQQKIEHAVRELLVAVGEDPDRSGLVETPKRVAKMYQEIFSSLNHRPEDFANYKKFHVDSNPEMVSINHIPIYSMCEHHLLPFFGYADIAYIPNNNTVLGLSKIPRLVEFVSKKPTMQEKITTDIVKQLAKFINPKGIAVAIKARHLCMEMRGINKYGQYTYTSDYAGLFNEDDRLKQEFLKQRG

SEQ ID NO: 9626 - protein, 191 aa, Lactobacillus ingluviei
  REGION 1..191: note = tr|A0A0R2GWC1|A0A0R2GWC1_9LACO GTP cyclohydrolase 1; OS = Lactobacillus ingluviei OX=148604 GN=folE PE=3 SV=1
MDLARIEAAVREILLAVGEDPTREGLQETPARVARMYSEVFASLGKQAEEVANYKTFHVEERPEMVLVQDIPFYSMCEHHLLPFFGVISLAYVPNDRVIGLSKIPRLVDYVTKKPGMQERVTTELLAELDRLLAPAGVAVSVAARHMCMEMRGVHKTGQFTYTSKFSGQFATQEALRQEFLQQVRTHHDQL

SEQ ID NO: 9627 - protein, 191 aa, Lactobacillus ingluviei
  REGION 1..191: note = tr|A0A0R1U7L8|A0A0R1U7L8_9LACO GTP cyclohydrolase 1; OS = Lactobacillus ingluviei DSM 15946 OX=1423760 GN=folE; PE = 3 SV=1
MDLARIEAAVREILLAVGEDPTREGLQETPARVARMYSEVFASLGKQAEEVANYKAFHVEERPEMVLVQDIPFYSMCEHHLLPFFGVISLAYVPNDRVIGLSKIPRLVDYVTKKPGMQERVTTELLTELDRLLAPAGVAVSVAARHMCMEMRGVHKTGQFTYTSKFSGQFATQEALRQEFLQQVRTHHDQL

SEQ ID NO: 9628 - protein, 347 aa, Lactobacillus kefiri
  REGION 1..347: note = tr|A0A511DR80|A0A511DR80_LACKE GTP cyclohydrolase 1; OS = Lactobacillus kefiri OX=33962 GN=folKE PE=3 SV=1
MQDVYLSLGSNIGNRELYLHKAIEMLGNDPQILIDKVADFYETSPVGGVKQRSFINTAVKIATNDEPLQLLDKIHQIEADLQRVRTVHWGPRTVDIDIIFFGTQETQIDKLTIPHPEAFNRLFVLIPIKQIMDHDSPYYAKVTQKIDQFPDKDQLIAKSNHPDSYKESIKRSVTNLLSTIGEDPNRPGLLETPDRVARMYGEIFASTGLDDFQDYKLFDDPNKDSKMVMIKNIPFYSMCEHHMMPFWGKVNVGYLPKNGKIIGLSKIPRLVDFVSHKLSLQEKITDDIVSQMNKILAPQGVAVVVDARHMCVEMRGVKKTGSITRTTKFSGIFEENSALRHEFLQSL

SEQ ID NO: 9629 - protein, 189 aa, Lactobacillus kimchicus
  REGION 1..189: note = tr|A0A0R1HJT3|A0A0R1HJT3_9LACO GTP cyclohydrolase 1; OS = Lactobacillus kimchicus JCM 15530 OX=1302272 GN=folE; PE = 3 SV=1
MINEENQAKIETAVKMILEAVGEDPTRDGLQETPARVARMYQEVFSSLNAPAFDNYKLFPVEETTEMVLIKDISFYSMCEHHLLPFFGVVHVAYIPNHKQVMGLSKIPRLIDYCAKRPNVQERMTVNIAAELTRILDPKGVAVAVSARHMCMEMRGVEKTGSHTETSYYTGEFKTNNALKSEFLQRTIG

SEQ ID NO: 9630 - protein, 354 aa, Lactobacillus kisonensis
  REGION 1..354: note = tr|A0A0R1NSY7|A0A0R1NSY7_9LACO GTP cyclohydrolase 1; OS = Lactobacillus kisonensis DSM 19906 = JCM 15041; OX = 1423766 GN=folE PE=3 SV=1
MEDVYLSLGSNIGNRQQYLNAAITLLGNNRQIIIERVANFYETSPVGNVSQRPFVNTAVKIATTLEPDDLLLVIHQIEKRLHRSRKIHWGPRTLDIDIIFYGQRVVHSDDLEIPHPEAFNRRFVLIPIKELVDHSFPYYEQITRAITHINSKDQELKPVSAKDNRGNIIERATTSILTAIGEDPSRAGLLETPNRVSRMDAEIFSSVGLTDFTDYKLFHSEDSDQSKMIMMNNLPFYSMCEHHMMPFWGSVNVAYMPANGTIIGLSKIPRLIDFVSHKLTLQERLTDEIIDQMTRILAPKGVAVVVDARHMCVEMRGVKSRGAITRTIRFSGDFERNQALQNEFLSAIKVTGKQ

SEQ ID NO: 9631 - protein, 354 aa, Lactobacillus kisonensis; identical to SEQ ID NO: 9630
  REGION 1..354: note = tr|H1LG97|H1LG97_9LACO GTP cyclohydrolase 1; OS = Lactobacillus kisonensis F0435 OX=797516 GN=folE PE=3; SV = 1

SEQ ID NO: 9632 - protein, 191 aa, Lactobacillus manihotivorans
  REGION 1..191: note = tr|A0A0R1QKH7|A0A0R1QKH7_9LACO GTP cyclohydrolase 1; OS = Lactobacillus manihotivorans DSM 13343 = JCM 12514; OX = 1423769 GN=folE PE=3 SV=1
MDQQRIENAVRELLDAVGEDTTRPGLIETPERVARMYQEVFGSLDKPADFKDYKVFETTEDPGLVMVQQIPFYSMCEHHLLPFFGHVTIGYMPSHKRIIGLSKLGRLVDFVARRPSVQEVLTTSIADQLQRVLDPKGIAVSVTARHMCMEMRGINRGDLFTYTSRYTGVFKTDLALRQEFQQEAQHRNGNR

SEQ ID NO: 9633 - protein, 189 aa, unidentified
  source 1..189: note = Lactobacillus mixtipabuli
  REGION 1..189: note = tr|A0A1Z5IDY1|A0A1Z5IDY1_9LACO GTP cyclohydrolase 1; OS = Lactobacillus mixtipabuli OX=1435342 GN=folE PE=3 SV=1
MIDDANQKKIEQAVKMILEAVGEDPNRDGLIETPARVARMYNEVFSSVKAPAFDNYKLFPVDETTEMVLIKDISFYSMCEHHLLPFFGTVDVAYIPNHQRVMGLSKIPRLIDYCAKRPNVQERMTVNIAKELTRILDPKGIAVSVTARHMCMEMRGVEKTGSQTETSYYTGAFKEDRELKQEFLQRING

SEQ ID NO: 9634 - protein, 190 aa, Lactobacillus mucosae
  REGION 1..190: note = tr|A0A0D4CIU9|A0A0D4CIU9_LACMC GTP cyclohydrolase 1; OS = Lactobacillus mucosae LM1 OX=1130798 GN=folE PE=3 SV=1
MDQEKIKHAVSELLEAFGEDPQREGLKETPQRVAKMYAEIFASLNHQPEDFSNYKTFHVDDQPEMVLIQQIPFYSMCEHHLLPFFGNVSVAYVPRDGKVIGLSKIPRLVDFVAKKPGMQERLTTELANELQRILNPKGIAIKVAARHMCMEMRGINKAGQFTYTSKFTGEFKDDLALRKEFLMQTKDLVK

SEQ ID NO: 9635 - protein, 190 aa, Lactobacillus mucosae; identical to SEQ ID NO: 9634
  REGION 1..190: note = tr|A0A0R1P8J1|A0A0R1P8J1_LACMC GTP cyclohydrolase 1; OS = Lactobacillus mucosae DSM 13345 OX=1423771 GN=folE PE=3; SV = 1

SEQ ID NO: 9636 - protein, 189 aa, Lactobacillus odoratitofui
  REGION 1..189: note = tr|A0A0R1M524|A0A0R1M524_9LACO GTP cyclohydrolase 1; OS = Lactobacillus odoratitofui DSM 19909 = JCM 15043; OX = 1423776 GN=folE PE=3 SV=1
MINEANQQKIEQAVKMILEAVGEDPKREGLIETPARVARMYGEVFSSVNAPAFDNYKLFPVDETTEMVLIKDIPFYSMCEHHLLPFFGQVHVAYIPDQKRVMGLSKIPRLVNYCAKRPNVQERLTVNIAKELTRILDPKGIAVSISARHMCMEMRGVEKTGSLTETSYYTGSFKTDQDLKREFLQRING

SEQ ID NO: 9637 - protein, 187 aa, Lactobacillus oligofermentans
  REGION 1..187: note = tr|A0A0R1RGD2|A0A0R1RGD2_9LACO GTP cyclohydrolase 1; OS = Lactobacillus oligofermentans DSM 15707 = LMG 22743; OX = 1423778 GN=folE PE=3 SV=1
MDEKRIENAVSEIISAIGEDPTREGLVETPARVAKMYTEIFSSLSDEPSDFDNFKVFHEDESPEMVLVQQIPFYSMCEHHFLPFFGVANVAYIPNNGEVIGISKIPRLVDYVAKKPGMQERITNDILSEMERILHPKGVAVSLSARHMCMEMRGINKSELSTYTSKFSGEFANNLDLKTEFLRQTGH

SEQ ID NO: 9638 - protein, 347 aa, Lactobacillus otakiensis
  REGION 1..347: note = tr|S4NEY2|S4NEY2_9LACO GTP cyclohydrolase 1; OS = Lactobacillus otakiensis DSM 19908 = JCM 15040; OX = 1423780 GN=folE PE=3 SV=1
MEDVYLSLGSNIGNRERYLHQAISMLGNDSGILVDKVAHFYETSPVGGVEQRAFLNTAVKIATRYQPEELLQKIHDIESELQRTRTIHWGPRTLDIDIIFFGNQKIQNQRLTIPHPEAFNRLFVLMPIQEIMDESLPQFSKINQTISQFPDKDQEIHKINSADSFDDSIKTSIRKLLTTIGEDPDRSGLKETPDRVARMYGEIFSSIGIEDFQDYKLFDEPIKDSKMIMIKSIPFYSMCEHHMMPFWGTVNVGYLPKDGKIIGLSKIPRLVDFVSHKLSLQEKITDDVLSQMDKILSPQGVAVVVDARHMCVEMRGVKKTGSVTRTTKFSGVFEQDPSLRQEFLQSI

SEQ ID NO: 9639 - protein, 353 aa, Lactobacillus parabuchneri
  REGION 1..353: note = tr|A0A0R1Z9Q8|A0A0R1Z9Q8_9LACO GTP cyclohydrolase 1; OS = Lactobacillus parabuchneri DSM 5707 = NBRC 107865; OX = 1423784 GN=folE PE=3 SV=1
MDEVYLSLGSNIGNRQAFLEQAIHGLGNDPQILIEKQADFYETSPVGGVKQRAFINTAVKIGTTYSPEALLEVIHQIESGLHRTRKIHWGPRTVDIDIIFFGNQKIQTANLSVPHPEAFKRLFVLVPILELVDEHFSQYEQIKQAVESLKNQDQTIQKVNPANDFATEVKTNVTHILSAIGDDPNRKGLIETPDRVARMYADIFDSIGIEDFQDYKLFDSPESNDSKTIMVKEIPFYSMCEHHMMPFWGKVSVAYLPDNGKIIGLSKIPRLVDFVSHKLSLQEKITDDVLDQMEKILHPKGVGVVVDARHMCIEMRGVKKTGTVTRTTKFSGVFQQNDELRSEFLNSIQVGQI

SEQ ID NO: 9640 - protein, 353 aa, Lactobacillus parabuchneri; identical to SEQ ID NO: 9639
  REGION 1..353: note = tr|A0A1X1FBP2|A0A1X1FBP2_9LACO GTP cyclohydrolase 1; OS = Lactobacillus parabuchneri OX=152331 GN=folE PE=3 SV=1

SEQ ID NO: 9641 - protein, 189 aa, Lactobacillus paracollinoides
  REGION 1..189: note = tr|A0A0R1TEZ7|A0A0R1TEZ7_9LACO GTP cyclohydrolase 1; OS = Lactobacillus paracollinoides DSM 15502 = JCM 11969; OX = 1423785 GN=folE PE=3 SV=1
MIDKTNQEKIEKAVRMILEAVGEDPDRPGLVETPARVARSYGEIFSSLNAPAFDNYKLFPVEETTEMVLIKDIPFYSMCEHHLLPFFGTVHVAYVPDHNRVMGLSKIPRLIDYCAKRPNVQERLTVNIAKELTRILDPKGVAVSISARHMCMEMRGVEKTGSQTESSYYTGTFKTDTALKQEFLQRING

SEQ ID NO: 9642 - protein, 189 aa, Lactobacillus paracollinoides
  REGION 1..189: note = tr|A0A1B2IWG8|A0A1B2IWG8_9LACO GTP cyclohydrolase 1; OS = Lactobacillus paracollinoides OX=240427 GN=folE PE=3; SV = 1
MIDKTNQEKIEKAVRMILEAVGEDPDRPGLVETPARVARSYGEIFSSLNAPAFDNYKLFPVEETTEMVLIKDIPFYSMCEHHLLPFFGTVHVAYVPDHKRVMGLSKIPRLIDYCAKRPNVQERLTVNIAKELTRILDPKGVAVSISARHMCMEMRGVEKTGSQTESSYYTGTFKTDTALKQEFLQRING

SEQ ID NO: 9643 - protein, 357 aa, Lactobacillus parafarraginis
  REGION 1..357: note = tr|G9ZS90|G9ZS90_9LACO GTP cyclohydrolase 1; OS = Lactobacillus parafarraginis F0439 OX=797515 GN=folE; PE = 3 SV=1
MENNVILSLGSNIGNREFYLNQAISQIGQDTHILVNQQSDFYETSPVGNVKQRQFINLALNIATTYTPEKLLTKVHQIEASLNRTRDIHWGPRTLDIDIVFWNDQQIKTTDLTVPHPEAFNRLFVLAPTLEVIDANFPLYKQIKAAVDGWSAKDQQVNLIRREDQSETVIQSSVRHLLSAIGDDPDRPGLVETPDRVFRMYHEIFSSQGIENFQDYKLFKTNETNDAKMIMMKNIPFYSMCEHHMMPFWGKVHIAYIPDHGTIIGLSKLPRLVDFVSHKLGLQEKVTDDLVIQLNRILAPKGVAVIVDARHMCVEMRGVKKTDSSTRTIRFTGIFDKQPELRTEFINSIGDVNGKTI

SEQ ID NO: 9644 - protein, 357 aa, Lactobacillus parafarraginis
  REGION 1..357: note = tr|A0A0R1YHR1|A0A0R1YHR1_9LACO GTP cyclohydrolase 1; OS = Lactobacillus parafarraginis DSM 18390 = JCM 14109; OX = 1423786 GN=folE PE=3 SV=1
MENNVILSLGSNIGNREFYLNQAISQIGQDTHILVNQQSDFYETSPVGNVKQRQFINLALNIATTYTPEKLLTRVHQIEASLNRTRDIHWGPRTLDIDIVFWNDQQIKTTDLTVPHPEAFNRLFVLAPTLEVIDANFPLYKQIKAAVDGWSAKDQQVNLIRREDQSETVIQSSVRHLLSAIGDDPDRPGLVETPDRVFRMYHEIFSSQGIENFQDYKLFKTDETNDAKMIMMKNIPFYSMCEHHMMPFWGKVHIAYIPDHGTIIGLSKLPRLVDFVSHKLGLQEKVTDDLVIQLNRILAPKGVAVIVDARHMCVEMRGVKKTDSSTRTIRFTGVFDKQPELRTEFLNSIGDVNGKTI

SEQ ID NO: 9645 - protein, 353 aa, Lactobacillus parakefiri
  REGION 1..353: note = tr|A0A269YPN4|A0A269YPN4_9LACO GTP cyclohydrolase 1; OS = Lactobacillus parakefiri OX=152332 GN=folE PE=3 SV=1
MEDVYLSLGSNIGNREAFLQQAIEALGSDPRIMIEKQASLYETSPVGGVKQRSFVNTAVKIGTTYEPLALLKVIHEIESGLHRTRSIHWGPRTVDIDIIFFGSEHIQEPGLSVPHPEAFNRLFVLIPIQELIDEQFPDAHKIEMAISILEKEDQSIKKISPANDFYTEITSNVTKVLAAIGDDPSRKGLIETPDRVARMYANIFDSIGLEDFQDYKLFDSPESDDSKTVMVKGIPFYSMCEHHMMPFWGKVSVAYVPDNGKIIGLSKIPRLVDFVSHKLSLQEKITDDVLVQMERILHPKGVAVIVDARHMCIEMRGVKKTGTVTRTTKFTGIFQQNDELRSEFLNSIQVGQI

SEQ ID NO: 9646 - protein, 353 aa, Lactobacillus parakefiri
  REGION 1..353: note = tr|A0A4R5NYL8|A0A4R5NYL8_9LACO GTP cyclohydrolase 1; OS = Lactobacillus parakefiri OX=152332 GN=folE PE=3 SV=1
MEDVYLSLGSNIGNREAFLQQAIEALGSDPRIMIEKQASLYETSPVGGVKQRAFVNTAVKIGTTYEPLALLKVIHEIESGLHRTRSIHWGPRTVDIDIIFFGSEHIQEPGLSVPHPEAFNRLFVLIPIQELIDEQFPDAHKIEMAISILEKEDQSIKKISPANDFYTEITSNVTKVLAAIGDDPSRKGLIETPDRVARMYANIFDSIGLEDFQDYKLFDSPESDDSKTVMVKGIPFYSMCEHHMMPFWGKVSVAYVPDNGKIIGLSKIPRLVDFVSHKLSLQEKITDDVLVQMERILHPKGVAVIVDARHMCIEMRGVKKTGTVTRTTKFTGIFQQNDELRSEFLNSIQVGQI

SEQ ID NO: 9647 - protein, 189 aa, Lactobacillus paraplantarum
  REGION 1..189: note = tr|A0A4Q9XYX4|A0A4Q9XYX4_9LACO GTP cyclohydrolase 1; OS = Lactobacillus paraplantarum OX=60520 GN=folE PE=3 SV=1
MIDEKNQAKIEHAVREILSAVGEDPDRPGLFETPARVARMYAEVFATKTAAPFDNYKLFKVENPTEMVLLKDIPFYSMCEHHLLPFFGTVQVAYVPQHEQVIGLSKIPRLIDYCSQQPNVQERLTVSIATELQRILDPAGIAVSITARHMCMEMRGVSKPGVHTESSYYSGQFKTDLDLKREFLQRIAK

SEQ ID NO: 9648 - protein, 189 aa, Lactobacillus paraplantarum
  REGION 1..189: note = tr|A0A098R9V6|A0A098R9V6_9LACO GTP cyclohydrolase 1; OS = Lactobacillus paraplantarum OX=60520 GN=folE PE=3 SV=1
MIDEKNQAKIEHAVREILSAVGEDPDRPGLVETPARVARMYAEVFATKTAAPFDNYKLFKVENPTEMVLLKDIPFYSMCEHHLLPFFGTVQVAYVPQHEQVIGLSKIPRLIDYCSQQPNVQERLTVSIATELQRILDPAGIAVSITARHMCMEMRGVSKPGVHTESSYYSGQFKTDLDLKREFLQRIAK

SEQ ID NO: 9649 - protein, 189 aa, unidentified
  source 1..189: note = Lactobacillus pentosiphilus
  REGION 1..189: note = tr|A0A1Z5IYL2|A0A1Z5IYL2_9LACO GTP cyclohydrolase 1; OS = Lactobacillus pentosiphilus OX=1714682 GN=folE PE=3 SV=1
MMDDANQKKIEQAVKMILEAVGEDPNRDGLVETPARVARMYGEVFSSVNAPAFDNYKLFPVDETTEMVLIKDISFYSMCEHHLLPFFGTVDVAYIPNHKRVMGLSKIPRLIDYCAKRPNVQERMTVNIAKELTKILDPKGIAVSVSARHMCMEMRGVEKTGSQTETSYYTGAFKTDHELKQEFLQRING

SEQ ID NO: 9650 - protein, 189 aa, Lactobacillus pentosus
  REGION 1..189: note = tr|A0A241RR12|A0A241RR12_LACPE GTP cyclohydrolase 1; OS = Lactobacillus pentosus OX=1589 GN=folE PE=3 SV=1
MIDEKNKAKIEHAVREILSAVGEDPDRPGLVETPARVARMYAEVFATKTAAPFDNYKLFKVENPTEMVLLKDIPFYSMCEHHLLPFFGTVQVAYVPQHDQVIGLSKIPRLVDYCAQQPNVQERLTVSIATELQRILDPAGIAVSITARHMCMEMRGVSKPGVQTESSYYSGQFKTDIELKREFLQRIAK

SEQ ID NO: 9651 - protein, 189 aa, Lactobacillus pentosus; identical to SEQ ID NO: 9650
  REGION 1..189: note = tr|G0M580|G0M580_LACPE GTP cyclohydrolase 1; OS = Lactobacillus pentosus IG1 OX=1042160 GN=folE PE=3 SV=1

SEQ ID NO: 9652 - protein, 189 aa, Lactobacillus plantarum
  REGION 1..189: note = sp|Q88ST4|GCH1_LACPL GTP cyclohydrolase 1; OS = Lactobacillus plantarum (strain ATCC BAA-793 / NCIMB 8826 / WCFS1) OX=220668 GN=folE PE=3 SV=1
MIDEKNQAKIEHAVREILSAVGEDPDRPGLVETPARVARMYAEVFATKTAAPFDNYKLFKVEHPTEMVLLKDIPFYSMCEHHLLPFFGTVQVAYVPQHEQVIGLSKIPRLIDYCSQQPNVQERLTVSIATELQRILDPAGIAVSITARHMCMEMRGVSKPGVHTESSYYSGQFKTDLDLKREFLQRIAK

SEQ ID NO: 9653 - protein, 189 aa, Lactobacillus plantarum
  REGION 1..189: note = tr|A0A2I0YX27|A0A2I0YX27_LACPN GTP cyclohydrolase 1; OS = Lactobacillus plantarum OX=1590 GN=folE PE=3 SV=1
MIDEKNQAKIEHAVREILSAVGEDPDRPGLVETPARVARMYAEVFATKTAAPFDNYKLFKVEHPTEMVLLKDIPFYSMCEHHLLPFFGTAQVAYVPQHEQVIGLSKIPRLIDYCSQQPNVQERLTVSIATELQRILDPAGIAVSITARHMCMEMRGVSKPGVHTESSYYSGQFKTDLDLKREFLQRIAK

SEQ ID NO: 9654 - protein, 351 aa, Lactobacillus rapi
  REGION 1..351: note = tr|A0A512PJA4|A0A512PJA4_9LACO GTP cyclohydrolase 1; OS = Lactobacillus rapi OX=481723 GN=folKE PE=3 SV=1
MEEVYLSLGSNIGNRQRYINSAIQMLGNNSQIIIDDVASFYETSPVGNVSQRSFINTAVKITTNLDPESLLNVIHAIEKSLRRTRKVHWGPRTLDIDIIFYGNQVINSDDLQIPHPETFNRKFVLVPVKQLIQRTFPYYEQINTAISKLDSQEQRLTKVPDTDNSQDTIEKAITDILAAIGDDPQRDGLVETPNRVSRMYSEIFSSVGLKDFSDYKLFHSEESGKSKMVIMNHIPFYSMCEHHLMPFFGTVNVAYIPNNGTIIGLSKIPRLVDFVSHKLTLQEQVTDDIVDQLNQILSPKGVAVVIDARHMCVEMRGVKKSGSTTRTVRFDGDFDGNVPLQNEFLSSIEAN

SEQ ID NO: 9655 - protein, 192 aa, Lactobacillus reuteri
  REGION 1..192: note = tr|B3XN19|B3XN19_LACR1 GTP cyclohydrolase 1; OS = Lactobacillus reuteri (strain DSM 17509 / CIP 109821 / 100-23) OX=349123 GN=folE PE=3 SV=1
MDQQKIAKAVKDLLIAIGEDPEREGLAETPQRVAKMYQEVFSSLNHQPEEMANYKVFHVDDVPEMVLVQHIPFYSMCEHHLLPFFGYANVAYVPKDKKVIGLSKIPRLLDFVTKKPGMQERVTTDLVAELQRILDPAGIAVTIAARHLCMEMRGVNKAGQFTYTDKFTGQFKTDRDLKQEFLNQTRNYRADL

SEQ ID NO: 9656 - protein, 192 aa, Lactobacillus reuteri
  REGION 1..192: note = tr|A0A0U5JY21|A0A0U5JY21_LACRE GTP cyclohydrolase 1; OS = Lactobacillus reuteri OX=1598 GN=folE PE=3 SV=1
MDQQKIAKAVKDLLIAIGEDPEREGLAETPQRVAKMYQEVFSSLNHQPEEMANYKVFHVDDVPEMVLVQHIPFYSMCEHHLLPFFGYANVAYVPKDKRVIGLSKIPRLLDFVTKKPGMQERVTTDLVAELQRILDPAGIAVTIAARHLCMEMRGVNKAGQFTYTDKFTGQFKTDRDLKQEFLNQTRNYRADL

SEQ ID NO: 9657 - protein, 193 aa, Lactobacillus rossiae
  REGION 1..193: note = tr|A0A0R1RTJ5|A0A0R1RTJ5_9LACO GTP cyclohydrolase 1; OS = Lactobacillus rossiae DSM 15814 OX=1114972 GN=folE PE=3; SV = 1
MTDEQQATIEGAVRQILTAVGEDPDRAGLVETPARVARAYAEMFSSLEQPTFKDYKLFHEEDNADMVVVGQIPFYSMCEHHLLPFFGRVSVAYVPTNGTIIGLSKIPRLVDYVSRRPTVQENITNQVAAELEKILKPAGVAVSVAARHMCMEMRGVNKTGSVTQTATYWGEFKTNNALRQEFLMRAEHGNINV

SEQ ID NO: 9658 - protein, 189 aa, Lactobacillus sakei
  REGION 1..189: note = sp|Q38WN0|GCH1_LACSS GTP cyclohydrolase 1; OS = Lactobacillus sakei subsp. sakei (strain 23K) OX=314315; GN = folE PE=3 SV=1
MIEQANQQIEKDVRDILKQVGDDPERAGVLETPQRVAKMYGEVLAYQGETIFKDYKLFETEETDDDQMVMMQDIPFYSMCEHHMLPFFGQVSVAYLPANGQIIGLSKIPRLVDFVSKRLSVQENLTRDIGQILNQILKPYGVAVQVTARHMCVEMRGIKKANSQTHTTFYSGNFKTDRQLRSEFLQLLK

SEQ ID NO: 9659 - protein, 189 aa, Lactobacillus sakei
  REGION 1..189: note = tr|A0A4R5MS79|A0A4R5MS79_LACSK GTP cyclohydrolase 1; OS = Lactobacillus sakei subsp. sakei OX=214326 GN=folE PE=3; SV = 1
MIEQANQQIEKDVRDILKQVGDDPERAGVLETPQRVAKMYGEVLAYQGETIFKDYKLFETEETDDDQMVMMQDIPFYSMCEHHMLPFFGQVSVAYLPANGQIIGLSKIPRLVDFVSKRLSVQENLTRDIGQILNQILKPHGVAVQVTARHMCVEMRGIKKANSQTHTTFYSGNFKTDRQLRSEFLQLLK

SEQ ID NO: 9660 - protein, 351 aa, Lactobacillus satsumensis
  REGION 1..351: note = tr|A0A0A7RGD9|A0A0A7RGD9_9LACO GTP cyclohydrolase 1; OS = Lactobacillus satsumensis OX=259059 GN=folE PE=3 SV=1
MESIYLSLGSNLGARQENIEKALTYLGNDHQIIIDQVSDYYETSPVGGVEQGMFLNVAAKIYTTYQPAKLLQIIHQIEAALQRVRKVHWGPRTLDIDIIFWGTERLNSQDLIVPHKETFKRLFVLRPLLDIYPQTEPYFKQITESIAALEQAEPQQKVTKVPQKKDSMAVIEQAVTELLQAIGDDPQRAGIKETPQRVAKMYQEIFSSQKQSEFQDYKIFATPKKDNSQMVLVKNIPFYSMCEHHMLPFFGQAHVAYIPRNGKIIGLSKIPRLVDFVARKLSLQEKITSDVAETLTDILDPLGVAVVVDARHMCIEMRGVKKSNSTTRTTYFTGNFDTDNQLRAEFLRVLN

SEQ ID NO: 9661 - protein, 344 aa, Lactobacillus satsumensis
  REGION 1..344: note = tr|A0A0R1V0N3|A0A0R1V0N3_9LACO GTP cyclohydrolase 1; OS = Lactobacillus satsumensis DSM 16230 = JCM 12392; OX = 1423801 GN=folE PE=3 SV=1
MGSNLGARQENIEKALTYLGNDHQIIIDQVSDYYETSPVGGVEQGMFLNVAAKIYTTYQPAKLLQIIHQIEAALQRVRKVHWGPRTLDIDIIFWGTERLNSQDLIVPHKETFKRLFVLRPLLDIYPQTEPYFKQITESIAALEQAEPQQKVTKVPQKKDSMAVIEQAVTELLQAIGDDPQRAGIKETPQRVAKMYQEIFSSQKQSEFQDYKIFATPKKDNSQMVLVKNIPFYSMCEHHMLPFFGQAHVAYIPRNGKIIGLSKIPRLVDFVARKLSLQEKITSDVAETLTDILDPLGVAVVVDARHMCIEMRGVKKSNSTTRTTYFTGNFDTDNQLRAEFLRVLN

SEQ ID NO: 9662 - protein, 189 aa, unidentified
  source 1..189: note = Lactobacillus silagei
  REGION 1..189: note = tr|A0A1Z5IIR5|A0A1Z5IIR5_9LACO GTP cyclohydrolase 1; OS = Lactobacillus silagei JCM 19001 OX=1302250 GN=folE PE=3; SV = 1
MIDDANQKKIEQAVKMILEAVGEDPNREGLVETPARVARMYNEVFSSVNAPAFDNYKLFPVDETTEMVLIKDISFYSMCEHHLLPFFGTVDVAYIPNHQRVMGLSKIPRLINYCAKRPNVQERMTVNIAKELTRILDPKGIAVSVSARHMCMEMRGVEKTGSQTETSYYTGVFKSDHDLKQEFLQRING

SEQ ID NO: 9663 - protein, 189 aa, unidentified
  source 1..189: note = Lactobacillus silagincola
  REGION 1..189: note = tr|A0A1Z5J2W0|A0A1Z5J2W0_9LACO GTP cyclohydrolase 1; OS = Lactobacillus silagincola OX=1714681 GN=folE PE=3 SV=1
MINDANQKKIEQAVKMILEAVGEDPDRDGLVETPGRVARMYSEVFSSVNAPAFDNYKLFPVDETTEMVLIKDISFYSMCEHHLLPFFGTVDVAYIPNHQRVMGLSKIPRLIDYCAKRPNVQERMTVNIAKELTRILDPQGIAVSVSARHMCMEMRGVEKTGSQTETSYYTGAFKTDRELKQEFLQRING

SEQ ID NO: 9664 - protein, 193 aa, Lactobacillus siliginis
  REGION 1..193: note = tr|A0A0R2KZB8|A0A0R2KZB8_9LACO GTP cyclohydrolase 1; OS = Lactobacillus siliginis OX=348151 GN=folE PE=3 SV=1
MTDEQQQTIEKAVRQILTAVGENPDRPGLVETPGRVARAYQEIFSSLGETEFTDYKLFHEETNADMVVVAQIPFYSMCEHHLLPFFGHVSVGYIPTDGTIIGLSKIPRLVDFVSHKPTVQENITTAISSELEKILKPAGIAVNVTARHMCMEMRGVNKTGSVTHTATYTGAFKNDAALRQEFLMRTANGNVNL

SEQ ID NO: 9665 - protein, 188 aa, Lactobacillus similis
  REGION 1..188: note = tr|A0A0R2FDF7|A0A0R2FDF7_9LACO GTP cyclohydrolase 1; OS = Lactobacillus similis DSM 23365 = JCM 2765 OX=1423804; GN = folE PE=3 SV=1
MNEANQAKIEQAVKLILEAVGEDPERQGLLETPARVARMYGEVFSSVTAPAFDNYKLFPVDETTEMVLIKDIPFYSMCEHHLLPFFGTVHVAYIPDHQRVMGLSKIPRLVDYCAKRPNVQERLTVNIAKELNRILDPKGVAISISARHMCMEMRGVEKTGSQTETSYYTGTFKTDHELKAEFLQRING

SEQ ID NO: 9666 - protein, 190 aa, Lactobacillus sp.; identical to SEQ ID NO: 9634
  REGION 1..190: note = tr|A0A3C1IAN5|A0A3C1IAN5_9LACO GTP cyclohydrolase 1; OS = Lactobacillus sp. OX=1591 GN=folE PE=3 SV=1

SEQ ID NO: 9667 - protein, 193 aa, Lactobacillus sp.
  REGION 1..193: note = tr|A0A349MV06|A0A349MV06_9LACO GTP cyclohydrolase 1; OS = Lactobacillus sp. OX=1591 GN=folE PE=3 SV=1
MTDEQQHTIEGAVRQILTAVGEDPNRAGLVETPARVARAYAEMFSSLEQPTFKDYKLFHEEDNADMVVVGQIPFYSMCEHHLLPFFGRVSVAYVPTNGTIIGLSKIPRLVDFVSHRPTVQENITNQVAAEMEKILQPAGVAVSVAARHMCMEMRGVNKTGSVTQTATYLGDFKTNAALRQEFLMRAEHGNINV

SEQ ID NO: 9668 - protein, 186 aa, Lactobacillus suebicus
  REGION 1..186: note = tr|A0A0R1W4P6|A0A0R1W4P6_9LACO GTP cyclohydrolase 1; OS = Lactobacillus suebicus DSM 5007 = KCTC 3549 OX=1423807; GN = folE PE=3 SV=1
MDNKRIEDAVSDILTGIGDDTNREGVVETPARVAKMYEEIFSSMGQKHFEDYKLFHVDDDPEMVLVQQIPFYSMCEHHLLPFFGVANVAYVPKDGVVIGLSKIPRLVDFTAKKPGMQERITTDIMKEMERMLHPQGVAVTLSARHMCMEMRGINKSNLYTYTSKFSGIFKTDKDLKQEFLQQTEKK

SEQ ID NO: 9669 - protein, 348 aa, Lactobacillus sunkii
  REGION 1..348: note = tr|A0A1E7XAQ5|A0A1E7XAQ5_9LACO GTP cyclohydrolase 1; OS = Lactobacillus sunkii OX=481719 GN=folE PE=3 SV=1
MNDVYLSLGSNIGNRELFLHEAIEALGNDANILIDKTAGFYETSPVGNVEQRPFVNTAVKIATTYTPQQLIRFIHEIEQGLHRTRTIHWGPRTIDIDIVFFGDQQINTKELTVPHPEAFNRLFVLVPILEIIDKGFPSYQKIESTISALKDKDQTIQKLTSNENYKGTLQASVRQLLTTVGENPDRPGLVETPDRVARMYGEIFSSIGIEDFDDYKLFDAPVSQSSKMVMVKDIPFYSMCEHHMMPFWGKVSVGYIPDHGKIIGLSKIPRLVDFVSHKLSLQEKVTNDIITQMNKILQPKGVAVLIDARHMCVEMRGVKKTGSVTRTTSFSGIFQTDEQLQSEFMSSI

SEQ ID NO: 9670 - protein, 348 aa, Lactobacillus sunkii; identical to SEQ ID NO: 9669
  REGION 1..348: note = tr|A0A0R1L2L7|A0A0R1L2L7_9LACO GTP cyclohydrolase 1; OS = Lactobacillus sunkii DSM 19904 OX=1423808 GN=folE PE=3; SV = 1

SEQ ID NO: 9671 - protein, 351 aa, Lactobacillus uvarum
  REGION 1..351: note = tr|A0A0R1PXK7|A0A0R1PXK7_9LACO GTP cyclohydrolase 1; OS = Lactobacillus uvarum DSM 19971 OX=1423812 GN=folE PE=3; SV = 1
MESIYLSLGSNIGNKQNNLEKAIEYLGNDSHLIIDKVSDYYETSPVGGIEQDVFLNIAVKIYTTYTPEELLTLIHKIEADLKRSRKVHWGPRTLDIDIIFWGNRSLNDEKLVIPHKETFNRLFVLIPLLDVYDKNDFFYEHIKKGISILERTEQTQKVVKVPKKEGNMQTIERVVTKLLLAIGDDPKREGIRETPRRVAEMYQEIFSSQNQNDFQEFKVFKTPKKDNSQMVLVKDIPFYSMCEHHMLPFFGKAHVAYIPRNGKIIGLSKIPRLVDFVSHRLSLQEKVTSDIADTLMDILDPVGVAVVVEARHMCVEMRGVKKNNSLTRTTYFTGDFNSNVQLRAEFLRVLN

SEQ ID NO: 9672 - protein, 186 aa, Lactobacillus vaccinostercus
  REGION 1..186: note = tr|A0A0R2ABR8|A0A0R2ABR8_9LACO GTP cyclohydrolase 1; OS = Lactobacillus vaccinostercus DSM 20634 OX=1423813; GN = folE PE=3 SV=1
MDKKRIENAVSEILAGVGDDPTREGVVETPARVAKMYEEIFSSVGKPHFEDYKLFHIDDDPEMVLVQQIPFYSMCEHHLLPFFGVANVAYVPQDGVVIGLSKVPRLVDFAARKPGMQERITVDILNEMERMLHPAGVAVSLSARHMCMEMRGINKSNLYTYTSKFSGAFKEDRDLKKEFLRQTERK

SEQ ID NO: 9673 - protein, 190 aa, Lactobacillus versmoldensis
  REGION 1..190: note = tr|A0A0R1SHG1|A0A0R1SHG1_9LACO GTP cyclohydrolase 1; OS = Lactobacillus versmoldensis DSM 14857 = KCTC 3814; OX = 1423815 GN=folE PE=3 SV=1
MSPENQQIIEQSVKNILKAVGDDPDRSGLKETPARVAKMYAEVFSSLEEPNFDDIKIFQEDTAVDGENVIVRNIPFYSMCEHHLLPFFGEITVGYVPKGGRIIGLSKIPRLVNYVAAKPNVQENITSELGRKLEKLLAPQGVAVIVTARHMCIEMRGVKKTDSKTTTSYYSGVFKDPTHKMAFLQEIKTC

SEQ ID NO: 9674 - protein, 189 aa, unidentified
  source 1..189: note = Lactobacillus wasatchensis
  REGION 1..189: note = tr|A0A0D0Y368|A0A0D0Y368_9LACO GTP cyclohydrolase 1; OS = Lactobacillus wasatchensis OX=1335616 GN=folE PE=3 SV=1
MDEKKIENAVKEILMAIGEDPAREGLMETPARVAKMYGEVFASLDESPEFDDYKVFHVEEDPGMVLVQQIPFYSMCEHHLLPFFGTANVAYVPRDGQIMGLSKIPRLVDFVAKRPGVQERITTQIAAQMKRILQPKGIAVSLSARHMCMEMRGISKSGLFTYTSKFDGVFKSDVEMRNEFLRQTGNHSE

SEQ ID NO: 9675 - protein, 189 aa, Lactobacillus xiangfangensis
  REGION 1..189: note = tr|A0A0R2MLJ1|A0A0R2MLJ1_9LACO GTP cyclohydrolase 1; OS = Lactobacillus xiangfangensis OX=942150 GN=folE PE=3 SV=1
MIDEQNKAKIERAVRDILTAVGEDPDRAGLVETPERVARMYAEVFSTKTAAPFDNYKLFKVEDPTEMVLLKDIPFYSMCEHHLLPFFGTVQVAYVPQHDQVIGLSKIPRLIDYCAKQPNVQERLTVNIAKELQRILDPAGIAVSITARHMCMEMRGVSKPGVHTESSYYSGQFKTNLDLKREFLQRIAK

SEQ ID NO: 9676 - protein, 190 aa, Lactobacillus zeae; identical to SEQ ID NO: 9593
  REGION 1..190: note = tr|A0A0R1F0N1|A0A0R1F0N1_LACZE GTP cyclohydrolase 1; OS = Lactobacillus zeae DSM 20178 = KCTC 3804 OX=1423816; GN = folE PE=3 SV=1

SEQ ID NO: 9677 - protein, 215 aa, Lactobacillus zeae
  REGION 1..215: note = tr|A0A0R1EV24|A0A0R1EV24_LACZE GTP cyclohydrolase 1; OS = Lactobacillus zeae DSM 20178 = KCTC 3804 OX=1423816; GN = folE PE=3 SV=1
MTTNNDHYNEAELLASYFPETANNSELLQQKLTDVQQIEQALQTLMALCGQDDNNPDLDKTPFRVVKAFLEYTSGYREDPTAHLEKVFDIQQNDPIIVKDIEFYSMCEHHFAPFFGVAHVAYLPDQKVTGLSKIARVVEGYARRFQVQERLTNQIADAIDTVLQPKGVMVAIEAKHLCVSSRGAKKEQAQTFTLASRGAYIKDSQLRSEFMTAIK

SEQ ID NO: 9678 - protein, 181 aa, Lactococcus chungangensis
  REGION 1..181: note = tr|A0A1K2HHC6|A0A1K2HHC6_9LACT GTP cyclohydrolase 1; OS = Lactococcus chungangensis CAU 28 = DSM 22330 OX=1122154; GN = folE PE=3 SV=1
MLETGTKNLLQAIGDNPNRDGLLETPKRVAKAYAEIFSATGETQFDNYKLFPTDQDSDMVIVADIPFYAMCEHHLLPFFGMVTVGYVPDGEIIGLSKIPRLVDWAARRPSVQENLTALICSEMQRIVHPKGVAVHIQSRHMCMEMRGINRPGTFTTTSLYKGILKTDAFLRQEFMMKVSGK

SEQ ID NO: 9679 - protein, 191 aa, Lactococcus fujiensis
  REGION 1..191: note = tr|A0A2A5RLR4|A0A2A5RLR4_9LACT GTP cyclohydrolase 1; OS = Lactococcus fujiensis JCM 16395 OX=1291764 GN=folE PE=3; SV = 1
MQEEKYNHLKELFSDEEKINQAITGIEALIDLIGEDVNREGLQDTPYRFLKAFAEYSQGYKVDPKTYLETQFEAESHDVVVVRDIPFESACEHHLARFHGVAHVAYIPNEKITGLSKFPRMINGYARRLQVQERLTAQAADAIYEVLNPEACAVVIEATHSCMTARGAMAHGSSTKTFAVRGEKNLLEYLK

SEQ ID NO: 9680 - protein, 349 aa, Lactococcus garvieae
  REGION 1..349: note = tr|A0A173M3H1|A0A173M3H1_9LACT GTP cyclohydrolase 1; OS = Lactococcus garvieae OX=1363 GN=folE PE=3 SV=1
MHTVYLSLGSNIGDKQAYLQDAVSLLGQNPAILIDKKSKFYQTSPVGGVEQDDFVNMALKISTTLEPTQLLEFIHEIEAQLNRVRKIHWGPRTIDIDILFYGNEQIFENDLIVPHKEVFNRLFVLVPLLEVLEQDFPYEQQVKQAIEKLKDTEQEIVEIPTEKPARKRIEHAVREILSAVGENPEREGLLETPERVAKMYEEILSSQKLTQFEEYKLFKIEKTAQDQTILIKDIPFYSMCEHHMLPFFGKANVAYIPKDGNIIGLSKIPRLVNYVSHKLSVQENITRDIAEILNDILEPKGVAVVVEARHMCVEMRGVKKGNSQTKTSFFMGEFEESRETRLEFLESLN

SEQ ID NO: 9681 - protein, 349 aa, Lactococcus garvieae
  REGION 1..349: note = tr|F9VDS2|F9VDS2_LACGL GTP cyclohydrolase 1; OS = Lactococcus garvieae (strain Lg2) OX=420890 GN=folE; PE = 3 SV=1
MQTVYLSLGSNIGDKQAYLQDAVSLLGQNSAILIDKKSKFYQTSPVGGVEQDDFVNMAVKISTTLEAKQLLALIHEIEAKLKRVRKIHWGPRTIDIDILFYGNDQISEEDLIVPHKEVFNRLFVLVPLLEILEPGFSHEQQVKQAIEKLKNTEQEIVELPTEKPARKRIEFAVREILSAVGEDPDREGLLETPERVAKMYEEILSSQKLTQFEEYKLFKIEKTDQDQTILIKDIPFYSMCEHHILPFFGKANVAYIPKDGNIIGLSKIPRLVNYVSHKLSVQENITRDIAEILNDILEPKGVAVVVEARHMCVEMRGVKKGNSQTKTSFFMGEFEENRETRLEFLESLN

SEQ ID NO: 9682 - protein, 349 aa, Lactococcus lactis
  REGION 1..349: note = sp|Q9CGE3|FOLKE_LACLA Bifunctional protein FolKE; OS = Lactococcus lactis subsp. lactis (strain IL1403); OX = 272623 GN=folKE PE=3 SV=1
MQTTYLSMGSNIGDRQYYLHEAIRLLGKHPKIMIEKVSNFYESTPVGGVKQDDFTNLALKVATLLEPLELLSFIHEVELSLNRERKIHWGPRTIDIDIIFYDDLEMQVENLVIPHKEAFNRLFVLKPIFELIDKDFKYYASIEKAIAELSVSEQELHVIKEEKTPRNRIEDAVKEILFAVGENPNREGLLETPARVAKMYEEILSSQRLSKFNEYKLFEIDSSKTDSIVLIKDIPFYSMCEHHMLPFFGKAHVAYIPADGKIIGLSKIPRLVDYVSRKLSVQENITHDIGDILTDILNPKGVAVLVEGRHMCVEMRGVKKVNSITKTSYFLGEFKENNEKRMEFLESLL

SEQ ID NO: 9683 - protein, 349 aa, Lactococcus lactis
  REGION 1..349: note = tr|H5SYZ1|H5SYZ1_LACLL GTP cyclohydrolase 1; OS = Lactococcus lactis subsp. lactis IO-1 OX=1046624; GN = folE PE=3 SV=1
MQTTYLSMGSNIGDRQYYLHEAIRLLGKHPKIMIEKVSNFYESTPVGGVKQDDFTNLALKVATLLEPLELLSFIHEVELSLNRERKIHWGPRTIDIDIIFYNDLEMQEENLVIPHKEAFNRLFVLKPIFELIDKDFKYYASIEKAIAELSVSEQELHVIKEEETPRNRIEDAVKEILFAVGENPNREGLLETPARVAKMYEEILSSQRLCKFNEYKLFEIDSSKTDSIVLIKDIPFYSMCEHHMLPFFGKAHVAYIPADGKIIGLSKIPRLVDYVSRKLSVQENITHDIGDILTDILNPKGVAVLVEGRHMCVEMRGVKKVNSITKTSYFLGEFKENNEKRMEFLESLL

SEQ ID NO: 9684 - protein, 349 aa, unidentified
  source 1..349: note = Lactococcus petauri
  REGION 1..349: note = tr|A0A252CEP0|A0A252CEP0_9LACT GTP cyclohydrolase 1; OS = Lactococcus petauri OX=1940789 GN=folE PE=3 SV=1
MQTVYLSLGSNIGDKQAYLQDAVSLLGQDSAILIDRRSKFYQTSPVGGVEQDDFVNMALKISTTLEASQLLELIHKIEAKLNRVRKIHWGPRTIDIDILFYGNEQILEEDLMVPHKEVFNRLFVLVPLLEILEPGFSYEQQVKQAIEKLKDTEQEIVEIPTEKPARKRIELAVREILSAVGEDPEREGLLETPERVAKMYEEILSSQKLTQFEEYKLFKIEKTDQDQTILIKDIPFYSMCEHHMLPFFGKANVAYIPKDGNIIGLSKIPRLVNYVSHKLSVQENITRDIAEILNDILEPKGVAVVVEARHMCVEMRGVKKGNSQTKTSFFMGEFEESRETRLEFLESLN

SEQ ID NO: 9685 - protein, 191 aa, Lactococcus piscium
  REGION 1..191: note = tr|A0A2C8EJX8|A0A2C8EJX8_9LACT GTP cyclohydrolase 1; OS = Lactococcus piscium OX=1364 GN=folE PE=3 SV=1
MKKNYQENKQHIESGTKKLLQAIGDDPTRDGLLETPERVFKAYSEIFASTGETQFDNYKLFPTDQDADMVIVGDIPFYAMCEHHLLPFFGTVSVGYVPDGEIIGLSKIPRLVNWAARRPSVQENLTALICSEMQRIVHPKGIAVHVHSRHMCMEMRGINRPGTFTTTSLYKGDLKTDAFLRQEFMMKVSDK

SEQ ID NO: 9686 - protein, 191 aa, Lactococcus piscium
  REGION 1..191: note = tr|A0A0D6DZ93|A0A0D6DZ93_9LACT GTP cyclohydrolase 1; OS = Lactococcus piscium MKFS47 OX=297352 GN=folE PE=3 SV=1
MKKNYQENKQHIESGTKKLLQAIGDDPTRDGLLETPERVFKAYSEIFASTGETQFDNYKLFPTDQDADMVIVGDIPFYAMCEHHLLPFFGTVSVGYVPDGEIIGLSKIPRLVDWAARRPSVQENLTALICSEMQRIVHPKGIAVHVHSRHMCMEMRGINRPGTFTTTSLYKGDLKTDAFLRQEFMMKVSDK

SEQ ID NO: 9687 - protein, 190 aa, Lactococcus plantarum
  REGION 1..190: note = tr|A0A2A5S0C7|A0A2A5S0C7_9LACT GTP cyclohydrolase 1; OS = Lactococcus plantarum OX=1365 GN=folE PE=3 SV=1
MTKISHEHKEQIETGTRNLLQAIGDNPNRDGLLETPERVFKAYSEIFAATGETQFNNYKLFPTDQETDMVIVADIPFYAMCEHHLLPFFGTVSVGYIPDGEIIGLSKIPRLVDWAARRPSVQENMTALICSEMERITHPKGVAVYIQSRHMCMEMRGINRPGTYTTTSLYKGLLKTDTLLRQEFMMKVRD

SEQ ID NO: 9688 - protein, 191 aa, Lactococcus raffinolactis
  REGION 1..191: note = tr|A0A290Q6W5|A0A290Q6W5_9LACT GTP cyclohydrolase 1; OS = Lactococcus raffinolactis OX=1366 GN=folE PE=3 SV=1
MKKFSQEHQETLKTGTKNLLQAIGDDPNRDGLLETPKRVAKAYAEIFSATGETQFDNYKLFPTDQDSDMVIVADIPFYAMCEHHLLPFFGTVTVGYVPDGEIIGLSKIPRLVDWAARRPSVQENLTALICSEMQRIVHPKGVAVHVQSRHMCMEMRGINRPGTYTTTSLYKGLLKTDAFLRQEFMMKVSGK

SEQ ID NO: 9689 - protein, 191 aa, Lactococcus raffinolactis
  REGION 1..191: note = tr|I7JGE6|I7JGE6_9LACT GTP cyclohydrolase 1; OS = Lactococcus raffinolactis 4877 OX=1215915 GN=folE PE=3; SV = 1
MKKFSQEHQETLETGTKNLLQAIGDNPNRDGLLETPKRVAKAYAEIFSATGETQFDNYKLFPTDQDSDMVIVADIPFYAMCEHHLLPFFGTVTVGYVPDGEIIGLSKIPRLVDWAARRPSVQENLTALICSEMQRIVHPKGVAVHMQSRHMCMEMRGINRPGTYTTTSLYKGLLKTDTFLRQEFMMKVSGK

SEQ ID NO: 9690 - protein, 191 aa, unidentified
  source 1..191: note = Lactococcus reticulitermitis
  REGION 1..191: note = tr|A0A224XE95|A0A224XE95_9LACT GTP cyclohydrolase 1; OS = Lactococcus reticulitermitis OX=2025039 GN=folE PE=3; SV = 1
MKKFSQEYQETLETGTKNLLQAIGDNPNRDGLLETPKRVAKAYAEIFSATGERQFDNYKLFPTDQDSDMVVVADIPFYAMCEHHLLPFFGTVSVGYVPDGEIIGLSKIPRLVDWAARRPSVQENLTALICSEMERIVHPKGVAVHIQSRHMCMEMRGINRPGTFTTTSLYKGQLKTDAFLRQEFMMKVSGK

SEQ ID NO: 9691 - protein, 196 aa, Lactococcus sp.
  REGION 1..196: note = tr|A0A5C8K4V8|A0A5C8K4V8_9LACT GTP cyclohydrolase 1; OS = Lactococcus sp. dk310 OX=2603289 GN=folE PE=3 SV=1
MMKEEKFNHLKTLFEDEDEDEEKIIKATEGIEALLDLIGEDKDREGLQDTPYRFLKAFAEYTQGYKIDPKTYLETQFEAESHDVVVVRDIPFESACEHHLARFHGVAHVAYIPSEKITGLSKFPRMINGYARRLQVQERLTAQVADAIYDVLNPEACAVVIEASHSCMTARGAMAHGSSTKTFAVRGDKNLLDYLK

SEQ ID NO: 9692 - protein, 349 aa, Lactococcus sp.
  REGION 1..349: note = tr|A0A3C1XAZ8|A0A3C1XAZ8_LACSP GTP cyclohydrolase 1; OS = Lactococcus sp. OX=44273 GN=folE PE=3 SV=1
MQTVYLSLGSNIGDKQAYLQEAVNLLGQNSAILIEKKSKVYQTSPVGGVPQDDFVNIALKLSTTLEAETLLEVIHDIEGKLNRVRAVHWGPRTIDIDILFYGTEKFREEHLTIPHKELFNRLFVLIPLMDILEEGFEYETQVKQAISNLEGKGQKIIEIPEEKTARKRIENAVRDILTAVGENPEREGLLETPERVAKMYEEILSSQKLTAFEEYKLFKIEATEQDQTILIKDIPFYSMCEHHMLPFFGTANVAYIPKDGNIIGLSKIPRLINYVSRKLSVQENITRDIAEILNDILQPKGVAVVVEARHMCIEMRGVKKGNSQTRTSFFLGEFEENRETRLEFLESLT

SEQ ID NO: 9693 - protein, 345 aa, unidentified
  source 1..345: note = Lactococcus termiticola
  REGION 1..345: note = tr|A0A2R5HG69|A0A2R5HG69_9LACT GTP cyclohydrolase 1; OS = Lactococcus termiticola OX=2169526 GN=folE PE=3 SV=1
MHSVYLSLGSNMGDRQDYLRRAIASLGENPGILMEQVSRFYETSPVGGVVQDDFINVALKLSTTLGPDELLAFIHEVEAKLGRERLIHWGPRTIDIDILLYDELEMNSDDLTLPHPELFKRLFVLEPLAELLPDDGRIKTAIEQLSKTDQAVQVVEAEAPAEERLEDAVGEILKAVGEDPSREGLLETPSRVAKMYAEILSSQKKAKFDEYKLFKIDVAEQDQEILVKDIPFYSMCEHHMLPFFGVAHVAYLPTDGNIIGLSKIPRLVDYVSRRLSVQENITREIAETMNEILKPKGVAVLVEARHMCIEMRGVKKLNSKTKTTFFLGEYDSNLNQRQEFLEAIK

SEQ ID NO: 9694 - protein, 184 aa, Lactonifactor longoviformis
  REGION 1..184: note = tr|A0A1M4YC22|A0A1M4YC22_9CLOT GTP cyclohydrolase 1; OS = Lactonifactor longoviformis DSM 17459 OX=1122155; GN = folE PE=3 SV=1
MVNQDKVREGVRLILEGIGEDINREGLVETPDRIARMYTELVGGMEEDAGEHLKKRFHVTNNEMVVEKDIVFYSLCEHHMLPFYGKAHIAYIPDHEVVGLSKIARTVEVFARRLQLQEQLTAQIADSFMEHLSPRGVMVMIEAEHLCMTMRGIKKPGSKTVTMVTRGVFEGNTELQNTFYQLVK

SEQ ID NO: 9695 - protein, 323 aa, unidentified
  source 1..323: note = Lacunisphaera limnophila
  REGION 1..323: note = tr|A0A1D8ARJ1|A0A1D8ARJ1_9BACT GTP cyclohydrolase FolE2 OS=Lacunisphaera limnophila OX=1838286 GN=folE2_1; PE = 4 SV=1
MKQMYLHRSDCGQPPLVQRGYDRKFKSSPAYRATLPDMMDVAHEAIQGANVPIQQVGIHNFKLPLKYRTKAGKTLTLETSVTGTVSLEAELKGINMSRIMRTFYEHKNGVTTGEWMGKILKGYLRKVETKDARLKIAFSYPMVRTSLRTGLEGYQFYTVAFEGVMTRDGRYRRFIHFDFVYSSACPCSAELTEHARAKRGAYGVPHSQRSKARITLEEVDGKKIWIEDVHALCLKALQTETQVMVKREDEQAFAELNGAYLKFVEDAARLLYREFDRDKRIADFRIACSHLESLHSHDAVSVICKGVKGGFSADFMDFGMLVC

SEQ ID NO: 9696 - protein, 250 aa, unidentified
  source 1..250: note = Lacunisphaera limnophila
  REGION 1..250: note = tr|A0A1D8AX70|A0A1D8AX70_9BACT GTP cyclohydrolase 1 type 2 OS=Lacunisphaera limnophila OX=1838286; GN = Verru16b_02576 PE=4 SV=1
MASLSQLVEYCDKRTRRPSFKDFPGAHNGLQVANDGRVTRIGAAVDAGLVPFEQAVARGVDFLIVHHGLFWGGVQPLTGGVYGRYSALVRGNCAVYSSHLPLDAHEDLGNNVLMARQLGLKPRRQFLPHENELIGWIAPNRFKRAQLCARLEELYPRVVSIECGSPTPKLVAFCSGSGNGAVPHLVAAGVDTLITGELREEWFNYAQEHKLNLICCGHYATETHGVKALAAELAKKFRLPWEFIETDNPL

SEQ ID NO: 9697 - protein, 308 aa, Lampropedia hyalina
  REGION 1..308: note = tr|A0A1M4TGB8|A0A1M4TGB8_9BURK GTP cyclohydrolase FolE2 OS=Lampropedia hyalina DSM 16112 OX=1122156 GN=folE2; PE = 3 SV=1
MNISLPDVSLTECPAVLAPLDWVGMQGIDVPLWLAEFEAPQQVHAQADIQVDLPQPHTKGIHMSRLYRLLDEAVQQPLTPTLLAQLLADAIHSHADCHSRRARLQLRFALLARRAALLTPGLAGWKSYPVQVRAQWQDGHLSLHTSVEIVYSSTCPCSAALTRQLVEQAFTAHFAGQEQVSRSDAAAWLRQQATLATPHSQRSVARVRVSLPATAATLGLLPLIDTVEAALATPVQTAVKRADEQAFARLNGQNLMFVEDAARRVQQALHEYQDASVQVQHLESLHPHDAVAWAGPDHTQATAPASHL

SEQ ID NO: 9698 - protein, 190 aa, Lapillicoccus jejuensis
  REGION 1..190: note = tr|A0A542DXF2|A0A542DXF2_9MICO GTP cyclohydrolase 1; OS = Lapillicoccus jejuensis OX=402171 GN=folE PE=3 SV=1
MAVDQERAEAAVRELLLAVGEDPDREGLRETPGRVARAYAEIFAGLDMTPSMVLDKTFAINHDELVIVRDIEVYSTCEHHLVPFHGLAHVGYIPAKDGKVTGLSKIGRLVDVFARRPQVQERLTTQVADALVDHLGVRGVIVVVECEHLCMSMRGVHKPGSRTITSAVRGQLRDAATRAEAMSLLRGGRS

SEQ ID NO: 9699 - protein, 244 aa, Larkinella arboricola
  REGION 1..244: note = tr|A0A327X9U0|A0A327X9U0_9BACT GTP cyclohydrolase 1; OS = Larkinella arboricola OX=643671 GN=folE PE=3 SV=1
MKPNGTSLNTRSNGHHLNFDVLNELTVEEIGDDHMASSLETPLREDAFALTDEAKIERIEEHFREIMNILGLDLTDDSLKGTPKRVAKMYVKEIFSGLNPDNKPKAALFENKYQYKEMLVEKNITVQSHCEHHFVPILGRAHVAYISSGKVIGLSKLNRIVQYFAKRPQVQERLTVQIANELKEVLQTEDVAVIIDARHLCVSMRGVQDVNSSTVTAHYGGKFKDDEATRQEFLRHVSEPTAAI
